(19) United States
(12) Patent Application Publication
(10) Pub. No.: US 2019/0224279 A1
(43) Pub. Date: Jul. 25, 2019

(54) PHARMACEUTICAL ASSOCIATION COMPRISING A GROWTH FACTOR RECEPTOR AGONIST CONJUGATED TO A BIOACTIVE CARRIER FOR CONVERTING A NEOPLASTIC CELL INTO A NON-NEOPLASTIC CELL AND USES THEREOF

(71) Applicant: HISTIDE AG, Schindellegi (CH)

(72) Inventors: Omar F. ZOUANI, Einsiedeln (CH); Veronika GOCHEVA, Einsiedeln (CH)

(21) Appl. No.: 15/760,800

(22) PCT Filed: Sep. 15, 2016
(86) PCT No.: PCT/EP2016/071781

§ 371 Date: Mar. 16, 2018

Related U.S. Application Data
(60) Provisional application No. 62/219,710, filed on Sep. 17, 2015.

(51) Int. Cl. A61K 38/18; A61L 27/12; A61P 35/00; A61K 9/16; A61L 27/54; A61K 38/08; A61K 38/12; A61K 38/10; A61L 27/34; A61K 38/05; A61K 38/07; G16B 15/00

(52) U.S. Cl. CPC A61K 38/18; A61L 27/12; A61P 35/00; A61K 9/16; A61L 27/54; G16B 15/00; A61K 38/12; A61K 38/10; A61L 27/34; A61K 38/05; A61K 38/07; A61K 38/08

(57) ABSTRACT

The present disclosure provides a pharmaceutical association for use in the treatment, prevention and/or diagnostic of a neoplastic disease, said association comprising at least one growth factor receptor-binding compound, which activates at least one growth factor receptor of a neoplastic cell, and at least one bioactive carrier forming at least one covalent or non-covalent interaction with said at least one growth factor receptor-binding compound, and wherein said association reduces or suppresses, in the neoplastic cell, the gene expression of at least one cyclin D and/or reduces or suppresses the formation of at least one complex formed between said at least one cyclin D and at least one of cyclin dependent-kinase 4 or 6.

### CROSS-REFERENCE TO RELATED APPLICATIONS

[0001] This application is a U.S. National Stage application of International Application No. PCT/EP2016/071781 filed 15 Sep. 2016, which claims priority to U.S. Provisional Application No. 62/219,710 filed 17 Sep. 2015, the entire disclosures of which are hereby incorporated by reference in their entireties.

### SEQUENCE LISTING

[0002] The instant application contains a Sequence Listing which has been submitted electronically in ASCII format and is hereby incorporated by reference in its entirety. Said ASCII copy, created on 12 Mar. 2019, is named Substitute_Sequence_Listing.txt and is 48,867 kilobytes in size.

### FIELD OF THE INVENTION

[0003] The invention relates to associations, combinations, compositions, kits, methods and processes for the design, preparation, manufacture and/or formulation thereof, and methods and uses thereof for converting or recoding a neoplastic cell into a non-neoplastic cell and treating and/or preventing a neoplastic disease.

### BACKGROUND

[0004] Neoplastic cells, such as cancer cells, are generally characterized by abnormal and/or uncontrolled proliferation leading, in most cases, to the development of a neoplastic disease, such as cancer. Conventional methods for treating neoplastic diseases include surgical treatments, radiotherapy and chemotherapy.

[0005] Surgery is usually practised in order to extract localised (non-circulating) neoplastic cells from a patient's body and is most generally combined with radiotherapy treatments. As well as being limited to the treatment of very early stage, non-metastatic tumors, surgery is an invasive medical procedure which remains traumatic for the treated patient, involves the permanent removal of tissues or organs (which is sometimes not possible as some organs or organ parts are not accessible or cannot be removed due to life threatening consequences), in some cases has been shown to “unblock” dormant tumors, while only offering a “visual” selectivity to distinguish between healthy and tumor cells. Radiotherapy also presents some significant drawbacks for the treated patients including the high cost of the radiation therapy equipment, the high cost of the treatment itself, side effects associated with the damage or destruction of healthy cells, limited effectiveness against metastasized neoplastic diseases, skin rashes caused by external beam radiation, the potential deleterious impact on the functioning of tissues, glands or organs located near the site of treatment, and the possible development of secondary cancers as a result of exposure to the radiations.

[0006] Conventional chemotherapy methods generally involve the administration of small synthetic regulatory molecules which inhibit specific intracellular target proteins thought to be responsible for the neoplastic phenotype of the cell. One example is the inhibition of tyrosine kinase signal transduction by small molecule inhibitors to regulate uncontrolled cell proliferation. Typical chemotherapy methods also include treatments wherein DNA is covalently altered by e.g. DNA strands crosslinking, or treatments wherein the polymerisation and depolymerisation of microtubules is enhanced prevented thus provoking apoptosis of the damaged cell.

[0007] Another method for treating neoplastic diseases includes gene therapy wherein a missing or defective gene is replaced with a functional, healthy copy, which is delivered to the target dysfunctional cells using a “vector.” Gene transfer therapy can be done outside the body (ex vivo) by extracting bone marrow or blood from the patient and growing the cells in a laboratory. The corrected copy of the gene is then introduced and allowed to penetrate the cells' DNA before being injected back into the body. Gene transfers can also be done directly inside the patient's body (in vivo). Gene therapy has been applied to a few specific cases of blood cancers (chronic lymphocytic leukemia (CLL), acute lymphocytic leukemia (ALL) and multiple myeloma) through a particular form thereof in which the genetically modified cells were not the neoplastic cells themselves but instead the immune T-cells. Modified T-cells could then target and destroy specific blood cells (neoplastic as well as healthy). The body of the patient is then able to produce healthy blood cells and eventually provide a treatment to certain blood cancer types. However, gene therapy is generally best suited for the treatment of diseases caused by a single defective gene, not neoplastic diseases, which often involve multiple defective genes. Overall, issues such as the correct integration of therapeutic DNA into the genome; the immune system response to the introduction of foreign DNA into the cell; the toxicity, immune and inflammatory responses; gene control and targeting issues of the vectors (usually viral) required to transport the DNA inside the cell; the difficulties associated with the treatment of multigene-associated neoplastic cells; the possibilities of inducing tumors if the DNA is integrated in the wrong place in the genome; and/or the significant cost usually involved with such a therapy, have greatly undermined the development of gene therapy.

[0008] Other intracellular therapies have been contemplated for the treatment of neoplastic diseases using, for instance, micro-ribonucleic acids (miRNAs) or small interfering ribonucleic acids (siRNA). Under these conditions, the neoplastic cell is generally forced to down-regulate or repress the expression of one or more specific target genes (e.g. oncogenes) thus inhibiting the expression of defective and/or defecting proteins (e.g. oncoproteins). One example is the repression of genes encoding key proteins in the proliferation of cancer cells such as vascular endothelial growth factor (VEGF) and kinesin spindle protein (KSP), thus controlling cancer proliferation.

[0009] Neoplastic diseases may also be treated using immunotherapy such as antibody therapies wherein the antibodies bind to a target antigen typically on the surface of the neoplastic cell. Cell surface receptors are common targets for antibody therapies and include the epidermal growth factor receptor, HER2, CD52, the vascular endothelial growth factor-A and CD30. Once bound to an antigen (e.g. a cancer antigen), antibodies can induce antibody-dependent cell-mediated cytotoxicity, activate the complement system, prevent a receptor interacting with its ligand or deliver a payload of chemotherapy or radiation, which may all lead to the induction of neoplastic cell death. For instance, Cetuximab (Erbitux) is a chimeric IgG1 monoclonal antibody that targets the extracellular domain of the epidermal growth factor receptor (EGFR). Once a ligand binds to the EGFR on the surface of the cell, signalling pathways are activated inside the cell that are associated with malignant characteristics such as cancer cell proliferation and invasion. Cetuximab competitively inhibits ligand binding, thereby preventing EGFR activation and subsequent cellular signalling. It also activates programmed cell death (apoptosis).

[0010] Other intracellular treatments such as messenger ribonucleic acids (mRNAs)-based therapies have also been used in the treatment of neoplastic disease wherein administration of mRNA material into a neoplastic cell causes the neoplastic cell e.g. to express specifically encoded antigens and causing the neoplastic cell to be eliminated by the host immune system.

[0011] Differentiation therapy is another technique which was developed on the concept that the acquisition of the malignant phenotype (such as neoplasia) in a cell is considered as a progressive de-differentiation or a defective differentiation of that cell. Thus, as e.g. tumor cell populations evolve to greater degrees of malignancy, they usually lose more and more differentiation markers. This led to the suggestion that it may be possible to treat cancer by inducing differentiation of cancer cells. However, some scientific reports have shown that the differentiation therapy does not in fact induce cancer cells differentiation but instead restrains their growth thus allowing the application of more conventional therapies (such as chemotherapy) to eradicate the malignant cells. Examples of differentiation therapy involve the forced (re-expression of some specific micro-RNAs and thus rely on an intracellular action generally presenting the same drawbacks as in any other intracellular therapies such the siRNA and gene therapies.

[0012] A shortcoming of the medical therapies relying on previously reported methods of treatment are numerous and mainly resides in the incapacity of providing a sustainable therapeutic effect i.e. the treated cells are not healed but instead are either destroyed (e.g. through induced apoptosis) or their proliferation reduced or temporarily halted using a sustained administration of therapeutic molecules until, in most case scenarios, neoplastic cells are able to adapt themselves and render the therapy ineffective. Interrupting a known therapy will usually lead to resumption of the neoplastic cell state.

[0013] Other drawbacks associated with previously reported therapies are numerous. For example, they may be very invasive and traumatic for the patient; they may necessitate permanently removing neoplastic tissues or organs which may be in some cases not practicable or feasible (organs or organ parts not accessible) or not possible due to life-threatening consequences; they may not be applied to or have limited effectiveness against metastatic neoplastic cells; they may not possess the ability to remove or treat all neoplastic cell types (i.e. neoplastic cells having different invasiveness levels and/or of different lineage origins); they may potentially “unblock” dormant tumors; they are often expensive; they may damage or destroy healthy cells alongside neoplastic cells thereby causing adverse treatment side effects; they may cause skin rashes and skin sensitivity; they may not target cancer stem cells as these are not proliferating; they may have a mutagenic action even towards healthy cells; they may require sustained administration to maintain treatment therapeutic effects; they may display very high cytotoxicity; they may cause multi-drug resistance whereby a drug having an intracellular action is no longer imported inside the cancer cell or is systematically exported outside of the cell.

[0014] None of these previously known methods allows for the effective recoding of a neoplastic cell thus permitting conversion of a neoplastic cell into a non-neoplastic cell.

[0015] The present invention thus provides associations, combinations, compositions, kits, methods and processes for the design, preparation, manufacture and/or formulation thereof, and methods and uses thereof for converting a neoplastic cell into a non-neoplastic cell including converting or recoding the neoplastic cell to induce, provide and/or reintroduce self-recovery or self-healing capabilities thereto.

### BRIEF DESCRIPTION OF THE DRAWINGS

[0016] FIG. 1 is a representation of a fluorescence intensity of non-covalent pharmaceutical associations comprising GFR-binding compounds of the present disclosure and type-I collagen or apatite ceramics bioactive carriers. The images represent surfaces non-covalently coated with GFR-binding compounds of the present disclosure labeled with FITC.

[0017] FIG. 2 is (a) a representation of a fluorescence intensity of pharmaceutical associations comprising various GFR-binding compounds of the present disclosure and type-I collagen immediately after association or 3, 7 and 10 days after association. The images represent surfaces non-covalently coated with GFR-binding compounds of the present disclosure labeled with FITC, (b) a total fluorescence intensity quantification of GFR-binding compounds of the present disclosure labeled with FITC associated with apatite ceramics after incubation in cell culture medium for the given indicated times (up to 10 days).

[0018] FIG. 3 is a representation of a Quantitative Real Time PCR analysis of the expression of DMP-1, Sclerostin and RANK-L in neoplastic cells (osteosarcoma cells) cultured on a native bioactive carrier (control) and on a bioactive carrier covalently associated with various GFR-binding compounds of the present disclosure after 24 hours of culture, (P<0.001).

[0019] FIG. 4 is a representation of Quantitative Real Time PCR analysis of the expression of MLC-1, GATA-4 and α-Sarcomeric actin in neoplastic cells (Rabdomiosarcoma cells) cultured on a native bioactive carrier (control) and on a bioactive carrier covalently associated with various GFR-binding compounds of the present disclosure after 24 hours of culture, (P<0.005).

[0020] FIG. 5 is a representation of Quantitative Real Time PCR analysis of the expression of Sox-9, IBSP and Collagen-IV in neoplastic cells (chondrosarcoma cells) cultured on a native bioactive carrier (control) and on a bioactive carrier covalently associated with various GFR-binding compounds of the present disclosure after 24 hours of culture, (P<0.001).

[0021] FIG. 6 is a representation of Quantitative Real Time PCR analysis of the expression of MMP-9, Vimentin and □□SMA in neoplastic cells (adenocarcinoma cells) cultured on a native bioactive carrier (control) and on a bioactive carrier covalently associated with various GFR-binding compounds of the present disclosure after 24 hours of culture, (P<0.005).

[0022] FIG. 7 is (a) a diagram representing a relative quantification from western blot of the amount of p53 protein present in neoplastic cells (osteosarcoma cells) cultured on a native bioactive carrier (control) and on a bioactive carrier covalently associated with various GFR-binding compounds of the present disclosure after 24 hours of culture, (b) a diagram representing a relative quantification from western blot of the extent of phosphorylation of the pRB protein present in neoplastic cells cultured on a native bioactive carrier (control) and on a bioactive carrier covalently associated with various GFR-binding compounds of the present disclosure after 24 hours of culture.

[0023] FIG. 8 is diagrams representing a relative quantification from western blot of the extent of phosphorylation of the ERK protein (a) and of the Src kinase (b) present in neoplastic cells (osteosarcoma cells) cultured on a native bioactive carrier (control) and on a bioactive carrier covalently associated with various GFR-binding compounds of the present disclosure after 24 hours of culture, (c) a diagram representing a relative quantification from western blot of the amount of PDK1 protein present in neoplastic cells cultured on a native bioactive carrier (control) and on a bioactive carrier covalently associated with various GFR-binding compounds of the present disclosure after 24 hours of culture.

[0024] FIG. 9 is a representation of a Quantitative Real Time PCR analysis of the expression of Paxillin (a) and Vinculin (b) in neoplastic cells (osteosarcoma cells) cultured on a native bioactive carrier (control) and on a bioactive carrier covalently associated with various GFR-binding compounds of the present disclosure after 24 hours of culture, (P<0.001).

[0025] FIG. 10 is a representation of a Quantitative Real Time PCR analysis of the expression of Cyclin D (average gene expression of Cyclin D1, D2 and D3) at different time intervals during 24 hours in neoplastic cells (osteosarcoma cells) cultured on a native bioactive carrier (control) and on a bioactive carrier covalently associated with various GFR-binding compounds of the present disclosure.

[0026] FIG. 11 is a diagram representing the grafting or association density of various radiolabeled GFR-binding compounds of the present disclosure covalently associated with a bioactive carrier using radioactivity quantification.

[0027] FIG. 12 is (a) a representation of a Quantitative Real Time PCR analysis of the expression of DMP-1, SCT and RANK-L in neoplastic cells (osteosarcoma cells) cultured on a native polymer scaffold (control) and on a polymer scaffold grafted with a mixture comprising a GFR-binding compound as defined in the present disclosure and a RGD peptide, after 24 hours of culture, (b) immunofluorescence staining of a representative neoplastic cell (osteosarcoma cells) cultured on a polymer scaffold grafted with a mixture comprising a GFR-binding compound as defined in the present disclosure (ID SEQ NO: 2) and a RGD peptide, after 24 hours of culture. The actin filaments were immunostained by using Alexa 488-phalloidin. The focal adhesions were represented by immunostaining with anti-vinculin. The nucleus was stained with DAPI and is represented by a circle in the center of the cell. Scale bar: 5 μm. (c) is a diagram representing the grafting density of a radiolabeled GFR-binding compound as defined in the present disclosure covalently grafted on a polymer scaffold and of a radiolabeled GFR-binding compound and a non-labeled RGD peptide both grafted on a polymer scaffold. The measurements were performed by using radioactivity quantification (no significant difference was observed). (d) Relative cell spreading function as the presence of different integrin subunits (α and β) couples (anti-α3β1, anti-□αvβ3 and anti-□α5β3 in neoplastic cells cultured on a non-modified polymer scaffold, after 24 h of culture.

[0028] FIG. 13 is (a) Western blot analysis of the expression integrin α3 and β1 before and after transduction with two independent integrin α3 and β1 shRNAs, which efficiently reduced endogenous integrin α3β1 protein levels. (b) Immunofluorescence visualization of a neoplastic cell (osteosarcoma cells) after silencing integrins α3β1 by using shRNAs, after 24 hours of culture on a polymer scaffold covalently grafted with RGD peptides. The silencing of these specific integrin proteins were shown to significantly reduce or suppress neoplastic cell adhesion on the RGD grafted polymers. The actin filaments were immunostained by using Alexa 488-phalloidin. The focal adhesions were represented by immunostaining with anti-vinculin. The nucleus was stained with DAPI and is represented by a circle in the center of the cell. Scale bar: 5 μm. (c) Immunofluorescence visualization of neoplastic cells cultured on a polymer scaffold covalently modified with a mixture comprising a GFR-binding compound as defined in the present disclosure (SEQ ID NO: 2) and a RGD peptide, after 24 hours of culture. Scale bar: 500 μm. A magnification of one region (right, Scale bar: 50 μm) indicates that Spheroid-like structures of neoplastic cells become predominant in this case as a result of the RGD induced integrin engagement. The actin filaments were immunostained by using Alexa 488-phalloidin. The focal adhesions were represented by immunostaining with anti-vinculin. The nucleus was stained with DAPI and is represented by a circle in the center of the cell.

[0029] FIG. 14 is a screen shot of the Standard Protein Blast online software used in the RMSD calculation procedure.

### DETAILED DESCRIPTION

[0030] Neoplastic diseases start when a cell (or neoplastic cell) is somehow altered so that it multiplies out of control. Tumors and cancers are some examples of neoplastic diseases. A tumor is a mass composed of a cluster of such abnormal cells. Most cancers form tumors, but not all tumors are cancerous. Benign, or non-cancerous, tumors—such as freckles and moles—stop growing, do not spread to other parts of the body, and do not create new tumors. Malignant, or cancerous, tumors crowd out healthy cells, interfere with body functions, and draw nutrients from body tissues. Cancers continue to grow and spread by direct extension or through a process called metastasis, whereby the malignant cells travel through the lymphatic or blood vessels, eventually forming new tumors in other parts of the body.

[0031] The term “cancer” generally encompasses more than one hundred diseases affecting nearly every part of the body, and all are potentially life threatening. The major types of cancer are carcinoma, sarcoma, melanoma, lymphoma, and leukemia.

[0032] Carcinoma is a type of cancer that develops from epithelial cells. Specifically, a carcinoma is a cancer that begins in a tissue that lines the inner or outer surfaces of the body, and that generally arises from cells originating in the endodermal or ectodermal germ layer during embryogenesis.

[0033] Sarcoma is a cancer that arises from transformed cells of mesenchymal origin. Thus, malignant tumors made of cancerous bone, cartilage, fat, muscle, vascular or hematopoietic tissues are, by definition, considered sarcomas. This is in contrast to a malignant tumor originating from epithelial cells, which are termed carcinoma. Human sarcomas are quite rare. Common malignancies, such as breast, colon, and lung cancer, are almost always carcinoma.

[0034] Melanoma is a type of skin cancer, which forms from melanocytes (pigment-containing cells in the skin).

[0035] Lymphoma is a group of blood cell tumors that develop from lymphocytes. It is sometimes used to refer to just the cancerous ones rather than all tumors. There are two main types: Hodgkin lymphoma (HL) and non-Hodgkin lymphoma (NHL), with two others, multiple myeloma and immunoproliferative diseases, also included by the World Health Organization within the category. Non-Hodgkin lymphoma makes up about 90% of cases and includes a large number of sub-types. Lymphomas are part of the broader group of neoplasms called tumors of the hematopoietic and lymphoid tissues.

[0036] Leukemia is a group of cancers that usually begins in the bone marrow and results in high numbers of abnormal white blood cells. These white blood cells are not fully developed and are called blasts or leukemia cells. Symptoms may include bleeding and bruising problems, feeling very tired, and an increased risk of infections. These symptoms occur due to a lack of normal blood cells. Diagnosis is typically by blood tests or bone marrow biopsy.

[0037] Cancers include, but are not limited to, Adrenal Cancer, Anal Cancer, Bile Duct Cancer, Bladder Cancer, Bone Cancer, Brain/CNS Tumors In Adults, Brain/CNS Tumors In Children, Breast Cancer, Breast Cancer In Men, Cancer in Adolescents, Cancer in Children, Cancer in Young Adults, Cancer of Unknown Primary, Castleman Disease, Cervical Cancer, Colon/Rectum Cancer, Endometrial Cancer, Esophagus Cancer, Ewing Family Of Tumors, Eye Cancer, Gallbladder Cancer, Gastrointestinal Carcinoid Tumors, Gastrointestinal Stromal Tumor (GIST), Gestational Trophoblastic Disease, Hodgkin Disease, Kaposi Sarcoma, Kidney Cancer, Laryngeal and Hypopharyngeal Cancer, Leukemia, Leukemia—Acute Lymphocytic (ALL) in Adults, Leukemia—Acute Myeloid (AML), Leukemia—Chronic Lymphocytic (CLL), Leukemia—Chronic Myeloid (CML), Leukemia—Chronic Myelomonocytic (CMML), Leukemia in Children, Liver Cancer, Lung Cancer, Lung Cancer—Non-Small Cell, Lung Cancer—Small Cell, Lung, Carcinoid Tumor, Lymphoma, Lymphoma of the Skin, Malignant Mesothelioma, Multiple Myeloma, Myelodysplastic Syndrome, Nasal Cavity and Paranasal Sinus Cancer, Nasopharyngeal Cancer, Neuroblastoma, Non-Hodgkin Lymphoma, Non-Hodgkin Lymphoma In Children, Oral Cavity and Oropharyngeal Cancer, Osteosarcoma, Ovarian Cancer, Pancreatic Cancer, Penile Cancer, Pituitary Tumors, Prostate Cancer, Retinoblastoma, Rhabdomyosarcoma, Salivary Gland Cancer, Sarcoma—Adult Soft Tissue Cancer, Skin Cancer, Skin Cancer—Basal and Squamous Cell, Skin Cancer—Melanoma, Skin Cancer—Merkel Cell, Small Intestine Cancer, Stomach Cancer, Testicular Cancer, Thymus Cancer, Thyroid Cancer, Uterine Sarcoma, Vaginal Cancer, Vulvar Cancer, Waldenstrom Macroglobulinemia, Wilms Tumor.

[0038] The activation of growth factor receptors (GFR) is commonly known to promote neoplastic cell proliferation. For instance, many cancer treatments rely on the inhibition of growth factors, growth factors receptors and/or downstream signalling proteins such as protein kinases. Such inhibitors include, non-exhaustively, anti-Met (e.g. ARQ-197), anti-VEGF (e.g. Bevacizumab), anti-VEGFR (e.g. Sunitinib or Semaxinib), anti-Her2 (e.g. Trastuzumab), anti-EGFR (e.g. Cetuximab, Gefitinib or Erlotinib), anti-PDGFR (e.g. Imatinib), anti-IGF-1 (e.g. IMC-A12), anti-Ras (e.g. Tipifarnib), anti-Raf (e.g. Sorafenib), anti-src (e.g. Dastinib or Saracatinib), anti-Mek (e.g. C1040 or PD-0325901), anti-PI3K (e.g. LY294002), anti-PDK (e.g. UNC01), anti-HSP90 (e.g. 17-AGG or IPI-504), anti-CDK (e.g. Flavopiridol) and anti-mTOR (e.g. Everolimus).

[0039] Unlike previously reported treatments, it has been surprisingly demonstrated that the pharmaceutical associations, combinations and compositions disclosed herein can be used to treat, prevent and/or diagnose neoplasms (e.g. tumors or cancers) by activating growth factor receptors of vertebrate cells (such as mammalian cells, especially human cells).

[0040] The present invention also aims at providing mechanisms for solving and/or avoiding at least one of, preferably a plurality of, the problems, issues and/or shortcomings associated with previously reported neoplasm treatment therapies.

[0041] The present disclosure thus provides embodiments for:
[0042] Converting or recoding a neoplastic cell to induce and/or promote and/or improve self-healing and/or self-recovery thereof, particularly within a shorter period of time
[0043] Converting or recoding a neoplastic cell to induce and/or promote and/or improve self-healing and/or self-recovery thereof, particularly with a higher conversion yield;
[0044] Restoring a neoplastic cell's ability to undergo conversion into a physiologically functional and/or healthy cell, particularly within a shorter period of time;
[0045] Restoring a neoplastic cell's ability to undergo differentiation, particularly within a shorter period of time;
[0046] Converting and/or recoding a circulating or non-circulating neoplastic cell such as a cancer cell, into a non-neoplastic cell, particularly within a shorter period of time;
[0047] Protecting a subject from a neoplastic disease, disorder, condition, or pathology such as cancer, or any symptoms thereof, particularly within a shorter period of time;
[0048] Providing and/or producing a physiologically functional and/or healthy cell including an osteocyte and/or a chondrocyte and/or an adipocyte and/or a myocyte and/or a keratinocyte and/or a fibrocyte and/or a podocyte and/or a neurocyte and/or a mature endothelial cell and/or a osteoblast and/or a chondroblast and/or a neuroblast and/or a Sertoli cell and/or a Leydig cell and/or a germ cell and/or an endothelial cell and/or an angioblast and/or a fibroblast from a neoplastic cell, particularly within a shorter period of time;
[0049] Re-establishing, restoring and/or reactivating a cell adhesion checkpoint of a neoplastic cell;
[0050] Inducing and/or promoting and/or enhancing neoplastic cell differentiation, particularly within a shorter period of time;
[0051] Inducing and/or promoting and/or enhancing a decrease in Cyclin D gene and protein expression;
[0052] Inducing and/or promoting and/or enhancing a G1 to G0 cell cycle phase transition;
[0053] Inducing and/or promoting and/or enhancing the inactivation of a protein complex between a Cyclin D and at least one of Cyclin-dependent kinase (CDK) 4 or 6;
[0054] Preventing or reducing the phosphorylation of the retinoblastoma (Rb) protein thus activating its tumour suppressor functions;
[0055] Increasing the phosphorylation of the p53 protein thus reducing its degradation and activating its tumor suppressor functions;
[0056] Preventing or reducing the activation of the Ras/MAP kinase signalling cascade;
[0057] Identifying and/or analysing the features and/or markers of a neoplastic cell;
[0058] Regulating and/or activating growth factor receptors of a neoplastic cell;
[0059] Modulating and/or regulating the adhesion between a cell (in particular a neoplastic cell) and its micro-environment i.e. the surrounding extracellular matrix;
[0060] Treating, recoding or converting a neoplastic cell without temporarily or permanently damaging or killing said neoplastic cell and/or without permanently inducing a quiescent state thereof;
[0061] Dampening and/or reducing or suppressing cell division and/or cell proliferation of a neoplastic cell;
[0062] Activating and/or promoting and/or regulating anti-mitogen activity and/or tumor suppressor pathways in a neoplastic cell;
[0063] Inhibiting and/or reducing anti-oncogenic activity in a neoplastic cell;
[0064] Converting or recoding a neoplastic cell to induce and/or promote and/or improve self-healing and/or self-recovery thereof, and/or protecting a subject from a neoplastic disease, disorder, condition or pathology such as cancer using extracellular means;
[0065] Converting or recoding a neoplastic cell to induce and/or promote and/or improve self-healing and/or self-recovery thereof, protecting a subject from a neoplastic disease, disorder, condition or pathology such as cancer without modifying the genome of said cell;
[0066] Providing diagnostic tools for diagnosing neoplastic diseases in a subject.

### I. Definitions

[0067] Those skilled in the art will recognize, or be able to ascertain using no more than routine experimentation, many equivalents to the specific embodiments in accordance with the invention described herein. The scope of the present invention is not intended to be limited to the present description, but rather is as set forth in the appended claims.

[0068] In the claims, articles such as “a”, “an”, and “the” may mean one or more than one unless indicated to the contrary or otherwise evident from the context. Claims or descriptions that include “or” between one or more members of a group are considered satisfied if one, more than one, or all of the group members are present in, employed in, or otherwise relevant to a given product or process unless indicated to the contrary or otherwise evident from the context. The invention includes embodiments in which exactly one member of the group is present in, employed in, or otherwise relevant to a given product or process. The invention includes embodiments in which more than one, or all of the group members are present in, employed in, or otherwise relevant to a given product or process.

[0069] It is also noted that the term “comprising” is intended to be open and permits but does not require the inclusion of additional elements or steps. When the term “comprising” is used herein, the terms “consisting of”, “consisting essentially of”, “consisting substantially of” and “consisting exclusively of” are thus also encompassed and disclosed.

[0070] As used herein, the term “approximately” or “about,” as applied to one or more values of interest, refers to a value that is similar to a stated reference value. In certain embodiments, the term “approximately” or “about” refers to a range of values that fall within 25%, 20%, 19%, 18%, 17%, 16%, 15%, 14%, 13%, 12%, 11%, 10%, 9%, 8%, 7%, 6%, 5%, 4%, 3%, 2%, 1%, or less in either direction (greater than or less than) of the stated reference value unless otherwise indicated, self-evident or contradictory in context (e.g. except where such number would exceed 100% of a possible value).

[0071] As used herein and unless otherwise indicated or contradictory in context, the term “with” followed by a specific number of amino acids, when used to define a particular peptide, variant or analog thereof, such as in “a peptide with three amino acids”, means that such peptide, variant or analog thereof, contains exclusively the specific number of amino acids specified after this term.

[0072] As used herein and unless otherwise indicated or contradictory in context, the term “Ci-alkyl” is intended to specifically and individually disclose any branched or unbranched radical, moiety or functional group having “i” carbon atom(s).

[0073] The carbon atom content of the various hydrocarbon-containing moieties herein may be indicated by a prefix designating the minimum and maximum number of carbon atoms in the moiety. For example, in certain embodiments, (Ca-Cb)alkyl indicates an alkyl moiety of the integer “a” to the integer “b” carbon atoms, inclusive.

[0074] At various places in the present specification, substituents of compounds of the present disclosure may be disclosed in groups or in ranges. It is specifically intended that the present disclosure include each and every individual sub-combination of the members of such groups and ranges. For example, in certain embodiments, the term “C1-C5 alkyl” is an abbreviation for (and thus is specifically intended to individually disclose) C1-alkyl (i.e. methyl), C2-alkyl (i.e. ethyl), C3-alkyl (i.e. 1-propyl and 2-propyl), C4-alkyl (i.e. 1-butyl, sec-butyl, iso-butyl and tert-butyl), and C5-alkyl (i.e. 1-pentyl, 2-pentyl, 3-pentyl, 2-methyl-1-butyl, 3-methyl-1-butyl, 2-methyl-2-butyl, 3-methyl-2-butyl, 2,2-dimethyl-1-propyl and 1,1-dimethyl-1-propyl).

[0075] As used herein, unless indicated otherwise or contradictory in context, the terms “alkyl” and “(Ca-Cb)alkyl” refer to monovalent hydrocarbon radicals containing the requisite number of carbon atoms as described above, having straight or branched moieties or combinations thereof. As used herein, alkyl groups may be optionally substituted with between one to four substitutes. Non-limiting examples of alkyl groups include, e.g. methyl, ethyl, n-propyl, isopropyl, n-butyl, isobutyl, sec-butyl, t-butyl, etc. Of course, other alkyl groups will be readily apparent to those of skilled in the art given the benefit of the present disclosure.

[0076] Where ranges are given, endpoints are included. Furthermore, it is to be understood that unless otherwise indicated or otherwise evident from the context and understanding of one of ordinary skill in the art, values that are expressed as ranges can assume any specific value or sub-range within the stated ranges in different embodiments of the invention, to the tenth of the unit of the lower limit of the range, unless the context clearly dictates otherwise. For example, in certain embodiments, a disclosed 0-10 range would, for example, in certain embodiments, also specifically and individually disclose the following values and ranges: 0, 1, 2, 3, 4, 5, 6, 7, 8, 9, 10, 0.1, 0.2, 0.3, 0.4, 0.5, 0.6, 0.7, 0.8, 0.9, 1, 1.1, 1.2, 1.3, 1.4, 1.5, 1.6, 1.7, 1.8, 1.9, 2, 2.1, 2.2, 2.3, 2.4, 2.5, 2.6, 2.7, 2.8, 2.9, 3, 3.1, 3.2, 3.3, 3.4, 3.5, 3.6, 3.7, 3.8, 3.9, 4, 4.1, 4.2, 4.3, 4.4, 4.5, 4.6, 4.7, 4.8, 4.9, 5, 5.1, 5.2, 5.3, 5.4, 5.5, 5.6, 5.7, 5.8, 5.9, 6, 6.1, 6.2, 6.3, 6.4, 6.5, 6.6, 6.7, 6.8, 6.9, 7, 7.1, 7.2, 7.3, 7.4, 7.5, 7.6, 7.7, 7.8, 7.9, 8, 8.1, 8.2, 8.3, 8.4, 8.5, 8.6, 8.7, 8.8, 8.9, 9, 9.1, 9.2, 9.3, 9.4, 9.5, 9.6, 9.7, 9.8, 9.9, 10, 0-1, 0-2, 0-3, 0-4, 0-5, 0-6, 0-7, 0-8, 0-9, 1-2, 1-3, 1-4, 1-5, 1-6, 1-7, 1-8, 1-9, 2-3, 2-4, 2-5, 2-6, 2-7, 2-8, 2-9, 2-10, 3-4, 3-5, 3-6, 3-7, 3-8, 3-9, 3-10, 4-5, 4-6, 4-7, 4-8, 4-9, 4-10, 5-6, 5-7, 5-8, 5-9, 5-10, 6-7, 6-8, 6-9, 6-10, 7-8, 7-9, 7-10, 8-9, 8-10, 9-10, 0-0.1, 0-0.2, 0-0.3, 0-0.4, 0-0.5, 0-0.6, 0-0.7, 0-0.8, 0-0.9, 0-1.1, 0-1.2, etc.

[0077] As used herein and unless otherwise indicated or contradictory in context, the term “substantially” refers to the qualitative condition of exhibiting total or near-total extent or degree of a characteristic or property of interest. One of ordinary skill in the biological arts will understand that biological and chemical phenomena rarely, if ever, go to completion and/or proceed to completeness or achieve or avoid an absolute result. The term “substantially” is therefore used herein to capture the potential lack of completeness inherent in many biological and chemical phenomena.

[0078] In addition, it is to be understood that any particular embodiment of the present invention that falls within the prior art may be explicitly excluded from any one or more of the claims using the appropriate disclaimer(s) or proviso(s). Since such embodiments are deemed to be known to one of ordinary skill in the art, they may be excluded even if the exclusion is not set forth explicitly herein. Any particular embodiment of the compositions of the invention (e.g., any peptide or peptidomimetic; any method of production; any method of use; etc.) can be excluded from any one or more claims, for any reason, whether or not related to the existence of prior art.

[0079] All cited sources, for example, in certain embodiments, references, publications, databases, database entries, and art cited herein, are incorporated into this application by reference in their entirety, even if not expressly stated in the citation. In case of conflicting statements of a cited source and the instant application, the statement in the instant application shall control.

[0080] As the case may be, and unless otherwise indicated or contradictory in context, macromolecules molecular weights should be understood in the present description as being number averaged molecular weights.

[0081] The peptides mentioned in the present description may not follow the usual representation conventions. For instance, the N-terminal amino acid of a peptide sequence may be the first amino acid in the sequence or the last amino acid. Likewise, the C-terminal amino acid of a peptide sequence may be the first amino acid in the sequence or the last amino acid. For example, in the peptide sequence NAIS, “N” may be N-terminal or C-terminal, and “S” may be N-terminal or C-terminal. Consequently, for the purpose of the present disclosure, e.g. NAIS also covers SIAN, SAIS also covers SIAS, SPIN also covers NIPS, etc.

[0082] In the present application, when reference is made to a certain peptide (e.g. a GFR-binding compound as provided herein) comprising one or more other peptide(s), said one or more other peptide(s) is(are) understood to be stably (in most cases, covalently) attached/bound to at least one part of said peptide. The attachment/binding may be located anywhere on the peptide unless indicated otherwise, contradictory in context or contradictory to general scientific rules. No specific attachment/binding location of said one or more other peptide(s) to said peptide shall be assumed unless specifically mentioned.

[0083] Peptide or polypeptide: As used herein, the term “peptide” or “polypeptide” are used interchangeably and refers to a polymer of less than or equal to 100 amino acids long, e.g., about 2, 3, 4, 5, 10, 15, 20, 25, 30, 35, 40, 45, 50, 55, 60, 65, 70, 75, 80, 85, 90, 95 or 100 amino acids long. The terms apply to amino acid polymers in which one or more amino acid residue is an artificial chemical mimetic of a corresponding naturally occurring amino acid, as well as to naturally occurring amino acid polymers, non-naturally occurring amino acid polymers, peptide analogs, peptide variants and peptide mimetics. Conventional techniques for synthesising peptides involve the activation of the carboxylic acid function of an amino acid or of a peptide, using a coupling agent. This activated acid is then contacted with an amino acid or a peptide in which the N-terminal amino acid is not protected, thus forming an amide bond also called peptide bond. Coupling reaction conditions together with coupling agents are well known in the art and described, for instance, in Greene, “Protective Groups in Organic Synthesis”, Wiley, New York, 2007 4th edition. In addition, suitable peptide synthesis routes are described, for instance, in Hojo H., Recent progress in the chemical synthesis of proteins, Curr Opin Struct Biol. 2014; 26C:16-23 and Saranya Chandrudu, et al., Chemical Methods for Peptide and Protein Production, Molecules, 2013, 18, 4373-4388, each of which is incorporated herein by reference in its entirety. There are two main strategies for peptide synthesis i.e. liquid-phase peptide synthesis and solid-phase peptide synthesis (SPPS) which is now most commonly used for peptide synthesis. Instead of C-terminal protection with a chemical group, the C-terminus of the first amino acid is coupled to an activated solid support, such as polystyrene or polyacrylamide. This type of approach has a two-fold function: the resin acts as the C-terminal protecting group and provides a rapid method to separate the growing peptide product from the different reaction mixtures during synthesis. As with many different biological manufacturing processes, peptide synthesizers have been developed for automation and high-throughput peptide production. SPPS allows the synthesis of natural peptides which are difficult to express in bacteria, the incorporation of unnatural amino acids, peptide/protein backbone modification, and the synthesis of D-proteins, which consist of D-amino acids. Very long peptide can be accessed by using native chemical ligation to couple two peptides together with quantitative yields.

[0084] Peptide analogs: As used herein, unless indicated otherwise or contradictory in context, the term “peptide analogs” refers to polypeptide variants which differ by one or more amino acid alterations, e.g., substitutions, additions or deletions of amino acid residues that still maintain one or more of the properties of the parent or starting peptide.

[0085] Peptide variants: As used herein, unless indicated otherwise or contradictory in context, the term “peptide variants” refers to a peptide which has a certain identity with a native or reference compound sequence. In one example, the peptide variant refers to any post-administration, application, injection modified peptide. Such post-administration, application, injection modifications include, but are not limited to, phosphorylation, acetylation, glutamylation, tyrosination, palmitoylation, glycosylation, myristoylation, palmitoylation, isoprenylation, glypiation, lipoylation, phosphopantetheinylation, acylation, alkylation, amidation, arginylation, polyglutamylation, polyglycylation, butyrylation, gamma-carboxylation, glycosylation, polysialylation, malonylation, hydroxylation, iodination, nucleotide addition, oxidation, adenylylation, propionylation, pyroglutamate formation, S-glutathionylation, S-nitrosylation, succinylation, sulfation, glycation, biotinylation, pegylation, ISGylation, SUMOylation, ubiquitination, Neddylation, Pupylation, citrullination, deamidation, eliminylation, carbamylation, and racemization.

[0086] Peptido-mimetic: As used herein, unless indicated otherwise or contradictory in context, the term “peptido-mimetic” or “peptidomimetic” refers to a synthetic chemical compound which comprises amino acids but not only and that is able to mimic the biological action of a peptide, often because the mimetic has a basic structure that mimics the basic structure of the peptide and/or has the salient biological properties of that peptide. In one particular example, a peptidomimetic is a hybrid molecule containing both, at least one peptide, and at least one of a polysaccharide, a polynucleotide or a linear or branched, saturated or unsaturated, hydrocarbon chain.

[0087] Linear peptide: As used herein, unless indicated otherwise or contradictory in context, the term “linear peptide” means a peptide in which the C-terminal and the N-terminal amino acid residues do not covalently interact with each other and none of the C-terminal or the N-terminal amino acid residues covalently interacts with another amino acid residue of the peptide chain.

[0088] Cyclic peptide: As used herein, unless indicated otherwise or contradictory in context, the term “cyclic peptide” means peptide in which the C-terminal and N-terminal amino acid residues do covalently interact with each other or the C-terminal and/or the N-terminal amino acid residues covalently interact with at least one other amino acid residue of the peptide chain so as to form a ring-like structure.

[0089] Amino acid: As used herein, unless indicated otherwise or contradictory in context, the term “amino acid” refers to naturally occurring and non-naturally occurring amino acids including amino acid analogs. Naturally occurring amino acids are those encoded by the genetic code, as well as those amino acids that are later modified, e.g., hydroxyproline, [gamma]-carboxyglutamate, and O-phosphoserine. Naturally encoded amino acids are the 20 common amino acids glycine (Gly, G), alanine (Ala, A), valine (Val, V), leucine (Leu, L), isoleucine (Ile, I), serine (Ser, S), threonine (Thr, T), phenylalanine (Phe, F), tyrosine (Tyr, Y), tryptophane (Trp, W), cysteine (Cys, C), methionine (Met, M), proline (Pro, P), aspartic acid (Asp, D), asparagine (Asn, N), glutamine (Gln, Q), glutamic acid (Glu, E), histidine (His, H), arginine (Arg, R) et lysine (Lys, K) and pyrrolysine and selenocysteine. Non-naturally occurring amino acids include, but are not limited to, the dextrogyre (D) isomers of the above-cited naturally-occurring amino acids. Amino acid analogs refers to compounds that have the same basic chemical structure as a naturally occurring amino acid i.e., an [alpha] carbon that is bound to a hydrogen, a carboxyl group, an amino group, and an R group (i.e. side chain), and which may be used in replacement thereof without substantially affecting the overall function of the peptide to which it belongs. Amino acid analogs (or non-naturally occurring amino acids) that may be suitable for implementing embodiments of the present invention include, but are not limited to, amino acids comprising a photoactivatable cross-linker, spin-labeled amino acids, fluorescent amino acids, metal binding amino acids, metal-containing amino acids, radioactive amino acids, amino acids with novel functional groups, amino acids that covalently or noncovalently interact with other molecules, photocaged and/or photoisomerizable amino acids, amino acids comprising biotin or a biotin analogue, glycosylated amino acids such as a sugar substituted serine, other carbohydrate modified amino acids, keto-containing amino acids, amino acids comprising polyethylene glycol or polyether, heavy atom substituted amino acids, chemically cleavable and/or photocleavable amino acids, amino acids with an elongated side chains as compared to natural amino acids, including but not limited to, polyethers or long chain hydrocarbons, including but not limited to, greater than about 5 or greater than about 10 carbons, carbon-linked sugar-containing amino acids, redox-active amino acids, amino thioacid containing amino acids, and amino acids comprising one or more toxic moiety. The term “AA^{I}” (AA roman numeral one) may be used in the description and refers to an amino acid which may be any amino acid as defined above in particular any naturally occurring and non-naturally occurring amino acids.

[0090] Amino acid side chain: As used herein, unless indicated otherwise or contradictory in context, the term “amino acid side chain” means the functional group of an amino acid that differentiates it from other amino acids. All amino acid structures have a carboxyl group, an amine group and a specific side chain.

[0091] AA^{II} (AA roman numeral two): As used herein, unless indicated otherwise or contradictory in context, the terms “polar amino acid” or “AA” means amino acids having a polar, non-charged group-containing side chain. Polar amino acids are protonated at physiological pH (about 7). Examples of polar amino acids include, but are not limited to, Cys (C), Asn (N), Gln (Q), Ser (S), Thr (T), or Tyr (Y).

[0092] AA^{III} (AA roman numeral three): As used herein, unless indicated otherwise or contradictory in context, the terms “acidic amino acid” or “AA^{III}” means amino acids having an acidic group-containing side chain. Acidic amino acid deprotonated forms predominate at physiological pH (about 7). Examples of acidic amino acids include, but are not limited to, Asn (N) and Glu (E).

[0093] AA^{IV} (AA roman numeral four): As used herein, unless indicated otherwise or contradictory in context, the terms “aliphatic amino acid” or “AA^{IV}” means amino acids having an aliphatic side chain. Examples of aliphatic amino acids include, but are not limited to, Ala (A), Leu (L), Ile (I), Gly (G), Val (V) and any analogs and derivatives thereof.

[0094] AA^{V} (AA roman numeral five): As used herein, unless indicated otherwise or contradictory in context, the terms “apolar amino acid” or “AA^{V}” means amino acids having an apolar side chain. Examples of apolar amino acids include, but are not limited to, Ala (A), Phe (F), Gly (G), Ile (I), Leu (L), Met (M), Pro (P), Val (V) or Trp (W).

[0095] AA^{VI} (AA roman numeral six): As used herein, unless indicated otherwise or contradictory in context, the term “aromatic amino acid” or “AA^{VI}” means amino acids having an aromatic group-containing side chain. Examples of aromatic amino acids include, but are not limited to, Trp (W), Tyr (Y) or Phe (F).

[0096] AA^{VII}(AA roman numeral seven): As used herein, unless indicated otherwise or contradictory in context, the term “basic amino acid” or “AA^{VII}” means amino acids having a basic group-containing side chain. Basic amino acid protonated forms predominate at physiological pH (about 7). Examples of basic amino acids include, but are not limited to, Arg (R), His (H), or Lys (K).

[0097] AA^{VIII} (AA roman numeral eight): As used herein, unless indicated otherwise or contradictory in context, the term “AA^{VIII}” means Leu (L) or Ile (I) and any analogs and derivatives thereof.

[0098] AA^{IX} (AA roman numeral nine): As used herein, unless indicated otherwise or contradictory in context, the term “charged amino acid” or “AA^{IX}” means amino acids having either an acidic group-containing side chain or an basic group-containing side chain. Charged amino acid charged forms predominate at physiological pH (about 7). Examples of charged amino acids include, but are not limited to, Asn (N), Glu (E), His (H), Lys (K) or Arg (R).

[0099] AAⁿ: As used herein, unless indicated otherwise or contradictory in context, the term “AAⁿ”, in which n is a positive integer arbitrarily chosen to identify a specific position within the primary sequence of a peptide. For instance, AA¹³ means the amino acid of position 13. The terms “amino acid” and “AA” are interchangeably used in the present description.

[0100] N-terminal: As used herein, unless indicated otherwise or contradictory in context, the term “N-terminal” means the amine (—NH₂) function/group/moiety located at one (terminal) end of a protein or polypeptide. This functional group is the only amine group which is not engage in n amide peptide bond.

[0101] C-terminal: As used herein, unless indicated otherwise or contradictory in context, the term “C-terminal” means the carboxylate (—CO₂H) function/group/moiety located at one (terminal) end of a protein or polypeptide. This functional group is the only carboxylic acid group which is not engage in n amide peptide bond.

[0102] Naturally-occurring peptide: As used herein, unless indicated otherwise or contradictory in context, the terms “naturally-occurring peptide” or “natural peptide” means a peptide which may be found in nature without human direct intervention (except for its extraction and/or isolation).

[0103] Synthetic peptide: As used herein, unless indicated otherwise or contradictory in context, the terms “synthetic peptide” or “non-natural peptide” means a peptide which may not be found in nature without human direct intervention (except for its extraction and/or isolation). For example, in certain embodiments, a synthetic peptide may have the amino acid sequence of a natural peptide except for at least one amino acid deletion or substitution relative to the natural sequence. In the case of a substitution, an amino acid from the natural sequence is replaced by another, different, naturally-occurring or non-naturally occurring amino acid. For example, in certain embodiments, a synthetic peptide may not possess a post-translational modification of the natural peptide such as the attachment of an acetate group, a phosphate group, a lipid, a carbohydrate, or the formation of a disulfide bridge.

[0104] Covalent interaction: As used herein, unless indicated otherwise or contradictory in context, the term “interact covalently”, “covalent interaction” or “covalent bond” are interchangeably used and means a chemical bond or interaction that involves the sharing of electron pairs between atoms. Examples of such interactions are σ-bonding and π-bonding.

[0105] Non-covalent interaction: As used herein, unless indicated otherwise or contradictory in context, the term “interact non-covalently”, “non-covalent interaction” or “non-covalent bond” are interchangeably used and means a chemical bond or interaction that does not involve the sharing of electron pairs between atoms but rather involves more dispersed variations of electromagnetic interactions between molecules or within a molecule. Non-covalent interactions can be generally classified into four categories, electrostatic interactions, π-interactions, van der Waals forces, and hydrophobic interactions.

[0106] Electrophile: As used herein, unless indicated otherwise or contradictory in context, the term “electrophile” means an organic molecule attracted to electrons that participates in a chemical reaction by accepting an electron pair in order to bond to a nucleophile. Most electrophiles are positively charged, have an atom that carries a partial positive charge, or have an atom that does not have an octet of electrons.

[0107] Nucleophile: As used herein, unless indicated otherwise or contradictory in context, the term “nucleophile” means an organic molecule that donates an electron pair to an electrophile to form a chemical bond in relation to a reaction. All molecules or ions with a free pair of electrons or at least one pi bond can act as nucleophiles.

[0108] Polysaccharide: As used herein, unless indicated otherwise or contradictory in context, the term “polysaccharide” means polymeric carbohydrate molecules composed of long chains of monosaccharide units bound together by glycosidic linkages and which upon hydrolysis provide monosaccharides or oligosaccharides. They range in structure from linear to highly branched polymers.

[0109] Polynucleotide: As used herein, the term “polynucleotide” or “nucleic acid”, which are used interchangeably, refers to the phosphate ester polymeric form of ribonucleosides (“RNA molecules”) or deoxyribonucleosides (“DNA molecules”), or any phosphoester analogs thereof, such as phosphorothioates and thioesters, in either single stranded form, or a double-stranded helix. The term “nucleic acid” includes double-stranded DNA round, inter alia, in linear (e.g., restriction fragments) or circular DNA molecules. In particular, nucleic acids as used herein refer to nucleic acids such as RNAs encoding for agonist of growth factor receptors as defined herein.

[0110] Nucleoside: As used herein, the term “nucleoside” refers to a compound containing a sugar molecule (e.g., a pentose or ribose) or derivative thereof in combination with an organic base (e.g., a purine or pyrimidine) or a derivative thereof (also referred to herein as “nucleobase”).

[0111] Nucleotide: As used herein, the term “nucleotide” refers to a nucleoside including a phosphate group.

[0112] Dendrimer: As used herein, unless indicated otherwise or contradictory in context, the term “dendrimer” means any repetitively branched molecules. Examples of dendrimers are phosphorous dendrimers, polylysine dendrimers, polypropylenimine dendrimers and PAMAM dendrimers, such as the ones described, for instance, in Scientific World Journal. 2013; 2013:732340; Curr Opin Chem Biol. 1998; 2(6):733-42; J Pept Sci. 1999; 5(5):203-20; and J Pept Sci. 2008; 14(1):2-43, which may be used for implementing embodiments of the present invention, each of which being herein incorporated by reference in its entirety.

[0113] Synthetic molecule: As used herein, unless indicated otherwise or contradictory in context, the term “synthetic molecule” means a molecule which may not be found in nature without human direct intervention (except for its extraction and/or isolation).

[0114] Synthetic polymers: As used herein, unless indicated otherwise or contradictory in context, the term “synthetic polymer” refers to a macromolecule or polymer which may not be found in nature without human direct intervention (except for its extraction and/or isolation).

[0115] Biocompatible: As used herein, unless indicated otherwise or contradictory in context, the term “biocompatible” means compatible with living cells, tissues, organs or systems posing little to no risk of injury, toxicity or rejection by the immune system.

[0116] Biologically active: As used herein, unless indicated otherwise or contradictory in context, the term “biologically active” refers to a characteristic of any substance that has activity in a biological system and/or organism. For instance, a substance that, when administered to an organism, has a biological effect on that organism, is considered to be biologically active. In particular examples, a compound, substance or pharmaceutical composition of the present disclosure may be considered biologically active even if a portion of the compound, substance or pharmaceutical composition is biologically active or mimics an activity considered biologically relevant.

[0117] Stem cells: As used herein, unless indicated otherwise or contradictory in context, the term “stem cell” refers to the term as it is generally understood in the art. For example, in certain embodiments, stem cells, regardless of their source, are cells that are capable of dividing and renewing themselves for long periods, are at least to a degree unspecialized (undifferentiated), and can give rise to (differentiate into) specialized cell types (i.e., they are progenitor or precursor cells for a variety of different, specialized cell types).

[0118] Mesenchymal stem cells: As used herein, unless indicated otherwise or contradictory in context, the term “mesenchymal stem cells” generally means multipotent adult stromal cells that can differentiate into a variety of cell types, such as osteoblasts, chondrocytes, and adipocytes.

[0119] Stem cell-like: As used herein, unless indicated otherwise or contradictory in context, the term “Stem cell-like” refers to a cell which is not a stem cell by its origin but functions as a stem cell and presents similar characteristics such as, for example, the expression of stemness markers like Stro-1 and/or is multipotent thus has the ability to differentiate into various cell types.

[0120] Progenitor cells: As used herein, unless indicated otherwise or contradictory in context, the term “progenitor cells” generally means a biological cell that, like any stem cell, has a tendency to differentiate into a specific type of cell, but is already more specific than a stem cell and is pushed to differentiate into its “target” cell. Stem cells can generally replicate indefinitely, whereas progenitor cells can divide only a limited number of times.

[0121] Adult stem cells: As used herein, unless indicated otherwise or contradictory in context, the term “adult stem cells” means undifferentiated cells, found throughout the body after development, that multiply by cell division to replenish dying cells and regenerate damaged tissues. Also known as somatic stem cells, they can be found in juvenile as well as adult animals and human bodies.

[0122] Differentiation: As used herein, unless indicated otherwise or contradictory in context, the term “differentiation” refers to the process by which a less specialized cell becomes a more specialized cell type and involves a switch from one gene expression pattern to another.

[0123] Differentiated cells: As used herein, unless indicated otherwise or contradictory in context, the term “differentiated cells” generally means any cell of a specific lineage at the exception of cells containing stem cell specific markers.

[0124] Non-terminally differentiated: As used herein, unless indicated otherwise or contradictory in context, the term “non-terminally differentiated”, when used in relation to a cell, refers to a differentiated cell as defined herein which has not reached its final state of differentiation. For example, in certain embodiments, in the Osteoblast cell lineage, a non-terminally differentiated cell is any differentiated cell of the lineage at the exception of an osteocyte.

[0125] Terminally differentiated: As used herein, unless indicated otherwise or contradictory in context, the term “terminally differentiated”, when used in relation to a cell, refers to a differentiated cell as defined herein which has reached its final state of differentiation. For example, in certain embodiments, in the Osteoblast cell lineage, a terminally differentiated cell is an osteocyte.

[0126] Methods for obtaining stem cells: Methods for obtaining such stem cells and providing initial culture conditions, such as a liquid culture or semi-solid culture medium, are known in the art. The cells are initially expanded in vivo or in vitro, by contacting the source of the stem cells with a suitable reagent that expands or enriches such cells in the tissue source or in culture. Preferably, adult stem cells are isolated from a tissue source and then expanded or enriched in vitro by exposure to a suitable agent. Cells are obtained from an individual by any suitable method for obtaining a cell sample from an animal, including, but not limited, to, collection of bone marrow collection of a bodily fluid (e.g., blood), collection of umbilical cord blood, tissue punch, and tissue dissection, including particularly, but not limited to, any biopsies of skin, intestine, cornea, spinal cord, brain tissue, scalp, stomach, breast, lung (e.g., including lavage and bronchioschopy), fine needle aspirates of the bone marrow, amniotic fluid, placenta and yolk sac.

[0127] Cell lineage: As used herein, unless indicated otherwise or contradictory in context, the term “cell lineage” refers to the developmental history of a particular cell from its primary state in the fertilized egg or embryo through to its fully differentiated state. The different steps and phases involved in the development of a cell produces many intermediate cells which may be referred to as progenitor or precursor cells in the present application and form an integral part of the cell lineage.

[0128] Bone: It is conventionally known that mature osteoblasts are the cells responsible for bone formation and are derived from osteoblast precursors. Differentiation of human bone marrow mesenchymal stem cells and osteoblast precursors is one of the important processes for bone regeneration. Osteoblasts differentiate from mesenchymal stem cells. Mature osteoblasts differentiate from osteoblast precursors and into osteocytes which are non-dividing cells. Bone-related neoplastic diseases include, but are not limited to, bone primary tumors (benign tumors or cancers) such as osteoma, osteoid osteoma, osteochondroma, osteoblastoma, enchondroma, giant cell tumor of bone, aneurysmal bone cyst, fibrous dysplasia of bone, osteosarcoma, chondrosarcoma, Ewing's sarcoma, fibrosarcoma; and secondary tumors (i.e. metastasize) such as, for example, in certain embodiments, carcinomas of the prostate, breasts, lungs, thyroid, and kidneys.

[0129] Osteoblast cell lineage: As used herein, unless indicated otherwise or contradictory in context, the term “osteoblast cell lineage” refers to bone cells at any stage of their development and thus include, but are not limited to, mesenchymal stem cells, osteoblasts, osteocytes or any precursors thereof.

[0130] Cartilage: Native chondrocytes are responsible for the synthesis and turnover of the cartilage extracellular matrix (ECM), which provides an environment of nutrition diffusion for chondrocytes and provides the joint surface with biomechanical competence. Chondrogenic cells arise from pluripotential adult mesenchymal stem cells (MSCs) through a series of differentiation pathways. Chondrogenic differentiation of MSCs is induced by various intrinsic and extrinsic factors. Growth factors play an important role in this process. For instance, in the hyaline cartilage, growth factors regulate homeostasis and integrity, as well as development. Cartilage-related neoplastic diseases include, but are not limited to, Chondroma/ecchondroma/enchondroma (Enchondromatosis, Extraskeletal chondroma), Chondrosarcoma (Mesenchymal chondrosarcoma, Myxoid chondrosarcoma), Osteochondroma (Osteochondromatosis), Chondromyxoid fibroma, and Chondroblastoma,

[0131] Chondrocytic cell lineage: As used herein, unless indicated otherwise or contradictory in context, the term “chondrocytic cell lineage” refers to cartilage cells at any stage of their development and thus include, but are not limited to, mesenchymal stem cells, chondroblasts, chondrocytes or any precursors thereof.

[0132] Muscles: Skeletal muscle is a highly complex and heterogeneous tissue serving a multitude of functions in the organism. The process of generating muscle—myogenesis—can be divided into several distinct phases. During embryonic myogenesis, mesoderm-derived structures generate the first muscle fibers of the body proper, and in subsequent waves additional fibers are generated along these template fibers. In the perinatal phase, muscle resident myogenic progenitors initially proliferate extensively but, later on, decrease as the number of myonuclei reaches a steady state and myofibrillar protein synthesis peaks. Once the muscle has matured, these progenitors will enter quiescence and henceforth reside within it as satellite cells. Adult skeletal muscle, like all renewing organs, relies on a mechanism that compensates for the turnover of terminally differentiated cells to maintain tissue homeostasis. This type of myogenesis depends on the activation of satellite cells that have the potential to differentiate into new fibers. The most comprehensively studied form of myogenesis takes place when mature muscle is damaged and large cohorts of satellite cells expand mitotically and differentiate to repair the tissue and reestablish homeostasis. It is now generally accepted that satellite cells are closely related to progenitors of somitic origin. The activation of the network of transcription factors that controls skeletal muscle development depends on paracrine factors that are released by adjacent tissues, such as the neural tube, notochord, surface ectoderm and lateral mesoderm. Several secreted factors have been identified that determine the spatial and temporal onset of myogenesis. Signalling molecules, such as Noggin and bone morphogenetic proteins (BMPs)—which inactivate and activate receptors of the transforming growth factor-β (TGFβ) superfamily, respectively—are reported to participate in the orchestration of the activation of myogenesis. Muscle-related neoplastic diseases include, but are not limited to, Rhabdomyosarcoma, and Leiomyosarcoma.

[0133] Muscle cell lineage: As used herein, unless indicated otherwise or contradictory in context, the term “muscle cell lineage” refers to muscle cells at any stage of their development and thus include, but are not limited to, mesenchymal stem cells, myoblasts, myocytes or any precursors thereof.

[0134] Vascular: The vasculature in the human body forms through two distinct processes: vasculogenesis and angiogenesis. Vasculogenesis is defined as the process of de novo blood vessel formation occurring when endothelial precursor cells (angioblasts) migrate and differentiate into endothelial cells which form the new vessel. These vascular trees are then extended through angiogenesis which is defined as the new vessel formation secondary to proliferation of endothelial cells from pre-existing vessels. Vasculogenesis as well as angiogenesis occur during the embryologic development of the circulatory system but also in the adult organism from circulating endothelial progenitor cells (derivatives of stem cells) able to contribute, albeit to varying degrees, to neovascularization. Vascular-related neoplastic diseases include, but are not limited to, Hemangiosarcoma, Kaposi's sarcoma, Lymphangiosarcoma, and Infantile hemangio-pericytoma.

[0135] Vascular cell lineage: As used herein, unless indicated otherwise or contradictory in context, the term “vascular cell lineage” refers to vascular cells at any stage of their development and thus include, but are not limited to, mesenchymal stem cells, angioblast, pericytes and endothelial cells or any precursors thereof.

[0136] Neurons: It was recently reported that neural cells can be regenerated from neural stem cells (NSCs). These are self-renewing, multipotent adult stem cells that generate the main phenotype of the nervous system. They undergo asymmetric cell division into two daughter cells, one non-specialized and one specialized. NSCs primarily differentiate into neurons, astrocytes, and oligodendrocytes. NSCs are generated throughout an adult's life via the process of neurogenesis. NSCs can be differentiated to replace lost or injured neurons or in many cases even glial cells. NSCs are stimulated to begin differentiation via exogenous cues from their microenvironment, or the neural stem cell niche. This niche defines a zone in which stem cells are retained after embryonic development for the production of new cells of the nervous system. This continual supply of new neurons and glia then provides the postnatal and adult brain with an added capacity for cellular plasticity. Critical to the maintenance of the stem cell niche are microenvironmental cues and cell-cell interactions that act to balance stem cell quiescence with proliferation and to direct neurogenesis versus gliogenesis lineage decisions. Several proteins like different growth factors are involved in the mechanisms of the neural stem cell niche as well as in the maintenance and growth of the newly formed neurons. These include the BMPs, FGFs, PDGF, VEGF, TGF 13, BDNF and others. Neuron-related neoplastic diseases include, but are not limited to, Anaplastic astrocytoma, Astrocytoma, Central neurocytoma, Choroid plexus carcinoma, Choroid plexus papilloma, Choroid plexus tumor, Dysembryoplastic neuroepithelial tumour, Ependymal tumor, Fibrillary astrocytoma, Giant-cell glioblastoma, Glioblastoma multiforme, Gliomatosis cerebri, Gliosarcoma, Hemangiopericytoma, Medulloblastoma, Medulloepithelioma, Meningeal carcinomatosis, Neuroblastoma, Neurocytoma, Oligoastrocytoma, Oligodendroglioma, Optic nerve sheath meningioma, Pediatric ependymoma, Pilocytic astrocytoma, Pinealoblastoma, Pineocytoma, Pleomorphic anaplastic neuroblastoma, Pleomorphic xanthoastrocytoma, Primary central nervous system lymphoma, Sphenoid wing meningioma, Subependymal giant cell astrocytoma, Subependymoma, and Trilateral retinoblastoma.

[0137] Neuronal cell lineage: As used herein, unless indicated otherwise or contradictory in context, the term “neuron lineage” refers to brain cells at any stage of their development and thus include, but are not limited to, neural stem cells, neuroblast, neurocyte and neuroglial cells or any precursors thereof.

[0138] Eye retina: The vertebrate retina is a light-sensitive layer of tissue, lining the inner surface of the eye. Retinal development involves a complex progression of tissue induction, proliferation of retinal progenitor cell (RPC) populations and terminal differentiation of these cells into specific functional types. Bone morphogenetic protein (BMP), is a member of the transforming growth factor (TGF)-β family of signaling molecules plays an important role in the retinal cell development. BMP-2, -4, and -7 and their receptors (BMPRs) are expressed in the eye during embryogenesis and are essential for multiple aspects of retinal development. Retina-related neoplastic diseases include, but are not limited to, Retinoblastoma. It should also be noted that eye cancers can be primary (starts within the eye) and metastatic (spread to the eye from another organ). The two most common cancers that would spread to the eyes from another organ are breast cancer and lung cancer. Other, less common, sites of origin include prostate, kidney, thyroid, skin, colon and blood or bone marrow.

[0139] Retinal cell lineage: As used herein, unless indicated otherwise or contradictory in context, the term “retinal cell lineage” refers to eye retina cells at any stage of their development and thus include, but are not limited to, photoreceptor, bipolar cells, rod and cone cells or any precursors thereof.

[0140] Kidneys: The kidneys are composed of complex tissues consisting of several different cell types including glomerular podocytes, endothelial cells, mesangial cells, interstitial cells, tubular epithelial cells, and connecting duct cells. These cell types interact to establish a precise cellular environment that functions as an efficient tissue. Kidneys-related neoplastic diseases include, but are not limited to, Squamous cell carcinoma, Juxtaglomerular cell, tumor (reninoma), Angiomyolipoma, Renal oncocytoma, Bellini duct carcinoma, Clear-cell sarcoma of the kidney, Mesoblastic nephroma, Wilms' tumor, Mixed epithelial stromal tumor, Clear cell adenocarcinoma, Transitional cell carcinoma, Inverted papilloma, Renal lymphoma, Teratoma, Carcinosarcoma, and Carcinoid tumor.

[0141] Renal cell lineage: As used herein, unless indicated otherwise or contradictory in context, the term “renal cell lineage” refers to renal cells at any stage of their development and thus include, but are not limited to, mesenchymal stem cells, podocytes, or any precursors thereof.

[0142] Ligaments and Tendons: Tendons and ligaments (T/L) are dense connective tissues of mesodermal origin. They connect and transmit force from muscle to bone and bone to bone, respectively. Both tissues are able to store elastic energy and withstand hightensile forces, on which locomotion is entirely dependent. T/L are predominantly composed of collagen type I fibrils organized in a highly hierarchical manner that is unique for the T/L. Other collagens (types XI, XII, XIV, and XV) and various proteoglycans (decorin, cartilage oligomeric matrix protein (COMP), byglican, lumican, fibromodulin, tenascin-C, etc.) are building the remaining T/L substance. The cellular content of T/L is dominated by tendon-specific fibroblasts named tenocytes. During embryonic development, the tendon-specific cells descend from a sub-set of mesenchymal progenitors condensed in the syndetome, a dorsolateral domain of the sclerotome. L/T-related neoplastic diseases include, but are not limited to, Fibrosarcoma, Malignant fibrous, Hystiocytoma, and Dermatofibrosarcoma.

[0143] Ligament and tendon cell lineage: As used herein, unless indicated otherwise or contradictory in context, the term “ligament and tendon cell lineage” or “LIT cell lineage” refers to bone or cartilage cells at any stage of their development and thus include, but are not limited to, mesenchymal stem cells, fibroblasts, fibrocytes, or any precursors thereof.

[0144] Skin: The skin constantly renews itself throughout adult life. Stem cells (SCs) residing in the epidermis ensure the maintenance of adult skin homeostasis, but they also participate in the repair of the epidermis after injuries. The skin protects the body from dehydration, injury and infection. The skin consists of an underlying dermis, separated by a basement membrane from the multilayered overlaying epidermis. The dermis is of mesodermal embryonic origin and contains as adult stem cells fibroblastic mesenchymal stem-cell-like cells. These cells have a multi-lineage differentiation potential, being also able to form adipose tissue or bones. Skin-related neoplastic diseases include, but are not limited to, basal cell carcinoma, squamous cell carcinoma, malignant melanoma, dermatofibrosarcoma protuberans, Merkel cell carcinoma, Kaposi's sarcoma, keratoacanthoma, spindle cell tumors, sebaceous carcinomas, microcystic adnexal carcinoma, Paget's disease of the breast, atypical fibroxanthoma, leiomyosarcoma, and angiosarcoma.

[0145] Fibroblast lineage: As used herein, unless indicated otherwise or contradictory in context, the term “fibroblast lineage” refers to skin cells at any stage of their development and thus include, but are not limited to, mesenchymal stem cells, fibroblasts, keratinocytes, Merkel cells, melanocytes, Langerhans cells, and any precursor cells thereof.

[0146] Reproduction: Reproduction (or procreation) is the biological process by which new offspring individual organisms are produced from their parents. Sexual reproduction is a biological process by which organisms create descendants that have a combination of genetic material contributed from two (usually) different members of the species. The development and physiological functions of basic structures in the mammalian reproductive system are influenced by the tissue-specific expression of members of different growth factors families like the BMP family. The establishment of the germ line is a fundamental aspect of reproduction. Germ cell determination is induced in epiblast cells by the extraembryonic ectoderm, and is not acquired through the inheritance of preformed germ plasma. There is some strong evidence that BMP-4 and -8b play a central role in determining primordial germ cell (PGC) formation in the embryo. The genes encoding BMP-4 and -8b have overlapping expression in the extraembryonic ectoderm before gastrulation, i.e., before PGCs are seen. Thus, PGC formation requires BMP-4 expression. There is also evidence from knockout mammals that BMP-8b is required for PGC formation. Furthermore, there is increasing evidence that locally produced BMPs play a major role in the differentiation of the pituitary gonadotrope. Reproduction-related neoplastic diseases include, but are not limited to, Prostate cancer, Ovary cancer (adenocarcinoma, or glandular cancer) also known as carcinoma of the prostate or prostatic intraepithelial neoplasia.

[0147] Reproduction system lineage: As used herein, unless indicated otherwise or contradictory in context, the term “reproduction system lineage” refers to Sertoli cells, Leydig cell and Germ cell at any stage of their development, in particular, mesenchymal stem cells.

[0148] Blood: Blood is a bodily fluid in animals that delivers necessary substances such as nutrients and oxygen to the cells and transports metabolic waste products away from those cells. When it reaches the lungs, gas exchange occurs wherein carbon dioxide is diffused out of the blood into the alveoli and oxygen is diffused into the blood. This oxygenated blood is pumped to the left hand side of the heart in the pulmonary vein and enters the left atrium. From here it passes through the bicuspid valve, through the ventricle and taken all around the body by the aorta. Blood contains antibodies, nutrients, oxygen and much more to help the body work. In vertebrates, it is composed of blood cells suspended in blood plasma. Plasma, which constitutes 55% of blood fluid, is mostly water (92% by volume), and contains dissipated proteins, glucose, mineral ions, hormones, carbon dioxide (plasma being the main medium for excretory product transportation), and blood cells themselves. Albumin is the main protein in plasma, and it functions to regulate the colloidal osmotic pressure of blood. Hematopoietic stem cells (HSCs) are the blood cells that give rise to all the other blood cells and are derived from the mesoderm. They are located in the red bone marrow, which is contained in the core of most bones. The HSCs give rise to the myeloid lineage (monocytes and macrophages, neutrophils, basophils, eosinophils, erythrocytes, megakaryocytes/platelets, dendritic cells), and to the lymphoid lineages (T-cells, B-cells, NK-cells). The most abundant cells in the vertebrate blood are red blood cells (also called RBSs or erythrocytes). These contain hemoglobin, an iron-containing protein, which facilitates oxygen transport by reversibly binding to this respiratory gas and greatly increasing its solubility in blood. Blood-related neoplastic diseases include, but are not limited to, acute lymphoblastic leukemia (ALL), acute myeloid leukemia (AML), chronic lymphocytic leukemia (CLL) and chronic myeloid leukemia (CML).

[0149] Blood cell lineages (myeloid lineage and lymphoid lineage): As used herein, unless indicated otherwise or contradictory in context, the term “blood cell lineages” refers to blood cells at any stage of their development from the myeloid or from the lymphoid lineage, and thus include, but are not limited to, hematopoietic stem cells (HSC), myeloid progenitors, lymphoid progenitors, mast cells, myeloblasts, monocytes, macrophages, neutrophils, basophils, eosinophils, erythrocytes, megakaryocytes, thrombocytes, dendritic cells, small lymphocytes, T-lymphocytes (T-cells), B-lymphocytes (B-cells), natural killer (NK)-cells, and any precursor cells thereof.

[0150] Adipose tissue: Adipose tissue is loose connective tissue composed mostly of adipocytes. In addition to adipocytes, adipose tissue contains the stromal vascular fraction (SVF) of cells including preadipocytes, fibroblasts, vascular endothelial cells and a variety of immune cells (i.e. adipose tissue macrophages (ATMs)). Adipose tissue is derived from preadipocytes. Its main role is to store energy in the form of lipids, although it also cushions and insulates the body. Pre-adipocytes are thought to be undifferentiated fibroblasts that can be stimulated to form adipocytes. The pre-adipocytes originate from mesenchymal stem cells. Areolar connective tissue is composed of adipocytes. The term “lipoblast” is used to describe the precursor of the adult cell. The term “lipoblastoma” is used to describe a tumor of this cell type. Adipose tissue-related neoplastic diseases include, but are not limited to, lipoma, Adenolipomas, Angiolipoleiomyomas, Angiolipomas, Corpus callosum lipoma, Cerebellar pontine angle and internal auditory canal lipomas, Chondroid lipomas, Hibernomas, Intradermal spindle cell lipomas, Neural fibrolipomas, Pleomorphic lipomas, Spindle-cell lipomas, Superficial subcutaneous lipomas, Lipoblastoma, Liposarcoma.

[0151] Adipocyte lineage: As used herein, unless indicated otherwise or contradictory in context, the term “adipocyte cell lineage” refers to adipocyte cells at any stage of their development and thus include, but are not limited to, mesenchymal stem cells, areolar connective cells, adipocytes, pre-adipocytes/lipoblasts, and any precursor cells thereof.

[0152] Digestive system: The human digestive system is composed mainly of the gastrointestinal tract (including the esophagus, stomach, small intestine, large intestine, rectum and anus) and the accessory digestive glands (the liver, the gall bladder and the pancreas). To achieve the goal of providing energy and nutrients to the body, six major functions take place in the digestive system: ingestion, secretion, mixing and movement, digestion, absorption, excretion. The gastrointestinal wall refers to the specialized series of tissue layers surrounding the lumen of the gastrointestinal tract. The general structure involves the four following layers (ordered from the lumen outward): mucosa, submucosa, muscularis externa, serosa (if the tissue is intraperitoneal)/adventitia (if the tissue is retroperitoneal). Gastrointestinal cancer refers to malignant conditions of the gastrointestinal tract (GI tract) and accessory organs of digestion. The symptoms relate to the organ affected and can include obstruction (leading to difficulty swallowing or defecating), abnormal bleeding or other associated problems. Gastrointestinal tissue-related neoplastic diseases include, but are not limited to, Esophageal cancer, Stomach cancer, Pancreatic cancer, Liver cancer, Gallbladder cancer, MALT lymphoma, Gastrointestinal stromal tumors and Cancers of the biliary tree, including cholangiocarcinoma.

[0153] Gastrointestinal cell lineages: As used herein, unless indicated otherwise or contradictory in context, the term “gastrointestinal cell lineages” refers to gastrointestinal cells and cells of the digestive accessory organs at any stage of their development and thus include, but are not limited to interstitial cells of Cajal, gastrointestinal epithelial cells, parietal cells, acinar cells, chief cells, mucus cells, goblet cells, G cells, endocrine I cells, endocrine S cells, endocrine K cells, endocrine M cells, ECL (enterochromaffin) cells, D cells, enteroendocrine cells, APUD cells, hepatocytes, sinusoidal hepatic endothelial cells, Kupffer cells, hepatic stellate cells, centroacinar cells, pancreatic stellate cells, α-cells, γ-cells, β-cells, δ-cells, centroacinar cells, basophilic cells, ductal cells, columnar cells, cholecystocytes and any precursor cells thereof.

[0154] Lung: The lung is the essential respiration organ in many air-breathing animals. In mammals the two lungs are located near the backbone on either side of the heart. Their principal function is to transport oxygen from the atmosphere into the bloodstream, and to release carbon dioxide from the bloodstream into the atmosphere. A large surface area is needed for this exchange of gases, which is accomplished by the mosaic of specialized cells that form millions of tiny, exceptionally thin-walled air sacs called alveoli. Lung cells include, but are not limited to, type I pneumocytes, type II pneumocytes, clara cells and goblet cells. Lung tissue-related neoplastic diseases include, but are not limited to, lung cancer also known as carcinoma of the lung or pulmonary carcinoma, Epithelial cells or small-cell lung carcinoma (SCLC) and non-small-cell lung carcinoma (NSCLC).

[0155] Lung cell Lineages: As used herein, unless indicated otherwise or contradictory in context, the term “lung cell Lineage” refers to lung cells at any stage of their development and thus include, but are not limited to, epithelial cells, erythrocytes, alveolar cells and any precursor cells thereof.

[0156] Head and neck cancer: As used herein, unless indicated otherwise or contradictory in context, the term “head and neck cancer” refers to a group of cancers that usually starts in the lip, oral cavity, nasal cavity, paranasal sinuses, pharynx, and larynx. About 90% of head and neck cancers are squamous cell carcinomas. Thus, neoplastic diseases such as head and neck cancers include, but are not limited to, oral cancer, nasopharynx cancer, oropharyngeal cancer, hypopharynx cancer and laryngeal cancer.

[0157] The cell lineage involved in head and neck cancers includes all the cells involved in the formation of such cancers at any stage of their development and thus include, but are not limited to, cells of the oral cavity, cells of the pharynx, cells of the larynx, cells of the paranasal sinuses and nasal cavity, cells of the salivary glands and any precursor cells thereof.

[0158] Ratio: As used herein, unless indicated otherwise or contradictory in context, the term “ratio”, when used in relation to GFR-binding compound with respect to the bioactive carrier in the pharmaceutical association or composition disclosed herein, refers to the (molar, weight or part as specified) ratio between the quantity of GFR-binding compound and the quantity of bioactive carrier. The ratio may be a molar ratio, a weight ratio or a part ratio and will be specified as needed on a case by case basis. Quantity units may conventionally be mole, millimole, gram, milligram or parts. For example, in certain embodiments, it is convenient to express the relative quantity between GFR-binding compounds and bioactive carriers using densities. It shall be understood that this ratio may be varied according to the neoplastic cell type to be treated.

[0159] Density: As used herein, unless indicated otherwise or contradictory in context, the term “density”, when used in relation to GFR-binding compound with respect to the bioactive carrier in the pharmaceutical composition disclosed herein, refers to the quantity of GFR-binding compounds, expressed in e.g. mole, millimole, gram, or milligram, with respect to one standardised surface unit e.g. squared millimetre (mm²), squared micrometre (μm²), or squared nanometre (nm²)). For example, in certain embodiments, the ratio between a GFR-binding compound and a bioactive carrier in the pharmaceutical association or composition disclosed herein may be expressed in pmol per mm² or pmol/mm².

[0160] Cell cycle: As used herein, unless indicated otherwise or contradictory in context, the term “cell cycle” refers to the process through which a vertebrate cell self-replicate. In eukaryote cells, cell cycle consists of four discrete phases: G1, S, G2, and M. Together, the G1, S, and G2 phases make up the period known as interphase. During the S or “synthesis” phase, the cell replicates its DNA creating an exact copy of all of its chromosomes. In the M or “mitotic” phase, the cell division actually occurs and separates the chromosomes in its cell nucleus into two identical sets in two nuclei. The first phase within interphase, from the end of the previous M phase until the beginning of DNA synthesis, is called G1. During this phase the biosynthetic activities of the cell, which are considerably slowed down during M phase, resume at a high rate. This phase is marked by the formation of millions of proteins and later on enzymes that are required in S phase, mainly those needed for DNA replication. The G2 phase, or pre-mitotic phase, is the third and final sub-phase of Interphase in the cell cycle directly preceding Mitosis. It follows the successful completion of S phase and ends with the onset of prophase, the first phase of mitosis. In order to move from one phase of the cell cycle to the next, a cell must “validate” numerous checkpoints. At each checkpoint, specialized proteins determine whether the necessary conditions exist. If so, the cell is free to enter into the next phase. If not, progression through the cell cycle is halted. For example, in certain embodiments, during G1, the cell passes through a “validation” window punctuated by the restriction point R. During the “validation” phase, different checkpoints ensure that environmental conditions are favourable for replication. If conditions are not favourable, the cell may enter a resting state known as G0. The G0 phase or resting phase is a period in the cell cycle in which cells exist in a quiescent state. G0 phase is viewed as either an extended G1 phase, where the cell is neither dividing nor preparing to divide, or a distinct quiescent stage that occurs outside of the cell cycle. Typically, a healthy vertebrate cell undergoes cell division when needed e.g. to regenerate damaged tissues or simply replace old tissues by new ones, by switching from a G0 resting state into the G1 state of the cell cycle and resume cell division. In contrast, neoplastic cells (such as cancer cells) have lost their ability to suspend cell division and switch to the G0 phase therefore undergoing permanent cell division which is generally referred to uncontrolled cell division or proliferation. Another “validation” window takes place later in the cell cycle, just before a cell moves from G2 to mitosis. Here, a number of proteins scrutinize the cell's DNA ensuring proper replication has taken place. Finally, another cell cycle “validation” window takes place during mitosis in which different checkpoints determines whether chromosomes are correctly attached to the spindle, and to the network of microtubules that will separate them during cell division.

[0161] Quiescence: As used herein, unless indicated otherwise or contradictory in context, the term “quiescence”, when used in relation to a cell, refers to a resting state during which the cell does not divide, duplicate or proliferate. This state is also called the G0 state. As used herein, “inducing quiescence of a neoplastic cell” thus means to provoke the passage from G1 to G0 of a neoplastic cell which usually has lost the ability to do so. One method to detect the passage from G1 to G0 is, for instance, to monitor the state of phosphorylation of the protein Rb via Western Blot. The Rb protein is normally not phosphorylated during the G0 phase but becomes phosphorylated or even hyper-phosphorylated during the rest of the cell cycle. Consequently, observing the absence (or substantial reduction i.e. at least 90% reduction, in comparison with the quantity present in the G1 phase) of phosphorylated Rb protein on a western blot confirms that a neoplastic cell has undergone (at some point in time) a switch to the G0 phase.

[0162] Cell division or cell proliferation: As used herein, unless indicated otherwise or contradictory in context, the term “cell division” or “cell proliferation”, refers to the process by which a cell self-replicate, replicate or is caused to replicate.

[0163] Proliferate: As used herein, unless indicated otherwise or contradictory in context, the term “proliferate” means to grow, expand or increase or cause to grow, expand or increase. “Proliferative” means having the ability to proliferate. “Anti-proliferative” means having properties to counter, reduce, or inhibit proliferation.

[0164] Hyperproliferation: As used herein, unless indicated otherwise or contradictory in context, the term “hyperproliferation” or “uncontrolled proliferation” means the abnormal growth, expansion or increase or causing the abnormal growth, expansion or increase. Abnormal growth typically originates from the abnormal regulation of the cell cycle preventing the cell to reach the G0 state and stop cell division and replication. One consequence of hyper or uncontrolled proliferation is the development of neoplastic diseases such as tumours and cancers.

[0165] Hyperproliferative diseases: As used herein, unless indicated otherwise or contradictory in context, the term “hyperproliferative diseases” is used interchangeably with “neoplastic diseases” and refers to diseases that are characterized by uncontrolled cellular proliferation and/or disruption in programmed cell death. The loss of a cell's ability to control cellular proliferation is often caused by genetic damage to the cellular pathways responsible for regulating cellular functions, including but not limited to, for example, in certain embodiments, metabolism, cell cycle progression, cell adhesion, vascular function, apoptosis, and angiogenesis.

[0166] Anti-mitogen activity: As used herein, unless indicated otherwise or contradictory in context, the term “anti-mitogen activity”, refers to biological pathways that down-regulate, partially inhibit or suppress cell mitosis i.e. cell division. As used herein, a substance or pharmaceutical association which promotes, induces or favours anti-mitogen activity thus means a substance or pharmaceutical association which provides at least part of its effective biologic or therapeutic action by down-regulating, partially inhibiting or suppressing mitosis of the neoplastic cell to be treated.

[0167] Tumor suppressor pathways: As used herein, unless indicated otherwise or contradictory in context, the term “tumor suppressor pathways” refers to biological pathways that down-regulate, partially inhibit or suppress tumor activity i.e. protect the cell against cell defects which could cause tumors or cancers. As used herein, a substance or pharmaceutical association which promotes, induces or favours tumor suppressor pathways thus means a substance or pharmaceutical association which provides at least part of its effective biologic or therapeutic action by up-regulating, activating or promoting the tumor suppressor genes or proteins of the neoplastic cell to be treated. Known tumor suppressor proteins which have a dampening or repressive effect on the regulation of the cell cycle or promote apoptosis include, but are not limited to, p53, pRb, pVHL, APC, CD95, ST5, YPEL3, ST7, and ST14.

[0168] Anti-oncogenic activity: As used herein, unless indicated otherwise or contradictory in context, the term “anti-oncogenic activity” refers to any molecule having the ability to inhibit, repress or down-regulate the gene or protein expression of oncogenes. An oncogene is a gene that has the potential to cause neoplastic diseases such as cancer. Examples of anti-oncogene molecules include tumor suppressor proteins.

[0169] By “without temporarily or permanently damaging or killing a neoplastic cell”, is meant, unless indicated otherwise or contradictory in context, that a neoplastic disease, such as cancer, is treated without inducing the entry of the neoplastic cells into apoptosis as it may be assessed by the positive expression of proteins caspase 3, 6 and 7.

[0170] By “without permanently inducing a quiescent state in a neoplastic cell”, is meant, unless indicated otherwise or contradictory in context, that a neoplastic disease, such as cancer, is treated by inducing a temporary quiescent state in the neoplastic cells (the cells enter the G0 phase) and then differentiate into a more specialised state.

[0171] Non-mutagenic: As used herein, unless indicated otherwise or contradictory in context, the term “non-mutagenic”, when used in relation to a therapy or treatment, refers to a therapy which does not involve the alteration or modification of a cell's genome.

[0172] Recoding: As used herein, unless indicated otherwise or contradictory in context, the term “recoding” or “converting”, when used in relation to a cell (in particular a neoplastic cell such as a cancer cell), refers to the action of providing, to a neoplastic cell to be treated, a suitable extracellular micro-environment (e.g. in the form of a pharmaceutical association or composition as defined herein) providing appropriate extracellular signals so that the cell may undergo self-recovery or -healing and be converted into a partially or fully differentiated non-neoplastic cell.

[0173] Recoding therapy: As used herein, unless indicated otherwise or contradictory in context, the term “recoding therapy” refers to a therapy that promotes and stimulates the cell's natural abilities to redirect its own fate by integrating accurate micro-environmental recoding signals.

[0174] Extracellular micro-environment: As used herein, unless indicated otherwise or contradictory in context, the term “extracellular micro-environment” refers to the environment surrounding (in functional proximity with) a specific cell which is characterized by biophysical, mechanical and biochemical properties specific for each tissue and is able to regulate cell behavior. Modification of the extracellular micro-environment of a neoplastic cell using, for instance, pharmaceutical associations or compositions as defined herein allows for the conversion or recoding of said neoplastic cell into a healthy, functional, non-neoplastic cell.

[0175] Self-recovery or self-healing: As used herein, unless indicated otherwise or contradictory in context, the term “self-recovery” or “self-healing”, when used in relation to a neoplastic cell such as a cancer cell, means that the neoplastic cell operates its own internal biological changes once it has been recoded or treated using a pharmaceutical association or composition as defined herein, so that it becomes a functional, healthy, non-neoplastic cell. The cell heal itself when in contact with the pharmaceutical composition or association as defined herein and, in contrast with previously reported methods wherein the neoplastic cell is forced to die or maintained in a temporarily reduced or non-proliferative state.

[0176] Physiologically functional cell: As used herein, unless indicated otherwise or contradictory in context, the term “physiologically functional cell” refers to a cell which is able to perform normally all of the cell functions associated with a particular cell type and necessary for the normal physiology of a cell. These functions include all of the intracellular molecular mechanisms but also all of the activities necessary for a normal communication between the cell and its microenvironment. One method which may be used to verify if a cell is physiologically functional is the grafting of the cell, after the introduction of fluorescent markers, in other mammalian model organisms such as mouse models. The cell is grafted in the tissue corresponding to its cell type. The cell characteristics and normal functions are monitored after a period of time with various methods such as in vivo microscopy or histological staining. The term “functional” when used in relation to a molecule, compound or substance refers to a biological molecule in a form in which it exhibits a property and/or activity by which it is characterized.

[0177] Healthy cell: As used herein, unless indicated otherwise or contradictory in context, the term “healthy cell” refers to a cell which presents a normal morphology, normal cell functions and normal cell growth which are not damaged, altered or inactivated by a neoplastic disease.

[0178] Shorter period of time: As used herein, unless indicated otherwise or contradictory in context, the term “shorter period of time”, when used in relation to conversion or recoding duration, means substantially shorter to provide a substantial benefit for the treated patient in comparison with existing treatments. In certain embodiments, a shorter period of time includes at least 1.5-fold, at least 2-fold, at least 2.5-fold, at least 3-fold, at least 3.5-fold, at least 4-fold, at least 4.5-fold, at least 5-fold, at least 6-fold, at least 7-fold, at least 8-fold, at least 9-fold or at least 10-fold reduction with respect to an existing treatment.

[0179] Exogenous: As used herein, unless indicated otherwise or contradictory in context, the term “exogenous” refers to a substance coming from outside a living system such as a cell, an organ, or an individual organism. For example, in certain embodiments, exogenous factors in medicine include pathogens and therapeutics. DNA introduced into a cell via transfection or viral infection may be considered as an exogenous factor. Carcinogens are also commonly referred to as exogenous factors.

[0180] Endogenous: As used herein, unless indicated otherwise or contradictory in context, the term “endogenous” refers to substances that originate from within an organism, tissue, or cell.

[0181] Intracellular: As used herein, unless indicated otherwise or contradictory in context, the term “intracellular” generally means “inside the cell”. In vertebrates, such as animals, the cell membrane is the barrier between the inside of the cell and the outside of the cell (the extracellular milieu). Thus, treatments and therapies in which at least one substance, compound, pharmaceutical association, combination or composition penetrates the cell wall of a cell to be treated in order to produce/deliver its (effective) biological effect are considered as intracellular treatments and therapies.

[0182] Extracellular: As used herein, unless indicated otherwise or contradictory in context, the term “extracellular” means “outside the cell”. In vertebrates, such as animals, the cell membrane is the barrier between the inside of the cell (the intracellular milieu) and the outside of the cell. Thus, treatments and therapies in which no substance, compound, pharmaceutical association, combination or composition requires penetration of the cell membrane in order to produce/deliver its (effective) biological effect (e.g. by interacting with trans-membrane receptors) are considered as extracellular treatments and therapies. In other words, a therapy using a plurality of substances in order to provide the desired biological effect wherein one or more of these substances require the entry into the intracellular compartment to provide (or deliver) its biological effect is not considered as an extracellular therapy in the sense of the present disclosure.

[0183] Cytostatic: As used herein, unless indicated otherwise or contradictory in context, the term “cytostatic” refers to inhibiting, reducing, or suppressing the growth, division, or multiplication of a cell (e.g., a mammalian cell (e.g., a human cell)), bacterium, virus, fungus, protozoan, parasite, prion, or a combination thereof.

[0184] Cytotoxic: As used herein, unless indicated otherwise or contradictory in context, the term “cytotoxic” refers to killing or causing injurious, toxic, or deadly effect on a cell (e.g., a mammalian cell (e.g., a human cell)), bacterium, virus, fungus, protozoan, parasite, prion, or a combination thereof.

[0185] In vitro: As used herein, unless indicated otherwise or contradictory in context, the term “in vitro” refers to events that occur in an artificial environment, e.g., in a test tube or reaction vessel, in cell culture, in a Petri dish, etc., rather than within an organism (e.g., animal, plant, or microbe).

[0186] In vivo: As used herein, unless indicated otherwise or contradictory in context, the term “in vivo” refers to events that occur within an organism (e.g., animal, plant, or microbe or cell or tissue thereof).

[0187] Ex vivo: As used herein, unless indicated otherwise or contradictory in context, the term “ex vivo” refers to events that occur in an external environment on tissues sourced from an organism (e.g., animal, plant, or microbe) in an attempt to replicate natural living conditions outside such an organism.

[0188] Syndecans: As used herein, unless indicated otherwise or contradictory in context, the term “syndecans” refers to single transmembrane domain proteins that are thought to act as co-receptors, especially for G protein-coupled receptors. These core proteins carry three to five heparan sulfate and chondroitin sulfate chains, which allow for interaction with a large variety of ligands including fibroblast growth factors, vascular endothelial growth factor, transforming growth factor-beta, fibronectin and antithrombin-1. Interactions between fibronectin and some syndecans can be modulated by the extracellular matrix protein tenascin C. The syndecan protein family has four members. Syndecans 1 and 3 and syndecans 2 and 4, making up separate subfamilies, arose by gene duplication and divergent evolution from a single ancestral gene. The syndecan numbers reflect the order in which the cDNAs for each family member were cloned. All syndecans have an N-terminal signal peptide, an ectodomain, a single hydrophobic transmembrane domain, and a short C-terminal cytoplasmic domain. All syndecans are anchored to plasma membrane via a 24-25 amino acid long hydrophobic transmembrane domain. In mammalian cells, syndecans are expressed by unique genes located on different chromosomes. All members of the syndecan family have 5 exons. The difference in size of the syndecans is credited to the variable length of exon 3, which encodes a spacer domain. In humans, the amino acid length of syndecan 1, 2, 3 and 4 is 310, 201, 346 and 198 respectively. Glycosaminoglycan chains, a member of the heparan sulfate group, are an important component of syndecans and are responsible for a diverse set of syndecan functions. The addition of glycosaminoglycans to syndecan is controlled by a series of post-translational events.

[0189] Cyclin-dependent kinases: As used herein, unless indicated otherwise or contradictory in context, the term “Cyclin-dependent kinases” or “CDKs” refers to a family of protein involved in the regulation of the cell cycle. They are present in all known eukaryotes, and their regulatory function in the cell cycle has been evolutionarily conserved. By definition, a CDK binds a regulatory protein called a cyclin. It is reported that, without cyclin, CDK has little kinase activity; only the cyclin-CDK complex is considered to be an active kinase. CDKs phosphorylate their substrates on serines and threonines, so they can be said to belong to the serine-threonine kinase family. CDKs and cyclins are thus highly conserved across species and are present in all cell types including those having a neoplastic phenotype (e.g. cancer cells). Most of the known cyclin-CDK complexes regulate the progression through the cell cycle. Animal cells contain at least nine CDKs, four of which, CDK 1, 2, 3, 4 and 6, are reported to be directly involved in cell cycle regulation: CDK1 regulated by cyclin A, cyclin B; CDK2 regulated by cyclin A, cyclin E; CDK3 regulated by cyclin C; CDK4 regulated by cyclin D1, cyclin D2, cyclin D3; CDK5 regulated by CDK5R1, CDK5R2; CDK6 regulated by cyclin D1, cyclin D2, cyclin D3; CDK7 regulated by cyclin H; CDK8 regulated by cyclin C; CDK9 regulated by cyclin T1, cyclin T2a, cyclin T2b, cyclin K.

[0190] Cyclins: As used herein, unless indicated otherwise or contradictory in context, the term “cyclins” refers to a family of proteins that control the progression of cells through the cell cycle by activating cyclin-dependent kinase (CDK) enzymes. Cyclin D is one of the major cyclins produced in terms of its functional importance. It is known to interact with four CDKs: CDK2, 4, 5, and 6. In proliferating cells, cyclin D-CDK4/6 complex accumulation is of great importance for cell cycle progression. For instance, cyclin D-CDK4/6 complexes partially phosphorylates retinoblastoma tumor suppressor protein (Rb), whose inhibition can induce expression of some genes important for S phase progression.

[0191] Patient/subject: As used herein, unless indicated otherwise or contradictory in context, the term “patient” or “subject”, which are used interchangeably, refers to any organism to which a composition in accordance with the invention may be administered, e.g., for experimental, diagnostic, prophylactic, and/or therapeutic purposes. Typical subjects include animals (e.g., mammals such as mice, rats, rabbits, non-human primates, and humans) and/or plants. As used herein, patients/subjects include those individuals who may seek or be in need of treatment, requires treatment, is receiving treatment, will receive treatment, or a subject who is under care by a trained professional for a particular disease or condition.

[0192] Purified: As used herein, unless indicated otherwise or contradictory in context, the term “purify,” “purified,” “purification” means to make substantially pure or clear from unwanted components, material defilement, admixture or imperfection.

[0193] Targeted Cells: As used herein, unless indicated otherwise or contradictory in context, the term “targeted cells” refers to any one or more cells of interest. The cells may be found in vitro, in vivo, in situ or in the tissue or organ of an organism. The organism may be an animal, preferably a mammal, more preferably a human and most preferably a patient.

[0194] Molecule length: As used herein, unless indicated otherwise or contradictory in context, the term molecule or peptide “length” or “size” means the longest 2D or 3D distance which may possibly be measured within the molecule. For cyclic molecules, “length” or “size” means the longest measurable distance across the cyclic structure. Throughout the present disclosure, when a molecule size or length is given (in general using the nanometre, nm, unit), the following procedures were used to calculate them:
[0195] The so-called «2D» procedure: a 2D chemical structure was drawn in e.g. the ChemDraw® Software. Then, size measurement was carried out via the available ChemDraw length measurement tools. The length value given herein corresponds to the longest 2D length of the molecule using the default settings 2D bond sizes and angles of the software.
[0196] Alternatively, the so-called “3D” procedure may be followed:
[0197] (1) Drawing of the chemical structure of the molecule using suitable softwares (such as ChemDraw).
[0198] (2) Creating a 3D structure model of the molecule hereby drawn using SCWRL (Protein Sci. 2003; 12(9):2001-14) or MODELLER (Current Protocols in Bioinformatics. 15:5.6:5.6.1-5.6.30), each of which is hereby incorporated by reference in its entirety.
[0199] (3) Incubating the obtained 3D structure model in a box simulation containing water for few milliseconds using AMBER (J. Computat. Chem. 2005; 26, 1668-1688), which is hereby incorporated by reference in its entirety.
[0200] (4) Measuring the size of the molecule hereby obtained using softwares such as Pymol® using available Pymol length measurement tools (DeLano Scientific LLC, http://www.pymol.org).

[0201] Root Mean Square Deviation: As used herein, unless indicated otherwise or contradictory in context, the term “Root Mean Square Deviation” or “RMSD” is well known in the art and means the square root of the arithmetic mean of the square of the distances between certain matched atoms. One can represent a molecular conformation as a vector whose components are the Cartesian coordinates of the molecule's atoms. Therefore, a conformation for a molecule with N atoms can be represented as a 3N-dimensional vector of real numbers. To calculate the RMSD of a pair of peptides or peptidomimetics (e.g. x and y), each one of them must be represented as a 3N-length (assuming N atoms) vector of coordinates. The RMSD is therefore the square root of the arithmetic mean of the square of the distances between corresponding atoms of x and y. It is a measure of the average atomic displacement between the conformations of the two structures:

$$\sqrt{\frac{1}{N} {\sum }_{i = 1}^{N} \vert xi - yi \vert {1}^{2}}$$

[0202] In other words, the RMSD is the measure of the average distance between the atoms (usually the backbone atoms) of superimposed polypeptides or peptidomimetics. In the study of globular protein conformations, one customarily measures the similarity in three-dimensional structure by the RMSD of the Ca atomic coordinates after optimal rigid body superposition.

[0203] The RMSD value of a given peptide or peptidomimetic with respect to a specifically selected reference structure (hereinafter may also be referred to as “PEPREF”) may be calculated using various methods all well know by the skilled person. However, for the purpose of the present disclosure and for the avoidance of doubts, the RMSD of a given peptide or peptidomimetic as used in the present disclosure is obtained precisely using the following procedure:

[0204] STEP 1: Creating a 3-dimensional model of (i.e. obtaining 3D structure coordinates for) a peptide or peptidomimetic for which the RMSD is to be calculated, by:

[0205] STEP 1.1: Obtaining a set of polypeptide 3D structure coordinates based on the alignment with the sequence of a peptide or peptidomometic for which the RMSD value is to be calculated, using the BLAST algorithm according to the following procedure:
[0206] 1. Open the following link to access the “Standard Protein Blast” tool: http://blast.ncbi.nlm.nih.gov/Blast.cgi?PROGRAM=blastp&PAGE_TYPE=BlastSearch&LINK_LO C=blasthome
[0207] 2. Enter the amino acid sequence of the peptide or peptidomimetic of interest in the “Enter Query Sequence” section. The alignment is performed one sequence after the other (this is not a multiple alignment tool).
[0208] 3. In the section “Choose Search Set”, choose the following database: Protein Data Bank Proteins (pdb).
[0209] 4. In the section “Choose Search Set”, do not exclude «Models (XM/XP)» and do not Exclude «Uncultured/environmental sample sequences
[0210] 5. In the section “Program Selection”, choose the following algorithm: blastp (protein-protein BLAST)
[0211] 6. Leave other fields as shown on the screenshot in FIG. 20.
[0212] 7. Run BLAST.
[0213] 8. The results obtained from the query are presented in the form of several pdb files.
[0214] 9. From this output results, the first ten (10) PDB files corresponding to the best sequence alignments are retained. This set of 10 PDB files or structures will be used in the next step (Step 2: structural alignments with STAMP).
[0215] 10. Finally, clean up the 10 structures contained in the 10 PDB files by removing all e.g. additional small molecules, receptors or portions thereof, dimers or portions thereof, so as to retain only the polypeptide chain of interest.

[0216] The set of pdf files contains the polypeptide 3D structure coordinates of the 10 structures having the highest sequence homology with the peptide or peptidomometic for which the RMSD value is to be calculated.

[0217] STEP 1.2: Performing the structural alignment of the set of 3D structure coordinates obtained in STEP 1.1, thereby obtaining a set of aligned polypeptide 3D structure coordinates, by using STAMP (Structural Alignment of Multiple Proteins Version 4.2) according to the following procedure:
[0218] 1. Open the following link to access the “STAMP superposition” tool: http://www.russelllab.org/cgi-bin/pdc/stamp.pl
[0219] 2. In the section entitled “Structure A”, input the PDB file corresponding to the first structure from the set of ten 3D structure coordinates obtained in STEP 1.1, which corresponds to the best sequence alignment with BLAST.
[0220] 3. In the section entitled “Structure B”, input the PDB file corresponding to the second structure from the set of ten 3D structure coordinates obtained in STEP 1.1, which corresponds to the second best sequence alignment with BLAST.
[0221] 4. Run STAMP.
[0222] 5. Repeat steps 2 to 4 with the other eight pdb files from the set of ten 3D structure coordinates identified in STEP 1.1 by successively entering the PDB files in the field “Structure B”.
[0223] 6. As a result, the structural alignment of the 10 structures contained in the set of PDB files obtained in STEP 1.1 is obtained in the form of 9 distinct PDB files each containing a pair of aligned polypeptide 3D structure (structure 1 with structure 2, structure 1 with structure 3, structure 1 with structure 4, . . . structure 1 with structure 10).
[0224] 7. From these 9 “pair” PDB files, 10 PDB files each containing one of structures 1 to 10 are created.
[0225] 8. 10 PDB files containing the aligned 3D structure coordinates are thus obtained from STEP 1.2. for use in the next step.

[0226] STEP 1.3: Modelling the sequence of peptide or peptidomometic for which the RMSD value is to be calculated against the set of aligned polypeptide 3D structure coordinates obtained in STEP 1.2, thereby obtaining a set of 3D structure coordinates for the peptide or peptidomometic for which the RMSD value is to be calculated, using SCWRL (reference: “SCWRL and MolIDE: computer programs for side-chain conformation prediction and homology modeling”, Nature Protocols VOL. 3 NO. 12 2008, Qiang Wang et al.; which is hereby incorporated by reference in its entirety) according to the following procedure:
[0227] 1. Insert the input sequence of a peptide or peptidomometic for which the RMSD value is to be calculated in Fasta format.
[0228] 2. Import the first PDB file containing the aligned polypeptide 3D structure coordinates obtained in STEP 1.2.
[0229] 3. Run SCWRL by typing the following command for Unix based systems: “scwrl_path/scwrl3-i inputpdbfile-o outputpdbfile-s sequencefile 4 logfile”.
[0230] 4. As a result, a first PBD file is obtained containing the predicted 3D structure coordinates of the peptide or peptidomometic for which the RMSD value is to be calculated.
[0231] 5. Repeat steps 1 to 3 using the 9 remaining PDB files obtained in STEP 1.2.
[0232] 6. 10 PDB files are obtained from STEP 1.3 for use in the following STEP 1.4.

[0233] STEP 1.4: Minimizing the free energy (AG) of the set of 3D structure coordinates for the peptide or peptidomometic for which the RMSD value is to be calculated obtained in STEP 1.3 using GROMACS (Reference: Hess B, Kutzner C, Van Der Spoel D, Lindahl E (2008). “GROMACS 4: Algorithms for Highly Efficient, Load-Balanced, and Scalable Molecular Simulation”. J Chem Theory Comput 4 (2): 435; which is hereby incorporated by reference in its entirety) according to the following procedure:
[0234] 1. Create a Gromacs topology (gmx) file from the first PDB file of the modeled peptide or peptidomometic for which the RMSD value is to be calculated obtained in STEP 1.3, by using the command «pdb2gmx-f NOMDUFICHIERPDB.pdb-water spc» “NOMDUFICHIERPDB” is the name of the input PDB file.
[0235] 2. Create a box around the imported modeled peptide or peptidomometic by using the command «editconf-f conf.gro-bt cubic d 0.7 o box.gro».
[0236] 3. Add solvent (water) molecules into the box by using the command «genbox-cp box.gro-cs spc216.gro-p topol.top-o solvated.gro».
[0237] 4. Prepare the input for the molecular dynamics (MD) run with the command «vim em.mdp». Default run is set to 1000 nsteps.
[0238] 5. Create an input for the MD run by using the command «grompp-f em.mdp-p topol.top-c solvated.gro-o em.tpr».
[0239] 6. Run the command «mdrun-v-deffnm em» to perform the actual energy minimization.
[0240] 7. Run the command «g energy-f em.edr-s em.tpr-o em.xvg» and then run option «7
[0241] 8. As a result, a first XMG file is obtained. To view the XMG file run the command «xmgrace em.xvg
[0242] 9. Repeat steps 1 to 8 with the 9 remaining structures obtained in STEP 1.3. 10 XMG files are thus obtained.
[0243] 10. The structure of lowest energy is obtained from each XMG file in the form of a PDB file. 10 PDB files each containing one structure of lowest energy are thus obtained from STEP 1.4 for use in the next step.

[0244] STEP 2: Calculating the RMSD of the peptide or peptidomimetic for which the RMSD value is to be calculated by comparing the 3D structure coordinates of the peptide or peptidomimetic obtained in STEP 1.4 with the 3D structure coordinates of PEPREF to obtain the lowest possible RMSD value using FATCAT (Flexible structure AlignmenT by Chaining Aligned fragment pairs allowing Twists) according to the following procedure:
[0245] 1. Open the following link to access the “FATCAT” software: http://fatcat.burnham.org
[0246] 2. Open the “pairwise alignment” tool.
[0247] 3. Import the PDB file containing the structure coordinates of PEPREF in the “Get the 1st structure” section.
[0248] 4. Import the first PDB file of the peptide or peptidomimetic for which the RMSD value is to be calculated with minimized energy obtained in STEP 1.4.
[0249] 5. Run FATCAT.
[0250] 6. As a result, a first RMSD value of the first structure of the peptide or peptidomimetic for which the RMSD value is to be calculated as obtained in STEP 1.4 will be obtained in the output report.
[0251] 7. Repeat steps 1 to 5 with the 9 remaining structures (PDB files) obtained from STEP 1.4.
[0252] 8. The peptide or peptidomimetic structure with the lowest RMSD (out of the ten RMSD values successively obtained) is the value taken into account in the present application.

[0253] 3D structure coordinates of PEPREF: As used herein, unless indicated otherwise or contradictory in context, the 3D structure coordinates of PEPREF are as follows:

| | | | | | | | | |
|---|---|---|---|---|---|---|---|---|
| ATOM | 511 | N | LYS | A | 1 | −14.570 | 46.437 | 27.424 |
| ATOM | 512 | CA | LYS | A | 1 | −13.512 | 45.748 | 28.151 |
| ATOM | 513 | C | LYS | A | 1 | −13.655 | 44.259 | 27.884 |
| ATOM | 514 | O | LYS | A | 1 | −12.769 | 43.463 | 28.197 |
| ATOM | 515 | CB | LYS | A | 1 | −13.605 | 46.029 | 29.652 |
| ATOM | 516 | CG | LYS | A | 1 | −13.640 | 47.509 | 29.991 |
| ATOM | 517 | CD | LYS | A | 1 | −12.615 | 48.297 | 29.183 |
| ATOM | 518 | CE | LYS | A | 1 | −12.625 | 49.768 | 29.575 |
| ATOM | 519 | NZ | LYS | A | 1 | −13.994 | 50.369 | 29.497 |
| ATOM | 520 | N | ILE | A | 2 | −14.792 | 43.890 | 27.309 |
| ATOM | 521 | CA | ILE | A | 2 | −15.051 | 42.499 | 26.967 |
| ATOM | 522 | C | ILE | A | 2 | −14.911 | 42.370 | 25.444 |
| ATOM | 523 | O | ILE | A | 2 | −15.531 | 43.125 | 24.683 |
| ATOM | 524 | CB | ILE | A | 2 | −16.466 | 42.065 | 27.401 |
| ATOM | 525 | CG1 | ILE | A | 2 | −16.630 | 42.238 | 28.915 |
| ATOM | 526 | CG2 | ILE | A | 2 | −16.710 | 40.629 | 26.985 |
| ATOM | 527 | CD1 | ILE | A | 2 | −15.631 | 41.478 | 29.30 |
| ATOM | 528 | N | PRO | A | 3 | −14.085 | 41.411 | 24.989 |
| ATOM | 529 | CA | PRO | A | 3 | −13.789 | 41.109 | 23.588 |
| ATOM | 530 | C | PRO | A | 3 | −14.998 | 40.695 | 22.768 |
| ATOM | 531 | O | PRO | A | 3 | −15.969 | 40.164 | 23.305 |
| ATOM | 532 | CB | PRO | A | 3 | −12.785 | 39.968 | 23.688 |
| ATOM | 533 | CG | PRO | A | 3 | −12.156 | 40.166 | 25.007 |
| ATOM | 534 | CD | PRO | A | 3 | −13.330 | 40.506 | 25.867 |
| ATOM | 535 | N | LYS | A | 4 | −14.937 | 40.937 | 21.463 |
| ATOM | 536 | CA | LYS | A | 4 | −16.023 | 40.529 | 20.590 |
| ATOM | 537 | C | LYS | A | 4 | −15.886 | 39.015 | 20.391 |
| ATOM | 538 | O | LYS | A | 4 | −14.903 | 38.415 | 20.831 |
| ATOM | 539 | CB | LYS | A | 4 | −15.926 | 41.244 | 19.245 |
| ATOM | 540 | CG | LYS | A | 4 | −15.802 | 42.751 | 19.355 |
| ATOM | 541 | CD | LYS | A | 4 | −16.292 | 43.433 | 18.083 |
| ATOM | 542 | CE | LYS | A | 4 | −16.162 | 44.943 | 18.177 |
| ATOM | 543 | NZ | LYS | A | 4 | −16.825 | 45.628 | 17.019 |
| ATOM | 544 | N | ALA | A | 5 | −16.85 | 38.393 | 19.759 |
| ATOM | 545 | CA | ALA | A | 5 | −16.811 | 36.955 | 19.507 |
| ATOM | 546 | C | ALA | A | 5 | −15.772 | 36.771 | 18.416 |
| ATOM | 547 | O | ALA | A | 5 | −15.727 | 37.534 | 17.455 |
| ATOM | 548 | CB | ALA | A | 5 | −18.168 | 36.419 | 19.043 |
| ATOM | 549 | N | CYS | A | 6 | −14.935 | 35.756 | 18.562 |
| ATOM | 550 | CA | CYS | A | 6 | −13.887 | 35.518 | 17.584 |
| ATOM | 551 | C | CYS | A | 6 | −14.347 | 34.765 | 16.338 |
| ATOM | 552 | O | CYS | A | 6 | −15.327 | 34.018 | 16.368 |
| ATOM | 553 | CB | CYS | A | 6 | −12.743 | 34.768 | 18.241 |
| ATOM | 554 | SG | CYS | A | 6 | −11.198 | 34.959 | 17.353 |
| ATOM | 555 | N | CYS | A | 7 | −13.623 | 34.973 | 15.243 |
| ATOM | 556 | CA | CYS | A | 7 | −13.931 | 34.328 | 13.969 |
| ATOM | 557 | C | CYS | A | 7 | −13.091 | 33.071 | 13.798 |
| ATOM | 558 | O | CYS | A | 7 | −11.961 | 33.123 | 13.302 |
| ATOM | 559 | CB | CYS | A | 7 | −13.653 | 35.290 | 12.824 |
| ATOM | 560 | SG | CYS | A | 7 | −13.930 | 34.633 | 11.154 |
| ATOM | 561 | N | VAL | A | 8 | −13.654 | 31.941 | 14.209 |
| ATOM | 562 | CA | VAL | A | 8 | −12.949 | 30.684 | 14.110 |
| ATOM | 563 | C | VAL | A | 8 | −13.653 | 29.733 | 13.157 |
| ATOM | 564 | O | VAL | A | 8 | −14.759 | 30.016 | 12.687 |
| ATOM | 565 | CB | VAL | A | 8 | −12.814 | 30.038 | 15.492 |
| ATOM | 566 | CG1 | VAL | A | 8 | −11.807 | 30.825 | 16.337 |
| ATOM | 567 | CG2 | VAL | A | 8 | −14.161 | 30.006 | 16.170 |
| ATOM | 568 | N | PRO | A | 9 | −13.003 | 28.601 | 12.828 |
| ATOM | 569 | CA | PRO | A | 9 | −13.593 | 27.615 | 11.918 |
| ATOM | 570 | C | PRO | A | 9 | −14.726 | 26.886 | 12.631 |
| ATOM | 571 | O | PRO | A | 9 | −14.581 | 26.476 | 13.780 |
| ATOM | 572 | CB | PRO | A | 9 | −12.423 | 26.676 | 11.601 |
| ATOM | 573 | CG | PRO | A | 9 | −11.204 | 27.487 | 11.925 |
| ATOM | 574 | CD | PRO | A | 9 | −11.620 | 28.226 | 13.163 |
| ATOM | 575 | N | THR | A | 10 | −15.847 | 26.721 | 11.942 |
| ATOM | 576 | CA | THR | A | 10 | −16.999 | 26.060 | 12.527 |
| ATOM | 577 | C | THR | A | 10 | −17.334 | 24.767 | 11.804 |
| ATOM | 578 | O | THR | A | 10 | −18.097 | 23.943 | 12.303 |
| ATOM | 579 | CB | THR | A | 10 | −18.211 | 27.010 | 12.523 |
| ATOM | 580 | OG1 | THR | A | 10 | −18.491 | 27.445 | 11.185 |
| ATOM | 581 | CG2 | THR | A | 10 | −17.902 | 28.230 | 13.375 |
| ATOM | 582 | N | GLU | A | 11 | −16.750 | 24.586 | 10.627 |
| ATOM | 583 | CA | GLU | A | 11 | −16.980 | 23.377 | 9.848 |
| ATOM | 584 | C | GLU | A | 11 | −15.643 | 22.935 | 9.246 |
| ATOM | 585 | O | GLU | A | 11 | −15.029 | 23.666 | 8.464 |
| ATOM | 586 | CB | GLU | A | 11 | −17.981 | 23.624 | 8.715 |
| ATOM | 587 | CG | GLU | A | 11 | −19.421 | 23.807 | 9.163 |
| ATOM | 588 | CD | GLU | A | 11 | −19.686 | 25.166 | 9.770 |
| ATOM | 589 | OE1 | GLU | A | 11 | −19.478 | 26.175 | 9.073 |
| ATOM | 590 | OE2 | GLU | A | 11 | −20.111 | 25.227 | 10.939 |
| ATOM | 591 | N | LEU | A | 12 | −15.183 | 21.749 | 9.622 |
| ATOM | 592 | CA | LEU | A | 12 | −13.923 | 21.254 | 9.104 |
| ATOM | 593 | C | LEU | A | 12 | −14.062 | 19.912 | 8.386 |
| ATOM | 594 | O | LEU | A | 12 | −15.136 | 19.299 | 8.359 |
| ATOM | 595 | CB | LEU | A | 12 | −12.893 | 21.144 | 10.230 |
| ATOM | 596 | CG | LEU | A | 12 | −12.660 | 22.422 | 11.054 |
| ATOM | 597 | CD1 | LEU | A | 12 | −13.475 | 22.350 | 12.337 |
| ATOM | 598 | CD2 | LEU | A | 12 | −11.181 | 22.586 | 11.399 |
| ATOM | 599 | N | SER | A | 13 | −12.971 | 19.476 | 7.771 |
| ATOM | 600 | CA | SER | A | 13 | −12.964 | 18.218 | 7.046 |
| ATOM | 601 | C | SER | A | 13 | −11.568 | 17.628 | 7.164 |
| ATOM | 602 | O | SER | A | 13 | −10.613 | 18.320 | 7.550 |
| ATOM | 603 | CB | SER | A | 13 | −13.346 | 18.435 | 5.578 |
| ATOM | 604 | OG | SER | A | 13 | −12.404 | 19.261 | 4.923 |
| ATOM | 605 | N | ALA | A | 13 | −11.449 | 16.352 | 6.818 |
| ATOM | 606 | CA | ALA | A | 13 | −10.179 | 15.665 | 6.949 |
| ATOM | 607 | C | ALA | A | 13 | −9.421 | 15.471 | 5.652 |
| ATOM | 608 | O | ALA | A | 13 | −9.941 | 15.720 | 4.563 |
| ATOM | 609 | CB | ALA | A | 13 | −10.413 | 14.306 | 7.626 |
| ATOM | 610 | N | ILE | A | 14 | −8.171 | 15.046 | 5.783 |
| ATOM | 611 | CA | ILE | A | 14 | −7.343 | 14.746 | 4.623 |
| ATOM | 612 | C | ILE | A | 14 | −6.475 | 13.559 | 5.004 |
| ATOM | 613 | O | ILE | A | 14 | −6.212 | 13.316 | 6.183 |
| ATOM | 614 | CB | ILE | A | 14 | −6.401 | 15.916 | 4.183 |
| ATOM | 615 | CG1 | ILE | A | 14 | −5.284 | 16.106 | 5.200 |
| ATOM | 616 | CG2 | ILE | A | 14 | −7.188 | 17.211 | 3.982 |
| ATOM | 617 | CD1 | ILE | A | 14 | −4.173 | 16.973 | 4.696 |
| ATOM | 618 | N | SER | A | 15 | −6.045 | 12.806 | 3.999 |
| ATOM | 619 | CA | SER | A | 15 | −5.187 | 11.662 | 4.242 |
| ATOM | 620 | C | SER | A | 15 | −3.740 | 12.089 | 4.217 |
| ATOM | 621 | O | SER | A | 15 | −3.360 | 13.020 | 3.508 |
| ATOM | 622 | CB | SER | A | 15 | −5.416 | 10.584 | 3.185 |
| ATOM | 623 | OG | SER | A | 15 | −6.667 | 9.971 | 3.401 |
| ATOM | 624 | N | MET | A | 16 | −2.933 | 11.409 | 5.012 |
| ATOM | 625 | CA | MET | A | 16 | −1.518 | 11.700 | 5.047 |
| ATOM | 626 | C | MET | A | 16 | −0.778 | 10.414 | 5.244 |
| ATOM | 627 | O | MET | A | 16 | −1.137 | 9.594 | 6.078 |
| ATOM | 628 | CB | MET | A | 16 | −1.170 | 12.694 | 6.164 |
| ATOM | 629 | CG | MET | A | 16 | −1.848 | 14.042 | 5.974 |
| ATOM | 630 | SD | MET | A | 16 | −1.017 | 15.431 | 6.760 |
| ATOM | 631 | CE | MET | A | 16 | −0.799 | 14.823 | 8.475 |
| ATOM | 632 | N | LEU | A | 17 | 0.238 | 10.231 | 4.426 |
| ATOM | 633 | CA | LEU | A | 17 | 1.077 | 9.065 | 4.508 |
| ATOM | 634 | C | LEU | A | 17 | 2.289 | 9.610 | 5.264 |
| ATOM | 635 | O | LEU | A | 17 | 2.939 | 10.565 | 4.818 |
| ATOM | 636 | CB | LEU | A | 17 | 1.461 | 8.608 | 3.100 |
| ATOM | 637 | CG | LEU | A | 17 | 2.324 | 7.355 | 2.955 |
| ATOM | 638 | CD1 | LEU | A | 17 | 1.553 | 6.145 | 3.445 |
| ATOM | 639 | CD2 | LEU | A | 17 | 2.723 | 7.190 | 1.492 |
| ATOM | 640 | N | TYR | A | 18 | 2.581 | 9.029 | 6.418 |
| ATOM | 641 | CA | TYR | A | 18 | 3.706 | 9.501 | 7.196 |
| ATOM | 642 | C | TYR | A | 18 | 4.434 | 8.333 | 7.835 |
| ATOM | 643 | O | TYR | A | 18 | 4.081 | 7.186 | 7.603 |
| ATOM | 644 | CB | TYR | A | 18 | 3.222 | 10.458 | 8.281 |
| ATOM | 645 | CG | TYR | A | 18 | 2.386 | 9.782 | 9.346 |
| ATOM | 646 | CD1 | TYR | A | 18 | 1.029 | 9.527 | 9.147 |
| ATOM | 647 | CD2 | TYR | A | 18 | 2.961 | 9.379 | 10.550 |
| ATOM | 648 | CE1 | TYR | A | 18 | 0.273 | 8.894 | 10.128 |
| ATOM | 649 | CE2 | TYR | A | 18 | 2.218 | 8.745 | 11.526 |
| ATOM | 650 | CZ | TYR | A | 18 | 0.877 | 8.508 | 11.317 |
| ATOM | 651 | OH | TYR | A | 18 | 0.134 | 7.922 | 12.318 |
| ATOM | 652 | N | LEU | A | 19 | 5.439 | 8.651 | 8.650 |
| ATOM | 653 | CA | LEU | A | 19 | 6.255 | 7.661 | 9.347 |
| ATOM | 654 | C | LEU | A | 19 | 6.210 | 7.946 | 10.847 |
| ATOM | 655 | O | LEU | A | 19 | 6.685 | 8.992 | 11.288 |
| ATOM | 656 | CB | LEU | A | 19 | 7.701 | 7.763 | 8.871 |
| ATOM | 657 | CG | LEU | A | 19 | 7.901 | 7.850 | 7.359 |
| ATOM | 658 | CD1 | LEU | A | 19 | 9.300 | 8.379 | 7.039 |
| ATOM | 659 | CD2 | LEU | A | 19 | 7.669 | 6.482 | 6.748 |
| ATOM | 660 | N | ASP | A | 20 | 5.652 | 7.035 | 11.639 |
| ATOM | 661 | CA | ASP | A | 20 | 5.594 | 7.282 | 13.071 |
| ATOM | 662 | C | ASP | A | 20 | 7.001 | 7.289 | 13.662 |
| ATOM | 663 | O | ASP | A | 20 | 7.985 | 7.185 | 12.932 |
| ATOM | 664 | CB | ASP | A | 20 | 4.714 | 6.244 | 13.786 |
| ATOM | 665 | CG | ASP | A | 20 | 5.292 | 4.837 | 13.752 |
| ATOM | 666 | OD1 | ASP | A | 20 | 6.533 | 4.678 | 13.775 |
| ATOM | 667 | OD2 | ASP | A | 20 | 4.491 | 3.882 | 13.732 |
| ATOM | 668 | N | GLU | A | 21 | 7.089 | 7.413 | 14.981 |
| ATOM | 669 | CA | GLU | A | 21 | 8.375 | 7.451 | 15.669 |
| ATOM | 670 | C | GLU | A | 21 | 9.250 | 6.212 | 15.463 |
| ATOM | 671 | O | GLU | A | 21 | 10.459 | 6.246 | 15.738 |
| ATOM | 672 | CB | GLU | A | 21 | 8.164 | 7.699 | 17.171 |
| ATOM | 673 | CG | GLU | A | 21 | 7.220 | 6.731 | 17.868 |
| ATOM | 674 | CD | GLU | A | 21 | 5.828 | 6.726 | 17.257 |
| ATOM | 675 | OE1 | GLU | A | 21 | 5.347 | 7.810 | 16.856 |
| ATOM | 676 | OE2 | GLU | A | 21 | 5.210 | 5.640 | 17.185 |
| ATOM | 677 | N | ASN | A | 22 | 8.646 | 5.133 | 14.966 |
| ATOM | 678 | CA | ASN | A | 22 | 9.377 | 3.889 | 14.727 |
| ATOM | 679 | C | ASN | A | 22 | 9.682 | 3.647 | 13.249 |
| ATOM | 680 | O | ASN | A | 22 | 10.095 | 2.554 | 12.853 |
| ATOM | 681 | CB | ASN | A | 22 | 8.591 | 2.707 | 15.299 |
| ATOM | 682 | CG | ASN | A | 22 | 8.384 | 2.827 | 16.794 |
| ATOM | 683 | OD1 | ASN | A | 22 | 9.349 | 2.930 | 17.560 |
| ATOM | 684 | ND2 | ASN | A | 22 | 7.125 | 2.819 | 17.221 |
| ATOM | 685 | N | GLU | A | 23 | 9.485 | 4.672 | 12.435 |
| ATOM | 686 | CA | GLU | A | 23 | 9.749 | 4.558 | 11.015 |
| ATOM | 687 | C | GLU | A | 23 | 8.790 | 3.603 | 10.299 |
| ATOM | 688 | O | GLU | A | 23 | 9.145 | 2.996 | 9.292 |
| ATOM | 689 | CB | GLU | A | 23 | 11.203 | 4.129 | 10.784 |
| ATOM | 690 | CG | GLU | A | 23 | 12.232 | 5.210 | 11.082 |
| ATOM | 691 | CD | GLU | A | 23 | 12.072 | 6.410 | 10.166 |
| ATOM | 692 | OE1 | GLU | A | 23 | 12.108 | 6.218 | 8.928 |
| ATOM | 693 | OE2 | GLU | A | 23 | 11.907 | 7.541 | 10.677 |
| ATOM | 694 | N | LYS | A | 24 | 7.580 | 3.459 | 10.826 |
| ATOM | 695 | CA | LYS | A | 24 | 6.583 | 2.624 | 10.175 |
| ATOM | 696 | C | LYS | A | 24 | 5.815 | 3.540 | 9.228 |
| ATOM | 697 | O | LYS | A | 24 | 5.553 | 4.692 | 9.552 |
| ATOM | 698 | CB | LYS | A | 24 | 5.602 | 2.039 | 11.182 |
| ATOM | 699 | CG | LYS | A | 24 | 6.163 | 0.963 | 12.058 |
| ATOM | 700 | CD | LYS | A | 24 | 5.068 | 0.387 | 12.947 |
| ATOM | 701 | CE | LYS | A | 24 | 5.648 | −0.511 | 14.031 |
| ATOM | 702 | NZ | LYS | A | 24 | 4.577 | −1.091 | 14.886 |
| ATOM | 703 | N | VAL | A | 25 | 5.455 | 3.037 | 8.057 |
| ATOM | 704 | CA | VAL | A | 25 | 4.713 | 3.849 | 7.116 |
| ATOM | 705 | C | VAL | A | 25 | 3.237 | 3.737 | 7.444 |
| ATOM | 706 | O | VAL | A | 25 | 2.657 | 2.659 | 7.383 |
| ATOM | 707 | CB | VAL | A | 25 | 4.969 | 3.396 | 5.681 |
| ATOM | 708 | CG1 | VAL | A | 25 | 4.250 | 4.317 | 4.708 |
| ATOM | 709 | CG2 | VAL | A | 25 | 6.462 | 3.393 | 5.422 |
| ATOM | 710 | N | VAL | A | 25 | 2.637 | 4.864 | 7.800 |
| ATOM | 711 | CA | VAL | A | 25 | 1.231 | 4.916 | 8.170 |
| ATOM | 712 | C | VAL | A | 25 | 0.418 | 5.778 | 7.213 |
| ATOM | 713 | O | VAL | A | 25 | 0.871 | 6.841 | 6.774 |
| ATOM | 714 | CB | VAL | A | 25 | 1.062 | 5.531 | 9.577 |
| ATOM | 715 | CG1 | VAL | A | 25 | −0.341 | 5.253 | 10.115 |
| ATOM | 716 | CG2 | VAL | A | 25 | 2.128 | 5.006 | 10.506 |
| ATOM | 717 | N | LEU | A | 26 | −0.779 | 5.306 | 6.887 |
| ATOM | 718 | CA | LEU | A | 26 | −1.706 | 6.048 | 6.040 |
| ATOM | 719 | C | LEU | A | 26 | −2.862 | 6.358 | 6.992 |
| ATOM | 720 | O | LEU | A | 26 | −3.679 | 5.497 | 7.297 |
| ATOM | 721 | CB | LEU | A | 26 | −2.201 | 5.189 | 4.876 |
| ATOM | 722 | CG | LEU | A | 26 | −3.204 | 5.898 | 3.952 |
| ATOM | 723 | CD1 | LEU | A | 26 | −2.519 | 7.077 | 3.262 |
| ATOM | 724 | CD2 | LEU | A | 26 | −3.755 | 4.925 | 2.929 |
| ATOM | 725 | N | LYS | A | 27 | −2.910 | 7.584 | 7.489 |
| ATOM | 726 | CA | LYS | A | 27 | −3.952 | 7.965 | 8.430 |
| ATOM | 727 | C | LYS | A | 27 | −4.831 | 9.082 | 7.881 |
| ATOM | 728 | O | LYS | A | 27 | −4.374 | 9.924 | 7.103 |
| ATOM | 729 | CB | LYS | A | 27 | −3.305 | 8.409 | 9.738 |
| ATOM | 730 | CG | LYS | A | 27 | −4.265 | 8.720 | 10.859 |
| ATOM | 731 | CD | LYS | A | 27 | −3.509 | 9.382 | 11.994 |
| ATOM | 732 | CE | LYS | A | 27 | −4.397 | 9.654 | 13.186 |
| ATOM | 733 | NZ | LYS | A | 27 | −4.839 | 8.377 | 13.816 |
| ATOM | 734 | N | ASN | A | 28 | −6.098 | 9.078 | 8.279 |
| ATOM | 735 | CA | ASN | A | 28 | −7.045 | 10.095 | 7.843 |
| ATOM | 736 | C | ASN | A | 28 | −7.147 | 11.103 | 8.979 |
| ATOM | 737 | O | ASN | A | 28 | −7.815 | 10.842 | 9.969 |
| ATOM | 738 | CB | ASN | A | 28 | −8.408 | 9.455 | 7.560 |
| ATOM | 739 | CG | ASN | A | 28 | −9.518 | 10.485 | 7.364 |
| ATOM | 740 | OD1 | ASN | A | 28 | −9.360 | 11.444 | 6.597 |
| ATOM | 741 | ND2 | ASN | A | 28 | −10.653 | 10.288 | 8.050 |
| ATOM | 742 | N | TYR | A | 29 | −6.473 | 12.241 | 8.837 |
| ATOM | 743 | CA | TYR | A | 29 | −6.470 | 13.278 | 9.869 |
| ATOM | 744 | C | TYR | A | 29 | −7.680 | 14.204 | 9.836 |
| ATOM | 745 | O | TYR | A | 29 | −7.928 | 14.870 | 8.835 |
| ATOM | 746 | CB | TYR | A | 29 | −5.197 | 14.130 | 9.768 |
| ATOM | 747 | CG | TYR | A | 29 | −3.913 | 13.420 | 10.155 |
| ATOM | 748 | CD1 | TYR | A | 29 | −3.378 | 12.394 | 9.363 |
| ATOM | 749 | CD2 | TYR | A | 29 | −3.220 | 13.792 | 11.306 |
| ATOM | 750 | CE1 | TYR | A | 29 | −2.181 | 11.765 | 9.713 |
| ATOM | 751 | CE2 | TYR | A | 29 | −2.032 | 13.171 | 11.665 |
| ATOM | 752 | CZ | TYR | A | 29 | −1.516 | 12.167 | 10.869 |
| ATOM | 753 | OH | TYR | A | 29 | −0.319 | 11.603 | 11.231 |
| ATOM | 754 | N | GLN | A | 30 | −8.408 | 14.254 | 10.950 |
| ATOM | 755 | CA | GLN | A | 30 | −9.606 | 15.088 | 11.089 |
| ATOM | 756 | C | GLN | A | 30 | −9.287 | 16.541 | 11.431 |
| ATOM | 757 | O | GLN | A | 30 | −8.213 | 16.847 | 11.925 |
| ATOM | 758 | CB | GLN | A | 30 | −10.500 | 14.541 | 12.202 |
| ATOM | 759 | CG | GLN | A | 30 | −10.807 | 13.074 | 12.104 |
| ATOM | 760 | CD | GLN | A | 30 | −11.744 | 12.749 | 10.969 |
| ATOM | 761 | OE1 | GLN | A | 30 | −11.900 | 11.582 | 10.602 |
| ATOM | 762 | NE2 | GLN | A | 30 | −12.385 | 13.773 | 10.405 |
| ATOM | 763 | N | ASP | A | 31 | −10.238 | 17.430 | 11.173 |
| ATOM | 764 | CA | ASP | A | 31 | −10.085 | 18.851 | 11.495 |
| ATOM | 765 | C | ASP | A | 31 | −8.867 | 19.494 | 10.842 |
| ATOM | 766 | O | ASP | A | 31 | −8.195 | 20.335 | 11.442 |
| ATOM | 767 | CB | ASP | A | 31 | −10.000 | 19.025 | 13.019 |
| ATOM | 768 | CG | ASP | A | 31 | −11.247 | 18.520 | 13.742 |
| ATOM | 769 | OD1 | ASP | A | 31 | −12.349 | 18.587 | 13.155 |
| ATOM | 770 | OD2 | ASP | A | 31 | −11.130 | 18.069 | 14.908 |
| ATOM | 771 | N | MET | A | 32 | −8.582 | 19.113 | 9.606 |
| ATOM | 772 | CA | MET | A | 32 | −7.426 | 19.662 | 8.918 |
| ATOM | 773 | C | MET | A | 32 | −7.780 | 20.808 | 7.987 |
| ATOM | 774 | O | MET | A | 32 | −7.021 | 21.768 | 7.855 |
| ATOM | 775 | CB | MET | A | 32 | −6.741 | 18.559 | 8.125 |
| ATOM | 776 | CG | MET | A | 32 | −6.037 | 17.540 | 8.980 |
| ATOM | 777 | SD | MET | A | 32 | −4.559 | 18.231 | 9.714 |
| ATOM | 778 | CE | MET | A | 32 | −3.406 | 18.041 | 8.318 |
| ATOM | 779 | N | VAL | A | 33 | −8.942 | 20.707 | 7.351 |
| ATOM | 780 | CA | VAL | A | 33 | −9.381 | 21.719 | 6.401 |
| ATOM | 781 | C | VAL | A | 33 | −10.579 | 22.536 | 6.858 |
| ATOM | 782 | O | VAL | A | 33 | −11.586 | 21.988 | 7.292 |
| ATOM | 783 | CB | VAL | A | 33 | −9.701 | 21.056 | 5.027 |
| ATOM | 784 | CG1 | VAL | A | 33 | −10.388 | 22.040 | 4.087 |
| ATOM | 785 | CG2 | VAL | A | 33 | −8.423 | 20.561 | 4.412 |
| ATOM | 786 | N | VAL | A | 34 | −10.465 | 23.855 | 6.739 |
| ATOM | 787 | CA | VAL | A | 34 | −11.553 | 24.745 | 7.113 |
| ATOM | 788 | C | VAL | A | 34 | −12.610 | 24.835 | 6.016 |
| ATOM | 789 | O | VAL | A | 34 | −12.373 | 25.403 | 4.950 |
| ATOM | 790 | CB | VAL | A | 34 | −11.057 | 26.176 | 7.407 |
| ATOM | 791 | CG1 | VAL | A | 34 | −12.240 | 27.097 | 7.601 |
| ATOM | 792 | CG2 | VAL | A | 34 | −10.222 | 26.186 | 8.655 |
| ATOM | 793 | N | GLU | A | 35 | −13.779 | 24.266 | 6.282 |
| ATOM | 794 | CA | GLU | A | 35 | −14.870 | 24.311 | 5.321 |
| ATOM | 795 | C | GLU | A | 35 | −15.702 | 25.565 | 5.572 |
| ATOM | 796 | O | GLU | A | 35 | −16.011 | 26.303 | 4.645 |
| ATOM | 797 | CB | GLU | A | 35 | −15.733 | 23.054 | 5.447 |
| ATOM | 798 | CG | GLU | A | 35 | −14.969 | 21.782 | 5.128 |
| ATOM | 799 | CD | GLU | A | 35 | −14.515 | 21.732 | 3.676 |
| ATOM | 800 | OE1 | GLU | A | 35 | −15.036 | 22.519 | 2.858 |
| ATOM | 801 | OE2 | GLU | A | 35 | −13.643 | 20.902 | 3.344 |
| ATOM | 802 | N | GLY | A | 36 | −16.053 | 25.811 | 6.829 |
| ATOM | 803 | CA | GLY | A | 36 | −16.834 | 26.990 | 7.152 |
| ATOM | 804 | C | GLY | A | 36 | −16.322 | 27.785 | 8.341 |
| ATOM | 805 | O | GLY | A | 36 | −15.671 | 27.249 | 9.237 |
| ATOM | 806 | N | CYS | A | 37 | −16.616 | 29.077 | 8.360 |
| ATOM | 807 | CA | CYS | A | 37 | −16.177 | 29.917 | 9.466 |
| ATOM | 808 | C | CYS | A | 37 | −17.347 | 30.502 | 10.249 |
| ATOM | 809 | O | CYS | A | 37 | −18.467 | 30.628 | 9.741 |
| ATOM | 810 | CB | CYS | A | 37 | −15.301 | 31.058 | 8.967 |
| ATOM | 811 | SG | CYS | A | 37 | −13.785 | 30.558 | 8.098 |
| ATOM | 812 | N | GLY | A | 38 | −17.079 | 30.867 | 11.494 |
| ATOM | 813 | CA | GLY | A | 38 | −18.129 | 31.430 | 12.309 |
| ATOM | 814 | C | GLY | A | 38 | −17.622 | 32.176 | 13.518 |
| ATOM | 815 | O | GLY | A | 38 | −16.425 | 32.235 | 13.791 |
| ATOM | 816 | N | CYS | A | 39 | −18.564 | 32.753 | 14.245 |
| ATOM | 817 | CA | CYS | A | 39 | −18.253 | 33.505 | 15.439 |
| ATOM | 818 | C | CYS | A | 39 | −18.543 | 32.670 | 16.665 |
| ATOM | 819 | O | CYS | A | 39 | −19.620 | 32.084 | 16.794 |
| ATOM | 820 | CB | CYS | A | 39 | −19.068 | 34.779 | 15.442 |
| ATOM | 821 | SG | CYS | A | 39 | −18.539 | 35.799 | 14.053 |

[0254] Structure coordinates: As used herein, unless indicated otherwise or contradictory in context, the “structure coordinates” refers to Cartesian coordinates derived from mathematical equations related to the patterns obtained on diffraction of a monochromatic beam of X-rays by the atoms (scattering centers) of a protein, protein complex or peptide in crystal form. The diffraction data are used to calculate an electron density map of the repeating unit of the crystal. The electron density maps are then used to establish the positions of the individual atoms of the molecule or molecular complex.

[0255] STAMP: STAMP (Structural Alignment of Multiple Proteins) is a tool for aligning protein sequences based on a three-dimensional structure. Its algorithm minimizes the Ca distance between aligned residues of each molecule by applying globally optimal rigid-body rotations and translations. This program provides some information on the equivalence of the residues between the selected models.

[0256] SCWRL: This program predicts and optimizes the protein side-chain conformations. It is using the backbone of a support protein and a backbone-dependent rotamer library. The possible conformations are explored by minimizing the steric hindrance between the side-chains and between the side-chains and the backbone.

[0257] GROMACS: GROMACS is a molecular dynamics package. The “gmx rms” tool included in GROMACS compares two structures by computing the root mean square deviation (RMSD).

[0258] For the avoidance of doubts, the term “pharmaceutical association” or “pharmaceutical combination” as used herein refers to a compound or substance comprising at least two components, i.e. a (modified) GFR-binding compound and a bioactive carrier, linked, connected or bound through at least one covalent or non-covalent link, connection or bond.

[0259] In one aspect, the present disclosure provides for non-mutagenic extracellular therapies having the ability to direct cell fate. It is thus possible to convert or recode a neoplastic cell by modifying its surrounding extracellular micro-environment, in-vitro, ex-vivo or in-vivo, so that the cell operates self-recovery or self-healing and a subject possessing such a neoplastic cell may be protected from a neoplastic disease.

[0260] In one example, a neoplastic cell may operate self-recovery or self-healing e.g. by inducing a quiescence state so that the neoplastic cell may remain inactive or dormant for seconds, minutes, hours, days, weeks, months or years, in particular, will never resume neoplasia; and/or by preventing, reducing or suppressing cell division and/or cell proliferation, preferably uncontrolled cell division and/or cell proliferation of said neoplastic cell; and/or by regulating or promoting anti-mitogen activity and/or tumour suppressor pathways and/or anti-oncogenic activity in said neoplastic cell; and/or by inducing cytostaticity and not cytotoxicity in the neoplastic cell; and/or by inducing differentiation; and/or by regulating and/or modulating the adhesion or interactions between the cell and its micro-environment (i.e. the surrounding ECM) so as activate, reactivate or restore cell adhesion checkpoints in said neoplastic cell.

[0261] In one aspect, the present disclosure provides a pharmaceutical association or combination having the ability to convert or recode, extracellularly, a neoplastic cell, in-vitro, ex-vivo or in-vivo, so that it may be used in the treatment, prevention and/or diagnostic of a neoplastic disease, said association comprising at least one growth factor receptor-binding compound which activates at least one growth factor receptor of a neoplastic cell and at least one bioactive carrier which forms at least one covalent or non-covalent association with said at least one growth factor receptor-binding compound, and wherein said association reduces or suppresses (i) the gene expression of at least one cyclin D in the neoplastic cell and/or (ii) reduces or suppresses the formation of at least one complex formed between said at least one cyclin D and at least one of cyclin dependent-kinase (CDK) 4 or 6 in the neoplastic cell.

### II. Growth Factor Receptor-Binding Compounds

[0262] In one aspect, the present disclosure provides for pharmaceutical associations or combinations comprising at least one growth factor receptor-binding compound as defined herein and a bioactive carrier as defined herein, said associations or combinations having the ability to convert or recode a neoplastic cell into a non-neoplastic cell.

[0263] As used herein, the term “Growth factor receptor-binding compound” or “GFR-binding compound” refers to an exogenous or endogenous compound, molecule or substance (a) having an (binding) affinity for a growth factor receptor as defined herein, (b) comprising the ability to associate or combine with a bioactive carrier as defined herein, and (c) comprising the ability to activate a growth factor receptor as defined herein.

[0264] There are many ways to test, measure and present the binding affinity of a given substance for a given receptor, but for the purpose of the present disclosure, and for the avoidance of any doubts, the (binding) affinity values of a given GFR-binding compound to a given GFR are provided using the method of fluorescence anisotropy. In this method, a GFR-binding compound is fluorescently labelled using technics well established in the art. Binding of the resulting labelled compound to a growth factor receptor results in a fluctuation of fluorescence anisotropy which is used to construct an affinity binding curve from which the GFR-binding compound binding affinity value is derived. Using this technique, binding affinity values are given in the form of dissociation constants Kd. In certain embodiments, GFR-binding compounds of the present disclosure have Kd values as measured by fluorescence anisotropy of more than 1 (one) picomolar (pM). In certain embodiments, GFR-binding compounds of the present disclosure have Kd values as measured by fluorescence anisotropy of more than 1 (one) nanomolar (nM). In certain embodiments, GFR-binding compounds of the present disclosure have Kd values as measured by fluorescence anisotropy of more than 10 (ten) nanomolar (nM). In certain embodiments, GFR-binding compounds of the present disclosure have Kd values as measured by fluorescence anisotropy of more than 100 (one hundred) nanomolar (nM). In certain embodiments, GFR-binding compounds of the present disclosure have Kd values as measured by fluorescence anisotropy of more than 1 (one) micromolar (μM). In certain embodiments, GFR-binding compounds of the present disclosure have Kd values as measured by fluorescence anisotropy of more than 10 (ten) micromolar (μM). In certain embodiments, GFR-binding compounds of the present disclosure have Kd values as measured by fluorescence anisotropy of more than 100 (one hundred) micromolar (μM).

[0265] There are many ways to test and measure the ability of a given substance to activate a given receptor, but for the purpose of the present disclosure, and for the avoidance of any doubts, a given GFR-binding compound activates a growth factor receptor if it induces growth factor receptor phosphorylation as measured by the western blot method. There are many distinct phosphorylation sites on growth factor receptors and they may widely vary according to the type of growth factor receptor as reported in the published scientific article from Mark A. Lemmon and Joseph Schlessinger, “Cell Signaling by Receptor Tyrosine Kinases”, Cell. 2010; 141(7), 1117-1134, which is hereby incorporated by reference in its entirety. A GFR-binding compound is said to possess the ability to associate or combine with a bioactive carrier if it comprises a functional chemical element, function or group allowing for the covalent or non-covalent assembly of the GFR-binding compound and the bioactive carrier. Such a functional chemical element, function or group, also referred to as a bioactive carrier-affinity-containing group or bioactive carrier-high-affinity-containing group, include, but is not limited to, a thiol-containing compound, a cysteine-containing compound, a cysteine, or a GTPGP or a WWFWG peptide fragment.

[0266] Growth factor receptor: As used herein, unless indicated otherwise or contradictory in context, the term “growth factor receptor” or “GFR” is a receptor which binds to growth factors which are naturally occurring substances capable of stimulating, for instance, cellular growth, proliferation, healing, and cellular differentiation. Suitable as growth factor receptors for implementing embodiments of the present invention include epidermal growth factor receptors (EGFR), fibroblast growth factor receptors (FGFR), vascular endothelial growth factor receptors (VEGFR), nerve growth factor receptors (NGFR), Insulin receptor family, Trk receptor family, Eph receptor family, AXL receptor family, LTK receptor family, TIE receptor family, ROR receptor family, DDR receptor family, RET receptor family, KLG receptor family, RYK receptor family, MuSK receptor family, hepatocyte growth factor receptors (HGFR), somatomedin or insulin-like growth factor receptors (SGFR), platelet-derived growth factor receptors (PDGFR), transforming growth factor beta (TGF-β) superfamily proteins such as AMH, ARTN, BMP10, BMP15, BMP2, BMP3, BMP4, BMP5, BMP6, BMP7, BMP8A, BMP8B, GDF1, GDF10, GDF11, GDF15, GDF2, GDF3, GDF3A, GDF5, GDF6, GDF7, GDF8, GDF9, GDNF, INHA, INHBA, INHBB, INHBC, INHBE, LEFTY1, LEFTY2, MSTN, NODAL, NRTN, PSPN, TGFB1, TGFB2 and TGFB3, and any combination thereof.

[0267] Growth factor: As used herein, unless indicated otherwise or contradictory in context, the term “growth factor” refers to any substance(s) having the ability to bind to a growth factor receptor and produce (a) biological effect(s) or reaction(s), such as promoting the growth of tissues, by activating such a growth factor receptor. Exemplary growth factors include, but are not limited to, platelet-derived growth factor (PDGF), platelet-derived angiogenesis factor (PDAF), vascular endotheial growth factor (VEGF), platelet-derived epidermal growth factor (PDEGF), transforming growth factor beta (TGF-β), transforming growth factor A (TGF-A), epidermal growth factor (EGF), fibroblast growth factor (FGF), acidic fibroblast growth factor (FGF-A), basic fibroblast growth factor (FGF-B), insulin-like growth factors 1 and 2 (IGF-I and IGF-2), keratinocyte growth factor (KGF), tumor necrosis factor (TNF), fibroblast growth factor (FGF) and interleukin-1 (IL-I), Keratinocyte Growth Factor-2 (KGF-2), and combinations thereof.

[0268] Activation of growth factor receptors: As used herein, unless indicated otherwise or contradictory in context, the term “activating” or “activation of”, when used in relation to a growth factor receptor, refers to the phosphorylation of the tyrosine kinase domain of such a growth factor receptor.

[0269] In one aspect, the present disclosure provides a GFR-binding compound, as part of a pharmaceutical association, combination or composition as defined herein, as an active principle for use in methods and uses described herein.

[0270] In one particular example, the growth factor receptor involved in the interaction with said GFR-binding compound is an epidermal growth factor receptor. In one particular example, the growth factor receptor involved in the interaction with said GFR-binding compound is a fibroblast growth factor receptor. In one particular example, the growth factor receptor involved in the interaction with said GFR-binding compound is a vascular endothelial growth factor receptor. In one particular example, the growth factor receptor involved in the interaction with said GFR-binding compound is a nerve growth factor receptor. In one particular example, the growth factor receptor involved in the interaction with said GFR-binding compound is a hepatocyte growth factor receptor. In one particular example, the growth factor receptor involved in the interaction with said GFR-binding compound is a somatomedin or insulin-like growth factor receptor. In one particular example, the growth factor receptor involved in the interaction with said GFR-binding compound is a platelet-derived growth factor receptor. In one particular example, the growth factor receptor involved in the interaction with said GFR-binding compound is a protein from the transforming growth factor beta (TGF-β) superfamily.

[0271] In one particular example, the growth factor receptor(s) involved in the interaction with said GFR-binding compound is (are) preferably selected from epidermal growth factor receptors, fibroblast growth factor receptors, vascular endothelial growth factor receptors, nerve growth factor receptors, hepatocyte growth factor receptors, somatomedin or insulin-like growth factor receptors, platelet-derived growth factor receptors, and transforming growth factor beta (TGF-β) superfamily proteins.

[0272] In one particular example, the gene expression of cyclin-D, in a neoplastic cell, is reduced, down-regulated, inhibited or suppressed during phase G1 of the cell cycle. In one particular example, the gene expression of cyclin-D is reduced or suppressed for substantially at least the entire duration of phase G1 of a cell cycle. In one particular example, the gene expression of cyclin-D is reduced by at least 20%. In one particular example, the gene expression of cyclin-D is reduced by at least 30%. In one particular example, the gene expression of cyclin-D is reduced by at least 40%. In one particular example, the gene expression of cyclin-D is reduced by at least 50%. In one particular example, the gene expression of cyclin-D is reduced by at least 60%. In one particular example, the gene expression of cyclin-D is reduced by at least 70%. In one particular example, the gene expression of cyclin-D is reduced by at least 80%. At least 40% is particularly preferred. Reduction of cyclin D gene expression is assessed with respect to the wild-type gene expression of cyclin-D and is measured by Quantitative Real Time Polymerase Chain Reaction (Q-PCR or RT-PCR) by (i) extracting RNA from the treated cells, (ii) converting the extracted RNA into the corresponding cDNA, (iii) subjecting the obtained cDNA to a real-time PCR amplification, (iv) analysing the data obtained from the real-time PCR amplification and comparing them with the data obtained by the ΔΔCt method, and (v) comparing the obtained values to the wild-type value.

[0273] In more details, Quantitative Real Time Polymerase Chain Reaction is carried out by (i) extracting RNA from the treated cells using the RNeasy total RNA kit from Qiagen®, (ii) converting the extracted RNA into the corresponding cDNA using a reverse transcription reaction (Gibco Brl®) and random primers from Invitrogen®, (iii) subjecting the obtained cDNA to a real-time PCR amplification in the presence of SYBR green reagents from Bio-Rad® in a thermocycler (iCycler, Biorad®), (iv) analysing the data obtained from the real-time PCR amplification with the iCycler IQ™ software following the iCycler iQ™ Real-Time PCR Detection System's instruction manual (Catalog Number 170-8740) and using weighted mean as a digital filter, PCR Baseline Subtracted Curve Fit as the analysis mode, FAM/490 as a fluorophore, the automatic calculation of the baseline cycles and the threshold, and the default settings for all other parameters, and comparing them with the data obtained by the ΔΔCt method as reported and described in Livak, K. J. and T. D. Schmittgen. “Analysis of relative gene expression data using real-time quantitative PCR and the 2(-Delta Delta C(T)) Method”, Methods (2001) 25(4): 402-408, hereby incorporated by reference in its entirety, and (v) comparing the obtained values to the wild-type value.

[0274] In one particular example, the gene expression of cyclin-D is maintained at such a reduced level (at least 20%, at least 30%, at least 40%, at least 50%, at least 60%, at least 70%, or at least 80%) during phase G1 of a cell cycle of the treated neoplastic cell. In one example, the gene expression of cyclin-D is maintained at such a reduced level during substantially the entire duration of the G1 phase. In one example, the gene expression of cyclin-D is maintained at such a reduced level during substantially the entire duration of the G1 and S phases. In one example, the gene expression of cyclin-D is maintained at such a reduced level during substantially the entire duration of the G1, S and G2 phases. In one example, the gene expression of cyclin-D is maintained at such a reduced level during substantially the entire duration of the G1, S, G2 and M phases i.e. during substantially the entire duration of a cell cycle of a treated neoplastic cell. Reduction of the gene expression level of cyclin D during substantially the entire duration of G1 is preferred.

[0275] As used herein, unless indicated otherwise or contradictory in context, the term “wild-type expression” of a protein or a gene, refers to the expression of a protein or a gene observed in normal, standard biological conditions i.e., in the present disclosure, without the presence of, or prior to the provision or administration to a neoplastic cell of a pharmaceutical association, combination or composition as defined herein. In-vitro, ex-vivo or in-vivo natural expression level of a protein or a gene in a neoplastic cell may thus be used as a comparative data (or control) to assess and quantify the effect of the presence or administration of a pharmaceutical association, combination or composition as defined herein on the expression level of such a protein or gene in that cell.

[0276] Suitable GFR-binding compounds for implementing certain embodiments of the invention include, without being limited to, linear (i.e. non-cyclic) GFR-binding compounds such as peptides, or variants or analogs thereof, or peptidomimetics, and cyclic GFR-binding compounds such as cyclic peptides, or variants or analogs thereof, or cyclic peptidomimetics.

[0277] II.1. Non-Cyclic GFR-Binding Compounds

[0278] In one example, said (non-cyclic) GFR-binding compound has a molecular weight of less than 8,000 Daltons. In one particular example, said (non-cyclic) GFR-binding compound has a molecular weight of less than 6,000 Daltons. In one particular example, said (non-cyclic) GFR-binding compound has a molecular weight comprised between 2,000 and 8,000 Daltons. In one particular example, said (non-cyclic) GFR-binding compound has a molecular weight comprised between 2,000 and 6,000 Daltons. Between 2,000 and 6,000 Daltons is particularly preferred.

[0279] In one particular example, said GFR-binding compound is a (non-cyclic) peptide, a variant or analog thereof, as defined herein, with (exclusively consisting of, or constituted of) between 20 and 60 (in particular between 20 and 50, and more particularly, between 20 and 45) amino acids, having growth factor receptor-binding capability or capabilities.

[0280] In one particular example, said GFR-binding compound is a (non-cyclic) peptidomimetic as defined herein, having growth factor receptor-binding capability or capabilities, comprising (consecutively or non consecutively) between 20-60 amino acids, in particular between 20-50 or 20-45 amino acids, and more particularly, between 23-60, 23-50 or 23-45 amino acids; wherein said GFR-binding compound has a molecular weight comprised between 2,000 and 8,000 Daltons (in particular, between 2,000 and 6,000 Da).

[0281] In one particular example, said GFR-binding compound is a peptidomimetic as defined herein, having growth factor receptor-binding capability or capabilities, comprising (consecutively or non consecutively) between 20-60 amino acids, in particular between 20-50 or 20-45 amino acids, and more particularly, between 23-60, 23-50 or 23-45 amino acids; and containing at least one peptide portion or fragment with between 5-20 amino acids (in particular containing two peptide portions or fragments, each of which with between 5-20 amino acids); wherein said GFR-binding compound has a molecular weight comprised between 2,000 and 8,000 Daltons (in particular, between 2,000 and 6,000 Da).

[0282] In one particular example, said GFR-binding compound is a peptide, a variant or analog thereof, or a peptidomimetic as defined herein, with (comprising, or exclusively consisting of, or constituted of) between 20 and 60 (in particular between 20 and 50, and more particularly, between 20 and 45) amino acids, having growth factor receptor-binding capability or capabilities, comprising a peptide with four amino acids (PEP1) and a peptide with five amino acids (PEP2).

[0283] In one particular example, said GFR-binding compound is a peptide, a variant or analog thereof, or a peptidomimetic as defined herein, with (comprising, or exclusively consisting of, or constituted of) between 20 and 60 (in particular between 20 and 50, and more particularly, between 20 and 45) amino acids, comprising a peptide with eight amino acids (PEP12) and a peptide with five amino acids (PEP2).

[0284] In one particular example, said GFR-binding compound is a peptide, a variant or analog thereof, or a peptidomimetic as defined herein, with (comprising, or exclusively consisting of, or constituted of) between 20 and 60 (in particular between 20 and 50, and more particularly, between 20 and 45) amino acids, comprising a peptide with four amino acids (PEP1) and a peptide with five amino acids (PEP2); wherein said GFR-binding compound further comprises a peptide with three amino acids (PEP3) and a peptide with three amino acids (PEP4).

[0285] In one particular example, said GFR-binding compound is a peptide, a variant or analog thereof, or a peptidomimetic as defined herein, with (comprising, or exclusively consisting of, or constituted of) between 20 and 60 (in particular between 20 and 50, and more particularly, between 20 and 45) amino acids, comprising a peptide with eight amino acids (PEP12) and a peptide with five amino acids (PEP2); wherein said GFR-binding compound further comprises a peptide with three amino acids (PEP3) and a peptide with three amino acids (PEP4).

[0286] In one particular example, said GFR-binding compound is a peptide, a variant or analog thereof, or a peptidomimetic as defined herein, with (comprising, or exclusively consisting of, or constituted of) between 20 and 60 (in particular between 20 and 50, and more particularly, between 20 and 45) amino acids, comprising a peptide with four amino acids (PEP1) and a peptide with five amino acids (PEP2); wherein said GFR-binding compound further comprises a peptide with five amino acids (PEP5) and a peptide with between five and seven amino acids (PEP6).

[0287] In one particular example, said GFR-binding compound is a peptide, a variant or analog thereof, or a peptidomimetic as defined herein, with (comprising, or exclusively consisting of, or constituted of) between 20 and 60 (in particular between 20 and 50, and more particularly, between 20 and 45) amino acids, comprising a peptide with eight amino acids (PEP12) and a peptide with five amino acids (PEP2); wherein said GFR-binding compound further comprises a peptide with five amino acids (PEP5) and a peptide with between five and seven amino acids (PEP6).

[0288] In one particular example, said GFR-binding compound is a peptide, a variant or analog thereof, or a peptidomimetic as defined herein, with (comprising, or exclusively consisting of, or constituted of) between 20 and 60 (in particular between 20 and 50, and more particularly, between 20 and 45) amino acids, comprising a peptide with four amino acids (PEP1) and a peptide with five amino acids (PEP2); wherein said GFR-binding compound further comprises a peptide with between six and twelve amino acids (PEP9) and a peptide with between six and eleven amino acids (PEP10).

[0289] In one particular example, said GFR-binding compound is a peptide, a variant or analog thereof, or a peptidomimetic as defined herein, with (comprising, or exclusively consisting of, or constituted of) between 20 and 60 (in particular between 20 and 50, and more particularly, between 20 and 45) amino acids, comprising a peptide with eight amino acids (PEP12) and a peptide with five amino acids (PEP2); wherein said GFR-binding compound further comprises a peptide with between six and twelve amino acids (PEP9) and a peptide with between six and eleven amino acids (PEP10).

[0290] In one particular example, said GFR-binding compound is a peptide, a variant or analog thereof, or a peptidomimetic as defined herein, with (comprising, or exclusively consisting of, or constituted of) between 20 and 60 (in particular between 20 and 50, and more particularly, between 20 and 45) amino acids, comprising a peptide with four amino acids (PEP1) and a peptide with five amino acids (PEP2); wherein said GFR-binding compound further comprises a peptide with three amino acids (PEP3) and a peptide with between five and seven amino acids (PEP6).

[0291] In one particular example, said GFR-binding compound is a peptide, a variant or analog thereof, or a peptidomimetic as defined herein, with (comprising, or exclusively consisting of, or constituted of) between 20 and 60 (in particular between 20 and 50, and more particularly, between 20 and 45) amino acids, comprising a peptide with eight amino acids (PEP12) and a peptide with five amino acids (PEP2); wherein said GFR-binding compound further comprises a peptide with three amino acids (PEP3) and a peptide with between five and seven amino acids (PEP6).

[0292] In one particular example, said GFR-binding compound is a peptide, a variant or analog thereof, or a peptidomimetic as defined herein, with (comprising, or exclusively consisting of, or constituted of) between 20 and 60 (in particular between 20 and 50, and more particularly, between 20 and 45) amino acids, comprising a peptide with four amino acids (PEP1) and a peptide with five amino acids (PEP2); wherein said GFR-binding compound further comprises a peptide with three amino acids (PEP3) and a peptide with between six and eleven amino acids (PEP10).

[0293] In one particular example, said GFR-binding compound is a peptide, a variant or analog thereof, or a peptidomimetic as defined herein, with (comprising, or exclusively consisting of, or constituted of) between 20 and 60 (in particular between 20 and 50, and more particularly, between 20 and 45) amino acids, comprising a peptide with eight amino acids (PEP12) and a peptide with five amino acids (PEP2); wherein said GFR-binding compound further comprises a peptide with three amino acids (PEP3) and a peptide with between six and eleven amino acids (PEP10).

[0294] In one particular example, said GFR-binding compound is a peptide, a variant or analog thereof, or a peptidomimetic as defined herein, with (comprising, or exclusively consisting of, or constituted of) between 20 and 60 (in particular between 20 and 50, and more particularly, between 20 and 45) amino acids, comprising a peptide with four amino acids (PEP1) and a peptide with five amino acids (PEP2); wherein said GFR-binding compound further comprises a peptide with five amino acids (PEP5) and a peptide with three amino acids (PEP4).

[0295] In one particular example, said GFR-binding compound is a peptide, a variant or analog thereof, or a peptidomimetic as defined herein, with (comprising, or exclusively consisting of, or constituted of) between 20 and 60 (in particular between 20 and 50, and more particularly, between 20 and 45) amino acids, comprising a peptide with four amino acids (PEP12) and a peptide with five amino acids (PEP2); wherein said GFR-binding compound further comprises a peptide with five amino acids (PEP5) and a peptide with three amino acids (PEP4).

[0296] In one particular example, said GFR-binding compound is a peptide, a variant or analog thereof, or a peptidomimetic as defined herein, with (comprising, or exclusively consisting of, or constituted of) between 20 and 60 (in particular between 20 and 50, and more particularly, between 20 and 45) amino acids, comprising a peptide with four amino acids (PEP1) and a peptide with five amino acids (PEP2); wherein said GFR-binding compound further comprises a peptide with between six and twelve amino acids (PEP9) and a peptide with three amino acids (PEP4).

[0297] In one particular example, said GFR-binding compound is a peptide, a variant or analog thereof, or a peptidomimetic as defined herein, with (comprising, or exclusively consisting of, or constituted of) between 20 and 60 (in particular between 20 and 50, and more particularly, between 20 and 45) amino acids, comprising a peptide with four amino acids (PEP12) and a peptide with five amino acids (PEP2); wherein said GFR-binding compound further comprises a peptide with between six and twelve amino acids (PEP9) and a peptide with three amino acids (PEP4).

[0298] In one particular example, said GFR-binding compound is a peptide, a variant or analog thereof, or a peptidomimetic as defined herein, with (comprising, or exclusively consisting of, or constituted of) between 20 and 60 (in particular between 20 and 50, and more particularly, between 20 and 45) amino acids, comprising a peptide with four amino acids (PEP1) and a peptide with five amino acids (PEP2); wherein said GFR-binding compound further comprises a peptide with five amino acids (PEP5) and a peptide with between six and eleven amino acids (PEP10).

[0299] In one particular example, said GFR-binding compound is a peptide, a variant or analog thereof, or a peptidomimetic as defined herein, with (comprising, or exclusively consisting of, or constituted of) between 20 and 60 (in particular between 20 and 50, and more particularly, between 20 and 45) amino acids, comprising a peptide with four amino acids (PEP12) and a peptide with five amino acids (PEP2); wherein said GFR-binding compound further comprises a peptide with five amino acids (PEP5) and a peptide with between six and eleven amino acids (PEP10).

[0300] In one particular example, said GFR-binding compound is a peptide, a variant or analog thereof, or a peptidomimetic as defined herein, with (comprising, or exclusively consisting of, or constituted of) between 20 and 60 (in particular between 20 and 50, and more particularly, between 20 and 45) amino acids, comprising a peptide with four amino acids (PEP1) and a peptide with five amino acids (PEP2); wherein said GFR-binding compound further comprises a peptide with between six and twelve amino acids (PEP9) and a peptide with between five and seven amino acids (PEP6).

[0301] In one particular example, said GFR-binding compound is a peptide, a variant or analog thereof, or a peptidomimetic as defined herein, with (comprising, or exclusively consisting of, or constituted of) between 20 and 60 (in particular between 20 and 50, and more particularly, between 20 and 45) amino acids, comprising a peptide with four amino acids (PEP12) and a peptide with five amino acids (PEP2); wherein said GFR-binding compound further comprises a peptide with between six and twelve amino acids (PEP9) and a peptide with between five and seven amino acids (PEP6).

[0302] In one particular example, said GFR-binding compound is a peptide, a variant or analog thereof, or a peptidomimetic as defined herein, with (comprising, or exclusively consisting of, or constituted of) between 20 and 60 (in particular between 20 and 50, and more particularly, between 20 and 45) amino acids, comprising a peptide with four amino acids (PEP1) and a peptide with five amino acids (PEP2); wherein said GFR-binding compound further comprises a peptide with three amino acids (PEP3), an amino acid or a peptide with between two and seven amino acids (PEP7), and a peptide with three amino acids (PEP4).

[0303] In one particular example, said GFR-binding compound is a peptide, a variant or analog thereof, or a peptidomimetic as defined herein, with (comprising, or exclusively consisting of, or constituted of) between 20 and 60 (in particular between 20 and 50, and more particularly, between 20 and 45) amino acids, comprising a peptide with four amino acids (PEP12) and a peptide with five amino acids (PEP2); wherein said GFR-binding compound further comprises a peptide with three amino acids (PEP3), an amino acid or a peptide with between two and seven amino acids (PEP7), and a peptide with three amino acids (PEP4).

[0304] In one particular example, said GFR-binding compound is a peptide, a variant or analog thereof, or a peptidomimetic as defined herein, with (comprising, or exclusively consisting of, or constituted of) between 20 and 60 (in particular between 20 and 50, and more particularly, between 20 and 45) amino acids, comprising a peptide with four amino acids (PEP1) and a peptide with five amino acids (PEP2); wherein said GFR-binding compound further comprises a peptide with three amino acids (PEP3), an amino acid or a peptide with between two and seven amino acids (PEP7), and a peptide with between five and seven amino acids (PEP6).

[0305] In one particular example, said GFR-binding compound is a peptide, a variant or analog thereof, or a peptidomimetic as defined herein, with (comprising, or exclusively consisting of, or constituted of) between 20 and 60 (in particular between 20 and 50, and more particularly, between 20 and 45) amino acids, comprising a peptide with four amino acids (PEP12) and a peptide with five amino acids (PEP2); wherein said GFR-binding compound further comprises a peptide with three amino acids (PEP3), an amino acid or a peptide with between two and seven amino acids (PEP7), and a peptide with between five and seven amino acids (PEP6).

[0306] In one particular example, said GFR-binding compound is a peptide, a variant or analog thereof, or a peptidomimetic as defined herein, with (comprising, or exclusively consisting of, or constituted of) between 20 and 60 (in particular between 20 and 50, and more particularly, between 20 and 45) amino acids, comprising a peptide with four amino acids (PEP1) and a peptide with five amino acids (PEP2); wherein said GFR-binding compound further comprises a peptide with three amino acids (PEP3), an amino acid or a peptide with between two and seven amino acids (PEP7), and a peptide with between six and eleven amino acids (PEP10).

[0307] In one particular example, said GFR-binding compound is a peptide, a variant or analog thereof, or a peptidomimetic as defined herein, with (comprising, or exclusively consisting of, or constituted of) between 20 and 60 (in particular between 20 and 50, and more particularly, between 20 and 45) amino acids, comprising a peptide with four amino acids (PEP12) and a peptide with five amino acids (PEP2); wherein said GFR-binding compound further comprises a peptide with three amino acids (PEP3), an amino acid or a peptide with between two and seven amino acids (PEP7), and a peptide with between six and eleven amino acids (PEP10).

[0308] In one particular example, said GFR-binding compound is a peptide, a variant or analog thereof, or a peptidomimetic as defined herein, with (comprising, or exclusively consisting of, or constituted of) between 20 and 60 (in particular between 20 and 50, and more particularly, between 20 and 45) amino acids, comprising a peptide with four amino acids (PEP1) and a peptide with five amino acids (PEP2); wherein said GFR-binding compound further comprises a peptide with three amino acids (PEP3), an amino acid or a peptide with between two and seven amino acids (PEP7), a peptide with three amino acids (PEP4), and an amino acid or a peptide with between two and six amino acids (PEP8).

[0309] In one particular example, said GFR-binding compound is a peptide, a variant or analog thereof, or a peptidomimetic as defined herein, with (comprising, or exclusively consisting of, or constituted of) between 20 and 60 (in particular between 20 and 50, and more particularly, between 20 and 45) amino acids, comprising a peptide with four amino acids (PEP12) and a peptide with five amino acids (PEP2); wherein said GFR-binding compound further comprises a peptide with three amino acids (PEP3), an amino acid or a peptide with between two and seven amino acids (PEP7), a peptide with three amino acids (PEP4), and an amino acid or a peptide with between two and six amino acids (PEP8).

[0310] In one particular example, said GFR-binding compound is a peptide, a variant or analog thereof, or a peptidomimetic as defined herein, with (comprising, or exclusively consisting of, or constituted of) between 20 and 60 (in particular between 20 and 50, and more particularly, between 20 and 45) amino acids, comprising a peptide with four amino acids (PEP1) and a peptide with five amino acids (PEP2); wherein said GFR-binding compound further comprises a peptide with three amino acids (PEP3), an amino acid or a peptide with between two and seven amino acids (PEP7), a peptide with between five and seven amino acids (PEP6), and an amino acid or a peptide with between two and six amino acids (PEP8).

[0311] In one particular example, said GFR-binding compound is a peptide, a variant or analog thereof, or a peptidomimetic as defined herein, with (comprising, or exclusively consisting of, or constituted of) between 20 and 60 (in particular between 20 and 50, and more particularly, between 20 and 45) amino acids, comprising a peptide with four amino acids (PEP12) and a peptide with five amino acids (PEP2); wherein said GFR-binding compound further comprises a peptide with three amino acids (PEP3), an amino acid or a peptide with between two and seven amino acids (PEP7), a peptide with between five and seven amino acids (PEP6), and an amino acid or a peptide with between two and six amino acids (PEP8).

[0312] In one particular example, said GFR-binding compound is a peptide, a variant or analog thereof, or a peptidomimetic as defined herein, with (comprising, or exclusively consisting of, or constituted of) between 20 and 60 (in particular between 20 and 50, and more particularly, between 20 and 45) amino acids, comprising a peptide with four amino acids (PEP1) and a peptide with five amino acids (PEP2); wherein said GFR-binding compound further comprises a peptide with five amino acids (PEP5), an amino acid or a peptide with between two and seven amino acids (PEP7), and a peptide with three amino acids (PEP4).

[0313] In one particular example, said GFR-binding compound is a peptide, a variant or analog thereof, or a peptidomimetic as defined herein, with (comprising, or exclusively consisting of, or constituted of) between 20 and 60 (in particular between 20 and 50, and more particularly, between 20 and 45) amino acids, comprising a peptide with four amino acids (PEP12) and a peptide with five amino acids (PEP2); wherein said GFR-binding compound further comprises a peptide with five amino acids (PEP5), an amino acid or a peptide with between two and seven amino acids (PEP7), and a peptide with three amino acids (PEP4).

[0314] In one particular example, said GFR-binding compound is a peptide, a variant or analog thereof, or a peptidomimetic as defined herein, with (comprising, or exclusively consisting of, or constituted of) between 20 and 60 (in particular between 20 and 50, and more particularly, between 20 and 45) amino acids, comprising a peptide with four amino acids (PEP1) and a peptide with five amino acids (PEP2); wherein said GFR-binding compound further comprises a peptide with five amino acids (PEP5), an amino acid or a peptide with between two and seven amino acids (PEP7), and a peptide with between five and seven amino acids (PEP6).

[0315] In one particular example, said GFR-binding compound is a peptide, a variant or analog thereof, or a peptidomimetic as defined herein, with (comprising, or exclusively consisting of, or constituted of) between 20 and 60 (in particular between 20 and 50, and more particularly, between 20 and 45) amino acids, comprising a peptide with four amino acids (PEP12) and a peptide with five amino acids (PEP2); wherein said GFR-binding compound further comprises a peptide with five amino acids (PEP5), an amino acid or a peptide with between two and seven amino acids (PEP7), and a peptide with between five and seven amino acids (PEP6).

[0316] In one particular example, said GFR-binding compound is a peptide, a variant or analog thereof, or a peptidomimetic as defined herein, with (comprising, or exclusively consisting of, or constituted of) between 20 and 60 (in particular between 20 and 50, and more particularly, between 20 and 45) amino acids, comprising a peptide with four amino acids (PEP1) and a peptide with five amino acids (PEP2); wherein said GFR-binding compound further comprises a peptide with five amino acids (PEP5), an amino acid or a peptide with between two and seven amino acids (PEP7), and a peptide with between six and eleven amino acids (PEP10).

[0317] In one particular example, said GFR-binding compound is a peptide, a variant or analog thereof, or a peptidomimetic as defined herein, with (comprising, or exclusively consisting of, or constituted of) between 20 and 60 (in particular between 20 and 50, and more particularly, between 20 and 45) amino acids, comprising a peptide with four amino acids (PEP12) and a peptide with five amino acids (PEP2); wherein said GFR-binding compound further comprises a peptide with five amino acids (PEP5), an amino acid or a peptide with between two and seven amino acids (PEP7), and a peptide with between six and eleven amino acids (PEP10).

[0318] In one particular example, said GFR-binding compound is a peptide, a variant or analog thereof, or a peptidomimetic as defined herein, with (comprising, or exclusively consisting of, or constituted of) between 20 and 60 (in particular between 20 and 50, and more particularly, between 20 and 45) amino acids, comprising a peptide with four amino acids (PEP1) and a peptide with five amino acids (PEP2); wherein said GFR-binding compound further comprises a peptide with five amino acids (PEP5), an amino acid or a peptide with between two and seven amino acids (PEP7), a peptide with three amino acids (PEP4), and an amino acid or a peptide with between two and six amino acids (PEP8).

[0319] In one particular example, said GFR-binding compound is a peptide, a variant or analog thereof, or a peptidomimetic as defined herein, with (comprising, or exclusively consisting of, or constituted of) between 20 and 60 (in particular between 20 and 50, and more particularly, between 20 and 45) amino acids, comprising a peptide with four amino acids (PEP12) and a peptide with five amino acids (PEP2); wherein said GFR-binding compound further comprises a peptide with five amino acids (PEP5), an amino acid or a peptide with between two and seven amino acids (PEP7), a peptide with three amino acids (PEP4), and an amino acid or a peptide with between two and six amino acids (PEP8).

[0320] In one particular example, said GFR-binding compound is a peptide, a variant or analog thereof, or a peptidomimetic as defined herein, with (comprising, or exclusively consisting of, or constituted of) between 20 and 60 (in particular between 20 and 50, and more particularly, between 20 and 45) amino acids, comprising a peptide with four amino acids (PEP1) and a peptide with five amino acids (PEP2); wherein said GFR-binding compound further comprises a peptide with five amino acids (PEP5), an amino acid or a peptide with between two and seven amino acids (PEP7), a peptide with between five and seven amino acids (PEP6), and an amino acid or a peptide with between two and six amino acids (PEP8).

[0321] In one particular example, said GFR-binding compound is a peptide, a variant or analog thereof, or a peptidomimetic as defined herein, with (comprising, or exclusively consisting of, or constituted of) between 20 and 60 (in particular between 20 and 50, and more particularly, between 20 and 45) amino acids, comprising a peptide with four amino acids (PEP12) and a peptide with five amino acids (PEP2); wherein said GFR-binding compound further comprises a peptide with five amino acids (PEP5), an amino acid or a peptide with between two and seven amino acids (PEP7), a peptide with between five and seven amino acids (PEP6), and an amino acid or a peptide with between two and six amino acids (PEP8).

[0322] In one particular example, said GFR-binding compound is a peptide, a variant or analog thereof, or a peptidomimetic as defined herein, with (comprising, or exclusively consisting of, or constituted of) between 20 and 60 (in particular between 20 and 50, and more particularly, between 20 and 45) amino acids, comprising a peptide with four amino acids (PEP1) and a peptide with five amino acids (PEP2); wherein said GFR-binding compound further comprises a peptide with between six and twelve amino acids (PEP9), a peptide with three amino acids (PEP4), and an amino acid or a peptide with between two and six amino acids (PEP8).

[0323] In one particular example, said GFR-binding compound is a peptide, a variant or analog thereof, or a peptidomimetic as defined herein, with (comprising, or exclusively consisting of, or constituted of) between 20 and 60 (in particular between 20 and 50, and more particularly, between 20 and 45) amino acids, comprising a peptide with four amino acids (PEP12) and a peptide with five amino acids (PEP2); wherein said GFR-binding compound further comprises a peptide with between six and twelve amino acids (PEP9), a peptide with three amino acids (PEP4), and an amino acid or a peptide with between two and six amino acids (PEP8).

[0324] In one particular example, said GFR-binding compound is a peptide, a variant or analog thereof, or a peptidomimetic as defined herein, with (comprising, or exclusively consisting of, or constituted of) between 20 and 60 (in particular between 20 and 50, and more particularly, between 20 and 45) amino acids, comprising a peptide with four amino acids (PEP1) and a peptide with five amino acids (PEP2); wherein said GFR-binding compound further comprises a peptide with between six and twelve amino acids (PEP9), a peptide with between five and seven amino acids (PEP6), and an amino acid or a peptide with between two and six amino acids (PEP8).

[0325] In one particular example, said GFR-binding compound is a peptide, a variant or analog thereof, or a peptidomimetic as defined herein, with (comprising, or exclusively consisting of, or constituted of) between 20 and 60 (in particular between 20 and 50, and more particularly, between 20 and 45) amino acids, comprising a peptide with four amino acids (PEP12) and a peptide with five amino acids (PEP2); wherein said GFR-binding compound further comprises a peptide with between six and twelve amino acids (PEP9), a peptide with between five and seven amino acids (PEP6), and an amino acid or a peptide with between two and six amino acids (PEP8).

[0326] In one particular example, said GFR-binding compound is a peptide, a variant or analog thereof, or a peptidomimetic as defined herein, with (comprising, or exclusively consisting of, or constituted of) between 20 and 60 (in particular between 20 and 50, and more particularly, between 20 and 45) amino acids, having the following general formula (Ia) (hereinafter may also be referred to as compound (Ia) or peptide (Ia)):

PEP(A)-LINKER-PEP(B) (Ia)

[0327] wherein one end of LINKER interacts covalently with one end of PEP(A); wherein another end of LINKER interacts covalently with one end of PEP(B); wherein PEP(A) comprises PEP1; wherein PEP(B) comprises PEP2; wherein LINKER is a linear or branched organic divalent radical, moiety or compound having a molecular weight (Mw) comprised between about 28 and about 2,000 Da, in particular, between about 300 and about 1000 Da.

[0328] In the present description, the molecular weight of LINKER refer to the calculated molecular weight prior to being connected to/reacted with any of the elements it is configured to connect to or react with e.g. PEP(A), PEP(B) or any other groups defined herein.

[0329] In one particular example, said GFR-binding compound is a peptide, a variant or analog thereof, or a peptidomimetic as defined herein, with (comprising, or exclusively consisting of, or constituted of) between 20 and 60 (in particular between 20 and 50, and more particularly, between 20 and 45) amino acids, having the following general formula (Ia) (hereinafter may also be referred to as compound (Ia) or peptide (I)):

PEP(A)-LINKER-PEP(B) (Ia)

[0330] wherein one end of LINKER interacts covalently with one end of PEP(A); wherein another end of LINKER interacts covalently with one end of PEP(B); wherein PEP(A) comprises PEP12; wherein PEP(B) comprises PEP2; wherein LINKER is a linear or branched organic divalent radical, moiety or compound having a molecular weight (Mw) comprised between about 28 and about 2,000 Da, in particular, between about 300 and about 1000 Da.

[0331] In one aspect, the present disclosure provides a GFR-binding compound of general formula (Ia), wherein PEP(A) comprises PEP1; wherein PEP(B) comprises PEP2; wherein PEP(A) further comprises PEP3; wherein PEP(B) further comprises PEP4.

[0332] In one aspect, the present disclosure provides a GFR-binding compound of general formula (Ia), wherein PEP(A) comprises PEP12; wherein PEP(B) comprises PEP2; wherein PEP(A) further comprises PEP3; wherein PEP(B) further comprises PEP4.

[0333] In one aspect, the present disclosure provides a GFR-binding compound of general formula (Ia), wherein PEP(A) comprises PEP1; wherein PEP(B) comprises PEP2; wherein PEP(A) further comprises PEP5; wherein PEP(B) further comprises PEP6.

[0334] In one aspect, the present disclosure provides a GFR-binding compound of general formula (Ia), wherein PEP(A) comprises PEP12; wherein PEP(B) comprises PEP2; wherein PEP(A) further comprises PEP5; wherein PEP(B) further comprises PEP6.

[0335] In one aspect, the present disclosure provides a GFR-binding compound of general formula (Ia), wherein PEP(A) comprises PEP1; wherein PEP(B) comprises PEP2; wherein PEP(A) further comprises PEP9; wherein PEP(B) further comprises PEP10.

[0336] In one aspect, the present disclosure provides a GFR-binding compound of general formula (Ia), wherein PEP(A) comprises PEP12; wherein PEP(B) comprises PEP2; wherein PEP(A) further comprises PEP9; wherein PEP(B) further comprises PEP10.

[0337] In one aspect, the present disclosure provides a GFR-binding compound of general formula (Ia), wherein PEP(A) comprises PEP1; wherein PEP(B) comprises PEP2; wherein PEP(A) further comprises PEP3; wherein PEP(B) further comprises PEP6.

[0338] In one aspect, the present disclosure provides a GFR-binding compound of general formula (Ia), wherein PEP(A) comprises PEP12; wherein PEP(B) comprises PEP2; wherein PEP(A) further comprises PEP3; wherein PEP(B) further comprises PEP6.

[0339] In one aspect, the present disclosure provides a GFR-binding compound of general formula (Ia), wherein PEP(A) comprises PEP1; wherein PEP(B) comprises PEP2; wherein PEP(A) further comprises PEP3; wherein PEP(B) further comprises PEP10.

[0340] In one aspect, the present disclosure provides a GFR-binding compound of general formula (Ia), wherein PEP(A) comprises PEP12; wherein PEP(B) comprises PEP2; wherein PEP(A) further comprises PEP3; wherein PEP(B) further comprises PEP10.

[0341] In one aspect, the present disclosure provides a GFR-binding compound of general formula (Ia), wherein PEP(A) comprises PEP1; wherein PEP(B) comprises PEP2; wherein PEP(A) further comprises PEP5; wherein PEP(B) further comprises PEP4.

[0342] In one aspect, the present disclosure provides a GFR-binding compound of general formula (Ia), wherein PEP(A) comprises PEP12; wherein PEP(B) comprises PEP2; wherein PEP(A) further comprises PEP5; wherein PEP(B) further comprises PEP4.

[0343] In one aspect, the present disclosure provides a GFR-binding compound of general formula (Ia), wherein PEP(A) comprises PEP1; wherein PEP(B) comprises PEP2; wherein PEP(A) further comprises PEP9; wherein PEP(B) further comprises PEP4.

[0344] In one aspect, the present disclosure provides a GFR-binding compound of general formula (Ia), wherein PEP(A) comprises PEP12; wherein PEP(B) comprises PEP2; wherein PEP(A) further comprises PEP9; wherein PEP(B) further comprises PEP4.

[0345] In one aspect, the present disclosure provides a GFR-binding compound of general formula (Ia), wherein PEP(A) comprises PEP1; wherein PEP(B) comprises PEP2; wherein PEP(A) further comprises PEP5; wherein PEP(B) further comprises PEP10.

[0346] In one aspect, the present disclosure provides a GFR-binding compound of general formula (Ia), wherein PEP(A) comprises PEP12; wherein PEP(B) comprises PEP2; wherein PEP(A) further comprises PEP5; wherein PEP(B) further comprises PEP10.

[0347] In one aspect, the present disclosure provides a GFR-binding compound of general formula (Ia), wherein PEP(A) comprises PEP1; wherein PEP(B) comprises PEP2; wherein PEP(A) further comprises PEP9; wherein PEP(B) further comprises PEP6.

[0348] In one aspect, the present disclosure provides a GFR-binding compound of general formula (Ia), wherein PEP(A) comprises PEP12; wherein PEP(B) comprises PEP2; wherein PEP(A) further comprises PEP9; wherein PEP(B) further comprises PEP6.

[0349] In one aspect, the present disclosure provides a GFR-binding compound of general formula (Ia), wherein PEP(A) comprises PEP1; wherein PEP(B) comprises PEP2; wherein PEP(A) further comprises PEP3 and PEP7; wherein PEP(B) further comprises PEP4.

[0350] In one aspect, the present disclosure provides a GFR-binding compound of general formula (Ia), wherein PEP(A) comprises PEP12; wherein PEP(B) comprises PEP2; wherein PEP(A) further comprises PEP3 and PEP7; wherein PEP(B) further comprises PEP4.

[0351] In one aspect, the present disclosure provides a GFR-binding compound of general formula (Ia), wherein PEP(A) comprises PEP1; wherein PEP(B) comprises PEP2; wherein PEP(A) further comprises PEP3 and PEP7; wherein PEP(B) further comprises PEP6.

[0352] In one aspect, the present disclosure provides a GFR-binding compound of general formula (Ia), wherein PEP(A) comprises PEP12; wherein PEP(B) comprises PEP2; wherein PEP(A) further comprises PEP3 and PEP7; wherein PEP(B) further comprises PEP6.

[0353] In one aspect, the present disclosure provides a GFR-binding compound of general formula (Ia), wherein PEP(A) comprises PEP1; wherein PEP(B) comprises PEP2; wherein PEP(A) further comprises PEP3 and PEP7; wherein PEP(B) further comprises PEP10.

[0354] In one aspect, the present disclosure provides a GFR-binding compound of general formula (Ia), wherein PEP(A) comprises PEP12; wherein PEP(B) comprises PEP2; wherein PEP(A) further comprises PEP3 and PEP7; wherein PEP(B) further comprises PEP10.

[0355] In one aspect, the present disclosure provides a GFR-binding compound of general formula (Ia), wherein PEP(A) comprises PEP1; wherein PEP(B) comprises PEP2; wherein PEP(A) further comprises PEP7; wherein PEP(B) further comprises PEP4 and PEP8.

[0356] In one aspect, the present disclosure provides a GFR-binding compound of general formula (Ia), wherein PEP(A) comprises PEP12; wherein PEP(B) comprises PEP2; wherein PEP(A) further comprises PEP7; wherein PEP(B) further comprises PEP4 and PEP8.

[0357] In one aspect, the present disclosure provides a GFR-binding compound of general formula (Ia), wherein PEP(A) comprises PEP1; wherein PEP(B) comprises PEP2; wherein PEP(A) further comprises PEP7; wherein PEP(B) further comprises PEP6 and PEP8.

[0358] In one aspect, the present disclosure provides a GFR-binding compound of general formula (Ia), wherein PEP(A) comprises PEP12; wherein PEP(B) comprises PEP2; wherein PEP(A) further comprises PEP7; wherein PEP(B) further comprises PEP6 and PEP8.

[0359] In one aspect, the present disclosure provides a GFR-binding compound of general formula (Ia), wherein PEP(A) comprises PEP1; wherein PEP(B) comprises PEP2; wherein PEP(A) further comprises PEP5 and PEP7; wherein PEP(B) further comprises PEP4.

[0360] In one aspect, the present disclosure provides a GFR-binding compound of general formula (Ia), wherein PEP(A) comprises PEP12; wherein PEP(B) comprises PEP2; wherein PEP(A) further comprises PEP5 and PEP7; wherein PEP(B) further comprises PEP4.

[0361] In one aspect, the present disclosure provides a GFR-binding compound of general formula (Ia), wherein PEP(A) comprises PEP1; wherein PEP(B) comprises PEP2; wherein PEP(A) further comprises PEP5 and PEP7; wherein PEP(B) further comprises PEP6.

[0362] In one aspect, the present disclosure provides a GFR-binding compound of general formula (Ia), wherein PEP(A) comprises PEP12; wherein PEP(B) comprises PEP2; wherein PEP(A) further comprises PEP5 and PEP7; wherein PEP(B) further comprises PEP6.

[0363] In one aspect, the present disclosure provides a GFR-binding compound of general formula (Ia), wherein PEP(A) comprises PEP1; wherein PEP(B) comprises PEP2; wherein PEP(A) further comprises PEP5 and PEP7; wherein PEP(B) further comprises PEP10.

[0364] In one aspect, the present disclosure provides a GFR-binding compound of general formula (Ia), wherein PEP(A) comprises PEP12; wherein PEP(B) comprises PEP2; wherein PEP(A) further comprises PEP5 and PEP7; wherein PEP(B) further comprises PEP10.

[0365] In one aspect, the present disclosure provides a GFR-binding compound of general formula (Ia), wherein PEP(A) comprises PEP1; wherein PEP(B) comprises PEP2; wherein PEP(A) further comprises PEP5 and PEP7; wherein PEP(B) further comprises PEP4 and PEP8.

[0366] In one aspect, the present disclosure provides a GFR-binding compound of general formula (Ia), wherein PEP(A) comprises PEP12; wherein PEP(B) comprises PEP2; wherein PEP(A) further comprises PEP5 and PEP7; wherein PEP(B) further comprises PEP4 and PEP8.

[0367] In one aspect, the present disclosure provides a GFR-binding compound of general formula (Ia), wherein PEP(A) comprises PEP1; wherein PEP(B) comprises PEP2; wherein PEP(A) further comprises PEP5 and PEP7; wherein PEP(B) further comprises PEP6 and PEP8.

[0368] In one aspect, the present disclosure provides a GFR-binding compound of general formula (Ia), wherein PEP(A) comprises PEP12; wherein PEP(B) comprises PEP2; wherein PEP(A) further comprises PEP5 and PEP7; wherein PEP(B) further comprises PEP6 and PEP8.

[0369] In one aspect, the present disclosure provides a GFR-binding compound of general formula (Ia), wherein PEP(A) comprises PEP1; wherein PEP(B) comprises PEP2; wherein PEP(A) further comprises PEP9; wherein PEP(B) further comprises PEP4 and PEP8.

[0370] In one aspect, the present disclosure provides a GFR-binding compound of general formula (Ia), wherein PEP(A) comprises PEP12; wherein PEP(B) comprises PEP2; wherein PEP(A) further comprises PEP9; wherein PEP(B) further comprises PEP4 and PEP8.

[0371] In one aspect, the present disclosure provides a GFR-binding compound of general formula (Ia), wherein PEP(A) comprises PEP1; wherein PEP(B) comprises PEP2; wherein PEP(A) further comprises PEP9; wherein PEP(B) further comprises PEP6 and PEP8.

[0372] In one aspect, the present disclosure provides a GFR-binding compound of general formula (Ia), wherein PEP(A) comprises PEP12; wherein PEP(B) comprises PEP2; wherein PEP(A) further comprises PEP9; wherein PEP(B) further comprises PEP6 and PEP8.

[0373] In one particular example, said GFR-binding compound is a peptide, a variant or analog thereof, or a peptidomimetic as defined herein, with (comprising, or exclusively consisting of, or constituted of) between 20 and 60 (in particular between 20 and 50, and more particularly, between 20 and 45) amino acids, having the following general formula (IIa) (hereinafter may also be referred to as compound (IIa) or peptide (IIa)):

PEP(C)-PEP12-LINKER-PEP2-PEP(D) (IIa)

[0374] wherein LINKER is a linear or branched organic divalent radical, moiety or compound having a molecular weight (Mw) comprised between about 28 and about 2,000 Da, in particular, between about 300 and about 1000 Da; wherein PEP12 is a peptide with 8 amino acids of formula PEP1-AA¹⁷-PEP11 as defined herein; wherein PEP2 is a peptide with five amino acids as already defined herein; wherein one end of PEP(C) interacts covalently with PEP12 via one end of PEP1; wherein one end of PEP(D) interacts covalently with one end of PEP2; wherein one end of LINKER interacts covalently with one end of PEP12 via one end of PEP11; wherein another end of LINKER interacts covalently with another end of PEP2; wherein PEP(C) is a peptide with at least 5 amino acids, in particular a peptide with between 5 and 12 amino acids; wherein PEP(D) is a peptide with at least 5 amino acids, in particular a peptide with between 5 and 11 amino acids.

[0375] In one aspect, the present disclosure provides a GFR-binding compound of general formula (IIa), wherein PEP(C) comprises PEP3; wherein PEP(D) comprises PEP4.

[0376] In one aspect, the present disclosure provides a GFR-binding compound of general formula (IIa), wherein PEP(C) comprises PEP5; wherein PEP(D) comprises PEP6. In one particular example, PEP(C) is PEP5; and PEP(D) is PEP6.

[0377] In one aspect, the present disclosure provides a GFR-binding compound of general formula (IIa), wherein PEP(C) comprises PEP9; wherein PEP(D) comprises PEP10. In one particular example, PEP(C) is PEP9; and PEP(D) is PEP10.

[0378] In one aspect, the present disclosure provides a GFR-binding compound of general formula (IIa), wherein PEP(C) comprises PEP3; wherein PEP(D) comprises PEP6. In one particular example, PEP(C) comprises PEP3 and PEP(D) is PEP6.

[0379] In one aspect, the present disclosure provides a GFR-binding compound of general formula (IIa), wherein PEP(C) comprises PEP3; wherein PEP(D) comprises PEP10. In one particular example, PEP(C) comprises PEP3 and PEP(D) is PEP10.

[0380] In one aspect, the present disclosure provides a GFR-binding compound of general formula (IIa), wherein PEP(C) comprises PEP5; wherein PEP(D) comprises PEP4. In one particular example, PEP(C) is PEP5 and PEP(D) comprises PEP4.

[0381] In one aspect, the present disclosure provides a GFR-binding compound of general formula (IIa), wherein PEP(C) comprises PEP9; wherein PEP(D) comprises PEP4. In one particular example, PEP(C) is PEP9 and PEP(D) comprises PEP4.

[0382] In one aspect, the present disclosure provides a GFR-binding compound of general formula (IIa), wherein PEP(C) comprises PEP5; wherein PEP(D) comprises PEP10. In one particular example, PEP(C) is PEP5 and PEP(D) is PEP10.

[0383] In one aspect, the present disclosure provides a GFR-binding compound of general formula (IIa), wherein PEP(C) comprises PEP9; wherein PEP(D) comprises PEP6. In one particular example, PEP(C) is PEP9 and PEP(D) is PEP6.

[0384] In one aspect, the present disclosure provides a GFR-binding compound of general formula (IIa), wherein PEP(C) comprises PEP3 and PEP7; wherein PEP(D) comprises PEP4.

[0385] In one aspect, the present disclosure provides a GFR-binding compound of general formula (IIa), wherein PEP(C) comprises PEP3 and PEP7; wherein PEP(D) comprises PEP6. In one particular example, PEP(C) comprises PEP3 and PEP7, and PEP(D) is PEP6.

[0386] In one aspect, the present disclosure provides a GFR-binding compound of general formula (IIa), wherein PEP(C) comprises PEP3 and PEP7; wherein PEP(D) comprises PEP10. In one particular example, PEP(C) comprises PEP3 and PEP7, and PEP(D) is PEP10.

[0387] In one aspect, the present disclosure provides a GFR-binding compound of general formula (IIa), wherein PEP(C) comprises PEP7; wherein PEP(D) comprises PEP4 and PEP8.

[0388] In one aspect, the present disclosure provides a GFR-binding compound of general formula (IIa), wherein PEP(C) comprises PEP7; wherein PEP(D) comprises PEP6 and PEP8.

[0389] In one aspect, the present disclosure provides a GFR-binding compound of general formula (IIa), wherein PEP(C) comprises PEP5 and PEP7; wherein PEP(D) comprises PEP4.

[0390] In one aspect, the present disclosure provides a GFR-binding compound of general formula (IIa), wherein PEP(C) comprises PEP5 and PEP7; wherein PEP(D) comprises PEP6.

[0391] In one aspect, the present disclosure provides a GFR-binding compound of general formula (IIa), wherein PEP(C) comprises PEP5 and PEP7; wherein PEP(D) comprises PEP10.

[0392] In one aspect, the present disclosure provides a GFR-binding compound of general formula (IIa), wherein PEP(C) comprises PEP5 and PEP7; wherein PEP(D) comprises PEP4 and PEP8.

[0393] In one aspect, the present disclosure provides a GFR-binding compound of general formula (IIa), wherein PEP(C) comprises PEP5 and PEP7; wherein PEP(D) comprises PEP6 and PEP8.

[0394] In one aspect, the present disclosure provides a GFR-binding compound of general formula (IIa), wherein PEP(C) comprises PEP9; wherein PEP(D) comprises PEP4 and PEP8.

[0395] In one aspect, the present disclosure provides a GFR-binding compound of general formula (IIa), wherein PEP(C) comprises PEP9; wherein PEP(D) comprises PEP6 and PEP8.

[0396] In one aspect, the present disclosure provides a GFR-binding compound of general formula (IIa), wherein PEP(C) is PEP5 or PEP9 and wherein PEP(D) is PEP6 or PEP10.

[0397] In one particular example, said GFR-binding compound is a peptide, a variant or analog thereof, or a peptidomimetic as defined herein, with (comprising, or exclusively consisting of, or constituted of) between 20 and 60 (in particular between 20 and 50, and more particularly, between 20 and 45) amino acids, having the following general formula (IIIa) (hereinafter may also be referred to as compound (IIIa) or peptide (IIIa)):

PEP7-PEP5-PEP12-LINKER-PEP2-PEP6-PEP8 (IIIa)

[0398] wherein LINKER is a linear or branched organic divalent radical, moiety or compound having a molecular weight (Mw) comprised between about 28 and about 2,000 Da, in particular, between about 300 and about 1000 Da; wherein PEP12 is a peptide with 8 amino acids of formula PEP1-AA¹⁷-PEP11 as defined herein; wherein PEP2 is a peptide with five amino acids as already defined herein; wherein PEP5 is a peptide with five amino acids as already defined herein; wherein PEP6 is a peptide with between five and seven amino acids as already defined herein; wherein PEP7 an amino acid or a peptide with between two and seven amino acids as already defined herein; wherein PEP8 an amino acid or a peptide with between two and six amino acids as already defined herein; wherein one end of LINKER interacts covalently with one end of PEP12 via AA²⁰; wherein another end of LINKER interacts covalently with one end of PEP2 via AA²¹; wherein one end of PEP5 interacts covalently with another end of PEP12 via AA¹²; wherein another end of PEP5 interacts covalently with one end of PEP7 via AA⁸; wherein one end of PEP6 interacts covalently with another end of PEP2 via AA²⁶; wherein another end of PEP6 interacts covalently with one end of PEP8 via AA³².

[0399] In one particular example, said GFR-binding compound is a peptide, a variant or analog thereof, or a peptidomimetic as defined herein, with (comprising, or exclusively consisting of, or constituted of) between 20 and 60 (in particular between 20 and 50, and more particularly, between 20 and 45) amino acids, having the following general formula (IVa) (hereinafter may also be referred to as compound (IVa) or peptide (IVa)):

AA¹-AA²-AA³-AA⁴-AA⁵-AA⁶-AA⁷-AA⁸-AA⁹-AA¹⁰-AA¹¹-AA¹²-AA¹³-AA¹⁴-AA¹⁵-AA¹⁶-AA¹⁷-AA¹⁸-AA¹⁹-AA²⁰-LINKER-AA²¹-AA²²-AA²³-AA²⁴-AA²⁵-AA²⁶-AA²⁷-AA²⁸-AA²⁹-AA³⁰-AA³¹-AA³²-AA³³-AA³⁴-AA³⁵-AA³⁶-AA³⁷-AA³⁸ (IVa)

[0400] wherein LINKER is a linear or branched organic divalent radical, moiety or compound having a molecular weight (Mw) comprised between about 28 and about 2,000 Da, in particular, between about 300 and about 1000 Da; wherein AA¹-AA²-AA³-AA⁴-AA⁵-AA⁶-AA⁷ is PEP7 as defined herein; wherein AA¹³-AA¹⁴-AA¹⁵-AA¹⁶-AA¹⁷-AA¹⁸-AA¹⁹-AA²⁰ is PEP12 as defined herein; wherein AA²¹-AA²²-AA²³-AA²⁴-AA²⁵ is PEP2 as already defined herein; wherein AA⁸-AA⁹-AA¹⁰ is PEP3 as defined herein; wherein AA³⁰-AA³¹-AA³² is PEP4 as defined herein; wherein AA³³-AA³⁴-AA³⁵-AA³⁶-AA³⁷-AA³⁸ is PEP8 as defined herein; wherein AA¹¹, AA¹², AA²⁶, AA²⁷, AA²⁸, and AA²⁹ are as defined herein; wherein one end of LINKER interacts covalently with AA²⁰; wherein another end of LINKER interacts covalently with AA²¹; wherein AA¹ and AA²¹ may be both N-terminal amino acids or both C-terminal amino acids; wherein AA³⁸ and AA²⁰ may be both N-terminal amino acids or both C-terminal amino acids.

[0401] In certain embodiments, PEP1 is selected from the group consisting of SAIS, SSLS, NAIS, SATS, SPIS, EPIS, SPIN, KPLS, EPLP, EPLT, SNIT, RSVK and RPVQ.

[0402] In certain embodiments, PEP2 is selected from the group consisting of LKNYQ, LKVYP, LKKYR, LRKHR, LKYHY, KFKYE, YGKIP, YKQYE, DHHKD, EQLSN, IGEMS, LGEMS, KEVQV and KKATV.

[0403] In certain embodiments, the pair PEP1:PEP2 is selected from the group consisting of SAIS:LKNYQ, SSLS:LKVYP, NAIS:LKKYR, SATS:LRKHR, SPIS:LKYHY, EPIS:KFKYE, SPIN:YGKIP, SPIS:YKQYE, KPLS:DHHKD, EPLP:EQLSN, EPLT:EQLSN, SNIT:IGEMS, SNIT:LGEMS, RSVK:KEVQV and RPVQ:KKATV.

[0404] In certain embodiments, PEP3 is selected from the group consisting of VPT, VPE, APT, TPT, VPA, APV, VPQ, VSQ, SRV and TQV.

[0405] In certain embodiments, PEP4 is selected from the group consisting of VVE, TVE, VVR, VVK, VAE, AVS, VVD, VEE, VRS, VKS, QHN, EHS, EEH and EDH.

[0406] In certain embodiments, PEP5 is a peptide of general formula PEP3-AA¹¹-AA¹²; wherein PEP3 is selected from the group consisting of VPT, VPE, APT, TPT, VPA, APV, VPQ, VSQ, SRV and TQV; wherein AA¹¹ is selected from the group consisting of E, K, Q, R, A, D, G and H; and wherein AA¹² is selected from the group consisting of L, M, T, E, Q and H. In one particular example, PEP5 is selected from the group consisting of VPTEL, VPEKM, APTKL, APTQL, VPTKL, TPTKM, VPARL, VPTRL, APVKT, VPQAL, VSQDL, VPQDL, VPTEE, VPTGQ, SRVHH and TQVQL.

[0407] In certain embodiments, PEP6 is a peptide of general formula AA²⁶-AA²⁷-AA²⁸-AA²⁹-PEP4; wherein PEP4 is selected from the group consisting of VVE, TVE, VVR, VVK, VAE, AVS, VVD, VEE, VRS, VKS, QHN, EHS, EEH and EDH; wherein AA²⁶ is absent or selected from the group consisting of AA^{III} amino acids, preferably is absent or is E; wherein AA²⁷ and AA²⁸ are independently selected from the group consisting of AA^{III} and AA^{V} amino acids; and wherein AA²⁹ is absent or selected from the group consisting of AA^{II} amino acids, preferably is absent or is S. In one particular example, PEP6 is selected from the group consisting of DMVVE, NMTVE, EMVVE, NMVVR, NMVVK, EGMSVAE, GMAVS, GMVVD, MIVEE, MIVRS, MIVKS, MVVKS, FLQHN, LEEHS, RLEEH and TLEDH.

[0408] In certain embodiments, PEP7 is an amino acid or a peptide with between two and seven amino acids of general formula AA¹-AA²-AA³-AA⁴-AA⁵-AA⁶-AA⁷; wherein wherein AA¹, AA², AA³, AA⁴, and AA⁵ are independently absent or AA^{I} as defined herein; wherein AA⁶ is absent or selected from the group consisting of S, T, C, E, Q, P and R; wherein AA⁷ is absent or is selected from the group consisting of S, T, C, E, Q, P and R, and wherein at least one of AA¹, AA², AA³, AA⁴, AA⁵, AA⁶ or AA⁷ is not absent. In one particular example, PEP7 is selected from the group consisting of KIPKAXX, GIPEPXX, SIPKAXX, HVTKPTX, YVPKPXX, TVPKPXX, AVPKAXX, KVGKAXX, KASKAXX, GSAGPXX, AAPASXX, STPPTXX, HVPKPXX, RVPSTXX, ASAAPXX, ASASPXX, NDEGLEX, SSVKXQP and RNVQXRP, wherein X is C or S throughout the present description.

[0409] In certain embodiments, PEP8 is an amino acid or a peptide with between two and six amino acids of general formula AA³³-AA³⁴-AA³⁵-AA³⁶-AA³⁷-AA³⁸; wherein AA³³ is absent or is selected from the group consisting of AA^{I} amino acids at the exception of AA^{VI} amino acids; AA³⁴ is absent or is selected from the group consisting of AA^{III} and AA^{IV} amino acids; wherein AA³⁵ is absent or is selected from the group consisting of AA^{II} amino acids, preferably is S or C; wherein AA³⁶ is absent or is selected from the group consisting of AA^{III} and AA^{IV} amino acids; wherein AA³⁷ is absent or is selected from the group consisting of AA^{II} amino acids, preferably is S or C; wherein AA³⁸ is absent or is selected from the group consisting of AN; and wherein at least one of AA³³, AA³⁴, AA³⁵, AA³⁶, AA³⁷ or AA³⁸ is not absent. In one particular example, PEP8 is selected from the group consisting of GXGXR, SXAXR, SXGXH, AXGXH, XGXR, EXGXR, RXGXS, AXGXR, SXGXR, XGXL, XKXS, KXEXR, QXEXR, LEXAXA and LAXKXE.

[0410] In certain embodiments, PEP9 is a peptide of general formula PEP7-PEP5; wherein PEP5 is a peptide of formula PEP3-AA¹¹-AA¹²; wherein PEP3 is selected from the group consisting of VPT, VPE, APT, TPT, VPA, APV, VPQ, VSQ, SRV and TQV; wherein AA¹¹ is selected from the group consisting of E, K, Q, R, A, D, G and H; and wherein AA¹² is selected from the group consisting of L, M, T, E, Q and H; wherein PEP7 is an amino acid or a peptide with between two and seven amino acids of general formula AA¹-AA²-AA³-AA⁴-AA⁵-AA⁶-AA⁷; wherein AA¹, AA², AA³, AA⁴, and AA⁵ are independently absent or AA^{I} as defined herein; wherein AA⁶ is absent or selected from the group consisting of S, T, C, E, Q, P and R; wherein AA⁷ is absent or is selected from the group consisting of S, T, C, E, Q, P and R. In one particular example, PEP9 is selected from the group consisting of KIPKAXXVPTEL, GIPEPXXVPEKM, SIPKAXXVPTEL, HVTKPTXAPTKL, YVPKPXXAPTKL, TVPKPXXAPTQL, AVPKAXXAPTKL, KVGKAXXVPTKL, KASKAXXVPTKL, GSAGPXXTPTKM, AAPASXXVPARL, STPPTXXVPTRL, HVPKPXXAPTKL, RVPSTXXAPVKT, ASAAPXXVPQAL, ASASPXXVSQDL, ASASPXXVPQDL, NDEGLEXVPTEE, NDEGLEXVPTGQ, SSVKXQPSRVHH and RNVQXRPTQVQL, wherein X is C or S throughout the present description.

[0411] In certain embodiments, PEP10 is a peptide of general formula PEP6-PEP8; wherein PEP6 is a peptide of formula AA²⁶-AA²⁷-AA²⁸-AA²⁹-PEP4; wherein PEP4 is selected from the group consisting of VVE, TVE, VVR, VVK, VAE, AVS, VVD, VEE, VRS, VKS, QHN, EHS, EEH and EDH; wherein AA²⁶ is absent or selected from the group consisting of AA^{III} amino acids, preferably is absent or is E; wherein AA²⁷ and AA²⁸ are independently selected from the group consisting of AA^{III} and AA^{V} amino acids; and wherein AA²⁹ is absent or selected from the group consisting of AA^{II} amino acids, preferably is absent or is S; wherein PEP8 is an amino acid or a peptide with between two and six amino acids of general formula AA³³-AA³⁴-AA³⁵-AA³⁶-AA³⁷-AA³⁸; AA³³ is absent or is selected from the group consisting of AA^{I} amino acids at the exception of AA^{VI} amino acids; AA³⁴ is absent or is selected from the group consisting of AA^{III} and AAR^{IV} amino acids; wherein AA³⁵ is absent or is selected from the group consisting of AA^{II} amino acids, preferably is S or C; wherein AA³⁶ is absent or is selected from the group consisting of AA^{III} and AA^{IV} amino acids; wherein AA³⁷ is absent or is selected from the group consisting of AA^{II} amino acids, preferably is S or C; wherein AA³⁸ is absent or is selected from the group consisting of AA^{I}. In one particular example, PEP10 is selected from the group consisting of DMVVEGXGXR, NMTVESXAXR, EMVVEGXGXR, NMVVRSXGXH, NMVVRAXGXH, NMVVKAXGXH, EGMSVAEXGXR, GMAVSEXGXR, GMVVDRXGXS, DMVVEAXGXR, DMVVESXGXR, MIVEEXGXL, MIVRSXKXS, MIVKSXKXS, MVVKSXKXS, FLQHNKXEXR, LEEHSQXEXR, RLEEHLEXAXA and TLEDHLAXKXE.

[0412] In certain embodiments, PEP12 is a peptide of general formula PEP1-AA¹⁷-PEP11; wherein AA¹⁷ is selected from the group consisting of G, A, V, L, I, P, F, M, W, T and S (in particular is selected from the group consisting of M, I, L, V and T); wherein PEP1 is selected from the group consisting of SAIS, SSLS, NAIS, SATS, SPIS, EPIS, SPIN, KPLS, EPLP, EPLT, SNIT, RSVK and RPVQ.

[0413] In certain embodiments, the pair PEP12:PEP2 is selected from the group consisting of SAIS-AA¹⁷-LYL:LKNYQ, SSLS-AA¹⁷-LFF:LKVYP, NAIS-AA¹⁷-LYF:LKKYR, SATS-AA¹⁷-LYY:LRKHR, SPIS-AA¹⁷-LYK:LKYHY, EPIS-AA¹⁷-LYL:KFKYE, SPIN-AA¹⁷-LYF:YGKIP, SPIS-AA¹⁷-LYI:YKQYE, SPIS-AA¹⁷-LFI:YKQYE, KPLS-AA¹⁷-LYV:DHHKD, EPLP-AA¹⁷-VYY:EQLSN, EPLT-AA¹⁷-LYY:EQLSN, SNIT-AA¹⁷-QIM:IGEMS, SNIT-AA¹⁷-QIM:LGEMS, RSVK-AA¹⁷-AKV:KEVQV and RPVQ-AA¹⁷-RKI:KKATV; wherein AA¹⁷ is selected from the group consisting of G, A, V, L, I, P, F, M, W, T and S (in particular is selected from the group consisting of M, I, L, V and T).

[0414] In certain embodiments, PEP11 is a peptide with 3 amino acids of general formula AA¹⁸-AA¹⁹-AA²⁰; wherein AA¹⁸ is selected from the group consisting of L, V, Q, A and R; wherein AA¹⁹ is selected from the group consisting of F, W, H, Y, I and K; wherein AA²⁰ is selected from the group consisting of L, F, Y, K, I, V and M. In one particular example, PEP11 is selected from the group consisting of LYL, LFF, LYF, LYY, LYK, LYI, LFI, LYV, VYY, QIM, AKV and RKI.

[0415] In certain embodiments, PEP3 is selected from the group consisting of VPT, VPE, APT, TPT, VPA, APV, VPQ, VSQ, SRV and TQV; PEP4 is selected from the group consisting of VVE, TVE, VVR, VVK, VAE, AVS, VVD, VEE, VRS, VKS, QHN, EHS, EEH and EDH; and wherein the pair PEP3:PEP4 is selected from the group consisting of VPT:VVE, VPE:TVE, APT:VVR, APT:VVK, VPT:VAE, VPT:AVS, TPT:VVD, VPA:VVE, APV:VEE, VPQ:VRS, VSQ:VKS, VPQ:VKS, VPT:QHN, VPT:EHS, SRV:EEH and TQV:EDH.

[0416] In certain embodiments, PEP5 is selected from the group consisting of VPT-AA¹¹-AA¹², VPE-AA¹¹-AA¹²-AA¹¹-AA¹², APT-AA¹¹-AA¹², TPT-AA¹¹-AA¹², VPA-AA¹¹-AA¹², VPT-AA¹¹-AA¹², APV-AA¹¹-AA¹², VPQ-AA¹¹-AA¹², VSQ-AA¹¹-AA¹², VPQ-AA¹¹-AA¹², SRV-AA¹¹-AA¹² and TQV-AA¹¹-AA¹²; wherein AA¹¹ is selected from the group consisting of E, K, Q, R, A, D, G and H; and wherein AA¹² is selected from the group consisting of L, M, T, E, Q and H; PEP6 is selected from the group consisting of AA²⁶-AA²⁷-AA²⁸-AA²⁹-VVE, AA²⁶-AA²⁷-AA²⁸-AA²⁹-TVE, AA²⁶-AA²⁷-AA²⁸-AA²⁹-VVR, AA²⁶-AA²⁷-AA²⁸-AA²⁹-VVK, AA²⁶-AA²⁷-AA²⁸-AA²⁹-VAE, AA²⁶-AA²⁷-AA²⁸-AA²⁹-AVS, AA²⁶-AA²⁷-AA²⁸-AA²⁹-VVD, AA²⁶-AA²⁷-AA²⁸-AA²⁹-VEE, AA²⁶-AA²⁷-AA²⁸-AA²⁹-VRS, AA²⁶-AA²⁷-AA²⁸-AA²⁹-VKS, AA²⁶-AA²⁷-AA²⁸-AA²⁹-QHN, AA²⁶-AA²⁷-AA²⁸-AA²⁹-EHS, AA²⁶-AA²⁷-AA²⁸-AA²⁹-EEH and AA²⁶-AA²⁷-AA²⁸-AA²⁹-EDH; wherein AA²⁶ is absent or selected from the group consisting of AA^{III} amino acids, preferably is absent or is E; wherein AA²⁷ and AA²⁸ are independently selected from the group consisting of AA^{III} and AA^{V} amino acids; and wherein AA²⁹ is absent or selected from the group consisting of AA^{II} amino acids, preferably is absent or is S; wherein the pair PEP5:PEP6 is selected from the group consisting of VPT-AA¹¹-AA¹²:AA²⁶-AA²⁷-AA²⁸-AA²⁹-VVE, VPE-AA¹¹-AA¹²:AA²⁶-AA²⁷-AA²⁸-AA²⁹-TVE, APT-AA¹¹-AA¹²:AA²⁶-AA²⁷-AA²⁸-AA²⁹-VVR, APT-AA¹¹-AA¹²:AA²⁶-AA²⁷-AA²⁸-AA²⁹-VVK, VPT-AA¹¹-AA¹²:AA²⁶-AA²⁷-AA²⁸-AA²⁹-VAE, VPT-AA¹¹-AA¹²:AA²⁶-AA²⁷-AA²⁸-AA²⁹-AVS, TPT-AA¹¹-AA¹²:AA²⁶-AA²⁷-AA²⁸-AA²⁹-VVD, VPA-AA¹¹-AA¹²:AA²⁶-AA²⁷-AA²⁸-AA²⁹-VVE, APV-AA¹¹-AA¹²:AA²⁶-AA²⁷-AA²⁸-AA²⁹-VE E, VPQ-AA¹¹-AA¹²:AA²⁶-AA²⁷-AA²⁸-AA²⁹-VRS, VSQ-AA¹¹-AA¹²:AA²⁶-AA²⁷-AA²⁸-AA²⁹-VKS, VPQ-AA¹¹-AA¹²:AA²⁶-AA²⁷-AA²⁸-AA²⁹-VKS, VPT-AA¹¹-AA¹²:AA²⁶-AA²⁷-AA²⁸-AA²⁹-QHN, VPT-AA¹¹-AA¹²:AA²⁶-AA²⁷-AA²⁸-AA²⁹-EHS, SRV-AA¹¹-AA¹²:AA²⁶-AA²⁷-AA²⁸-AA²⁹-EEH and TQV-AA¹¹-AA¹²:AA²⁶-AA²⁷-AA²⁸-AA²⁹-EDH.

[0417] In certain embodiments, PEP5 is selected from the group consisting of VPTEL, VPEKM, APTKL, APTQL, VPTKL, TPTKM, VPARL, VPTRL, APVKT, VPQAL, VSQDL, VPQDL, VPTEE, VPTGQ, SRVHH and TQVQL; PEP6 is selected from the group consisting of DMVVE, NMTVE, EMVVE, NMVVR, NMVVK, EGMSVAE, GMAVS, GMVVD, MIVEE, MIVRS, MIVKS, MVVKS, FLQHN, LEEHS, RLEEH and TLEDH; and wherein the pair PEP5:PEP6 is selected from the group consisting of VPTEL:DMVVE, VPEKM:NMTVE, VPTEL:EMVVE, APTKL:NMVVR, APTQL:NMVVR, APTKL:NMVVK, VPTKL:EGMSVAE, VPTKL:GMAVS, TPTKM:GMVVD, VPARL:DMVVE, VPTRL:DMVVE, APVKT:MIVEE, VPQAL:MIVRS, VSQDL:MIVKS, VPQDL:MVVKS, VPTEE:FLQHN, VPTGQ:LEEHS, SRVHH:RLEEH and TQVQL:TLEDH.

[0418] In certain embodiments, PEP7 is selected from the group consisting of KIPKAXX, GIPEPXX, SIPKAXX, HVTKPTX, YVPKPXX, TVPKPXX, AVPKAXX, KVGKAXX, KASKAXX, GSAGPXX, AAPASXX, STPPTXX, HVPKPXX, RVPSTXX, ASAAPXX, ASASPXX, NDEGLEX, SSVKXQP and RNVQXRP; wherein PEP8 is selected from the group consisting of GXGXR, SXAXR, SXGXH, AXGXH, XGXR, EXGXR, RXGXS, AXGXR, SXGXR, XGXL, XKXS, KXEXR, QXEXR, LEXAXA and LAXKXE; and wherein the pair PEP7:PEP8 is selected from the group consisting of KIPKAXX:GXGXR, GIPEPXX:SXAXR, SIPKAXX:GXGXR, HVTKPTX:SXGXH, YVPKPXX:SXGXH, TVPKPXX:AXGXH, AVPKAXX:AXGXH, KVGKAXX:XGXR, KASKAXX:EXGXR, GSAGPXX:RXGXS, AAPASXX:AXGXR, STPPTXX:SXGXR, HVPKPXX:SXGXH, RVPSTXX:XGXL, ASAAPXX:XKXS, ASASPXX:XKXS, NDEGLEX:KXEXR, NDEGLEX:QXEXR, SSVKXQP:LEXAXA and RNVQXRP:LAXKXE.

[0419] In certain embodiments, PEP9 is selected from the group consisting of KIPKAXXVPT-AA¹¹-AA¹², GIPEPXXVPE-AA¹¹-AA¹², SIPKAXXVPT-AA¹¹-AA¹², HVTKPTXAPT-AA¹¹-AA¹², YVPKPXXAPT-AA¹¹-AA¹², TVPKPXXAPT-AA¹¹-AA¹², AVPKAXXAPT-AA¹¹-AA¹², KVGKAXXVPT-AA¹¹-AA¹², KASKAXXVPT-AA¹¹-AA¹², GSAGPXXTPT-AA¹¹-AA¹², AAPASXXVPA-AA¹¹-AA¹², STPPTXXVPT-AA¹¹-AA¹², HVPKPXXAPT-AA¹¹-AA¹², RVPSTXXAPV-AA¹¹-AA¹², ASAAPXXVPQ-AA¹¹-AA¹², ASASPXXVSQ-AA¹¹-AA¹², ASASPXXVPQ-AA¹¹-AA¹², NDEGLEXVPT-AA¹¹-AA¹², NDEGLEXVPT-AA¹¹-AA¹², SSVKXQPSRV-AA¹¹-AA¹² and RNVQXRPTQV-AA¹¹-AA¹²; wherein AA¹¹ is selected from the group consisting of E, K, Q, R, A, D, G and H; and wherein AA¹² is selected from the group consisting of L, M, T, E, Q and H; PEP10 is selected from the group consisting of AA²⁶-AA²⁷-AA²⁸-AA²⁹-VVEGXGXR, AA²⁶-AA²⁷-AA²⁸-AA²⁹-TVESXAXR, AA²⁶-AA²⁷-AA²⁸-AA²⁹-VVEGXGXR, AA²⁶-AA²⁷-AA²⁸-AA²⁹-VVRSXGXH, AA²⁶-AA²⁷-AA²⁸-AA²⁹-VVRAXGXH, AA²⁶-AA²⁷-AA²⁸-AA²⁹-VVKAXGXH, AA²⁶-AA²⁷-AA²⁸-AA²⁹-VAEXGXR, AA²⁶-AA²⁷-AA²⁸-AA²⁹-AVSEXGXR, AA²⁶-AA²⁷-AA²⁸-AA²⁹-VVDRXGXS, AA²⁶-AA²⁷-AA²⁸-AA²⁹-VVEAXGXR, AA²⁶-AA²⁷-AA²⁸-AA²⁹-VVESXGXR, AA²⁶-AA²⁷-AA²⁸-AA²⁹-VEEXGXL, AA²⁶-AA²⁷-AA²⁸-AA²⁹-VRSXKXS, AA²⁶-AA²⁷-AA²⁸-AA²⁹-VKSXKXS, AA²⁶-AA²⁷-AA²⁸-AA²⁹-VKSXKXS, AA²⁶-AA²⁷-AA²⁸-AA²⁹-QHNKXEXR, AA²⁶-AA²⁷-AA²⁸-AA²⁹-EHSQXEXR, AA²⁶-AA²⁷-AA²⁸-AA²⁹-EEHLEXAXA and AA²⁶-AA²⁷-AA²⁸-AA²⁹-EDHLAXKXE; wherein AA²⁶ is absent or selected from the group consisting of AA^{III} amino acids, preferably is absent or is E; wherein AA²⁷ and AA²⁸ are independently selected from the group consisting of AA^{III} and AA^{V} amino acids; and wherein AA²⁹ is absent or selected from the group consisting of AA^{II} amino acids, preferably is absent or is S; and wherein the pair PEP9:PEP10 is selected from the group consisting of KIPKAXXVPT-AA¹¹-AA¹²:AA²⁶-AA²⁷-AA²⁸-AA²⁹-VVEGXGXR, GIPEPXXVPE-AA¹¹-AA¹²:AA²⁶-AA²⁷-AA²⁸-AA²⁹-TVESXAXR, SIPKAXXVPT-AA¹¹-AA¹²:AA²⁶-AA²⁷-AA²⁸-AA²⁹-VVEGXGXR, HVTKPTXAPT-AA¹¹-AA¹²:AA²⁶-AA²⁷-AA²⁸-AA²⁹-VVRSXGXH, YVPKPXXAPT-AA¹¹-AA¹²:AA²⁶-AA²⁷-AA²⁸-AA²⁹-VVRSXGXH, TVPKPXXAPT-AA¹¹-AA¹²:AA²⁶-AA²⁷-AA²⁸-AA²⁹-VVRAXGXH, AVPKAXXAPT-AA¹¹-AA¹²:AA²⁶-AA²⁷-AA²⁸-AA²⁹-VVKAXGXH, KVGKAXXVPT-AA¹¹-AA¹²:AA²⁶-AA²⁷-AA²⁸-AA²⁹-VAEXGXR, KASKAXXVPT-AA¹¹-AA¹²-AA¹¹-AA¹²:AA²⁶-AA²⁷-AA²⁸-AA²⁹-AVSEXGXR, GSAGPXXTPT-AA¹¹-AA¹²:AA²⁶-AA²⁷-AA²⁸-AA²⁹-VVDRXGXS, AAPASXXVPA-AA¹¹-AA¹²:AA²⁶-AA²⁷-AA²⁸-AA²⁹-VVEAXGXR, STPPTXXVPT-AA¹¹-AA¹²-AA¹¹-AA¹²:AA²⁶-AA²⁷-AA²⁸-AA²⁹-VVESXGXR, HVPKPXXAPT-AA¹¹-AA¹²:AA²⁶-AA²⁷-AA²⁸-AA²⁹-VVRSXGXH, RVPSTXXAPV-AA¹¹-AA¹²:AA²⁶-AA²⁷-AA²⁸-AA²⁹-VEEXGXL, ASAAPXXVPQ-AA¹¹-AA¹²:AA²⁶-AA²⁷-AA²⁸-AA²⁹-VRSXKXS, ASASPXXVSQ-AA¹¹-AA¹²:AA²⁶-AA²⁷-AA²⁸-AA²⁹-VKSXKXS, ASASPXXVPQ-AA¹¹-AA¹²:AA²⁶-AA²⁷-AA²⁸-AA²⁹-VKSXKXS, NDEGLEXVPT-AA¹¹-AA¹²:AA²⁶-AA²⁷-AA²⁸-AA²⁹-QHNKXEXR, NDEGLEXVPT-AA¹¹-AA¹²:AA²⁶-AA²⁷-AA²⁸-AA²⁹-EHSQXEXR, SSVKXQPSRV-AA¹¹-AA¹²:AA²⁶-AA²⁷-AA²⁸-AA²⁹-EEHLEXAXA and RNVQXRPTQV-AA¹¹-AA¹²:AA²⁶-AA²⁷-AA²⁸-AA²⁹-EDHLAXKXE.

[0420] In certain embodiments, PEP9 is selected from the group consisting of KIPKAXXVPTEL, GIPEPXXVPEKM, SIPKAXXVPTEL, HVTKPTXAPTKL, YVPKPXXAPTKL, TVPKPXXAPTQL, AVPKAXXAPTKL, KVGKAXXVPTKL, KASKAXXVPTKL, GSAGPXXTPTKM, AAPASXXVPARL, STPPTXXVPTRL, HVPKPXXAPTKL, RVPSTXXAPVKT, ASAAPXXVPQAL, ASASPXXVSQDL, ASASPXXVPQDL, NDEGLEXVPTEE, NDEGLEXVPTGQ, SSVKXQPSRVHH and RNVQXRPTQVQL; PEP10 is selected from the group consisting of DMVVEGXGXR, NMTVESXAXR, EMVVEGXGXR, NMVVRSXGXH, NMVVRAXGXH, NMVVKAXGXH, EGMSVAEXGXR, GMAVSEXGXR, GMVVDRXGXS, DMVVEAXGXR, DMVVESXGXR, MIVEEXGXL, MIVRSXKXS, MIVKSXKXS, MVVKSXKXS, FLQHNKXEXR, LEEHSQXEXR, RLEEHLEXAXA and TLEDHLAXKXE; and wherein the pair PEP9:PEP10 is selected from the group consisting of KIPKAXXVPTEL:DMVVEGXGXR, GIPEPXXVPEKM:NMTVESXAXR, SIPKAXXVPTEL:EMVVEGXGXR, HVTKPTXAPTKL:NMVVRSXGXH, YVPKPXXAPTKL:NMVVRSXGXH, TVPKPXXAPTQL:NMVVRAXGXH, AVPKAXXAPTKL:NMVVKAXGXH, KVGKAXXVPTKL:EGMSVAEXGXR, KASKAXXVPTKL:GMAVSEXGXR, GSAGPXXTPTKM:GMVVDRXGXS, AAPASXXVPARL:DMVVEAXGXR, STPPTXXVPTRL:DMVVESXGXR, HVPKPXXAPTKL:NMVVRSXGXH, RVPSTXXAPVKT:MIVEEXGXL, ASAAPXXVPQAL:MIVRSXKXS, ASASPXXVSQDL:MIVKSXKXS, ASASPXXVPQDL:MVVKSXKXS, NDEGLEXVPTEE:FLQHNKXEXR, NDEGLEXVPTGQ:LEEHSQXEXR, NDEGLEXVPTEE:FLQHNKXEXR, NDEGLEXVPTEE:FLQHNKXEXR, SSVKXQPSRVHH:RLEEHLEXAXA and RNVQXRPTQVQL:TLEDHLAXKXE.

[0421] In certain embodiments, PEP5 is selected from the group consisting of VPTEL, VPEKM, APTKL, APTQL, VPTKL, TPTKM, VPARL, VPTRL, APVKT, VPQAL, VSQDL, VPQDL, VPTEE, VPTGQ, SRVHH and TQVQL; PEP6 is selected from the group consisting of DMVVE, NMTVE, EMVVE, NMVVR, NMVVK, EGMSVAE, GMAVS, GMVVD, MIVEE, MIVRS, MIVKS, MVVKS, FLQHN, LEEHS, RLEEH and TLEDH; wherein the pair PEP5:PEP6 is selected from the group consisting of VPTEL:DMVVE, VPEKM:NMTVE, VPTEL:EMVVE, APTKL:NMVVR, APTQL:NMVVR, APTKL:NMVVK, VPTKL:EGMSVAE, VPTKL:GMAVS, TPTKM:GMVVD, VPARL:DMVVE, VPTRL:DMVVE, APVKT:MIVEE, VPQAL:MIVRS, VSQDL:MIVKS, VPQDL:MVVKS, VPTEE:FLQHN, VPTGQ:LEEHS, SRVHH:RLEEH and TQVQL:TLEDH; and wherein the pair PEP5:PEP6 is not VPTEL:DMVVE when PEP1 is SAIS and PEP2 is LKNYQ; wherein the pair PEP5:PEP6 is not VPEKM:NMTVE when PEP1 is SSLS and PEP2 is LKVYP; wherein the pair PEP5:PEP6 is not VPTEL:EMVVE when PEP1 is SAIS and PEP2 is LKNYQ; wherein the pair PEP5:PEP6 is not APTKL:NMVVR when PEP1 is NAIS and PEP2 is LKKYR; wherein the pair PEP5:PEP6 is not APTQL:NMVVR when PEP1 is NAIS and PEP2 is LKKYR; wherein the pair PEP5:PEP6 is not APTKL:NMVVK when PEP1 is SATS and PEP2 is LRKHR; wherein the pair PEP5:PEP6 is not VPTKL:EGMSVAE when PEP1 is SPIS and PEP2 is LKYHY; wherein the pair PEP5:PEP6 is not VPTKL:GMAVS when PEP1 is EPIS and PEP2 is KFKYE; wherein the pair PEP5:PEP6 is not TPTKM:GMVVD when PEP1 is SPIN and PEP2 is YGKIP; wherein the pair PEP5:PEP6 is not VPARL:DMVVE when PEP1 is SPIS and PEP2 is YKQYE; wherein the pair PEP5:PEP6 is not VPTRL:DMVVE when PEP1 is SPIS and PEP2 is YKQYE; wherein the pair PEP5:PEP6 is not APVKT:MIVEE when PEP1 is KPLS and PEP2 is DHHKD; wherein the pair PEP5:PEP6 is not VPQAL:MIVRS when PEP1 is EPLP and PEP2 is EQLSN; wherein the pair PEP5:PEP6 is not VSQDL:MIVKS when PEP1 is EPLT and PEP2 is EQLSN; wherein the pair PEP5:PEP6 is not VPQDL:MVVKS when PEP1 is EPLT and PEP2 is EQLSN; wherein the pair PEP5:PEP6 is not VPTEE:FLQHN when PEP1 is SNIT and PEP2 is IGEMS; wherein the pair PEP5:PEP6 is not VPTGQ:LEEHS when PEP1 is SNIT and PEP2 is LGEMS; wherein the pair PEP5:PEP6 is not SRVHH:RLEEH when PEP1 is RSVK and PEP2 is KEVQV; and wherein the pair PEP5:PEP6 is not TQVQL:TLEDH when PEP1 is RPVQ and PEP2 is KKATV.

[0422] In certain embodiments, PEP9 is selected from the group consisting of KIPKAXXVPT-AA¹¹-AA¹², GIPEPXXVPE-AA¹¹-AA¹², SIPKAXXVPT-AA¹¹-AA¹², HVTKPTXAPT-AA¹¹-AA¹², YVPKPXXAPT-AA¹¹-AA¹², TVPKPXXAPT-AA¹¹-AA¹², AVPKAXXAPT-AA¹¹-AA¹², KVGKAXXVPT-AA¹¹-AA¹², KASKAXXVPT-AA¹¹-AA¹², GSAGPXXTPT-AA¹¹-AA¹², AAPASXXVPA-AA¹¹-AA¹², STPPTXXVPT-AA¹¹-AA¹², HVPKPXXAPT-AA¹¹-AA¹², RVPSTXXAPV-AA¹¹-AA¹², ASAAPXXVPQ-AA¹¹-AA¹², ASASPXXVSQ-AA¹¹-AA¹², ASASPXXVPQ-AA¹¹-AA¹², NDEGLEXVPT-AA¹¹-AA¹², NDEGLEXVPT-AA¹¹-AA¹², SSVKXQPSRV-AA¹¹-AA¹² and RNVQXRPTQV-AA¹¹-AA¹²; wherein AA¹¹ is selected from the group consisting of E, K, Q, R, A, D, G and H; and wherein AA¹² is selected from the group consisting of L, M, T, E, Q and H; PEP10 is selected from the group consisting of AA²⁶-AA²⁷-AA²⁸-AA²⁹-VVEGXGXR, AA²⁶-AA²⁷-AA²⁸-AA²⁹-TVESXAXR, AA²⁶-AA²⁷-AA²⁸-AA²⁹-VVEGXGXR, AA²⁶-AA²⁷-AA²⁸-AA²⁹-VVRSXGXH, AA²⁶-AA²⁷-AA²⁸-AA²⁹-VVRAXGXH, AA²⁶-AA²⁷-AA²⁸-AA²⁹-VVKAXGXH, AA²⁶-AA²⁷-AA²⁸-AA²⁹-VAEXGXR, AA²⁶-AA²⁷-AA²⁸-AA²⁹-AVSEXGXR, AA²⁶-AA²⁷-AA²⁸-AA²⁹-VVDRXGXS, AA²⁶-AA²⁷-AA²⁸-AA²⁹-VVEAXGXR, AA²⁶-AA²⁷-AA²⁸-AA²⁹-VVESXGXR, AA²⁶-AA²⁷-AA²⁸-AA²⁹-VEEXGXL, AA²⁶-AA²⁷-AA²⁸-AA²⁹-VKSXKXS, AA²⁶-AA²⁷-AA²⁸-AA²⁹-VKSXKXS, AA²⁶-AA²⁷-AA²⁸-AA²⁹-VKSXKXS, AA²⁶-AA²⁷-AA²⁸-AA²⁹-QHNKXEXR, AA²⁶-AA²⁷-AA²⁸-AA²⁹-EHSQXEXR, AA²⁶-AA²⁷-AA²⁸-AA²⁹-EEHLEXAXA and AA²⁶-AA²⁷-AA²⁸-AA²⁹-EDHLAXKXE; wherein AA²⁶ is absent or selected from the group consisting of AA^{III} amino acids, preferably is absent or is E; wherein AA²⁷ and AA²⁸ are independently selected from the group consisting of AA^{III} and AA^{V} amino acids; and wherein AA²⁹ is absent or selected from the group consisting of AA^{II} amino acids, preferably is absent or is S; and wherein the pair PEP9:PEP10 is selected from the group consisting of KIPKAXXVPT-AA¹¹-AA¹²:AA²⁶-AA²⁷-AA²⁸-AA²⁹-VVEGXGXR, GIPEPXXVPE-AA¹¹-AA¹²:AA²⁶-AA²⁷-AA²⁸-AA²⁹-TVESXAXR, SIPKAXXVPT-AA¹¹-AA¹²:AA²⁶-AA²⁷-AA²⁸-AA²⁹-VVEGXGXR, HVTKPTXAPT-AA¹¹-AA¹²:AA²⁶-AA²⁷-AA²⁸-AA²⁹-VVRSXGXH, YVPKPXXAPT-AA¹¹-AA¹²:AA²⁶-AA²⁷-AA²⁸-AA²⁹-VVRSXGXH, TVPKPXXAPT-AA¹¹-AA¹²:AA²⁶-AA²⁷-AA²⁸-AA²⁹-VVRAXGXH, AVPKAXXAPT-AA¹¹-AA¹²:AA²⁶-AA²⁷-AA²⁸-AA²⁹-VVKAXGXH, KVGKAXXVPT-AA¹¹-AA¹²:AA²⁶-AA²⁷-AA²⁸-AA²⁹-VAEXGXR, KASKAXXVPT-AA¹¹-AA¹²-AA¹¹-AA¹²:AA²⁶-AA²⁷-AA²⁸-AA²⁹-AVSEXGXR, GSAGPXXTPT-AA¹¹-AA¹²:AA²⁶-AA²⁷-AA²⁸-AA²⁹-VVDRXGXS, AAPASXXVPA-AA¹¹-AA¹²:AA²⁶-AA²⁷-AA²⁸-AA²⁹-VVEAXGXR, STPPTXXVPT-AA¹¹-AA¹²-AA¹¹-AA¹²:AA²⁶-AA²⁷-AA²⁸-AA²⁹-VVESXGXR, HVPKPXXAPT-AA¹¹-AA¹²:AA²⁶-AA²⁷-AA²⁸-AA²⁹-VVRSXGXH, RVPSTXXAPV-AA¹¹-AA¹²:AA²⁶-AA²⁷-AA²⁸-AA²⁹-VEEXGXL, ASAAPXXVPQ-AA¹¹-AA¹²:AA²⁶-AA²⁷-AA²⁸-AA²⁹-VRSXKXS, ASASPXXVSQ-AA¹¹-AA¹²:AA²⁶-AA²⁷-AA²⁸-AA²⁹-VKSXKXS, ASASPXXVPQ-AA¹¹-AA¹²:AA²⁶-AA²⁷-AA²⁸-AA²⁹-VKSXKXS, NDEGLEXVPT-AA¹¹-AA¹²:AA²⁶-AA²⁷-AA²⁸-AA²⁹-QHNKXEXR, NDEGLEXVPT-AA¹¹-AA¹²:AA²⁶-AA²⁷-AA²⁸-AA²⁹-EHSQXEXR, SSVKXQPSRV-AA¹¹-AA¹²:AA²⁶-AA²⁷-AA²⁸-AA²⁹-EEHLEXAXA and RNVQXRPTQV-AA¹¹-AA¹²:AA²⁶-AA²⁷-AA²⁸-AA²⁹-EDHLAXKXE; and wherein PEP9:PEP10 is not KIPKAXXVPT-AA¹¹-AA¹²:AA²⁶-AA²⁷-AA²⁸-AA²⁹-VVEGXGXR when PEP1 is SAIS and PEP2 is LKNYQ; wherein PEP9:PEP10 is not GIPEPXXVPE-AA¹¹-AA¹²:AA²⁶-AA²⁷-AA²⁸-AA²⁹-TVESXAXR when PEP1 is SSLS and PEP2 is LKVYP; wherein PEP9:PEP10 is not SIPKAXXVPT-AA¹¹-AA¹²:AA²⁶-AA²⁷-AA²⁸-AA²⁹-VVEGXGXR when PEP1 is SAIS and PEP2 is LKNYQ; wherein PEP9:PEP10 is not HVTKPTXAPT-AA¹¹-AA¹²:AA²⁶-AA²⁷-AA²⁸-AA²⁹-VVRSXGXH when PEP1 is NAIS and PEP2 is LKKYR; wherein PEP9:PEP10 is not YVPKPXXAPT-AA¹¹-AA¹²:AA²⁶-AA²⁷-AA²⁸-AA²⁹-VVRSXGXH when PEP1 is NAIS and PEP2 is LKKYR; wherein PEP9:PEP10 is not TVPKPXXAPT-AA¹¹-AA¹²:AA²⁶-AA²⁷-AA²⁸-AA²⁹-VVRAXGXH when PEP1 is NAIS and PEP2 is LKKYR; wherein PEP9:PEP10 is not AVPKAXXAPT-AA¹¹-AA¹²:AA²⁶-AA²⁷-AA²⁸-AA²⁹-VVKAXGXH when PEP1 is SATS and PEP2 is LRKHR; wherein PEP9:PEP10 is not KVGKAXXVPT-AA¹¹-AA¹²:AA²⁶-AA²⁷-AA²⁸-AA²⁹-VAEXGXR when PEP1 is SPIS and PEP2 is LKYHY; wherein PEP9:PEP10 is not KASKAXXVPT-AA¹¹-AA¹²-AA¹¹-AA¹²:AA²⁶-AA²⁷-AA²⁸-AA²⁹-AVSEXGXR when PEP1 is EPIS and PEP2 is KFKYE; wherein PEP9:PEP10 is not GSAGPXXTPT-AA¹¹-AA¹²:AA²⁶-AA²⁷-AA²⁸-AA²⁹-VVDRXGXS when PEP1 is SPIN and PEP2 is YGKIP; wherein PEP9:PEP10 is not AAPASXXVPA-AA¹¹-AA¹²:AA²⁶-AA²⁷-AA²⁸-AA²⁹-VVEAXGXR when PEP1 is SPIS and PEP2 is YKQYE; wherein PEP9:PEP10 is not STPPTXXVPT-AA¹¹-AA¹²-AA¹¹-AA¹²:AA²⁶-AA²⁷-AA²⁸-AA²⁹-VVESXGXR when PEP1 is SPIS and PEP2 is YKQYE; wherein PEP9:PEP10 is not HVPKPXXAPT-AA¹¹-AA¹²:AA²⁶-AA²⁷-AA²⁸-AA²⁹-VVRSXGXH when PEP1 is NAIS and PEP2 is LKKYR; wherein PEP9:PEP10 is not RVPSTXXAPV-AA¹¹-AA¹²:AA²⁶-AA²⁷-AA²⁸-AA²⁹-VEEXGXL when PEP1 is KPLS and PEP2 is DHHKD; wherein PEP9:PEP10 is not ASAAPXXVPQ-AA¹¹-AA¹²:AA²⁶-AA²⁷-AA²⁸-AA²⁹-VRSXKXS when PEP1 is EPLP and PEP2 is EQLSN; ASASPXXVSQ-AA¹¹-AA¹²:AA²⁶-AA²⁷-AA²⁸-AA²⁹-VKSXKXS when PEP1 is EPLT and PEP2 is EQLSN; wherein PEP9:PEP10 is not ASASPXXVPQ-AA¹¹-AA¹²:AA²⁶-AA²⁷-AA²⁸-AA²⁹-VKSXKXS when PEP1 is EPLT and PEP2 is EQLSN; wherein PEP9:PEP10 is not NDEGLEXVPT-AA¹¹-AA¹²:AA²⁶-AA²⁷-AA²⁸-AA²⁹-QHNKXEXR when PEP1 is SNIT and PEP2 is IGEMS; wherein PEP9:PEP10 is not NDEGLEXVPT-AA¹¹-AA¹²:AA²⁶-AA²⁷-AA²⁸-AA²⁹-EHSQXEXR when PEP1 is SNIT and PEP2 is LGEMS; wherein PEP9:PEP10 is not SSVKXQPSRV-AA¹¹-AA¹²:AA²⁶-AA²⁷-AA²⁸-AA²⁹-EEHLEXAXA when PEP1 is RSVK and PEP2 is KEVQV; and wherein PEP9:PEP10 is not RNVQXRPTQV-AA¹¹-AA¹²:AA²⁶-AA²⁷-AA²⁸-AA²⁹-EDHLAXKXE when PEP1 is RPVQ and PEP2 is KKATV.

[0423] In certain embodiments, PEP9 is selected from the group consisting of KIPKAXXVPTEL, GIPEPXXVPEKM, SIPKAXXVPTEL, HVTKPTXAPTKL, YVPKPXXAPTKL, TVPKPXXAPTQL, AVPKAXXAPTKL, KVGKAXXVPTKL, KASKAXXVPTKL, GSAGPXXTPTKM, AAPASXXVPARL, STPPTXXVPTRL, HVPKPXXAPTKL, RVPSTXXAPVKT, ASAAPXXVPQAL, ASASPXXVSQDL, ASASPXXVPQDL, NDEGLEXVPTEE, NDEGLEXVPTGQ, SSVKXQPSRVHH and RNVQXRPTQVQL; PEP10 is selected from the group consisting of DMVVEGXGXR, NMTVESXAXR, EMVVEGXGXR, NMVVRSXGXH, NMVVRAXGXH, NMVVKAXGXH, EGMSVAEXGXR, GMAVSEXGXR, GMVVDRXGXS, DMVVEAXGXR, DMVVESXGXR, MIVEEXGXL, MIVRSXKXS, MIVKSXKXS, MVVKSXKXS, FLQHNKXEXR, LEEHSQXEXR, RLEEHLEXAXA and TLEDHLAXKXE; and wherein the pair PEP9:PEP10 is selected from the group consisting of KIPKAXXVPTEL:DMVVEGXGXR, GIPEPXXVPEKM:NMTVESXAXR, SIPKAXXVPTEL:EMVVEGXGXR, HVTKPTXAPTKL:NMVVRSXGXH, YVPKPXXAPTKL:NMVVRSXGXH, TVPKPXXAPTQL:NMVVRAXGXH, AVPKAXXAPTKL:NMVVKAXGXH, KVGKAXXVPTKL:EGMSVAEXGXR, KASKAXXVPTKL:GMAVSEXGXR, GSAGPXXTPTKM:GMVVDRXGXS, AAPASXXVPARL:DMVVEAXGXR, STPPTXXVPTRL:DMVVESXGXR, HVPKPXXAPTKL:NMVVRSXGXH, RVPSTXXAPVKT:MIVEEXGXL, ASAAPXXVPQAL:MIVRSXKXS, ASASPXXVSQDL:MIVKSXKXS, ASASPXXVPQDL:MVVKSXKXS, NDEGLEXVPTEE:FLQHNKXEXR, NDEGLEXVPTGQ:LEEHSQXEXR, NDEGLEXVPTEE:FLQHNKXEXR, NDEGLEXVPTEE:FLQHNKXEXR, SSVKXQPSRVHH:RLEEHLEXAXA and RNVQXRPTQVQL:TLEDHLAXKXE; and wherein PEP9:PEP10 is not KIPKAXXVPTEL:DMVVEGXGXR when PEP1 is SAIS and PEP2 is LKNYQ; wherein PEP9:PEP10 is not GIPEPXXVPEKM:NMTVESXAXR when PEP1 is SSLS and PEP2 is LKVYP; wherein PEP9:PEP10 is not SIPKAXXVPTEL:EMVVEGXGXR when PEP1 is SAIS and PEP2 is LKNYQ; wherein PEP9:PEP10 is not HVTKPTXAPTKL:NMVVRSXGXH when PEP1 is NAIS and PEP2 is LKKYR; wherein PEP9:PEP10 is not YVPKPXXAPTKL:NMVVRSXGXH when PEP1 is NAIS and PEP2 is LKKYR; wherein PEP9:PEP10 is not TVPKPXXAPTQL:NMVVRAXGXH when PEP1 is NAIS and PEP2 is LKKYR; wherein PEP9:PEP10 is not AVPKAXXAPTKL:NMVVKAXGXH when PEP1 is SATS and PEP2 is LRKHR; wherein PEP9:PEP10 is not KVGKAXXVPTKL:EGMSVAEXGXR when PEP1 is SPIS and PEP2 is LKYHY; wherein PEP9:PEP10 is not KASKAXXVPTKL:GMAVSEXGXR when PEP1 is EPIS and PEP2 is KFKYE; wherein PEP9:PEP10 is not GSAGPXXTPTKM:GMVVDRXGXS when PEP1 is SPIN and PEP2 is YGKIP; wherein PEP9:PEP10 is not AAPASXXVPARL:DMVVEAXGXR when PEP1 is SPIS and PEP2 is YKQYE; wherein PEP9:PEP10 is not STPPTXXVPTRL:DMVVESXGXR when PEP1 is SPIS and PEP2 is YKQYE; wherein PEP9:PEP10 is not HVPKPXXAPTKL:NMVVRSXGXH when PEP1 is NAIS and PEP2 is LKKYR; wherein PEP9:PEP10 is not RVPSTXXAPVKT:MIVEEXGXL when PEP1 is KPLS and PEP2 is DHHKD; wherein PEP9:PEP10 is not ASAAPXXVPQAL:MIVRSXKXS when PEP1 is EPLP and PEP2 is EQLSN; ASASPXXVSQDL:MIVKSXKXS when PEP1 is EPLT and PEP2 is EQLSN; wherein PEP9:PEP10 is not ASASPXXVPQDL:MVVKSXKXS when PEP1 is EPLT and PEP2 is EQLSN; wherein PEP9:PEP10 is not NDEGLEXVPTEE:FLQHNKXEXR when PEP1 is SNIT and PEP2 is IGEMS; wherein PEP9:PEP10 is not NDEGLEXVPTGQ:LEEHSQXEXR when PEP1 is SNIT and PEP2 is LGEMS; wherein PEP9:PEP10 is not NDEGLEXVPTEE:FLQHNKXEXR when PEP1 is SNIT and PEP2 is IGEMS; wherein PEP9:PEP10 is not NDEGLEXVPTEE:FLQHNKXEXR when PEP1 is SNIT and PEP2 is IGEMS; wherein PEP9:PEP10 is not SSVKXQPSRVHH:RLEEHLEXAXA when PEP1 is RSVK and PEP2 is KEVQV; and wherein PEP9:PEP10 is not RNVQXRPTQVQL:TLEDHLAXKXE when PEP1 is RPVQ and PEP2 is KKATV.

[0424] In certain embodiments, PEP1 is selected from the group consisting of SAIS, SSLS, NAIS, SATS, SPIS, EPIS, SPIN, KPLS, EPLP, EPLT, SNIT, RSVK and RPVQ; PEP11 is selected from the group consisting of LYL, LFF, LYF, LYY, LYK, LYI, LFI, LYV, VYY, QIM, AKV and RKI; and the pair PEP1:PEP11 is selected from the group consisting of SAIS:LYL, SSLS:LFF, NAIS:LYF, SATS:LYY, SPIS:LYK, SPIS:LYI, EPIS:LYL, SPIN:LYF, KPLS:LYV, EPLP:VYY, EPLT:LYY, SNIT:QIM, RSVK:AKV and RPVQ:RKI.

[0425] In one particular example, said GFR-binding compound is a peptide, a variant or analog thereof, or a peptidomimetic as defined herein, with between 20 and 60 (in particular between 20 and 50, and more particularly, between 20 and 45) amino acids, comprising a peptide with four amino acids (PEP1) or a peptide with eight amino acids (PEP12), a peptide with five amino acids (PEP2), and optionally a pair of peptides selected form the group consisting of PEP3:PEP4, PEP3:PEP6, PEP3:PEP10, PEP5:PEP4, PEP9:PEP4, PEP5:PEP6, PEP5:PEP10, PEP9:PEP6 and PEP9:PEP10; wherein said GFR-binding compound does not comprise the pair of peptides VPTEL:DMVVE when PEP1 is SAIS and PEP2 is LKNYQ; wherein said GFR-binding compound does not comprise the pair of peptides VPEKM:NMTVE when PEP1 is SSLS and PEP2 is LKVYP; wherein said GFR-binding compound does not comprise the pair of peptides VPTEL:EMVVE when PEP1 is SAIS and PEP2 is LKNYQ; wherein said GFR-binding compound does not comprise the pair of peptides APTKL:NMVVR when PEP1 is NAIS and PEP2 is LKKYR; wherein said GFR-binding compound does not comprise the pair of peptides APTQL:NMVVR when PEP1 is NAIS and PEP2 is LKKYR; wherein said GFR-binding compound does not comprise the pair of peptides APTKL:NMVVK when PEP1 is SATS and PEP2 is LRKHR; wherein said GFR-binding compound does not comprise the pair of peptides VPTKL:EGMSVAE when PEP1 is SPIS and PEP2 is LKYHY; wherein said GFR-binding compound does not comprise the pair of peptides VPTKL:GMAVS when PEP1 is EPIS and PEP2 is KFKYE; wherein said GFR-binding compound does not comprise the pair of peptides TPTKM:GMVVD when PEP1 is SPIN and PEP2 is YGKIP; wherein said GFR-binding compound does not comprise the pair of peptides VPARL:DMVVE when PEP1 is SPIS and PEP2 is YKQYE; wherein said GFR-binding compound does not comprise the pair of peptides VPTRL:DMVVE when PEP1 is SPIS and PEP2 is YKQYE; wherein said GFR-binding compound does not comprise the pair of peptides APVKT:MIVEE when PEP1 is KPLS and PEP2 is DHHKD; wherein said GFR-binding compound does not comprise the pair of peptides VPQAL:MIVRS when PEP1 is EPLP and PEP2 is EQLSN; wherein said GFR-binding compound does not comprise the pair of peptides VSQDL:MIVKS when PEP1 is EPLT and PEP2 is EQLSN; wherein said GFR-binding compound does not comprise the pair of peptides VPQDL:MVVKS when PEP1 is EPLT and PEP2 is EQLSN; wherein said GFR-binding compound does not comprise the pair of peptides VPTEE:FLQHN when PEP1 is SNIT and PEP2 is IGEMS; wherein said GFR-binding compound does not comprise the pair of peptides VPTGQ:LEEHS when PEP1 is SNIT and PEP2 is LGEMS; wherein said GFR-binding compound does not comprise the pair of peptides SRVHH:RLEEH when PEP1 is RSVK and PEP2 is KEVQV; and wherein said GFR-binding compound does not comprise the pair of peptides TQVQL:TLEDH when PEP1 is RPVQ and PEP2 is KKATV.

[0426] In one particular example, said GFR-binding compound is a peptide, a variant or analog thereof, or a peptidomimetic as defined herein, with between 20 and 60 (in particular between 20 and 50, and more particularly, between 20 and 45) amino acids, comprising a peptide with four amino acids (PEP1) or a peptide with eight amino acids (PEP12), a peptide with five amino acids (PEP2), and optionally a pair of peptides selected form the group consisting of PEP3:PEP4, PEP3:PEP6, PEP3:PEP10, PEP5:PEP4, PEP9:PEP4, PEP5:PEP6, PEP5:PEP10, PEP9:PEP6 and PEP9:PEP10; wherein said GFR-binding compound does not comprise the pair of peptides KIPKAXXVPTEL:DMVVEGXGXR when PEP1 is SAIS and PEP2 is LKNYQ; wherein said GFR-binding compound does not comprise the pair of peptides GIPEPXXVPEKM:NMTVESXAXR when PEP1 is SSLS and PEP2 is LKVYP; wherein said GFR-binding compound does not comprise the pair of peptides SIPKAXXVPTEL:EMVVEGXGXR when PEP1 is SAIS and PEP2 is LKNYQ; wherein said GFR-binding compound does not comprise the pair of peptides HVTKPTXAPTKL:NMVVRSXGXH when PEP1 is NAIS and PEP2 is LKKYR; wherein said GFR-binding compound does not comprise the pair of peptides YVPKPXXAPTKL:NMVVRSXGXH when PEP1 is NAIS and PEP2 is LKKYR; wherein said GFR-binding compound does not comprise the pair of peptides TVPKPXXAPTQL:NMVVRAXGXH when PEP1 is NAIS and PEP2 is LKKYR; wherein said GFR-binding compound does not comprise the pair of peptides AVPKAXXAPTKL:NMVVKAXGXH when PEP1 is SATS and PEP2 is LRKHR; wherein said GFR-binding compound does not comprise the pair of peptides KVGKAXXVPTKL:EGMSVAEXGXR when PEP1 is SPIS and PEP2 is LKYHY; wherein said GFR-binding compound does not comprise the pair of peptides KASKAXXVPTKL:GMAVSEXGXR when PEP1 is EPIS and PEP2 is KFKYE; wherein said GFR-binding compound does not comprise the pair of peptides GSAGPXXTPTKM:GMVVDRXGXS when PEP1 is SPIN and PEP2 is YGKIP; wherein said GFR-binding compound does not comprise the pair of peptides AAPASXXVPARL:DMVVEAXGXR when PEP1 is SPIS and PEP2 is YKQYE; wherein said GFR-binding compound does not comprise the pair of peptides STPPTXXVPTRL:DMVVESXGXR when PEP1 is SPIS and PEP2 is YKQYE; wherein said GFR-binding compound does not comprise the pair of peptides HVPKPXXAPTKL:NMVVRSXGXH when PEP1 is NAIS and PEP2 is LKKYR; wherein said GFR-binding compound does not comprise the pair of peptides RVPSTXXAPVKT:MIVEEXGXL when PEP1 is KPLS and PEP2 is DHHKD; wherein said GFR-binding compound does not comprise the pair of peptides ASAAPXXVPQAL:MIVRSXKXS when PEP1 is EPLP and PEP2 is EQLSN; ASASPXXVSQDL:MIVKSXKXS when PEP1 is EPLT and PEP2 is EQLSN; wherein said GFR-binding compound does not comprise the pair of peptides ASASPXXVPQDL:MVVKSXKXS when PEP1 is EPLT and PEP2 is EQLSN; wherein said GFR-binding compound does not comprise the pair of peptides NDEGLEXVPTEE:FLQHNKXEXR when PEP1 is SNIT and PEP2 is IGEMS; wherein said GFR-binding compound does not comprise the pair of peptides NDEGLEXVPTGQ:LEEHSQXEXR when PEP1 is SNIT and PEP2 is LGEMS; wherein said GFR-binding compound does not comprise the pair of peptides NDEGLEXVPTEE:FLQHNKXEXR when PEP1 is SNIT and PEP2 is IGEMS; wherein said GFR-binding compound does not comprise the pair of peptides NDEGLEXVPTEE:FLQHNKXEXR when PEP1 is SNIT and PEP2 is IGEMS; wherein said GFR-binding compound does not comprise the pair of peptides SSVKXQPSRVHH:RLEEHLEXAXA when PEP1 is RSVK and PEP2 is KEVQV; wherein said GFR-binding compound does not comprise the pair of peptides RNVQXRPTQVQL:TLEDHLAXKXE when PEP1 is RPVQ and PEP2 is KKATV.

[0427] In particular, in certain embodiments, the quadruplet PEP3:PEP1:PEP2:PEP4 is selected from the group consisting of VPT:SAIS:LKNYQ:VVE, VPE:SAIS:LKNYQ:TVE, APT:SAIS:LKNYQ:VVR, APT:SAIS:LKNYQ:VVK, VPT:SAIS:LKNYQ:VAE, VPT:SAIS:LKNYQ:AVS, TPT:SAIS:LKNYQ:VVD, VPA:SAIS:LKNYQ:VVE, APV:SAIS:LKNYQ:VEE, VPQ:SAIS:LKNYQ:VRS, VSQ:SAIS:LKNYQ:VKS, VPQ:SAIS:LKNYQ:VKS, VPT:SAIS:LKNYQ:QHN, VPT:SAIS:LKNYQ:EHS, SRV:SAIS:LKNYQ:EEH, TQV:SAIS:LKNYQ:EDH, VPE:SSLS:LKVYP:TVE, VPT:SSLS:LKVYP:VVE, APT:SSLS:LKVYP:VVR, APT:SSLS:LKVYP:VVK, VPT:SSLS:LKVYP:VAE, VPT:SSLS:LKVYP:AVS, TPT:SSLS:LKVYP:VVD, VPA:SSLS:LKVYP:VVE, APV:SSLS:LKVYP:VEE, VPQ:SSLS:LKVYP:VRS, VSQ:SSLS:LKVYP:VKS, VPQ:SSLS:LKVYP:VKS, VPT:SSLS:LKVYP:QHN, VPT:SSLS:LKVYP:EHS, SRV:SSLS:LKVYP:EEH, TQV:SSLS:LKVYP:EDH, APT:NAIS:LKKYR:VVR, VPT:NAIS:LKKYR:VVE, VPE:NAIS:LKKYR:TVE, APT:NAIS:LKKYR:VVK, VPT:NAIS:LKKYR:VAE, VPT:NAIS:LKKYR:AVS, TPT:NAIS:LKKYR:VVD, VPA:NAIS:LKKYR:VVE, APV:NAIS:LKKYR:VEE, VPQ:NAIS:LKKYR:VRS, VSQ:NAIS:LKKYR:VKS, VPQ:NAIS:LKKYR:VKS, VPT:NAIS:LKKYR:QHN, VPT:NAIS:LKKYR:EHS, SRV:NAIS:LKKYR:EEH, TQV:NAIS:LKKYR:EDH, APT:SATS:LRKHR:VVK, VPT:SATS:LRKHR:VVE, VPE:SATS:LRKHR:TVE, APT:SATS:LRKHR:VVR, VPT:SATS:LRKHR:VAE, VPT:SATS:LRKHR:AVS, TPT:SATS:LRKHR:VVD, VPA:SATS:LRKHR:VVE, APV:SATS:LRKHR:VEE, VPQ:SATS:LRKHR:VRS, VSQ:SATS:LRKHR:VKS, VPQ:SATS:LRKHR:VKS, VPT:SATS:LRKHR:QHN, VPT:SATS:LRKHR:EHS, SRV:SATS:LRKHR:EEH, TQV:SATS:LRKHR:EDH, VPT:SPIS:LKYHY:VAE, VPT:SPIS:LKYHY:VVE, VPE:SPIS:LKYHY:TVE, APT:SPIS:LKYHY:VVR, APT:SPIS:LKYHY:VVK, VPT:SPIS:LKYHY:AVS, TPT:SPIS:LKYHY:VVD, VPA:SPIS:LKYHY:VVE, APV:SPIS:LKYHY:VEE, VPQ:SPIS:LKYHY:VRS, VSQ:SPIS:LKYHY:VKS, VPQ:SPIS:LKYHY:VKS, VPT:SPIS:LKYHY:QHN, VPT:SPIS:LKYHY:EHS, SRV:SPIS:LKYHY:EEH, TQV:SPIS:LKYHY:EDH, VPT:EPIS:KFKYE:AVS, VPT:EPIS:KFKYE:VVE, VPE:EPIS:KFKYE:TVE, APT:EPIS:KFKYE:VVR, APT:EPIS:KFKYE:VVK, VPT:EPIS:KFKYE:VAE, TPT:EPIS:KFKYE:VVD, VPA:EPIS:KFKYE:VVE, APV:EPIS:KFKYE:VEE, VPQ:EPIS:KFKYE:VRS, VSQ:EPIS:KFKYE:VKS, VPQ:EPIS:KFKYE:VKS, VPT:EPIS:KFKYE:QHN, VPT:EPIS:KFKYE:EHS, SRV:EPIS:KFKYE:EEH, TQV:EPIS:KFKYE:EDH, TPT:SPIN:YGKIP:VVD, VPT:SPIN:YGKIP:VVE, VPE:SPIN:YGKIP:TVE, APT:SPIN:YGKIP:VVR, APT:SPIN:YGKIP:VVK, VPT:SPIN:YGKIP:VAE, VPT:SPIN:YGKIP:AVS, VPA:SPIN:YGKIP:VVE, APV:SPIN:YGKIP:VEE, VPQ:SPIN:YGKIP:VRS, VSQ:SPIN:YGKIP:VKS, VPQ:SPIN:YGKIP:VKS, VPT:SPIN:YGKIP:QHN, VPT:SPIN:YGKIP:EHS, SRV:SPIN:YGKIP:EEH, TQV:SPIN:YGKIP:EDH, VPA:SPIS:YKQYE:VVE, VPT:SPIS:YKQYE:VVE, VPE:SPIS:YKQYE:TVE, APT:SPIS:YKQYE:VVR, APT:SPIS:YKQYE:VVK, VPT:SPIS:YKQYE:VAE, VPT:SPIS:YKQYE:AVS, TPT:SPIS:YKQYE:VVD, APV:SPIS:YKQYE:VEE, VPQ:SPIS:YKQYE:VRS, VSQ:SPIS:YKQYE:VKS, VPQ:SPIS:YKQYE:VKS, VPT:SPIS:YKQYE:QHN, VPT:SPIS:YKQYE:EHS, SRV:SPIS:YKQYE:EEH, TQV:SPIS:YKQYE:EDH, APV:KPLS:DHHKD:VEE, VPT:KPLS:DHHKD:VVE, VPE:KPLS:DHHKD:TVE, APT:KPLS:DHHKD:VVR, APT:KPLS:DHHKD:VVK, VPT:KPLS:DHHKD:VAE, VPT:KPLS:DHHKD:AVS, TPT:KPLS:DHHKD:VVD, VPA:KPLS:DHHKD:VVE, VPQ:KPLS:DHHKD:VRS, VSQ:KPLS:DHHKD:VKS, VPQ:KPLS:DHHKD:VKS, VPT:KPLS:DHHKD:QHN, VPT:KPLS:DHHKD:EHS, SRV:KPLS:DHHKD:EEH, TQV:KPLS:DHHKD:EDH, VPQ:EPLP:EQLSN:VRS, VPT:EPLP:EQLSN:VVE, VPE:EPLP:EQLSN:TVE, APT:EPLP:EQLSN:VVR, APT:EPLP:EQLSN:VVK, VPT:EPLP:EQLSN:VAE, VPT:EPLP:EQLSN:AVS, TPT:EPLP:EQLSN:VVD, VPA:EPLP:EQLSN:VVE, APV:EPLP:EQLSN:VEE, VSQ:EPLP:EQLSN:VKS, VPQ:EPLP:EQLSN:VKS, VPT:EPLP:EQLSN:QHN, VPT:EPLP:EQLSN:EHS, SRV:EPLP:EQLSN:EEH, TQV:EPLP:EQLSN:EDH, VSQ:EPLT:EQLSN:VKS, VPT:EPLT:EQLSN:VVE, VPE:EPLT:EQLSN:TVE, APT:EPLT:EQLSN:VVR, APT:EPLT:EQLSN:VVK, VPT:EPLT:EQLSN:VAE, VPT:EPLT:EQLSN:AVS, TPT:EPLT:EQLSN:VVD, VPA:EPLT:EQLSN:VVE, APV:EPLT:EQLSN:VEE, VPQ:EPLT:EQLSN:VRS, VPQ:EPLT:EQLSN:VKS, VPT:EPLT:EQLSN:QHN, VPT:EPLT:EQLSN:EHS, SRV:EPLT:EQLSN:EEH, TQV:EPLT:EQLSN:EDH, VPT:SNIT:IGEMS:QHN, VPT:SNIT:IGEMS:VVE, VPE:SNIT:IGEMS:TVE, APT:SNIT:IGEMS:VVR, APT:SNIT:IGEMS:VVK, VPT:SNIT:IGEMS:VAE, VPT:SNIT:IGEMS:AVS, TPT:SNIT:IGEMS:VVD, VPA:SNIT:IGEMS:VVE, APV:SNIT:IGEMS:VEE, VPQ:SNIT:IGEMS:VRS, VSQ:SNIT:IGEMS:VKS, VPQ:SNIT:IGEMS:VKS, VPT:SNIT:IGEMS:EHS, SRV:SNIT:IGEMS:EEH, TQV:SNIT:IGEMS:EDH, VPT:SNIT:LGEMS:EHS, VPT:SNIT:LGEMS:VVE, VPE:SNIT:LGEMS:TVE, APT:SNIT:LGEMS:VVR, APT:SNIT:LGEMS:VVK, VPT:SNIT:LGEMS:VAE, VPT:SNIT:LGEMS:AVS, TPT:SNIT:LGEMS:VVD, VPA:SNIT:LGEMS:VVE, APV:SNIT:LGEMS:VEE, VPQ:SNIT:LGEMS:VRS, VSQ:SNIT:LGEMS:VKS, VPQ:SNIT:LGEMS:VKS, VPT:SNIT:LGEMS:QHN, SRV:SNIT:LGEMS:EEH, TQV:SNIT:LGEMS:EDH, SRV:RSVK:KEVQV:EEH, VPT:RSVK:KEVQV:VVE, VPE:RSVK:KEVQV:TVE, APT:RSVK:KEVQV:VVR, APT:RSVK:KEVQV:VVK, VPT:RSVK:KEVQV:VAE, VPT:RSVK:KEVQV:AVS, TPT:RSVK:KEVQV:VVD, VPA:RSVK:KEVQV:VVE, APV:RSVK:KEVQV:VEE, VPQ:RSVK:KEVQV:VRS, VSQ:RSVK:KEVQV:VKS, VPQ:RSVK:KEVQV:VKS, VPT:RSVK:KEVQV:QHN, VPT:RSVK:KEVQV:EHS, TQV:RSVK:KEVQV:EDH, TQV:RPVQ:KKATV:EDH, VPT:RPVQ:KKATV:VVE, VPE:RPVQ:KKATV:TVE, APT:RPVQ:KKATV:VVR, APT:RPVQ:KKATV:VVK, VPT:RPVQ:KKATV:VAE, VPT:RPVQ:KKATV:AVS, TPT:RPVQ:KKATV:VVD, VPA:RPVQ:KKATV:VVE, APV:RPVQ:KKATV:VEE, VPQ:RPVQ:KKATV:VRS, VSQ:RPVQ:KKATV:VKS, VPQ:RPVQ:KKATV:VKS, VPT:RPVQ:KKATV:QHN, VPT:RPVQ:KKATV:EHS and SRV:RPVQ:KKATV:EEH.

[0428] In particular, in certain embodiments, the quadruplet PEP3:PEP12:PEP2:PEP4 is selected from the group consisting of VPT:SAIS-AA¹⁷-LYL:LKNYQ:VVE, VPE:SAIS-AA¹⁷-LYL:LKNYQ:TVE, APT:SAIS-AA¹⁷-LYL:LKNYQ:VVR, APT:SAIS-AA¹⁷-LYL:LKNYQ:VVK, VPT:SAIS-AA¹⁷-LYL:LKNYQ:VAE, VPT:SAIS-AA¹⁷-LYL:LKNYQ:AVS, TPT:SAIS-AA¹⁷-LYL:LKNYQ:VVD, VPA:SAIS-AA¹⁷-LYL:LKNYQ:VVE, APV:SAIS-AA¹⁷-LYL:LKNYQ:VEE, VPQ:SAIS-AA¹⁷-LYL:LKNYQ:VRS, VSQ:SAIS-AA¹⁷-LYL:LKNYQ:VKS, VPQ:SAIS-AA¹⁷-LYL:LKNYQ:VKS, VPT:SAIS-AA¹⁷-LYL:LKNYQ:QHN, VPT:SAIS-AA¹⁷-LYL:LKNYQ:EHS, SRV:SAIS-AA¹⁷-LYL:LKNYQ:EEH, TQV:SAIS-AA¹⁷-LYL:LKNYQ:EDH, VPE:SSLS-AA¹⁷-LFF:LKVYP:TVE, VPT:SSLS-AA¹⁷-LFF:LKVYP:VVE, APT:SSLS-AA¹⁷-LFF:LKVYP:VVR, APT:SSLS-AA¹⁷-LFF:LKVYP:VVK, VPT:SSLS-AA¹⁷-LFF:LKVYP:VAE, VPT:SSLS-AA¹⁷-LFF:LKVYP:AVS, TPT:SSLS-AA¹⁷-LFF:LKVYP:VVD, VPA:SSLS-AA¹⁷-LFF:LKVYP:VVE, APV:SSLS-AA¹⁷-LFF:LKVYP:VEE, VPQ:SSLS-AA¹⁷-LFF:LKVYP:VRS, VSQ:SSLS-AA¹⁷-LFF:LKVYP:VKS, VPQ:SSLS-AA¹⁷-LFF:LKVYP:VKS, VPT:SSLS-AA¹⁷-LFF:LKVYP:QHN, VPT:SSLS-AA¹⁷-LFF:LKVYP:EHS, SRV:SSLS-AA¹⁷-LFF:LKVYP:EEH, TQV:SSLS-AA¹⁷-LFF:LKVYP:EDH, APT:NAIS-AA¹⁷-LYFIKKYR:VVR, VPT:NAIS-AA¹⁷-LYFIKKYR:VVE, VPE:NAIS-AA¹⁷-LYFIKKYR:TVE, APT:NAIS-AA¹⁷-LYFIKKYR:VVK, VPT:NAIS-AA¹⁷-LYFIKKYR:VAE, VPT:NAIS-AA¹⁷-LYFIKKYR:AVS, TPT:NAIS-AA¹⁷-LYFIKKYR:VVD, VPA:NAIS-AA¹⁷-LYFIKKYR:VVE, APV:NAIS-AA¹⁷-LYFIKKYR:VEE, VPQ:NAIS-AA¹⁷-LYFIKKYR:VRS, VSQ:NAIS-AA¹⁷-LYFIKKYR:VKS, VPQ:NAIS-AA¹⁷-LYFIKKYR:VKS, VPT:NAIS-AA¹⁷-LYFIKKYR:QHN, VPT:NAIS-AA¹⁷-LYFIKKYR:EHS, SRV:NAIS-AA¹⁷-LYF:LKKY R: EEH, TQV:NAIS-AA¹⁷-LYFIKKYR:EDH, APT:SATS-AA¹⁷-LYY:LRKHR:VVK, VPT:SATS-AA¹⁷-LYY:LRKHR:VVE, VPE:SATS-AA¹⁷-LYY:LRKHR:TVE, APT:SATS-AA¹⁷-LYY:LRKHR:VVR, VPT:SATS-AA¹⁷-LYY:LRKHR:VAE, VPT:SATS-AA¹⁷-LYY:LRKHR:AVS, TPT:SATS-AA¹⁷-LYY:LRKHR:VVD, VPA:SATS-AA¹⁷-LYY:LRKHR:VVE, APV:SATS-AA¹⁷-LYY:LRKHR:VEE, VPQ:SATS-AA¹⁷-LYY:LRKHR:VRS, VSQ:SATS-AA¹⁷-LYY:LRKHR:VKS, VPQ:SATS-AA¹⁷-LYY:LRKHR:VKS, VPT:SATS-AA¹⁷-LYY:LRKHR:QHN, VPT:SATS-AA¹⁷-LYY:LRKHR:EHS, SRV:SATS-AA¹⁷-LYY:LRKHR:EEH, TQV:SATS-AA¹⁷-LYY:LRKHR:EDH, VPT:SPIS-AA¹⁷-LYK:LKYHY:VAE, VPT:SPIS-AA¹⁷-LYK:LKYHY:VVE, VPE:SPIS-AA¹⁷-LYK:LKYHY:TVE, APT:SPIS-AA¹⁷-LYK:LKYHY:VVR, APT:SPIS-AA¹⁷-LYK:LKYHY:VVK, VPT:SPIS-AA¹⁷-LYK:LKYHY:AVS, TPT:SPIS-AA¹⁷-LYK:LKYHY:VVD, VPA:SPIS-AA¹⁷-LYK:LKYHY:VVE, APV:SPIS-AA¹⁷-LYK:LKYHY:VEE, VPQ:SPIS-AA¹⁷-LYK:LKYHY:VRS, VSQ:SPIS-AA¹⁷-LYK:LKYHY:VKS, VPQ:SPIS-AA¹⁷-LYK:LKYHY:VKS, VPT:SPIS-AA¹⁷-LYK:LKYHY:QHN, VPT:SPIS-AA¹⁷-LYK:LKYHY:EHS, SRV:SPIS-AA¹⁷-LYK:LKYHY:EEH, TQV:SPIS-AA¹⁷-LYK:LKYHY:EDH, VPT:EPIS-AA¹⁷-LYL:KFKYE:AVS, VPT:EPIS-AA¹⁷-LYL:KFKYE:VVE, VPE:EPIS-AA¹⁷-LYL:KFKYE:TVE, APT:EPIS-AA¹⁷-LYL:KFKYE:VVR, APT:EPIS-AA¹⁷-LYL:KFKYE:VVK, VPT:EPIS-AA¹⁷-LYL:KFKYE:VAE, TPT:EPIS-AA¹⁷-LYL:KFKYE:VVD, VPA:EPIS-AA¹⁷-LYL:KFKYE:VVE, APV:EPIS-AA¹⁷-LYL:KFKYE:VEE, VPQ:EPIS-AA¹⁷-LYL:KFKYE:VRS, VSQ:EPIS-AA¹⁷-LYL:KFKYE:VKS, VPQ:EPIS-AA¹⁷-LYL:KFKYE:VKS, VPT:EPIS-AA¹⁷-LYL:KFKYE:QHN, VPT:EPIS-AA¹⁷-LYL:KFKYE:EHS, SRV:EPIS-AA¹⁷-LYL:KFKYE:EEH, TQV:EPIS-AA¹⁷-LYL:KFKYE:EDH, TPT:SPIN-AA¹⁷-LYF:YGKIP:VVD, VPT:SPIN-AA¹⁷-LYF:YGKIP:VVE, VPE:SPIN-AA¹⁷-LYF:YGKIP:TVE, APT:SPIN-AA¹⁷-LYF:YGKIP:VVR, APT:SPIN-AA¹⁷-LYF:YGKIP:VVK, VPT:SPIN-AA¹⁷-LYF:YGKIP:VAE, VPT:SPIN-AA¹⁷-LYF:YGKIP:AVS, VPA:SPIN-AA¹⁷-LYF:YGKIP:VVE, APV:SPIN-AA¹⁷-LYF:YGKIP:VEE, VPQ:SPIN-AA¹⁷-LYF:YGKIP:VRS, VSQ:SPIN-AA¹⁷-LYF:YGKIP:VKS, VPQ:SPIN-AA¹⁷-LYF:YGKIP:VKS, VPT:SPIN-AA¹⁷-LYF:YGKIP:QHN, VPT:SPIN-AA¹⁷-LYF:YGKIP:EHS, SRV:SPIN-AA¹⁷-LYF:YGKIP:EEH, TQV:SPIN-AA¹⁷-LYF:YGKIP:EDH, VPA:SPIS-AA¹⁷-LYI:YKQYE:VVE, VPT:SPIS-AA¹⁷-LYI:YKQYE:VVE, VPE:SPIS-AA¹⁷-LYI:YKQYE:TVE, APT:SPIS-AA¹⁷-LYI:YKQYE:VVR, APT:SPIS-AA¹⁷-LYI:YKQYE:VVK, VPT:SPIS-AA¹⁷-LYI:YKQYE:VAE, VPT:SPIS-AA¹⁷-LYI:YKQYE:AVS, TPT:SPIS-AA¹⁷-LYI:YKQYE:VVD, APV:SPIS-AA¹⁷-LYI:YKQYE:VEE, VPQ:SPIS-AA¹⁷-LYI:YKQYE:VRS, VSQ:SPIS-AA¹⁷-LYI:YKQYE:VKS, VPQ:SPIS-AA¹⁷-LYI:YKQYE:VKS, VPT:SPIS-AA¹⁷-LYI:YKQYE:QHN, VPT:SPIS-AA¹⁷-LYI:YKQYE:EHS, SRV:SPIS-AA¹⁷-LYI:YKQYE:EEH, TQV:SPIS-AA¹⁷-LYI:YKQYE:EDH, VPT:SPIS-AA¹⁷-LRYKQYE:VVE, VPE:SPIS-AA¹⁷-LRYKQYE:TVE, APT:SPIS-AA¹⁷-LRYKQYE:VVR, APT:SPIS-AA¹⁷-LRYKQYE:VVK, VPT:SPIS-AA¹⁷-LRYKQYE:VAE, VPT:SPIS-AA¹⁷-LRYKQYE:AVS, TPT:SPIS-AA¹⁷-LRYKQYE:VVD, VPA:SPIS-AA¹⁷-LFINKQYE:VVE, APV:SPIS-AA¹⁷-LRYKQYE:VEE, VPQ:SPIS-AA¹⁷-LFLYKQYE:VRS, VSQ:SPIS-AA¹⁷-LFINKQYE:VKS, VPQ:SPIS-AA¹⁷-LFLYKQYE:VKS, VPT:SPIS-AA¹⁷-LFLYKQYE:QHN, VPT:SPIS-AA¹⁷-LRYKQYE:EHS, SRV:SPIS-AA¹⁷-LFLYKQYE:EEH, TQV:SPIS-AA¹⁷-LFLYKQYE:EDH, APV:KPLS-AA¹⁷-LYV:DHHKD:VEE, VPT:KPLS-AA¹⁷-LYV:DHHKD:VVE, VPE:KPLS-AA¹⁷-LYV:DHHKD:TVE, APT:KPLS-AA¹⁷-LYV:DHHKD:VVR, APT:KPLS-AA¹⁷-LYV:DHHKD:VVK, VPT:KPLS-AA¹⁷-LYV:DHHKD:VAE, VPT:KPLS-AA¹⁷-LYV:DHHKD:AVS, TPT:KPLS-AA¹⁷-LYV:DHHKD:VVD, VPA:KPLS-AA¹⁷-LYV:DHHKD:VVE, VPQ:KPLS-AA¹⁷-LYV:DHHKD:VRS, VSQ:KPLS-AA¹⁷-LYV:DHHKD:VKS, VPQ:KPLS-AA¹⁷-LYV:DHHKD:VKS, VPT:KPLS-AA¹⁷-LYV:DHHKD:QHN, VPT:KPLS-AA¹⁷-LYV:DHHKD:EHS, SRV:KPLS-AA¹⁷-LYV:DHHKD:EEH, TQV:KPLS-AA¹⁷-LYV:DHHKD:EDH, VPQ:EPLP-AA¹⁷-VYY:EQLSN:VRS, VPT:EPLP-AA¹⁷-VYY:EQLSN:VVE, VPE:EPLP-AA¹⁷-VYY:EQLSN:TVE, APT:EPLP-AA¹⁷-VYY:EQLSN:VVR, APT:EPLP-AA¹⁷-VYY:EQLSN:VVK, VPT:EPLP-AA¹⁷-VYY:EQLSN:VAE, VPT:EPLP-AA¹⁷-VYY:EQLSN:AVS, TPT:EPLP-AA¹⁷-VYY:EQLSN:VVD, VPA:EPLP-AA¹⁷-VYY:EQLSN:VVE, APV:EPLP-AA¹⁷-VYY:EQLSN:VEE, VSQ:EPLP-AA¹⁷-VYY:EQLSN:VKS, VPQ:EPLP-AA¹⁷-VYY:EQLSN:VKS, VPT:EPLP-AA¹⁷-VYY:EQLSN:QHN, VPT:EPLP-AA¹⁷-VYY:EQLSN:EHS, SRV:EPLP-AA¹⁷-VYY:EQLSN:EEH, TQV:EPLP-AA¹⁷-VYY:EQLSN:EDH, VSQ:EPLT-AA¹⁷-LYY:EQLSN:VKS, VPT:EPLT-AA¹⁷-LYY:EQLSN:VVE, VPE:EPLT-AA¹⁷-LYY:EQLSN:TVE, APT:EPLT-AA¹⁷-LYY:EQLSN:VVR, APT:EPLT-AA¹⁷-LYY:EQLSN:VVK, VPT:EPLT-AA¹⁷-LYY:EQLSN:VAE, VPT:EPLT-AA¹⁷-LYY:EQLSN:AVS, TPT:EPLT-AA¹⁷-LYY:EQLSN:VVD, VPA:EPLT-AA¹⁷-LYY:EQLSN:VVE, APV:EPLT-AA¹⁷-LYY:EQLSN:VEE, VPQ:EPLT-AA¹⁷-LYY:EQLSN:VRS, VPQ:EPLT-AA¹⁷-LYY:EQLSN:VKS, VPT:EPLT-AA¹⁷-LYY:EQLSN:QHN, VPT:EPLT-AA¹⁷-LYY:EQLSN:EHS, SRV:EPLT-AA¹⁷-LYY:EQLSN:EEH, TQV:EPLT-AA¹⁷-LYY:EQLSN:EDH, VPT:SNIT-AA¹⁷-QIM:IGEMS:QHN, VPT:SNIT-AA¹⁷-QIM:IGEMS:VVE, VPE:SNIT-AA¹⁷-QIM:IGEMS:TVE, APT:SNIT-AA¹⁷-QIM:IGEMS:VVR, APT:SNIT-AA¹⁷-QIM:IGEMS:VVK, VPT:SNIT-AA¹⁷-QIM:IGEMS:VAE, VPT:SNIT-AA¹⁷-QIM:IGEMS:AVS, TPT:SNIT-AA¹⁷-QIM:IGEMS:VVD, VPA:SNIT-AA¹⁷-QIM:IGEMS:VVE, APV:SNIT-AA¹⁷-QIM:IGEMS:VEE, VPQ:SNIT-AA¹⁷-QIM:IGEMS:VRS, VSQ:SNIT-AA¹⁷-QIM:IGEMS:VKS, VPQ:SNIT-AA¹⁷-QIM:IGEMS:VKS, VPT:SNIT-AA¹⁷-QIM:IGEMS:EHS, SRV:SNIT-AA¹⁷-QIM:IGEMS:EEH, TQV:SNIT-AA¹⁷-QIM:IGEMS:EDH, VPT:SNIT-AA¹⁷-QIM:LGEMS:EHS, VPT:SNIT-AA¹⁷-QIM:LGEMS:VVE, VPE:SNIT-AA¹⁷-QIM:LGEMS:TVE, APT:SNIT-AA¹⁷-QIM:LGEMS:VVR, APT:SNIT-AA¹⁷-QIM:LGEMS:VVK, VPT:SNIT-AA¹⁷-QIM:LGEMS:VAE, VPT:SNIT-AA¹⁷-QIM:LGEMS:AVS, TPT:SNIT-AA¹⁷-QIM:LGEMS:VVD, VPA:SNIT-AA¹⁷-QIM:LGEMS:VVE, APV:SNIT-AA¹⁷-QIM:LGEMS:VEE, VPQ:SNIT-AA¹⁷-QIM:LGEMS:VRS, VSQ:SNIT-AA¹⁷-QIM:LGEMS:VKS, VPQ:SNIT-AA¹⁷-QIM:LGEMS:VKS, VPT:SNIT-AA¹⁷-QIM:LGEMS:QHN, SRV:SNIT-AA¹⁷-QIM:LGEMS:EEH, TQV:SNIT-AA¹⁷-QIM:LGEMS:EDH, SRV:RSVK-AA¹⁷-AKV:KEVQV:EEH, VPT:RSVK-AA¹⁷-AKV:KEVQV:VVE, VPE:RSVK-AA¹⁷-AKV:KEVQV:TVE, APT:RSVK-AA¹⁷-AKV:KEVQV:VVR, APT:RSVK-AA¹⁷-AKV:KEVQV:VVK, VPT:RSVK-AA¹⁷-AKV:KEVQV:VAE, VPT:RSVK-AA¹⁷-AKV:KEVQV:AVS, TPT:RSVK-AA¹⁷-AKV:KEVQV:VVD, VPA:RSVK-AA¹⁷-AKV:KEVQV:VVE, APV: RSVK-AA¹⁷-AKV:KEVQV:VE E, VPQ:RSVK-AA¹⁷-AKV:KEVQV:VRS, VSQ:RSVK-AA¹⁷-AKV:KEVQV:VKS, VPQ:RSVK-AA¹⁷-AKV:KEVQV:VKS, VPT:RSVK-AA¹⁷-AKV:KEVQV:QHN, VPT:RSVK-AA¹⁷-AKV:KEVQV:EHS, TQV:RSVK-AA¹⁷-AKV:KEVQV:EDH, TQV:RPVQ-AA¹⁷-RKI:KKATV:EDH, VPT:RPVQ-AA¹⁷-RKI:KKATV:VVE, VPE:RPVQ-AA¹⁷-RKI:KKATV:TVE, APT:RPVQ-AA¹⁷-RKI:KKATV:VVR, APT:RPVQ-AA¹⁷-RKI:KKATV:VVK, VPT:RPVQ-AA¹⁷-RKI:KKATV:VAE, VPT:RPVQ-AA¹⁷-RKI:KKATV:AVS, TPT:RPVQ-AA¹⁷-RKI:KKATV:VVD, VPA:RPVQ-AA¹⁷-RKI:KKATV:VVE, APV:RPVQ-AA¹⁷-RKI:KKATV:VEE, VPQ:RPVQ-AA¹⁷-RKI:KKATV:VRS, VSQ:RPVQ-AA¹⁷-RKI:KKATV:VKS, VPQ:RPVQ-AA¹⁷-RKI:KKATV:VKS, VPT:RPVQ-AA¹⁷-RKI:KKATV:QHN, VPT:RPVQ-AA¹⁷-RKI:KKATV:EHS and SRV:RPVQ-AA¹⁷-RKI:KKATV:EEH; and wherein AA¹⁷ is selected from the group consisting of G, A, V, L, I, P, F, M, W, T and S (in particular is selected from the group consisting of M, I, L, V and T).

[0429] In particular, in certain embodiments, the quadruplet PEP5:PEP1:PEP2:PEP6 is selected from the group consisting of VPTKM:SAIS:LKNYQ:NMVVE, VPTEL:SAIS:LKNYQ:EMVVE, VPTKL:SAIS:LKNYQ:NMVVE, VPTQL:SAIS:LKNYQ:NMVVE, VPTKL:SAIS:LKNYQ:EGMSVVE, VPTKL:SAIS:LKNYQ:GMVVE, VPTKM:SAIS:LKNYQ:GMVVE, VPTRL:SAIS:LKNYQ:DMVVE, VPTKT:SAIS:LKNYQ:MIVVE, VPTAL:SAIS:LKNYQ:MIVVE, VPTDL:SAIS:LKNYQ:MIVVE, VPTDL:SAIS:LKNYQ:MVVVE, VPTEE:SAIS:LKNYQ:FLVVE, VPTGQ:SAIS:LKNYQ:LEVVE, VPTHH:SAIS:LKNYQ:RLVVE, VPTQL:SAIS:LKNYQ:TLVVE, VPEKM:SAIS:LKNYQ:NMTVE, APTKL:SAIS:LKNYQ:NMVVR, APTQL:SAIS:LKNYQ:NMVVR, APTKL:SAIS:LKNYQ:NMVVK, VPTKL:SAIS:LKNYQ:EGMSVAE, VPTKL:SAIS:LKNYQ:GMAVS, TPTKM:SAIS:LKNYQ:GMVVD, VPARL:SAIS:LKNYQ:DMVVE, APVKT:SAIS:LKNYQ:MIVEE, VPQAL:SAIS:LKNYQ:MIVRS, VSQDL:SAIS:LKNYQ:MIVKS, VPQDL:SAIS:LKNYQ:MVVKS, VPTEE:SAIS:LKNYQ:FLQHN, VPTGQ:SAIS:LKNYQ:LEEHS, SRVHH:SAIS:LKNYQ:RLEEH, TQVQL:SAIS:LKNYQ:TLEDH, VPEEL:SSLS:LKVYP:DMTVE, VPEEL:SSLS:LKVYP:EMTVE, VPEKL:SSLS:LKVYP:NMTVE, VPEQL:SSLS:LKVYP:NMTVE, VPEKL:SSLS:LKVYP:EGMSTVE, VPEKL:SSLS:LKVYP:GMTVE, VPEKM:SSLS:LKVYP:GMTVE, VPERL:SSLS:LKVYP:DMTVE, VPEKT:SSLS:LKVYP:MITVE, VPEAL:SSLS:LKVYP:MITVE, VPEDL:SSLS:LKVYP:MITVE, VPEDL:SSLS:LKVYP:MVTVE, VPEEE:SSLS:LKVYP:FLTVE, VPEGQ:SSLS:LKVYP:LETVE, VPEHH:SSLS:LKVYP:RLTVE, VPEQL:SSLS:LKVYP:TLTVE, VPTEL:SSLS:LKVYP:DMVVE, VPTEL:SSLS:LKVYP:EMVVE, APTKL:SSLS:LKVYP:NMVVR, APTQL:SSLS:LKVYP:NMVVR, APTKL:SSLS:LKVYP:NMVVK, VPTKL:SSLS:LKVYP:EGMSVAE, VPTKL:SSLS:LKVYP:GMAVS, TPTKM:SSLS:LKVYP:GMVVD, VPARL:SSLS:LKVYP:DMVVE, VPTRL:SSLS:LKVYP:DMVVE, APVKT:SSLS:LKVYP:MIVEE, VPQAL:SSLS:LKVYP:MIVRS, VSQDL:SSLS:LKVYP:MIVKS, VPQDL:SSLS:LKVYP:MVVKS, VPTEE:SSLS:LKVYP:FLQHN, VPTGQ:SSLS:LKVYP:LEEHS, SRVHH:SSLS:LKVYP:RLEEH, TQVQL:SSLS:LKVYP:TLEDH, VPTEL:SAIS:LKNYQ:DMVVE, APTEL:NAIS:LKKYR:DMVVR, APTKM:NAIS:LKKYR:NMVVR, APTEL:NAIS:LKKYR:EMVVR, APTKL:NAIS:LKKYR:NMVVR, APTQL:NAIS:LKKYR:NMVVR, APTKL:NAIS:LKKYR:EGMSVVR, APTKL:NAIS:LKKYR:GMVVR, APTKM:NAIS:LKKYR:GMVVR, APTRL:NAIS:LKKYR:DMVVR, APTKT:NAIS:LKKYR:MIVVR, APTAL:NAIS:LKKYR:MIVVR, APTDL:NAIS:LKKYR:MIVVR, APTDL:NAIS:LKKYR:MVVVR, APTEE:NAIS:LKKYR:FLVVR, APTGQ:NAIS:LKKYR:LEVVR, APTHH:NAIS:LKKYR:RLVVR, APTQL:NAIS:LKKYR:TLVVR, VPTEL:NAIS:LKKYR:DMVVE, VPEKM:NAIS:LKKYR:NMTVE, VPTEL:NAIS:LKKYR:EMVVE, APTKL:NAIS:LKKYR:NMVVK, VPTKL:NAIS:LKKYR:EGMSVAE, VPTKL:NAIS:LKKYR:GMAVS, TPTKM:NAIS:LKKYR:GMVVD, VPARL:NAIS:LKKYR:DMVVE, VPTRL:NAIS:LKKYR:DMVVE, APVKT:NAIS:LKKYR:MIVEE, VPQAL:NAIS:LKKYR:MIVRS, VSQDL:NAIS:LKKYR:MIVKS, VPQDL:NAIS:LKKYR:MVVKS, VPTEE:NAIS:LKKYR:FLQHN, VPTGQ:NAIS:LKKYR:LEEHS, SRVHH:NAIS:LKKYR:RLEEH, TQVQL:NAIS:LKKYR:TLEDH, APTEL:SATS:LRKHR:DMVVK, APTKM:SATS:LRKHR:NMVVK, APTEL:SATS:LRKHR:EMVVK, APTKL:SATS:LRKHR:NMVVK, APTQL:SATS:LRKHR:NMVVK, APTKL:SATS:LRKHR:EGMSVVK, APTKL:SATS:LRKHR:GMVVK, APTKM:SATS:LRKHR:GMVVK, APTRL:SATS:LRKHR:DMVVK, APTKT:SATS:LRKHR:MIVVK, APTAL:SATS:LRKHR:MIVVK, APTDL:SATS:LRKHR:MIVVK, APTDL:SATS:LRKHR:MVVVK, APTEE:SATS:LRKHR:FLVVK, APTGQ:SATS:LRKHR:LEVVK, APTHH:SATS:LRKHR:RLVVK, APTQL:SATS:LRKHR:TLVVK, VPTEL:SATS:LRKHR:DMVVE, VPEKM:SATS:LRKHR:NMTVE, VPTEL:SATS:LRKHR:EMVVE, APTKL:SATS:LRKHR:NMVVR, APTQL:SATS:LRKHR:NMVVR, VPTKL:SATS:LRKHR:EGMSVAE, VPTKL:SATS:LRKHR:GMAVS, TPTKM:SATS:LRKHR:GMVVD, VPARL:SATS:LRKHR:DMVVE, VPTRL:SATS:LRKHR:DMVVE, APVKT:SATS:LRKHR:MIVEE, VPQAL:SATS:LRKHR:MIVRS, VSQDL:SATS:LRKHR:MIVKS, VPQDL:SATS:LRKHR:MVVKS, VPTEE:SATS:LRKHR:FLQHN, VPTGQ:SATS:LRKHR:LEEHS, SRVHH:SATS:LRKHR:RLEEH, TQVQL:SATS:LRKHR:TLEDH, VPTEL:SPIS:LKYHY:DMVAE, VPTKM:SPIS:LKYHY:NMVAE, VPTEL:SPIS:LKYHY:EMVAE, VPTKL:SPIS:LKYHY:NMVAE, VPTQL:SPIS:LKYHY:NMVAE, VPTKL:SPIS:LKYHY:GMVAE, VPTKM:SPIS:LKYHY:GMVAE, VPTRL:SPIS:LKYHY:DMVAE, VPTKT:SPIS:LKYHY:MIVAE, VPTAL:SPIS:LKYHY:MIVAE, VPTDL:SPIS:LKYHY:MIVAE, VPTDL:SPIS:LKYHY:MVVAE, VPTEE:SPIS:LKYHY:FLVAE, VPTGQ:SPIS:LKYHY:LEVAE, VPTHH:SPIS:LKYHY:RLVAE, VPTQL:SPIS:LKYHY:TLVAE, VPTEL:SPIS:LKYHY:DMVVE, VPEKM:SPIS:LKYHY:NMTVE, VPTEL:SPIS:LKYHY:EMVVE, APTKL:SPIS:LKYHY:NMVVR, APTQL:SPIS:LKYHY:NMVVR, APTKL:SPIS:LKYHY:NMVVK, VPTKL:SPIS:LKYHY:GMAVS, TPTKM:SPIS:LKYHY:GMVVD, VPARL:SPIS:LKYHY:DMVVE, VPTRL:SPIS:LKYHY:DMVVE, APVKT:SPIS:LKYHY:MIVEE, VPQAL:SPIS:LKYHY:MIVRS, VSQDL:SPIS:LKYHY:MIVKS, VPQDL:SPIS:LKYHY:MVVKS, VPTEE:SPIS:LKYHY:FLQHN, VPTGQ:SPIS:LKYHY:LEEHS, SRVHH:SPIS:LKYHY:RLEEH, TQVQL:SPIS:LKYHY:TLEDH, VPTEL:EPIS:KFKYE:DMAVS, VPTKM:EPIS:KFKYE:NMAVS, VPTEL:EPIS:KFKYE:EMAVS, VPTKL:EPIS:KFKYE:NMAVS, VPTQL:EPIS:KFKYE:NMAVS, VPTKL:EPIS:KFKYE:EGMSAVS, VPTKM:EPIS:KFKYE:GMAVS, VPTRL:EPIS:KFKYE:DMAVS, VPTKT:EPIS:KFKYE:MIAVS, VPTAL:EPIS:KFKYE:MIAVS, VPTDL:EPIS:KFKYE:MIAVS, VPTDL:EPIS:KFKYE:MVAVS, VPTEE:EPIS:KFKYE:FLAVS, VPTGQ:EPIS:KFKYE:LEAVS, VPTHH:EPIS:KFKYE:RLAVS, VPTQL:EPIS:KFKYE:TLAVS, VPTEL:EPIS:KFKYE:DMVVE, VPEKM:EPIS:KFKYE:NMTVE, VPTEL:EPIS:KFKYE:EMVVE, APTKL:EPIS:KFKYE:NMVVR, APTQL:EPIS:KFKYE:NMVVR, APTKL:EPIS:KFKYE:NMVVK, VPTKL:EPIS:KFKYE:EGMSVAE, TPTKM:EPIS:KFKYE:GMVVD, VPARL:EPIS:KFKYE:DMVVE, VPTRL:EPIS:KFKYE:DMVVE, APVKT:EPIS:KFKYE:MIVEE, VPQAL:EPIS:KFKYE:MIVRS, VSQDL:EPIS:KFKYE:MIVKS, VPQDL:EPIS:KFKYE:MVVKS, VPTEE:EPIS:KFKYE:FLQHN, VPTGQ:EPIS:KFKYE:LEEHS, SRVHH:EPIS:KFKYE:RLEEH, TQVQL:EPIS:KFKYE:TLEDH, TPTEL:SPIN:YGKIP:DMVVD, TPTKM:SPIN:YGKIP:NMVVD, TPTEL:SPIN:YGKIP:EMVVD, TPTKL:SPIN:YGKIP:NMVVD, TPTQL:SPIN:YGKIP:NMVVD, TPTKL:SPIN:YGKIP:EGMSVVD, TPTKL:SPIN:YGKIP:GMVVD, TPTRL:SPIN:YGKIP:DMVVD, TPTKT:SPIN:YGKIP:MIVVD, TPTAL:SPIN:YGKIP:MIVVD, TPTDL:SPIN:YGKIP:MIVVD, TPTDL:SPIN:YGKIP:MVVVD, TPTEE:SPIN:YGKIP:FLVVD, TPTGQ:SPIN:YGKIP:LEVVD, TPTHH:SPIN:YGKIP:RLVVD, TPTQL:SPIN:YGKIP:TLVVD, VPTEL:SPIN:YGKIP:DMVVE, VPEKM:SPIN:YGKIP:NMTVE, VPTEL:SPIN:YGKIP:EMVVE, APTKL:SPIN:YGKIP:NMVVR, APTQL:SPIN:YGKIP:NMVVR, APTKL:SPIN:YGKIP:NMVVK, VPTKL:SPIN:YGKIP:EGMSVAE, VPTKL:SPIN:YGKIP:GMAVS, VPARL:SPIN:YGKIP:DMVVE, VPTRL:SPIN:YGKIP:DMVVE, APVKT:SPIN:YGKIP:MIVEE, VPQAL:SPIN:YGKIP:MIVRS, VSQDL:SPIN:YGKIP:MIVKS, VPQDL:SPIN:YGKIP:MVVKS, VPTEE:SPIN:YGKIP:FLQHN, VPTGQ:SPIN:YGKIP:LEEHS, SRVHH:SPIN:YGKIP:RLEEH, TQVQL:SPIN:YGKIP:TLEDH, VPAEL:SPIS:YKQYE:DMVVE, VPAKM:SPIS:YKQYE:NMVVE, VPAEL:SPIS:YKQYE:EMVVE, VPAKL:SPIS:YKQYE:NMVVE, VPAQL:SPIS:YKQYE:NMVVE, VPAKL:SPIS:YKQYE:EGMSVVE, VPAKL:SPIS:YKQYE:GMVVE, VPAKM:SPIS:YKQYE:GMVVE, VPARL:SPIS:YKQYE:DMVVE, VPAKT:SPIS:YKQYE:MIVVE, VPAAL:SPIS:YKQYE:MIVVE, VPADL:SPIS:YKQYE:MIVVE, VPADL:SPIS:YKQYE:MVVVE, VPAEE:SPIS:YKQYE:FLVVE, VPAGQ:SPIS:YKQYE:LEVVE, VPAHH:SPIS:YKQYE:RLVVE, VPAQL:SPIS:YKQYE:TLVVE, VPTEL:SPIS:YKQYE:DMVVE, VPEKM:SPIS:YKQYE:NMTVE, VPTEL:SPIS:YKQYE:EMVVE, APTKL:SPIS:YKQYE:NMVVR, APTQL:SPIS:YKQYE:NMVVR, APTKL:SPIS:YKQYE:NMVVK, VPTKL:SPIS:YKQYE:EGMSVAE, VPTKL:SPIS:YKQYE:GMAVS, TPTKM:SPIS:YKQYE:GMVVD, VPTRL:SPIS:YKQYE:DMVVE, APVKT:SPIS:YKQYE:MIVEE, VPQAL:SPIS:YKQYE:MIVRS, VSQDL:SPIS:YKQYE:MIVKS, VPQDL:SPIS:YKQYE:MVVKS, VPTEE:SPIS:YKQYE:FLQHN, VPTGQ:SPIS:YKQYE:LEEHS, SRVHH:SPIS:YKQYE:RLEEH, TQVQL:SPIS:YKQYE:TLEDH, VPTKM:SPIS:YKQYE:NMVVE, VPTKL:SPIS:YKQYE:NMVVE, VPTQL:SPIS:YKQYE:NMVVE, VPTKL:SPIS:YKQYE:EGMSVVE, VPTKL:SPIS:YKQYE:GMVVE, VPTKM:SPIS:YKQYE:GMVVE, VPTKT:SPIS:YKQYE:MIVVE, VPTAL:SPIS:YKQYE:MIVVE, VPTDL:SPIS:YKQYE:MIVVE, VPTDL:SPIS:YKQYE:MVVVE, VPTEE:SPIS:YKQYE:FLVVE, VPTGQ:SPIS:YKQYE:LEVVE, VPTHH:SPIS:YKQYE:RLVVE, VPTQL:SPIS:YKQYE:TLVVE, APVEL:KPLS:DHHKD:DMVEE, APVKM:KPLS:DHHKD:NMVEE, APVEL:KPLS:DHHKD:EMVEE, APVKL:KPLS:DHHKD:NMVEE, APVQL:KPLS:DHHKD:NMVEE, APVKL:KPLS:DHHKD:EGMSVEE, APVKL:KPLS:DHHKD:GMVEE, APVKM:KPLS:DHHKD:GMVEE, APVRL:KPLS:DHHKD:DMVEE, APVAL:KPLS:DHHKD:MIVEE, APVDL:KPLS:DHHKD:MIVEE, APVDL:KPLS:DHHKD:MVVEE, APVEE:KPLS:DHHKD:FLVEE, APVGQ:KPLS:DHHKD:LEVEE, APVHH:KPLS:DHHKD:RLVEE, APVQL:KPLS:DHHKD:TLVEE, VPTEL:KPLS:DHHKD:DMVVE, VPEKM:KPLS:DHHKD:NMTVE, VPTEL:KPLS:DHHKD:EMVVE, APTKL:KPLS:DHHKD:NMVVR, APTQL:KPLS:DHHKD:NMVVR, APTKL:KPLS:DHHKD:NMVVK, VPTKL:KPLS:DHHKD:EGMSVAE, VPTKL:KPLS:DHHKD:GMAVS, TPTKM:KPLS:DHHKD:GMVVD, VPARL:KPLS:DHHKD:DMVVE, VPTRL:KPLS:DHHKD:DMVVE, VPQAL:KPLS:DHHKD:MIVRS, VSQDL:KPLS:DHHKD:MIVKS, VPQDL:KPLS:DHHKD:MVVKS, VPTEE:KPLS:DHHKD:FLQHN, VPTGQ:KPLS:DHHKD:LEEHS, SRVHH:KPLS:DHHKD:RLEEH, TQVQL:KPLS:DHHKD:TLEDH, VPQEL:EPLP:EQLSN:DMVRS, VPQKM:EPLP:EQLSN:NMVRS, VPQEL:EPLP:EQLSN:EMVRS, VPQKL:EPLP:EQLSN:NMVRS, VPQQL:EPLP:EQLSN:NMVRS, VPQKL:EPLP:EQLSN:EGMSVRS, VPQKL:EPLP:EQLSN:GMVRS, VPQKM:EPLP:EQLSN:GMVRS, VPQEL:EPLP:EQLSN:DMVRS, VPQKT:EPLP:EQLSN:MIVRS, VPQDL:EPLP:EQLSN:MIVRS, VPQDL:EPLP:EQLSN:MVVRS, VPQEE:EPLP:EQLSN:FLVRS, VPQGQ:EPLP:EQLSN:LEVRS, VPQHH:EPLP:EQLSN:RLVRS, VPQQL:EPLP:EQLSN:TLVRS, VPTEL:EPLP:EQLSN:DMVVE, VPEKM:EPLP:EQLSN:NMTVE, VPTEL:EPLP:EQLSN:EMVVE, APTKL:EPLP:EQLSN:NMVVR, APTQL:EPLP:EQLSN:NMVVR, APTKL:EPLP:EQLSN:NMVVK, VPTKL:EPLP:EQLSN:EGMSVAE, VPTKL:EPLP:EQLSN:GMAVS, TPTKM:EPLP:EQLSN:GMVVD, VPARL:EPLP:EQLSN:DMVVE, VPTRL:EPLP:EQLSN:DMVVE, APVKT:EPLP:EQLSN:MIVEE, VSQDL:EPLP:EQLSN:MIVKS, VPQDL:EPLP:EQLSN:MVVKS, VPTEE:EPLP:EQLSN:FLQHN, VPTGQ:EPLP:EQLSN:LEEHS, SRVHH:EPLP:EQLSN:RLEEH, TQVQL:EPLP:EQLSN:TLEDH, VSQEL:EPLT:EQLSN:DMVKS, VSQKM:EPLT:EQLSN:NMVKS, VSQEL:EPLT:EQLSN:EMVKS, VSQKL:EPLT:EQLSN:NMVKS, VSQQL:EPLT:EQLSN:NMVKS, VSQKL:EPLT:EQLSN:EGMSVKS, VSQKL:EPLT:EQLSN:GMVKS, VSQKM:EPLT:EQLSN:GMVKS, VSQRL:EPLT:EQLSN:DMVKS, VPQKT:EPLT:EQLSN:MIVKS, VSQAL:EPLT:EQLSN:MIVKS, VSQDL:EPLT:EQLSN:MVVKS, VPQEE:EPLT:EQLSN:FLVKS, VSQGQ:EPLT:EQLSN:LEVKS, VSQHH:EPLT:EQLSN:RLVKS, VSQQL:EPLT:EQLSN:TLVKS, VPTEL:EPLT:EQLSN:DMVVE, VPEKM:EPLT:EQLSN:NMTVE, VPTEL:EPLT:EQLSN:EMVVE, APTKL:EPLT:EQLSN:NMVVR, APTQL:EPLT:EQLSN:NMVVR, APTKL:EPLT:EQLSN:NMVVK, VPTKL:EPLT:EQLSN:EGMSVAE, VPTKL:EPLT:EQLSN:GMAVS, TPTKM:EPLT:EQLSN:GMVVD, VPARL:EPLT:EQLSN:DMVVE, VPTRL:EPLT:EQLSN:DMVVE, APVKT:EPLT:EQLSN:MIVEE, VPQAL:EPLT:EQLSN:MIVRS, VPQDL:EPLT:EQLSN:MVVKS, VPTEE:EPLT:EQLSN:FLQHN, VPTGQ:EPLT:EQLSN:LEEHS, SRVHH:EPLT:EQLSN:RLEEH, TQVQL:EPLT:EQLSN:TLEDH, VPQEL:EPLT:EQLSN:DMVKS, VPQKM:EPLT:EQLSN:NMVKS, VPQEL:EPLT:EQLSN:EMVKS, VPQKL:EPLT:EQLSN:NMVKS, VPQQL:EPLT:EQLSN:NMVKS, VPQKL:EPLT:EQLSN:EGMSVKS, VPQKL:EPLT:EQLSN:GMVKS, VPQKM:EPLT:EQLSN:GMVKS, VPQRL:EPLT:EQLSN:DMVKS, VPQKT:EPLT:EQLSN:MIVKS, VPQAL:EPLT:EQLSN:MIVKS, VPQDL:EPLT:EQLSN:MIVKS, VPQEE:EPLT:EQLSN:FLVKS, VPQGQ:EPLT:EQLSN:LEVKS, VPQHH:EPLT:EQLSN:RLVKS, VPQQL:EPLT:EQLSN:TLVKS, VSQDL:EPLT:EQLSN:MIVKS, VPTEL:SNIT:IGEMS:DMQHN, VPTKM:SNIT:IGEMS:NMQHN, VPTEL:SNIT:IGEMS:EMQHN, VPTKL:SNIT:IGEMS:NMQHN, VPTQL:SNIT:IGEMS:NMQHN, VPTKL:SNIT:IGEMS:EGMSQHN, VPTKL:SNIT:IGEMS:GMQHN, VPTKM:SNIT:IGEMS:GMQHN, VPTRL:SNIT:IGEMS:DMQHN, VPTKT:SNIT:IGEMS:MIQHN, VPTAL:SNIT:IGEMS:MIQHN, VPTDL:SNIT:IGEMS:MIQHN, VPTDL:SNIT:IGEMS:MVQHN, VPTGQ:SNIT:IGEMS:LEQHN, VPTEE:SNIT:IGEMS:FLQHN, VPTHH:SNIT:IGEMS:RLQHN, VPTQL:SNIT:IGEMS:TLQHN, VPTEL:SNIT:IGEMS:DMVVE, VPEKM:SNIT:IGEMS:NMTVE, VPTEL:SNIT:IGEMS:EMVVE, APTKL:SNIT:IGEMS:NMVVR, APTQL:SNIT:IGEMS:NMVVR, APTKL:SNIT:IGEMS:NMVVK, VPTKL:SNIT:IGEMS:EGMSVAE, VPTKL:SNIT:IGEMS:GMAVS, TPTKM:SNIT:IGEMS:GMVVD, VPARL:SNIT:IGEMS:DMVVE, VPTRL:SNIT:IGEMS:DMVVE, APVKT:SNIT:IGEMS:MIVEE, VPQAL:SNIT:IGEMS:MIVRS, VSQDL:SNIT:IGEMS:MIVKS, VPQDL:SNIT:IGEMS:MVVKS, VPTGQ:SNIT:IGEMS:LEEHS, SRVHH:SNIT:IGEMS:RLEEH, TQVQL:SNIT:IGEMS:TLEDH, VPTEL:SNIT:LGEMS:DMEHS, VPTKM:SNIT:LGEMS:NMEHS, VPTEL:SNIT:LGEMS:EMEHS, VPTKL:SNIT:LGEMS:NMEHS, VPTQL:SNIT:LGEMS:NMEHS, VPTKL:SNIT:LGEMS:EGMSEHS, VPTKL:SNIT:LGEMS:GMEHS, VPTKM:SNIT:LGEMS:GMEHS, VPTEL:SNIT:LGEMS:DMEHS, VPTKT:SNIT:LGEMS:MIEHS, VPTAL:SNIT:LGEMS:MIEHS, VPTDL:SNIT:LGEMS:MIEHS, VPTDL:SNIT:LGEMS:MVEHS, VPTEE:SNIT:LGEMS:FLEHS, VPTHH:SNIT:LGEMS:RLEHS, VPTQL:SNIT:LGEMS:TLEHS, VPTEL:SNIT:LGEMS:DMVVE, VPEKM:SNIT:LGEMS:NMTVE, VPTEL:SNIT:LGEMS:EMVVE, APTKL:SNIT:LGEMS:NMVVR, APTQL:SNIT:LGEMS:NMVVR, APTKL:SNIT:LGEMS:NMVVK, VPTKL:SNIT:LGEMS:EGMSVAE, VPTKL:SNIT:LGEMS:GMAVS, TPTKM:SNIT:LGEMS:GMVVD, VPARL:SNIT:LGEMS:DMVVE, VPTRL:SNIT:LGEMS:DMVVE, APVKT:SNIT:LGEMS:MIVEE, VPQAL:SNIT:LGEMS:MIVRS, VSQDL:SNIT:LGEMS:MIVKS, VPQDL:SNIT:LGEMS:MVVKS, VPTEE:SNIT:LGEMS:FLQHN, SRVHH:SNIT:LGEMS:RLEEH, TQVQL:SNIT:LGEMS:TLEDH, SRVEL:RSVK:KEVQV:DMEEH, SRVKM:RSVK:KEVQV:NMEEH, SRVEL:RSVK:KEVQV:EMEEH, SRVKL:RSVK:KEVQV:NMEEH, SRVKL:RSVK:KEVQV:NMEEH, SRVKL:RSVK:KEVQV:EGMSEEH, SRVKL:RSVK:KEVQV:GMEEH, SRVKM:RSVK:KEVQV:GMEEH, SRVRL:RSVK:KEVQV:DMEEH, SRVKT:RSVK:KEVQV:MIEEH, SRVAL:RSVK:KEVQV:MIEEH, SRVDL:RSVK:KEVQV:MIEEH, SRVDL:RSVK:KEVQV:MVEEH, SRVEE:RSVK:KEVQV:FLEEH, SRVGQ:RSVK:KEVQV:LEEEH, SRVQL:RSVK:KEVQV:TLEEH, VPTEL:RSVK:KEVQV:DMVVE, VPEKM:RSVK:KEVQV:NMTVE, VPTEL:RSVK:KEVQV:EMVVE, APTKL:RSVK:KEVQV:NMVVR, APTQL:RSVK:KEVQV:NMVVR, APTKL:RSVK:KEVQV:NMVVK, VPTKL:RSVK:KEVQV:EGMSVAE, VPTKL:RSVK:KEVQV:GMAVS, TPTKM:RSVK:KEVQV:GMVVD, VPARL:RSVK:KEVQV:DMVVE, VPTRL:RSVK:KEVQV:DMVVE, APVKT:RSVK:KEVQV:MIVEE, VPQAL:RSVK:KEVQV:MIVRS, VSQDL:RSVK:KEVQV:MIVKS, VPQDL:RSVK:KEVQV:MVVKS, VPTEE:RSVK:KEVQV:FLQHN, VPTGQ:RSVK:KEVQV:LEEHS, TQVQL:RSVK:KEVQV:TLEDH, TQVEL:RPVQ:KKATV:DMEDH, TQVKM:RPVQ:KKATV:NMEDH, TQVEL:RPVQ:KKATV:EMEDH, TQVKL:RPVQ:KKATV:NMEDH, TQVQL:RPVQ:KKATV:NMEDH, TQVKL:RPVQ:KKATV:EGMSEDH, TQVKL:RPVQ:KKATV:GMEDH, TQVKM:RPVQ:KKATV:GMEDH, TQVRL:RPVQ:KKATV:DMEDH, TQVKT:RPVQ:KKATV:MIEDH, TQVAL:RPVQ:KKATV:MIEDH, TQVDL:RPVQ:KKATV:MIEDH, TQVDL:RPVQ:KKATV:MVEDH, TQVEE:RPVQ:KKATV:FLEDH, TQVGQ:RPVQ:KKATV:LEEDH, TQVHH:RPVQ:KKATV:RLEDH, VPTEL:RPVQ:KKATV:DMVVE, VPEKM:RPVQ:KKATV:NMTVE, VPTEL:RPVQ:KKATV:EMVVE, APTKL:RPVQ:KKATV:NMVVR, APTQL:RPVQ:KKATV:NMVVR, APTKL:RPVQ:KKATV:NMVVK, VPTKL:RPVQ:KKATV:EGMSVAE, VPTKL:RPVQ:KKATV:GMAVS, TPTKM:RPVQ:KKATV:GMVVD, VPARL:RPVQ:KKATV:DMVVE, VPTRL:RPVQ:KKATV:DMVVE, APVKT:RPVQ:KKATV:MIVEE, VPQAL:RPVQ:KKATV:MIVRS, VSQDL:RPVQ:KKATV:MIVKS, VPQDL:RPVQ:KKATV:MVVKS, VPTEE:RPVQ:KKATV:FLQHN, VPTGQ:RPVQ:KKATV:LEEHS and SRVHH:RPVQ:KKATV:RLEEH. More particularly, the quadruplet PEP5:PEP1:PEP2:PEP6 is selected from the group consisting of VPTKM:SAIS:LKNYQ:NMVVE, VPTKL:SAIS:LKNYQ:NMVVE, VPTQL:SAIS:LKNYQ:NMVVE, VPTKL:SAIS:LKNYQ:EGMSVVE, VPTKL:SAIS:LKNYQ:GMVVE, VPTKM:SAIS:LKNYQ:GMVVE, VPTRL:SAIS:LKNYQ:DMVVE, VPTKT:SAIS:LKNYQ:MIVVE, VPTAL:SAIS:LKNYQ:MIVVE, VPTDL:SAIS:LKNYQ:MIVVE, VPTDL:SAIS:LKNYQ:MVVVE, VPEKM:SAIS:LKNYQ:NMTVE, APTKL:SAIS:LKNYQ:NMVVR, APTQL:SAIS:LKNYQ:NMVVR, APTKL:SAIS:LKNYQ:NMVVK, VPTKL:SAIS:LKNYQ:EGMSVAE, VPTKL:SAIS:LKNYQ:GMAVS, TPTKM:SAIS:LKNYQ:GMVVD, VPARL:SAIS:LKNYQ:DMVVE, APVKT:SAIS:LKNYQ:MIVEE, VPQAL:SAIS:LKNYQ:MIVRS, VSQDL:SAIS:LKNYQ:MIVKS, VPQDL:SAIS:LKNYQ:MVVKS, VPTEE:SAIS:LKNYQ:FLQHN, VPTGQ:SAIS:LKNYQ:LEEHS, SRVHH:SAIS:LKNYQ: RLEEH, TQVQL:SAIS:LKNYQ:TLEDH, VPEEL:SSLS:LKVYP:DMTVE, VPEEL:SSLS:LKVYP:EMTVE, VPEKL:SSLS:LKVYP:NMTVE, VPEQL:SSLS:LKVYP:NMTVE, VPEKL:SSLS:LKVYP:EGMSTVE, VPEKL:SSLS:LKVYP:GMTVE, VPEKM:SSLS:LKVYP:GMTVE, VPERL:SSLS:LKVYP:DMTVE, VPEKT:SSLS:LKVYP:MITVE, VPEAL:SSLS:LKVYP:MITVE, VPEDL:SSLS:LKVYP:MITVE, VPEDL:SSLS:LKVYP:MVTVE, VPTEL:SSLS:LKVYP:DMVVE, VPTEL:SSLS:LKVYP:EMVVE, APTKL:SSLS:LKVYP:NMVVR, APTQL:SSLS:LKVYP:NMVVR, APTKL:SSLS:LKVYP:NMVVK, VPTKL:SSLS:LKVYP:EGMSVAE, VPTKL:SSLS:LKVYP:GMAVS, TPTKM:SSLS:LKVYP:GMVVD, VPARL:SSLS:LKVYP:DMVVE, VPTRL:SSLS:LKVYP:DMVVE, APVKT:SSLS:LKVYP:MIVEE, VPQAL:SSLS:LKVYP:MIVRS, VSQDL:SSLS:LKVYP:MIVKS, VPQDL:SSLS:LKVYP:MVVKS, VPTEE:SSLS:LKVYP:FLQHN, VPTGQ:SSLS:LKVYP:LEEHS, SRVHH:SSLS:LKVYP:RLEEH, TQVQL:SSLS:LKVYP:TLEDH, APTEL:NAIS:LKKYR:DMVVR, APTKM:NAIS:LKKYR:NMVVR, APTEL:NAIS:LKKYR:EMVVR, APTKL:NAIS:LKKYR:NMVVR, APTKL:NAIS:LKKYR:EGMSVVR, APTKL:NAIS:LKKYR:GMVVR, APTKM:NAIS:LKKYR:GMVVR, APTRL:NAIS:LKKYR:DMVVR, APTKT:NAIS:LKKYR:MIVVR, APTAL:NAIS:LKKYR:MIVVR, APTDL:NAIS:LKKYR:MIVVR, APTDL:NAIS:LKKYR:MVVVR, VPTEL:NAIS:LKKYR:DMVVE, VPEKM:NAIS:LKKYR:NMTVE, VPTEL:NAIS:LKKYR:EMVVE, APTKL:NAIS:LKKYR:NMVVK, VPTKL:NAIS:LKKYR:EGMSVAE, VPTKL:NAIS:LKKYR:GMAVS, TPTKM:NAIS:LKKYR:GMVVD, VPARL:NAIS:LKKYR:DMVVE, VPTRL:NAIS:LKKYR:DMVVE, APVKT:NAIS:LKKYR:MIVEE, VPQAL:NAIS:LKKYR:MIVRS, VSQDL:NAIS:LKKYR:MIVKS, VPQDL:NAIS:LKKYR:MVVKS, VPTEE:NAIS:LKKYR:FLQHN, VPTGQ:NAIS:LKKYR:LEEHS, SRVHH:NAIS:LKKYR:RLEEH, TQVQL:NAIS:LKKYR:TLEDH, APTEL:SATS:LRKHR:DMVVK, APTKM:SATS:LRKHR:NMVVK, APTEL:SATS:LRKHR:EMVVK, APTKL:SATS:LRKHR:NMVVK, APTQL:SATS:LRKHR:NMVVK, APTKL:SATS:LRKHR:EGMSVVK, APTKL:SATS:LRKHR:GMVVK, APTKM:SATS:LRKHR:GMVVK, APTRL:SATS:LRKHR:DMVVK, APTKT:SATS:LRKHR:MIVVK, APTAL:SATS:LRKHR:MIVVK, APTDL:SATS:LRKHR:MIVVK, APTDL:SATS:LRKHR:MVVVK, VPTEL:SATS:LRKHR:DMVVE, VPEKM:SATS:LRKHR:NMTVE, VPTEL:SATS:LRKHR:EMVVE, APTKL:SATS:LRKHR:NMVVR, APTQL:SATS:LRKHR:NMVVR, VPTKL:SATS:LRKHR:EGMSVAE, VPTKL:SATS:LRKHR:GMAVS, TPTKM:SATS:LRKHR:GMVVD, VPARL:SATS:LRKHR:DMVVE, VPTRL:SATS:LRKHR:DMVVE, APVKT:SATS:LRKHR:MIVEE, VPQAL:SATS:LRKHR:MIVRS, VSQDL:SATS:LRKHR:MIVKS, VPQDL:SATS:LRKHR:MVVKS, VPTEE:SATS:LRKHR:FLQHN, VPTGQ:SATS:LRKHR:LEEHS, SRVHH:SATS:LRKHR:RLEEH, TQVQL:SATS:LRKHR:TLEDH, VPTEL:SPIS:LKYHY:DMVAE, VPTKM:SPIS:LKYHY:NMVAE, VPTEL:SPIS:LKYHY:EMVAE, VPTKL:SPIS:LKYHY:NMVAE, VPTQL:SPIS:LKYHY:NMVAE, VPTKL:SPIS:LKYHY:GMVAE, VPTKM:SPIS:LKYHY:GMVAE, VPTRL:SPIS:LKYHY:DMVAE, VPTKT:SPIS:LKYHY:MIVAE, VPTAL:SPIS:LKYHY:MIVAE, VPTDL:SPIS:LKYHY:MIVAE, VPTDL:SPIS:LKYHY:MVVAE, VPTEL:SPIS:LKYHY:DMVVE, VPEKM:SPIS:LKYHY:NMTVE, VPTEL:SPIS:LKYHY:EMVVE, APTKL:SPIS:LKYHY:NMVVR, APTQL:SPIS:LKYHY:NMVVR, APTKL:SPIS:LKYHY:NMVVK, VPTKL:SPIS:LKYHY:GMAVS, TPTKM:SPIS:LKYHY:GMVVD, VPARL:SPIS:LKYHY:DMVVE, VPTRL:SPIS:LKYHY:DMVVE, APVKT:SPIS:LKYHY:MIVEE, VPQAL:SPIS:LKYHY:MIVRS, VSQDL:SPIS:LKYHY:MIVKS, VPQDL:SPIS:LKYHY:MVVKS, VPTEE:SPIS:LKYHY:FLQHN, VPTGQ:SPIS:LKYHY:LEEHS, SRVHH:SPIS:LKYHY:RLEEH, TQVQL:SPIS:LKYHY:TLEDH, VPTEL:EPIS:KFKYE:DMAVS, VPTKM:EPIS:KFKYE:NMAVS, VPTEL:EPIS:KFKYE:EMAVS, VPTKL:EPIS:KFKYE:NMAVS, VPTQL:EPIS:KFKYE:NMAVS, VPTKL:EPIS:KFKYE:EGMSAVS, VPTKM:EPIS:KFKYE:GMAVS, VPTRL:EPIS:KFKYE:DMAVS, VPTKT:EPIS:KFKYE:MIAVS, VPTAL:EPIS:KFKYE:MIAVS, VPTDL:EPIS:KFKYE:MIAVS, VPTDL:EPIS:KFKYE:MVAVS, VPTEL:EPIS:KFKYE:DMVVE, VPEKM:EPIS:KFKYE:NMTVE, VPTEL:EPIS:KFKYE:EMVVE, APTKL:EPIS:KFKYE:NMVVR, APTQL:EPIS:KFKYE:NMVVR, APTKL:EPIS:KFKYE:NMVVK, VPTKL:EPIS:KFKYE:EGMSVAE, TPTKM:EPIS:KFKYE:GMVVD, VPARL:EPIS:KFKYE:DMVVE, VPTRL:EPIS:KFKYE:DMVVE, APVKT:EPIS:KFKYE:MIVEE, VPQAL:EPIS:KFKYE:MIVRS, VSQDL:EPIS:KFKYE:MIVKS, VPQDL:EPIS:KFKYE:MVVKS, VPTEE:EPIS:KFKYE:FLQHN, VPTGQ:EPIS:KFKYE:LEEHS, SRVHH:EPIS:KFKYE:RLEEH, TQVQL:EPIS:KFKYE:TLEDH, TPTEL:SPIN:YGKIP:DMVVD, TPTKM:SPIN:YGKIP:NMVVD, TPTEL:SPIN:YGKIP:EMVVD, TPTKL:SPIN:YGKIP:NMVVD, TPTQL:SPIN:YGKIP:NMVVD, TPTKL:SPIN:YGKIP:EGMSVVD, TPTKL:SPIN:YGKIP:GMVVD, TPTRL:SPIN:YGKIP:DMVVD, TPTKT:SPIN:YGKIP:MIVVD, TPTAL:SPIN:YGKIP:MIVVD, TPTDL:SPIN:YGKIP:MIVVD, TPTDL:SPIN:YGKIP:MVVVD, VPTEL:SPIN:YGKIP:DMVVE, VPEKM:SPIN:YGKIP:NMTVE, VPTEL:SPIN:YGKIP:EMVVE, APTKL:SPIN:YGKIP:NMVVR, APTQL:SPIN:YGKIP:NMVVR, APTKL:SPIN:YGKIP:NMVVK, VPTKL:SPIN:YGKIP:EGMSVAE, VPTKL:SPIN:YGKIP:GMAVS, VPARL:SPIN:YGKIP:DMVVE, VPTRL:SPIN:YGKIP:DMVVE, APVKT:SPIN:YGKIP:MIVEE, VPQAL:SPIN:YGKIP:MIVRS, VSQDL:SPIN:YGKIP:MIVKS, VPQDL:SPIN:YGKIP:MVVKS, VPTEE:SPIN:YGKIP:FLQHN, VPTGQ:SPIN:YGKIP:LEEHS, SRVHH:SPIN:YGKIP:RLEEH, TQVQL:SPIN:YGKIP:TLEDH, VPAEL:SPIS:YKQYE:DMVVE, VPAKM:SPIS:YKQYE:NMVVE, VPAEL:SPIS:YKQYE:EMVVE, VPAKL:SPIS:YKQYE:NMVVE, VPAQL:SPIS:YKQYE:NMVVE, VPAKL:SPIS:YKQYE:EGMSVVE, VPAKL:SPIS:YKQYE:GMVVE, VPAKM:SPIS:YKQYE:GMVVE, VPARL:SPIS:YKQYE:DMVVE, VPAKT:SPIS:YKQYE:MIVVE, VPAAL:SPIS:YKQYE:MIVVE, VPADL:SPIS:YKQYE:MIVVE, VPADL:SPIS:YKQYE:MVVVE, VPTEL:SPIS:YKQYE:DMVVE, VPEKM:SPIS:YKQYE:NMTVE, VPTEL:SPIS:YKQYE:EMVVE, APTKL:SPIS:YKQYE:NMVVR, APTQL:SPIS:YKQYE:NMVVR, APTKL:SPIS:YKQYE:NMVVK, VPTKL:SPIS:YKQYE:EGMSVAE, VPTKL:SPIS:YKQYE:GMAVS, TPTKM:SPIS:YKQYE:GMVVD, VPTRL:SPIS:YKQYE:DMVVE, APVKT:SPIS:YKQYE:MIVEE, VPQAL:SPIS:YKQYE:MIVRS, VSQDL:SPIS:YKQYE:MIVKS, VPQDL:SPIS:YKQYE:MVVKS, VPTEE:SPIS:YKQYE:FLQHN, VPTGQ:SPIS:YKQYE:LEEHS, SRVHH:SPIS:YKQYE:RLEEH, TQVQL:SPIS:YKQYE:TLEDH, VPTKM:SPIS:YKQYE:NMVVE, VPTKL:SPIS:YKQYE:NMVVE, VPTQL:SPIS:YKQYE:NMVVE, VPTKL:SPIS:YKQYE:EGMSVVE, VPTKL:SPIS:YKQYE:GMVVE, VPTKM:SPIS:YKQYE:GMVVE, VPTKT:SPIS:YKQYE:MIVVE, VPTAL:SPIS:YKQYE:MIVVE, VPTDL:SPIS:YKQYE:MIVVE, VPTDL:SPIS:YKQYE:MVVVE, APVEL:KPLS:DHHKD:DMVEE, APVKM:KPLS:DHHKD:NMVEE, APVEL:KPLS:DHHKD:EMVEE, APVKL:KPLS:DHHKD:NMVEE, APVQL:KPLS:DHHKD:NMVEE, APVKL:KPLS:DHHKD:EGMSVEE, APVKL:KPLS:DHHKD:GMVEE, APVKM:KPLS:DHHKD:GMVEE, APVRL:KPLS:DHHKD:DMVEE, APVAL:KPLS:DHHKD:MIVEE, APVDL:KPLS:DHHKD:MIVEE, APVDL:KPLS:DHHKD:MVVEE, VPTEL:KPLS:DHHKD:DMVVE, VPEKM:KPLS:DHHKD:NMTVE, VPTEL:KPLS:DHHKD:EMVVE, APTKL:KPLS:DHHKD:NMVVR, APTQL:KPLS:DHHKD:NMVVR, APTKL:KPLS:DHHKD:NMVVK, VPTKL:KPLS:DHHKD:EGMSVAE, VPTKL:KPLS:DHHKD:GMAVS, TPTKM:KPLS:DHHKD:GMVVD, VPARL:KPLS:DHHKD:DMVVE, VPTRL:KPLS:DHHKD:DMVVE, VPQAL:KPLS:DHHKD:MIVRS, VSQDL:KPLS:DHHKD:MIVKS, VPQDL:KPLS:DHHKD:MVVKS, VPTEE:KPLS:DHHKD:FLQHN, VPTGQ:KPLS:DHHKD:LEEHS, SRVHH:KPLS:DHHKD:RLEEH, TQVQL:KPLS:DHHKD:TLEDH, VPQEL:EPLP:EQLSN:DMVRS, VPQKM:EPLP:EQLSN:NMVRS, VPQEL:EPLP:EQLSN:EMVRS, VPQKL:EPLP:EQLSN:NMVRS, VPQQL:EPLP:EQLSN:NMVRS, VPQKL:EPLP:EQLSN:EGMSVRS, VPQKL:EPLP:EQLSN:GMVRS, VPQKM:EPLP:EQLSN:GMVRS, VPQRL:EPLP:EQLSN:DMVRS, VPQKT:EPLP:EQLSN:MIVRS, VPQDL:EPLP:EQLSN:MIVRS, VPQDL:EPLP:EQLSN:MVVRS, VPTEL:EPLP:EQLSN:DMVVE, VPEKM:EPLP:EQLSN:NMTVE, VPTEL:EPLP:EQLSN:EMVVE, APTKL:EPLP:EQLSN:NMVVR, APTQL:EPLP:EQLSN:NMVVR, APTKL:EPLP:EQLSN:NMVVK, VPTKL:EPLP:EQLSN:EGMSVAE, VPTKL:EPLP:EQLSN:GMAVS, TPTKM:EPLP:EQLSN:GMVVD, VPARL:EPLP:EQLSN:DMVVE, VPTRL:EPLP:EQLSN:DMVVE, APVKT:EPLP:EQLSN:MIVEE, VSQDL:EPLP:EQLSN:MIVKS, VPQDL:EPLP:EQLSN:MVVKS, VPTEE:EPLP:EQLSN:FLQHN, VPTGQ:EPLP:EQLSN:LEEHS, SRVHH:EPLP:EQLSN:RLEEH, TQVQL:EPLP:EQLSN:TLEDH, VSQEL:EPLT:EQLSN:DMVKS, VSQKM:EPLT:EQLSN:NMVKS, VSQEL:EPLT:EQLSN:EMVKS, VSQKL:EPLT:EQLSN:NMVKS, VSQQL:EPLT:EQLSN:NMVKS, VSQKL:EPLT:EQLSN:EGMSVKS, VSQKL:EPLT:EQLSN:GMVKS, VSQKM:EPLT:EQLSN:GMVKS, VSQRL:EPLT:EQLSN:DMVKS, VSQKT:EPLT:EQLSN:MIVKS, VSQAL:EPLT:EQLSN:MIVKS, VSQDL:EPLT:EQLSN:MVVKS, VPTEL:EPLT:EQLSN:DMVVE, VPEKM:EPLT:EQLSN:NMTVE, VPTEL:EPLT:EQLSN:EMVVE, APTKL:EPLT:EQLSN:NMVVR, APTQL:EPLT:EQLSN:NMVVR, APTKL:EPLT:EQLSN:NMVVK, VPTKL:EPLT:EQLSN:EGMSVAE, VPTKL:EPLT:EQLSN:GMAVS, TPTKM:EPLT:EQLSN:GMVVD, VPARL:EPLT:EQLSN:DMVVE, VPTRL:EPLT:EQLSN:DMVVE, APVKT:EPLT:EQLSN:MIVEE, VPQAL:EPLT:EQLSN:MIVRS, VPTEE:EPLT:EQLSN:FLQHN, VPTGQ:EPLT:EQLSN:LEEHS, SRVHH:EPLT:EQLSN:RLEEH, TQVQL:EPLT:EQLSN:TLEDH, VPQEL:EPLT:EQLSN:DMVKS, VPQKM:EPLT:EQLSN:NMVKS, VPQEL:EPLT:EQLSN:EMVKS, VPQKL:EPLT:EQLSN:NMVKS, VPQQL:EPLT:EQLSN:NMVKS, VPQKL:EPLT:EQLSN:EGMSVKS, VPQKL:EPLT:EQLSN:GMVKS, VPQKM:EPLT:EQLSN:GMVKS, VPQRL:EPLT:EQLSN:DMVKS, VPQKT:EPLT:EQLSN:MIVKS, VPQAL:EPLT:EQLSN:MIVKS, VPQDL:EPLT:EQLSN:MIVKS, VPTGQ:SNIT:IGEMS:LEQHN, VPTEL:SNIT:IGEMS:DMVVE, VPEKM:SNIT:IGEMS:NMTVE, VPTEL:SNIT:IGEMS:EMVVE, APTKL:SNIT:IGEMS:NMVVR, APTQL:SNIT:IGEMS:NMVVR, APTKL:SNIT:IGEMS:NMVVK, VPTKL:SNIT:IGEMS:EGMSVAE, VPTKL:SNIT:IGEMS:GMAVS, TPTKM:SNIT:IGEMS:GMVVD, VPARL:SNIT:IGEMS:DMVVE, VPTEL:SNIT:IGEMS:DMVVE, APVKT:SNIT:IGEMS:MIVEE, VPQAL:SNIT:IGEMS:MIVRS, VSQDL:SNIT:IGEMS:MIVKS, VPQDL:SNIT:IGEMS:MVVKS, VPTGQ:SNIT:IGEMS:LEEHS, SRVHH:SNIT:IGEMS:RLEEH, TQVQL:SNIT:IGEMS:TLEDH, VPTEE:SNIT:LGEMS:FLEHS, VPTEL:SNIT:LGEMS:DMVVE, VPEKM:SNIT:LGEMS:NMTVE, VPTEL:SNIT:LGEMS:EMVVE, APTKL:SNIT:LGEMS:NMVVR, APTQL:SNIT:LGEMS:NMVVR, APTKL:SNIT:LGEMS:NMVVK, VPTKL:SNIT:LGEMS: EGMSVAE, VPTKL:SNIT:LGEMS:GMAVS, TPTKM:SNIT:LGEMS:GMVVD, VPARL:SNIT:LGEMS:DMVVE, VPTRL:SNIT:LGEMS:DMVVE, APVKT:SNIT:LGEMS:MIVEE, VPQAL:SNIT:LGEMS:MIVRS, VSQDL:SNIT:LGEMS:MIVKS, VPQDL:SNIT:LGEMS:MVVKS, VPTEE:SNIT:LGEMS:FLQHN, SRVHH:SNIT:LGEMS:RLEEH, TQVQL:SNIT:LGEMS:TLEDH, SRVQL:RSVK:KEVQV:TLEEH, VPTEL:RSVK:KEVQV:DMVVE, VPEKM:RSVK:KEVQV:NMTVE, VPTEL:RSVK:KEVQV:EMVVE, APTKL:RSVK:KEVQV:NMVVR, APTQL:RSVK:KEVQV:NMVVR, APTKL:RSVK:KEVQV:NMVVK, VPTKL:RSVK:KEVQV:EGMSVAE, VPTKL:RSVK:KEVQV:GMAVS, TPTKM:RSVK:KEVQV:GMVVD, VPARL:RSVK:KEVQV:DMVVE, VPTRL:RSVK:KEVQV:DMVVE, APVKT:RSVK:KEVQV:MIVEE, VPQAL:RSVK:KEVQV:MIVRS, VSQDL:RSVK:KEVQV:MIVKS, VPQDL:RSVK:KEVQV:MVVKS, VPTEE:RSVK:KEVQV:FLQHN, VPTGQ:RSVK:KEVQV:LEEHS, TQVQL:RSVK:KEVQV:TLEDH, TQVHH:RPVQ:KKATV:RLEDH, VPTEL:RPVQ:KKATV:DMVVE, VPEKM:RPVQ:KKATV:NMTVE, VPTEL:RPVQ:KKATV:EMVVE, APTKL:RPVQ:KKATV:NMVVR, APTQL:RPVQ:KKATV:NMVVR, APTKL:RPVQ:KKATV:NMVVK, VPTKL:RPVQ:KKATV:EGMSVAE, VPTKL:RPVQ:KKATV:GMAVS, TPTKM:RPVQ:KKATV:GMVVD, VPARL:RPVQ:KKATV:DMVVE, VPTRL:RPVQ:KKATV:DMVVE, APVKT:RPVQ:KKATV:MIVEE, VPQAL:RPVQ:KKATV:MIVRS, VSQDL:RPVQ:KKATV:MIVKS, VPQDL:RPVQ:KKATV:MVVKS, VPTEE:RPVQ:KKATV:FLQHN, VPTGQ:RPVQ:KKATV:LEEHS and SRVHH:RPVQ:KKATV:RLEEH.

[0430] In particular, in certain embodiments, the quadruplet PEP5:PEP12:PEP2:PEP6 is selected from the group consisting of VPTKM:SAIS-AA¹⁷-LYL:LKNYQ:NMVVE, VPTEL:SAIS-AA¹⁷-LYL:LKNYQ:EMVVE, VPTKL:SAIS-AA¹⁷-LYL:LKNYQ:NMVVE, VPTQL:SAIS-AA¹⁷-LYL:LKNYQ:NMVVE, VPTKL:SAIS-AA¹⁷-LYL:LKNYQ:EGMSVVE, VPTKL:SAIS-AA¹⁷-LYL:LKNYQ:GMVVE, VPTKM:SAIS-AA¹⁷-LYL:LKNYQ:GMVVE, VPTRL:SAIS-AA¹⁷-LYL:LKNYQ:DMVVE, VPTKT:SAIS-AA¹⁷-LYL:LKNYQ:MIVVE, VPTAL:SAIS-AA¹⁷-LYL:LKNYQ:MIVVE, VPTDL:SAIS-AA¹⁷-LYL:LKNYQ:MIVVE, VPTDL:SAIS-AA¹⁷-LYL:LKNYQ:MVVVE, VPTEE:SAIS-AA¹⁷-LYL:LKNYQ:FLVVE, VPTGQ:SAIS-AA¹⁷-LYL:LKNYQ:LEVVE, VPTHH:SAIS-AA¹⁷-LYL:LKNYQ:RLVVE, VPTQL:SAIS-AA¹⁷-LYL:LKNYQ:TLVVE, VPEKM:SAIS-AA¹⁷-LYL:LKNYQ:NMTVE, APTKL:SAIS-AA¹⁷-LYL:LKNYQ:NMVVR, APTQL:SAIS-AA¹⁷-LYL:LKNYQ:NMVVR, APTKL:SAIS-AA¹⁷-LYL:LKNYQ:NMVVK, VPTKL:SAIS-AA¹⁷-LYL:LKNYQ:EGMSVAE, VPTKL:SAIS-AA¹⁷-LYL:LKNYQ:GMAVS, TPTKM:SAIS-AA¹⁷-LYL:LKNYQ:GMVVD, VPARL:SAIS-AA¹⁷-LYL:LKNYQ:DMVVE, APVKT:SAIS-AA¹⁷-LYL:LKNYQ:MIVEE, VPQAL:SAIS-AA¹⁷-LYL:LKNYQ:MIVRS, VSQDL:SAIS-AA¹⁷-LYL:LKNYQ:MIVKS, VPQDL:SAIS-AA¹⁷-LYL:LKNYQ:MVVKS, VPTEE:SAIS-AA¹⁷-LYL:LKNYQ:FLQHN, VPTGQ:SAIS-AA¹⁷-LYL:LKNYQ:LEEHS, SRVHH:SAIS-AA¹⁷-LYL:LKNYQ:RLEEH, TQVQL:SAIS-AA¹⁷-LYL:LKNYQ:TLEDH, VPEEL:SSLS-AA¹⁷-LFF:LKVYP:DMTVE, VPEEL:SSLS-AA¹⁷-LFF:LKVYP:EMTVE, VPEKL:SSLS-AA¹⁷-LFF:LKVYP:NMTVE, VPEQL:SSLS-AA¹⁷-LFF:LKVYP:NMTVE, VPEKL:SSLS-AA¹⁷-LFF:LKVYP:EGMSTVE, VPEKL:SSLS-AA¹⁷-LFF:LKVYP:GMTVE, VPEKM:SSLS-AA¹⁷-LFF:LKVYP:GMTVE, VPERL:SSLS-AA¹⁷-LFF:LKVYP:DMTVE, VPEKT:SSLS-AA¹⁷-LFF:LKVYP:MITVE, VPEAL:SSLS-AA¹⁷-LFF:LKVYP:MITVE, VPEDL:SSLS-AA¹⁷-LFF:LKVYP:MITVE, VPEDL:SSLS-AA¹⁷-LFF:LKVYP:MVTVE, VPEEE:SSLS-AA¹⁷-LFF:LKVYP:FLTVE, VPEGQ:SSLS-AA¹⁷-LFF:LKVYP:LETVE, VPEHH:SSLS-AA¹⁷-LFF:LKVYP:RLTVE, VPEQL:SSLS-AA¹⁷-LFF:LKVYP:TLTVE, VPTEL:SSLS-AA¹⁷-LFF:LKVYP:DMVVE, VPTEL:SSLS-AA¹⁷-LFF:LKVYP:EMVVE, APTKL:SSLS-AA¹⁷-LFF:LKVYP:NMVVR, APTQL:SSLS-AA¹⁷-LFF:LKVYP:NMVVR, APTKL:SSLS-AA¹⁷-LFF:LKVYP:NMVVK, VPTKL:SSLS-AA¹⁷-LFF:LKVYP:EGMSVAE, VPTKL:SSLS-AA¹⁷-LFF:LKVYP:GMAVS, TPTKM:SSLS-AA¹⁷-LFF:LKVYP:GMVVD, VPARL:SSLS-AA¹⁷-LFF:LKVYP:DMVVE, VPTRL:SSLS-AA¹⁷-LFF:LKVYP:DMVVE, APVKT:SSLS-AA¹⁷-LFF:LKVYP:MIVEE, VPQAL:SSLS-AA¹⁷-LFF:LKVYP:MIVRS, VSQDL:SSLS-AA¹⁷-LFF:LKVYP:MIVKS, VPQDL:SSLS-AA¹⁷-LFF:LKVYP:MVVKS, VPTEE:SSLS-AA¹⁷-LFF:LKVYP:FLQHN, VPTGQ:SSLS-AA¹⁷-LFF:LKVYPIEEHS, SRVHH:SSLS-AA¹⁷-LFF:LKVYP:RLEEH, TQVQL:SSLS-AA¹⁷-LFF:LKVYP:TLEDH, VPTEL:SAIS-AA¹⁷-LYL:LKNYQ:DMVVE, APTEL:NAIS-AA¹⁷-LYFIKKYR:DMVVR, APTKM:NAIS-AA¹⁷-LYFIKKYR:NMVVR, APTEL:NAIS-AA¹⁷-LYFIKKYR:EMVVR, APTKL:NAIS-AA¹⁷-LYFIKKYR:NMVVR, APTQL:NAIS-AA¹⁷-LYFIKKYR:NMVVR, APTKL:NAIS-AA¹⁷-LYF:LKKYR:EGMSVVR, APTKL:NAIS-AA¹⁷-LYFIKKYR:GMVVR, APTKM:NAIS-AA¹⁷-LYF:LKKYR:GMVVR, APTRL:NAIS-AA¹⁷-LYFIKKYR:DMVVR, APTKT:NAIS-AA¹⁷-LYFIKKYR:MIVVR, APTAL:NAIS-AA¹⁷-LYFIKKYR:MIVVR, APTDL:NAIS-AA¹⁷-LYFIKKYR:MIVVR, APTDL:NAIS-AA¹⁷-LYF:LKKYR:MVVVR, APTEE:NAIS-AA¹⁷-LYFIKKYR:FLVVR, APTGQ:NAIS-AA¹⁷-LYFIKKYR:LEVVR, APTHH:NAIS-AA¹⁷-LYFIKKYR:RLVVR, APTQL:NAIS-AA¹⁷-LYFIKKYR:TLVVR, VPTEL:NAIS-AA¹⁷-LYFIKKYR:DMVVE, VPEKM:NAIS-AA¹⁷-LYFIKKYR:NMTVE, VPTEL:NAIS-AA¹⁷-LYFIKKYR:EMVVE, APTKL:NAIS-AA¹⁷-LYF:LKKYR:NMVVK, VPTKL:NAIS-AA¹⁷-LYFIKKYR:EGMSVAE, VPTKL:NAIS-AA¹⁷-LYFIKKYR:GMAVS, TPTKM:NAIS-AA¹⁷-LYFIKKYR:GMVVD, VPARL:NAIS-AA¹⁷-LYFIKKYR:DMVVE, VPTRL:NAIS-AA¹⁷-LYFIKKYR:DMVVE, APVKT:NAIS-AA¹⁷-LYFIKKYR:MIVEE, VPQAL:NAIS-AA¹⁷-LYFIKKYR:MIVRS, VSQDL:NAIS-AA¹⁷-LYFIKKYR:MIVKS, VPQDL:NAIS-AA¹⁷-LYFIKKYR:MVVKS, VPTEE:NAIS-AA¹⁷-LYFIKKYR:FLQHN, VPTGQ:NAIS-AA¹⁷-LYFIKKYR:LEEHS, SRVHH:NAIS-AA¹⁷-LYFIKKYR:RLEEH, TQVQL:NAIS-AA¹⁷-LYFIKKYR:TLEDH, APTEL:SATS-AA¹⁷-LYY:LRKHR:DMVVK, APTKM:SATS-AA¹⁷-LYY:LRKHR:NMVVK, APTEL:SATS-AA¹⁷-LYY:LRKHR:EMVVK, APTKL:SATS-AA¹⁷-LYY:LRKHR:NMVVK, APTQL:SATS-AA¹⁷-LYY:LRKHR:NMVVK, APTKL:SATS-AA¹⁷-LYY:LRKHR:EGMSVVK, APTKL:SATS-AA¹⁷-LYY:LRKHR:GMVVK, APTKM:SATS-AA¹⁷-LYY:LRKHR:GMVVK, APTRL:SATS-AA¹⁷-LYY:LRKHR:DMVVK, APTKT:SATS-AA¹⁷-LYY:LRKHR:MIVVK, APTAL:SATS-AA¹⁷-LYY:LRKHR:MIVVK, APTDL:SATS-AA¹⁷-LYY:LRKHR:MIVVK, APTDL:SATS-AA¹⁷-LYY:LRKHR:MVVVK, APTEE:SATS-AA¹⁷-LYY:LRKHR:FLVVK, APTGQ:SATS-AA¹⁷-LYY:LRKHR:LEVVK, APTHH:SATS-AA¹⁷-LYY:LRKHR:RLVVK, APTQL:SATS-AA¹⁷-LYY:LRKHR:TLVVK, VPTEL:SATS-AA¹⁷-LYY:LRKHR:DMVVE, VPEKM:SATS-AA¹⁷-LYY:LRKHR:NMTVE, VPTEL:SATS-AA¹⁷-LYY:LRKHR:EMVVE, APTKL:SATS-AA¹⁷-LYY:LRKHR:NMVVR, APTQL:SATS-AA¹⁷-LYY:LRKHR:NMVVR, VPTKL:SATS-AA¹⁷-LYY:LRKHR:EGMSVAE, VPTKL:SATS-AA¹⁷-LYY:LRKHR:GMAVS, TPTKM:SATS-AA¹⁷-LYY:LRKHR:GMVVD, VPARL:SATS-AA¹⁷-LYY:LRKHR:DMVVE, VPTRL:SATS-AA¹⁷-LYY:LRKHR:DMVVE, APVKT:SATS-AA¹⁷-LYY:LRKHR:MIVEE, VPQAL:SATS-AA¹⁷-LYY:LRKHR:MIVRS, VSQDL:SATS-AA¹⁷-LYY:LRKHR:MIVKS, VPQDL:SATS-AA¹⁷-LYY:LRKHR:MVVKS, VPTEE:SATS-AA¹⁷-LYY:LRKHR:FLQHN, VPTGQ:SATS-AA¹⁷-LYY:LRKHR:LEEHS, SRVHH:SATS-AA¹⁷-LYY:LRKHR:RLEEH, TQVQL:SATS-AA¹⁷-LYY:LRKHR:TLEDH, VPTEL:SPIS-AA¹⁷-LYK:LKYHY:DMVAE, VPTKM:SPIS-AA¹⁷-LYK:LKYHY:NMVAE, VPTEL:SPIS-AA¹⁷-LYKIKYHY:EMVAE, VPTKL:SPIS-AA¹⁷-LYK:LKYHY:NMVAE, VPTQL:SPIS-AA¹⁷-LYK:LKYHY:NMVAE, VPTKL:SPIS-AA¹⁷-LYK:LKYHY:GMVAE, VPTKM:SPIS-AA¹⁷-LYK:LKYHY:GMVAE, VPTRL:SPIS-AA¹⁷-LYK:LKYHY:DMVAE, VPTKT:SPIS-AA¹⁷-LYK:LKYHY:MIVAE, VPTAL:SPIS-AA¹⁷-LYKIKYHY:MIVAE, VPTDL:SPIS-AA¹⁷-LYK:LKYHY:MIVAE, VPTDL:SPIS-AA¹⁷-LYK:LKYHY:MVVAE, VPTEE:SPIS-AA¹⁷-LYK:LKYHY:FLVAE, VPTGQ:SPIS-AA¹⁷-LYK:LKYHY:LEVAE, VPTHH:SPIS-AA¹⁷-LYK:LKYHY:RLVAE, VPTQL:SPIS-AA¹⁷-LYK:LKYHY:TLVAE, VPTEL:SPIS-AA¹⁷-LYKIKYHY:DMVVE, VPEKM:SPIS-AA¹⁷-LYK:LKYHY:NMTVE, VPTEL:SPIS-AA¹⁷-LYK:LKYHY:EMVVE, APTKL:SPIS-AA¹⁷-LYK:LKYHY:NMVVR, APTQL:SPIS-AA¹⁷-LYK:LKYHY:NMVVR, APTKL:SPIS-AA¹⁷-LYK:LKYHY:NMVVK, VPTKL:SPIS-AA¹⁷-LYK:LKYHY:GMAVS, TPTKM:SPIS-AA¹⁷-LYK:LKYHY:GMVVD, VPARL:SPIS-AA¹⁷-LYKIKYHY:DMVVE, VPTRL:SPIS-AA¹⁷-LYK:LKYHY:DMVVE, APVKT:SPIS-AA¹⁷-LYK:LKYHY:MIVEE, VPQAL:SPIS-AA¹⁷-LYK:LKYHY:MIVRS, VSQDL:SPIS-AA¹⁷-LYK:LKYHY:MIVKS, VPQDL:SPIS-AA¹⁷-LYK:LKYHY:MVVKS, VPTEE:SPIS-AA¹⁷-LYK:LKYHY:FLQHN, VPTGQ:SPIS-AA¹⁷-LYK:LKYHY:LEEHS, SRVHH:SPIS-AA¹⁷-LYK:LKYHY:RLEEH, TQVQL:SPIS-AA¹⁷-LYK:LKYHY:TLEDH, VPTEL:EPIS-AA¹⁷-LYL:KFKYE:DMAVS, VPTKM:EPIS-AA¹⁷-LYL:KFKYE:NMAVS, VPTEL:EPIS-AA¹⁷-LYL:KFKYE:EMAVS, VPTKL:EPIS-AA¹⁷-LYL:KFKYE:NMAVS, VPTQL:EPIS-AA¹⁷-LYL:KFKYE:NMAVS, VPTKL:EPIS-AA¹⁷-LYL:KFKYE:EGMSAVS, VPTKM:EPIS-AA¹⁷-LYL:KFKYE:GMAVS, VPTRL:EPIS-AA¹⁷-LYL:KFKYE:DMAVS, VPTKT:EPIS-AA¹⁷-LYL:KFKYE:MIAVS, VPTAL:EPIS-AA¹⁷-LYL:KFKYE:MIAVS, VPTDLEPIS-AA¹⁷-LYL:KFKYE:MIAVS, VPTDLEPIS-AA¹⁷-LYL:KFKYE:MVAVS, VPTEE:EPIS-AA¹⁷-LYL:KFKYE:FLAVS, VPTGQ:EPIS-AA¹⁷-LYL:KFKYE:LEAVS, VPTHH:EPIS-AA¹⁷-LYL:KFKYE:RLAVS, VPTQL:EPIS-AA¹⁷-LYL:KFKYE:TLAVS, VPTEL:EPIS-AA¹⁷-LYL:KFKYE:DMVVE, VPEKM:EPIS-AA¹⁷-LYL:KFKYE:NMTVE, VPTEL:EPIS-AA¹⁷-LYL:KFKYE:EMVVE, APTKL:EPIS-AA¹⁷-LYL:KFKYE:NMVVR, APTQL:EPIS-AA¹⁷-LYL:KFKYE:NMVVR, APTKL:EPIS-AA¹⁷-LYL:KFKYE:NMVVK, VPTKL:EPIS-AA¹⁷-LYL:KFKYE:EGMSVAE, TPTKM:EPIS-AA¹⁷-LYL:KFKYE:GMVVD, VPARL:EPIS-AA¹⁷-LYL:KFKYE:DMVVE, VPTRL:EPIS-AA¹⁷-LYL:KFKYE:DMVVE, APVKT:EPIS-AA¹⁷-LYL:KFKYE:MIVEE, VPQAL:EPIS-AA¹⁷-LYL:KFKYE:MIVRS, VSQDLEPIS-AA¹⁷-LYL:KFKYE:MIVKS, VPQDL:EPIS-AA¹⁷-LYL:KFKYE:MVVKS, VPTEE:EPIS-AA¹⁷-LYL:KFKYE:FLQHN, VPTGQ:EPIS-AA¹⁷-LYL:KFKYE:LEEHS, SRVHH:EPIS-AA¹⁷-LYL:KFKYE:RLEEH, TQVQL:EPIS-AA¹⁷-LYL:KFKYE:TLEDH, TPTEL:SPIN-AA¹⁷-LYF:YGKIP:DMVVD, TPTKM:SPIN-AA¹⁷-LYF:YGKIP:NMVVD, TPTEL:SPIN-AA¹⁷-LYF:YGKIP:EMVVD, TPTKL:SPIN-AA¹⁷-LYF:YGKIP:NMVVD, TPTQL:SPIN-AA¹⁷-LYF:YGKIP:NMVVD, TPTKL:SPIN-AA¹⁷-LYF:YGKIP:EGMSVVD, TPTKL:SPIN-AA¹⁷-LYF:YGKIP:GMVVD, TPTRL:SPIN-AA¹⁷-LYF:YGKIP:DMVVD, TPTKT:SPIN-AA¹⁷-LYF:YGKIP:MIVVD, TPTAL:SPIN-AA¹⁷-LYF:YGKIP:MIVVD, TPTDL:SPIN-AA¹⁷-LYF:YGKIP:MIVVD, TPTDL:SPIN-AA¹⁷-LYF:YGKIP:MVVVD, TPTEE:SPIN-AA¹⁷-LYF:YGKIP:FLVVD, TPTGQ:SPIN-AA¹⁷-LYF:YGKIP:LEVVD, TPTHH:SPIN-AA¹⁷-LYF:YGKIP:RLVVD, TPTQL:SPIN-AA¹⁷-LYF:YGKIP:TLVVD, VPTEL:SPIN-AA¹⁷-LYF:YGKIP:DMVVE, VPEKM:SPIN-AA¹⁷-LYF:YGKIP:NMTVE, VPTEL:SPIN-AA¹⁷-LYF:YGKIP:EMVVE, APTKL:SPIN-AA¹⁷-LYF:YGKIP:NMVVR, APTQL:SPIN-AA¹⁷-LYF:YGKIP:NMVVR, APTKL:SPIN-AA¹⁷-LYF:YGKIP:NMVVK, VPTKL:SPIN-AA¹⁷-LYF:YGKIP:EGMSVAE, VPTKL:SPIN-AA¹⁷-LYF:YGKIP:GMAVS, VPARL:SPIN-AA¹⁷-LYF:YGKIP:DMVVE, VPTRL:SPIN-AA¹⁷-LYF:YGKIP:DMVVE, APVKT:SPIN-AA¹⁷-LYF:YGKIP:MIVEE, VPQAL:SPIN-AA¹⁷-LYF:YGKIP:MIVRS, VSQDL:SPIN-AA¹⁷-LYF:YGKIP:MIVKS, VPQDL:SPIN-AA¹⁷-LYF:YGKIP:MVVKS, VPTEE:SPIN-AA¹⁷-LYF:YGKIP:FLQHN, VPTGQ:SPIN-AA¹⁷-LYF:YGKIP:LEEHS, SRVHH:SPIN-AA¹⁷-LYF:YGKIP:RLEEH, TQVQL:SPIN-AA¹⁷-LYF:YGKIP:TLEDH, VPAEL:SPIS-AA¹⁷-LYI:YKQYE:DMVVE, VPAKM:SPIS-AA¹⁷-LYI:YKQYE:NMVVE, VPAEL:SPIS-AA¹⁷-LYI:YKQYE:EMVVE, VPAKL:SPIS-AA¹⁷-LYI:YKQYE:NMVVE, VPAQL:SPIS-AA¹⁷-LYI:YKQYE:NMVVE, VPAKL:SPIS-AA¹⁷-LYI:YKQYE:EGMSVVE, VPAKL:SPIS-AA¹⁷-LYI:YKQYE:GMVVE, VPAKM:SPIS-AA¹⁷-LYI:YKQYE:GMVVE, VPARL:SPIS-AA¹⁷-LYI:YKQYE:DMVVE, VPAKT:SPIS-AA¹⁷-LYI:YKQYE:MIVVE, VPAAL:SPIS-AA¹⁷-LYI:YKQYE:MIVVE, VPADL:SPIS-AA¹⁷-LYI:YKQYE:MIVVE, VPADL:SPIS-AA¹⁷-LYI:YKQYE:MVVVE, VPAEE:SPIS-AA¹⁷-LYI:YKQYE:FLVVE, VPAGQ:SPIS-AA¹⁷-LYI:YKQYE:LEVVE, VPAHH:SPIS-AA¹⁷-LYI:YKQYE:RLVVE, VPAQL:SPIS-AA¹⁷-LYI:YKQYE:TLVVE, VPTEL:SPIS-AA¹⁷-LYI:YKQYE:DMVVE, VPEKM:SPIS-AA¹⁷-LYI:YKQYE:NMTVE, VPTEL:SPIS-AA¹⁷-LYI:YKQYE:EMVVE, APTKL:SPIS-AA¹⁷-LYI:YKQYE:NMVVR, APTQL:SPIS-AA¹⁷-LYI:YKQYE:NMVVR, APTKL:SPIS-AA¹⁷-LYI:YKQYE:NMVVK, VPTKL:SPIS-AA¹⁷-LYI:YKQYE:EGMSVAE, VPTKL:SPIS-AA¹⁷-LYI:YKQYE:GMAVS, TPTKM:SPIS-AA¹⁷-LYI:YKQYE:GMVVD, VPTRL:SPIS-AA¹⁷-LYI:YKQYE:DMVVE, APVKT:SPIS-AA¹⁷-LYI:YKQYE:MIVEE, VPQAL:SPIS-AA¹⁷-LYI:YKQYE:MIVRS, VSQDL:SPIS-AA¹⁷-LYI:YKQYE:MIVKS, VPQDL:SPIS-AA¹⁷-LYI:YKQYE:MVVKS, VPTEE:SPIS-AA¹⁷-LYI:YKQYE:FLQHN, VPTGQ:SPIS-AA¹⁷-LYI:YKQYE:LEEHS, SRVHH:SPIS-AA¹⁷-LYI:YKQYE:RLEEH, TQVQL:SPIS-AA¹⁷-LYI:YKQYE:TLEDH, VPTEL:SPIS-AA¹⁷-LFINKQYE:DMVVE, VPTKM:SPIS-AA¹⁷-LRYKQYE:NMVVE, VPTEL:SPIS-AA¹⁷-LRYKQYE:EMVVE, VPTKL:SPIS-AA¹⁷-LRYKQYE:NMVVE, VPTQL:SPIS-AA¹⁷-LFINKQYE:NMVVE, VPTKL:SPIS-AA¹⁷-LFINKQYE:EGMSVVE, VPTKL:SPIS-AA¹⁷-LRYKQYE:GMVVE, VPTKM:SPIS-AA¹⁷-LRYKQYE:GMVVE, VPTRL:SPIS-AA¹⁷-LFINKQYE:DMVVE, VPTKT:SPIS-AA¹⁷-LFINKQYE:MIVVE, VPTAL:SPIS-AA¹⁷-LFINKQYE:MIVVE, VPTDL:SPIS-AA¹⁷-LRYKQYE:MIVVE, VPTDL:SPIS-AA¹⁷-LFI:YKQYE:MVVVE, VPTEE:SPIS-AA¹⁷-LFINKQYE:FLVVE, VPTGQ:SPIS-AA¹⁷-LRYKQYE:LEVVE, VPTHH:SPIS-AA¹⁷-LRYKQYE:RLVVE, VPTQL:SPIS-AA¹⁷-LFINKQYE:TLVVE, VPEKM:SPIS-AA¹⁷-LRYKQYE:NMTVE, APTKL:SPIS-AA¹⁷-LFINKQYE:NMVVR, APTQL:SPIS-AA¹⁷-LRYKQYE:NMVVR, APTKL:SPIS-AA¹⁷-LFINKQYE:NMVVK, VPTKL:SPIS-AA¹⁷-LRYKQYE:EGMSVAE, VPTKL:SPIS-AA¹⁷-LRYKQYE:GMAVS, TPTKM:SPIS-AA¹⁷-LRYKQYE:GMVVD, VPARL:SPIS-AA¹⁷-LRYKQYE:DMVVE, APVKT:SPIS-AA¹⁷-LRYKQYE:MIVEE, VPQAL:SPIS-AA¹⁷-LFINKQYE:MIVRS, VSQDL:SPIS-AA¹⁷-LFLYKQYE:MIVKS, VPQDL:SPIS-AA¹⁷-LFLYKQYE:MVVKS, VPTEE:SPIS-AA¹⁷-LRYKQYE:FLQHN, VPTGQ:SPIS-AA¹⁷-LFINKQYE:LEEHS, SRVHH:SPIS-AA¹⁷-LRYKQYE:RLEEH, TQVQL:SPIS-AA¹⁷-LRYKQYE:TLEDH, APVEL:KPLS-AA¹⁷-LYV:DHHKD:DMVEE, APVKM:KPLS-AA¹⁷-LYV:DHHKD:NMVEE, APVEL:KPLS-AA¹⁷-LYV:DHHKD:EMVEE, APVKL:KPLS-AA¹⁷-LYV:DHHKD:NMVEE, APVQL:KPLS-AA¹⁷-LYV:DHHKD:NMVEE, APVKL:KPLS-AA¹⁷-LYV:DHHKD:EGMSVEE, APVKL:KPLS-AA¹⁷-LYV:DHHKD:GMVEE, APVKM:KPLS-AA¹⁷-LYV:DHHKD:GMVEE, APVRL:KPLS-AA¹⁷-LYV:DHHKD:DMVEE, APVAL:KPLS-AA¹⁷-LYV:DHHKD:MIVEE, APVDL:KPLS-AA¹⁷-LYV:DHHKD:MIVEE, APVDL:KPLS-AA¹⁷-LYV:DHHKD:MVVEE, APVEE:KPLS-AA¹⁷-LYV:DHHKD:FLVEE, APVGQ:KPLS-AA¹⁷-LYV:DHHKaLEVEE, APVHH:KPLS-AA¹⁷-LYV:DHHKD:RLVEE, APVQL:KPLS-AA¹⁷-LYV:DHHKD:TLVEE, VPTEL:KPLS-AA¹⁷-LYV:DHHKD:DMVVE, VPEKM:KPLS-AA¹⁷-LYV:DHHKD:NMTVE, VPTEL:KPLS-AA¹⁷-LYV:DHHKD:EMVVE, APTKL:KPLS-AA¹⁷-LYV:DHHKD:NMVVR, APTQL:KPLS-AA¹⁷-LYV:DHHKD:NMVVR, APTKL:KPLS-AA¹⁷-LYV:DHHKD:NMVVK, VPTKL:KPLS-AA¹⁷-LYV:DHHKD:EGMSVAE, VPTKL:KPLS-AA¹⁷-LYV:DHHKD:GMAVS, TPTKM:KPLS-AA¹⁷-LYV:DHHKD:GMVVD, VPARL:KPLS-AA¹⁷-LYV:DHHKD:DMVVE, VPTRL:KPLS-AA¹⁷-LYV:DHHKD:DMVVE, VPQAL:KPLS-AA¹⁷-LYV:DHHKD:MIVRS, VSQDL:KPLS-AA¹⁷-LYV:DHHKD:MIVKS, VPQDL:KPLS-AA¹⁷-LYV:DHHKD:MVVKS, VPTEE:KPLS-AA¹⁷-LYV:DHHKD:FLQHN, VPTGQ:KPLS-AA¹⁷-LYV:DHHKDIEEHS, SRVHH:KPLS-AA¹⁷-LYV:DHHKD:RLEEH, TQVQL:KPLS-AA¹⁷-LYV:DHHKD:TLEDH, VPQEL:EPLP-AA¹⁷-VYY:EQLSN:DMVRS, VPQKM:EPLP-AA¹⁷-VYY:EQLSN:NMVRS, VPQEL:EPLP-AA¹⁷-VYY:EQLSN:EMVRS, VPQKL:EPLP-AA¹⁷-VYY:EQLSN:NMVRS, VPQQL:EPLP-AA¹⁷-VYY:EQLSN:NMVRS, VPQKL:EPLP-AA¹⁷-VYY:EQLSN:EGMSVRS, VPQKL:EPLP-AA¹⁷-VYY:EQLSN:GMVRS, VPQKM:EPLP-AA¹⁷-VYY:EQLSN:GMVRS, VPQRL:EPLP-AA¹⁷-VYY:EQLSN:DMVRS, VPQKT:EPLP-AA¹⁷-VYY:EQLSN:MIVRS, VPQDLEPLP-AA¹⁷-VYY:EQLSN:MIVRS, VPQDLEPLP-AA¹⁷-VYY:EQLSN:MVVRS, VPQEE:EPLP-AA¹⁷-VYY:EQLSN:FLVRS, VPQGQ:EPLP-AA¹⁷-VYY:EQLSN:LEVRS, VPQHH:EPLP-AA¹⁷-VYY:EQLSN:RLVRS, VPQQL:EPLP-AA¹⁷-VYY:EQLSN:TLVRS, VPTEL:EPLP-AA¹⁷-VYY:EQLSN:DMVVE, VPEKM:EPLP-AA¹⁷-VYY:EQLSN:NMTVE, VPTEL:EPLP-AA¹⁷-VYY:EQLSN:EMVVE, APTKL:EPLP-AA¹⁷-VYY:EQLSN:NMVVR, APTQL:EPLP-AA¹⁷-VYY:EQLSN:NMVVR, APTKL:EPLP-AA¹⁷-VYY:EQLSN:NMVVK, VPTKL:EPLP-AA¹⁷-VYY:EQLSN:EGMSVAE, VPTKL:EPLP-AA¹⁷-VYY:EQLSN:GMAVS, TPTKM:EPLP-AA¹⁷-VYY:EQLSN:GMVVD, VPARL:EPLP-AA¹⁷-VYY:EQLSN:DMVVE, VPTRL:EPLP-AA¹⁷-VYY:EQLSN:DMVVE, APVKT:EPLP-AA¹⁷-VYY:EQLSN:MIVEE, VSQDLEPLP-AA¹⁷-VYY:EQLSN:MIVKS, VPQDL:EPLP-AA¹⁷-VYY:EQLSN:MVVKS, VPTEE:EPLP-AA¹⁷-VYY:EQLSN:FLQHN, VPTGQ:EPLP-AA¹⁷-VYY:EQLSN:LEEHS, SRVHH:EPLP-AA¹⁷-VYY:EQLSN:RLEEH, TQVQL:EPLP-AA¹⁷-VYY:EQLSN:TLEDH, VSQEL:EPLT-AA¹⁷-LYY:EQLSN:DMVKS, VSQKM:EPLT-AA¹⁷-LYY:EQLSN:NMVKS, VSQEL:EPLT-AA¹⁷-LYY:EQLSN:EMVKS, VSQKL:EPLT-AA¹⁷-LYY:EQLSN:NMVKS, VSQQL:EPLT-AA¹⁷-LYY:EQLSN:NMVKS, VSQKL:EPLT-AA¹⁷-LYY:EQLSN:EGMSVKS, VSQKL:EPLT-AA¹⁷-LYY:EQLSN:GMVKS, VSQKM:EPLT-AA¹⁷-LYY:EQLSN:GMVKS, VSQRL:EPLT-AA¹⁷-LYY:EQLSN:DMVKS, VSQKT:EPLT-AA¹⁷-LYY:EQLSN:MIVKS, VSQAL:EPLT-AA¹⁷-LYY:EQLSN:MIVKS, VSQDL:EPLT-AA¹⁷-LYY:EQLSN:MVVKS, VSQEE:EPLT-AA¹⁷-LYY:EQLSN:FLVKS, VSQGQ:EPLT-AA¹⁷-LYY:EQLSN:LEVKS, VSQHH:EPLT-AA¹⁷-LYY:EQLSN:RLVKS, VSQQL:EPLT-AA¹⁷-LYY:EQLSN:TLVKS, VPTEL:EPLT-AA¹⁷-LYY:EQLSN:DMVVE, VPEKM:EPLT-AA¹⁷-LYY:EQLSN:NMTVE, VPTEL:EPLT-AA¹⁷-LYY:EQLSN:EMVVE, APTKL:EPLT-AA¹⁷-LYY:EQLSN:NMVVR, APTQL:EPLT-AA¹⁷-LYY:EQLSN:NMVVR, APTKL:EPLT-AA¹⁷-LYY:EQLSN:NMVVK, VPTKL:EPLT-AA¹⁷-LYY:EQLSN:EGMSVAE, VPTKL:EPLT-AA¹⁷-LYY:EQLSN:GMAVS, TPTKM:EPLT-AA¹⁷-LYY:EQLSN:GMVVD, VPARL:EPLT-AA¹⁷-LYY:EQLSN:DMVVE, VPTRL:EPLT-AA¹⁷-LYY:EQLSN:DMVVE, APVKT:EPLT-AA¹⁷-LYY:EQLSN:MIVEE, VPQAL:EPLT-AA¹⁷-LYY:EQLSN:MIVRS, VPQDL:EPLT-AA¹⁷-LYY:EQLSN:MVVKS, VPTEE:EPLT-AA¹⁷-LYY:EQLSN:FLQHN, VPTGQ:EPLT-AA¹⁷-LYY:EQLSN:LEEHS, SRVHH:EPLT-AA¹⁷-LYY:EQLSN:RLEEH, TQVQL:EPLT-AA¹⁷-LYY:EQLSN:TLEDH, VPQEL:EPLT-AA¹⁷-LYY:EQLSN:DMVKS, VPQKM:EPLT-AA¹⁷-LYY:EQLSN:NMVKS, VPQEL:EPLT-AA¹⁷-LYY:EQLSN:EMVKS, VPQKL:EPLT-AA¹⁷-LYY:EQLSN:NMVKS, VPQQL:EPLT-AA¹⁷-LYY:EQLSN:NMVKS, VPQKL:EPLT-AA¹⁷-LYY:EQLSN:EGMSVKS, VPQKL:EPLT-AA¹⁷-LYY:EQLSN:GMVKS, VPQKM:EPLT-AA¹⁷-LYY:EQLSN:GMVKS, VPQRL:EPLT-AA¹⁷-LYY:EQLSN:DMVKS, VPQKT:EPLT-AA¹⁷-LYY:EQLSN:MIVKS, VPQAL:EPLT-AA¹⁷-LYY:EQLSN:MIVKS, VPQDL:EPLT-AA¹⁷-LYY:EQLSN:MIVKS, VPQEE:EPLT-AA¹⁷-LYY:EQLSN:FLVKS, VPQGQ:EPLT-AA¹⁷-LYY:EQLSN:LEVKS, VPQHH:EPLT-AA¹⁷-LYY:EQLSN:RLVKS, VPQQL:EPLT-AA¹⁷-LYY:EQLSN:TLVKS, VSQDL:EPLT-AA¹⁷-LYY:EQLSN:MIVKS, VPTEL:SNIT-AA¹⁷-QIM:IGEMS:DMQHN, VPTKM:SNIT-AA¹⁷-QIM:IGEMS:NMQHN, VPTEL:SNIT-AA¹⁷-QIM:IGEMS:EMQHN, VPTKL:SNIT-AA¹⁷-QIM:IGEMS:NMQHN, VPTQL:SNIT-AA¹⁷-QIM:IGEMS:NMQHN, VPTKL:SNIT-AA¹⁷-QIM:IGEMS:EGMSQHN, VPTKL:SNIT-AA¹⁷-QIM:IGEMS:GMQHN, VPTKM:SNIT-AA¹⁷-QIM:IGEMS:GMQHN, VPTRL:SNIT-AA¹⁷-QIM:IGEMS:DMQHN, VPTKT:SNIT-AA¹⁷-QIM:IGEMS:MIQHN, VPTAL:SNIT-AA¹⁷-QIM:IGEMS:MIQHN, VPTDL:SNIT-AA¹⁷-QIM:IGEMS:MIQHN, VPTDL:SNIT-AA¹⁷-QIM:IGEMS:MVQHN, VPTGQ:SNIT-AA¹⁷-QIM:IGEMS:LEQHN, VPTEE:SNIT-AA¹⁷-QIM:IGEMS:FLQHN, VPTHH:SNIT-AA¹⁷-QIM:IGEMS:RLQHN, VPTQL:SNIT-AA¹⁷-QIM:IGEMS:TLQHN, VPTEL:SNIT-AA¹⁷-QIM:IGEMS:DMVVE, VPEKM:SNIT-AA¹⁷-QIM:IGEMS:NMTVE, VPTEL:SNIT-AA¹⁷-QIM:IGEMS:EMVVE, APTKL:SNIT-AA¹⁷-QIM:IGEMS:NMVVR, APTQL:SNIT-AA¹⁷-QIM:IGEMS:NMVVR, APTKL:SNIT-AA¹⁷-QIM:IGEMS:NMVVK, VPTKL:SNIT-AA¹⁷-QIM:IGEMS:EGMSVAE, VPTKL:SNIT-AA¹⁷-QIM:IGEMS:GMAVS, TPTKM:SNIT-AA¹⁷-QIM:IGEMS:GMVVD, VPARL:SNIT-AA¹⁷-QIM:IGEMS:DMVVE, VPTRL:SNIT-AA¹⁷-QIM:IGEMS:DMVVE, APVKT:SNIT-AA¹⁷-QIM:IGEMS:MIVEE, VPQAL:SNIT-AA¹⁷-QIM:IGEMS:MIVRS, VSQDL:SNIT-AA¹⁷-QIM:IGEMS:MIVKS, VPQDL:SNIT-AA¹⁷-QIM:IGEMS:MVVKS, VPTGQ:SNIT-AA¹⁷-QIM:IGEMS:LEEHS, SRVHH:SNIT-AA¹⁷-QIM:IGEMS:RLEEH, TQVQL:SNIT-AA¹⁷-QIM:IGEMS:TLEDH, VPTEL:SNIT-AA¹⁷-QIM:LGEMS:DMEHS, VPTKM:SNIT-AA¹⁷-QIM:LGEMS:NMEHS, VPTEL:SNIT-AA¹⁷-QIM:LGEMS:EMEHS, VPTKL:SNIT-AA¹⁷-QIM:LGEMS:NMEHS, VPTQL:SNIT-AA¹⁷-QIM:LGEMS:NMEHS, VPTKL:SNIT-AA¹⁷-QIM:LGEMS:EGMSEHS, VPTKL:SNIT-AA¹⁷-QIM:LGEMS:GMEHS, VPTKM:SNIT-AA¹⁷-QIM:LGEMS:GMEHS, VPTRL:SNIT-AA¹⁷-QIM:LGEMS:DMEHS, VPTKT:SNIT-AA¹⁷-QIM:LGEMS:MIEHS, VPTAL:SNIT-AA¹⁷-QIM:LGEMS:MIEHS, VPTDL:SNIT-AA¹⁷-QIM:LGEMS:MIEHS, VPTDL:SNIT-AA¹⁷-QIM:LGEMS:MVEHS, VPTEE:SNIT-AA¹⁷-QIM:LGEMS:FLEHS, VPTHH:SNIT-AA¹⁷-QIM:LGEMS:RLEHS, VPTQL:SNIT-AA¹⁷-QIM:LGEMS:TLEHS, VPTEL:SNIT-AA¹⁷-QIM:LGEMS:DMVVE, VPEKM:SNIT-AA¹⁷-QIM:LGEMS:NMTVE, VPTEL:SNIT-AA¹⁷-QIM:LGEMS:EMVVE, APTKL:SNIT-AA¹⁷-QIM:LGEMS:NMVVR, APTQL:SNIT-AA¹⁷-QIM:LGEMS:NMVVR, APTKL:SNIT-AA¹⁷-QIM:LGEMS:NMVVK, VPTKL:SNIT-AA¹⁷-QIM:LGEMS:EGMSVAE, VPTKL:SNIT-AA¹⁷-QIM:LGEMS:GMAVS, TPTKM:SNIT-AA¹⁷-QIM:LGEMS:GMVVD, VPARL:SNIT-AA¹⁷-QIM:LGEMS:DMVVE, VPTRL:SNIT-AA¹⁷-QIM:LGEMS:DMVVE, APVKT:SNIT-AA¹⁷-QIM:LGEMS:MIVEE, VPQAL:SNIT-AA¹⁷-QIM:LGEMS:MIVRS, VSQDL:SNIT-AA¹⁷-QIM:LGEMS:MIVKS, VPQDL:SNIT-AA¹⁷-QIM:LGEMS:MVVKS, VPTEE:SNIT-AA¹⁷-QIM:LGEMS:FLQHN, SRVHH:SNIT-AA¹⁷-QIM:LGEMS:RLEEH, TQVQL:SNIT-AA¹⁷-QIM:LGEMS:TLEDH, SRVEL:RSVK-AA¹⁷-AKV:KEVQV:DMEEH, SRVKM:RSVK-AA¹⁷-AKV:KEVQV:NMEEH, SRVEL:RSVK-AA¹⁷-AKV:KEVQV:EMEEH, SRVKL:RSVK-AA¹⁷-AKV:KEVQV:NMEEH, SRVQL:RSVK-AA¹⁷-AKV:KEVQV:NMEEH, SRVKL:RSVK-AA¹⁷-AKV:KEVQV:EGMSEEH, SRVKL:RSVK-AA¹⁷-AKV:KEVQV:GMEEH, SRVKM:RSVK-AA¹⁷-AKV:KEVQV:GMEEH, SRVRL:RSVK-AA¹⁷-AKV:KEVQV:DMEEH, SRVKT:RSVK-AA¹⁷-AKV:KEVQV:MIEEH, SRVAL:RSVK-AA¹⁷-AKV:KEVQV:MIEEH, SRVDL:RSVK-AA¹⁷-AKV:KEVQV:MIEEH, SRVDL:RSVK-AA¹⁷-AKV:KEVQV:MVEEH, SRVEE:RSVK-AA¹⁷-AKV:KEVQV:FLEEH, SRVGQ:RSVK-AA¹⁷-AKV:KEVQVIEEEH, SRVQL:RSVK-AA¹⁷-AKV:KEVQV:TLEEH, VPTEL:RSVK-AA¹⁷-AKV:KEVQV:DMVVE, VPEKM:RSVK-AA¹⁷-AKV:KEVQV:NMTVE, VPTEL:RSVK-AA¹⁷-AKV:KEVQV:EMVVE, APTKL:RSVK-AA¹⁷-AKV:KEVQV:NMVVR, APTQL:RSVK-AA¹⁷-AKV:KEVQV:NMVVR, APTKL:RSVK-AA¹⁷-AKV:KEVQV:NMVVK, VPTKL:RSVK-AA¹⁷-AKV:KEVQV:EGMSVAE, VPTKL:RSVK-AA¹⁷-AKV:KEVQV:GMAVS, TPTKM:RSVK-AA¹⁷-AKV:KEVQV:GMVVD, VPARL:RSVK-AA¹⁷-AKV:KEVQV:DMVVE, VPTRL:RSVK-AA¹⁷-AKV:KEVQV:DMVVE, APVKT:RSVK-AA¹⁷-AKV:KEVQV:MIVEE, VPQAL:RSVK-AA¹⁷-AKV:KEVQV:MIVRS, VSQDL:RSVK-AA¹⁷-AKV:KEVQV:MIVKS, VPQDL:RSVK-AA¹⁷-AKV:KEVQV:MVVKS, VPTEE:RSVK-AA¹⁷-AKV:KEVQV:FLQHN, VPTGQ:RSVK-AA¹⁷-AKV:KEVQVIEEHS, TQVQL:RSVK-AA¹⁷-AKV:KEVQV:TLEDH, TQVEL:RPVQ-AA¹⁷-RKI:KKATV:DMEDH, TQVKM:RPVQ-AA¹⁷-RKI:KKATV:NMEDH, TQVEL:RPVQ-AA¹⁷-RKI:KKATV:EMEDH, TQVKL:RPVQ-AA¹⁷-RKI:KKATV:NMEDH, TQVQL:RPVQ-AA¹⁷-RKI:KKATV:NMEDH, TQVKL:RPVQ-AA¹⁷-RKI:KKATV:EGMSEDH, TQVKL:RPVQ-AA¹⁷-RKI:KKATV:GMEDH, TQVKM:RPVQ-AA¹⁷-RKI:KKATV:GMEDH, TQVRL:RPVQ-AA¹⁷-RKI:KKATV:DMEDH, TQVKT:RPVQ-AA¹⁷-RKI:KKATV:MIEDH, TQVAL:RPVQ-AA¹⁷-RKI:KKATV:MIEDH, TQVDL:RPVQ-AA¹⁷-RKI:KKATV:MIEDH, TQVDL:RPVQ-AA¹⁷-RKI:KKATV:MVEDH, TQVEE:RPVQ-AA¹⁷-RKI:KKATV:FLEDH, TQVGQ:RPVQ-AA¹⁷-RKI:KKATV:LEEDH, TQVHH:RPVQ-AA¹⁷-RKI:KKATV:RLEDH, VPTEL:RPVQ-AA¹⁷-RKI:KKATV:DMVVE, VPEKM:RPVQ-AA¹⁷-RKI:KKATV:NMTVE, VPTEL:RPVQ-AA¹⁷-RKI:KKATV:EMVVE, APTKL:RPVQ-AA¹⁷-RKI:KKATV:NMVVR, APTQL:RPVQ-AA¹⁷-RKI:KKATV:NMVVR, APTKL:RPVQ-AA¹⁷-RKI:KKATV:NMVVK, VPTKL:RPVQ-AA¹⁷-RKI:KKATV:EGMSVAE, VPTKL:RPVQ-AA¹⁷-RKI:KKATV:GMAVS, TPTKM:RPVQ-AA¹⁷-RKI:KKATV:GMVVD, VPARL:RPVQ-AA¹⁷-RKI:KKATV:DMVVE, VPTRL:RPVQ-AA¹⁷-RKI:KKATV:DMVVE, APVKT:RPVQ-AA¹⁷-RKI:KKATV:MIVEE, VPQAL:RPVQ-AA¹⁷-RKI:KKATV:MIVRS, VSQDL:RPVQ-AA¹⁷-RKI:KKATV:MIVKS, VPQDL:RPVQ-AA¹⁷-RKI:KKATV:MVVKS, VPTEE:RPVQ-AA¹⁷-RKI:KKATV:FLQHN, VPTGQ:RPVQ-AA¹⁷-RKI:KKATV:LEEHS and SRVHH:RPVQ-AA¹⁷-RKI:KKATV:RLEEH; and wherein AA¹⁷ is selected from the group consisting of G, A, V, L, I, P, F, M, W, T and S (in particular is selected from the group consisting of M, I, L, V and T). More particularly, the quadruplet PEP5:PEP12:PEP2:PEP6 is selected from the group consisting of VPTKM:SAIS-AA¹⁷-LYL:LKNYQ:NMVVE, VPTKL:SAIS-AA¹⁷-LYL:LKNYQ:NMVVE, VPTQL:SAIS-AA¹⁷-LYL:LKNYQ:NMVVE, VPTKL:SAIS-AA¹⁷-LYL:LKNYQ:EGMSVVE, VPTKL:SAIS-AA¹⁷-LYL:LKNYQ:GMVVE, VPTKM:SAIS-AA¹⁷-LYL:LKNYQ:GMVVE, VPTRL:SAIS-AA¹⁷-LYL:LKNYQ:DMVVE, VPTKT:SAIS-AA¹⁷-LYL:LKNYQ:MIVVE, VPTAL:SAIS-AA¹⁷-LYL:LKNYQ:MIVVE, VPTDL:SAIS-AA¹⁷-LYL:LKNYQ:MIVVE, VPTDL:SAIS-AA¹⁷-LYL:LKNYQ:MVVVE, VPEKM:SAIS-AA¹⁷-LYL:LKNYQ:NMTVE, APTKL:SAIS-AA¹⁷-LYL:LKNYQ:NMVVR, APTQL:SAIS-AA¹⁷-LYL:LKNYQ:NMVVR, APTKL:SAIS-AA¹⁷-LYL:LKNYQ:NMVVK, VPTKL:SAIS-AA¹⁷-LYL:LKNYQ:EGMSVAE, VPTKL:SAIS-AA¹⁷-LYL:LKNYQ:GMAVS, TPTKM:SAIS-AA¹⁷-LYL:LKNYQ:GMVVD, VPARL:SAIS-AA¹⁷-LYL:LKNYQ:DMVVE, APVKT:SAIS-AA¹⁷-LYL:LKNYQ:MIVEE, VPQAL:SAIS-AA¹⁷-LYL:LKNYQ:MIVRS, VSQDL:SAIS-AA¹⁷-LYL:LKNYQ:MIVKS, VPQDL:SAIS-AA¹⁷-LYL:LKNYQ:MVVKS, VPTEE:SAIS-AA¹⁷-LYL:LKNYQ:FLQHN, VPTGQ:SAIS-AA¹⁷-LYL:LKNYQ:LEEHS, SRVHH:SAIS-AA¹⁷-LYL:LKNYQ:RLEEH, TQVQL:SAIS-AA¹⁷-LYL:LKNYQ:TLEDH, VPEEL:SSLS-AA¹⁷-LFF:LKVYP:DMTVE, VPEEL:SSLS-AA¹⁷-LFF:LKVYP:EMTVE, VPEKL:SSLS-AA¹⁷-LFF:LKVYP:NMTVE, VPEQL:SSLS-AA¹⁷-LFF:LKVYP:NMTVE, VPEKL:SSLS-AA¹⁷-LFF:LKVYP:EGMSTVE, VPEKL:SSLS-AA¹⁷-LFF:LKVYP:GMTVE, VPEKM:SSLS-AA¹⁷-LFF:LKVYP:GMTVE, VPERL:SSLS-AA¹⁷-LFF:LKVYP:DMTVE, VPEKT:SSLS-AA¹⁷-LFF:LKVYP:MITVE, VPEAL:SSLS-AA¹⁷-LFF:LKVYP:MITVE, VPEDL:SSLS-AA¹⁷-LFF:LKVYP:MITVE, VPEDL:SSLS-AA¹⁷-LFF:LKVYP:MVTVE, VPTEL:SSLS-AA¹⁷-LFF:LKVYP:DMVVE, VPTEL:SSLS-AA¹⁷-LFF:LKVYP:EMVVE, APTKL:SSLS-AA¹⁷-LFF:LKVYP:NMVVR, APTQL:SSLS-AA¹⁷-LFF:LKVYP:NMVVR, APTKL:SSLS-AA¹⁷-LFF:LKVYP:NMVVK, VPTKL:SSLS-AA¹⁷-LFF:LKVYP:EGMSVAE, VPTKL:SSLS-AA¹⁷-LFF:LKVYP:GMAVS, TPTKM:SSLS-AA¹⁷-LFF:LKVYP:GMVVD, VPARL:SSLS-AA¹⁷-LFF:LKVYP:DMVVE, VPTRL:SSLS-AA¹⁷-LFF:LKVYP:DMVVE, APVKT:SSLS-AA¹⁷-LFF:LKVYP:MIVEE, VPQAL:SSLS-AA¹⁷-LFF:LKVYP:MIVRS, VSQDL:SSLS-AA¹⁷-LFF:LKVYP:MIVKS, VPQDL:SSLS-AA¹⁷-LFF:LKVYP:MVVKS, VPTEE:SSLS-AA¹⁷-LFF:LKVYP:FLQHN, VPTGQ:SSLS-AA¹⁷-LFF:LKVYPIEEHS, SRVHH:SSLS-AA¹⁷-LFF:LKVYP:RLEEH, TQVQL:SSLS-AA¹⁷-LFF:LKVYP:TLEDH, APTEL:NAIS-AA¹⁷-LYFIKKYR:DMVVR, APTKM:NAIS-AA¹⁷-LYFIKKYR:NMVVR, APTEL:NAIS-AA¹⁷-LYFIKKYR:EMVVR, APTKL:NAIS-AA¹⁷-LYFIKKYR:NMVVR, APTKL:NAIS-AA¹⁷-LYFIKKYR:EGMSVVR, APTKL:NAIS-AA¹⁷-LYF:LKKYR:GMVVR, APTKM:NAIS-AA¹⁷-LYF:LKKYR:GMVVR, APTRL:NAIS-AA¹⁷-LYFIKKYR:DMVVR, APTKT:NAIS-AA¹⁷-LYFIKKYR:MIVVR, APTAL:NAIS-AA¹⁷-LYFIKKYR:MIVVR, APTDL:NAIS-AA¹⁷-LYFIKKYR:MIVVR, APTDL:NAIS-AA¹⁷-LYFIKKYR:MVVVR, VPTEL:NAIS-AA¹⁷-LYFIKKYR:DMVVE, VPEKM:NAIS-AA¹⁷-LYFIKKYR:NMTVE, VPTEL:NAIS-AA¹⁷-LYFIKKYR:EMVVE, APTKL:NAIS-AA¹⁷-LYFIKKYR:NMVVK, VPTKL:NAIS-AA¹⁷-LYFIKKYR:EGMSVAE, VPTKL:NAIS-AA¹⁷-LYF:LKKYR:GMAVS, TPTKM:NAIS-AA¹⁷-LYFIKKYR:GMVVD, VPARL:NAIS-AA¹⁷-LYFIKKYR:DMVVE, VPTRL:NAIS-AA¹⁷-LYFIKKYR:DMVVE, APVKT:NAIS-AA¹⁷-LYFIKKYR:MIVEE, VPQAL:NAIS-AA¹⁷-LYF:LKKYR:MIVRS, VSQDL:NAIS-AA¹⁷-LYFIKKYR:MIVKS, VPQDL:NAIS-AA¹⁷-LYFIKKYR:MVVKS, VPTEE:NAIS-AA¹⁷-LYFIKKYR:FLQHN, VPTGQ:NAIS-AA¹⁷-LYFIKKYR:LEEHS, SRVHH:NAIS-AA¹⁷-LYFIKKYR:RLEEH, TQVQL:NAIS-AA¹⁷-LYFIKKYR:TLEDH, APTEL:SATS-AA¹⁷-LYY:LRKHR:DMVVK, APTKM:SATS-AA¹⁷-LYY:LRKHR:NMVVK, APTEL:SATS-AA¹⁷-LYY:LRKHR:EMVVK, APTKL:SATS-AA¹⁷-LYY:LRKHR:NMVVK, APTQL:SATS-AA¹⁷-LYY:LRKHR:NMVVK, APTKL:SATS-AA¹⁷-LYY:LRKHR:EGMSVVK, APTKL:SATS-AA¹⁷-LYY:LRKHR:GMVVK, APTKM:SATS-AA¹⁷-LYY:LRKHR:GMVVK, APTRL:SATS-AA¹⁷-LYY:LRKHR:DMVVK, APTKT:SATS-AA¹⁷-LYY:LRKHR:MIVVK, APTAL:SATS-AA¹⁷-LYY:LRKHR:MIVVK, APTDL:SATS-AA¹⁷-LYY:LRKHR:MIVVK, APTDL:SATS-AA¹⁷-LYY:LRKHR:MVVVK, VPTEL:SATS-AA¹⁷-LYY:LRKHR:DMVVE, VPEKM:SATS-AA¹⁷-LYY:LRKHR:NMTVE, VPTEL:SATS-AA¹⁷-LYY:LRKHR:EMVVE, APTKL:SATS-AA¹⁷-LYY:LRKHR:NMVVR, APTQL:SATS-AA¹⁷-LYY:LRKHR:NMVVR, VPTKL:SATS-AA¹⁷-LYY:LRKHR:EGMSVAE, VPTKL:SATS-AA¹⁷-LYY:LRKHR:GMAVS, TPTKM:SATS-AA¹⁷-LYY:LRKHR:GMVVD, VPARL:SATS-AA¹⁷-LYY:LRKHR:DMVVE, VPTRL:SATS-AA¹⁷-LYY:LRKHR:DMVVE, APVKT:SATS-AA¹⁷-LYY:LRKHR:MIVEE, VPQAL:SATS-AA¹⁷-LYY:LRKHR:MIVRS, VSQDL:SATS-AA¹⁷-LYY:LRKHR:MIVKS, VPQDL:SATS-AA¹⁷-LYY:LRKHR:MVVKS, VPTEE:SATS-AA¹⁷-LYY:LRKHR:FLQHN, VPTGQ:SATS-AA¹⁷-LYY:LRKHR:LEEHS, SRVHH:SATS-AA¹⁷-LYY:LRKHR:RLEEH, TQVQL:SATS-AA¹⁷-LYY:LRKHR:TLEDH, VPTEL:SPIS-AA¹⁷-LYK:LKYHY:DMVAE, VPTKM:SPIS-AA¹⁷-LYK:LKYHY:NMVAE, VPTEL:SPIS-AA¹⁷-LYKIKYHY:EMVAE, VPTKL:SPIS-AA¹⁷-LYK:LKYHY:NMVAE, VPTQL:SPIS-AA¹⁷-LYK:LKYHY:NMVAE, VPTKL:SPIS-AA¹⁷-LYK:LKYHY:GMVAE, VPTKM:SPIS-AA¹⁷-LYK:LKYHY:GMVAE, VPTRL:SPIS-AA¹⁷-LYK:LKYHY:DMVAE, VPTKT:SPIS-AA¹⁷-LYK:LKYHY:MIVAE, VPTAL:SPIS-AA¹⁷-LYK:LKYHY:MIVAE, VPTDL:SPIS-AA¹⁷-LYK:LKYHY:MIVAE, VPTDL:SPIS-AA¹⁷-LYK:LKYHY:MVVAE, VPTEL:SPIS-AA¹⁷-LYKIKYHY:DMVVE, VPEKM:SPIS-AA¹⁷-LYK:LKYHY:NMTVE, VPTEL:SPIS-AA¹⁷-LYK:LKYHY:EMVVE, APTKL:SPIS-AA¹⁷-LYK:LKYHY:NMVVR, APTQL:SPIS-AA¹⁷-LYKIKYHY:NMVVR, APTKL:SPIS-AA¹⁷-LYK:LKYHY:NMVVK, VPTKL:SPIS-AA¹⁷-LYK:LKYHY:GMAVS, TPTKM:SPIS-AA¹⁷-LYK:LKYHY:GMVVD, VPARL:SPIS-AA¹⁷-LYK:LKYHY:DMVVE, VPTRL:SPIS-AA¹⁷-LYK:LKYHY:DMVVE, APVKT:SPIS-AA¹⁷-LYK:LKYHY:MIVEE, VPQAL:SPIS-AA¹⁷-LYK:LKYHY:MIVRS, VSQDL:SPIS-AA¹⁷-LYK:LKYHY:MIVKS, VPQDL:SPIS-AA¹⁷-LYK:LKYHY:MVVKS, VPTEE:SPIS-AA¹⁷-LYK:LKYHY:FLQHN, VPTGQ:SPIS-AA¹⁷-LYK:LKYHY:LEEHS, SRVHH:SPIS-AA¹⁷-LYK:LKYHY:RLEEH, TQVQL:SPIS-AA¹⁷-LYK:LKYHY:TLEDH, VPTEL:EPIS-AA¹⁷-LYL:KFKYE:DMAVS, VPTKM:EPIS-AA¹⁷-LYL:KFKYE:NMAVS, VPTEL:EPIS-AA¹⁷-LYL:KFKYE:EMAVS, VPTKL:EPIS-AA¹⁷-LYL:KFKYE:NMAVS, VPTQL:EPIS-AA¹⁷-LYL:KFKYE:NMAVS, VPTKL:EPIS-AA¹⁷-LYL:KFKYE:EGMSAVS, VPTKM:EPIS-AA¹⁷-LYL:KFKYE:GMAVS, VPTRL:EPIS-AA¹⁷-LYL:KFKYE:DMAVS, VPTKT:EPIS-AA¹⁷-LYL:KFKYE:MIAVS, VPTAL:EPIS-AA¹⁷-LYL:KFKYE:MIAVS, VPTDL:EPIS-AA¹⁷-LYL:KFKYE:MIAVS, VPTDLEPIS-AA¹⁷-LYL:KFKYE:MVAVS, VPTEL:EPIS-AA¹⁷-LYL:KFKYE:DMVVE, VPEKM:EPIS-AA¹⁷-LYL:KFKYE:NMTVE, VPTEL:EPIS-AA¹⁷-LYL:KFKYE:EMVVE, APTKL:EPIS-AA¹⁷-LYL:KFKYE:NMVVR, APTQL:EPIS-AA¹⁷-LYL:KFKYE:NMVVR, APTKL:EPIS-AA¹⁷-LYL:KFKYE:NMVVK, VPTKL:EPIS-AA¹⁷-LYL:KFKYE:EGMSVAE, TPTKM:EPIS-AA¹⁷-LYL:KFKYE:GMVVD, VPARL:EPIS-AA¹⁷-LYL:KFKYE:DMVVE, VPTRL:EPIS-AA¹⁷-LYL:KFKYE:DMVVE, APVKT:EPIS-AA¹⁷-LYL:KFKYE:MIVEE, VPQAL:EPIS-AA¹⁷-LYL:KFKYE:MIVRS, VSQDL:EPIS-AA¹⁷-LYL:KFKYE:MIVKS, VPQDL:EPIS-AA¹⁷-LYL:KFKYE:MVVKS, VPTEE:EPIS-AA¹⁷-LYL:KFKYE:FLQHN, VPTGQ:EPIS-AA¹⁷-LYL:KFKYE:LEEHS, SRVHH:EPIS-AA¹⁷-LYL:KFKYE:RLEEH, TQVQL:EPIS-AA¹⁷-LYL:KFKYE:TLEDH, TPTEL:SPIN-AA¹⁷-LYF:YGKIP:DMVVD, TPTKM:SPIN-AA¹⁷-LYF:YGKIP:NMVVD, TPTEL:SPIN-AA¹⁷-LYF:YGKIP:EMVVD, TPTKL:SPIN-AA¹⁷-LYF:YGKIP:NMVVD, TPTQL:SPIN-AA¹⁷-LYF:YGKIP:NMVVD, TPTKL:SPIN-AA¹⁷-LYF:YGKIP:EGMSVVD, TPTKL:SPIN-AA¹⁷-LYF:YGKIP:GMVVD, TPTRL:SPIN-AA¹⁷-LYF:YGKIP:DMVVD, TPTKT:SPIN-AA¹⁷-LYF:YGKIP:MIVVD, TPTAL:SPIN-AA¹⁷-LYF:YGKIP:MIVVD, TPTDL:SPIN-AA¹⁷-LYF:YGKIP:MIVVD, TPTDL:SPIN-AA¹⁷-LYF:YGKIP:MVVVD, VPTEL:SPIN-AA¹⁷-LYF:YGKIP:DMVVE, VPEKM:SPIN-AA¹⁷-LYF:YGKIP:NMTVE, VPTEL:SPIN-AA¹⁷-LYF:YGKIP:EMVVE, APTKL:SPIN-AA¹⁷-LYF:YGKIP:NMVVR, APTQL:SPIN-AA¹⁷-LYF:YGKIP:NMVVR, APTKL:SPIN-AA¹⁷-LYF:YGKIP:NMVVK, VPTKL:SPIN-AA¹⁷-LYF:YGKIP:EGMSVAE, VPTKL:SPIN-AA¹⁷-LYF:YGKIP:GMAVS, VPARL:SPIN-AA¹⁷-LYF:YGKIP:DMVVE, VPTRL:SPIN-AA¹⁷-LYF:YGKIP:DMVVE, APVKT:SPIN-AA¹⁷-LYF:YGKIP:MIVEE, VPQAL:SPIN-AA¹⁷-LYF:YGKIP:MIVRS, VSQDL:SPIN-AA¹⁷-LYF:YGKIP:MIVKS, VPQDL:SPIN-AA¹⁷-LYF:YGKIP:MVVKS, VPTEE:SPIN-AA¹⁷-LYF:YGKIP:FLQHN, VPTGQ:SPIN-AA¹⁷-LYF:YGKIP:LEEHS, SRVHH:SPIN-AA¹⁷-LYF:YGKIP:RLEEH, TQVQL:SPIN-AA¹⁷-LYF:YGKIP:TLEDH, VPAEL:SPIS-AA¹⁷-LYI:YKQYE:DMVVE, VPAKM:SPIS-AA¹⁷-LYI:YKQYE:NMVVE, VPAEL:SPIS-AA¹⁷-LYI:YKQYE:EMVVE, VPAKL:SPIS-AA¹⁷-LYI:YKQYE:NMVVE, VPAQL:SPIS-AA¹⁷-LYI:YKQYE:NMVVE, VPAKL:SPIS-AA¹⁷-LYI:YKQYE:EGMSVVE, VPAKL:SPIS-AA¹⁷-LYI:YKQYE:GMVVE, VPAKM:SPIS-AA¹⁷-LYI:YKQYE:GMVVE, VPARL:SPIS-AA¹⁷-LYI:YKQYE:DMVVE, VPAKT:SPIS-AA¹⁷-LYI:YKQYE:MIVVE, VPAAL:SPIS-AA¹⁷-LYI:YKQYE:MIVVE, VPADL:SPIS-AA¹⁷-LYI:YKQYE:MIVVE, VPADL:SPIS-AA¹⁷-LYI:YKQYE:MVVVE, VPTEL:SPIS-AA¹⁷-LYI:YKQYE:DMVVE, VPEKM:SPIS-AA¹⁷-LYI:YKQYE:NMTVE, VPTEL:SPIS-AA¹⁷-LYI:YKQYE:EMVVE, APTKL:SPIS-AA¹⁷-LYI:YKQYE:NMVVR, APTQL:SPIS-AA¹⁷-LYI:YKQYE:NMVVR, APTKL:SPIS-AA¹⁷-LYI:YKQYE:NMVVK, VPTKL:SPIS-AA¹⁷-LYI:YKQYE:EGMSVAE, VPTKL:SPIS-AA¹⁷-LYI:YKQYE:GMAVS, TPTKM:SPIS-AA¹⁷-LYI:YKQYE:GMVVD, VPTRL:SPIS-AA¹⁷-LYI:YKQYE:DMVVE, APVKT:SPIS-AA¹⁷-LYI:YKQYE:MIVEE, VPQAL:SPIS-AA¹⁷-LYI:YKQYE:MIVRS, VSQDL:SPIS-AA¹⁷-LYI:YKQYE:MIVKS, VPQDL:SPIS-AA¹⁷-LYI:YKQYE:MVVKS, VPTEE:SPIS-AA¹⁷-LYI:YKQYE:FLQHN, VPTGQ:SPIS-AA¹⁷-LYI:YKQYE:LEEHS, SRVHH:SPIS-AA¹⁷-LYI:YKQYE:RLEEH, TQVQL:SPIS-AA¹⁷-LYI:YKQYE:TLEDH, VPTEL:SPIS-AA¹⁷-LRYKQYE:DMVVE, VPTKM:SPIS-AA¹⁷-LRYKQYE:NMVVE, VPTEL:SPIS-AA¹⁷-LFINKQYE:EMVVE, VPTKL:SPIS-AA¹⁷-LFINKQYE:NMVVE, VPTQL:SPIS-AA¹⁷-LRYKQYE:NMVVE, VPTKL:SPIS-AA¹⁷-LFI:YKQYE:EGMSVVE, VPTKL:SPIS-AA¹⁷-LFINKQYE:GMVVE, VPTKM:SPIS-AA¹⁷-LFINKQYE:GMVVE, VPTRL:SPIS-AA¹⁷-LFINKQYE:DMVVE, VPTKT:SPIS-AA¹⁷-LFINKQYE:MIVVE, VPTAL:SPIS-AA¹⁷-LRYKQYE:MIVVE, VPTDL:SPIS-AA¹⁷-LRYKQYE:MIVVE, VPTDL:SPIS-AA¹⁷-LRYKQYE:MVVVE, VPEKM:SPIS-AA¹⁷-LFINKQYE:NMTVE, APTKL:SPIS-AA¹⁷-LRYKQYE:NMVVR, APTQL:SPIS-AA¹⁷-LRYKQYE:NMVVR, APTKL:SPIS-AA¹⁷-LFLYKQYE:NMVVK, VPTKL:SPIS-AA¹⁷-LFINKQYE:EGMSVAE, VPTKL:SPIS-AA¹⁷-LFINKQYE:GMAVS, TPTKM:SPIS-AA¹⁷-LRYKQYE:GMVVD, VPARL:SPIS-AA¹⁷-LRYKQYE:DMVVE, APVKT:SPIS-AA¹⁷-LRYKQYE:MIVEE, VPQAL:SPIS-AA¹⁷-LRYKQYE:MIVRS, VSQDL:SPIS-AA¹⁷-LFLYKQYE:MIVKS, VPQDL:SPIS-AA¹⁷-LFLYKQYE:MVVKS, VPTEE:SPIS-AA¹⁷-LRYKQYE:FLQHN, VPTGQ:SPIS-AA¹⁷-LRYKQYE:LEEHS, SRVHH:SPIS-AA¹⁷-LRYKQYE:RLEEH, TQVQL:SPIS-AA¹⁷-LRYKQYE:TLEDH, APVEL:KPLS-AA¹⁷-LYV:DHHKD:DMVEE, APVKM:KPLS-AA¹⁷-LYV:DHHKD:NMVEE, APVEL:KPLS-AA¹⁷-LYV:DHHKD:EMVEE, APVKL:KPLS-AA¹⁷-LYV:DHHKD:NMVEE, APVQL:KPLS-AA¹⁷-LYV:DHHKD:NMVEE, APVKL:KPLS-AA¹⁷-LYV:DHHKD:EGMSVEE, APVKL:KPLS-AA¹⁷-LYV:DHHKD:GMVEE, APVKM:KPLS-AA¹⁷-LYV:DHHKD:GMVEE, APVRL:KPLS-AA¹⁷-LYV:DHHKD:DMVEE, APVAL:KPLS-AA¹⁷-LYV:DHHKD:MIVEE, APVDL:KPLS-AA¹⁷-LYV:DHHKD:MIVEE, APVDL:KPLS-AA¹⁷-LYV:DHHKD:MVVEE, VPTEL:KPLS-AA¹⁷-LYV:DHHKD:DMVVE, VPEKM:KPLS-AA¹⁷-LYV:DHHKD:NMTVE, VPTEL:KPLS-AA¹⁷-LYV:DHHKD:EMVVE, APTKL:KPLS-AA¹⁷-LYV:DHHKD:NMVVR, APTQL:KPLS-AA¹⁷-LYV:DHHKD:NMVVR, APTKL:KPLS-AA¹⁷-LYV:DHHKD:NMVVK, VPTKL:KPLS-AA¹⁷-LYV:DHHKD:EGMSVAE, VPTKL:KPLS-AA¹⁷-LYV:DHHKD:GMAVS, TPTKM:KPLS-AA¹⁷-LYV:DHHKD:GMVVD, VPARL:KPLS-AA¹⁷-LYV:DHHKD:DMVVE, VPTRL:KPLS-AA¹⁷-LYV:DHHKD:DMVVE, VPQAL:KPLS-AA¹⁷-LYV:DHHKD:MIVRS, VSQDL:KPLS-AA¹⁷-LYV:DHHKD:MIVKS, VPQDL:KPLS-AA¹⁷-LYV:DHHKD:MVVKS, VPTEE:KPLS-AA¹⁷-LYV:DHHKD:FLQHN, VPTGQ:KPLS-AA¹⁷-LYV:DHHKD:LEEHS, SRVHH:KPLS-AA¹⁷-LYV:DHHKD:RLEEH, TQVQL:KPLS-AA¹⁷-LYV:DHHKD:TLEDH, VPQEL:EPLP-AA¹⁷-VYY:EQLSN:DMVRS, VPQKM:EPLP-AA¹⁷-VYY:EQLSN:NMVRS, VPQEL:EPLP-AA¹⁷-VYY:EQLSN:EMVRS, VPQKL:EPLP-AA¹⁷-VYY:EQLSN:NMVRS, VPQQL:EPLP-AA¹⁷-VYY:EQLSN:NMVRS, VPQKL:EPLP-AA¹⁷-VYY:EQLSN:EGMSVRS, VPQKL:EPLP-AA¹⁷-VYY:EQLSN:GMVRS, VPQKM:EPLP-AA¹⁷-VYY:EQLSN:GMVRS, VPQRL:EPLP-AA¹⁷-VYY:EQLSN:DMVRS, VPQKT:EPLP-AA¹⁷-VYY:EQLSN:MIVRS, VPQDLEPLP-AA¹⁷-VYY:EQLSN:MIVRS, VPQDLEPLP-AA¹⁷-VYY:EQLSN:MVVRS, VPTEL:EPLP-AA¹⁷-VYY:EQLSN:DMVVE, VPEKM:EPLP-AA¹⁷-VYY:EQLSN:NMTVE, VPTEL:EPLP-AA¹⁷-VYY:EQLSN:EMVVE, APTKL:EPLP-AA¹⁷-VYY:EQLSN:NMVVR, APTQL:EPLP-AA¹⁷-VYY:EQLSN:NMVVR, APTKL:EPLP-AA¹⁷-VYY:EQLSN:NMVVK, VPTKL:EPLP-AA¹⁷-VYY:EQLSN:EGMSVAE, VPTKL:EPLP-AA¹⁷-VYY:EQLSN:GMAVS, TPTKM:EPLP-AA¹⁷-VYY:EQLSN:GMVVD, VPARL:EPLP-AA¹⁷-VYY:EQLSN:DMVVE, VPTRL:EPLP-AA¹⁷-VYY:EQLSN:DMVVE, APVKT:EPLP-AA¹⁷-VYY:EQLSN:MIVEE, VSQDLEPLP-AA¹⁷-VYY:EQLSN:MIVKS, VPQDL:EPLP-AA¹⁷-VYY:EQLSN:MVVKS, VPTEE:EPLP-AA¹⁷-VYY:EQLSN:FLQHN, VPTGQ:EPLP-AA¹⁷-VYY:EQLSN:LEEHS, SRVHH:EPLP-AA¹⁷-VYY:EQLSN:RLEEH, TQVQL:EPLP-AA¹⁷-VYY:EQLSN:TLEDH, VSQEL:EPLT-AA¹⁷-LYY:EQLSN:DMVKS, VSQKM:EPLT-AA¹⁷-LYY:EQLSN:NMVKS, VSQEL:EPLT-AA¹⁷-LYY:EQLSN:EMVKS, VSQKL:EPLT-AA¹⁷-LYY:EQLSN:NMVKS, VSQQL:EPLT-AA¹⁷-LYY:EQLSN:NMVKS, VSQKL:EPLT-AA¹⁷-LYY:EQLSN:EGMSVKS, VSQKL:EPLT-AA¹⁷-LYY:EQLSN:GMVKS, VSQKM:EPLT-AA¹⁷-LYY:EQLSN:GMVKS, VSQRL:EPLT-AA¹⁷-LYY:EQLSN:DMVKS, VSQKT:EPLT-AA¹⁷-LYY:EQLSN:MIVKS, VSQAL:EPLT-AA¹⁷-LYY:EQLSN:MIVKS, VSQDL:EPLT-AA¹⁷-LYY:EQLSN:MVVKS, VPTEL:EPLT-AA¹⁷-LYY:EQLSN:DMVVE, VPEKM:EPLT-AA¹⁷-LYY:EQLSN:NMTVE, VPTEL:EPLT-AA¹⁷-LYY:EQLSN:EMVVE, APTKL:EPLT-AA¹⁷-LYY:EQLSN:NMVVR, APTQL:EPLT-AA¹⁷-LYY:EQLSN:NMVVR, APTKL:EPLT-AA¹⁷-LYY:EQLSN:NMVVK, VPTKL:EPLT-AA¹⁷-LYY:EQLSN:EGMSVAE, VPTKL:EPLT-AA¹⁷-LYY:EQLSN:GMAVS, TPTKM:EPLT-AA¹⁷-LYY:EQLSN:GMVVD, VPARL:EPLT-AA¹⁷-LYY:EQLSN:DMVVE, VPTRL:EPLT-AA¹⁷-LYY:EQLSN:DMVVE, APVKT:EPLT-AA¹⁷-LYY:EQLSN:MIVEE, VPQAL:EPLT-AA¹⁷-LYY:EQLSN:MIVRS, VPTEE:EPLT-AA¹⁷-LYY:EQLSN:FLQHN, VPTGQ:EPLT-AA¹⁷-LYY:EQLSN:LEEHS, SRVHH:EPLT-AA¹⁷-LYY:EQLSN:RLEEH, TQVQL:EPLT-AA¹⁷-LYY:EQLSN:TLEDH, VPQEL:EPLT-AA¹⁷-LYY:EQLSN:DMVKS, VPQKM:EPLT-AA¹⁷-LYY:EQLSN:NMVKS, VPQEL:EPLT-AA¹⁷-LYY:EQLSN:EMVKS, VPQKL:EPLT-AA¹⁷-LYY:EQLSN:NMVKS, VPQQL:EPLT-AA¹⁷-LYY:EQLSN:NMVKS, VPQKL:EPLT-AA¹⁷-LYY:EQLSN:EGMSVKS, VPQKL:EPLT-AA¹⁷-LYY:EQLSN:GMVKS, VPQKM:EPLT-AA¹⁷-LYY:EQLSN:GMVKS, VPQRL:EPLT-AA¹⁷-LYY:EQLSN:DMVKS, VPQKT:EPLT-AA¹⁷-LYY:EQLSN:MIVKS, VPQAL:EPLT-AA¹⁷-LYY:EQLSN:MIVKS, VPQDL:EPLT-AA¹⁷-LYY:EQLSN:MIVKS, VPTGQ:SNIT-AA¹⁷-QIM:IGEMS:LEQHN, VPTEL:SNIT-AA¹⁷-QIM:IGEMS:DMVVE, VPEKM:SNIT-AA¹⁷-QIM:IGEMS:NMTVE, VPTEL:SNIT-AA¹⁷-QIM:IGEMS:EMVVE, APTKL:SNIT-AA¹⁷-QIM:IGEMS:NMVVR, APTQL:SNIT-AA¹⁷-QIM:IGEMS:NMVVR, APTKL:SNIT-AA¹⁷-QIM:IGEMS:NMVVK, VPTKL:SNIT-AA¹⁷-QIM:IGEMS:EGMSVAE, VPTKL:SNIT-AA¹⁷-QIM:IGEMS:GMAVS, TPTKM:SNIT-AA¹⁷-QIM:IGEMS:GMVVD, VPARL:SNIT-AA¹⁷-QIM:IGEMS:DMVVE, VPTRL:SNIT-AA¹⁷-QIM:IGEMS:DMVVE, APVKT:SNIT-AA¹⁷-QIM:IGEMS:MIVEE, VPQAL:SNIT-AA¹⁷-QIM:IGEMS:MIVRS, VSQDL:SNIT-AA¹⁷-QIM:IGEMS:MIVKS, VPQDL:SNIT-AA¹⁷-QIM:IGEMS:MVVKS, VPTGQ:SNIT-AA¹⁷-QIM:IGEMS:LEEHS, SRVHH:SNIT-AA¹⁷-QIM:IGEMS:RLEEH, TQVQL:SNIT-AA¹⁷-QIM:IGEMS:TLEDH, VPTEE:SNIT-AA¹⁷-QIM:LGEMS:FLEHS, VPTEL:SNIT-AA¹⁷-QIM:LGEMS:DMVVE, VPEKM:SNIT-AA¹⁷-QIM:LGEMS:NMTVE, VPTEL:SNIT-AA¹⁷-QIM:LGEMS:EMVVE, APTKL:SNIT-AA¹⁷-QIM:LGEMS:NMVVR, APTQL:SNIT-AA¹⁷-QIM:LGEMS:NMVVR, APTKL:SNIT-AA¹⁷-QIM:LGEMS:NMVVK, VPTKL:SNIT-AA¹⁷-QIM:LGEMS:EGMSVAE, VPTKL:SNIT-AA¹⁷-QIM:LGEMS:GMAVS, TPTKM:SNIT-AA¹⁷-QIM:LGEMS:GMVVD, VPARL:SNIT-AA¹⁷-QIM:LGEMS:DMVVE, VPTRL:SNIT-AA¹⁷-QIM:LGEMS:DMVVE, APVKT:SNIT-AA¹⁷-QIM:LGEMS:MIVEE, VPQAL:SNIT-AA¹⁷-QIM:LGEMS:MIVRS, VSQDL:SNIT-AA¹⁷-QIM:LGEMS:MIVKS, VPQDL:SNIT-AA¹⁷-QIM:LGEMS:MVVKS, VPTEE:SNIT-AA¹⁷-QIM:LGEMS:FLQHN, SRVHH:SNIT-AA¹⁷-QIM:LGEMS:RLEEH, TQVQL:SNIT-AA¹⁷-QIM:LGEMS:TLEDH, SRVQL:RSVK-AA¹⁷-AKV:KEVQV:TLEEH, VPTEL:RSVK-AA¹⁷-AKV:KEVQV:DMVVE, VPEKM:RSVK-AA¹⁷-AKV:KEVQV:NMTVE, VPTEL:RSVK-AA¹⁷-AKV:KEVQV:EMVVE, APTKL:RSVK-AA¹⁷-AKV:KEVQV:NMVVR, APTQL:RSVK-AA¹⁷-AKV:KEVQV:NMVVR, APTKL:RSVK-AA¹⁷-AKV:KEVQV:NMVVK, VPTKL:RSVK-AA¹⁷-AKV:KEVQV:EGMSVAE, VPTKL:RSVK-AA¹⁷-AKV:KEVQV:GMAVS, TPTKM:RSVK-AA¹⁷-AKV:KEVQV:GMVVD, VPARL:RSVK-AA¹⁷-AKV:KEVQV:DMVVE, VPTRL:RSVK-AA¹⁷-AKV:KEVQV:DMVVE, APVKT:RSVK-AA¹⁷-AKV:KEVQV:MIVEE, VPQAL:RSVK-AA¹⁷-AKV:KEVQV:MIVRS, VSQDL:RSVK-AA¹⁷-AKV:KEVQV:MIVKS, VPQDL:RSVK-AA¹⁷-AKV:KEVQV:MVVKS, VPTEE:RSVK-AA¹⁷-AKV:KEVQV:FLQHN, VPTGQ:RSVK-AA¹⁷-AKV:KEVQVIEEHS, TQVQL:RSVK-AA¹⁷-AKV:KEVQV:TLEDH, TQVHH:RPVQ-AA¹⁷-RKI:KKATV:RLEDH, VPTEL:RPVQ-AA¹⁷-RKI:KKATV:DMVVE, VPEKM:RPVQ-AA¹⁷-RKI:KKATV:NMTVE, VPTEL:RPVQ-AA¹⁷-RKI:KKATV:EMVVE, APTKL:RPVQ-AA¹⁷-RKI:KKATV:NMVVR, APTQL:RPVQ-AA¹⁷-RKI:KKATV:NMVVR, APTKL:RPVQ-AA¹⁷-RKI:KKATV:NMVVK, VPTKL:RPVQ-AA¹⁷-RKI:KKATV:EGMSVAE, VPTKL:RPVQ-AA¹⁷-RKI:KKATV:GMAVS, TPTKM:RPVQ-AA¹⁷-RKI:KKATV:GMVVD, VPARL:RPVQ-AA¹⁷-RKI:KKATV:DMVVE, VPTRL:RPVQ-AA¹⁷-RKI:KKATV:DMVVE, APVKT:RPVQ-AA¹⁷-RKI:KKATV:MIVEE, VPQAL:RPVQ-AA¹⁷-RKI:KKATV:MIVRS, VSQDL:RPVQ-AA¹⁷-RKI:KKATV:MIVKS, VPQDL:RPVQ-AA¹⁷-RKI:KKATV:MVVKS, VPTEE:RPVQ-AA¹⁷-RKI:KKATV:FLQHN, VPTGQ:RPVQ-AA¹⁷-RKI:KKATVIEEHS and SRVHH:RPVQ-AA¹⁷-RKI:KKATV:RLEEH; and wherein AA¹⁷ is selected from the group consisting of G, A, V, L, I, P, F, M, W, T and S (in particular is selected from the group consisting of M, I, L, V and T).

[0431] In particular, in certain embodiments, the quadruplet PEP9:PEP1:PEP2:PEP10 is selected from the group consisting of GIPEPXXVPTKM:SAIS:LKNYQ:NMVVESXAXR, SIPKAXXVPTEL:SAIS:LKNYQ:EMVVEGXGXR, HVTKPTXVPTKL:SAIS:LKNYQ:NMVVESXGXH, YVPKPXXVPTKL:SAIS:LKNYQ:NMVVESXGXH, TVPKPXXVPTQL:SAIS:LKNYQ:NMVVEAXGXH, AVPKAXXVPTKL:SAIS:LKNYQ:NMVVEAXGXH, KVGKAXXVPTKL:SAIS:LKNYQ:EGMSVVEXGXR, KASKAXXVPTKL:SAIS:LKNYQ:GMVVEEXGXR, GSAGPXXVPTKM:SAIS:LKNYQ:GMVVERXGXS, AAPASXXVPTRL:SAIS:LKNYQ:DMVVEAXGXR, STPPTXXVPTRL:SAIS:LKNYQ:DMVVESXGXR, HVPKPXXVPTKL:SAIS:LKNYQ:NMVVESXGXH, RVPSTXXVPTKT:SAIS:LKNYQ:MIVVEXGXL, ASAAPXXVPTAL:SAIS:LKNYQ:MIVVEXKXS, ASASPXXVPTDL:SAIS:LKNYQ:MIVVEXKXS, ASASPXXVPTDL:SAIS:LKNYQ:MVVVEXKXS, NDEGLEXVPTEE:SAIS:LKNYQ:FLVVEKXEXR, NDEGLEXVPTGQ:SAIS:LKNYQ:LEVVEQXEXR, SSVKXQPVPTHH:SAIS:LKNYQ:RLVVELEXAXA, RNVQXRPVPTQL:SAIS:LKNYQ:TLVVELAXKXE, GIPEPXXVPEKM:SAIS:LKNYQ:NMTVESXAXR, HVTKPTXAPTKL:SAIS:LKNYQ:NMVVRSXGXH, YVPKPXXAPTKL:SAIS:LKNYQ:NMVVRSXGXH, TVPKPXXAPTQL:SAIS:LKNYQ:NMVVRAXGXH, AVPKAXXAPTKL:SAIS:LKNYQ:NMVVKAXGXH, KVGKAXXVPTKL:SAIS:LKNYQ:EGMSVAEXGXR, KASKAXXVPTKL:SAIS:LKNYQ:GMAVSEXGXR, GSAGPXXTPTKM:SAIS:LKNYQ:GMVVDRXGXS, AAPASXXVPARL:SAIS:LKNYQ:DMVVEAXGXR, HVPKPXXAPTKL:SAIS:LKNYQ:NMVVRSXGXH, RVPSTXXAPVKT:SAIS:LKNYQ:MIVEEXGXL, ASAAPXXVPQAL:SAIS:LKNYQ:MIVRSXKXS, ASASPXXVSQDL:SAIS:LKNYQ:MIVKSXKXS, ASASPXXVPQDL:SAIS:LKNYQ:MVVKSXKXS, NDEGLEXVPTEE:SAIS:LKNYQ:FLQHNKXEXR, NDEGLEXVPTGQ:SAIS:LKNYQ:LEEHSQXEXR, SSVKXQPSRVHH:SAIS:LKNYQ:RLEEHLEXAXA, RNVQXRPTQVQL:SAIS:LKNYQ:TLEDHLAXKXE, KIPKAXXVPEEL:SSLS:LKVYP:DMTVEGXGXR, SIPKAXXVPEEL:SSLS:LKVYP:EMTVEGXGXR, HVTKPTXVPEKL:SSLS:LKVYP:NMTVESXGXH, YVPKPXXVPEKL:SSLS:LKVYP:NMTVESXGXH, TVPKPXXVPEQL:SSLS:LKVYP:NMTVEAXGXH, AVPKAXXVPEKL:SSLS:LKVYP:NMTVEAXGXH, KVGKAXXVPEKL:SSLS:LKVYP:EGMSTVEXGXR, KASKAXXVPEKL:SSLS:LKVYP:GMTVEEXGXR, GSAGPXXVPEKM:SSLS:LKVYP:GMTVERXGXS, AAPASXXVPERL:SSLS:LKVYP:DMTVEAXGXR, STPPTXXVPERL:SSLS:LKVYP:DMTVESXGXR, HVPKPXXVPEKL:SSLS:LKVYP:NMTVESXGXH, RVPSTXXVPEKT:SSLS:LKVYP:MITVEXGXL, ASAAPXXVPEAL:SSLS:LKVYP:MITVEXKXS, ASASPXXVPEDL:SSLS:LKVYP:MITVEXKXS, ASASPXXVPEDL:SSLS:LKVYP:MVTVEXKXS, NDEGLEXVPEEE:SSLS:LKVYP:FLTVEKXEXR, NDEGLEXVPEGQ:SSLS:LKVYP:LETVEQXEXR, SSVKXQPVPEHH:SSLS:LKVYP:RLTVELEXAXA, RNVQXRPVPEQL:SSLS:LKVYP:TLTVELAXKXE, KIPKAXXVPTEL:SSLS:LKVYP:DMVVEGXGXR, SIPKAXXVPTEL:SSLS:LKVYP:EMVVEGXGXR, HVTKPTXAPTKL:SSLS:LKVYP:NMVVRSXGXH, YVPKPXXAPTKL:SSLS:LKVYP:NMVVRSXGXH, TVPKPXXAPTQL:SSLS:LKVYP:NMVVRAXGXH, AVPKAXXAPTKL:SSLS:LKVYP:NMVVKAXGXH, KVGKAXXVPTKL:SSLS:LKVYP:EGMSVAEXGXR, KASKAXXVPTKL:SSLS:LKVYP:GMAVSEXGXR, GSAGPXXTPTKM:SSLS:LKVYP:GMVVDRXGXS, AAPASXXVPARL:SSLS:LKVYP:DMVVEAXGXR, STPPTXXVPTRL:SSLS:LKVYP:DMVVESXGXR, HVPKPXXAPTKL:SSLS:LKVYP:NMVVRSXGXH, RVPSTXXAPVKT:SSLS:LKVYP:MIVEEXGXL, ASAAPXXVPQAL:SSLS:LKVYP:MIVRSXKXS, ASASPXXVSQDL:SSLS:LKVYP:MIVKSXKXS, ASASPXXVPQDL:SSLS:LKVYP:MVVKSXKXS, NDEGLEXVPTEE:SSLS:LKVYP:FLQHNKXEXR, NDEGLEXVPTGQ:SSLS:LKVYP:LEEHSQXEXR, SSVKXQPSRVHH:SSLS:LKVYP:RLEEHLEXAXA, RNVQXRPTQVQL:SSLS:LKVYP:TLEDHLAXKXE, KIPKAXXVPTEL:SAIS:LKNYQ:DMVVEGXGXR, KIPKAXXAPTEL:NAIS:LKKYR:DMVVRGXGXR, GIPEPXXAPTKM:NAIS:LKKYR:NMVVRSXAXR, SIPKAXXAPTEL:NAIS:LKKYR:EMVVRGXGXR, YVPKPXXAPTKL:NAIS:LKKYR:NMVVRSXGXH, TVPKPXXAPTQL:NAIS:LKKYR:NMVVRAXGXH, AVPKAXXAPTKL:NAIS:LKKYR:NMVVRAXGXH, KVGKAXXAPTKL:NAIS:LKKYR:EGMSVVRXGXR, KASKAXXAPTKL:NAIS:LKKYR:GMVVREXGXR, GSAGPXXAPTKM:NAIS:LKKYR:GMVVRRXGXS, AAPASXXAPTRL:NAIS:LKKYR:DMVVRAXGXR, STPPTXXAPTRL:NAIS:LKKYR:DMVVRSXGXR, HVPKPXXAPTKL:NAIS:LKKYR:NMVVRSXGXH, RVPSTXXAPTKT:NAIS:LKKYR:MIVVRXGXL, ASAAPXXAPTAL:NAIS:LKKYR:MIVVRXKXS, ASASPXXAPTDL:NAIS:LKKYR:MIVVRXKXS, ASASPXXAPTDL:NAIS:LKKYR:MVVVRXKXS, NDEGLESAPTEE:NAIS:LKKYR:FLVVRKXEXR, NDEGLESAPTGQ:NAIS:LKKYR:LEVVRQXEXR, SSVKXQPAPTHH:NAIS:LKKYR:RLVVRLEXAXA, RNVQXRPAPTQL:NAIS:LKKYR:TLVVRLAXKXE, KIPKAXXVPTEL:NAIS:LKKYR:DMVVEGXGXR, GIPEPXXVPEKM:NAIS:LKKYR:NMTVESXAXR, SIPKAXXVPTEL:NAIS:LKKYR:EMVVEGXGXR, AVPKAXXAPTKL:NAIS:LKKYR:NMVVKAXGXH, KVGKAXXVPTKL:NAIS:LKKYR:EGMSVAEXGXR, KASKAXXVPTKL:NAIS:LKKYR:GMAVSEXGXR, GSAGPXXTPTKM:NAIS:LKKYR:GMVVDRXGXS, AAPASXXVPARL:NAIS:LKKYR:DMVVEAXGXR, STPPTXXVPTRL:NAIS:LKKYR:DMVVESXGXR, RVPSTXXAPVKT:NAIS:LKKYR:MIVEEXGXL, ASAAPXXVPQAL:NAIS:LKKYR:MIVRSXKXS, ASASPXXVSQDL:NAIS:LKKYR:MIVKSXKXS, ASASPXXVPQDL:NAIS:LKKYR:MVVKSXKXS, NDEGLEXVPTEE:NAIS:LKKYR:FLQHNKXEXR, NDEGLEXVPTGQ:NAIS:LKKYR:LEEHSQXEXR, SSVKXQPSRVHH:NAIS:LKKYR:RLEEHLEXAXA, RNVQXRPTQVQL:NAIS:LKKYR:TLEDHLAXKXE, HVTKPTXAPTKL:NAIS:LKKYR:NMVVRSXGXH, KIPKAXXAPTEL:SATS:LRKHR:DMVVKGXGXR, GIPEPXXAPTKM:SATS:LRKHR:NMVVKSXAXR, SIPKAXXAPTEL:SATS:LRKHR:EMVVKGXGXR, HVTKPTXAPTKL:SATS:LRKHR:NMVVKSXGXH, YVPKPXXAPTKL:SATS:LRKHR:NMVVKSXGXH, TVPKPXXAPTQL:SATS:LRKHR:NMVVKAXGXH, KVGKAXXAPTKL:SATS:LRKHR:EGMSVVKXGXR, KASKAXXAPTKL:SATS:LRKHR:GMVVKEXGXR, GSAGPXXAPTKM:SATS:LRKHR:GMVVKRXGXS, AAPASXXAPTRL:SATS:LRKHR:DMVVKAXGXR, STPPTXXAPTRL:SATS:LRKHR:DMVVKSXGXR, HVPKPXXAPTKL:SATS:LRKHR:NMVVKSXGXH, RVPSTXXAPTKT:SATS:LRKHR:MIVVKXGXL, ASAAPXXAPTAL:SATS:LRKHR:MIVVKXKXS, ASASPXXAPTDL:SATS:LRKHR:MIVVKXKXS, ASASPXXAPTDL:SATS:LRKHR:MVVVKXKXS, NDEGLESAPTEE:SATS:LRKHR:FLVVKKXEXR, NDEGLESAPTGQ:SATS:LRKHR:LEVVKQXEXR, SSVKXQPAPTHH:SATS:LRKHR:RLVVKLEXAXA, RNVQXRPAPTQL:SATS:LRKHR:TLVVKLAXKXE, KIPKAXXVPTEL:SATS:LRKHR:DMVVEGXGXR, GIPEPXXVPEKM:SATS:LRKHR:NMTVESXAXR, SIPKAXXVPTEL:SATS:LRKHR:EMVVEGXGXR, HVTKPTXAPTKL:SATS:LRKHR:NMVVRSXGXH, YVPKPXXAPTKL:SATS:LRKHR:NMVVRSXGXH, TVPKPXXAPTQL:SATS:LRKHR:NMVVRAXGXH, KVGKAXXVPTKL:SATS:LRKHR:EGMSVAEXGXR, KASKAXXVPTKL:SATS:LRKHR:GMAVSEXGXR, GSAGPXXTPTKM:SATS:LRKHR:GMVVDRXGXS, AAPASXXVPARL:SATS:LRKHR:DMVVEAXGXR, STPPTXXVPTRL:SATS:LRKHR:DMVVESXGXR, HVPKPXXAPTKL:SATS:LRKHR:NMVVRSXGXH, RVPSTXXAPVKT:SATS:LRKHR:MIVEEXGXL, ASAAPXXVPQAL:SATS:LRKHR:MIVRSXKXS, ASASPXXVSQDL:SATS:LRKHR:MIVKSXKXS, ASASPXXVPQDL:SATS:LRKHR:MVVKSXKXS, NDEGLEXVPTEE:SATS:LRKHR:FLQHNKXEXR, NDEGLEXVPTGQ:SATS:LRKHR:LEEHSQXEXR, SSVKXQPSRVHH:SATS:LRKHR:RLEEHLEXAXA, RNVQXRPTQVQL:SATS:LRKHR:TLEDHLAXKXE, KIPKAXXVPTEL:SPIS:LKYHY:DMVAEGXGXR, GIPEPXXVPTKM:SPIS:LKYHY:NMVAESXAXR, SIPKAXXVPTEL:SPIS:LKYHY:EMVAEGXGXR, HVTKPTXVPTKL:SPIS:LKYHY:NMVAESXGXH, YVPKPXXVPTKL:SPIS:LKYHY:NMVAESXGXH, TVPKPXXVPTQL:SPIS:LKYHY:NMVAEAXGXH, AVPKAXXVPTKL:SPIS:LKYHY:NMVAEAXGXH, KASKAXXVPTKL:SPIS:LKYHY:GMVAEEXGXR, GSAGPXXVPTKM:SPIS:LKYHY:GMVAERXGXS, AAPASXXVPTRL:SPIS:LKYHY:DMVAEAXGXR, STPPTXXVPTRL:SPIS:LKYHY:DMVAESXGXR, HVPKPXXVPTKL:SPIS:LKYHY:NMVAESXGXH, RVPSTXXVPTKT:SPIS:LKYHY:MIVAEXGXL, ASAAPXXVPTAL:SPIS:LKYHY:MIVAEXKXS, ASASPXXVPTDL:SPIS:LKYHY:MIVAEXKXS, ASASPXXVPTDL:SPIS:LKYHY:MVVAEXKXS, NDEGLEXVPTEE:SPIS:LKYHY:FLVAEKXEXR, NDEGLEXVPTGQ:SPIS:LKYHY:LEVAEQXEXR, SSVKXQPVPTHH:SPIS:LKYHY:RLVAELEXAXA, RNVQXRPVPTQL:SPIS:LKYHY:TLVAELAXKXE, KIPKAXXVPTEL:SPIS:LKYHY:DMVVEGXGXR, GIPEPXXVPEKM:SPIS:LKYHY:NMTVESXAXR, SIPKAXXVPTEL:SPIS:LKYHY:EMVVEGXGXR, HVTKPTXAPTKL:SPIS:LKYHY:NMVVRSXGXH, YVPKPXXAPTKL:SPIS:LKYHY:NMVVRSXGXH, TVPKPXXAPTQL:SPIS:LKYHY:NMVVRAXGXH, AVPKAXXAPTKL:SPIS:LKYHY:NMVVKAXGXH, KASKAXXVPTKL:SPIS:LKYHY:GMAVSEXGXR, GSAGPXXTPTKM:SPIS:LKYHY:GMVVDRXGXS, AAPASXXVPARL:SPIS:LKYHY:DMVVEAXGXR, STPPTXXVPTRL:SPIS:LKYHY:DMVVESXGXR, HVPKPXXAPTKL:SPIS:LKYHY:NMVVRSXGXH, RVPSTXXAPVKT:SPIS:LKYHY:MIVEEXGXL, ASAAPXXVPQAL:SPIS:LKYHY:MIVRSXKXS, ASASPXXVSQDL:SPIS:LKYHY:MIVKSXKXS, ASASPXXVPQDL:SPIS:LKYHY:MVVKSXKXS, NDEGLEXVPTEE:SPIS:LKYHY:FLQHNKXEXR, NDEGLEXVPTGQ:SPIS:LKYHY:LEEHSQXEXR, SSVKXQPSRVHH:SPIS:LKYHY:RLEEHLEXAXA, RNVQXRPTQVQL:SPIS:LKYHY:TLEDHLAXKXE, KIPKAXXVPTEL:EPIS:KFKYE:DMAVXGXGSR, GIPEPXXVPTKM:EPIS:KFKYE:NMAVSSXAXR, SIPKAXXVPTEL:EPIS:KFKYE:EMAVXGXGSR, HVTKPTXVPTKL:EPIS:KFKYE:NMAVSSXGXH, YVPKPXXVPTKL:EPIS:KFKYE:NMAVSSXGXH, TVPKPXXVPTQL:EPIS:KFKYE:NMAVSAXGXH, AVPKAXXVPTKL:EPIS:KFKYE:NMAVSAXGXH, KVGKAXXVPTKL:EPIS:KFKYE:EGMSAVSXGXR, GSAGPXXVPTKM:EPIS:KFKYE:GMAVSRXGXS, AAPASXXVPTRL:EPIS:KFKYE:DMAVSAXGXR, STPPTXXVPTRL:EPIS:KFKYE:DMAVSSXGXR, HVPKPXXVPTKL:EPIS:KFKYE:NMAVSSXGXH, RVPSTXXVPTKT:EPIS:KFKYE:MIAVSXGXL, ASAAPXXVPTAL:EPIS:KFKYE:MIAVSXKXS, ASASPXXVPTDL:EPIS:KFKYE:MIAVSXKXS, ASASPXXVPTDL:EPIS:KFKYE:MVAVSXKXS, NDEGLEXVPTEE:EPIS:KFKYE:FLAVXKXESR, NDEGLEXVPTGQ:EPIS:KFKYE:LEAVSQXEXR, SSVKXQPVPTHH:EPIS:KFKYE:RLAVSLEXAXA, RNVQXRPVPTQL:EPIS:KFKYE:TLAVSLAXKXE, KIPKAXXVPTEL:EPIS:KFKYE:DMVVEGXGXR, GIPEPXXVPEKM:EPIS:KFKYE:NMTVESXAXR, SIPKAXXVPTEL:EPIS:KFKYE:EMVVEGXGXR, HVTKPTXAPTKL:EPIS:KFKYE:NMVVRSXGXH, YVPKPXXAPTKL: EPIS:KFKYE:NMVVRSXGXH, TVPKPXXAPTQL: EPIS:KFKYE:NMVVRAXGXH, AVPKAXXAPTKL: EPIS:KFKYE:NMVVKAXGXH, KVGKAXXVPTKL:EPIS:KFKYE:EGMSVAEXGXR, GSAGPXXTPTKM:EPIS:KFKYE:GMVVDRXGXS, AAPASXXVPARL: EPIS:KFKYE:DMVVEAXGXR, STPPTXXVPTRL:EPIS:KFKYE:DMVVESXGXR, HVPKPXXAPTKL:EPIS:KFKYE:NMVVRSXGXH, RVPSTXXAPVKT:EPIS:KFKYE:MIVEEXGXL, ASAAPXXVPQAL: EPIS:KFKYE:MIVRSXKXS, ASASPXXVSQDL:EPIS:KFKYE:MIVKSXKXS, ASASPXXVPQDL:EPIS:KFKYE:MVVKSXKXS, NDEGLEXVPTEE:EPIS:KFKYE:FLQHNKXEXR, NDEGLEXVPTGQ:EPIS:KFKYE:LEEHSQXEXR, SSVKXQPSRVHH:EPIS:KFKYE:RLEEHLEXAXA, RNVQXRPTQVQL:EPIS:KFKYE:TLEDHLAXKXE, KIPKAXXTPTEL:SPIN:YGKIP:DMVVDGXGXR, GIPEPXXTPTKM:SPIN:YGKIP:NMVVDSXAXR, SIPKAXXTPTEL:SPIN:YGKIP:EMVVDGXGXR, HVTKPTXTPTKL:SPIN:YGKIP:NMVVDSXGXH, YVPKPXXTPTKL:SPIN:YGKIP:NMVVDSXGXH, TVPKPXXTPTQL:SPIN:YGKIP:NMVVDAXGXH, AVPKAXXTPTKL:SPIN:YGKIP:NMVVDAXGXH, KVGKAXXTPTKL:SPIN:YGKIP:EGMSVVDXGXR, KASKAXXTPTKL:SPIN:YGKIP:GMVVDEXGXR, AAPASXXTPTRL:SPIN:YGKIP:DMVVDAXGXR, STPPTXXTPTRL:SPIN:YGKIP:DMVVDSXGXR, HVPKPXXTPTKL:SPIN:YGKIP:NMVVDSXGXH, RVPSTXXTPTKT:SPIN:YGKIP:MIVVDXGXL, ASAAPXXTPTAL:SPIN:YGKIP:MIVVDXKXS, ASASPXXTPTDL:SPIN:YGKIP:MIVVDXKXS, ASASPXXTPTDL:SPIN:YGKIP:MVVVDXKXS, NDEGLESTPTEE:SPIN:YGKIP:FLVVDKXEXR, NDEGLESTPTGQ:SPIN:YGKIP:LEVVDQXEXR, SSVKXQPTPTHH:SPIN:YGKIP:RLVVDLEXAXA, RNVQXRPTPTQL:SPIN:YGKIP:TLVVDLAXKXE, KIPKAXXVPTEL:SPIN:YGKIP:DMVVEGXGXR, GIPEPXXVPEKM:SPIN:YGKIP:NMTVESXAXR, SIPKAXXVPTEL:SPIN:YGKIP:EMVVEGXGXR, HVTKPTXAPTKL:SPIN:YGKIP:NMVVRSXGXH, YVPKPXXAPTKL:SPIN:YGKIP:NMVVRSXGXH, TVPKPXXAPTQL:SPIN:YGKIP:NMVVRAXGXH, AVPKAXXAPTKL:SPIN:YGKIP:NMVVKAXGXH, KVGKAXXVPTKL:SPIN:YGKIP:EGMSVAEXGXR, KASKAXXVPTKL:SPIN:YGKIP:GMAVSEXGXR, AAPASXXVPARL:SPIN:YGKIP:DMVVEAXGXR, STPPTXXVPTRL:SPIN:YGKIP:DMVVESXGXR, HVPKPXXAPTKL:SPIN:YGKIP:NMVVRSXGXH, RVPSTXXAPVKT:SPIN:YGKIP:MIVEEXGXL, ASAAPXXVPQAL:SPIN:YGKIP:MIVRSXKXS, ASASPXXVSQDL:SPIN:YGKIP:MIVKSXKXS, ASASPXXVPQDL:SPIN:YGKIP:MVVKSXKXS, NDEGLEXVPTEE:SPIN:YGKIP:FLQHNKXEXR, NDEGLEXVPTGQ:SPIN:YGKIP:LEEHSQXEXR, SSVKXQPSRVHH:SPIN:YGKIP:RLEEHLEXAXA, RNVQXRPTQVQL:SPIN:YGKIP:TLEDHLAXKXE, KIPKAXXVPAEL:SPIS:YKQYE:DMVVEGXGXR, GIPEPXXVPAKM:SPIS:YKQYE:NMVVESXAXR, SIPKAXXVPAEL:SPIS:YKQYE:EMVVEGXGXR, HVTKPTXVPAKL:SPIS:YKQYE:NMVVESXGXH, YVPKPXXVPAKL:SPIS:YKQYE:NMVVESXGXH, TVPKPXXVPAQL:SPIS:YKQYE:NMVVEAXGXH, AVPKAXXVPAKL:SPIS:YKQYE:NMVVEAXGXH, KVGKAXXVPAKL:SPIS:YKQYE:EGMSVVEXGXR, KASKAXXVPAKL:SPIS:YKQYE:GMVVEEXGXR, GSAGPXXVPAKM:SPIS:YKQYE:GMVVERXGXS, STPPTXXVPARL:SPIS:YKQYE:DMVVESXGXR, HVPKPXXVPAKL:SPIS:YKQYE:NMVVESXGXH, RVPSTXXVPAKT:SPIS:YKQYE:MIVVEXGXL, ASAAPXXVPAAL:SPIS:YKQYE:MIVVEXKXS, ASASPXXVPADL:SPIS:YKQYE:MIVVEXKXS, ASASPXXVPADL:SPIS:YKQYE:MVVVEXKXS, NDEGLEXVPAEE:SPIS:YKQYE:FLVVEKXEXR, NDEGLEXVPAGQ:SPIS:YKQYE:LEVVEQXEXR, SSVKXQPVPAHH:SPIS:YKQYE:RLVVELEXAXA, RNVQXRPVPAQL:SPIS:YKQYE:TLVVELAXKXE, KIPKAXXVPTEL:SPIS:YKQYE:DMVVEGXGXR, GIPEPXXVPEKM:SPIS:YKQYE:NMTVESXAXR, SIPKAXXVPTEL:SPIS:YKQYE:EMVVEGXGXR, HVTKPTXAPTKL:SPIS:YKQYE:NMVVRSXGXH, YVPKPXXAPTKL:SPIS:YKQYE:NMVVRSXGXH, TVPKPXXAPTQL:SPIS:YKQYE:NMVVRAXGXH, AVPKAXXAPTKL:SPIS:YKQYE:NMVVKAXGXH, KVGKAXXVPTKL:SPIS:YKQYE:EGMSVAEXGXR, KASKAXXVPTKL:SPIS:YKQYE:GMAVSEXGXR, GSAGPXXTPTKM:SPIS:YKQYE:GMVVDRXGXS, STPPTXXVPTRL:SPIS:YKQYE:DMVVESXGXR, HVPKPXXAPTKL:SPIS:YKQYE:NMVVRSXGXH, RVPSTXXAPVKT:SPIS:YKQYE:MIVEEXGXL, ASAAPXXVPQAL:SPIS:YKQYE:MIVRSXKXS, ASASPXXVSQDL:SPIS:YKQYE:MIVKSXKXS, ASASPXXVPQDL:SPIS:YKQYE:MVVKSXKXS, NDEGLEXVPTEE:SPIS:YKQYE:FLQHNKXEXR, NDEGLEXVPTGQ:SPIS:YKQYE:LEEHSQXEXR, SSVKXQPSRVHH:SPIS:YKQYE:RLEEHLEXAXA, RNVQXRPTQVQL:SPIS:YKQYE:TLEDHLAXKXE, GIPEPXXVPTKM:SPIS:YKQYE:NMVVESXAXR, HVTKPTXVPTKL:SPIS:YKQYE:NMVVESXGXH, YVPKPXXVPTKL:SPIS:YKQYE:NMVVESXGXH, TVPKPXXVPTQL:SPIS:YKQYE:NMVVEAXGXH, AVPKAXXVPTKL:SPIS:YKQYE:NMVVEAXGXH, KVGKAXXVPTKL:SPIS:YKQYE:EGMSVVEXGXR, KASKAXXVPTKL:SPIS:YKQYE:GMVVEEXGXR, GSAGPXXVPTKM:SPIS:YKQYE:GMVVERXGXS, AAPASXXVPTRL:SPIS:YKQYE:DMVVEAXGXR, HVPKPXXVPTKL:SPIS:YKQYE:NMVVESXGXH, RVPSTXXVPTKT:SPIS:YKQYE:MIVVEXGXL, ASAAPXXVPTAL:SPIS:YKQYE:MIVVEXKXS, ASASPXXVPTDL:SPIS:YKQYE:MIVVEXKXS, ASASPXXVPTDL:SPIS:YKQYE:MVVVEXKXS, NDEGLEXVPTEE:SPIS:YKQYE:FLVVEKXEXR, NDEGLEXVPTGQ:SPIS:YKQYE:LEVVEQXEXR, SSVKXQPVPTHH:SPIS:YKQYE:RLVVELEXAXA, RNVQXRPVPTQL:SPIS:YKQYE:TLVVELAXKXE, AAPASXXVPARL:SPIS:YKQYE:DMVVEAXGXR, KIPKAXXAPVEL:KPLS:DHHKD:DMVEEGXGXR, GIPEPXXAPVKM:KPLS:DHHKD:NMVEESXAXR, SIPKAXXAPVEL:KPLS:DHHKD:EMVEEGXGXR, HVTKPTXAPVKL:KPLS:DHHKD:NMVEESXGXH, YVPKPXXAPVKL:KPLS:DHHKD:NMVEESXGXH, TVPKPXXAPVQL:KPLS:DHHKD:NMVEEAXGXH, AVPKAXXAPVKL:KPLS:DHHKD:NMVEEAXGXH, KVGKAXXAPVKL:KPLS:DHHKD:EGMSVEEXGXR, KASKAXXAPVKL:KPLS:DHHKD:GMVEEEXGXR, GSAGPXXAPVKM:KPLS:DHHKD:GMVEERXGXS, AAPASXXAPVRL:KPLS:DHHKD:DMVEEAXGXR, STPPTXXAPVRL:KPLS:DHHKD:DMVEESXGXR, HVPKPXXAPVKL:KPLS:DHHKD:NMVEESXGXH, ASAAPXXAPVAL:KPLS:DHHKD:MIVEEXKXS, ASASPXXAPVDL:KPLS:DHHKD:MIVEEXKXS, ASASPXXAPVDL:KPLS:DHHKD:MVVEEXKXS, NDEGLESAPVEE:KPLS:DHHKD:FLVEEKXEXR, NDEGLESAPVGQ:KPLS:DHHKD:LEVEEQXEXR, SSVKXQPAPVHH:KPLS:DHHKD:RLVEELEXAXA, RNVQXRPAPVQL:KPLS:DHHKD:TLVEELAXKXE, KIPKAXXVPTEL:KPLS:DHHKD:DMVVEGXGXR, GIPEPXXVPEKM:KPLS:DHHKD:NMTVESXAXR, SIPKAXXVPTEL:KPLS:DHHKD:EMVVEGXGXR, HVTKPTXAPTKL:KPLS:DHHKD:NMVVRSXGXH, YVPKPXXAPTKL:KPLS:DHHKD:NMVVRSXGXH, TVPKPXXAPTQL:KPLS:DHHKD:NMVVRAXGXH, AVPKAXXAPTKL:KPLS:DHHKD:NMVVKAXGXH, KVGKAXXVPTKL:KPLS:DHHKD:EGMSVAEXGXR, KASKAXXVPTKL:KPLS:DHHKD:GMAVSEXGXR, GSAGPXXTPTKM:KPLS:DHHKD:GMVVDRXGXS, AAPASXXVPARL:KPLS:DHHKD:DMVVEAXGXR, STPPTXXVPTRL:KPLS:DHHKD:DMVVESXGXR, HVPKPXXAPTKL:KPLS:DHHKD:NMVVRSXGXH, ASAAPXXVPQAL:KPLS:DHHKD:MIVRSXKXS, ASASPXXVSQDL:KPLS:DHHKD:MIVKSXKXS, ASASPXXVPQDL:KPLS:DHHKD:MVVKSXKXS, NDEGLEXVPTEE:KPLS:DHHKD:FLQHNKXEXR, NDEGLEXVPTGQ:KPLS:DHHKD:LEEHSQXEXR, SSVKXQPSRVHH:KPLS:DHHKD:RLEEHLEXAXA, RNVQXRPTQVQL:KPLS:DHHKD:TLEDHLAXKXE, KIPKAXXVPQEL:EPLP:EQLSN:DMVRXGXGSR, GIPEPXXVPQKM:EPLP:EQLSN:NMVRSSXAXR, SIPKAXXVPQEL:EPLP:EQLSN:EMVRXGXGSR, HVTKPTXVPQKL:EPLP:EQLSN:NMVRSSXGXH, YVPKPXXVPQKL:EPLP:EQLSN:NMVRSSXGXH, TVPKPXXVPQQL:EPLP:EQLSN:NMVRSAXGXH, AVPKAXXVPQKL:EPLP:EQLSN:NMVRSAXGXH, KVGKAXXVPQKL:EPLP:EQLSN:EGMSVRSXGXR, KASKAXXVPQKL:EPLP:EQLSN:GMVRSEXGXR, GSAGPXXVPQKM:EPLP:EQLSN:GMVRSRXGXS, AAPASXXVPQRL:EPLP:EQLSN:DMVRSAXGXR, STPPTXXVPQRL:EPLP:EQLSN:DMVRSSXGXR, HVPKPXXVPQKL:EPLP:EQLSN:NMVRSSXGXH, RVPSTXXVPQKT:EPLP:EQLSN:MIVRSXGXL, ASASPXXVPQDL:EPLP:EQLSN:MIVRSXKXS, ASASPXXVPQDL:EPLP:EQLSN:MVVRSXKXS, NDEGLEXVPQEE:EPLP:EQLSN:FLVRXKXESR, NDEGLEXVPQGQ:EPLP:EQLSN:LEVRSQXEXR, SSVKXQPVPQHH:EPLP:EQLSN:RLVRSLEXAXA, RNVQXRPVPQQL:EPLP:EQLSN:TLVRSLAXKXE, KIPKAXXVPTEL:EPLP:EQLSN:DMVVEGXGXR, GIPEPXXVPEKM:EPLP:EQLSN:NMTVESXAXR, SIPKAXXVPTEL:EPLP:EQLSN:EMVVEGXGXR, HVTKPTXAPTKL:EPLP:EQLSN:NMVVRSXGXH, YVPKPXXAPTKL:EPLP:EQLSN:NMVVRSXGXH, TVPKPXXAPTQL:EPLP:EQLSN:NMVVRAXGXH, AVPKAXXAPTKL:EPLP:EQLSN:NMVVKAXGXH, KVGKAXXVPTKL:EPLP:EQLSN:EGMSVAEXGXR, KASKAXXVPTKL:EPLP:EQLSN:GMAVSEXGXR, GSAGPXXTPTKM:EPLP:EQLSN:GMVVDRXGXS, AAPASXXVPARL:EPLP:EQLSN:DMVVEAXGXR, STPPTXXVPTRL:EPLP:EQLSN:DMVVESXGXR, HVPKPXXAPTKL: EPLP:EQLSN:NMVVRSXGXH, RVPSTXXAPVKT:EPLP:EQLSN:MIVEEXGXL, ASASPXXVSQDL:EPLP:EQLSN:MIVKSXKXS, ASASPXXVPQDL:EPLP:EQLSN:MVVKSXKXS, NDEGLEXVPTEE:EPLP:EQLSN:FLQHNKXEXR, NDEGLEXVPTGQ:EPLP:EQLSN:LEEHSQXEXR, SSVKXQPSRVHH:EPLP:EQLSN:RLEEHLEXAXA, RNVQXRPTQVQL:EPLP:EQLSN:TLEDHLAXKXE, KIPKAXXVSQEL:EPLT:EQLSN:DMVKXGXGSR, GIPEPXXVSQKM:EPLT:EQLSN:NMVKSSXAXR, SIPKAXXVSQEL:EPLT:EQLSN:EMVKXGXGSR, HVTKPTXVSQKL:EPLT:EQLSN:NMVKSSXGXH, YVPKPXXVSQKL:EPLT:EQLSN:NMVKSSXGXH, TVPKPXXVSQQL:EPLT:EQLSN:NMVKSAXGXH, AVPKAXXVSQKL:EPLT:EQLSN:NMVKSAXGXH, KVGKAXXVSQKL:EPLT:EQLSN:EGMSVKSXGXR, KASKAXXVSQKL:EPLT:EQLSN:GMVKSEXGXR, GSAGPXXVSQKM:EPLT:EQLSN:GMVKSRXGXS, AAPASXXVSQRL:EPLT:EQLSN:DMVKSAXGXR, STPPTXXVSQRL:EPLT:EQLSN:DMVKSSXGXR, HVPKPXXVSQKL:EPLT:EQLSN:NMVKSSXGXH, RVPSTXXVSQKT:EPLT:EQLSN:MIVKSXGXL, ASAAPXXVSQAL:EPLT:EQLSN:MIVKSXKXS, ASASPXXVSQDL:EPLT:EQLSN:MVVKSXKXS, NDEGLEXVSQEE:EPLT:EQLSN:FLVKXKXESR, NDEGLEXVSQGQ:EPLT:EQLSN:LEVKSQXEXR, SSVKXQPVSQHH:EPLT:EQLSN:RLVKSLEXAXA, RNVQXRPVSQQL:EPLT:EQLSN:TLVKSLAXKXE, KIPKAXXVPTEL:EPLT:EQLSN:DMVVEGXGXR, GIPEPXXVPEKM:EPLT:EQLSN:NMTVESXAXR, SIPKAXXVPTEL:EPLT:EQLSN:EMVVEGXGXR, HVTKPTXAPTKL:EPLT:EQLSN:NMVVRSXGXH, YVPKPXXAPTKL:EPLT:EQLSN:NMVVRSXGXH, TVPKPXXAPTQL:EPLT:EQLSN:NMVVRAXGXH, AVPKAXXAPTKL:EPLT:EQLSN:NMVVKAXGXH, KVGKAXXVPTKL:EPLT:EQLSN:EGMSVAEXGXR, KASKAXXVPTKL:EPLT:EQLSN:GMAVSEXGXR, GSAGPXXTPTKM:EPLT:EQLSN:GMVVDRXGXS, AAPASXXVPARL:EPLT:EQLSN:DMVVEAXGXR, STPPTXXVPTRL:EPLT:EQLSN:DMVVESXGXR, HVPKPXXAPTKL:EPLT:EQLSN:NMVVRSXGXH, RVPSTXXAPVKT:EPLT:EQLSN:MIVEEXGXL, ASAAPXXVPQAL:EPLT:EQLSN:MIVRSXKXS, ASASPXXVPQDL:EPLT:EQLSN:MVVKSXKXS, NDEGLEXVPTEE:EPLT:EQLSN:FLQHNKXEXR, NDEGLEXVPTGQ:EPLT:EQLSN:LEEHSQXEXR, SSVKXQPSRVHH:EPLT:EQLSN:RLEEHLEXAXA, RNVQXRPTQVQL:EPLT:EQLSN:TLEDHLAXKXE, KIPKAXXVPQEL:EPLT:EQLSN:DMVKXGXGSR, GIPEPXXVPQKM:EPLT:EQLSN:NMVKSSXAXR, SIPKAXXVPQEL:EPLT:EQLSN:EMVKXGXGSR, HVTKPTXVPQKL:EPLT:EQLSN:NMVKSSXGXH, YVPKPXXVPQKL:EPLT:EQLSN:NMVKSSXGXH, TVPKPXXVPQQL:EPLT:EQLSN:NMVKSAXGXH, AVPKAXXVPQKL:EPLT:EQLSN:NMVKSAXGXH, KVGKAXXVPQKL:EPLT:EQLSN:EGMSVKSXGXR, KASKAXXVPQKL:EPLT:EQLSN:GMVKSEXGXR, GSAGPXXVPQKM:EPLT:EQLSN:GMVKSRXGXS, AAPASXXVPQRL:EPLT:EQLSN:DMVKSAXGXR, STPPTXXVPQRL:EPLT:EQLSN:DMVKSSXGXR, HVPKPXXVPQKL:EPLT:EQLSN:NMVKSSXGXH, RVPSTXXVPQKT:EPLT:EQLSN:MIVKSXGXL, ASAAPXXVPQAL:EPLT:EQLSN:MIVKSXKXS, ASASPXXVPQDL:EPLT:EQLSN:MIVKSXKXS, NDEGLEXVPQEE:EPLT:EQLSN:FLVKXKXESR, NDEGLEXVPQGQ:EPLT:EQLSN:LEVKSQXEXR, SSVKXQPVPQHH:EPLT:EQLSN:RLVKSLEXAXA, RNVQXRPVPQQL:EPLT:EQLSN:TLVKSLAXKXE, ASASPXXVSQDL:EPLT:EQLSN:MIVKSXKXS, KIPKAXXVPTEL:SNIT:IGEMS:DMQHNGXGXR, GIPEPXXVPTKM:SNIT:IGEMS:NMQHNSXAXR, SIPKAXXVPTEL:SNIT:IGEMS:EMQHNGXGXR, HVTKPTXVPTKL:SNIT:IGEMS:NMQHNSXGXH, YVPKPXXVPTKL:SNIT:IGEMS:NMQHNSXGXH, TVPKPXXVPTQL:SNIT:IGEMS:NMQHNAXGXH, AVPKAXXVPTKL:SNIT:IGEMS:NMQHNAXGXH, KVGKAXXVPTKL:SNIT:IGEMS:EGMSQHNXGXR, KASKAXXVPTKL:SNIT:IGEMS:GMQHNEXGXR, GSAGPXXVPTKM:SNIT:IGEMS:GMQHNRXGXS, AAPASXXVPTRL:SNIT:IGEMS:DMQHNAXGXR, STPPTXXVPTRL:SNIT:IGEMS:DMQHNSXGXR, HVPKPXXVPTKL:SNIT:IGEMS:NMQHNSXGXH, RVPSTXXVPTKT:SNIT:IGEMS:MIQHNXGXL, ASAAPXXVPTAL:SNIT:IGEMS:MIQHNXKXS, ASASPXXVPTDL:SNIT:IGEMS:MIQHNXKXS, ASASPXXVPTDL:SNIT:IGEMS:MVQHNXKXS, NDEGLEXVPTGQ:SNIT:IGEMS:LEQHNQXEXR, NDEGLEXVPTEE:SNIT:IGEMS:FLQHNKXEXR, SSVKXQPVPTHH:SNIT:IGEMS:RLQHNLEXAXA, RNVQXRPVPTQL:SNIT:IGEMS:TLQHNLAXKXE, KIPKAXXVPTEL:SNIT:IGEMS:DMVVEGXGXR, GIPEPXXVPEKM:SNIT:IGEMS:NMTVESXAXR, SIPKAXXVPTEL:SNIT:IGEMS:EMVVEGXGXR, HVTKPTXAPTKL:SNIT:IGEMS:NMVVRSXGXH, YVPKPXXAPTKL:SNIT:IGEMS:NMVVRSXGXH, TVPKPXXAPTQL:SNIT:IGEMS:NMVVRAXGXH, AVPKAXXAPTKL:SNIT:IGEMS:NMVVKAXGXH, KVGKAXXVPTKL:SNIT:IGEMS:EGMSVAEXGXR, KASKAXXVPTKL:SNIT:IGEMS:GMAVSEXGXR, GSAGPXXTPTKM:SNIT:IGEMS:GMVVDRXGXS, AAPASXXVPARL:SNIT:IGEMS:DMVVEAXGXR, STPPTXXVPTRL:SNIT:IGEMS:DMVVESXGXR, HVPKPXXAPTKL:SNIT:IGEMS:NMVVRSXGXH, RVPSTXXAPVKT:SNIT:IGEMS:MIVEEXGXL, ASAAPXXVPQAL:SNIT:IGEMS:MIVRSXKXS, ASASPXXVSQDL:SNIT:IGEMS:MIVKSXKXS, ASASPXXVPQDL:SNIT:IGEMS:MVVKSXKXS, NDEGLEXVPTGQ:SNIT:IGEMS:LEEHSQXEXR, SSVKXQPSRVHH:SNIT:IGEMS:RLEEHLEXAXA, RNVQXRPTQVQL:SNIT:IGEMS:TLEDHLAXKXE, KIPKAXXVPTEL:SNIT:LGEMS:DMEHXGXGSR, GIPEPXXVPTKM:SNIT:LGEMS:NMEHSSXAXR, SIPKAXXVPTEL:SNIT:LGEMS:EMEHXGXGSR, HVTKPTXVPTKL:SNIT:LGEMS:NMEHSSXGXH, YVPKPXXVPTKL:SNIT:LGEMS:NMEHSSXGXH, TVPKPXXVPTQL:SNIT:LGEMS:NMEHSAXGXH, AVPKAXXVPTKL:SNIT:LGEMS:NMEHSAXGXH, KVGKAXXVPTKL:SNIT:LGEMS:EGMSEHSXGXR, KASKAXXVPTKL:SNIT:LGEMS:GMEHSEXGXR, GSAGPXXVPTKM:SNIT:LGEMS:GMEHSRXGXS, AAPASXXVPTRL:SNIT:LGEMS:DMEHSAXGXR, STPPTXXVPTRL:SNIT:LGEMS:DMEHSSXGXR, HVPKPXXVPTKL:SNIT:LGEMS:NMEHSSXGXH, RVPSTXXVPTKT:SNIT:LGEMS:MIEHSXGXL, ASAAPXXVPTAL:SNIT:LGEMS:MIEHSXKXS, ASASPXXVPTDL:SNIT:LGEMS:MIEHSXKXS, ASASPXXVPTDL:SNIT:LGEMS:MVEHSXKXS, NDEGLEXVPTEE:SNIT:LGEMS:FLEHXKXESR, SSVKXQPVPTHH:SNIT:LGEMS:RLEHSLEXAXA, RNVQXRPVPTQL:SNIT:LGEMS:TLEHSLAXKXE, KIPKAXXVPTEL:SNIT:LGEMS:DMVVEGXGXR, GIPEPXXVPEKM:SNIT:LGEMS:NMTVESXAXR, SIPKAXXVPTEL:SNIT:LGEMS:EMVVEGXGXR, HVTKPTXAPTKL:SNIT:LGEMS:NMVVRSXGXH, YVPKPXXAPTKL:SNIT:LGEMS:NMVVRSXGXH, TVPKPXXAPTQL:SNIT:LGEMS:NMVVRAXGXH, AVPKAXXAPTKL:SNIT:LGEMS:NMVVKAXGXH, KVGKAXXVPTKL:SNIT:LGEMS:EGMSVAEXGXR, KASKAXXVPTKL:SNIT:LGEMS:GMAVSEXGXR, GSAGPXXTPTKM:SNIT:LGEMS:GMVVDRXGXS, AAPASXXVPARL:SNIT:LGEMS:DMVVEAXGXR, STPPTXXVPTRL:SNIT:LGEMS:DMVVESXGXR, HVPKPXXAPTKL:SNIT:LGEMS:NMVVRSXGXH, RVPSTXXAPVKT:SNIT:LGEMS:MIVEEXGXL, ASAAPXXVPQAL:SNIT:LGEMS:MIVRSXKXS, ASASPXXVSQDL:SNIT:LGEMS:MIVKSXKXS, ASASPXXVPQDL:SNIT:LGEMS:MVVKSXKXS, NDEGLEXVPTEE:SNIT:LGEMS:FLQHNKXEXR, SSVKXQPSRVHH:SNIT:LGEMS:RLEEHLEXAXA, RNVQXRPTQVQL:SNIT:LGEMS:TLEDHLAXKXE, KIPKASSSRVEL:RSVK:KEVQV:DMEEHGXGXR, GIPEPSSSRVKM:RSVK:KEVQV:NMEEHSXAXR, SIPKASSSRVEL:RSVK:KEVQV:EMEEHGXGXR, HVTKPTXSRVKL:RSVK:KEVQV:NMEEHSXGXH, YVPKPSSSRVKL:RSVK:KEVQV:NMEEHSXGXH, TVPKPSSSRVQL:RSVK:KEVQV:NMEEHAXGXH, AVPKASSSRVKL:RSVK:KEVQV:NMEEHAXGXH, KVGKASSSRVKL:RSVK:KEVQV:EGMSEEHXGXR, KASKASSSRVKL:RSVK:KEVQV:GMEEHEXGXR, GSAGPSSSRVKM:RSVK:KEVQV:GMEEHRXGXS, AAPASSSSRVRL:RSVK:KEVQV:DMEEHAXGXR, STPPTSSSRVRL:RSVK:KEVQV:DMEEHSXGXR, HVPKPSSSRVKL:RSVK:KEVQV:NMEEHSXGXH, RVPSTSSSRVKT:RSVK:KEVQV:MIEEHXGXL, ASAAPSSSRVAL:RSVK:KEVQV:MIEEHXKXS, ASASPSSSRVDL:RSVK:KEVQV:MIEEHXKXS, ASASPSSSRVDL:RSVK:KEVQV:MVEEHXKXS, NDEGLESSRVEE:RSVK:KEVQV:FLEEHKXEXR, NDEGLESSRVGQ:RSVK:KEVQV:LEEEHQXEXR, RNVQXRPSRVQL:RSVK:KEVQV:TLEEHLAXKXE, KIPKAXXVPTEL:RSVK:KEVQV:DMVVEGXGXR, GIPEPXXVPEKM:RSVK:KEVQV:NMTVESXAXR, SIPKAXXVPTEL:RSVK:KEVQV:EMVVEGXGXR, HVTKPTXAPTKL:RSVK:KEVQV:NMVVRSXGXH, YVPKPXXAPTKL:RSVK:KEVQV:NMVVRSXGXH, TVPKPXXAPTQL:RSVK:KEVQV:NMVVRAXGXH, AVPKAXXAPTKL:RSVK:KEVQV:NMVVKAXGXH, KVGKAXXVPTKL:RSVK:KEVQV:EGMSVAEXGXR, KASKAXXVPTKL: RSVK:KEVQV:GMAVSEXGXR, GSAGPXXTPTKM:RSVK:KEVQV:GMVVDRXGXS, AAPASXXVPARL:RSVK:KEVQV:DMVVEAXGXR, STPPTXXVPTRL:RSVK:KEVQV:DMVVESXGXR, HVPKPXXAPTKL:RSVK:KEVQV:NMVVRSXGXH, RVPSTXXAPVKT:RSVK:KEVQV:MIVEEXGXL, ASAAPXXVPQAL:RSVK:KEVQV:MIVRSXKXS, ASASPXXVSQDL:RSVK:KEVQV:MIVKSXKXS, ASASPXXVPQDL:RSVK:KEVQV:MVVKSXKXS, NDEGLEXVPTEE: RSVK:KEVQV:FLQHNKXEXR, NDEGLEXVPTGQ:RSVK:KEVQV:LEEHSQXEXR, RNVQXRPTQVQL: RSVK:KEVQV:TLEDHLAXKXE, KIPKASSTQVEL:RPVQ:KKATV:DMEDHGXGXR, GIPEPSSTQVKM:RPVQ:KKATV:NMEDHSXAXR, SIPKASSTQVEL:RPVQ:KKATV:EMEDHGXGXR, HVTKPTXTQVKL:RPVQ:KKATV:NMEDHSXGXH, YVPKPSSTQVKL:RPVQ:KKATV:NMEDHSXGXH, TVPKPSSTQVQL:RPVQ:KKATV:NMEDHAXGXH, AVPKASSTQVKL:RPVQ:KKATV:NMEDHAXGXH, KVGKASSTQVKL:RPVQ:KKATV:EGMSEDHXGXR, KASKASSTQVKL:RPVQ:KKATV:GMEDHEXGXR, GSAGPSSTQVKM:RPVQ:KKATV:GMEDHRXGXS, AAPASSSTQVRL:RPVQ:KKATV:DMEDHAXGXR, STPPTSSTQVRL:RPVQ:KKATV:DMEDHSXGXR, HVPKPSSTQVKL:RPVQ:KKATV:NMEDHSXGXH, RVPSTSSTQVKT:RPVQ:KKATV:MIEDHXGXL, ASAAPSSTQVAL:RPVQ:KKATV:MIEDHXKXS, ASASPSSTQVDL:RPVQ:KKATV:MIEDHXKXS, ASASPSSTQVDL:RPVQ:KKATV:MVEDHXKXS, NDEGLESTQVEE:RPVQ:KKATV:FLEDHKXEXR, NDEGLESTQVGQ:RPVQ:KKATV:LEEDHQXEXR, SSVKXQPTQVHH:RPVQ:KKATV:RLEDHLEXAXA, KIPKAXXVPTEL:RPVQ:KKATV:DMVVEGXGXR, GIPEPXXVPEKM:RPVQ:KKATV:NMTVESXAXR, SIPKAXXVPTEL:RPVQ:KKATV:EMVVEGXGXR, HVTKPTXAPTKL: RPVQ:KKATV:NMVVRSXGXH, YVPKPXXAPTKL:RPVQ:KKATV:NMVVRSXGXH, TVPKPXXAPTQL:RPVQ:KKATV:NMVVRAXGXH, AVPKAXXAPTKL:RPVQ:KKATV:NMVVKAXGXH, KVGKAXXVPTKL: RPVQ:KKATV:EGMSVAEXGXR, KASKAXXVPTKL:RPVQ:KKATV:GMAVSEXGXR, GSAGPXXTPTKM:RPVQ:KKATV:GMVVDRXGXS, AAPASXXVPARL: RPVQ:KKATV:DMVVEAXGXR, STPPTXXVPTRL:RPVQ:KKATV:DMVVESXGXR, HVPKPXXAPTKL:RPVQ:KKATV:NMVVRSXGXH, RVPSTXXAPVKT:RPVQ:KKATV:MIVEEXGXL, ASAAPXXVPQAL:RPVQ:KKATV:MIVRSXKXS, ASASPXXVSQDL:RPVQ:KKATV:MIVKSXKXS, ASASPXXVPQDL:RPVQ:KKATV:MVVKSXKXS, NDEGLEXVPTEE:RPVQ:KKATV:FLQHNKXEXR, NDEGLEXVPTGQ:RPVQ:KKATV:LEEHSQXEXR and SSVKXQPSRVHH:RPVQ:KKATV:RLEEHLEXAXA. More particularly, the quadruplet PEP9:PEP1:PEP2:PEP10 is selected from the group consisting of GIPEPXXVPTKM:SAIS:LKNYQ:NMVVESXAXR, HVTKPTXVPTKL:SAIS:LKNYQ:NMVVESXGXH, YVPKPXXVPTKL:SAIS:LKNYQ:NMVVESXGXH, TVPKPXXVPTQL:SAIS:LKNYQ:NMVVEAXGXH, AVPKAXXVPTKL:SAIS:LKNYQ:NMVVEAXGXH, KVGKAXXVPTKL:SAIS:LKNYQ:EGMSVVEXGXR, KASKAXXVPTKL:SAIS:LKNYQ:GMVVEEXGXR, GSAGPXXVPTKM:SAIS:LKNYQ:GMVVERXGXS, AAPASXXVPTRL:SAIS:LKNYQ:DMVVEAXGXR, STPPTXXVPTRL:SAIS:LKNYQ:DMVVESXGXR, HVPKPXXVPTKL:SAIS:LKNYQ:NMVVESXGXH, RVPSTXXVPTKT:SAIS:LKNYQ:MIVVEXGXL, ASAAPXXVPTAL:SAIS:LKNYQ:MIVVEXKXS, ASASPXXVPTDL:SAIS:LKNYQ:MIVVEXKXS, ASASPXXVPTDL:SAIS:LKNYQ:MVVVEXKXS, GIPEPXXVPEKM:SAIS:LKNYQ:NMTVESXAXR, HVTKPTXAPTKL:SAIS:LKNYQ:NMVVRSXGXH, YVPKPXXAPTKL:SAIS:LKNYQ:NMVVRSXGXH, TVPKPXXAPTQL:SAIS:LKNYQ:NMVVRAXGXH, AVPKAXXAPTKL:SAIS:LKNYQ:NMVVKAXGXH, KVGKAXXVPTKL:SAIS:LKNYQ:EGMSVAEXGXR, KASKAXXVPTKL:SAIS:LKNYQ:GMAVSEXGXR, GSAGPXXTPTKM:SAIS:LKNYQ:GMVVDRXGXS, AAPASXXVPARL:SAIS:LKNYQ:DMVVEAXGXR, HVPKPXXAPTKL:SAIS:LKNYQ:NMVVRSXGXH, RVPSTXXAPVKT:SAIS:LKNYQ:MIVEEXGXL, ASAAPXXVPQAL:SAIS:LKNYQ:MIVRSXKXS, ASASPSSVSQDL:SAIS:LKNYQ:MIVKSXKXS, ASASPXXVPQDL:SAIS:LKNYQ:MVVKSXKXS, NDEGLEXVPTEE:SAIS:LKNYQ:FLQHNKXEXR, NDEGLEXVPTGQ:SAIS:LKNYQ:LEEHSQXEXR, SSVKXQPSRVHH:SAIS:LKNYQ:RLEEHLEXAXA, RNVQXRPTQVQL:SAIS:LKNYQ:TLEDHLAXKXE, KIPKAXXVPEEL:SSLS:LKVYP:DMTVEGXGXR, SIPKAXXVPEEL:SSLS:LKVYP:EMTVEGXGXR, HVTKPTXVPEKL:SSLS:LKVYP:NMTVESXGXH, YVPKPXXVPEKL:SSLS:LKVYP:NMTVESXGXH, TVPKPXXVPEQL:SSLS:LKVYP:NMTVEAXGXH, AVPKAXXVPEKL:SSLS:LKVYP:NMTVEAXGXH, KVGKAXXVPEKL:SSLS:LKVYP:EGMSTVEXGXR, KASKAXXVPEKL:SSLS:LKVYP:GMTVEEXGXR, GSAGPXXVPEKM:SSLS:LKVYP:GMTVERXGXS, AAPASXXVPERL:SSLS:LKVYP:DMTVEAXGXR, STPPTXXVPERL:SSLS:LKVYP:DMTVESXGXR, HVPKPXXVPEKL:SSLS:LKVYP:NMTVESXGXH, RVPSTXXVPEKT:SSLS:LKVYP:MITVEXGXL, ASAAPXXVPEAL:SSLS:LKVYP:MITVEXKXS, ASASPXXVPEDL:SSLS:LKVYP:MITVEXKXS, ASASPXXVPEDL:SSLS:LKVYP:MVTVEXKXS, KIPKAXXVPTEL:SSLS:LKVYP:DMVVEGXGXR, SIPKAXXVPTEL:SSLS:LKVYP:EMVVEGXGXR, HVTKPTXAPTKL:SSLS:LKVYP:NMVVRSXGXH, YVPKPXXAPTKL:SSLS:LKVYP:NMVVRSXGXH, TVPKPXXAPTQL:SSLS:LKVYP:NMVVRAXGXH, AVPKAXXAPTKL:SSLS:LKVYP:NMVVKAXGXH, KVGKAXXVPTKL:SSLS:LKVYP:EGMSVAEXGXR, KASKAXXVPTKL:SSLS:LKVYP:GMAVSEXGXR, GSAGPXXTPTKM:SSLS:LKVYP:GMVVDRXGXS, AAPASXXVPARL:SSLS:LKVYP:DMVVEAXGXR, STPPTXXVPTRL:SSLS:LKVYP:DMVVESXGXR, HVPKPXXAPTKL:SSLS:LKVYP:NMVVRSXGXH, RVPSTXXAPVKT:SSLS:LKVYP:MIVEEXGXL, ASAAPXXVPQAL:SSLS:LKVYP:MIVRSXKXS, ASASPSSVSQDL:SSLS:LKVYP:MIVKSXKXS, ASASPXXVPQDL:SSLS:LKVYP:MVVKSXKXS, NDEGLEXVPTEE:SSLS:LKVYP:FLQHNKXEXR, NDEGLEXVPTGQ:SSLS:LKVYP:LEEHSQXEXR, SSVKXQPSRVHH:SSLS:LKVYP:RLEEHLEXAXA, RNVQXRPTQVQL:SSLS:LKVYP:TLEDHLAXKXE, KIPKAXXAPTEL:NAIS:LKKYR:DMVVRGXGXR, GIPEPXXAPTKM:NAIS:LKKYR:NMVVRSXAXR, SIPKAXXAPTEL:NAIS:LKKYR:EMVVRGXGXR, AVPKAXXAPTKL:NAIS:LKKYR:NMVVRAXGXH, KVGKAXXAPTKL:NAIS:LKKYR:EGMSVVRXGXR, KASKAXXAPTKL:NAIS:LKKYR:GMVVREXGXR, GSAGPXXAPTKM:NAIS:LKKYR:GMVVRRXGXS, AAPASXXAPTRL:NAIS:LKKYR:DMVVRAXGXR, STPPTXXAPTRL:NAIS:LKKYR:DMVVRSXGXR, RVPSTXXAPTKT:NAIS:LKKYR:MIVVRXGXL, ASAAPXXAPTAL:NAIS:LKKYR:MIVVRXKXS, ASASPXXAPTDL:NAIS:LKKYR:MIVVRXKXS, ASASPXXAPTDL:NAIS:LKKYR:MVVVRXKXS, KIPKAXXVPTEL:NAIS:LKKYR:DMVVEGXGXR, GIPEPXXVPEKM:NAIS:LKKYR:NMTVESXAXR, SIPKAXXVPTEL:NAIS:LKKYR:EMVVEGXGXR, AVPKAXXAPTKL:NAIS:LKKYR:NMVVKAXGXH, KVGKAXXVPTKL:NAIS:LKKYR:EGMSVAEXGXR, KASKAXXVPTKL:NAIS:LKKYR:GMAVSEXGXR, GSAGPXXTPTKM:NAIS:LKKYR:GMVVDRXGXS, AAPASXXVPARL:NAIS:LKKYR:DMVVEAXGXR, STPPTXXVPTRL:NAIS:LKKYR:DMVVESXGXR, RVPSTXXAPVKT:NAIS:LKKYR:MIVEEXGXL, ASAAPXXVPQAL:NAIS:LKKYR:MIVRSXKXS, ASASPSSVSQDL:NAIS:LKKYR:MIVKSXKXS, ASASPXXVPQDL:NAIS:LKKYR:MVVKSXKXS, NDEGLEXVPTEE:NAIS:LKKYR:FLQHNKXEXR, NDEGLEXVPTGQ:NAIS:LKKYR:LEEHSQXEXR, SSVKXQPSRVHH:NAIS:LKKYR:RLEEHLEXAXA, RNVQXRPTQVQL:NAIS:LKKYR:TLEDHLAXKXE, KIPKAXXAPTEL:SATS:LRKHR:DMVVKGXGXR, GIPEPXXAPTKM:SATS:LRKHR:NMVVKSXAXR, SIPKAXXAPTEL:SATS:LRKHR:EMVVKGXGXR, HVTKPTXAPTKL:SATS:LRKHR:NMVVKSXGXH, YVPKPXXAPTKL:SATS:LRKHR:NMVVKSXGXH, TVPKPXXAPTQL:SATS:LRKHR:NMVVKAXGXH, KVGKAXXAPTKL:SATS:LRKHR:EGMSVVKXGXR, KASKAXXAPTKL:SATS:LRKHR:GMVVKEXGXR, GSAGPXXAPTKM:SATS:LRKHR:GMVVKRXGXS, AAPASXXAPTRL:SATS:LRKHR:DMVVKAXGXR, STPPTXXAPTRL:SATS:LRKHR:DMVVKSXGXR, HVPKPXXAPTKL:SATS:LRKHR:NMVVKSXGXH, RVPSTXXAPTKT:SATS:LRKHR:MIVVKXGXL, ASAAPXXAPTAL:SATS:LRKHR:MIVVKXKXS, ASASPXXAPTDL:SATS:LRKHR:MIVVKXKXS, ASASPXXAPTDL:SATS:LRKHR:MVVVKXKXS, KIPKAXXVPTEL:SATS:LRKHR:DMVVEGXGXR, GIPEPXXVPEKM:SATS:LRKHR:NMTVESXAXR, SIPKAXXVPTEL:SATS:LRKHR:EMVVEGXGXR, HVTKPTXAPTKL:SATS:LRKHR:NMVVRSXGXH, YVPKPXXAPTKL:SATS:LRKHR:NMVVRSXGXH, TVPKPXXAPTQL:SATS:LRKHR:NMVVRAXGXH, KVGKAXXVPTKL:SATS:LRKHR:EGMSVAEXGXR, KASKAXXVPTKL:SATS:LRKHR:GMAVSEXGXR, GSAGPXXTPTKM:SATS:LRKHR:GMVVDRXGXS, AAPASXXVPARL:SATS:LRKHR:DMVVEAXGXR, STPPTXXVPTRL:SATS:LRKHR:DMVVESXGXR, HVPKPXXAPTKL:SATS:LRKHR:NMVVRSXGXH, RVPSTXXAPVKT:SATS:LRKHR:MIVEEXGXL, ASAAPXXVPQAL:SATS:LRKHR:MIVRSXKXS, ASASPSSVSQDL:SATS:LRKHR:MIVKSXKXS, ASASPXXVPQDL:SATS:LRKHR:MVVKSXKXS, NDEGLEXVPTEE:SATS:LRKHR:FLQHNKXEXR, NDEGLEXVPTGQ:SATS:LRKHR:LEEHSQXEXR, SSVKXQPSRVHH:SATS:LRKHR:RLEEHLEXAXA, RNVQXRPTQVQL:SATS:LRKHR:TLEDHLAXKXE, KIPKAXXVPTEL:SPIS:LKYHY:DMVAEGXGXR, GIPEPXXVPTKM:SPIS:LKYHY:NMVAESXAXR, SIPKAXXVPTEL:SPIS:LKYHY:EMVAEGXGXR, HVTKPTXVPTKL:SPIS:LKYHY:NMVAESXGXH, YVPKPXXVPTKL:SPIS:LKYHY:NMVAESXGXH, TVPKPXXVPTQL:SPIS:LKYHY:NMVAEAXGXH, AVPKAXXVPTKL:SPIS:LKYHY:NMVAEAXGXH, KASKAXXVPTKL:SPIS:LKYHY:GMVAEEXGXR, GSAGPXXVPTKM:SPIS:LKYHY:GMVAERXGXS, AAPASXXVPTRL:SPIS:LKYHY:DMVAEAXGXR, STPPTXXVPTRL:SPIS:LKYHY:DMVAESXGXR, HVPKPXXVPTKL:SPIS:LKYHY:NMVAESXGXH, RVPSTXXVPTKT:SPIS:LKYHY:MIVAEXGXL, ASAAPXXVPTAL:SPIS:LKYHY:MIVAEXKXS, ASASPXXVPTDL:SPIS:LKYHY:MIVAEXKXS, ASASPXXVPTDL:SPIS:LKYHY:MVVAEXKXS, KIPKAXXVPTEL:SPIS:LKYHY:DMVVEGXGXR, GIPEPXXVPEKM:SPIS:LKYHY:NMTVESXAXR, SIPKAXXVPTEL:SPIS:LKYHY:EMVVEGXGXR, HVTKPTXAPTKL:SPIS:LKYHY:NMVVRSXGXH, YVPKPXXAPTKL:SPIS:LKYHY:NMVVRSXGXH, TVPKPXXAPTQL:SPIS:LKYHY:NMVVRAXGXH, AVPKAXXAPTKL:SPIS:LKYHY:NMVVKAXGXH, KASKAXXVPTKL:SPIS:LKYHY:GMAVSEXGXR, GSAGPXXTPTKM:SPIS:LKYHY:GMVVDRXGXS, AAPASXXVPARL:SPIS:LKYHY:DMVVEAXGXR, STPPTXXVPTRL:SPIS:LKYHY:DMVVESXGXR, HVPKPXXAPTKL:SPIS:LKYHY:NMVVRSXGXH, RVPSTXXAPVKT:SPIS:LKYHY:MIVEEXGXL, ASAAPXXVPQAL:SPIS:LKYHY:MIVRSXKXS, ASASPSSVSQDL:SPIS:LKYHY:MIVKSXKXS, ASASPXXVPQDL:SPIS:LKYHY:MVVKSXKXS, NDEGLEXVPTEE:SPIS:LKYHY:FLQHNKXEXR, NDEGLEXVPTGQ:SPIS:LKYHY:LEEHSQXEXR, SSVKXQPSRVHH:SPIS:LKYHY:RLEEHLEXAXA, RNVQXRPTQVQL:SPIS:LKYHY:TLEDHLAXKXE, KIPKAXXVPTEL:EPIS:KFKYE:DMAVXGXGSR, GIPEPXXVPTKM: EPIS:KFKYE:NMAVSSXAXR, SIPKAXXVPTEL: EPIS:KFKYE:EMAVXGXGSR, HVTKPTXVPTKL:EPIS:KFKYE:NMAVSSXGXH, YVPKPXXVPTKL:EPIS:KFKYE:NMAVSSXGXH, TVPKPXXVPTQL:EPIS:KFKYE:NMAVSAXGXH, AVPKAXXVPTKL:EPIS:KFKYE:NMAVSAXGXH, KVGKAXXVPTKL:EPIS:KFKYE:EGMSAVSXGXR, GSAGPXXVPTKM:EPIS:KFKYE:GMAVSRXGXS, AAPASXXVPTRL:EPIS:KFKYE:DMAVSAXGXR, STPPTXXVPTRL:EPIS:KFKYE:DMAVSSXGXR, HVPKPXXVPTKL:EPIS:KFKYE:NMAVSSXGXH, RVPSTXXVPTKT:EPIS:KFKYE:MIAVSXGXL, ASAAPXXVPTAL: EPIS:KFKYE:MIAVSXKXS, ASASPXXVPTDL:EPIS:KFKYE:MIAVSXKXS, ASASPXXVPTDL:EPIS:KFKYE:MVAVSXKXS, KIPKAXXVPTEL:EPIS:KFKYE:DMVVEGXGXR, GIPEPXXVPEKM:EPIS:KFKYE:NMTVESXAXR, SIPKAXXVPTEL:EPIS:KFKYE:EMVVEGXGXR, HVTKPTXAPTKL:EPIS:KFKYE:NMVVRSXGXH, YVPKPXXAPTKL: EPIS:KFKYE:NMVVRSXGXH, TVPKPXXAPTQL:EPIS:KFKYE:NMVVRAXGXH, AVPKAXXAPTKL:EPIS:KFKYE:NMVVKAXGXH, KVGKAXXVPTKL:EPIS:KFKYE:EGMSVAEXGXR, GSAGPXXTPTKM:EPIS:KFKYE:GMVVDRXGXS, AAPASXXVPARL:EPIS:KFKYE:DMVVEAXGXR, STPPTXXVPTRL:EPIS:KFKYE:DMVVESXGXR, HVPKPXXAPTKL:EPIS:KFKYE:NMVVRSXGXH, RVPSTXXAPVKT:EPIS:KFKYE:MIVEEXGXL, ASAAPXXVPQAL:EPIS:KFKYE:MIVRSXKXS, ASASPSSVSQDL:EPIS:KFKYE:MIVKSXKXS, ASASPXXVPQDL:EPIS:KFKYE:MVVKSXKXS, NDEGLEXVPTEE:EPIS:KFKYE:FLQHNKXEXR, NDEGLEXVPTGQ:EPIS:KFKYE:LEEHSQXEXR, SSVKXQPSRVHH:EPIS:KFKYE:RLEEHLEXAXA, RNVQXRPTQVQL:EPIS:KFKYE:TLEDHLAXKXE, KIPKAXXTPTEL:SPIN:YGKIP:DMVVDGXGXR, GIPEPXXTPTKM:SPIN:YGKIP:NMVVDSXAXR, SIPKAXXTPTEL:SPIN:YGKIP:EMVVDGXGXR, HVTKPTXTPTKL:SPIN:YGKIP:NMVVDSXGXH, YVPKPXXTPTKL:SPIN:YGKIP:NMVVDSXGXH, TVPKPXXTPTQL:SPIN:YGKIP:NMVVDAXGXH, AVPKAXXTPTKL:SPIN:YGKIP:NMVVDAXGXH, KVGKAXXTPTKL:SPIN:YGKIP:EGMSVVDXGXR, KASKAXXTPTKL:SPIN:YGKIP:GMVVDEXGXR, AAPASXXTPTRL:SPIN:YGKIP:DMVVDAXGXR, STPPTXXTPTRL:SPIN:YGKIP:DMVVDSXGXR, HVPKPXXTPTKL:SPIN:YGKIP:NMVVDSXGXH, RVPSTXXTPTKT:SPIN:YGKIP:MIVVDXGXL, ASAAPXXTPTAL:SPIN:YGKIP:MIVVDXKXS, ASASPXXTPTDL:SPIN:YGKIP:MIVVDXKXS, ASASPXXTPTDL:SPIN:YGKIP:MVVVDXKXS, KIPKAXXVPTEL:SPIN:YGKIP:DMVVEGXGXR, GIPEPXXVPEKM:SPIN:YGKIP:NMTVESXAXR, SIPKAXXVPTEL:SPIN:YGKIP:EMVVEGXGXR, HVTKPTXAPTKL:SPIN:YGKIP:NMVVRSXGXH, YVPKPXXAPTKL:SPIN:YGKIP:NMVVRSXGXH, TVPKPXXAPTQL:SPIN:YGKIP:NMVVRAXGXH, AVPKAXXAPTKL:SPIN:YGKIP:NMVVKAXGXH, KVGKAXXVPTKL:SPIN:YGKIP:EGMSVAEXGXR, KASKAXXVPTKL:SPIN:YGKIP:GMAVSEXGXR, AAPASXXVPARL:SPIN:YGKIP:DMVVEAXGXR, STPPTXXVPTRL:SPIN:YGKIP:DMVVESXGXR, HVPKPXXAPTKL:SPIN:YGKIP:NMVVRSXGXH, RVPSTXXAPVKT:SPIN:YGKIP:MIVEEXGXL, ASAAPXXVPQAL:SPIN:YGKIP:MIVRSXKXS, ASASPSSVSQDL:SPIN:YGKIP:MIVKSXKXS, ASASPXXVPQDL:SPIN:YGKIP:MVVKSXKXS, NDEGLEXVPTEE:SPIN:YGKIP:FLQHNKXEXR, NDEGLEXVPTGQ:SPIN:YGKIP:LEEHSQXEXR, SSVKXQPSRVHH:SPIN:YGKIP:RLEEHLEXAXA, RNVQXRPTQVQL:SPIN:YGKIP:TLEDHLAXKXE, KIPKAXXVPAEL:SPIS:YKQYE:DMVVEGXGXR, GIPEPXXVPAKM:SPIS:YKQYE:NMVVESXAXR, SIPKAXXVPAEL:SPIS:YKQYE:EMVVEGXGXR, HVTKPTXVPAKL:SPIS:YKQYE:NMVVESXGXH, YVPKPXXVPAKL:SPIS:YKQYE:NMVVESXGXH, TVPKPXXVPAQL:SPIS:YKQYE:NMVVEAXGXH, AVPKAXXVPAKL:SPIS:YKQYE:NMVVEAXGXH, KVGKAXXVPAKL:SPIS:YKQYE:EGMSVVEXGXR, KASKAXXVPAKL:SPIS:YKQYE:GMVVEEXGXR, GSAGPXXVPAKM:SPIS:YKQYE:GMVVERXGXS, STPPTXXVPARL:SPIS:YKQYE:DMVVESXGXR, HVPKPXXVPAKL:SPIS:YKQYE:NMVVESXGXH, RVPSTXXVPAKT:SPIS:YKQYE:MIVVEXGXL, ASAAPXXVPAAL:SPIS:YKQYE:MIVVEXKXS, ASASPXXVPADL:SPIS:YKQYE:MIVVEXKXS, ASASPXXVPADL:SPIS:YKQYE:MVVVEXKXS, KIPKAXXVPTEL:SPIS:YKQYE:DMVVEGXGXR, GIPEPXXVPEKM:SPIS:YKQYE:NMTVESXAXR, SIPKAXXVPTEL:SPIS:YKQYE:EMVVEGXGXR, HVTKPTXAPTKL:SPIS:YKQYE:NMVVRSXGXH, YVPKPXXAPTKL:SPIS:YKQYE:NMVVRSXGXH, TVPKPXXAPTQL:SPIS:YKQYE:NMVVRAXGXH, AVPKAXXAPTKL:SPIS:YKQYE:NMVVKAXGXH, KVGKAXXVPTKL:SPIS:YKQYE:EGMSVAEXGXR, KASKAXXVPTKL:SPIS:YKQYE:GMAVSEXGXR, GSAGPXXTPTKM:SPIS:YKQYE:GMVVDRXGXS, STPPTXXVPTRL:SPIS:YKQYE:DMVVESXGXR, HVPKPXXAPTKL:SPIS:YKQYE:NMVVRSXGXH, RVPSTXXAPVKT:SPIS:YKQYE:MIVEEXGXL, ASAAPXXVPQAL:SPIS:YKQYE:MIVRSXKXS, ASASPSSVSQDL:SPIS:YKQYE:MIVKSXKXS, ASASPXXVPQDL:SPIS:YKQYE:MVVKSXKXS, NDEGLEXVPTEE:SPIS:YKQYE:FLQHNKXEXR, NDEGLEXVPTGQ:SPIS:YKQYE:LEEHSQXEXR, SSVKXQPSRVHH:SPIS:YKQYE:RLEEHLEXAXA, RNVQXRPTQVQL:SPIS:YKQYE:TLEDHLAXKXE, GIPEPXXVPTKM:SPIS:YKQYE:NMVVESXAXR, HVTKPTXVPTKL:SPIS:YKQYE:NMVVESXGXH, YVPKPXXVPTKL:SPIS:YKQYE:NMVVESXGXH, TVPKPXXVPTQL:SPIS:YKQYE:NMVVEAXGXH, AVPKAXXVPTKL:SPIS:YKQYE:NMVVEAXGXH, KVGKAXXVPTKL:SPIS:YKQYE:EGMSVVEXGXR, KASKAXXVPTKL:SPIS:YKQYE:GMVVEEXGXR, GSAGPXXVPTKM:SPIS:YKQYE:GMVVERXGXS, AAPASXXVPTRL:SPIS:YKQYE:DMVVEAXGXR, HVPKPXXVPTKL:SPIS:YKQYE:NMVVESXGXH, RVPSTXXVPTKT:SPIS:YKQYE:MIVVEXGXL, ASAAPXXVPTAL:SPIS:YKQYE:MIVVEXKXS, ASASPXXVPTDL:SPIS:YKQYE:MIVVEXKXS, ASASPXXVPTDL:SPIS:YKQYE:MVVVEXKXS, AAPASXXVPARL:SPIS:YKQYE:DMVVEAXGXR, KIPKAXXAPVEL:KPLS:DHHKD:DMVEEGXGXR, GIPEPXXAPVKM:KPLS:DHHKD:NMVEESXAXR, SIPKAXXAPVEL:KPLS:DHHKD:EMVEEGXGXR, HVTKPTXAPVKL:KPLS:DHHKD:NMVEESXGXH, YVPKPXXAPVKL:KPLS:DHHKD:NMVEESXGXH, TVPKPXXAPVQL:KPLS:DHHKD:NMVEEAXGXH, AVPKAXXAPVKL:KPLS:DHHKD:NMVEEAXGXH, KVGKAXXAPVKL:KPLS:DHHKD:EGMSVEEXGXR, KASKAXXAPVKL:KPLS:DHHKD:GMVEEEXGXR, GSAGPXXAPVKM:KPLS:DHHKD:GMVEERXGXS, AAPASXXAPVRL:KPLS:DHHKD:DMVEEAXGXR, STPPTXXAPVRL:KPLS:DHHKD:DMVEESXGXR, HVPKPXXAPVKL:KPLS:DHHKD:NMVEESXGXH, ASAAPXXAPVAL:KPLS:DHHKD:MIVEEXKXS, ASASPXXAPVDL:KPLS:DHHKD:MIVEEXKXS, ASASPXXAPVDL:KPLS:DHHKD:MVVEEXKXS, KIPKAXXVPTEL:KPLS:DHHKD:DMVVEGXGXR, GIPEPXXVPEKM:KPLS:DHHKD:NMTVESXAXR, SIPKAXXVPTEL:KPLS:DHHKD:EMVVEGXGXR, HVTKPTXAPTKL:KPLS:DHHKD:NMVVRSXGXH, YVPKPXXAPTKL:KPLS:DHHKD:NMVVRSXGXH, TVPKPXXAPTQL:KPLS:DHHKD:NMVVRAXGXH, AVPKAXXAPTKL:KPLS:DHHKD:NMVVKAXGXH, KVGKAXXVPTKL:KPLS:DHHKD:EGMSVAEXGXR, KASKAXXVPTKL:KPLS:DHHKD:GMAVSEXGXR, GSAGPXXTPTKM:KPLS:DHHKD:GMVVDRXGXS, AAPASXXVPARL:KPLS:DHHKD:DMVVEAXGXR, STPPTXXVPTRL:KPLS:DHHKD:DMVVESXGXR, HVPKPXXAPTKL:KPLS:DHHKD:NMVVRSXGXH, ASAAPXXVPQAL:KPLS:DHHKD:MIVRSXKXS, ASASPSSVSQDL:KPLS:DHHKD:MIVKSXKXS, ASASPXXVPQDL:KPLS:DHHKD:MVVKSXKXS, NDEGLEXVPTEE:KPLS:DHHKD:FLQHNKXEXR, NDEGLEXVPTGQ:KPLS:DHHKD:LEEHSQXEXR, SSVKXQPSRVHH:KPLS:DHHKD:RLEEHLEXAXA, RNVQXRPTQVQL:KPLS:DHHKD:TLEDHLAXKXE, KIPKAXXVPQEL:EPLP:EQLSN:DMVRXGXGSR, GIPEPXXVPQKM:EPLP:EQLSN:NMVRSSXAXR, SIPKAXXVPQEL:EPLP:EQLSN:EMVRXGXGSR, HVTKPTXVPQKL:EPLP:EQLSN:NMVRSSXGXH, YVPKPXXVPQKL:EPLP:EQLSN:NMVRSSXGXH, TVPKPXXVPQQL:EPLP:EQLSN:NMVRSAXGXH, AVPKAXXVPQKL:EPLP:EQLSN:NMVRSAXGXH, KVGKAXXVPQKL:EPLP:EQLSN:EGMSVRSXGXR, KASKAXXVPQKL:EPLP:EQLSN:GMVRSEXGXR, GSAGPXXVPQKM:EPLP:EQLSN:GMVRSRXGXS, AAPASXXVPQRL:EPLP:EQLSN:DMVRSAXGXR, STPPTXXVPQRL:EPLP:EQLSN:DMVRSSXGXR, HVPKPXXVPQKL:EPLP:EQLSN:NMVRSSXGXH, RVPSTXXVPQKT:EPLP:EQLSN:MIVRSXGXL, ASASPXXVPQDL:EPLP:EQLSN:MIVRSXKXS, ASASPXXVPQDL:EPLP:EQLSN:MVVRSXKXS, KIPKAXXVPTEL:EPLP:EQLSN:DMVVEGXGXR, GIPEPXXVPEKM:EPLP:EQLSN:NMTVESXAXR, SIPKAXXVPTEL:EPLP:EQLSN:EMVVEGXGXR, HVTKPTXAPTKL:EPLP:EQLSN:NMVVRSXGXH, YVPKPXXAPTKL: EPLP:EQLSN:NMVVRSXGXH, TVPKPXXAPTQL:EPLP:EQLSN:NMVVRAXGXH, AVPKAXXAPTKL: EPLP:EQLSN:NMVVKAXGXH, KVGKAXXVPTKL: EPLP:EQLSN:EGMSVAEXGXR, KASKAXXVPTKL: EPLP:EQLSN:GMAVSEXGXR, GSAGPXXTPTKM: EPLP:EQLSN:GMVVDRXGXS, AAPASXXVPARL:EPLP:EQLSN:DMVVEAXGXR, STPPTXXVPTRL:EPLP:EQLSN:DMVVESXGXR, HVPKPXXAPTKL:EPLP:EQLSN:NMVVRSXGXH, RVPSTXXAPVKT:EPLP:EQLSN:MIVEEXGXL, ASASPSSVSQDL:EPLP:EQLSN:MIVKSXKXS, ASASPXXVPQDL:EPLP:EQLSN:MVVKSXKXS, NDEGLEXVPTEE:EPLP:EQLSN:FLQHNKXEXR, NDEGLEXVPTGQ:EPLP:EQLSN:LEEHSQXEXR, SSVKXQPSRVHH:EPLP:EQLSN:RLEEHLEXAXA, RNVQXRPTQVQL:EPLP:EQLSN:TLEDHLAXKXE, KIPKASSVSQEL:EPLT:EQLSN:DMVKXGXGSR, GIPEPSSVSQKM:EPLT:EQLSN:NMVKSSXAXR, SIPKASSVSQEL:EPLT:EQLSN:EMVKXGXGSR, HVTKPTXVSQKL:EPLT:EQLSN:NMVKSSXGXH, YVPKPSSVSQKL:EPLT:EQLSN:NMVKSSXGXH, TVPKPSSVSQQL:EPLT:EQLSN:NMVKSAXGXH, AVPKASSVSQKL:EPLT:EQLSN:NMVKSAXGXH, KVGKASSVSQKL:EPLT:EQLSN:EGMSVKSXGXR, KASKASSVSQKL:EPLT:EQLSN:GMVKSEXGXR, GSAGPSSVSQKM:EPLT:EQLSN:GMVKSRXGXS, AAPASSSVSQRL:EPLT:EQLSN:DMVKSAXGXR, STPPTSSVSQRL:EPLT:EQLSN:DMVKSSXGXR, HVPKPSSVSQKL:EPLT:EQLSN:NMVKSSXGXH, RVPSTSSVSQKT:EPLT:EQLSN:MIVKSXGXL, ASAAPSSVSQAL:EPLT:EQLSN:MIVKSXKXS, ASASPSSVSQDL:EPLT:EQLSN:MVVKSXKXS, KIPKAXXVPTEL:EPLT:EQLSN:DMVVEGXGXR, GIPEPXXVPEKM:EPLT:EQLSN:NMTVESXAXR, SIPKAXXVPTEL:EPLT:EQLSN:EMVVEGXGXR, HVTKPTXAPTKL:EPLT:EQLSN:NMVVRSXGXH, YVPKPXXAPTKL:EPLT:EQLSN:NMVVRSXGXH, TVPKPXXAPTQL:EPLT:EQLSN:NMVVRAXGXH, AVPKAXXAPTKL:EPLT:EQLSN:NMVVKAXGXH, KVGKAXXVPTKL:EPLT:EQLSN:EGMSVAEXGXR, KASKAXXVPTKL:EPLT:EQLSN:GMAVSEXGXR, GSAGPXXTPTKM:EPLT:EQLSN:GMVVDRXGXS, AAPASXXVPARL:EPLT:EQLSN:DMVVEAXGXR, STPPTXXVPTRL:EPLT:EQLSN:DMVVESXGXR, HVPKPXXAPTKL:EPLT:EQLSN:NMVVRSXGXH, RVPSTXXAPVKT:EPLT:EQLSN:MIVEEXGXL, ASAAPXXVPQAL:EPLT:EQLSN:MIVRSXKXS, NDEGLEXVPTEE:EPLT:EQLSN:FLQHNKXEXR, NDEGLEXVPTGQ:EPLT:EQLSN:LEEHSQXEXR, SSVKXQPSRVHH:EPLT:EQLSN:RLEEHLEXAXA, RNVQXRPTQVQL:EPLT:EQLSN:TLEDHLAXKXE, KIPKAXXVPQEL:EPLT:EQLSN:DMVKXGXGSR, GIPEPXXVPQKM:EPLT:EQLSN:NMVKSSXAXR, SIPKAXXVPQEL:EPLT:EQLSN:EMVKXGXGSR, HVTKPTXVPQKL:EPLT:EQLSN:NMVKSSXGXH, YVPKPXXVPQKL:EPLT:EQLSN:NMVKSSXGXH, TVPKPXXVPQQL:EPLT:EQLSN:NMVKSAXGXH, AVPKAXXVPQKL:EPLT:EQLSN:NMVKSAXGXH, KVGKAXXVPQKL:EPLT:EQLSN:EGMSVKSXGXR, KASKAXXVPQKL:EPLT:EQLSN:GMVKSEXGXR, GSAGPXXVPQKM:EPLT:EQLSN:GMVKSRXGXS, AAPASXXVPQRL:EPLT:EQLSN:DMVKSAXGXR, STPPTXXVPQRL:EPLT:EQLSN:DMVKSSXGXR, HVPKPXXVPQKL:EPLT:EQLSN:NMVKSSXGXH, RVPSTXXVPQKT:EPLT:EQLSN:MIVKSXGXL, ASAAPXXVPQAL:EPLT:EQLSN:MIVKSXKXS, ASASPXXVPQDL:EPLT:EQLSN:MIVKSXKXS, NDEGLEXVPTGQ:SNIT:IGEMS:LEQHNQXEXR, KIPKAXXVPTEL:SNIT:IGEMS:DMVVEGXGXR, GIPEPXXVPEKM:SNIT:IGEMS:NMTVESXAXR, SIPKAXXVPTEL:SNIT:IGEMS:EMVVEGXGXR, HVTKPTXAPTKL:SNIT:IGEMS:NMVVRSXGXH, YVPKPXXAPTKL:SNIT:IGEMS:NMVVRSXGXH, TVPKPXXAPTQL:SNIT:IGEMS:NMVVRAXGXH, AVPKAXXAPTKL:SNIT:IGEMS:NMVVKAXGXH, KVGKAXXVPTKL:SNIT:IGEMS:EGMSVAEXGXR, KASKAXXVPTKL:SNIT:IGEMS:GMAVSEXGXR, GSAGPXXTPTKM:SNIT:IGEMS:GMVVDRXGXS, AAPASXXVPARL:SNIT:IGEMS:DMVVEAXGXR, STPPTXXVPTRL:SNIT:IGEMS:DMVVESXGXR, HVPKPXXAPTKL:SNIT:IGEMS:NMVVRSXGXH, RVPSTXXAPVKT:SNIT:IGEMS:MIVEEXGXL, ASAAPXXVPQAL:SNIT:IGEMS:MIVRSXKXS, ASASPSSVSQDL:SNIT:IGEMS:MIVKSXKXS, ASASPXXVPQDL:SNIT:IGEMS:MVVKSXKXS, NDEGLEXVPTGQ:SNIT:IGEMS:LEEHSQXEXR, SSVKXQPSRVHH:SNIT:IGEMS:RLEEHLEXAXA, RNVQXRPTQVQL:SNIT:IGEMS:TLEDHLAXKXE, NDEGLEXVPTEE:SNIT:LGEMS:FLEHXKXESR, KIPKAXXVPTEL:SNIT:LGEMS:DMVVEGXGXR, GIPEPXXVPEKM:SNIT:LGEMS:NMTVESXAXR, SIPKAXXVPTEL:SNIT:LGEMS:EMVVEGXGXR, HVTKPTXAPTKL:SNIT:LGEMS:NMVVRSXGXH, YVPKPXXAPTKL:SNIT:LGEMS:NMVVRSXGXH, TVPKPXXAPTQL:SNIT:LGEMS:NMVVRAXGXH, AVPKAXXAPTKL:SNIT:LGEMS:NMVVKAXGXH, KVGKAXXVPTKL:SNIT:LGEMS:EGMSVAEXGXR, KASKAXXVPTKL:SNIT:LGEMS:GMAVSEXGXR, GSAGPXXTPTKM:SNIT:LGEMS:GMVVDRXGXS, AAPASXXVPARL:SNIT:LGEMS:DMVVEAXGXR, STPPTXXVPTRL:SNIT:LGEMS:DMVVESXGXR, HVPKPXXAPTKL:SNIT:LGEMS:NMVVRSXGXH, RVPSTXXAPVKT:SNIT:LGEMS:MIVEEXGXL, ASAAPXXVPQAL:SNIT:LGEMS:MIVRSXKXS, ASASPSSVSQDL:SNIT:LGEMS:MIVKSXKXS, ASASPXXVPQDL:SNIT:LGEMS:MVVKSXKXS, NDEGLEXVPTEE:SNIT:LGEMS:FLQHNKXEXR, SSVKXQPSRVHH:SNIT:LGEMS:RLEEHLEXAXA, RNVQXRPTQVQL:SNIT:LGEMS:TLEDHLAXKXE, RNVQXRPSRVQL:RSVK:KEVQV:TLEEHLAXKXE, KIP KAXXVPTEL: RSVK:KEVQV:DMVVEGXGXR, GIPEPXXVPEKM:RSVK:KEVQV:NMTVESXAXR, SIP KAXXVPTEL: RSVK:KEVQV: EMVVEGXGXR, HVTKPTXAPTKL: RSVK:KEVQV:NMVVRSXGXH, YVPKPXXAPTKL:RSVK:KEVQV:NMVVRSXGXH, TVPKPXXAPTQL:RSVK:KEVQV:NMVVRAXGXH, AVPKAXXAPTKL:RSVK:KEVQV:NMVVKAXGXH, KVGKAXXVPTKL:RSVK:KEVQV:EGMSVAEXGXR, KASKAXXVPTKL:RSVK:KEVQV:GMAVSEXGXR, GSAGPXXTPTKM:RSVK:KEVQV:GMVVDRXGXS, AAPASXXVPARL: RSVK:KEVQV:DMVVEAXGXR, STPPTXXVPTRL:RSVK:KEVQV:DMVVESXGXR, HVPKPXXAPTKL:RSVK:KEVQV:NMVVRSXGXH, RVPSTXXAPVKT:RSVK:KEVQV:MIVEEXGXL, ASAAPXXVPQAL:RSVK:KEVQV:MIVRSXKXS, ASASPSSVSQDL:RSVK:KEVQV:MIVKSXKXS, ASASPXXVPQDL: RSVK:KEVQV:MVVKSXKXS, NDEGLEXVPTEE:RSVK:KEVQV:FLQHNKXEXR, NDEGLEXVPTGQ:RSVK:KEVQV:LEEHSQXEXR, RNVQXRPTQVQL:RSVK:KEVQV:TLEDHLAXKXE, SSVKXQPTQVHH:RPVQ:KKATV:RLEDHLEXAXA, KIPKAXXVPTEL: RPVQ:KKATV:DMVVEGXGXR, GIPEPXXVPEKM:RPVQ:KKATV:NMTVESXAXR, SIPKAXXVPTEL:RPVQ:KKATV:EMVVEGXGXR, HVTKPTXAPTKL: RPVQ:KKATV:NMVVRSXGXH, YVPKPXXAPTKL:RPVQ:KKATV:NMVVRSXGXH, TVPKPXXAPTQL:RPVQ:KKATV:NMVVRAXGXH, AVPKAXXAPTKL:RPVQ:KKATV:NMVVKAXGXH, KVGKAXXVPTKL: RPVQ:KKATV:EGMSVAEXGXR, KASKAXXVPTKL:RPVQ:KKATV:GMAVSEXGXR, GSAGPXXTPTKM:RPVQ:KKATV:GMVVDRXGXS, AAPASXXVPARL: RPVQ:KKATV:DMVVEAXGXR, STPPTXXVPTRL:RPVQ:KKATV:DMVVESXGXR, HVPKPXXAPTKL:RPVQ:KKATV:NMVVRSXGXH, RVPSTXXAPVKT:RPVQ:KKATV:MIVEEXGXL, ASAAPXXVPQAL:RPVQ:KKATV:MIVRSXKXS, ASASPSSVSQDL:RPVQ:KKATV:MIVKSXKXS, ASASPXXVPQDL: RPVQ:KKATV:MVVKSXKXS, NDEGLEXVPTEE:RPVQ:KKATV:FLQHNKXEXR, NDEGLEXVPTGQ:RPVQ:KKATV:LEEHSQXEXR and SSVKXQPSRVHH:RPVQ:KKATV:RLEEHLEXAXA.

[0432] In particular, in certain embodiments, the quadruplet PEP9:PEP12:PEP2:PEP10 is selected from the group consisting of GIPEPXXVPTKM:SAIS-AA¹⁷-LYL:LKNYQ:NMVVESXAXR, SIPKAXXVPTEL:SAIS-AA¹⁷-LYL:LKNYQ:EMVVEGXGXR, HVTKPTXVPTKL:SAIS-AA¹⁷-LYL:LKNYQ:NMVVESXGXH, YVPKPXXVPTKL:SAIS-AA¹⁷-LYL:LKNYQ:NMVVESXGXH, TVPKPXXVPTQL:SAIS-AA¹⁷-LYL:LKNYQ:NMVVEAXGXH, AVPKAXXVPTKL:SAIS-AA¹⁷-LYL:LKNYQ:NMVVEAXGXH, KVGKAXXVPTKL:SAIS-AA¹⁷-LYL:LKNYQ:EGMSVVEXGXR, KASKAXXVPTKL:SAIS-AA¹⁷-LYL:LKNYQ:GMVVEEXGXR, GSAGPXXVPTKM:SAIS-AA¹⁷-LYL:LKNYQ:GMVVERXGXS, AAPASXXVPTRL:SAIS-AA¹⁷-LYL:LKNYQ:DMVVEAXGXR, STPPTXXVPTRL:SAIS-AA¹⁷-LYL:LKNYQ:DMVVESXGXR, HVPKPXXVPTKL:SAIS-AA¹⁷-LYL:LKNYQ:NMVVESXGXH, RVPSTXXVPTKT:SAIS-AA¹⁷-LYL:LKNYQ:MIVVEXGXL, ASAAPXXVPTAL:SAIS-AA¹⁷-LYL:LKNYQ:MIVVEXKXS, ASASPXXVPTDL:SAIS-AA¹⁷-LYL:LKNYQ:MIVVEXKXS, ASASPXXVPTDL:SAIS-AA¹⁷-LYL:LKNYQ:MVVVEXKXS, NDEGLEXVPTEE:SAIS-AA¹⁷-LYL:LKNYQ:FLVVEKXEXR, NDEGLEXVPTGQ:SAIS-AA¹⁷-LYL:LKNYQ:LEVVEQXEXR, SSVKXQPVPTHH:SAIS-AA¹⁷-LYL:LKNYQ:RLVVELEXAXA, RNVQXRPVPTQL:SAIS-AA¹⁷-LYL:LKNYQ:TLVVELAXKXE, GIPEPXXVPEKM:SAIS-AA¹⁷-LYL:LKNYQ:NMTVESXAXR, HVTKPTXAPTKL:SAIS-AA¹⁷-LYL:LKNYQ:NMVVRSXGXH, YVPKPXXAPTKL:SAIS-AA¹⁷-LYL:LKNYQ:NMVVRSXGXH, TVPKPXXAPTQL:SAIS-AA¹⁷-LYL:LKNYQ:NMVVRAXGXH, AVPKAXXAPTKL:SAIS-AA¹⁷-LYL:LKNYQ:NMVVKAXGXH, KVGKAXXVPTKL:SAIS-AA¹⁷-LYL:LKNYQ:EGMSVAEXGXR, KASKAXXVPTKL:SAIS-AA¹⁷-LYL:LKNYQ:GMAVSEXGXR, GSAGPXXTPTKM:SAIS-AA¹⁷-LYL:LKNYQ:GMVVDRXGXS, AAPASXXVPARL:SAIS-AA¹⁷-LYL:LKNYQ:DMVVEAXGXR, HVPKPXXAPTKL:SAIS-AA¹⁷-LYL:LKNYQ:NMVVRSXGXH, RVPSTXXAPVKT:SAIS-AA¹⁷-LYL:LKNYQ:MIVEEXGXL, ASAAPXXVPQAL:SAIS-AA¹⁷-LYL:LKNYQ:MIVRSXKXS, ASASPXXVSQDL:SAIS-AA¹⁷-LYL:LKNYQ:MIVKSXKXS, ASASPXXVPQDL:SAIS-AA¹⁷-LYL:LKNYQ:MVVKSXKXS, NDEGLEXVPTEE:SAIS-AA¹⁷-LYL:LKNYQ:FLQHNKXEXR, NDEGLEXVPTGQ:SAIS-AA¹⁷-LYL:LKNYQ:LEEHSQXEXR, SSVKXQPSRVHH:SAIS-AA¹⁷-LYL:LKNYQ:RLEEHLEXAXA, RNVQXRPTQVQL:SAIS-AA¹⁷-LYL:LKNYQ:TLEDHLAXKXE, KIPKAXXVPEEL:SSLS-AA¹⁷-LFF:LKVYP:DMTVEGXGXR, SIPKAXXVPEEL:SSLS-AA¹⁷-LFF:LKVYP:EMTVEGXGXR, HVTKPTXVPEKL:SSLS-AA¹⁷-LFF:LKVYP:NMTVESXGXH, YVPKPXXVPEKL:SSLS-AA¹⁷-LFF:LKVYP:NMTVESXGXH, TVPKPXXVPEQL:SSLS-AA¹⁷-LFF:LKVYP:NMTVEAXGXH, AVPKAXXVPEKL:SSLS-AA¹⁷-LFF:LKVYP:NMTVEAXGXH, KVGKAXXVPEKL:SSLS-AA¹⁷-LFF:LKVYP:EGMSTVEXGXR, KASKAXXVPEKL:SSLS-AA¹⁷-LFF:LKVYP:GMTVEEXGXR, GSAGPXXVPEKM:SSLS-AA¹⁷-LFF:LKVYP:GMTVERXGXS, AAPASXXVPERL:SSLS-AA¹⁷-LFF:LKVYP:DMTVEAXGXR, STPPTXXVPERL:SSLS-AA¹⁷-LFF:LKVYP:DMTVESXGXR, HVPKPXXVPEKL:SSLS-AA¹⁷-LFF:LKVYP:NMTVESXGXH, RVPSTXXVPEKT:SSLS-AA¹⁷-LFF:LKVYP:MITVEXGXL, ASAAPXXVPEAL:SSLS-AA¹⁷-LFF:LKVYP:MITVEXKXS, ASASPXXVPEDL:SSLS-AA¹⁷-LFF:LKVYP:MITVEXKXS, ASASPXXVPEDL:SSLS-AA¹⁷-LFF:LKVYP:MVTVEXKXS, NDEGLEXVPEEE:SSLS-AA¹⁷-LFF:LKVYP:FLTVEKXEXR, NDEGLEXVPEGQ:SSLS-AA¹⁷-LFF:LKVYP:LETVEQXEXR, SSVKXQPVPEHH:SSLS-AA¹⁷-LFF:LKVYP:RLTVELEXAXA, RNVQXRPVPEQL:SSLS-AA¹⁷-LFF:LKVYP:TLTVELAXKXE, KIPKAXXVPTEL:SSLS-AA¹⁷-LFF:LKVYP:DMVVEGXGXR, SIPKAXXVPTEL:SSLS-AA¹⁷-LFF:LKVYP:EMVVEGXGXR, HVTKPTXAPTKL:SSLS-AA¹⁷-LFF:LKVYP:NMVVRSXGXH, YVPKPXXAPTKL:SSLS-AA¹⁷-LFF:LKVYP:NMVVRSXGXH, TVPKPXXAPTQL:SSLS-AA¹⁷-LFF:LKVYP:NMVVRAXGXH, AVPKAXXAPTKL:SSLS-AA¹⁷-LFF:LKVYP:NMVVKAXGXH, KVGKAXXVPTKL:SSLS-AA¹⁷-LFF:LKVYP:EGMSVAEXGXR, KASKAXXVPTKL:SSLS-AA¹⁷-LFF:LKVYP:GMAVSEXGXR, GSAGPXXTPTKM:SSLS-AA¹⁷-LFF:LKVYP:GMVVDRXGXS, AAPASXXVPARL:SSLS-AA¹⁷-LFF:LKVYP:DMVVEAXGXR, STPPTXXVPTRL:SSLS-AA¹⁷-LFF:LKVYP:DMVVESXGXR, HVPKPXXAPTKL:SSLS-AA¹⁷-LFF:LKVYP:NMVVRSXGXH, RVPSTXXAPVKT:SSLS-AA¹⁷-LFF:LKVYP:MIVEEXGXL, ASAAPXXVPQAL:SSLS-AA¹⁷-LFF:LKVYP:MIVRSXKXS, ASASPXXVSQDL:SSLS-AA¹⁷-LFF:LKVYP:MIVKSXKXS, ASASPXXVPQDL:SSLS-AA¹⁷-LFF:LKVYP:MVVKSXKXS, NDEGLEXVPTEE:SSLS-AA¹⁷-LFF:LKVYP:FLQHNKXEXR, NDEGLEXVPTGQ:SSLS-AA¹⁷-LFF:LKVYPIEEHSQXEXR, SSVKXQPSRVHH:SSLS-AA¹⁷-LFF:LKVYP:RLEEHLEXAXA, RNVQXRPTQVQL:SSLS-AA¹⁷-LFF:LKVYP:TLEDHLAXKXE, KIPKAXXVPTEL:SAIS-AA¹⁷-LYL:LKNYQ:DMVVEGXGXR, KIPKAXXAPTEL:NAIS-AA¹⁷-LYF:LKKYR:DMVVRGXGXR, GIPEPXXAPTKM:NAIS-AA¹⁷-LYFIKKYR:NMVVRSXAXR, SIPKAXXAPTEL:NAIS-AA¹⁷-LYFIKKYR:EMVVRGXGXR, YVPKPXXAPTKL:NAIS-AA¹⁷-LYFIKKYR:NMVVRSXGXH, TVPKPXXAPTQL:NAIS-AA¹⁷-LYFIKKYR:NMVVRAXGXH, AVPKAXXAPTKL:NAIS-AA¹⁷-LYFIKKYR:NMVVRAXGXH, KVGKAXXAPTKL:NAIS-AA¹⁷-LYF:LKKYR:EGMSVVRXGXR, KASKAXXAPTKL:NAIS-AA¹⁷-LYFIKKYR:GMVVREXGXR, GSAGPXXAPTKM:NAIS-AA¹⁷-LYFIKKYR:GMVVRRXGXS, AAPASXXAPTRL:NAIS-AA¹⁷-LYF:LKKYR:DMVVRAXGXR, STPPTXXAPTRL:NAIS-AA¹⁷-LYFIKKYR:DMVVRSXGXR, HVPKPXXAPTKL:NAIS-AA¹⁷-LYFIKKYR:NMVVRSXGXH, RVPSTXXAPTKT:NAIS-AA¹⁷-LYFIKKYR:MIVVRXGXL, ASAAPXXAPTAL:NAIS-AA¹⁷-LYF:LKKYR:MIVVRXKXS, ASASPXXAPTDL:NAIS-AA¹⁷-LYFIKKYR:MIVVRXKXS, ASASPXXAPTDL:NAIS-AA¹⁷-LYF:LKKYR:MVVVRXKXS, NDEGLESAPTEE:NAIS-AA¹⁷-LYFIKKYR:FLVVRKXEXR, NDEGLESAPTGQ:NAIS-AA¹⁷-LYFIKKYR:LEVVRQXEXR, SSVKXQPAPTHH:NAIS-AA¹⁷-LYFIKKYR:RLVVRLEXAXA, RNVQXRPAPTQL:NAIS-AA¹⁷-LYFIKKYR:TLVVRLAXKXE, KIPKAXXVPTEL:NAIS-AA¹⁷-LYFIKKYR:DMVVEGXGXR, GIPEPXXVPEKM:NAIS-AA¹⁷-LYF:LKKYR:NMTVESXAXR, SIPKAXXVPTEL:NAIS-AA¹⁷-LYFIKKYR:EMVVEGXGXR, AVPKAXXAPTKL:NAIS-AA¹⁷-LYFIKKYR:NMVVKAXGXH, KVGKAXXVPTKL:NAIS-AA¹⁷-LYF:LKKYR:EGMSVAEXGXR, KASKAXXVPTKL:NAIS-AA¹⁷-LYFIKKYR:GMAVSEXGXR, GSAGPXXTPTKM:NAIS-AA¹⁷-LYFIKKYR:GMVVDRXGXS, AAPASXXVPARL:NAIS-AA¹⁷-LYF:LKKYR:DMVVEAXGXR, STPPTXXVPTRL:NAIS-AA¹⁷-LYFIKKYR:DMVVESXGXR, RVPSTXXAPVKT:NAIS-AA¹⁷-LYFIKKYR:MIVEEXGXL, ASAAPXXVPQAL:NAIS-AA¹⁷-LYF:LKKYR:MIVRSXKXS, ASASPXXVSQDL:NAIS-AA¹⁷-LYF:LKKYR:MIVKSXKXS, ASASPXXVPQDL:NAIS-AA¹⁷-LYFIKKYR:MVVKSXKXS, NDEGLEXVPTEE:NAIS-AA¹⁷-LYF:LKKYR:FLQHNKXEXR, NDEGLEXVPTGQ:NAIS-AA¹⁷-LYFIKKYR:LEEHSQXEXR, SSVKXQPSRVHH:NAIS-AA¹⁷-LYFIKKYR:RLEEHLEXAXA, RNVQXRPTQVQL:NAIS-AA¹⁷-LYF:LKKYR:TLEDHLAXKXE, HVTKPTXAPTKL:NAIS-AA¹⁷-LYFIKKYR:NMVVRSXGXH, KIPKAXXAPTEL:SATS-AA¹⁷-LYY:LRKHR:DMVVKGXGXR, GIPEPXXAPTKM:SATS-AA¹⁷-LYY:LRKHR:NMVVKSXAXR, SIPKAXXAPTEL:SATS-AA¹⁷-LYY:LRKHR:EMVVKGXGXR, HVTKPTXAPTKL:SATS-AA¹⁷-LYY:LRKHR:NMVVKSXGXH, YVPKPXXAPTKL:SATS-AA¹⁷-LYY:LRKHR:NMVVKSXGXH, TVPKPXXAPTQL:SATS-AA¹⁷-LYY:LRKHR:NMVVKAXGXH, KVGKAXXAPTKL:SATS-AA¹⁷-LYY:LRKHR:EGMSVVKXGXR, KASKAXXAPTKL:SATS-AA¹⁷-LYY:LRKHR:GMVVKEXGXR, GSAGPXXAPTKM:SATS-AA¹⁷-LYY:LRKHR:GMVVKRXGXS, AAPASXXAPTRL:SATS-AA¹⁷-LYY:LRKHR:DMVVKAXGXR, STPPTXXAPTRL:SATS-AA¹⁷-LYY:LRKHR:DMVVKSXGXR, HVPKPXXAPTKL:SATS-AA¹⁷-LYY:LRKHR:NMVVKSXGXH, RVPSTXXAPTKT:SATS-AA¹⁷-LYY:LRKHR:MIVVKXGXL, ASAAPXXAPTAL:SATS-AA¹⁷-LYY:LRKHR:MIVVKXKXS, ASASPXXAPTDL:SATS-AA¹⁷-LYY:LRKHR:MIVVKXKXS, ASASPXXAPTDL:SATS-AA¹⁷-LYY:LRKHR:MVVVKXKXS, NDEGLESAPTEE:SATS-AA¹⁷-LYY:LRKHR:FLVVKKXEXR, NDEGLESAPTGQ:SATS-AA¹⁷-LYY:LRKHR:LEVVKQXEXR, SSVKXQPAPTHH:SATS-AA¹⁷-LYY:LRKHR:RLVVKLEXAXA, RNVQXRPAPTQL:SATS-AA¹⁷-LYY:LRKHR:TLVVKLAXKXE, KIPKAXXVPTEL:SATS-AA¹⁷-LYY:LRKHR:DMVVEGXGXR, GIPEPXXVPEKM:SATS-AA¹⁷-LYY:LRKHR:NMTVESXAXR, SIPKAXXVPTEL:SATS-AA¹⁷-LYY:LRKHR:EMVVEGXGXR, HVTKPTXAPTKL:SATS-AA¹⁷-LYY:LRKHR:NMVVRSXGXH, YVPKPXXAPTKL:SATS-AA¹⁷-LYY:LRKHR:NMVVRSXGXH, TVPKPXXAPTQL:SATS-AA¹⁷-LYY:LRKHR:NMVVRAXGXH, KVGKAXXVPTKL:SATS-AA¹⁷-LYY:LRKHR:EGMSVAEXGXR, KASKAXXVPTKL:SATS-AA¹⁷-LYY:LRKHR:GMAVSEXGXR, GSAGPXXTPTKM:SATS-AA¹⁷-LYY:LRKHR:GMVVDRXGXS, AAPASXXVPARL:SATS-AA¹⁷-LYY:LRKHR:DMVVEAXGXR, STPPTXXVPTRL:SATS-AA¹⁷-LYY:LRKHR:DMVVESXGXR, HVPKPXXAPTKL:SATS-AA¹⁷-LYY:LRKHR:NMVVRSXGXH, RVPSTXXAPVKT:SATS-AA¹⁷-LYY:LRKHR:MIVEEXGXL, ASAAPXXVPQAL:SATS-AA¹⁷-LYY:LRKHR:MIVRSXKXS, ASASPXXVSQDL:SATS-AA¹⁷-LYY:LRKHR:MIVKSXKXS, ASASPXXVPQDL:SATS-AA¹⁷-LYY:LRKHR:MVVKSXKXS, NDEGLEXVPTEE:SATS-AA¹⁷-LYY:LRKHR:FLQHNKXEXR, NDEGLEXVPTGQ:SATS-AA¹⁷-LYY:LRKHR:LEEHSQXEXR, SSVKXQPSRVHH:SATS-AA¹⁷-LYY:LRKHR:RLEEHLEXAXA, RNVQXRPTQVQL:SATS-AA¹⁷-LYY:LRKHR:TLEDHLAXKXE, KIPKAXXVPTEL:SPIS-AA¹⁷-LYK:LKYHY:DMVAEGXGXR, GIPEPXXVPTKM:SPIS-AA¹⁷-LYK:LKYHY:NMVAESXAXR, SIPKAXXVPTEL:SPIS-AA¹⁷-LYK:LKYHY:EMVAEGXGXR, HVTKPTXVPTKL:SPIS-AA¹⁷-LYK:LKYHY:NMVAESXGXH, YVPKPXXVPTKL:SPIS-AA¹⁷-LYK:LKYHY:NMVAESXGXH, TVPKPXXVPTQL:SPIS-AA¹⁷-LYK:LKYHY:NMVAEAXGXH, AVPKAXXVPTKL:SPIS-AA¹⁷-LYK:LKYHY:NMVAEAXGXH, KASKAXXVPTKL:SPIS-AA¹⁷-LYK:LKYHY:GMVAEEXGXR, GSAGPXXVPTKM:SPIS-AA¹⁷-LYK:LKYHY:GMVAERXGXS, AAPASXXVPTRL:SPIS-AA¹⁷-LYK:LKYHY:DMVAEAXGXR, STPPTXXVPTRL:SPIS-AA¹⁷-LYK:LKYHY:DMVAESXGXR, HVPKPXXVPTKL:SPIS-AA¹⁷-LYK:LKYHY:NMVAESXGXH, RVPSTXXVPTKT:SPIS-AA¹⁷-LYK:LKYHY:MIVAEXGXL, ASAAPXXVPTAL:SPIS-AA¹⁷-LYKIKYHY:MIVAEXKXS, ASASPXXVPTDL:SPIS-AA¹⁷-LYK:LKYHY:MIVAEXKXS, ASASPXXVPTDL:SPIS-AA¹⁷-LYK:LKYHY:MVVAEXKXS, NDEGLEXVPTEE:SPIS-AA¹⁷-LYKIKYHY:FLVAEKXEXR, NDEGLEXVPTGQ:SPIS-AA¹⁷-LYK:LKYHY:LEVAEQXEXR, SSVKXQPVPTHH:SPIS-AA¹⁷-LYK:LKYHY:RLVAELEXAXA, RNVQXRPVPTQL:SPIS-AA¹⁷-LYK:LKYHY:TLVAELAXKXE, KIPKAXXVPTEL:SPIS-AA¹⁷-LYK:LKYHY:DMVVEGXGXR, GIPEPXXVPEKM:SPIS-AA¹⁷-LYK:LKYHY:NMTVESXAXR, SIPKAXXVPTEL:SPIS-AA¹⁷-LYKIKYHY:EMVVEGXGXR, HVTKPTXAPTKL:SPIS-AA¹⁷-LYK:LKYHY:NMVVRSXGXH, YVPKPXXAPTKL:SPIS-AA¹⁷-LYK:LKYHY:NMVVRSXGXH, TVPKPXXAPTQL:SPIS-AA¹⁷-LYK:LKYHY:NMVVRAXGXH, AVPKAXXAPTKL:SPIS-AA¹⁷-LYK:LKYHY:NMVVKAXGXH, KASKAXXVPTKL:SPIS-AA¹⁷-LYK:LKYHY:GMAVSEXGXR, GSAGPXXTPTKM:SPIS-AA¹⁷-LYK:LKYHY:GMVVDRXGXS, AAPASXXVPARL:SPIS-AA¹⁷-LYKIKYHY:DMVVEAXGXR, STPPTXXVPTRL:SPIS-AA¹⁷-LYK:LKYHY:DMVVESXGXR, HVPKPXXAPTKL:SPIS-AA¹⁷-LYK:LKYHY:NMVVRSXGXH, RVPSTXXAPVKT:SPIS-AA¹⁷-LYK:LKYHY:MIVEEXGXL, ASAAPXXVPQAL:SPIS-AA¹⁷-LYK:LKYHY:MIVRSXKXS, ASASPXXVSQDL:SPIS-AA¹⁷-LYK:LKYHY:MIVKSXKXS, ASASPXXVPQDL:SPIS-AA¹⁷-LYK:LKYHY:MVVKSXKXS, NDEGLEXVPTEE:SPIS-AA¹⁷-LYK:LKYHY:FLQHNKXEXR, NDEGLEXVPTGQ:SPIS-AA¹⁷-LYK:LKYHY:LEEHSQXEXR, SSVKXQPSRVHH:SPIS-AA¹⁷-LYK:LKYHY:RLEEHLEXAXA, RNVQXRPTQVQL:SPIS-AA¹⁷-LYK:LKYHY:TLEDHLAXKXE, KIPKAXXVPTEL:EPIS-AA¹⁷-LYL:KFKYE:DMAVXGXGSR, GIPEPXXVPTKM:EPIS-AA¹⁷-LYL:KFKYE:NMAVSSXAXR, SIPKAXXVPTEL:EPIS-AA¹⁷-LYL:KFKYE:EMAVXGXGSR, HVTKPTXVPTKL:EPIS-AA¹⁷-LYL:KFKYE:NMAVSSXGXH, YVPKPXXVPTKL:EPIS-AA¹⁷-LYL:KFKYE:NMAVSSXGXH, TVPKPXXVPTQL:EPIS-AA¹⁷-LYL:KFKYE:NMAVSAXGXH, AVPKAXXVPTKL:EPIS-AA¹⁷-LYL:KFKYE:NMAVSAXGXH, KVGKAXXVPTKL:EPIS-AA¹⁷-LYL:KFKYE:EGMSAVSXGXR, GSAGPXXVPTKM:EPIS-AA¹⁷-LYL:KFKYE:GMAVSRXGXS, AAPASXXVPTRL:EPIS-AA¹⁷-LYL:KFKYE:DMAVSAXGXR, STPPTXXVPTRL:EPIS-AA¹⁷-LYL:KFKYE:DMAVSSXGXR, HVPKPXXVPTKL:EPIS-AA¹⁷-LYL:KFKYE:NMAVSSXGXH, RVPSTXXVPTKT:EPIS-AA¹⁷-LYL:KFKYE:MIAVSXGXL, ASAAPXXVPTAL:EPIS-AA¹⁷-LYL:KFKYE:MIAVSXKXS, ASASPXXVPTDLEPIS-AA¹⁷-LYL:KFKYE:MIAVSXKXS, ASASPXXVPTIDLEPIS-AA¹⁷-LYL:KFKYE:MVAVSXKXS, NDEGLEXVPTEE:EPIS-AA¹⁷-LYL:KFKYE:FLAVXKXESR, NDEGLEXVPTGQ:EPIS-AA¹⁷-LYL:KFKYE:LEAVSQXEXR, SSVKXQPVPTHH:EPIS-AA¹⁷-LYL:KFKYE:RLAVSLEXAXA, RNVQXRPVPTQL:EPIS-AA¹⁷-LYL:KFKYE:TLAVSLAXKXE, KIPKAXXVPTEL:EPIS-AA¹⁷-LYL:KFKYE:DMVVEGXGXR, GIPEPXXVPEKM:EPIS-AA¹⁷-LYL:KFKYE:NMTVESXAXR, SIPKAXXVPTEL:EPIS-AA¹⁷-LYL:KFKYE:EMVVEGXGXR, HVTKPTXAPTKL:EPIS-AA¹⁷-LYL:KFKYE:NMVVRSXGXH, YVPKPXXAPTKL:EPIS-AA¹⁷-LYL:KFKYE:NMVVRSXGXH, TVPKPXXAPTQL:EPIS-AA¹⁷-LYL:KFKYE:NMVVRAXGXH, AVPKAXXAPTKL:EPIS-AA¹⁷-LYL:KFKYE:NMVVKAXGXH, KVGKAXXVPTKL:EPIS-AA¹⁷-LYL:KFKYE:EGMSVAEXGXR, GSAGPXXTPTKM:EPIS-AA¹⁷-LYL:KFKYE:GMVVDRXGXS, AAPASXXVPARL:EPIS-AA¹⁷-LYL:KFKYE:DMVVEAXGXR, STPPTXXVPTRL:EPIS-AA¹⁷-LYL:KFKYE:DMVVESXGXR, HVPKPXXAPTKL:EPIS-AA¹⁷-LYL:KFKYE:NMVVRSXGXH, RVPSTXXAPVKT:EPIS-AA¹⁷-LYL:KFKYE:MIVEEXGXL, ASAAPXXVPQAL:EPIS-AA¹⁷-LYL:KFKYE:MIVRSXKXS, ASASPXXVSQDLEPIS-AA¹⁷-LYL:KFKYE:MIVKSXKXS, ASASPXXVPQDLEPIS-AA¹⁷-LYL:KFKYE:MVVKSXKXS, NDEGLEXVPTEE:EPIS-AA¹⁷-LYL:KFKYE:FLQHNKXEXR, NDEGLEXVPTGQ:EPIS-AA¹⁷-LYL:KFKYE:LEEHSQXEXR, SSVKXQPSRVHH:EPIS-AA¹⁷-LYL:KFKYE:RLEEHLEXAXA, RNVQXRPTQVQL:EPIS-AA¹⁷-LYL:KFKYE:TLEDHLAXKXE, KIPKASSTPTEL:SPIN-AA¹⁷-LYF:YGKIP:DMVVDGXGXR, GIPEPXXTPTKM:SPIN-AA¹⁷-LYF:YGKIP:NMVVDSXAXR, SIPKASSTPTEL:SPIN-AA¹⁷-LYF:YGKIP:EMVVDGXGXR, HVTKPTSTPTKL:SPIN-AA¹⁷-LYF:YGKIP:NMVVDSXGXH, YVPKPXXTPTKL:SPIN-AA¹⁷-LYF:YGKIP:NMVVDSXGXH, TVPKPXXTPTQL:SPIN-AA¹⁷-LYF:YGKIP:NMVVDAXGXH, AVPKASSTPTKL:SPIN-AA¹⁷-LYF:YGKIP:NMVVDAXGXH, KVGKASSTPTKL:SPIN-AA¹⁷-LYF:YGKIP:EGMSVVDXGXR, KASKASSTPTKL:SPIN-AA¹⁷-LYF:YGKIP:GMVVDEXGXR, AAPASSSTPTRL:SPIN-AA¹⁷-LYF:YGKIP:DMVVDAXGXR, STPPTSSTPTRL:SPIN-AA¹⁷-LYF:YGKIP:DMVVDSXGXR, HVPKPXXTPTKL:SPIN-AA¹⁷-LYF:YGKIP:NMVVDSXGXH, RVPSTSSTPTKT:SPIN-AA¹⁷-LYF:YGKIP:MIVVDXGXL, ASAAPXXTPTAL:SPIN-AA¹⁷-LYF:YGKIP:MIVVDXKXS, ASASPXXTPTDL:SPIN-AA¹⁷-LYF:YGKIP:MIVVDXKXS, ASASPXXTPTDL:SPIN-AA¹⁷-LYF:YGKIP:MVVVDXKXS, NDEGLESTPTEE:SPIN-AA¹⁷-LYF:YGKIP:FLVVDKXEXR, NDEGLESTPTGQ:SPIN-AA¹⁷-LYF:YGKIP:LEVVDQXEXR, SSVKXQPTPTHH:SPIN-AA¹⁷-LYF:YGKIP:RLVVDLEXAXA, RNVQXRPTPTQL:SPIN-AA¹⁷-LYF:YGKIP:TLVVDLAXKXE, KIPKAXXVPTEL:SPIN-AA¹⁷-LYF:YGKIP:DMVVEGXGXR, GIPEPXXVPEKM:SPIN-AA¹⁷-LYF:YGKIP:NMTVESXAXR, SIPKAXXVPTEL:SPIN-AA¹⁷-LYF:YGKIP:EMVVEGXGXR, HVTKPTXAPTKL:SPIN-AA¹⁷-LYF:YGKIP:NMVVRSXGXH, YVPKPXXAPTKL:SPIN-AA¹⁷-LYF:YGKIP:NMVVRSXGXH, TVPKPXXAPTQL:SPIN-AA¹⁷-LYF:YGKIP:NMVVRAXGXH, AVPKAXXAPTKL:SPIN-AA¹⁷-LYF:YGKIP:NMVVKAXGXH, KVGKAXXVPTKL:SPIN-AA¹⁷-LYF:YGKIP:EGMSVAEXGXR, KASKAXXVPTKL:SPIN-AA¹⁷-LYF:YGKIP:GMAVSEXGXR, AAPASXXVPARL:SPIN-AA¹⁷-LYF:YGKIP:DMVVEAXGXR, STPPTXXVPTRL:SPIN-AA¹⁷-LYF:YGKIP:DMVVESXGXR, HVPKPXXAPTKL:SPIN-AA¹⁷-LYF:YGKIP:NMVVRSXGXH, RVPSTXXAPVKT:SPIN-AA¹⁷-LYF:YGKIP:MIVEEXGXL, ASAAPXXVPQAL:SPIN-AA¹⁷-LYF:YGKIP:MIVRSXKXS, ASASPXXVSQDL:SPIN-AA¹⁷-LYF:YGKIP:MIVKSXKXS, ASASPXXVPQDL:SPIN-AA¹⁷-LYF:YGKIP:MVVKSXKXS, NDEGLEXVPTEE:SPIN-AA¹⁷-LYF:YGKIP:FLQHNKXEXR, NDEGLEXVPTGQ:SPIN-AA¹⁷-LYF:YGKIP:LEEHSQXEXR, SSVKXQPSRVHH:SPIN-AA¹⁷-LYF:YGKIP:RLEEHLEXAXA, RNVQXRPTQVQL:SPIN-AA¹⁷-LYF:YGKIP:TLEDHLAXKXE, KIPKAXXVPAEL:SPIS-AA¹⁷-LYI:YKQYE:DMVVEGXGXR, GIPEPXXVPAKM:SPIS-AA¹⁷-LYI:YKQYE:NMVVESXAXR, SIPKAXXVPAEL:SPIS-AA¹⁷-LYI:YKQYE:EMVVEGXGXR, HVTKPTXVPAKL:SPIS-AA¹⁷-LYI:YKQYE:NMVVESXGXH, YVPKPXXVPAKL:SPIS-AA¹⁷-LYI:YKQYE:NMVVESXGXH, TVPKPXXVPAQL:SPIS-AA¹⁷-LYI:YKQYE:NMVVEAXGXH, AVPKAXXVPAKL:SPIS-AA¹⁷-LYI:YKQYE:NMVVEAXGXH, KVGKAXXVPAKL:SPIS-AA¹⁷-LYI:YKQYE:EGMSVVEXGXR, KASKAXXVPAKL:SPIS-AA¹⁷-LYI:YKQYE:GMVVEEXGXR, GSAGPXXVPAKM:SPIS-AA¹⁷-LYI:YKQYE:GMVVERXGXS, STPPTXXVPARL:SPIS-AA¹⁷-LYI:YKQYE:DMVVESXGXR, HVPKPXXVPAKL:SPIS-AA¹⁷-LYI:YKQYE:NMVVESXGXH, RVPSTXXVPAKT:SPIS-AA¹⁷-LYI:YKQYE:MIVVEXGXL, ASAAPXXVPAAL:SPIS-AA¹⁷-LYI:YKQYE:MIVVEXKXS, ASASPXXVPADL:SPIS-AA¹⁷-LYI:YKQYE:MIVVEXKXS, ASASPXXVPADL:SPIS-AA¹⁷-LYI:YKQYE:MVVVEXKXS, NDEGLEXVPAEE:SPIS-AA¹⁷-LYI:YKQYE:FLVVEKXEXR, NDEGLEXVPAGQ:SPIS-AA¹⁷-LYI:YKQYE:LEVVEQXEXR, SSVKXQPVPAHH:SPIS-AA¹⁷-LYI:YKQYE:RLVVELEXAXA, RNVQXRPVPAQL:SPIS-AA¹⁷-LYI:YKQYE:TLVVELAXKXE, KIPKAXXVPTEL:SPIS-AA¹⁷-LYI:YKQYE:DMVVEGXGXR, GIPEPXXVPEKM:SPIS-AA¹⁷-LYI:YKQYE:NMTVESXAXR, SIPKAXXVPTEL:SPIS-AA¹⁷-LYI:YKQYE:EMVVEGXGXR, HVTKPTXAPTKL:SPIS-AA¹⁷-LYI:YKQYE:NMVVRSXGXH, YVPKPXXAPTKL:SPIS-AA¹⁷-LYI:YKQYE:NMVVRSXGXH, TVPKPXXAPTQL:SPIS-AA¹⁷-LYI:YKQYE:NMVVRAXGXH, AVPKAXXAPTKL:SPIS-AA¹⁷-LYI:YKQYE:NMVVKAXGXH, KVGKAXXVPTKL:SPIS-AA¹⁷-LYI:YKQYE:EGMSVAEXGXR, KASKAXXVPTKL:SPIS-AA¹⁷-LYI:YKQYE:GMAVSEXGXR, GSAGPXXTPTKM:SPIS-AA¹⁷-LYI:YKQYE:GMVVDRXGXS, STPPTXXVPTRL:SPIS-AA¹⁷-LYI:YKQYE:DMVVESXGXR, HVPKPXXAPTKL:SPIS-AA¹⁷-LYI:YKQYE:NMVVRSXGXH, RVPSTXXAPVKT:SPIS-AA¹⁷-LYI:YKQYE:MIVEEXGXL, ASAAPXXVPQAL:SPIS-AA¹⁷-LYI:YKQYE:MIVRSXKXS, ASASPXXVSQDL:SPIS-AA¹⁷-LYI:YKQYE:MIVKSXKXS, ASASPXXVPQDL:SPIS-AA¹⁷-LYI:YKQYE:MVVKSXKXS, NDEGLEXVPTEE:SPIS-AA¹⁷-LYI:YKQYE:FLQHNKXEXR, NDEGLEXVPTGQ:SPIS-AA¹⁷-LYI:YKQYE:LEEHSQXEXR, SSVKXQPSRVHH:SPIS-AA¹⁷-LYI:YKQYE:RLEEHLEXAXA, RNVQXRPTQVQL:SPIS-AA¹⁷-LYI:YKQYE:TLEDHLAXKXE, KIPKAXXVPTEL:SPIS-AA¹⁷-LRYKQYE:DMVVEGXGXR, GIPEPXXVPTKM:SPIS-AA¹⁷-LRYKQYE:NMVVESXAXR, SIPKAXXVPTEL:SPIS-AA¹⁷-LFI:YKQYE:EMVVEGXGXR, HVTKPTXVPTKL:SPIS-AA¹⁷-LFLYKQYE:NMVVESXGXH, YVPKPXXVPTKL:SPIS-AA¹⁷-LFLYKQYE:NMVVESXGXH, TVPKPXXVPTQL:SPIS-AA¹⁷-LFI:YKQYE:NMVVEAXGXH, AVPKAXXVPTKL:SPIS-AA¹⁷-LFI:YKQYE:NMVVEAXGXH, KVGKAXXVPTKL:SPIS-AA¹⁷-LRYKQYE:EGMSVVEXGXR, KASKAXXVPTKL:SPIS-AA¹⁷-LFI:YKQYE:GMVVEEXGXR, GSAGPXXVPTKM:SPIS-AA¹⁷-LRYKQYE:GMVVERXGXS, AAPASXXVPTRL:SPIS-AA¹⁷-LRYKQYE:DMVVEAXGXR, HVPKPXXVPTKL:SPIS-AA¹⁷-LFI:YKQYE:NMVVESXGXH, RVPSTXXVPTKT:SPIS-AA¹⁷-LRYKQYE:MIVVEXGXL, ASAAPXXVPTAL:SPIS-AA¹⁷-LRYKQYE:MIVVEXKXS, ASASPXXVPTDL:SPIS-AA¹⁷-LFI:YKQYE:MIVVEXKXS, ASASPXXVPTDL:SPIS-AA¹⁷-LFINKQYE:MVVVEXKXS, NDEGLEXVPTEE:SPIS-AA¹⁷-LRYKQYE:FLVVEKXEXR, NDEGLEXVPTGQ:SPIS-AA¹⁷-LFI:YKQYE:LEVVEQXEXR, SSVKXQPVPTHH:SPIS-AA¹⁷-LFINKQYE:RLVVELEXAXA, RNVQXRPVPTQL:SPIS-AA¹⁷-LRYKQYE:TLVVELAXKXE, GIPEPXXVPEKM:SPIS-AA¹⁷-LFI:YKQYE:NMTVESXAXR, HVTKPTXAPTKL:SPIS-AA¹⁷-LFLYKQYE:NMVVRSXGXH, YVPKPXXAPTKL:SPIS-AA¹⁷-LFLYKQYE:NMVVRSXGXH, TVPKPXXAPTQL:SPIS-AA¹⁷-LFI:YKQYE:NMVVRAXGXH, AVPKAXXAPTKL:SPIS-AA¹⁷-LRYKQYE:NMVVKAXGXH, KVGKAXXVPTKL:SPIS-AA¹⁷-LRYKQYE:EGMSVAEXGXR, KASKAXXVPTKL:SPIS-AA¹⁷-LFI:YKQYE:GMAVSEXGXR, GSAGPXXTPTKM:SPIS-AA¹⁷-LRYKQYE:GMVVDRXGXS, AAPASXXVPARL:SPIS-AA¹⁷-LRYKQYE:DMVVEAXGXR, HVPKPXXAPTKL:SPIS-AA¹⁷-LFI:YKQYE:NMVVRSXGXH, RVPSTXXAPVKT:SPIS-AA¹⁷-LFINKQYE:MIVEEXGXL, ASAAPXXVPQAL:SPIS-AA¹⁷-LFINKQYE:MIVRSXKXS, ASASPXXVSQDL:SPIS-AA¹⁷-LRYKQYE:MIVKSXKXS, ASASPXXVPQDL:SPIS-AA¹⁷-LFINKQYE:MVVKSXKXS, NDEGLEXVPTEE:SPIS-AA¹⁷-LRYKQYE:FLQHNKXEXR, NDEGLEXVPTGQ:SPIS-AA¹⁷-LFI:YKQYE:LEEHSQXEXR, SSVKXQPSRVHH:SPIS-AA¹⁷-LRYKQYE:RLEEHLEXAXA, RNVQXRPTQVQL:SPIS-AA¹⁷-LRYKQYE:TLEDHLAXKXE, KIPKAXXAPVEL:KPLS-AA¹⁷-LYV:DHHKD:DMVEEGXGXR, GIPEPXXAPVKM:KPLS-AA¹⁷-LYV:DHHKD:NMVEESXAXR, SIPKAXXAPVEL:KPLS-AA¹⁷-LYV:DHHKD:EMVEEGXGXR, HVTKPTXAPVKL:KPLS-AA¹⁷-LYV:DHHKD:NMVEESXGXH, YVPKPXXAPVKL:KPLS-AA¹⁷-LYV:DHHKD:NMVEESXGXH, TVPKPXXAPVQL:KPLS-AA¹⁷-LYV:DHHKD:NMVEEAXGXH, AVPKAXXAPVKL:KPLS-AA¹⁷-LYV:DHHKD:NMVEEAXGXH, KVGKAXXAPVKL:KPLS-AA¹⁷-LYV:DHHKD:EGMSVEEXGXR, KASKAXXAPVKL:KPLS-AA¹⁷-LYV:DHHKD:GMVEEEXGXR, GSAGPXXAPVKM:KPLS-AA¹⁷-LYV:DHHKD:GMVEERXGXS, AAPASXXAPVRL:KPLS-AA¹⁷-LYV:DHHKD:DMVEEAXGXR, STPPTXXAPVRL:KPLS-AA¹⁷-LYV:DHHKD:DMVEESXGXR, HVPKPXXAPVKL:KPLS-AA¹⁷-LYV:DHHKD:NMVEESXGXH, ASAAPXXAPVAL:KPLS-AA¹⁷-LYV:DHHKD:MIVEEXKXS, ASASPXXAPVDL:KPLS-AA¹⁷-LYV:DHHKD:MIVEEXKXS, ASASPXXAPVDL:KPLS-AA¹⁷-LYV:DHHKD:MVVEEXKXS, NDEGLESAPVEE:KPLS-AA¹⁷-LYV:DHHKD:FLVEEKXEXR, NDEGLESAPVGQ:KPLS-AA¹⁷-LYV:DHHKD:DLEVEEQXEXR, SSVKXQPAPVHH:KPLS-AA¹⁷-LYV:DHHKD:RLVEELEXAXA, RNVQXRPAPVQL:KPLS-AA¹⁷-LYV:DHHKD:TLVEELAXKXE, KIPKAXXVPTEL:KPLS-AA¹⁷-LYV:DHHKD:DMVVEGXGXR, GIPEPXXVPEKM:KPLS-AA¹⁷-LYV:DHHKD:NMTVESXAXR, SIPKAXXVPTEL:KPLS-AA¹⁷-LYV:DHHKD:EMVVEGXGXR, HVTKPTXAPTKL:KPLS-AA¹⁷-LYV:DHHKD:NMVVRSXGXH, YVPKPXXAPTKL:KPLS-AA¹⁷-LYV:DHHKD:NMVVRSXGXH, TVPKPXXAPTQL:KPLS-AA¹⁷-LYV:DHHKD:NMVVRAXGXH, AVPKAXXAPTKL:KPLS-AA¹⁷-LYV:DHHKD:NMVVKAXGXH, KVGKAXXVPTKL:KPLS-AA¹⁷-LYV:DHHKD:EGMSVAEXGXR, KASKAXXVPTKL:KPLS-AA¹⁷-LYV:DHHKD:GMAVSEXGXR, GSAGPXXTPTKM:KPLS-AA¹⁷-LYV:DHHKD:GMVVDRXGXS, AAPASXXVPARL:KPLS-AA¹⁷-LYV:DHHKD:DMVVEAXGXR, STPPTXXVPTRL:KPLS-AA¹⁷-LYV:DHHKD:DMVVESXGXR, HVPKPXXAPTKL:KPLS-AA¹⁷-LYV:DHHKD:NMVVRSXGXH, ASAAPXXVPQAL:KPLS-AA¹⁷-LYV:DHHKD:MIVRSXKXS, ASASPXXVSQDL:KPLS-AA¹⁷-LYV:DHHKD:MIVKSXKXS, ASASPXXVPQDL:KPLS-AA¹⁷-LYV:DHHKD:MVVKSXKXS, NDEGLEXVPTEE:KPLS-AA¹⁷-LYV:DHHKD:FLQHNKXEXR, NDEGLEXVPTGQ:KPLS-AA¹⁷-LYV:DHHKID:LEEHSQXEXR, SSVKXQPSRVHH:KPLS-AA¹⁷-LYV:DHHKD:RLEEHLEXAXA, RNVQXRPTQVQL:KPLS-AA¹⁷-LYV:DHHKD:TLEDHLAXKXE, KIPKAXXVPQEL:EPLP-AA¹⁷-VYY:EQLSN:DMVRXGXGSR, GIPEPXXVPQKM:EPLP-AA¹⁷-VYY:EQLSN:NMVRSSXAXR, SIPKAXXVPQEL:EPLP-AA¹⁷-VYY:EQLSN:EMVRXGXGSR, HVTKPTXVPQKL:EPLP-AA¹⁷-VYY:EQLSN:NMVRSSXGXH, YVPKPXXVPQKL:EPLP-AA¹⁷-VYY:EQLSN:NMVRSSXGXH, TVPKPXXVPQQL:EPLP-AA¹⁷-VYY:EQLSN:NMVRSAXGXH, AVPKAXXVPQKL:EPLP-AA¹⁷-VYY:EQLSN:NMVRSAXGXH, KVGKAXXVPQKL:EPLP-AA¹⁷-VYY:EQLSN:EGMSVRSXGXR, KASKAXXVPQKL:EPLP-AA¹⁷-VYY:EQLSN:GMVRSEXGXR, GSAGPXXVPQKM:EPLP-AA¹⁷-VYY:EQLSN:GMVRSRXGXS, AAPASXXVPQRL:EPLP-AA¹⁷-VYY:EQLSN:DMVRSAXGXR, STPPTXXVPQRL:EPLP-AA¹⁷-VYY:EQLSN:DMVRSSXGXR, HVPKPXXVPQKL:EPLP-AA¹⁷-VYY:EQLSN:NMVRSSXGXH, RVPSTXXVPQKT:EPLP-AA¹⁷-VYY:EQLSN:MIVRSXGXL, ASASPXXVPQDLEPLP-AA¹⁷-VYY:EQLSN:MIVRSXKXS, ASASPXXVPQDLEPLP-AA¹⁷-VYY:EQLSN:MVVRSXKXS, NDEGLEXVPQEE:EPLP-AA¹⁷-VYY:EQLSN:FLVRXKXESR, NDEGLEXVPQGQ:EPLP-AA¹⁷-VYY:EQLSN:LEVRSQXEXR, SSVKXQPVPQHH:EPLP-AA¹⁷-VYY:EQLSN:RLVRSLEXAXA, RNVQXRPVPQQL:EPLP-AA¹⁷-VYY:EQLSN:TLVRSLAXKXE, KIPKAXXVPTEL:EPLP-AA¹⁷-VYY:EQLSN:DMVVEGXGXR, GIPEPXXVPEKM:EPLP-AA¹⁷-VYY:EQLSN:NMTVESXAXR, SIPKAXXVPTEL:EPLP-AA¹⁷-VYY:EQLSN:EMVVEGXGXR, HVTKPTXAPTKL:EPLP-AA¹⁷-VYY:EQLSN:NMVVRSXGXH, YVPKPXXAPTKL:EPLP-AA¹⁷-VYY:EQLSN:NMVVRSXGXH, TVPKPXXAPTQL:EPLP-AA¹⁷-VYY:EQLSN:NMVVRAXGXH, AVPKAXXAPTKL:EPLP-AA¹⁷-VYY:EQLSN:NMVVKAXGXH, KVGKAXXVPTKL:EPLP-AA¹⁷-VYY:EQLSN:EGMSVAEXGXR, KASKAXXVPTKL:EPLP-AA¹⁷-VYY:EQLSN:GMAVSEXGXR, GSAGPXXTPTKM:EPLP-AA¹⁷-VYY:EQLSN:GMVVDRXGXS, AAPASXXVPARL:EPLP-AA¹⁷-VYY:EQLSN:DMVVEAXGXR, STPPTXXVPTRL:EPLP-AA¹⁷-VYY:EQLSN:DMVVESXGXR, HVPKPXXAPTKL:EPLP-AA¹⁷-VYY:EQLSN:NMVVRSXGXH, RVPSTXXAPVKT:EPLP-AA¹⁷-VYY:EQLSN:MIVEEXGXL, ASASPXXVSQDLEPLP-AA¹⁷-VYY:EQLSN:MIVKSXKXS, ASASPXXVPQDLEPLP-AA¹⁷-VYY:EQLSN:MVVKSXKXS, NDEGLEXVPTEE:EPLP-AA¹⁷-VYY:EQLSN:FLQHNKXEXR, NDEGLEXVPTGQ:EPLP-AA¹⁷-VYY:EQLSN:LEEHSQXEXR, SSVKXQPSRVHH:EPLP-AA¹⁷-VYY:EQLSN:RLEEHLEXAXA, RNVQXRPTQVQL:EPLP-AA¹⁷-VYY:EQLSN:TLEDHLAXKXE, KIPKASSVSQEL:EPLT-AA¹⁷-LYY:EQLSN:DMVKXGXGSR, GIPEPXXVSQKM:EPLT-AA¹⁷-LYY:EQLSN:NMVKSSXAXR, SIPKASSVSQEL:EPLT-AA¹⁷-LYY:EQLSN:EMVKXGXGSR, HVTKPTXVSQKL:EPLT-AA¹⁷-LYY:EQLSN:NMVKSSXGXH, YVPKPXXVSQKL:EPLT-AA¹⁷-LYY:EQLSN:NMVKSSXGXH, TVPKPXXVSQQL:EPLT-AA¹⁷-LYY:EQLSN:NMVKSAXGXH, AVPKASSVSQKL:EPLT-AA¹⁷-LYY:EQLSN:NMVKSAXGXH, KVGKASSVSQKL:EPLT-AA¹⁷-LYY:EQLSN:EGMSVKSXGXR, KASKASSVSQKL:EPLT-AA¹⁷-LYY:EQLSN:GMVKSEXGXR, GSAGPXXVSQKM:EPLT-AA¹⁷-LYY:EQLSN:GMVKSRXGXS, AAPASSSVSQRL:EPLT-AA¹⁷-LYY:EQLSN:DMVKSAXGXR, STPPTSSVSQRL:EPLT-AA¹⁷-LYY:EQLSN:DMVKSSXGXR, HVPKPXXVSQKL:EPLT-AA¹⁷-LYY:EQLSN:NMVKSSXGXH, RVPSTSSVSQKT:EPLT-AA¹⁷-LYY:EQLSN:MIVKSXGXL, ASAAPXXVSQAL:EPLT-AA¹⁷-LYY:EQLSN:MIVKSXKXS, ASASPXXVSQDL:EPLT-AA¹⁷-LYY:EQLSN:MVVKSXKXS, NDEGLEXVSQEE:EPLT-AA¹⁷-LYY:EQLSN:FLVKXKXESR, NDEGLEXVSQGQ:EPLT-AA¹⁷-LYY:EQLSN:LEVKSQXEXR, SSVKXQPVSQHH:EPLT-AA¹⁷-LYY:EQLSN:RLVKSLEXAXA, RNVQXRPVSQQL:EPLT-AA¹⁷-LYY:EQLSN:TLVKSLAXKXE, KIPKAXXVPTEL:EPLT-AA¹⁷-LYY:EQLSN:DMVVEGXGXR, GIPEPXXVPEKM:EPLT-AA¹⁷-LYY:EQLSN:NMTVESXAXR, SIPKAXXVPTEL:EPLT-AA¹⁷-LYY:EQLSN:EMVVEGXGXR, HVTKPTXAPTKL:EPLT-AA¹⁷-LYY:EQLSN:NMVVRSXGXH, YVPKPXXAPTKL:EPLT-AA¹⁷-LYY:EQLSN:NMVVRSXGXH, TVPKPXXAPTQL:EPLT-AA¹⁷-LYY:EQLSN:NMVVRAXGXH, AVPKAXXAPTKL:EPLT-AA¹⁷-LYY:EQLSN:NMVVKAXGXH, KVGKAXXVPTKL:EPLT-AA¹⁷-LYY:EQLSN:EGMSVAEXGXR, KASKAXXVPTKL:EPLT-AA¹⁷-LYY:EQLSN:GMAVSEXGXR, GSAGPXXTPTKM:EPLT-AA¹⁷-LYY:EQLSN:GMVVDRXGXS, AAPASXXVPARL:EPLT-AA¹⁷-LYY:EQLSN:DMVVEAXGXR, STPPTXXVPTRL:EPLT-AA¹⁷-LYY:EQLSN:DMVVESXGXR, HVPKPXXAPTKL:EPLT-AA¹⁷-LYY:EQLSN:NMVVRSXGXH, RVPSTXXAPVKT:EPLT-AA¹⁷-LYY:EQLSN:MIVEEXGXL, ASAAPXXVPQAL:EPLT-AA¹⁷-LYY:EQLSN:MIVRSXKXS, ASASPXXVPQDL:EPLT-AA¹⁷-LYY:EQLSN:MVVKSXKXS, NDEGLEXVPTEE:EPLT-AA¹⁷-LYY:EQLSN:FLQHNKXEXR, NDEGLEXVPTGQ:EPLT-AA¹⁷-LYY:EQLSN:LEEHSQXEXR, SSVKXQPSRVHH:EPLT-AA¹⁷-LYY:EQLSN:RLEEHLEXAXA, RNVQXRPTQVQL:EPLT-AA¹⁷-LYY:EQLSN:TLEDHLAXKXE, KIPKAXXVPQEL:EPLT-AA¹⁷-LYY:EQLSN:DMVKXGXGSR, GIPEPXXVPQKM:EPLT-AA¹⁷-LYY:EQLSN:NMVKSSXAXR, SIPKAXXVPQEL:EPLT-AA¹⁷-LYY:EQLSN:EMVKXGXGSR, HVTKPTXVPQKL:EPLT-AA¹⁷-LYY:EQLSN:NMVKSSXGXH, YVPKPXXVPQKL:EPLT-AA¹⁷-LYY:EQLSN:NMVKSSXGXH, TVPKPXXVPQQL:EPLT-AA¹⁷-LYY:EQLSN:NMVKSAXGXH, AVPKAXXVPQKL:EPLT-AA¹⁷-LYY:EQLSN:NMVKSAXGXH, KVGKAXXVPQKL:EPLT-AA¹⁷-LYY:EQLSN:EGMSVKSXGXR, KASKAXXVPQKL:EPLT-AA¹⁷-LYY:EQLSN:GMVKSEXGXR, GSAGPXXVPQKM:EPLT-AA¹⁷-LYY:EQLSN:GMVKSRXGXS, AAPASXXVPQRL:EPLT-AA¹⁷-LYY:EQLSN:DMVKSAXGXR, STPPTXXVPQRL:EPLT-AA¹⁷-LYY:EQLSN:DMVKSSXGXR, HVPKPXXVPQKL:EPLT-AA¹⁷-LYY:EQLSN:NMVKSSXGXH, RVPSTXXVPQKT:EPLT-AA¹⁷-LYY:EQLSN:MIVKSXGXL, ASAAPXXVPQAL:EPLT-AA¹⁷-LYY:EQLSN:MIVKSXKXS, ASASPXXVPQDL:EPLT-AA¹⁷-LYY:EQLSN:MIVKSXKXS, NDEGLEXVPQEE:EPLT-AA¹⁷-LYY:EQLSN:FLVKXKXESR, NDEGLEXVPQGQ:EPLT-AA¹⁷-LYY:EQLSN:LEVKSQXEXR, SSVKXQPVPQHH:EPLT-AA¹⁷-LYY:EQLSN:RLVKSLEXAXA, RNVQXRPVPQQL:EPLT-AA¹⁷-LYY:EQLSN:TLVKSLAXKXE, ASASPXXVSQDL:EPLT-AA¹⁷-LYY:EQLSN:MIVKSXKXS, KIPKAXXVPTEL:SNIT-AA¹⁷-QIM:IGEMS:DMQHNGXGXR, GIPEPXXVPTKM:SNIT-AA¹⁷-QIM:IGEMS:NMQHNSXAXR, SIPKAXXVPTEL:SNIT-AA¹⁷-QIM:IGEMS:EMQHNGXGXR, HVTKPTXVPTKL:SNIT-AA¹⁷-QIM:IGEMS:NMQHNSXGXH, YVPKPXXVPTKL:SNIT-AA¹⁷-QIM:IGEMS:NMQHNSXGXH, TVPKPXXVPTQL:SNIT-AA¹⁷-QIM:IGEMS:NMQHNAXGXH, AVPKAXXVPTKL:SNIT-AA¹⁷-QIM:IGEMS:NMQHNAXGXH, KVGKAXXVPTKL:SNIT-AA¹⁷-QIM:IGEMS:EGMSQHNXGXR, KASKAXXVPTKL:SNIT-AA¹⁷-QIM:IGEMS:GMQHNEXGXR, GSAGPXXVPTKM:SNIT-AA¹⁷-QIM:IGEMS:GMQHNRXGXS, AAPASXXVPTRL:SNIT-AA¹⁷-QIM:IGEMS:DMQHNAXGXR, STPPTXXVPTRL:SNIT-AA¹⁷-QIM:IGEMS:DMQHNSXGXR, HVPKPXXVPTKL:SNIT-AA¹⁷-QIM:IGEMS:NMQHNSXGXH, RVPSTXXVPTKT:SNIT-AA¹⁷-QIM:IGEMS:MIQHNXGXL, ASAAPXXVPTAL:SNIT-AA¹⁷-QIM:IGEMS:MIQHNXKXS, ASASPXXVPTDL:SNIT-AA¹⁷-QIM:IGEMS:MIQHNXKXS, ASASPXXVPTDL:SNIT-AA¹⁷-QIM:IGEMS:MVQHNXKXS, NDEGLEXVPTGQ:SNIT-AA¹⁷-QIM:IGEMS:LEQHNQXEXR, NDEGLEXVPTEE:SNIT-AA¹⁷-QIM:IGEMS:FLQHNKXEXR, SSVKXQPVPTHH:SNIT-AA¹⁷-QIM:IGEMS:RLQHNLEXAXA, RNVQXRPVPTQL:SNIT-AA¹⁷-QIM:IGEMS:TLQHNLAXKXE, KIPKAXXVPTEL:SNIT-AA¹⁷-QIM:IGEMS:DMVVEGXGXR, GIPEPXXVPEKM:SNIT-AA¹⁷-QIM:IGEMS:NMTVESXAXR, SIPKAXXVPTEL:SNIT-AA¹⁷-QIM:IGEMS:EMVVEGXGXR, HVTKPTXAPTKL:SNIT-AA¹⁷-QIM:IGEMS:NMVVRSXGXH, YVPKPXXAPTKL:SNIT-AA¹⁷-QIM:IGEMS:NMVVRSXGXH, TVPKPXXAPTQL:SNIT-AA¹⁷-QIM:IGEMS:NMVVRAXGXH, AVPKAXXAPTKL:SNIT-AA¹⁷-QIM:IGEMS:NMVVKAXGXH, KVGKAXXVPTKL:SNIT-AA¹⁷-QIM:IGEMS:EGMSVAEXGXR, KASKAXXVPTKL:SNIT-AA¹⁷-QIM:IGEMS:GMAVSEXGXR, GSAGPXXTPTKM:SNIT-AA¹⁷-QIM:IGEMS:GMVVDRXGXS, AAPASXXVPARL:SNIT-AA¹⁷-QIM:IGEMS:DMVVEAXGXR, STPPTXXVPTRL:SNIT-AA¹⁷-QIM:IGEMS:DMVVESXGXR, HVPKPXXAPTKL:SNIT-AA¹⁷-QIM:IGEMS:NMVVRSXGXH, RVPSTXXAPVKT:SNIT-AA¹⁷-QIM:IGEMS:MIVEEXGXL, ASAAPXXVPQAL:SNIT-AA¹⁷-QIM:IGEMS:MIVRSXKXS, ASASPXXVSQDL:SNIT-AA¹⁷-QIM:IGEMS:MIVKSXKXS, ASASPXXVPQDL:SNIT-AA¹⁷-QIM:IGEMS:MVVKSXKXS, NDEGLEXVPTGQ:SNIT-AA¹⁷-QIM:IGEMS:LEEHSQXEXR, SSVKXQPSRVHH:SNIT-AA¹⁷-QIM:IGEMS:RLEEHLEXAXA, RNVQXRPTQVQL:SNIT-AA¹⁷-QIM:IGEMS:TLEDHLAXKXE, KIPKAXXVPTEL:SNIT-AA¹⁷-QIM:LGEMS:DMEHXGXGSR, GIPEPXXVPTKM:SNIT-AA¹⁷-QIM:LGEMS:NMEHSSXAXR, SIPKAXXVPTEL:SNIT-AA¹⁷-QIM:LGEMS:EMEHXGXGSR, HVTKPTXVPTKL:SNIT-AA¹⁷-QIM:LGEMS:NMEHSSXGXH, YVPKPXXVPTKL:SNIT-AA¹⁷-QIM:LGEMS:NMEHSSXGXH, TVPKPXXVPTQL:SNIT-AA¹⁷-QIM:LGEMS:NMEHSAXGXH, AVPKAXXVPTKL:SNIT-AA¹⁷-QIM:LGEMS:NMEHSAXGXH, KVGKAXXVPTKL:SNIT-AA¹⁷-QIM:LGEMS:EGMSEHSXGXR, KASKAXXVPTKL:SNIT-AA¹⁷-QIM:LGEMS:GMEHSEXGXR, GSAGPXXVPTKM:SNIT-AA¹⁷-QIM:LGEMS:GMEHSRXGXS, AAPASXXVPTRL:SNIT-AA¹⁷-QIM:LGEMS:DMEHSAXGXR, STPPTXXVPTRL:SNIT-AA¹⁷-QIM:LGEMS:DMEHSSXGXR, HVPKPXXVPTKL:SNIT-AA¹⁷-QIM:LGEMS:NMEHSSXGXH, RVPSTXXVPTKT:SNIT-AA¹⁷-QIM:LGEMS:MIEHSXGXL, ASAAPXXVPTAL:SNIT-AA¹⁷-QIM:LGEMS:MIEHSXKXS, ASASPXXVPTDL:SNIT-AA¹⁷-QIM:LGEMS:MIEHSXKXS, ASASPXXVPTDL:SNIT-AA¹⁷-QIM:LGEMS:MVEHSXKXS, NDEGLEXVPTEE:SNIT-AA¹⁷-QIM:LGEMS:FLEHXKXESR, SSVKXQPVPTHH:SNIT-AA¹⁷-QIM:LGEMS:RLEHSLEXAXA, RNVQXRPVPTQL:SNIT-AA¹⁷-QIM:LGEMS:TLEHSLAXKXE, KIPKAXXVPTEL:SNIT-AA¹⁷-QIM:LGEMS:DMVVEGXGXR, GIPEPXXVPEKM:SNIT-AA¹⁷-QIM:LGEMS:NMTVESXAXR, SIPKAXXVPTEL:SNIT-AA¹⁷-QIM:LGEMS:EMVVEGXGXR, HVTKPTXAPTKL:SNIT-AA¹⁷-QIM:LGEMS:NMVVRSXGXH, YVPKPXXAPTKL:SNIT-AA¹⁷-QIM:LGEMS:NMVVRSXGXH, TVPKPXXAPTQL:SNIT-AA¹⁷-QIM:LGEMS:NMVVRAXGXH, AVPKAXXAPTKL:SNIT-AA¹⁷-QIM:LGEMS:NMVVKAXGXH, KVGKAXXVPTKL:SNIT-AA¹⁷-QIM:LGEMS:EGMSVAEXGXR, KASKAXXVPTKL:SNIT-AA¹⁷-QIM:LGEMS:GMAVSEXGXR, GSAGPXXTPTKM:SNIT-AA¹⁷-QIM:LGEMS:GMVVDRXGXS, AAPASXXVPARL:SNIT-AA¹⁷-QIM:LGEMS:DMVVEAXGXR, STPPTXXVPTRL:SNIT-AA¹⁷-QIM:LGEMS:DMVVESXGXR, HVPKPXXAPTKL:SNIT-AA¹⁷-QIM:LGEMS:NMVVRSXGXH, RVPSTXXAPVKT:SNIT-AA¹⁷-QIM:LGEMS:MIVEEXGXL, ASAAPXXVPQAL:SNIT-AA¹⁷-QIM:LGEMS:MIVRSXKXS, ASASPXXVSQDL:SNIT-AA¹⁷-QIM:LGEMS:MIVKSXKXS, ASASPXXVPQDL:SNIT-AA¹⁷-QIM:LGEMS:MVVKSXKXS, NDEGLEXVPTEE:SNIT-AA¹⁷-QIM:LGEMS:FLQHNKXEXR, SSVKXQPSRVHH:SNIT-AA¹⁷-QIM:LGEMS:RLEEHLEXAXA, RNVQXRPTQVQL:SNIT-AA¹⁷-QIM:LGEMS:TLEDHLAXKXE, KIPKASSSRVEL:RSVK-AA¹⁷-AKV:KEVQV:DMEEHGXGXR, GIPEPXXSRVKM:RSVK-AA¹⁷-AKV:KEVQV:NMEEHSXAXR, SIPKASSSRVEL:RSVK-AA¹⁷-AKV:KEVQV:EMEEHGXGXR, HVTKPTSSRVKL:RSVK-AA¹⁷-AKV:KEVQV:NMEEHSXGXH, YVPKPXXSRVKL:RSVK-AA¹⁷-AKV:KEVQV:NMEEHSXGXH, TVPKPXXSRVQL:RSVK-AA¹⁷-AKV:KEVQV:NMEEHAXGXH, AVPKASSSRVKL:RSVK-AA¹⁷-AKV:KEVQV:NMEEHAXGXH, KVGKASSSRVKL:RSVK-AA¹⁷-AKV:KEVQV:EGMSEEHXGXR, KASKASSSRVKL:RSVK-AA¹⁷-AKV:KEVQV:GMEEHEXGXR, GSAGPXXSRVKM:RSVK-AA¹⁷-AKV:KEVQV:GMEEHRXGXS, AAPASSSSRVRL:RSVK-AA¹⁷-AKV:KEVQV:DMEEHAXGXR, STPPTSSSRVRL:RSVK-AA¹⁷-AKV:KEVQV:DMEEHSXGXR, HVPKPXXSRVKL:RSVK-AA¹⁷-AKV:KEVQV:NMEEHSXGXH, RVPSTSSSRVKT:RSVK-AA¹⁷-AKV:KEVQV:MIEEHXGXL, ASAAPXXSRVAL:RSVK-AA¹⁷-AKV:KEVQV:MIEEHXKXS, ASASPXXSRVDL:RSVK-AA¹⁷-AKV:KEVQV:MIEEHXKXS, ASASPXXSRVDL:RSVK-AA¹⁷-AKV:KEVQV:MVEEHXKXS, NDEGLESSRVEE:RSVK-AA¹⁷-AKV:KEVQV:FLEEHKXEXR, NDEGLESSRVGQ:RSVK-AA¹⁷-AKV:KEVQVIEEEHQXEXR, RNVQXRPSRVQL:RSVK-AA¹⁷-AKV:KEVQV:TLEEHLAXKXE, KIPKAXXVPTEL:RSVK-AA¹⁷-AKV:KEVQV:DMVVEGXGXR, GIPEPXXVPEKM:RSVK-AA¹⁷-AKV:KEVQV:NMTVESXAXR, SIPKAXXVPTEL:RSVK-AA¹⁷-AKV:KEVQV:EMVVEGXGXR, HVTKPTXAPTKL:RSVK-AA¹⁷-AKV:KEVQV:NMVVRSXGXH, YVPKPXXAPTKL:RSVK-AA¹⁷-AKV:KEVQV:NMVVRSXGXH, TVPKPXXAPTQL:RSVK-AA¹⁷-AKV:KEVQV:NMVVRAXGXH, AVPKAXXAPTKL:RSVK-AA¹⁷-AKV:KEVQV:NMVVKAXGXH, KVGKAXXVPTKL:RSVK-AA¹⁷-AKV:KEVQV:EGMSVAEXGXR, KASKAXXVPTKL:RSVK-AA¹⁷-AKV:KEVQV:GMAVSEXGXR, GSAGPXXTPTKM:RSVK-AA¹⁷-AKV:KEVQV:GMVVDRXGXS, AAPASXXVPARL:RSVK-AA¹⁷-AKV:KEVQV:DMVVEAXGXR, STPPTXXVPTRL:RSVK-AA¹⁷-AKV:KEVQV:DMVVESXGXR, HVPKPXXAPTKL:RSVK-AA¹⁷-AKV:KEVQV:NMVVRSXGXH, RVPSTXXAPVKT:RSVK-AA¹⁷-AKV:KEVQV:MIVEEXGXL, ASAAPXXVPQAL:RSVK-AA¹⁷-AKV:KEVQV:MIVRSXKXS, ASASPXXVSQDL:RSVK-AA¹⁷-AKV:KEVQV:MIVKSXKXS, ASASPXXVPQDL:RSVK-AA¹⁷-AKV:KEVQV:MVVKSXKXS, NDEGLEXVPTEE:RSVK-AA¹⁷-AKV:KEVQV:FLQHNKXEXR, NDEGLEXVPTGQ:RSVK-AA¹⁷-AKV:KEVQVIEEHSQXEXR, RNVQXRPTQVQL:RSVK-AA¹⁷-AKV:KEVQV:TLEDHLAXKXE, KIPKASSTQVEL:RPVQ-AA¹⁷-RKI:KKATV:DMEDHGXGXR, GIPEPXXTQVKM:RPVQ-AA¹⁷-RKI:KKATV:NMEDHSXAXR, SIPKASSTQVEL:RPVQ-AA¹⁷-RKI:KKATV:EMEDHGXGXR, HVTKPTSTQVKL:RPVQ-AA¹⁷-RKI:KKATV:NMEDHSXGXH, YVPKPXXTQVKL:RPVQ-AA¹⁷-RKI:KKATV:NMEDHSXGXH, TVPKPXXTQVQL:RPVQ-AA¹⁷-RKI:KKATV:NMEDHAXGXH, AVPKASSTQVKL:RPVQ-AA¹⁷-RKI:KKATV:NMEDHAXGXH, KVGKASSTQVKL:RPVQ-AA¹⁷-RKI:KKATV:EGMSEDHXGXR, KASKASSTQVKL:RPVQ-AA¹⁷-RKI:KKATV:GMEDHEXGXR, GSAGPXXTQVKM:RPVQ-AA¹⁷-RKI:KKATV:GMEDHRXGXS, AAPASSSTQVRL:RPVQ-AA¹⁷-RKI:KKATV:DMEDHAXGXR, STPPTSSTQVRL:RPVQ-AA¹⁷-RKI:KKATV:DMEDHSXGXR, HVPKPXXTQVKL:RPVQ-AA¹⁷-RKI:KKATV:NMEDHSXGXH, RVPSTSSTQVKT:RPVQ-AA¹⁷-RKI:KKATV:MIEDHXGXL, ASAAPXXTQVAL:RPVQ-AA¹⁷-RKI:KKATV:MIEDHXKXS, ASASPXXTQVDL:RPVQ-AA¹⁷-RKI:KKATV:MIEDHXKXS, ASASPXXTQVDL:RPVQ-AA¹⁷-RKI:KKATV:MVEDHXKXS, NDEGLESTQVEE:RPVQ-AA¹⁷-RKI:KKATV:FLEDHKXEXR, NDEGLESTQVGQ:RPVQ-AA¹⁷-RKI:KKATV:LEEDHQXEXR, SSVKXQPTQVHH:RPVQ-AA¹⁷-RKI:KKATV:RLEDHLEXAXA, KIPKAXXVPTEL:RPVQ-AA¹⁷-RKI:KKATV:DMVVEGXGXR, GIPEPXXVPEKM:RPVQ-AA¹⁷-RKI:KKATV:NMTVESXAXR, SIPKAXXVPTEL:RPVQ-AA¹⁷-RKI:KKATV:EMVVEGXGXR, HVTKPTXAPTKL:RPVQ-AA¹⁷-RKI:KKATV:NMVVRSXGXH, YVPKPXXAPTKL:RPVQ-AA¹⁷-RKI:KKATV:NMVVRSXGXH, TVPKPXXAPTQL:RPVQ-AA¹⁷-RKI:KKATV:NMVVRAXGXH, AVPKAXXAPTKL:RPVQ-AA¹⁷-RKI:KKATV:NMVVKAXGXH, KVGKAXXVPTKL:RPVQ-AA¹⁷-RKI:KKATV:EGMSVAEXGXR, KASKAXXVPTKL:RPVQ-AA¹⁷-RKI:KKATV:GMAVSEXGXR, GSAGPXXTPTKM:RPVQ-AA¹⁷-RKI:KKATV:GMVVDRXGXS, AAPASXXVPARL:RPVQ-AA¹⁷-RKI:KKATV:DMVVEAXGXR, STPPTXXVPTRL:RPVQ-AA¹⁷-RKI:KKATV:DMVVESXGXR, HVPKPXXAPTKL:RPVQ-AA¹⁷-RKI:KKATV:NMVVRSXGXH, RVPSTXXAPVKT:RPVQ-AA¹⁷-RKI:KKATV:MIVEEXGXL, ASAAPXXVPQAL:RPVQ-AA¹⁷-RKI:KKATV:MIVRSXKXS, ASASPXXVSQDL:RPVQ-AA¹⁷-RKI:KKATV:MIVKSXKXS, ASASPXXVPQDL:RPVQ-AA¹⁷-RKI:KKATV:MVVKSXKXS, NDEGLEXVPTEE:RPVQ-AA¹⁷-RKI:KKATV:FLQHNKXEXR, NDEGLEXVPTGQ:RPVQ-AA¹⁷-RKI:KKATVIEEHSQXEXR and SSVKXQPSRVHH:RPVQ-AA¹⁷-RKI:KKATV:RLEEHLEXAXA; and wherein AA¹⁷ is selected from the group consisting of G, A, V, L, I, P, F, M, W, T and S (in particular is selected from the group consisting of M, I, L, V and T). More particularly, the quadruplet PEP9:PEP12:PEP2:PEP10 is selected from the group consisting of GIPEPXXVPTKM:SAIS-AA¹⁷-LYL:LKNYQ:NMVVESXAXR, HVTKPTXVPTKL:SAIS-AA¹⁷-LYL:LKNYQ:NMVVESXGXH, YVPKPXXVPTKL:SAIS-AA¹⁷-LYL:LKNYQ:NMVVESXGXH, TVPKPXXVPTQL:SAIS-AA¹⁷-LYL:LKNYQ:NMVVEAXGXH, AVPKAXXVPTKL:SAIS-AA¹⁷-LYL:LKNYQ:NMVVEAXGXH, KVGKAXXVPTKL:SAIS-AA¹⁷-LYL:LKNYQ:EGMSVVEXGXR, KASKAXXVPTKL:SAIS-AA¹⁷-LYL:LKNYQ:GMVVEEXGXR, GSAGPXXVPTKM:SAIS-AA¹⁷-LYL:LKNYQ:GMVVERXGXS, AAPASXXVPTRL:SAIS-AA¹⁷-LYL:LKNYQ:DMVVEAXGXR, STPPTXXVPTRL:SAIS-AA¹⁷-LYL:LKNYQ:DMVVESXGXR, HVPKPXXVPTKL:SAIS-AA¹⁷-LYL:LKNYQ:NMVVESXGXH, RVPSTXXVPTKT:SAIS-AA¹⁷-LYL:LKNYQ:MIVVEXGXL, ASAAPXXVPTAL:SAIS-AA¹⁷-LYL:LKNYQ:MIVVEXKXS, ASASPXXVPTDL:SAIS-AA¹⁷-LYL:LKNYQ:MIVVEXKXS, ASASPXXVPTDL:SAIS-AA¹⁷-LYL:LKNYQ:MVVVEXKXS, GIPEPXXVPEKM:SAIS-AA¹⁷-LYL:LKNYQ:NMTVESXAXR, HVTKPTXAPTKL:SAIS-AA¹⁷-LYL:LKNYQ:NMVVRSXGXH, YVPKPXXAPTKL:SAIS-AA¹⁷-LYL:LKNYQ:NMVVRSXGXH, TVPKPXXAPTQL:SAIS-AA¹⁷-LYL:LKNYQ:NMVVRAXGXH, AVPKAXXAPTKL:SAIS-AA¹⁷-LYL:LKNYQ:NMVVKAXGXH, KVGKAXXVPTKL:SAIS-AA¹⁷-LYL:LKNYQ:EGMSVAEXGXR, KASKAXXVPTKL:SAIS-AA¹⁷-LYL:LKNYQ:GMAVSEXGXR, GSAGPXXTPTKM:SAIS-AA¹⁷-LYL:LKNYQ:GMVVDRXGXS, AAPASXXVPARL:SAIS-AA¹⁷-LYL:LKNYQ:DMVVEAXGXR, HVPKPXXAPTKL:SAIS-AA¹⁷-LYL:LKNYQ:NMVVRSXGXH, RVPSTXXAPVKT:SAIS-AA¹⁷-LYL:LKNYQ:MIVEEXGXL, ASAAPXXVPQAL:SAIS-AA¹⁷-LYL:LKNYQ:MIVRSXKXS, ASASPXXVSQDL:SAIS-AA¹⁷-LYL:LKNYQ:MIVKSXKXS, ASASPXXVPQDL:SAIS-AA¹⁷-LYL:LKNYQ:MVVKSXKXS, NDEGLEXVPTEE:SAIS-AA¹⁷-LYL:LKNYQ:FLQHNKXEXR, NDEGLEXVPTGQ:SAIS-AA¹⁷-LYL:LKNYQ:LEEHSQXEXR, SSVKXQPSRVHH:SAIS-AA¹⁷-LYL:LKNYQ:RLEEHLEXAXA, RNVQXRPTQVQL:SAIS-AA¹⁷-LYL:LKNYQ:TLEDHLAXKXE, KI PKAXXVPEEL:SSLS-AA¹⁷-LFF:LKVYP:DMTVEGXGXR, SIPKAXXVPEEL:SSLS-AA¹⁷-LFF:LKVYP: EMTVEGXGXR, HVTKPTXVPEKL:SSLS-AA¹⁷-LFF:LKVYP:NMTVESXGXH, YVPKPXXVPEKL:SSLS-AA¹⁷-LFF:LKVYP:NMTVESXGXH, TVPKPXXVPEQL:SSLS-AA¹⁷-LFF:LKVYP:NMTVEAXGXH, AVPKAXXVPEKL:SSLS-AA¹⁷-LFF:LKVYP:NMTVEAXGXH, KVGKAXXVPEKL:SSLS-AA¹⁷-LFF:LKVYP:EGMSTVEXGXR, KASKAXXVPEKL:SSLS-AA¹⁷-LFF:LKVYP:GMTVEEXGXR, GSAGPXXVPEKM:SSLS-AA¹⁷-LFF:LKVYP:GMTVERXGXS, AAPASXXVPERL:SSLS-AA¹⁷-LFF:LKVYP:DMTVEAXGXR, STPPTXXVPERL:SSLS-AA¹⁷-LFF:LKVYP: DMTVESXGXR, HVPKPXXVPEKL:SSLS-AA¹⁷-LFF:LKVYP:NMTVESXGXH, RVPSTXXVPEKT:SSLS-AA¹⁷-LFF:LKVYP:MITVEXGXL, ASAAPXXVPEAL:SSLS-AA¹⁷-LFF:LKVYP:MITVEXKXS, ASASPXXVPEDL:SSLS-AA¹⁷-LFF:LKVYP:MITVEXKXS, ASASPXXVPEDL:SSLS-AA¹⁷-LFF:LKVYP:MVTVEXKXS, KIPKAXXVPTEL:SSLS-AA¹⁷-LFF:LKVYP:DMVVEGXGXR, SIPKAXXVPTEL:SSLS-AA¹⁷-LFF:LKVYP:EMVVEGXGXR, HVTKPTXAPTKL:SSLS-AA¹⁷-LFF:LKVYP:NMVVRSXGXH, YVPKPXXAPTKL:SSLS-AA¹⁷-LFF:LKVYP:NMVVRSXGXH, TVPKPXXAPTQL:SSLS-AA¹⁷-LFF:LKVYP:NMVVRAXGXH, AVPKAXXAPTKL:SSLS-AA¹⁷-LFF:LKVYP:NMVVKAXGXH, KVGKAXXVPTKL:SSLS-AA¹⁷-LFF:LKVYP:EGMSVAEXGXR, KASKAXXVPTKL:SSLS-AA¹⁷-LFF:LKVYP:GMAVSEXGXR, GSAGPXXTPTKM:SSLS-AA¹⁷-LFF:LKVYP:GMVVDRXGXS, AAPASXXVPARL:SSLS-AA¹⁷-LFF:LKVYP:DMVVEAXGXR, STPPTXXVPTRL:SSLS-AA¹⁷-LFF:LKVYP:DMVVESXGXR, HVPKPXXAPTKL:SSLS-AA¹⁷-LFF:LKVYP:NMVVRSXGXH, RVPSTXXAPVKT:SSLS-AA¹⁷-LFF:LKVYP:MIVEEXGXL, ASAAPXXVPQAL:SSLS-AA¹⁷-LFF:LKVYP:MIVRSXKXS, ASASPXXVSQDL:SSLS-AA¹⁷-LFF:LKVYP:MIVKSXKXS, ASASPXXVPQDL:SSLS-AA¹⁷-LFF:LKVYP:MVVKSXKXS, NDEGLEXVPTEE:SSLS-AA¹⁷-LFF:LKVYP:FLQHNKXEXR, NDEGLEXVPTGQ:SSLS-AA¹⁷-LFF:LKVYP:LEEHSQXEXR, SSVKXQPSRVHH:SSLS-AA¹⁷-LFF:LKVYP:RLEEHLEXAXA, RNVQXRPTQVQL:SSLS-AA¹⁷-LFF:LKVYP:TLEDHLAXKXE, KIPKAXXAPTEL:NAIS-AA¹⁷-LYF:LKKYR:DMVVRGXGXR, GIPEPXXAPTKM:NAIS-AA¹⁷-LYFIKKYR:NMVVRSXAXR, SIPKAXXAPTEL:NAIS-AA¹⁷-LYFIKKYR:EMVVRGXGXR, AVPKAXXAPTKL:NAIS-AA¹⁷-LYF:LKKYR:NMVVRAXGXH, KVGKAXXAPTKL:NAIS-AA¹⁷-LYFIKKYR:EGMSVVRXGXR, KASKAXXAPTKL:NAIS-AA¹⁷-LYFIKKYR:GMVVREXGXR, GSAGPXXAPTKM:NAIS-AA¹⁷-LYFIKKYR:GMVVRRXGXS, AAPASXXAPTRL:NAIS-AA¹⁷-LYFIKKYR:DMVVRAXGXR, STPPTXXAPTRL:NAIS-AA¹⁷-LYFIKKYR:DMVVRSXGXR, RVPSTXXAPTKT:NAIS-AA¹⁷-LYF:LKKYR:MIVVRXGXL, ASAAPXXAPTAL:NAIS-AA¹⁷-LYF:LKKYR:MIVVRXKXS, ASASPXXAPTDL:NAIS-AA¹⁷-LYFIKKYR:MIVVRXKXS, ASASPXXAPTDL:NAIS-AA¹⁷-LYF:LKKYR:MVVVRXKXS, KIPKAXXVPTEL:NAIS-AA¹⁷-LYFIKKYR:DMVVEGXGXR, GIPEPXXVPEKM:NAIS-AA¹⁷-LYFIKKYR:NMTVESXAXR, SIPKAXXVPTEL:NAIS-AA¹⁷-LYFIKKYR:EMVVEGXGXR, AVPKAXXAPTKL:NAIS-AA¹⁷-LYF:LKKYR:NMVVKAXGXH, KVGKAXXVPTKL:NAIS-AA¹⁷-LYFIKKYR:EGMSVAEXGXR, KASKAXXVPTKL:NAIS-AA¹⁷-LYF:LKKYR:GMAVSEXGXR, GSAGPXXTPTKM:NAIS-AA¹⁷-LYFIKKYR:GMVVDRXGXS, AAPASXXVPARL:NAIS-AA¹⁷-LYFIKKYR:DMVVEAXGXR, STPPTXXVPTRL:NAIS-AA¹⁷-LYFIKKYR:DMVVESXGXR, RVPSTXXAPVKT:NAIS-AA¹⁷-LYF:LKKYR:MIVEEXGXL, ASAAPXXVPQAL:NAIS-AA¹⁷-LYFIKKYR:MIVRSXKXS, ASASPXXVSQDL:NAIS-AA¹⁷-LYFIKKYR:MIVKSXKXS, ASASPXXVPQDL:NAIS-AA¹⁷-LYFIKKYR:MVVKSXKXS, NDEGLEXVPTEE:NAIS-AA¹⁷-LYFIKKYR:FLQHNKXEXR, NDEGLEXVPTGQ:NAIS-AA¹⁷-LYF:LKKYR:LEEHSQXEXR, SSVKXQPSRVHH:NAIS-AA¹⁷-LYFIKKYR:RLEEHLEXAXA, RNVQXRPTQVQL:NAIS-AA¹⁷-LYFIKKYR:TLEDHLAXKXE, KIPKAXXAPTEL:SATS-AA¹⁷-LYY:LRKHR:DMVVKGXGXR, GIPEPXXAPTKM:SATS-AA¹⁷-LYY:LRKHR:NMVVKSXAXR, SIPKAXXAPTEL:SATS-AA¹⁷-LYY:LRKHR:EMVVKGXGXR, HVTKPTXAPTKL:SATS-AA¹⁷-LYY:LRKHR:NMVVKSXGXH, YVPKPXXAPTKL:SATS-AA¹⁷-LYY:LRKHR:NMVVKSXGXH, TVPKPXXAPTQL:SATS-AA¹⁷-LYY:LRKHR:NMVVKAXGXH, KVGKAXXAPTKL:SATS-AA¹⁷-LYY:LRKHR:EGMSVVKXGXR, KASKAXXAPTKL:SATS-AA¹⁷-LYY:LRKHR:GMVVKEXGXR, GSAGPXXAPTKM:SATS-AA¹⁷-LYY:LRKHR:GMVVKRXGXS, AAPASXXAPTRL:SATS-AA¹⁷-LYY:LRKHR:DMVVKAXGXR, STPPTXXAPTRL:SATS-AA¹⁷-LYY:LRKHR:DMVVKSXGXR, HVPKPXXAPTKL:SATS-AA¹⁷-LYY:LRKHR:NMVVKSXGXH, RVPSTXXAPTKT:SATS-AA¹⁷-LYY:LRKHR:MIVVKXGXL, ASAAPXXAPTAL:SATS-AA¹⁷-LYY:LRKHR:MIVVKXKXS, ASASPXXAPTDL:SATS-AA¹⁷-LYY:LRKHR:MIVVKXKXS, ASASPXXAPTDL:SATS-AA¹⁷-LYY:LRKHR:MVVVKXKXS, KIPKAXXVPTEL:SATS-AA¹⁷-LYY:LRKHR:DMVVEGXGXR, GIPEPXXVPEKM:SATS-AA¹⁷-LYY:LRKHR:NMTVESXAXR, SIPKAXXVPTEL:SATS-AA¹⁷-LYY:LRKHR:EMVVEGXGXR, HVTKPTXAPTKL:SATS-AA¹⁷-LYY:LRKHR:NMVVKSXGXH, YVPKPXXAPTKL:SATS-AA¹⁷-LYY:LRKHR:NMVVRSXGXH, TVPKPXXAPTQL:SATS-AA¹⁷-LYY:LRKHR:NMVVRAXGXH, KVGKAXXVPTKL:SATS-AA¹⁷-LYY:LRKHR:EGMSVAEXGXR, KASKAXXVPTKL:SATS-AA¹⁷-LYY:LRKHR:GMAVSEXGXR, GSAGPXXTPTKM:SATS-AA¹⁷-LYY:LRKHR:GMVVDRXGXS, AAPASXXVPARL:SATS-AA¹⁷-LYY:LRKHR:DMVVEAXGXR, STPPTXXVPTRL:SATS-AA¹⁷-LYY:LRKHR:DMVVESXGXR, HVPKPXXAPTKL:SATS-AA¹⁷-LYY:LRKHR:NMVVRSXGXH, RVPSTXXAPVKT:SATS-AA¹⁷-LYY:LRKHR:MIVEEXGXL, ASAAPXXVPQAL:SATS-AA¹⁷-LYY:LRKHR:MIVRSXKXS, ASASPXXVSQDL:SATS-AA¹⁷-LYY:LRKHR:MIVKSXKXS, ASASPXXVPQDL:SATS-AA¹⁷-LYY:LRKHR:MVVKSXKXS, NDEGLEXVPTEE:SATS-AA¹⁷-LYY:LRKHR:FLQHNKXEXR, NDEGLEXVPTGQ:SATS-AA¹⁷-LYY:LRKHR:LEEHSQXEXR, SSVKXQPSRVHH:SATS-AA¹⁷-LYY:LRKHR:RLEEHLEXAXA, RNVQXRPTQVQL:SATS-AA¹⁷-LYY:LRKHR:TLEDHLAXKXE, KIPKAXXVPTEL:SPIS-AA¹⁷-LYK:LKYHY:DMVAEGXGXR, GIPEPXXVPTKM:SPIS-AA¹⁷-LYK:LKYHY:NMVAESXAXR, SIPKAXXVPTEL:SPIS-AA¹⁷-LYK:LKYHY:EMVAEGXGXR, HVTKPTXVPTKL:SPIS-AA¹⁷-LYK:LKYHY:NMVAESXGXH, YVPKPXXVPTKL:SPIS-AA¹⁷-LYK:LKYHY:NMVAESXGXH, TVPKPXXVPTQL:SPIS-AA¹⁷-LYK:LKYHY:NMVAEAXGXH, AVPKAXXVPTKL:SPIS-AA¹⁷-LYK:LKYHY:NMVAEAXGXH, KASKAXXVPTKL:SPIS-AA¹⁷-LYK:LKYHY:GMVAEEXGXR, GSAGPXXVPTKM:SPIS-AA¹⁷-LYK:LKYHY:GMVAERXGXS, AAPASXXVPTRL:SPIS-AA¹⁷-LYK:LKYHY:DMVAEAXGXR, STPPTXXVPTRL:SPIS-AA¹⁷-LYK:LKYHY:DMVAESXGXR, HVPKPXXVPTKL:SPIS-AA¹⁷-LYK:LKYHY:NMVAESXGXH, RVPSTXXVPTKT:SPIS-AA¹⁷-LYK:LKYHY:MIVAEXGXL, ASAAPXXVPTAL:SPIS-AA¹⁷-LYKIKYHY:MIVAEXKXS, ASASPXXVPTDL:SPIS-AA¹⁷-LYK:LKYHY:MIVAEXKXS, ASASPXXVPTDL:SPIS-AA¹⁷-LYK:LKYHY:MVVAEXKXS, KIPKAXXVPTEL:SPIS-AA¹⁷-LYK:LKYHY:DMVVEGXGXR, GIPEPXXVPEKM:SPIS-AA¹⁷-LYK:LKYHY:NMTVESXAXR, SIPKAXXVPTEL:SPIS-AA¹⁷-LYK:LKYHY:EMVVEGXGXR, HVTKPTXAPTKL:SPIS-AA¹⁷-LYK:LKYHY:NMVVRSXGXH, YVPKPXXAPTKL:SPIS-AA¹⁷-LYK:LKYHY:NMVVRSXGXH, TVPKPXXAPTQL:SPIS-AA¹⁷-LYK:LKYHY:NMVVRAXGXH, AVPKAXXAPTKL:SPIS-AA¹⁷-LYK:LKYHY:NMVVKAXGXH, KASKAXXVPTKL:SPIS-AA¹⁷-LYKIKYHY:GMAVSEXGXR, GSAGPXXTPTKM:SPIS-AA¹⁷-LYK:LKYHY:GMVVDRXGXS, AAPASXXVPARL:SPIS-AA¹⁷-LYKIKYHY:DMVVEAXGXR, STPPTXXVPTRL:SPIS-AA¹⁷-LYK:LKYHY:DMVVESXGXR, HVPKPXXAPTKL:SPIS-AA¹⁷-LYK:LKYHY:NMVVRSXGXH, RVPSTXXAPVKT:SPIS-AA¹⁷-LYK:LKYHY:MIVEEXGXL, ASAAPXXVPQAL:SPIS-AA¹⁷-LYK:LKYHY:MIVRSXKXS, ASASPXXVSQDL:SPIS-AA¹⁷-LYK:LKYHY:MIVKSXKXS, ASASPXXVPQDL:SPIS-AA¹⁷-LYK:LKYHY:MVVKSXKXS, NDEGLEXVPTEE:SPIS-AA¹⁷-LYK:LKYHY:FLQHNKXEXR, NDEGLEXVPTGQ:SPIS-AA¹⁷-LYK:LKYHY:LEEHSQXEXR, SSVKXQPSRVHH:SPIS-AA¹⁷-LYK:LKYHY:RLEEHLEXAXA, RNVQXRPTQVQL:SPIS-AA¹⁷-LYK:LKYHY:TLEDHLAXKXE, KIPKAXXVPTEL:EPIS-AA¹⁷-LYL:KFKYE:DMAVXGXGSR, GIPEPXXVPTKM:EPIS-AA¹⁷-LYL:KFKYE:NMAVSSXAXR, SIPKAXXVPTEL:EPIS-AA¹⁷-LYL:KFKYE:EMAVXGXGSR, HVTKPTXVPTKL:EPIS-AA¹⁷-LYL:KFKYE:NMAVSSXGXH, YVPKPXXVPTKL:EPIS-AA¹⁷-LYL:KFKYE:NMAVSSXGXH, TVPKPXXVPTQL:EPIS-AA¹⁷-LYL:KFKYE:NMAVSAXGXH, AVPKAXXVPTKL:EPIS-AA¹⁷-LYL:KFKYE:NMAVSAXGXH, KVGKAXXVPTKL:EPIS-AA¹⁷-LYL:KFKYE:EGMSAVSXGXR, GSAGPXXVPTKM:EPIS-AA¹⁷-LYL:KFKYE:GMAVSRXGXS, AAPASXXVPTRL:EPIS-AA¹⁷-LYL:KFKYE:DMAVSAXGXR, STPPTXXVPTRL:EPIS-AA¹⁷-LYL:KFKYE:DMAVSSXGXR, HVPKPXXVPTKL:EPIS-AA¹⁷-LYL:KFKYE:NMAVSSXGXH, RVPSTXXVPTKT:EPIS-AA¹⁷-LYL:KFKYE:MIAVSXGXL, ASAAPXXVPTAL:EPIS-AA¹⁷-LYL:KFKYE:MIAVSXKXS, ASASPXXVPTDLEPIS-AA¹⁷-LYL:KFKYE:MIAVSXKXS, ASASPXXVPTDLEPIS-AA¹⁷-LYL:KFKYE:MVAVSXKXS, KIPKAXXVPTEL:EPIS-AA¹⁷-LYL:KFKYE:DMVVEGXGXR, GIPEPXXVPEKM:EPIS-AA¹⁷-LYL:KFKYE:NMTVESXAXR, SIPKAXXVPTEL:EPIS-AA¹⁷-LYL:KFKYE:EMVVEGXGXR, HVTKPTXAPTKL:EPIS-AA¹⁷-LYL:KFKYE:NMVVRSXGXH, YVPKPXXAPTKL:EPIS-AA¹⁷-LYL:KFKYE:NMVVRSXGXH, TVPKPXXAPTQL:EPIS-AA¹⁷-LYL:KFKYE:NMVVRAXGXH, AVPKAXXAPTKL:EPIS-AA¹⁷-LYL:KFKYE:NMVVKAXGXH, KVGKAXXVPTKL:EPIS-AA¹⁷-LYL:KFKYE:EGMSVAEXGXR, GSAGPXXTPTKM:EPIS-AA¹⁷-LYL:KFKYE:GMVVDRXGXS, AAPASXXVPARL:EPIS-AA¹⁷-LYL:KFKYE:DMVVEAXGXR, STPPTXXVPTRL:EPIS-AA¹⁷-LYL:KFKYE:DMVVESXGXR, HVPKPXXAPTKL:EPIS-AA¹⁷-LYL:KFKYE:NMVVRSXGXH, RVPSTXXAPVKT:EPIS-AA¹⁷-LYL:KFKYE:MIVEEXGXL, ASAAPXXVPQAL:EPIS-AA¹⁷-LYL:KFKYE:MIVRSXKXS, ASASPXXVSQDLEPIS-AA¹⁷-LYL:KFKYE:MIVKSXKXS, ASASPXXVPQDLEPIS-AA¹⁷-LYL:KFKYE:MVVKSXKXS, NDEGLEXVPTEE:EPIS-AA¹⁷-LYL:KFKYE:FLQHNKXEXR, NDEGLEXVPTGQ:EPIS-AA¹⁷-LYL:KFKYE:LEEHSQXEXR, SSVKXQPSRVHH:EPIS-AA¹⁷-LYL:KFKYE:RLEEHLEXAXA, RNVQXRPTQVQL:EPIS-AA¹⁷-LYL:KFKYE:TLEDHLAXKXE, KIPKAXXTPTEL:SPIN-AA¹⁷-LYF:YGKIP:DMVVDGXGXR, GIPEPXXTPTKM:SPIN-AA¹⁷-LYF:YGKIP:NMVVDSXAXR, SIPKAXXTPTEL:SPIN-AA¹⁷-LYF:YGKIP:EMVVDGXGXR, HVTKPTSTPTKL:SPIN-AA¹⁷-LYF:YGKIP:NMVVDSXGXH, YVPKPXXTPTKL:SPIN-AA¹⁷-LYF:YGKIP:NMVVDSXGXH, TVPKPXXTPTQL:SPIN-AA¹⁷-LYF:YGKIP:NMVVDAXGXH, AVPKAXXTPTKL:SPIN-AA¹⁷-LYF:YGKIP:NMVVDAXGXH, KVGKAXXTPTKL:SPIN-AA¹⁷-LYF:YGKIP:EGMSVVDXGXR, KASKAXXTPTKL:SPIN-AA¹⁷-LYF:YGKIP:GMVVDEXGXR, AAPASXXTPTRL:SPIN-AA¹⁷-LYF:YGKIP:DMVVDAXGXR, STPPTXXTPTRL:SPIN-AA¹⁷-LYF:YGKIP:DMVVDSXGXR, HVPKPXXTPTKL:SPIN-AA¹⁷-LYF:YGKIP:NMVVDSXGXH, RVPSTXXTPTKT:SPIN-AA¹⁷-LYF:YGKIP:MIVVDXGXL, ASAAPXXTPTAL:SPIN-AA¹⁷-LYF:YGKIP:MIVVDXKXS, ASASPXXTPTDL:SPIN-AA¹⁷-LYF:YGKIP:MIVVDXKXS, ASASPXXTPTDL:SPIN-AA¹⁷-LYF:YGKIP:MVVVDXKXS, KIPKAXXVPTEL:SPIN-AA¹⁷-LYF:YGKIP:DMVVEGXGXR, GIPEPXXVPEKM:SPIN-AA¹⁷-LYF:YGKIP:NMTVESXAXR, SIPKAXXVPTEL:SPIN-AA¹⁷-LYF:YGKIP:EMVVEGXGXR, HVTKPTXAPTKL:SPIN-AA¹⁷-LYF:YGKIP:NMVVRSXGXH, YVPKPXXAPTKL:SPIN-AA¹⁷-LYF:YGKIP:NMVVRSXGXH, TVPKPXXAPTQL:SPIN-AA¹⁷-LYF:YGKIP:NMVVRAXGXH, AVPKAXXAPTKL:SPIN-AA¹⁷-LYF:YGKIP:NMVVKAXGXH, KVGKAXXVPTKL:SPIN-AA¹⁷-LYF:YGKIP:EGMSVAEXGXR, KASKAXXVPTKL:SPIN-AA¹⁷-LYF:YGKIP:GMAVSEXGXR, AAPASXXVPARL:SPIN-AA¹⁷-LYF:YGKIP:DMVVEAXGXR, STPPTXXVPTRL:SPIN-AA¹⁷-LYF:YGKIP:DMVVESXGXR, HVPKPXXAPTKL:SPIN-AA¹⁷-LYF:YGKIP:NMVVRSXGXH, RVPSTXXAPVKT:SPIN-AA¹⁷-LYF:YGKIP:MIVEEXGXL, ASAAPXXVPQAL:SPIN-AA¹⁷-LYF:YGKIP:MIVRSXKXS, ASASPXXVSQDL:SPIN-AA¹⁷-LYF:YGKIP:MIVKSXKXS, ASASPXXVPQDL:SPIN-AA¹⁷-LYF:YGKIP:MVVKSXKXS, NDEGLEXVPTEE:SPIN-AA¹⁷-LYF:YGKIP:FLQHNKXEXR, NDEGLEXVPTGQ:SPIN-AA¹⁷-LYF:YGKIP:LEEHSQXEXR, SSVKXQPSRVHH:SPIN-AA¹⁷-LYF:YGKIP:RLEEHLEXAXA, RNVQXRPTQVQL:SPIN-AA¹⁷-LYF:YGKIP:TLEDHLAXKXE, KIPKAXXVPAEL:SPIS-AA¹⁷-LYI:YKQYE:DMVVEGXGXR, GIPEPXXVPAKM:SPIS-AA¹⁷-LYI:YKQYE:NMVVESXAXR, SIPKAXXVPAEL:SPIS-AA¹⁷-LYI:YKQYE:EMVVEGXGXR, HVTKPTXVPAKL:SPIS-AA¹⁷-LYI:YKQYE:NMVVESXGXH, YVPKPXXVPAKL:SPIS-AA¹⁷-LYI:YKQYE:NMVVESXGXH, TVPKPXXVPAQL:SPIS-AA¹⁷-LYI:YKQYE:NMVVEAXGXH, AVPKAXXVPAKL:SPIS-AA¹⁷-LYI:YKQYE:NMVVEAXGXH, KVGKAXXVPAKL:SPIS-AA¹⁷-LYI:YKQYE:EGMSVVEXGXR, KASKAXXVPAKL:SPIS-AA¹⁷-LYI:YKQYE:GMVVEEXGXR, GSAGPXXVPAKM:SPIS-AA¹⁷-LYI:YKQYE:GMVVERXGXS, STPPTXXVPARL:SPIS-AA¹⁷-LYI:YKQYE:DMVVESXGXR, HVPKPXXVPAKL:SPIS-AA¹⁷-LYI:YKQYE:NMVVESXGXH, RVPSTXXVPAKT:SPIS-AA¹⁷-LYI:YKQYE:MIVVEXGXL, ASAAPXXVPAAL:SPIS-AA¹⁷-LYI:YKQYE:MIVVEXKXS, ASASPXXVPADL:SPIS-AA¹⁷-LYI:YKQYE:MIVVEXKXS, ASASPXXVPADL:SPIS-AA¹⁷-LYI:YKQYE:MVVVEXKXS, KIPKAXXVPTEL:SPIS-AA¹⁷-LYI:YKQYE:DMVVEGXGXR, GIPEPXXVPEKM:SPIS-AA¹⁷-LYI:YKQYE:NMTVESXAXR, SIPKAXXVPTEL:SPIS-AA¹⁷-LYI:YKQYE:EMVVEGXGXR, HVTKPTXAPTKL:SPIS-AA¹⁷-LYI:YKQYE:NMVVRSXGXH, YVPKPXXAPTKL:SPIS-AA¹⁷-LYI:YKQYE:NMVVRSXGXH, TVPKPXXAPTQL:SPIS-AA¹⁷-LYI:YKQYE:NMVVRAXGXH, AVPKAXXAPTKL:SPIS-AA¹⁷-LYI:YKQYE:NMVVKAXGXH, KVGKAXXVPTKL:SPIS-AA¹⁷-LYI:YKQYE:EGMSVAEXGXR, KASKAXXVPTKL:SPIS-AA¹⁷-LYI:YKQYE:GMAVSEXGXR, GSAGPXXTPTKM:SPIS-AA¹⁷-LYI:YKQYE:GMVVDRXGXS, STPPTXXVPTRL:SPIS-AA¹⁷-LYI:YKQYE:DMVVESXGXR, HVPKPXXAPTKL:SPIS-AA¹⁷-LYI:YKQYE:NMVVRSXGXH, RVPSTXXAPVKT:SPIS-AA¹⁷-LYI:YKQYE:MIVEEXGXL, ASAAPXXVPQAL:SPIS-AA¹⁷-LYI:YKQYE:MIVRSXKXS, ASASPXXVSQDL:SPIS-AA¹⁷-LYI:YKQYE:MIVKSXKXS, ASASPXXVPQDL:SPIS-AA¹⁷-LYI:YKQYE:MVVKSXKXS, NDEGLEXVPTEE:SPIS-AA¹⁷-LYI:YKQYE:FLQHNKXEXR, NDEGLEXVPTGQ:SPIS-AA¹⁷-LYI:YKQYE:LEEHSQXEXR, SSVKXQPSRVHH:SPIS-AA¹⁷-LYI:YKQYE:RLEEHLEXAXA, RNVQXRPTQVQL:SPIS-AA¹⁷-LYI:YKQYE:TLEDHLAXKXE, KIPKAXXVPTEL:SPIS-AA¹⁷-LFI:YKQYE:DMVVEGXGXR, GIPEPXXVPTKM:SPIS-AA¹⁷-LRYKQYE:NMVVESXAXR, SIPKAXXVPTEL:SPIS-AA¹⁷-LRYKQYE:EMVVEGXGXR, HVTKPTXVPTKL:SPIS-AA¹⁷-LFI:YKQYE:NMVVESXGXH, YVPKPXXVPTKL:SPIS-AA¹⁷-LFLYKQYE:NMVVESXGXH, TVPKPXXVPTQL:SPIS-AA¹⁷-LRYKQYE:NMVVEAXGXH, AVPKAXXVPTKL:SPIS-AA¹⁷-LFI:YKQYE:NMVVEAXGXH, KVGKAXXVPTKL:SPIS-AA¹⁷-LRYKQYE:EGMSVVEXGXR, KASKAXXVPTKL:SPIS-AA¹⁷-LRYKQYE:GMVVEEXGXR, GSAGPXXVPTKM:SPIS-AA¹⁷-LRYKQYE:GMVVERXGXS, AAPASXXVPTRL:SPIS-AA¹⁷-LRYKQYE:DMVVEAXGXR, HVPKPXXVPTKL:SPIS-AA¹⁷-LFLYKQYE:NMVVESXGXH, RVPSTXXVPTKT:SPIS-AA¹⁷-LFI:YKQYE:MIVVEXGXL, ASAAPXXVPTAL:SPIS-AA¹⁷-LRYKQYE:MIVVEXKXS, ASASPXXVPTDL:SPIS-AA¹⁷-LRYKQYE:MIVVEXKXS, ASASPXXVPTDL:SPIS-AA¹⁷-LFI:YKQYE:MVVVEXKXS, GIPEPXXVPEKM:SPIS-AA¹⁷-LRYKQYE:NMTVESXAXR, HVTKPTXAPTKL:SPIS-AA¹⁷-LFINKQYE:NMVVRSXGXH, YVPKPXXAPTKL:SPIS-AA¹⁷-LFI:YKQYE:NMVVRSXGXH, TVPKPXXAPTQL:SPIS-AA¹⁷-LRYKQYE:NMVVRAXGXH, AVPKAXXAPTKL:SPIS-AA¹⁷-LRYKQYE:NMVVKAXGXH, KVGKAXXVPTKL:SPIS-AA¹⁷-LFI:YKQYE:EGMSVAEXGXR, KASKAXXVPTKL:SPIS-AA¹⁷-LRYKQYE:GMAVSEXGXR, GSAGPXXTPTKM:SPIS-AA¹⁷-LRYKQYE:GMVVDRXGXS, AAPASXXVPARL:SPIS-AA¹⁷-LFI:YKQYE:DMVVEAXGXR, HVPKPXXAPTKL:SPIS-AA¹⁷-LFLYKQYE:NMVVRSXGXH, RVPSTXXAPVKT:SPIS-AA¹⁷-LRYKQYE:MIVEEXGXL, ASAAPXXVPQAL:SPIS-AA¹⁷-LFI:YKQYE:MIVRSXKXS, ASASPXXVSQDL:SPIS-AA¹⁷-LFINKQYE:MIVKSXKXS, ASASPXXVPQDL:SPIS-AA¹⁷-LRYKQYE:MVVKSXKXS, NDEGLEXVPTEE:SPIS-AA¹⁷-LFI:YKQYE:FLQHNKXEXR, NDEGLEXVPTGQ:SPIS-AA¹⁷-LRYKQYE:LEEHSQXEXR, SSVKXQPSRVHH:SPIS-AA¹⁷-LRYKQYE:RLEEHLEXAXA, RNVQXRPTQVQL:SPIS-AA¹⁷-LFI:YKQYE:TLEDHLAXKXE, KIPKAXXAPVEL:KPLS-AA¹⁷-LYV:DHHKD:DMVEEGXGXR, GIPEPXXAPVKM:KPLS-AA¹⁷-LYV:DHHKD:NMVEESXAXR, SIPKAXXAPVEL:KPLS-AA¹⁷-LYV:DHHKD:EMVEEGXGXR, HVTKPTXAPVKL:KPLS-AA¹⁷-LYV:DHHKD:NMVEESXGXH, YVPKPXXAPVKL:KPLS-AA¹⁷-LYV:DHHKD:NMVEESXGXH, TVPKPXXAPVQL:KPLS-AA¹⁷-LYV:DHHKD:NMVEEAXGXH, AVPKAXXAPVKL:KPLS-AA¹⁷-LYV:DHHKD:NMVEEAXGXH, KVGKAXXAPVKL:KPLS-AA¹⁷-LYV:DHHKD:EGMSVEEXGXR, KASKAXXAPVKL:KPLS-AA¹⁷-LYV:DHHKD:GMVEEEXGXR, GSAGPXXAPVKM:KPLS-AA¹⁷-LYV:DHHKD:GMVEERXGXS, AAPASXXAPVRL:KPLS-AA¹⁷-LYV:DHHKD:DMVEEAXGXR, STPPTXXAPVRL:KPLS-AA¹⁷-LYV:DHHKD:DMVEESXGXR, HVPKPXXAPVKL:KPLS-AA¹⁷-LYV:DHHKD:NMVEESXGXH, ASAAPXXAPVAL:KPLS-AA¹⁷-LYV:DHHKD:MIVEEXKXS, ASASPXXAPVDL:KPLS-AA¹⁷-LYV:DHHKD:MIVEEXKXS, ASASPXXAPVDL:KPLS-AA¹⁷-LYV:DHHKD:MVVEEXKXS, KIPKAXXVPTEL:KPLS-AA¹⁷-LYV:DHHKD:DMVVEGXGXR, GIPEPXXVPEKM:KPLS-AA¹⁷-LYV:DHHKD:NMTVESXAXR, SIPKAXXVPTEL:KPLS-AA¹⁷-LYV:DHHKD:EMVVEGXGXR, HVTKPTXAPTKL:KPLS-AA¹⁷-LYV:DHHKD:NMVVRSXGXH, YVPKPXXAPTKL:KPLS-AA¹⁷-LYV:DHHKD:NMVVRSXGXH, TVPKPXXAPTQL:KPLS-AA¹⁷-LYV:DHHKD:NMVVRAXGXH, AVPKAXXAPTKL:KPLS-AA¹⁷-LYV:DHHKD:NMVVKAXGXH, KVGKAXXVPTKL:KPLS-AA¹⁷-LYV:DHHKD:EGMSVAEXGXR, KASKAXXVPTKL:KPLS-AA¹⁷-LYV:DHHKD:GMAVSEXGXR, GSAGPXXTPTKM:KPLS-AA¹⁷-LYV:DHHKD:GMVVDRXGXS, AAPASXXVPARL:KPLS-AA¹⁷-LYV:DHHKD:DMVVEAXGXR, STPPTXXVPTRL:KPLS-AA¹⁷-LYV:DHHKD:DMVVESXGXR, HVPKPXXAPTKL:KPLS-AA¹⁷-LYV:DHHKD:NMVVRSXGXH, ASAAPXXVPQAL:KPLS-AA¹⁷-LYV:DHHKD:MIVRSXKXS, ASASPXXVSQDL:KPLS-AA¹⁷-LYV:DHHKD:MIVKSXKXS, ASASPXXVPQDL:KPLS-AA¹⁷-LYV:DHHKD:MVVKSXKXS, NDEGLEXVPTEE:KPLS-AA¹⁷-LYV:DHHKD:FLQHNKXEXR, NDEGLEXVPTGQ:KPLS-AA¹⁷-LYV:DHHKID:LEEHSQXEXR, SSVKXQPSRVHH:KPLS-AA¹⁷-LYV:DHHKD:RLEEHLEXAXA, RNVQXRPTQVQL:KPLS-AA¹⁷-LYV:DHHKD:TLEDHLAXKXE, KIPKAXXVPQEL:EPLP-AA¹⁷-VYY:EQLSN:DMVRXGXGSR, GIPEPXXVPQKM:EPLP-AA¹⁷-VYY:EQLSN:NMVRSSXAXR, SIPKAXXVPQEL:EPLP-AA¹⁷-VYY:EQLSN:EMVRXGXGSR, HVTKPTXVPQKL:EPLP-AA¹⁷-VYY:EQLSN:NMVRSSXGXH, YVPKPXXVPQKL:EPLP-AA¹⁷-VYY:EQLSN:NMVRSSXGXH, TVPKPXXVPQQL:EPLP-AA¹⁷-VYY:EQLSN:NMVRSAXGXH, AVPKAXXVPQKL:EPLP-AA¹⁷-VYY:EQLSN:NMVRSAXGXH, KVGKAXXVPQKL:EPLP-AA¹⁷-VYY:EQLSN:EGMSVRSXGXR, KASKAXXVPQKL:EPLP-AA¹⁷-VYY:EQLSN:GMVRSEXGXR, GSAGPXXVPQKM:EPLP-AA¹⁷-VYY:EQLSN:GMVRSRXGXS, AAPASXXVPQRL:EPLP-AA¹⁷-VYY:EQLSN:DMVRSAXGXR, STPPTXXVPQRL:EPLP-AA¹⁷-VYY:EQLSN:DMVRSSXGXR, HVPKPXXVPQKL:EPLP-AA¹⁷-VYY:EQLSN:NMVRSSXGXH, RVPSTXXVPQKT:EPLP-AA¹⁷-VYY:EQLSN:MIVRSXGXL, ASASPXXVPQDLEPLP-AA¹⁷-VYY:EQLSN:MIVRSXKXS, ASASPXXVPQDLEPLP-AA¹⁷-VYY:EQLSN:MVVRSXKXS, KIPKAXXVPTEL:EPLP-AA¹⁷-VYY:EQLSN:DMVVEGXGXR, GIPEPXXVPEKM:EPLP-AA¹⁷-VYY:EQLSN:NMTVESXAXR, SIPKAXXVPTEL:EPLP-AA¹⁷-VYY:EQLSN:EMVVEGXGXR, HVTKPTXAPTKL:EPLP-AA¹⁷-VYY:EQLSN:NMVVRSXGXH, YVPKPXXAPTKL:EPLP-AA¹⁷-VYY:EQLSN:NMVVRSXGXH, TVPKPXXAPTQL:EPLP-AA¹⁷-VYY:EQLSN:NMVVRAXGXH, AVPKAXXAPTKL:EPLP-AA¹⁷-VYY:EQLSN:NMVVKAXGXH, KVGKAXXVPTKL:EPLP-AA¹⁷-VYY:EQLSN:EGMSVAEXGXR, KASKAXXVPTKL:EPLP-AA¹⁷-VYY:EQLSN:GMAVSEXGXR, GSAGPXXTPTKM:EPLP-AA¹⁷-VYY:EQLSN:GMVVDRXGXS, AAPASXXVPARL:EPLP-AA¹⁷-VYY:EQLSN:DMVVEAXGXR, STPPTXXVPTRL:EPLP-AA¹⁷-VYY:EQLSN:DMVVESXGXR, HVPKPXXAPTKL:EPLP-AA¹⁷-VYY:EQLSN:NMVVRSXGXH, RVPSTXXAPVKT:EPLP-AA¹⁷-VYY:EQLSN:MIVEEXGXL, ASASPXXVSQDLEPLP-AA¹⁷-VYY:EQLSN:MIVKSXKXS, ASASPXXVPQDLEPLP-AA¹⁷-VYY:EQLSN:MVVKSXKXS, NDEGLEXVPTEE:EPLP-AA¹⁷-VYY:EQLSN:FLQHNKXEXR, NDEGLEXVPTGQ:EPLP-AA¹⁷-VYY:EQLSN:LEEHSQXEXR, SSVKXQPSRVHH:EPLP-AA¹⁷-VYY:EQLSN:RLEEHLEXAXA, RNVQXRPTQVQL:EPLP-AA¹⁷-VYY:EQLSN:TLEDHLAXKXE, KIPKAXXVSQEL:EPLT-AA¹⁷-LYY:EQLSN:DMVKXGXGSR, GIPEPXXVSQKM:EPLT-AA¹⁷-LYY:EQLSN:NMVKSSXAXR, SIPKAXXVSQEL:EPLT-AA¹⁷-LYY:EQLSN:EMVKXGXGSR, HVTKPTXVSQKL:EPLT-AA¹⁷-LYY:EQLSN:NMVKSSXGXH, YVPKPXXVSQKL:EPLT-AA¹⁷-LYY:EQLSN:NMVKSSXGXH, TVPKPXXVSQQL:EPLT-AA¹⁷-LYY:EQLSN:NMVKSAXGXH, AVPKAXXVSQKL:EPLT-AA¹⁷-LYY:EQLSN:NMVKSAXGXH, KVGKAXXVSQKL:EPLT-AA¹⁷-LYY:EQLSN:EGMSVKSXGXR, KASKAXXVSQKL:EPLT-AA¹⁷-LYY:EQLSN:GMVKSEXGXR, GSAGPXXVSQKM:EPLT-AA¹⁷-LYY:EQLSN:GMVKSRXGXS, AAPASXXVSQRL:EPLT-AA¹⁷-LYY:EQLSN:DMVKSAXGXR, STPPTXXVSQRL:EPLT-AA¹⁷-LYY:EQLSN:DMVKSSXGXR, HVPKPXXVSQKL:EPLT-AA¹⁷-LYY:EQLSN:NMVKSSXGXH, RVPSTXXVSQKT:EPLT-AA¹⁷-LYY:EQLSN:MIVKSXGXL, ASAAPXXVSQAL:EPLT-AA¹⁷-LYY:EQLSN:MIVKSXKXS, ASASPXXVSQDL:EPLT-AA¹⁷-LYY:EQLSN:MVVKSXKXS, KIPKAXXVPTEL:EPLT-AA¹⁷-LYY:EQLSN:DMVVEGXGXR, GIPEPXXVPEKM:EPLT-AA¹⁷-LYY:EQLSN:NMTVESXAXR, SIPKAXXVPTEL:EPLT-AA¹⁷-LYY:EQLSN:EMVVEGXGXR, HVTKPTXAPTKL:EPLT-AA¹⁷-LYY:EQLSN:NMVVRSXGXH, YVPKPXXAPTKL:EPLT-AA¹⁷-LYY:EQLSN:NMVVRSXGXH, TVPKPXXAPTQL:EPLT-AA¹⁷-LYY:EQLSN:NMVVRAXGXH, AVPKAXXAPTKL:EPLT-AA¹⁷-LYY:EQLSN:NMVVKAXGXH, KVGKAXXVPTKL:EPLT-AA¹⁷-LYY:EQLSN:EGMSVAEXGXR, KASKAXXVPTKL:EPLT-AA¹⁷-LYY:EQLSN:GMAVSEXGXR, GSAGPXXTPTKM:EPLT-AA¹⁷-LYY:EQLSN:GMVVDRXGXS, AAPASXXVPARL:EPLT-AA¹⁷-LYY:EQLSN:DMVVEAXGXR, STPPTXXVPTRL:EPLT-AA¹⁷-LYY:EQLSN:DMVVESXGXR, HVPKPXXAPTKL:EPLT-AA¹⁷-LYY:EQLSN:NMVVRSXGXH, RVPSTXXAPVKT:EPLT-AA¹⁷-LYY:EQLSN:MIVEEXGXL, ASAAPXXVPQAL:EPLT-AA¹⁷-LYY:EQLSN:MIVRSXKXS, NDEGLEXVPTEE:EPLT-AA¹⁷-LYY:EQLSN:FLQHNKXEXR, NDEGLEXVPTGQ:EPLT-AA¹⁷-LYY:EQLSN:LEEHSQXEXR, SSVKXQPSRVHH:EPLT-AA¹⁷-LYY:EQLSN:RLEEHLEXAXA, RNVQXRPTQVQL:EPLT-AA¹⁷-LYY:EQLSN:TLEDHLAXKXE, KIPKAXXVPQEL:EPLT-AA¹⁷-LYY:EQLSN:DMVKXGXGSR, GIPEPXXVPQKM:EPLT-AA¹⁷-LYY:EQLSN:NMVKSSXAXR, SIPKAXXVPQEL:EPLT-AA¹⁷-LYY:EQLSN:EMVKXGXGSR, HVTKPTXVPQKL:EPLT-AA¹⁷-LYY:EQLSN:NMVKSSXGXH, YVPKPXXVPQKL:EPLT-AA¹⁷-LYY:EQLSN:NMVKSSXGXH, TVPKPXXVPQQL:EPLT-AA¹⁷-LYY:EQLSN:NMVKSAXGXH, AVPKAXXVPQKL:EPLT-AA¹⁷-LYY:EQLSN:NMVKSAXGXH, KVGKAXXVPQKL:EPLT-AA¹⁷-LYY:EQLSN:EGMSVKSXGXR, KASKAXXVPQKL:EPLT-AA¹⁷-LYY:EQLSN:GMVKSEXGXR, GSAGPXXVPQKM:EPLT-AA¹⁷-LYY:EQLSN:GMVKSRXGXS, AAPASXXVPQRL:EPLT-AA¹⁷-LYY:EQLSN:DMVKSAXGXR, STPPTXXVPQRL:EPLT-AA¹⁷-LYY:EQLSN:DMVKSSXGXR, HVPKPXXVPQKL:EPLT-AA¹⁷-LYY:EQLSN:NMVKSSXGXH, RVPSTXXVPQKT:EPLT-AA¹⁷-LYY:EQLSN:MIVKSXGXL, ASAAPXXVPQAL:EPLT-AA¹⁷-LYY:EQLSN:MIVKSXKXS, ASASPXXVPQDL:EPLT-AA¹⁷-LYY:EQLSN:MIVKSXKXS, NDEGLEXVPTGQ:SNIT-AA¹⁷-QIM:IGEMS:LEQHNQXEXR, KIPKAXXVPTEL:SNIT-AA¹⁷-QIM:IGEMS:DMVVEGXGXR, GIPEPXXVPEKM:SNIT-AA¹⁷-QIM:IGEMS:NMTVESXAXR, SIPKAXXVPTEL:SNIT-AA¹⁷-QIM:IGEMS:EMVVEGXGXR, HVTKPTXAPTKL:SNIT-AA¹⁷-QIM:IGEMS:NMVVRSXGXH, YVPKPXXAPTKL:SNIT-AA¹⁷-QIM:IGEMS:NMVVRSXGXH, TVPKPXXAPTQL:SNIT-AA¹⁷-QIM:IGEMS:NMVVRAXGXH, AVPKAXXAPTKL:SNIT-AA¹⁷-QIM:IGEMS:NMVVKAXGXH, KVGKAXXVPTKL:SNIT-AA¹⁷-QIM:IGEMS:EGMSVAEXGXR, KASKAXXVPTKL:SNIT-AA¹⁷-QIM:IGEMS:GMAVSEXGXR, GSAGPXXTPTKM:SNIT-AA¹⁷-QIM:IGEMS:GMVVDRXGXS, AAPASXXVPARL:SNIT-AA¹⁷-QIM:IGEMS:DMVVEAXGXR, STPPTXXVPTRL:SNIT-AA¹⁷-QIM:IGEMS:DMVVESXGXR, HVPKPXXAPTKL:SNIT-AA¹⁷-QIM:IGEMS:NMVVRSXGXH, RVPSTXXAPVKT:SNIT-AA¹⁷-QIM:IGEMS:MIVEEXGXL, ASAAPXXVPQAL:SNIT-AA¹⁷-QIM:IGEMS:MIVRSXKXS, ASASPXXVSQDL:SNIT-AA¹⁷-QIM:IGEMS:MIVKSXKXS, ASASPXXVPQDL:SNIT-AA¹⁷-QIM:IGEMS:MVVKSXKXS, NDEGLEXVPTGQ:SNIT-AA¹⁷-QIM:IGEMS:LEEHSQXEXR, SSVKXQPSRVHH:SNIT-AA¹⁷-QIM:IGEMS:RLEEHLEXAXA, RNVQXRPTQVQL:SNIT-AA¹⁷-QIM:IGEMS:TLEDHLAXKXE, NDEGLEXVPTEE:SNIT-AA¹⁷-QIM:LGEMS:FLEHXKXESR, KIPKAXXVPTEL:SNIT-AA¹⁷-QIM:LGEMS:DMVVEGXGXR, GIPEPXXVPEKM:SNIT-AA¹⁷-QIM:LGEMS:NMTVESXAXR, SIPKAXXVPTEL:SNIT-AA¹⁷-QIM:LGEMS:EMVVEGXGXR, HVTKPTXAPTKL:SNIT-AA¹⁷-QIM:LGEMS:NMVVRSXGXH, YVPKPXXAPTKL:SNIT-AA¹⁷-QIM:LGEMS:NMVVRSXGXH, TVPKPXXAPTQL:SNIT-AA¹⁷-QIM:LGEMS:NMVVRAXGXH, AVPKAXXAPTKL:SNIT-AA¹⁷-QIM:LGEMS:NMVVKAXGXH, KVGKAXXVPTKL:SNIT-AA¹⁷-QIM:LGEMS:EGMSVAEXGXR, KASKAXXVPTKL:SNIT-AA¹⁷-QIM:LGEMS:GMAVSEXGXR, GSAGPXXTPTKM:SNIT-AA¹⁷-QIM:LGEMS:GMVVDRXGXS, AAPASXXVPARL:SNIT-AA¹⁷-QIM:LGEMS:DMVVEAXGXR, STPPTXXVPTRL:SNIT-AA¹⁷-QIM:LGEMS:DMVVESXGXR, HVPKPXXAPTKL:SNIT-AA¹⁷-QIM:LGEMS:NMVVRSXGXH, RVPSTXXAPVKT:SNIT-AA¹⁷-QIM:LGEMS:MIVEEXGXL, ASAAPXXVPQAL:SNIT-AA¹⁷-QIM:LGEMS:MIVRSXKXS, ASASPXXVSQDL:SNIT-AA¹⁷-QIM:LGEMS:MIVKSXKXS, ASASPXXVPQDL:SNIT-AA¹⁷-QIM:LGEMS:MVVKSXKXS, NDEGLEXVPTEE:SNIT-AA¹⁷-QIM:LGEMS:FLQHNKXEXR, SSVKXQPSRVHH:SNIT-AA¹⁷-QIM:LGEMS:RLEEHLEXAXA, RNVQXRPTQVQL:SNIT-AA¹⁷-QIM:LGEMS:TLEDHLAXKXE, RNVQXRPSRVQL:RSVK-AA¹⁷-AKV:KEVQV:TLEEHLAXKXE, KIPKAXXVPTEL:RSVK-AA¹⁷-AKV:KEVQV:DMVVEGXGXR, GIPEPXXVPEKM:RSVK-AA¹⁷-AKV:KEVQV:NMTVESXAXR, SIPKAXXVPTEL:RSVK-AA¹⁷-AKV:KEVQV:EMVVEGXGXR, HVTKPTXAPTKL:RSVK-AA¹⁷-AKV:KEVQV:NMVVRSXGXH, YVPKPXXAPTKL:RSVK-AA¹⁷-AKV:KEVQV:NMVVRSXGXH, TVPKPXXAPTQL:RSVK-AA¹⁷-AKV:KEVQV:NMVVRAXGXH, AVPKAXXAPTKL:RSVK-AA¹⁷-AKV:KEVQV:NMVVKAXGXH, KVGKAXXVPTKL:RSVK-AA¹⁷-AKV:KEVQV:EGMSVAEXGXR, KASKAXXVPTKL:RSVK-AA¹⁷-AKV:KEVQV:GMAVSEXGXR, GSAGPXXTPTKM:RSVK-AA¹⁷-AKV:KEVQV:GMVVDRXGXS, AAPASXXVPARL:RSVK-AA¹⁷-AKV:KEVQV:DMVVEAXGXR, STPPTXXVPTRL:RSVK-AA¹⁷-AKV:KEVQV:DMVVESXGXR, HVPKPXXAPTKL:RSVK-AA¹⁷-AKV:KEVQV:NMVVRSXGXH, RVPSTXXAPVKT:RSVK-AA¹⁷-AKV:KEVQV:MIVEEXGXL, ASAAPXXVPQAL:RSVK-AA¹⁷-AKV:KEVQV:MIVRSXKXS, ASASPXXVSQDL:RSVK-AA¹⁷-AKV:KEVQV:MIVKSXKXS, ASASPXXVPQDL:RSVK-AA¹⁷-AKV:KEVQV:MVVKSXKXS, NDEGLEXVPTEE:RSVK-AA¹⁷-AKV:KEVQV:FLQHNKXEXR, NDEGLEXVPTGQ:RSVK-AA¹⁷-AKV:KEVQVIEEHSQXEXR, RNVQXRPTQVQL:RSVK-AA¹⁷-AKV:KEVQV:TLEDHLAXKXE, SSVKXQPTQVHH:RPVQ-AA¹⁷-RKI:KKATV:RLEDHLEXAXA, KIPKAXXVPTEL:RPVQ-AA¹⁷-RKI:KKATV:DMVVEGXGXR, GIPEPXXVPEKM:RPVQ-AA¹⁷-RKI:KKATV:NMTVESXAXR, SIPKAXXVPTEL:RPVQ-AA¹⁷-RKI:KKATV:EMVVEGXGXR, HVTKPTXAPTKL:RPVQ-AA¹⁷-RKI:KKATV:NMVVRSXGXH, YVPKPXXAPTKL:RPVQ-AA¹⁷-RKI:KKATV:NMVVRSXGXH, TVPKPXXAPTQL:RPVQ-AA¹⁷-RKI:KKATV:NMVVRAXGXH, AVPKAXXAPTKL:RPVQ-AA¹⁷-RKI:KKATV:NMVVKAXGXH, KVGKAXXVPTKL:RPVQ-AA¹⁷-RKI:KKATV:EGMSVAEXGXR, KASKAXXVPTKL:RPVQ-AA¹⁷-RKI:KKATV:GMAVSEXGXR, GSAGPXXTPTKM:RPVQ-AA¹⁷-RKI:KKATV:GMVVDRXGXS, AAPASXXVPARL:RPVQ-AA¹⁷-RKI:KKATV:DMVVEAXGXR, STPPTXXVPTRL:RPVQ-AA¹⁷-RKI:KKATV:DMVVESXGXR, HVPKPXXAPTKL:RPVQ-AA¹⁷-RKI:KKATV:NMVVRSXGXH, RVPSTXXAPVKT:RPVQ-AA¹⁷-RKI:KKATV:MIVEEXGXL, ASAAPXXVPQAL:RPVQ-AA¹⁷-RKI:KKATV:MIVRSXKXS, ASASPXXVSQDL:RPVQ-AA¹⁷-RKI:KKATV:MIVKSXKXS, ASASPXXVPQDL:RPVQ-AA¹⁷-RKI:KKATV:MVVKSXKXS, NDEGLEXVPTEE:RPVQ-AA¹⁷-RKI:KKATV:FLQHNKXEXR, NDEGLEXVPTGQ:RPVQ-AA¹⁷-RKI:KKATV:LEEHSQXEXR and SSVKXQPSRVHH:RPVQ-AA¹⁷-RKI:KKATV:RLEEHLEXAXA; and wherein AA¹⁷ is selected from the group consisting of G, A, V, L, I, P, F, M, W, T and S (in particular is selected from the group consisting of M, I, L, V and T).

[0433] In particular, in certain embodiments, the hexaplet PEP7:PEP3:PEP1:PEP2:PEP4:PEP8 is selected from the group consisting of GIPEPXX:VPT:SAIS:LKNYQ:VVE:SXAXR, SIPKAXX:VPT:SAIS:LKNYQ:VVE:GXGXR, HVTKPTX:VPT:SAIS:LKNYQ:VVE:SXGXH, YVPKPXX:VPT:SAIS:LKNYQ:VVE:SXGXH, TVPKPXX:VPT:SAIS:LKNYQ:VVE:AXGXH, AVPKAXX:VPT:SAIS:LKNYQ:VVE:AXGXH, KVGKAXX:VPT:SAIS:LKNYQ:VVE:XGXR, KASKAXX:VPT:SAIS:LKNYQ:VVE:EXGXR, GSAGPXX:VPT:SAIS:LKNYQ:VVE:RXGXS, AAPASXX:VPT:SAIS:LKNYQ:VVE:AXGXR, STPPTXX:VPT:SAIS:LKNYQ:VVE:SXGXR, HVPKPXX:VPT:SAIS:LKNYQ:VVE:SXGXH, RVPSTXX:VPT:SAIS:LKNYQ:VVE:XGXL, ASAAPXX:VPT:SAIS:LKNYQ:VVE:XKXS, ASASPXX:VPT:SAIS:LKNYQ:VVE:XKXS, NDEGLEX:VPT:SAIS:LKNYQ:VVE:KXEXR, NDEGLEX:VPT:SAIS:LKNYQ:VVE:QXEXR, SSVKXQP:VPT:SAIS:LKNYQ:VVE:LEXAXA, RNVQXRP:VPT:SAIS:LKNYQ:VVE:LAXKXE, GIPEPXX:VPE:SAIS:LKNYQ:TVE:SXAXR, HVTKPTX:APT:SAIS:LKNYQ:VVR:SXGXH, YVPKPXX:APT:SAIS:LKNYQ:VVR:SXGXH, TVPKPXX:APT:SAIS:LKNYQ:VVR:AXGXH, AVPKAXX:APT:SAIS:LKNYQ:VVK:AXGXH, KVGKAXX:VPT:SAIS:LKNYQ:VAE:XGXR, KASKAXX:VPT:SAIS:LKNYQ:AVS:EXGXR, GSAGPXX:TPT:SAIS:LKNYQ:VVD:RXGXS, AAPASXX:VPA:SAIS:LKNYQ:VVE:AXGXR, HVPKPXX:APT:SAIS:LKNYQ:VVR:SXGXH, RVPSTXX:APV:SAIS:LKNYQ:VEE:XGXL, ASAAPXX:VPQ:SAIS:LKNYQ:VRS:XKXS, ASASPXX:VSQ:SAIS:LKNYQ:VKS:XKXS, ASASPXX:VPQ:SAIS:LKNYQ:VKS:XKXS, NDEGLEX:VPT:SAIS:LKNYQ:QHN:KXEXR, NDEGLEX:VPT:SAIS:LKNYQ:EHS:QXEXR, SSVKXQP:SRV:SAIS:LKNYQ:EEH:LEXAXA, RNVQXRP:TQV:SAIS:LKNYQ:EDH:LAXKXE, KIPKAXX:VPE:SSLS:LKVYP:TVE:GXGXR, SIPKAXX:VPE:SSLS:LKVYP:TVE:GXGXR, HVTKPTX:VPE:SSLS:LKVYP:TVE:SXGXH, YVPKPXX:VPE:SSLS:LKVYP:TVE:SXGXH, TVPKPXX:VPE:SSLS:LKVYP:TVE:AXGXH, AVPKAXX:VPE:SSLS:LKVYP:TVE:AXGXH, KVGKAXX:VPE:SSLS:LKVYP:TVE:XGXR, KASKAXX:VPE:SSLS:LKVYP:TVE:EXGXR, GSAGPXX:VPE:SSLS:LKVYP:TVE:RXGXS, AAPASXX:VPE:SSLS:LKVYP:TVE:AXGXR, STPPTXX:VPE:SSLS:LKVYP:TVE:SXGXR, HVPKPXX:VPE:SSLS:LKVYP:TVE:SXGXH, RVPSTXX:VPE:SSLS:LKVYP:TVE:XGXL, ASAAPXX:VPE:SSLS:LKVYP:TVE:XKXS, ASASPXX:VPE:SSLS:LKVYP:TVE:XKXS, NDEGLEX:VPE:SSLS:LKVYP:TVE:KXEXR, NDEGLEX:VPE:SSLS:LKVYP:TVE:QXEXR, SSVKXQP:VPE:SSLS:LKVYP:TVE:LEXAXA, RNVQXRP:VPE:SSLS:LKVYP:TVE:LAXKXE, KIPKAXX:VPT:SSLS:LKVYP:VVE:GXGXR, SIPKAXX:VPT:SSLS:LKVYP:VVE:GXGXR, HVTKPTX:APT:SSLS:LKVYP:VVR:SXGXH, YVPKPXX:APT:SSLS:LKVYP:VVR:SXGXH, TVPKPXX:APT:SSLS:LKVYP:VVR:AXGXH, AVPKAXX:APT:SSLS:LKVYP:VVK:AXGXH, KVGKAXX:VPT:SSLS:LKVYP:VAE:XGXR, KASKAXX:VPT:SSLS:LKVYP:AVS:EXGXR, GSAGPXX:TPT:SSLS:LKVYP:VVD:RXGXS, AAPASXX:VPA:SSLS:LKVYP:VVE:AXGXR, STPPTXX:VPT:SSLS:LKVYP:VVE:SXGXR, HVPKPXX:APT:SSLS:LKVYP:VVR:SXGXH, RVPSTXX:APV:SSLS:LKVYP:VEE:XGXL, ASAAPXX:VPQ:SSLS:LKVYP:VRS:XKXS, ASASPXX:VSQ:SSLS:LKVYP:VKS:XKXS, ASASPXX:VPQ:SSLS:LKVYP:VKS:XKXS, NDEGLEX:VPT:SSLS:LKVYP:QHN:KXEXR, NDEGLEX:VPT:SSLS:LKVYP:EHS:QXEXR, SSVKXQP:SRV:SSLS:LKVYP:EEH:LEXAXA, RNVQXRP:TQV:SSLS:LKVYP:EDH:LAXKXE, KIPKAXX:VPT:SAIS:LKNYQ:VVE:GXGXR, KIPKAXX:APT:NAIS:LKKYR:VVR:GXGXR, GIPEPXX:APT:NAIS:LKKYR:VVR:SXAXR, SIPKAXX:APT:NAIS:LKKYR:VVR:GXGXR, YVPKPXX:APT:NAIS:LKKYR:VVR:SXGXH, TVPKPXX:APT:NAIS:LKKYR:VVR:AXGXH, AVPKAXX:APT:NAIS:LKKYR:VVR:AXGXH, KVGKAXX:APT:NAIS:LKKYR:VVR:XGXR, KASKAXX:APT:NAIS:LKKYR:VVR:EXGXR, GSAGPXX:APT:NAIS:LKKYR:VVR:RXGXS, AAPASXX:APT:NAIS:LKKYR:VVR:AXGXR, STPPTXX:APT:NAIS:LKKYR:VVR:SXGXR, HVPKPXX:APT:NAIS:LKKYR:VVR:SXGXH, RVPSTXX:APT:NAIS:LKKYR:VVR:XGXL, ASAAPXX:APT:NAIS:LKKYR:VVR:XKXS, ASASPXX:APT:NAIS:LKKYR:VVR:XKXS, NDEGLEX:APT:NAIS:LKKYR:VVR:KXEXR, NDEGLEX:APT:NAIS:LKKYR:VVR:QXEXR, SSVKXQP:APT:NAIS:LKKYR:VVR:LEXAXA, RNVQXRP:APT:NAIS:LKKYR:VVR:LAXKXE, KIPKAXX:VPT:NAIS:LKKYR:VVE:GXGXR, GIPEPXX:VPE:NAIS:LKKYR:TVE:SXAXR, SIPKAXX:VPT:NAIS:LKKYR:VVE:GXGXR, AVPKAXX:APT:NAIS:LKKYR:VVK:AXGXH, KVGKAXX:VPT:NAIS:LKKYR:VAE:XGXR, KASKAXX:VPT:NAIS:LKKYR:AVS:EXGXR, GSAGPXX:TPT:NAIS:LKKYR:VVD:RXGXS, AAPASXX:VPA:NAIS:LKKYR:VVE:AXGXR, STPPTXX:VPT:NAIS:LKKYR:VVE:SXGXR, RVPSTXX:APV:NAIS:LKKYR:VEE:XGXL, ASAAPXX:VPQ:NAIS:LKKYR:VRS:XKXS, ASASPXX:VSQ:NAIS:LKKYR:VKS:XKXS, ASASPXX:VPQ:NAIS:LKKYR:VKS:XKXS, NDEGLEX:VPT:NAIS:LKKYR:QHN:KXEXR, NDEGLEX:VPT:NAIS:LKKYR:EHS:QXEXR, SSVKXQP:SRV:NAIS:LKKYR:EEH:LEXAXA, RNVQXRP:TQV:NAIS:LKKYR:EDH:LAXKXE, HVTKPTX:APT:NAIS:LKKYR:VVR:SXGXH, KIPKAXX:APT:SATS:LRKHR:VVK:GXGXR, GIPEPXX:APT:SATS:LRKHR:VVK:SXAXR, SIPKAXX:APT:SATS:LRKHR:VVK:GXGXR, HVTKPTX:APT:SATS:LRKHR:VVK:SXGXH, YVPKPXX:APT:SATS:LRKHR:VVK:SXGXH, TVPKPXX:APT:SATS:LRKHR:VVK:AXGXH, KVGKAXX:APT:SATS:LRKHR:VVK:XGXR, KASKAXX:APT:SATS:LRKHR:VVK:EXGXR, GSAGPXX:APT:SATS:LRKHR:VVK:RXGXS, AAPASXX:APT:SATS:LRKHR:VVK:AXGXR, STPPTXX:APT:SATS:LRKHR:VVK:SXGXR, HVPKPXX:APT:SATS:LRKHR:VVK:SXGXH, RVPSTXX:APT:SATS:LRKHR:VVK:XGXL, ASAAPXX:APT:SATS:LRKHR:VVK:XKXS, ASASPXX:APT:SATS:LRKHR:VVK:XKXS, NDEGLEX:APT:SATS:LRKHR:VVK:KXEXR, NDEGLEX:APT:SATS:LRKHR:VVK:QXEXR, SSVKXQP:APT:SATS:LRKHR:VVK:LEXAXA, RNVQXRP:APT:SATS:LRKHR:VVK:LAXKXE, KIPKAXX:VPT:SATS:LRKHR:VVE:GXGXR, GIPEPXX:VPE:SATS:LRKHR:TVE:SXAXR, SIPKAXX:VPT:SATS:LRKHR:VVE:GXGXR, HVTKPTX:APT:SATS:LRKHR:VVR:SXGXH, YVPKPXX:APT:SATS:LRKHR:VVR:SXGXH, TVPKPXX:APT:SATS:LRKHR:VVR:AXGXH, KVGKAXX:VPT:SATS:LRKHR:VAE:XGXR, KASKAXX:VPT:SATS:LRKHR:AVS:EXGXR, GSAGPXX:TPT:SATS:LRKHR:VVD:RXGXS, AAPASXX:VPA:SATS:LRKHR:VVE:AXGXR, STPPTXX:VPT:SATS:LRKHR:VVE:SXGXR, HVPKPXX:APT:SATS:LRKHR:VVR:SXGXH, RVPSTXX:APV:SATS:LRKHR:VEE:XGXL, ASAAPXX:VPQ:SATS:LRKHR:VRS:XKXS, ASASPXX:VSQ:SATS:LRKHR:VKS:XKXS, ASASPXX:VPQ:SATS:LRKHR:VKS:XKXS, NDEGLEX:VPT:SATS:LRKHR:QHN:KXEXR, NDEGLEX:VPT:SATS:LRKHR:EHS:QXEXR, SSVKXQP:SRV:SATS:LRKHR:EEH:LEXAXA, RNVQXRP:TQV:SATS:LRKHR:EDH:LAXKXE, KIPKAXX:VPT:SPIS:LKYHY:VAE:GXGXR, GIPEPXX:VPT:SPIS:LKYHY:VAE:SXAXR, SIPKAXX:VPT:SPIS:LKYHY:VAE:GXGXR, HVTKPTX:VPT:SPIS:LKYHY:VAE:SXGXH, YVPKPXX:VPT:SPIS:LKYHY:VAE:SXGXH, TVPKPXX:VPT:SPIS:LKYHY:VAE:AXGXH, AVPKAXX:VPT:SPIS:LKYHY:VAE:AXGXH, KASKAXX:VPT:SPIS:LKYHY:VAE:EXGXR, GSAGPXX:VPT:SPIS:LKYHY:VAE:RXGXS, AAPASXX:VPT:SPIS:LKYHY:VAE:AXGXR, STPPTXX:VPT:SPIS:LKYHY:VAE:SXGXR, HVPKPXX:VPT:SPIS:LKYHY:VAE:SXGXH, RVPSTXX:VPT:SPIS:LKYHY:VAE:XGXL, ASAAPXX:VPT:SPIS:LKYHY:VAE:XKXS, ASASPXX:VPT:SPIS:LKYHY:VAE:XKXS, NDEGLEX:VPT:SPIS:LKYHY:VAE:KXEXR, NDEGLEX:VPT:SPIS:LKYHY:VAE:QXEXR, SSVKXQP:VPT:SPIS:LKYHY:VAE:LEXAXA, RNVQXRP:VPT:SPIS:LKYHY:VAE:LAXKXE, KIPKAXX:VPT:SPIS:LKYHY:VVE:GXGXR, GIPEPXX:VPE:SPIS:LKYHY:TVE:SXAXR, SIPKAXX:VPT:SPIS:LKYHY:VVE:GXGXR, HVTKPTX:APT:SPIS:LKYHY:VVR:SXGXH, YVPKPXX:APT:SPIS:LKYHY:VVR:SXGXH, TVPKPXX:APT:SPIS:LKYHY:VVR:AXGXH, AVPKAXX:APT:SPIS:LKYHY:VVK:AXGXH, KASKAXX:VPT:SPIS:LKYHY:AVS:EXGXR, GSAGPXX:TPT:SPIS:LKYHY:VVD:RXGXS, AAPASXX:VPA:SPIS:LKYHY:VVE:AXGXR, STPPTXX:VPT:SPIS:LKYHY:VVE:SXGXR, HVPKPXX:APT:SPIS:LKYHY:VVR:SXGXH, RVPSTXX:APV:SPIS:LKYHY:VEE:XGXL, ASAAPXX:VPQ:SPIS:LKYHY:VRS:XKXS, ASASPXX:VSQ:SPIS:LKYHY:VKS:XKXS, ASASPXX:VPQ:SPIS:LKYHY:VKS:XKXS, NDEGLEX:VPT:SPIS:LKYHY:QHN:KXEXR, NDEGLEX:VPT:SPIS:LKYHY:EHS:QXEXR, SSVKXQP:SRV:SPIS:LKYHY:EEH:LEXAXA, RNVQXRP:TQV:SPIS:LKYHY:EDH:LAXKXE, KIPKAXX:VPT:EPIS:KFKYE:AVS:GXGXR, GIPEPXX:VPT:EPIS:KFKYE:AVS:SXAXR, SIPKAXX:VPT:EPIS:KFKYE:AVS:GXGXR, HVTKPTX:VPT:EPIS:KFKYE:AVS:SXGXH, YVPKPXX:VPT:EPIS:KFKYE:AVS:SXGXH, TVPKPXX:VPT:EPIS:KFKYE:AVS:AXGXH, AVPKAXX:VPT:EPIS:KFKYE:AVS:AXGXH, KVGKAXX:VPT:EPIS:KFKYE:AVS:XGXR, GSAGPXX:VPT:EPIS:KFKYE:AVS:RXGXS, AAPASXX:VPT:EPIS:KFKYE:AVS:AXGXR, STPPTXX:VPT:EPIS:KFKYE:AVS:SXGXR, HVPKPXX:VPT:EPIS:KFKYE:AVS:SXGXH, RVPSTXX:VPT:EPIS:KFKYE:AVS:XGXL, ASAAPXX:VPT:EPIS:KFKYE:AVS:XKXS, ASASPXX:VPT:EPIS:KFKYE:AVS:XKXS, NDEGLEX:VPT:EPIS:KFKYE:AVS:KXEXR, NDEGLEX:VPT:EPIS:KFKYE:AVS:QXEXR, SSVKXQP:VPT:EPIS:KFKYE:AVS:LEXAXA, RNVQXRP:VPT:EPIS:KFKYE:AVS:LAXKXE, KIPKAXX:VPT:EPIS:KFKYE:VVE:GXGXR, GIPEPXX:VPE:EPIS:KFKYE:TVE:SXAXR, SIPKAXX:VPT:EPIS:KFKYE:VVE:GXGXR, HVTKPTX:APT:EPIS:KFKYE:VVR:SXGXH, YVPKPXX:APT:EPIS:KFKYE:VVR:SXGXH, TVPKPXX:APT:EPIS:KFKYE:VVR:AXGXH, AVPKAXX:APT:EPIS:KFKYE:VVK:AXGXH, KVGKAXX:VPT:EPIS:KFKYE:VAE:XGXR, GSAGPXX:TPT:EPIS:KFKYE:VVD:RXGXS, AAPASXX:VPA:EPIS:KFKYE:VVE:AXGXR, STPPTXX:VPT:EPIS:KFKYE:VVE:SXGXR, HVPKPXX:APT:EPIS:KFKYE:VVR:SXGXH, RVPSTXX:APV:EPIS:KFKYE:VEE:XGXL, ASAAPXX:VPQ:EPIS:KFKYE:VRS:XKXS, ASASPXX:VSQ:EPIS:KFKYE:VKS:XKXS, ASASPXX:VPQ:EPIS:KFKYE:VKS:XKXS, NDEGLEX:VPT:EPIS:KFKYE:QHN:KXEXR, NDEGLEX:VPT:EPIS:KFKYE:EHS:QXEXR, SSVKXQP:SRV:EPIS:KFKYE:EEH:LEXAXA, RNVQXRP:TQV:EPIS:KFKYE:EDH:LAXKXE, KIPKAXX:TPT:SPIN:YGKIP:VVD:GXGXR, GIPEPXX:TPT:SPIN:YGKIP:VVD:SXAXR, SIPKAXX:TPT:SPIN:YGKIP:VVD:GXGXR, HVTKPTX:TPT:SPIN:YGKIP:VVD:SXGXH, YVPKPXX:TPT:SPIN:YGKIP:VVD:SXGXH, TVPKPXX:TPT:SPIN:YGKIP:VVD:AXGXH, AVPKAXX:TPT:SPIN:YGKIP:VVD:AXGXH, KVGKAXX:TPT:SPIN:YGKIP:VVD:XGXR, KASKAXX:TPT:SPIN:YGKIP:VVD:EXGXR, AAPASXX:TPT:SPIN:YGKIP:VVD:AXGXR, STPPTXX:TPT:SPIN:YGKIP:VVD:SXGXR, HVPKPXX:TPT:SPIN:YGKIP:VVD:SXGXH, RVPSTXX:TPT:SPIN:YGKIP:VVD:XGXL, ASAAPXX:TPT:SPIN:YGKIP:VVD:XKXS, ASASPXX:TPT:SPIN:YGKIP:VVD:XKXS, NDEGLEX:TPT:SPIN:YGKIP:VVD:KXEXR, NDEGLEX:TPT:SPIN:YGKIP:VVD:QXEXR, SSVKXQP:TPT:SPIN:YGKIP:VVD:LEXAXA, RNVQXRP:TPT:SPIN:YGKIP:VVD:LAXKXE, KIPKAXX:VPT:SPIN:YGKIP:VVE:GXGXR, GIPEPXX:VPE:SPIN:YGKIP:TVE:SXAXR, SIPKAXX:VPT:SPIN:YGKIP:VVE:GXGXR, HVTKPTX:APT:SPIN:YGKIP:VVR:SXGXH, YVPKPXX:APT:SPIN:YGKIP:VVR:SXGXH, TVPKPXX:APT:SPIN:YGKIP:VVR:AXGXH, AVPKAXX:APT:SPIN:YGKIP:VVK:AXGXH, KVGKAXX:VPT:SPIN:YGKIP:VAE:XGXR, KASKAXX:VPT:SPIN:YGKIP:AVS:EXGXR, AAPASXX:VPA:SPIN:YGKIP:VVE:AXGXR, STPPTXX:VPT:SPIN:YGKIP:VVE:SXGXR, HVPKPXX:APT:SPIN:YGKIP:VVR:SXGXH, RVPSTXX:APV:SPIN:YGKIP:VEE:XGXL, ASAAPXX:VPQ:SPIN:YGKIP:VRS:XKXS, ASASPXX:VSQ:SPIN:YGKIP:VKS:XKXS, ASASPXX:VPQ:SPIN:YGKIP:VKS:XKXS, NDEGLEX:VPT:SPIN:YGKIP:QHN:KXEXR, NDEGLEX:VPT:SPIN:YGKIP:EHS:QXEXR, SSVKXQP:SRV:SPIN:YGKIP:EEH:LEXAXA, RNVQXRP:TQV:SPIN:YGKIP:EDH:LAXKXE, KIPKAXX:VPA:SPIS:YKQYE:VVE:GXGXR, GIPEPXX:VPA:SPIS:YKQYE:VVE:SXAXR, SIPKAXX:VPA:SPIS:YKQYE:VVE:GXGXR, HVTKPTX:VPA:SPIS:YKQYE:VVE:SXGXH, YVPKPXX:VPA:SPIS:YKQYE:VVE:SXGXH, TVPKPXX:VPA:SPIS:YKQYE:VVE:AXGXH, AVPKAXX:VPA:SPIS:YKQYE:VVE:AXGXH, KVGKAXX:VPA:SPIS:YKQYE:VVE:XGXR, KASKAXX:VPA:SPIS:YKQYE:VVE:EXGXR, GSAGPXX:VPA:SPIS:YKQYE:VVE:RXGXS, STPPTXX:VPA:SPIS:YKQYE:VVE:SXGXR, HVPKPXX:VPA:SPIS:YKQYE:VVE:SXGXH, RVPSTXX:VPA:SPIS:YKQYE:VVE:XGXL, ASAAPXX:VPA:SPIS:YKQYE:VVE:XKXS, ASASPXX:VPA:SPIS:YKQYE:VVE:XKXS, NDEGLEX:VPA:SPIS:YKQYE:VVE:KXEXR, NDEGLEX:VPA:SPIS:YKQYE:VVE:QXEXR, SSVKXQP:VPA:SPIS:YKQYE:VVE:LEXAXA, RNVQXRP:VPA:SPIS:YKQYE:VVE:LAXKXE, KIPKAXX:VPT:SPIS:YKQYE:VVE:GXGXR, GIPEPXX:VPE:SPIS:YKQYE:TVE:SXAXR, SIPKAXX:VPT:SPIS:YKQYE:VVE:GXGXR, HVTKPTX:APT:SPIS:YKQYE:VVR:SXGXH, YVPKPXX:APT:SPIS:YKQYE:VVR:SXGXH, TVPKPXX:APT:SPIS:YKQYE:VVR:AXGXH, AVPKAXX:APT:SPIS:YKQYE:VVK:AXGXH, KVGKAXX:VPT:SPIS:YKQYE:VAE:XGXR, KASKAXX:VPT:SPIS:YKQYE:AVS:EXGXR, GSAGPXX:TPT:SPIS:YKQYE:VVD:RXGXS, STPPTXX:VPT:SPIS:YKQYE:VVE:SXGXR, HVPKPXX:APT:SPIS:YKQYE:VVR:SXGXH, RVPSTXX:APV:SPIS:YKQYE:VEE:XGXL, ASAAPXX:VPQ:SPIS:YKQYE:VRS:XKXS, ASASPXX:VSQ:SPIS:YKQYE:VKS:XKXS, ASASPXX:VPQ:SPIS:YKQYE:VKS:XKXS, NDEGLEX:VPT:SPIS:YKQYE:QHN:KXEXR, NDEGLEX:VPT:SPIS:YKQYE:EHS:QXEXR, SSVKXQP:SRV:SPIS:YKQYE: EEH:LEXAXA, RNVQXRP:TQV:SPIS:YKQYE: EDH:LAXKXE, GIPEPXX:VPT:SPIS:YKQYE:VVE:SXAXR, HVTKPTX:VPT:SPIS:YKQYE:VVE:SXGXH, YVPKPXX:VPT:SPIS:YKQYE:VVE:SXGXH, TVPKPXX:VPT:SPIS:YKQYE:VVE:AXGXH, AVPKAXX:VPT:SPIS:YKQYE:VVE:AXGXH, KVGKAXX:VPT:SPIS:YKQYE:VVE:XGXR, KASKAXX:VPT:SPIS:YKQYE:VVE:EXGXR, GSAGPXX:VPT:SPIS:YKQYE:VVE:RXGXS, AAPASXX:VPT:SPIS:YKQYE:VVE:AXGXR, HVPKPXX:VPT:SPIS:YKQYE:VVE:SXGXH, RVPSTXX:VPT:SPIS:YKQYE:VVE:XGXL, ASAAPXX:VPT:SPIS:YKQYE:VVE:XKXS, ASASPXX:VPT:SPIS:YKQYE:VVE:XKXS, NDEGLEX:VPT:SPIS:YKQYE:VVE:KXEXR, NDEGLEX:VPT:SPIS:YKQYE:VVE:QXEXR, SSVKXQP:VPT:SPIS:YKQYE:VVE:LEXAXA, RNVQXRP:VPT:SPIS:YKQYE:VVE:LAXKXE, AAPASXX:VPA:SPIS:YKQYE:VVE:AXGXR, KIPKAXX:APV:KPLS:DHHKD:VEE:GXGXR, GIPEPXX:APV:KPLS:DHHKD:VEE:SXAXR, SIPKAXX:APV:KPLS:DHHKD:VEE:GXGXR, HVTKPTX:APV:KPLS:DHHKD:VEE:SXGXH, YVPKPXX:APV:KPLS:DHHKD:VEE:SXGXH, TVPKPXX:APV:KPLS:DHHKD:VEE:AXGXH, AVPKAXX:APV:KPLS:DHHKD:VEE:AXGXH, KVGKAXX:APV:KPLS:DHHKD:VEE:XGXR, KASKAXX:APV:KPLS:DHHKD:VEE:EXGXR, GSAGPXX:APV:KPLS:DHHKD:VEE:RXGXS, AAPASXX:APV:KPLS:DHHKD:VEE:AXGXR, STPPTXX:APV:KPLS:DHHKD:VEE:SXGXR, HVPKPXX:APV:KPLS:DHHKD:VEE:SXGXH, ASAAPXX:APV:KPLS:DHHKD:VEE:XKXS, ASASPXX:APV:KPLS:DHHKD:VEE:XKXS, NDEGLEX:APV:KPLS:DHHKD:VEE:KXEXR, NDEGLEX:APV:KPLS:DHHKD:VEE:QXEXR, SSVKXQP:APV:KPLS:DHHKD:VEE:LEXAXA, RNVQXRP:APV:KPLS:DHHKD:VEE:LAXKXE, KIPKAXX:VPT:KPLS:DHHKD:VVE:GXGXR, GIPEPXX:VPE:KPLS:DHHKD:TVE:SXAXR, SIPKAXX:VPT:KPLS:DHHKD:VVE:GXGXR, HVTKPTX:APT:KPLS:DHHKD:VVR:SXGXH, YVPKPXX:APT:KPLS:DHHKD:VVR:SXGXH, TVPKPXX:APT:KPLS:DHHKD:VVR:AXGXH, AVPKAXX:APT:KPLS:DHHKD:VVK:AXGXH, KVGKAXX:VPT:KPLS:DHHKD:VAE:XGXR, KASKAXX:VPT:KPLS:DHHKD:AVS: EXGXR, GSAGPXX:TPT:KPLS:DHHKD:VVD:RXGXS, AAPASXX:VPA:KPLS:DHHKD:VVE:AXGXR, STPPTXX:VPT:KPLS:DHHKD:VVE:SXGXR, HVPKPXX:APT:KPLS:DHHKD:VVR:SXGXH, ASAAPXX:VPQ:KPLS:DHHKD:VRS:XKXS, ASASPXX:VSQ:KPLS:DHHKD:VKS:XKXS, ASASPXX:VPQ:KPLS:DHHKD:VKS:XKXS, NDEGLEX:VPT:KPLS:DHHKD:QHN:KXEXR, NDEGLEX:VPT:KPLS:DHHKD:EHS:QXEXR, SSVKXQP:SRV:KPLS:DHHKD:EEH:LEXAXA, RNVQXRP:TQV:KPLS:DHHKD:EDH:LAXKXE, KIPKAXX:VPQ:EPLP:EQLSN:VRS:GXGXR, GIPEPXX:VPQ:EPLP:EQLSN:VRS:SXAXR, SIPKAXX:VPQ:EPLP:EQLSN:VRS:GXGXR, HVTKPTX:VPQ:EPLP:EQLSN:VRS:SXGXH, YVPKPXX:VPQ:EPLP:EQLSN:VRS:SXGXH, TVPKPXX:VPQ:EPLP:EQLSN:VRS:AXGXH, AVPKAXX:VPQ:EPLP:EQLSN:VRS:AXGXH, KVGKAXX:VPQ:EPLP:EQLSN:VRS:XGXR, KASKAXX:VPQ:EPLP:EQLSN:VRS:EXGXR, GSAGPXX:VPQ:EPLP:EQLSN:VRS:RXGXS, AAPASXX:VPQ:EPLP:EQLSN:VRS:AXGXR, STPPTXX:VPQ:EPLP:EQLSN:VRS:SXGXR, HVPKPXX:VPQ:EPLP:EQLSN:VRS:SXGXH, RVPSTXX:VPQ:EPLP:EQLSN:VRS:XGXL, ASASPXX:VPQ:EPLP:EQLSN:VRS:XKXS, NDEGLEX:VPQ:EPLP:EQLSN:VRS:KXEXR, NDEGLEX:VPQ:EPLP:EQLSN:VRS:QXEXR, SSVKXQP:VPQ:EPLP:EQLSN:VRS:LEXAXA, RNVQXRP:VPQ:EPLP:EQLSN:VRS:LAXKXE, KIPKAXX:VPT:EPLP:EQLSN:VVE:GXGXR, GIPEPXX:VPE:EPLP:EQLSN:TVE:SXAXR, SIPKAXX:VPT: EPLP: EQLSN:VVE:GXGXR, HVTKPTX:APT:EPLP:EQLSN:VVR:SXGXH, YVPKPXX:APT:EPLP:EQLSN:VVR:SXGXH, TVPKPXX:APT:EPLP:EQLSN:VVR:AXGXH, AVPKAXX:APT:EPLP:EQLSN:VVK:AXGXH, KVGKAXX:VPT:EPLP:EQLSN:VAE:XGXR, KASKAXX:VPT:EPLP:EQLSN:AVS:EXGXR, GSAGPXX:TPT:EPLP:EQLSN:VVD:RXGXS, AAPASXX:VPA:EPLP:EQLSN:VVE:AXGXR, STPPTXX:VPT:EPLP:EQLSN:VVE:SXGXR, HVPKPXX:APT:EPLP:EQLSN:VVR:SXGXH, RVPSTXX:APV:EPLP:EQLSN:VEE:XGXL, ASASPXX:VSQ:EPLP:EQLSN:VKS:XKXS, ASASPXX:VPQ:EPLP:EQLSN:VKS:XKXS, NDEGLEX:VPT:EPLP:EQLSN:QHN:KXEXR, NDEGLEX:VPT:EPLP:EQLSN:EHS:QXEXR, SSVKXQP:SRV:EPLP:EQLSN:EEH:LEXAXA, RNVQXRP:TQV:EPLP:EQLSN:EDH:LAXKXE, KIPKAXX:VSQ:EPLT:EQLSN:VKS:GXGXR, GIPEPXX:VSQ:EPLT:EQLSN:VKS:SXAXR, SIPKAXX:VSQ:EPLT:EQLSN:VKS:GXGXR, HVTKPTX:VSQ:EPLT:EQLSN:VKS:SXGXH, YVPKPXX:VSQ:EPLT:EQLSN:VKS:SXGXH, TVPKPXX:VSQ:EPLT:EQLSN:VKS:AXGXH, AVPKAXX:VSQ:EPLT:EQLSN:VKS:AXGXH, KVGKAXX:VSQ:EPLT:EQLSN:VKS:XGXR, KASKAXX:VSQ:EPLT:EQLSN:VKS:EXGXR, GSAGPXX:VSQ:EPLT:EQLSN:VKS:RXGXS, AAPASXX:VSQ:EPLT:EQLSN:VKS:AXGXR, STPPTXX:VSQ:EPLT:EQLSN:VKS:SXGXR, HVPKPXX:VSQ:EPLT:EQLSN:VKS:SXGXH, RVPSTXX:VSQ:EPLT:EQLSN:VKS:XGXL, ASAAPXX:VSQ:EPLT:EQLSN:VKS:XKXS, ASASPXX:VSQ:EPLT:EQLSN:VKS:XKXS, NDEGLEX:VSQ:EPLT:EQLSN:VKS:KXEXR, NDEGLEX:VSQ:EPLT:EQLSN:VKS:QXEXR, SSVKXQP:VSQ:EPLT:EQLSN:VKS:LEXAXA, RNVQXRP:VSQ:EPLT:EQLSN:VKS:LAXKXE, KIPKAXX:VPT:EPLT:EQLSN:VVE:GXGXR, GIPEPXX:VPE:EPLT:EQLSN:TVE:SXAXR, SIPKAXX:VPT:EPLT:EQLSN:VVE:GXGXR, HVTKPTX:APT:EPLT:EQLSN:VVR:SXGXH, YVPKPXX:APT:EPLT:EQLSN:VVR:SXGXH, TVPKPXX:APT:EPLT:EQLSN:VVR:AXGXH, AVPKAXX:APT:EPLT:EQLSN:VVK:AXGXH, KVGKAXX:VPT:EPLT:EQLSN:VAE:XGXR, KASKAXX:VPT:EPLT:EQLSN:AVS:EXGXR, GSAGPXX:TPT:EPLT:EQLSN:VVD:RXGXS, AAPASXX:VPA:EPLT:EQLSN:VVE:AXGXR, STPPTXX:VPT:EPLT:EQLSN:VVE:SXGXR, HVPKPXX:APT:EPLT:EQLSN:VVR:SXGXH, RVPSTXX:APV:EPLT:EQLSN:VEE:XGXL, ASAAPXX:VPQ:EPLT:EQLSN:VRS:XKXS, ASASPXX:VPQ:EPLT:EQLSN:VKS:XKXS, NDEGLEX:VPT:EPLT:EQLSN:QHN:KXEXR, NDEGLEX:VPT:EPLT:EQLSN:EHS:QXEXR, SSVKXQP:SRV:EPLT:EQLSN:EEH:LEXAXA, RNVQXRP:TQV:EPLT:EQLSN:EDH:LAXKXE, KIPKAXX:VPQ:EPLT:EQLSN:VKS:GXGXR, GIPEPXX:VPQ:EPLT:EQLSN:VKS:SXAXR, SIPKAXX:VPQ:EPLT:EQLSN:VKS:GXGXR, HVTKPTX:VPQ:EPLT:EQLSN:VKS:SXGXH, YVPKPXX:VPQ:EPLT:EQLSN:VKS:SXGXH, TVPKPXX:VPQ:EPLT:EQLSN:VKS:AXGXH, AVPKAXX:VPQ:EPLT:EQLSN:VKS:AXGXH, KVGKAXX:VPQ:EPLT:EQLSN:VKS:XGXR, KASKAXX:VPQ:EPLT:EQLSN:VKS:EXGXR, GSAGPXX:VPQ:EPLT:EQLSN:VKS:RXGXS, AAPASXX:VPQ:EPLT:EQLSN:VKS:AXGXR, STPPTXX:VPQ:EPLT:EQLSN:VKS:SXGXR, HVPKPXX:VPQ:EPLT:EQLSN:VKS:SXGXH, RVPSTXX:VPQ:EPLT:EQLSN:VKS:XGXL, ASAAPXX:VPQ:EPLT:EQLSN:VKS:XKXS, NDEGLEX:VPQ:EPLT:EQLSN:VKS:KXEXR, NDEGLEX:VPQ:EPLT:EQLSN:VKS:QXEXR, SSVKXQP:VPQ:EPLT:EQLSN:VKS:LEXAXA, RNVQXRP:VPQ:EPLT:EQLSN:VKS:LAXKXE, KIPKAXX:VPT:SNIT:IGEMS:QHN:GXGXR, GIPEPXX:VPT:SNIT:IGEMS:QHN:SXAXR, SIPKAXX:VPT:SNIT:IGEMS:QHN:GXGXR, HVTKPTX:VPT:SNIT:IGEMS:QHN:SXGXH, YVPKPXX:VPT:SNIT:IGEMS:QHN:SXGXH, TVPKPXX:VPT:SNIT:IGEMS:QHN:AXGXH, AVPKAXX:VPT:SNIT:IGEMS:QHN:AXGXH, KVGKAXX:VPT:SNIT:IGEMS:QHN:XGXR, KASKAXX:VPT:SNIT:IGEMS:QHN:EXGXR, GSAGPXX:VPT:SNIT:IGEMS:QHN:RXGXS, AAPASXX:VPT:SNIT:IGEMS:QHN:AXGXR, STPPTXX:VPT:SNIT:IGEMS:QHN:SXGXR, HVPKPXX:VPT:SNIT:IGEMS:QHN:SXGXH, RVPSTXX:VPT:SNIT:IGEMS:QHN:XGXL, ASAAPXX:VPT:SNIT:IGEMS:QHN:XKXS, ASASPXX:VPT:SNIT:IGEMS:QHN:XKXS, NDEGLEX:VPT:SNIT:IGEMS:QHN:QXEXR, NDEGLEX:VPT:SNIT:IGEMS:QHN:KXEXR, SSVKXQP:VPT:SNIT:IGEMS:QHN:LEXAXA, RNVQXRP:VPT:SNIT:IGEMS:QHN:LAXKXE, KIPKAXX:VPT:SNIT:IGEMS:VVE:GXGXR, GIPEPXX:VPE:SNIT:IGEMS:TVE:SXAXR, SIPKAXX:VPT:SNIT:IGEMS:VVE:GXGXR, HVTKPTX:APT:SNIT:IGEMS:VVR:SXGXH, YVPKPXX:APT:SNIT:IGEMS:VVR:SXGXH, TVPKPXX:APT:SNIT:IGEMS:VVR:AXGXH, AVPKAXX:APT:SNIT:IGEMS:VVK:AXGXH, KVGKAXX:VPT:SNIT:IGEMS:VAE:XGXR, KASKAXX:VPT:SNIT:IGEMS:AVS:EXGXR, GSAGPXX:TPT:SNIT:IGEMS:VVD:RXGXS, AAPASXX:VPA:SNIT:IGEMS:VVE:AXGXR, STPPTXX:VPT:SNIT:IGEMS:VVE:SXGXR, HVPKPXX:APT:SNIT:IGEMS:VVR:SXGXH, RVPSTXX:APV:SNIT:IGEMS:VEE:XGXL, ASAAPXX:VPQ:SNIT:IGEMS:VRS:XKXS, ASASPXX:VSQ:SNIT:IGEMS:VKS:XKXS, ASASPXX:VPQ:SNIT:IGEMS:VKS:XKXS, NDEGLEX:VPT:SNIT:IGEMS:EHS:QXEXR, SSVKXQP:SRV:SNIT:IGEMS:EEH:LEXAXA, RNVQXRP:TQV:SNIT:IGEMS:EDH:LAXKXE, KIPKAXX:VPT:SNIT:LGEMS:EHS:GXGXR, GIPEPXX:VPT:SNIT:LGEMS:EHS:SXAXR, SIPKAXX:VPT:SNIT:LGEMS:EHS:GXGXR, HVTKPTX:VPT:SNIT:LGEMS:EHS:SXGXH, YVPKPXX:VPT:SNIT:LGEMS:EHS:SXGXH, TVPKPXX:VPT:SNIT:LGEMS:EHS:AXGXH, AVPKAXX:VPT:SNIT:LGEMS:EHS:AXGXH, KVGKAXX:VPT:SNIT:LGEMS:EHS:XGXR, KASKAXX:VPT:SNIT:LGEMS:EHS:EXGXR, GSAGPXX:VPT:SNIT:LGEMS:EHS:RXGXS, AAPASXX:VPT:SNIT:LGEMS:EHS:AXGXR, STPPTXX:VPT:SNIT:LGEMS:EHS:SXGXR, HVPKPXX:VPT:SNIT:LGEMS:EHS:SXGXH, RVPSTXX:VPT:SNIT:LGEMS:EHS:XGXL, ASAAPXX:VPT:SNIT:LGEMS:EHS:XKXS, ASASPXX:VPT:SNIT:LGEMS:EHS:XKXS, NDEGLEX:VPT:SNIT:LGEMS:EHS:KXEXR, SSVKXQP:VPT:SNIT:LGEMS:EHS:LEXAXA, RNVQXRP:VPT:SNIT:LGEMS:EHS:LAXKXE, KIPKAXX:VPT:SNIT:LGEMS:VVE:GXGXR, GIPEPXX:VPE:SNIT:LGEMS:TVE:SXAXR, SIPKAXX:VPT:SNIT:LGEMS:VVE:GXGXR, HVTKPTX:APT:SNIT:LGEMS:VVR:SXGXH, YVPKPXX:APT:SNIT:LGEMS:VVR:SXGXH, TVPKPXX:APT:SNIT:LGEMS:VVR:AXGXH, AVPKAXX:APT:SNIT:LGEMS:VVK:AXGXH, KVGKAXX:VPT:SNIT:LGEMS:VAE:XGXR, KASKAXX:VPT:SNIT:LGEMS:AVS:EXGXR, GSAGPXX:TPT:SNIT:LGEMS:VVD:RXGXS, AAPASXX:VPA:SNIT:LGEMS:VVE:AXGXR, STPPTXX:VPT:SNIT:LGEMS:VVE:SXGXR, HVPKPXX:APT:SNIT:LGEMS:VVR:SXGXH, RVPSTXX:APV:SNIT:LGEMS:VEE:XGXL, ASAAPXX:VPQ:SNIT:LGEMS:VRS:XKXS, ASASPXX:VSQ:SNIT:LGEMS:VKS:XKXS, ASASPXX:VPQ:SNIT:LGEMS:VKS:XKXS, NDEGLEX:VPT:SNIT:LGEMS:QHN:KXEXR, SSVKXQP:SRV:SNIT:LGEMS:EEH:LEXAXA, RNVQXRP:TQV:SNIT:LGEMS:EDH:LAXKXE, KIPKAXX:SRV:RSVK:KEVQV:EEH:GXGXR, GIPEPXX:SRV:RSVK:KEVQV:EEH:SXAXR, SIPKAXX:SRV:RSVK:KEVQV:EEH:GXGXR, HVTKPTX:SRV:RSVK:KEVQV:EEH:SXGXH, YVPKPXX:SRV:RSVK:KEVQV:EEH:SXGXH, TVPKPXX:SRV:RSVK:KEVQV:EEH:AXGXH, AVPKAXX:SRV:RSVK:KEVQV:EEH:AXGXH, KVGKAXX:SRV:RSVK:KEVQV:EEH:XGXR, KASKAXX:SRV:RSVK:KEVQV:EEH:EXGXR, GSAGPXX:SRV:RSVK:KEVQV:EEH:RXGXS, AAPASXX:SRV:RSVK:KEVQV:EEH:AXGXR, STPPTXX:SRV:RSVK:KEVQV:EEH:SXGXR, HVPKPXX:SRV:RSVK:KEVQV:EEH:SXGXH, RVPSTXX:SRV:RSVK:KEVQV:EEH:XGXL, ASAAPXX:SRV:RSVK:KEVQV:EEH:XKXS, ASASPXX:SRV:RSVK:KEVQV:EEH:XKXS, NDEGLEX:SRV: RSVK:KEVQV:EEH:KXEXR, NDEGLEX:SRV:RSVK:KEVQV:EEH:QXEXR, RNVQXRP:SRV:RSVK:KEVQV:EEH:LAXKXE, KIPKAXX:VPT:RSVK:KEVQV:VVE:GXGXR, GIPEPXX:VPE:RSVK:KEVQV:TVE:SXAXR, SIPKAXX:VPT:RSVK:KEVQV:VVE:GXGXR, HVTKPTX:APT:RSVK:KEVQV:VVR:SXGXH, YVPKPXX:APT:RSVK:KEVQV:VVR:SXGXH, TVPKPXX:APT:RSVK:KEVQV:VVR:AXGXH, AVPKAXX:APT:RSVK:KEVQV:VVK:AXGXH, KVGKAXX:VPT:RSVK:KEVQV:VAE:XGXR, KASKAXX:VPT:RSVK:KEVQV:AVS:EXGXR, GSAGPXX:TPT:RSVK:KEVQV:VVD:RXGXS, AAPASXX:VPA:RSVK:KEVQV:VVE:AXGXR, STPPTXX:VPT:RSVK:KEVQV:VVE:SXGXR, HVPKPXX:APT:RSVK:KEVQV:VVR:SXGXH, RVPSTXX:APV:RSVK:KEVQV:VEE:XGXL, ASAAPXX:VPQ:RSVK:KEVQV:VRS:XKXS, ASASPXX:VSQ:RSVK:KEVQV:VKS:XKXS, ASASPXX:VPQ:RSVK:KEVQV:VKS:XKXS, NDEGLEX:VPT:RSVK:KEVQV:QHN:KXEXR, NDEGLEX:VPT:RSVK:KEVQV:EHS:QXEXR, RNVQXRP:TQV:RSVK:KEVQV:EDH:LAXKXE, KIPKAXX:TQV:RPVQ:KKATV:EDH:GXGXR, GIPEPXX:TQV:RPVQ:KKATV:EDH:SXAXR, SIPKAXX:TQV: RPVQ:KKATV: EDH:GXGXR, HVTKPTX:TQV:RPVQ:KKATV:EDH:SXGXH, YVPKPXX:TQV:RPVQ:KKATV:EDH:SXGXH, TVPKPXX:TQV:RPVQ:KKATV:EDH:AXGXH, AVPKAXX:TQV:RPVQ:KKATV:EDH:AXGXH, KVGKAXX:TQV:RPVQ:KKATV:EDH:XGXR, KASKAXX:TQV:RPVQ:KKATV:EDH:EXGXR, GSAGPXX:TQV:RPVQ:KKATV:EDH:RXGXS, AAPASXX:TQV:RPVQ:KKATV:EDH:AXGXR, STPPTXX:TQV:RPVQ:KKATV:EDH:SXGXR, HVPKPXX:TQV:RPVQ:KKATV:EDH:SXGXH, RVPSTXX:TQV:RPVQ:KKATV:EDH:XGXL, ASAAPXX:TQV:RPVQ:KKATV:EDH:XKXS, ASASPXX:TQV:RPVQ:KKATV:EDH:XKXS, NDEGLEX:TQV:RPVQ:KKATV:EDH:KXEXR, NDEGLEX:TQV: RPVQ:KKATV:EDH:QXEXR, SSVKXQP:TQV:RPVQ:KKATV:EDH:LEXAXA, KIPKAXX:VPT:RPVQ:KKATV:VVE:GXGXR, GIPEPXX:VPE:RPVQ:KKATV:TVE:SXAXR, SIPKAXX:VPT:RPVQ:KKATV:VVE:GXGXR, HVTKPTX:APT:RPVQ:KKATV:VVR:SXGXH, YVPKPXX:APT:RPVQ:KKATV:VVR:SXGXH, TVPKPXX:APT:RPVQ:KKATV:VVR:AXGXH, AVPKAXX:APT:RPVQ:KKATV:VVK:AXGXH, KVGKAXX:VPT:RPVQ:KKATV:VAE:XGXR, KASKAXX:VPT:RPVQ:KKATV:AVS:EXGXR, GSAGPXX:TPT:RPVQ:KKATV:VVD:RXGXS, AAPASXX:VPA:RPVQ:KKATV:VVE:AXGXR, STPPTXX:VPT:RPVQ:KKATV:VVE:SXGXR, HVPKPXX:APT:RPVQ:KKATV:VVR:SXGXH, RVPSTXX:APV:RPVQ:KKATV:VEE:XGXL, ASAAPXX:VPQ: RPVQ:KKATV:VRS:XKXS, ASASPXX:VSQ:RPVQ:KKATV:VKS:XKXS, ASASPXX:VPQ:RPVQ:KKATV:VKS:XKXS, NDEGLEX:VPT: RPVQ:KKATV:QHN:KXEXR, NDEGLEX:VPT:RPVQ:KKATV:EHS:QXEXR and SSVKXQP:SRV:RPVQ:KKATV:EEH:LEXAXA. More particularly, the hexaplet PEP7:PEP3:PEP1:PEP2:PEP4:PEP8 is selected from the group consisting of GIPEPXX:VPT:SAIS:LKNYQ:VVE:SXAXR, HVTKPTX:VPT:SAIS:LKNYQ:VVE:SXGXH, YVPKPXX:VPT:SAIS:LKNYQ:VVE:SXGXH, TVPKPXX:VPT:SAIS:LKNYQ:VVE:AXGXH, AVPKAXX:VPT:SAIS:LKNYQ:VVE:AXGXH, KVGKAXX:VPT:SAIS:LKNYQ:VVE:XGXR, KASKAXX:VPT:SAIS:LKNYQ:VVE:EXGXR, GSAGPXX:VPT:SAIS:LKNYQ:VVE:RXGXS, AAPASXX:VPT:SAIS:LKNYQ:VVE:AXGXR, STPPTXX:VPT:SAIS:LKNYQ:VVE:SXGXR, HVPKPXX:VPT:SAIS:LKNYQ:VVE:SXGXH, RVPSTXX:VPT:SAIS:LKNYQ:VVE:XGXL, ASAAPXX:VPT:SAIS:LKNYQ:VVE:XKXS, ASASPXX:VPT:SAIS:LKNYQ:VVE:XKXS, GIPEPXX:VPE:SAIS:LKNYQ:TVE:SXAXR, HVTKPTX:APT:SAIS:LKNYQ:VVR:SXGXH, YVPKPXX:APT:SAIS:LKNYQ:VVR:SXGXH, TVPKPXX:APT:SAIS:LKNYQ:VVR:AXGXH, AVPKAXX:APT:SAIS:LKNYQ:VVK:AXGXH, KVGKAXX:VPT:SAIS:LKNYQ:VAE:XGXR, KASKAXX:VPT:SAIS:LKNYQ:AVS:EXGXR, GSAGPXX:TPT:SAIS:LKNYQ:VVD:RXGXS, AAPASXX:VPA:SAIS:LKNYQ:VVE:AXGXR, HVPKPXX:APT:SAIS:LKNYQ:VVR:SXGXH, RVPSTXX:APV:SAIS:LKNYQ:VEE:XGXL, ASAAPXX:VPQ:SAIS:LKNYQ:VRS:XKXS, ASASPXX:VSQ:SAIS:LKNYQ:VKS:XKXS, ASASPXX:VPQ:SAIS:LKNYQ:VKS:XKXS, NDEGLEX:VPT:SAIS:LKNYQ:QHN:KXEXR, NDEGLEX:VPT:SAIS:LKNYQ:EHS:QXEXR, SSVKXQP:SRV:SAIS:LKNYQ:EEH:LEXAXA, RNVQXRP:TQV:SAIS:LKNYQ:EDH:LAXKXE, KIPKAXX:VPE:SSLS:LKVYP:TVE:GXGXR, SIPKAXX:VPE:SSLS:LKVYP:TVE:GXGXR, HVTKPTX:VPE:SSLS:LKVYP:TVE:SXGXH, YVPKPXX:VPE:SSLS:LKVYP:TVE:SXGXH, TVPKPXX:VPE:SSLS:LKVYP:TVE:AXGXH, AVPKAXX:VPE:SSLS:LKVYP:TVE:AXGXH, KVGKAXX:VPE:SSLS:LKVYP:TVE:XGXR, KASKAXX:VPE:SSLS:LKVYP:TVE:EXGXR, GSAGPXX:VPE:SSLS:LKVYP:TVE:RXGXS, AAPASXX:VPE:SSLS:LKVYP:TVE:AXGXR, STPPTXX:VPE:SSLS:LKVYP:TVE:SXGXR, HVPKPXX:VPE:SSLS:LKVYP:TVE:SXGXH, RVPSTXX:VPE:SSLS:LKVYP:TVE:XGXL, ASAAPXX:VPE:SSLS:LKVYP:TVE:XKXS, ASASPXX:VPE:SSLS:LKVYP:TVE:XKXS, KIPKAXX:VPT:SSLS:LKVYP:VVE:GXGXR, SIPKAXX:VPT:SSLS:LKVYP:VVE:GXGXR, HVTKPTX:APT:SSLS:LKVYP:VVR:SXGXH, YVPKPXX:APT:SSLS:LKVYP:VVR:SXGXH, TVPKPXX:APT:SSLS:LKVYP:VVR:AXGXH, AVPKAXX:APT:SSLS:LKVYP:VVK:AXGXH, KVGKAXX:VPT:SSLS:LKVYP:VAE:XGXR, KASKAXX:VPT:SSLS:LKVYP:AVS:EXGXR, GSAGPXX:TPT:SSLS:LKVYP:VVD:RXGXS, AAPASXX:VPA:SSLS:LKVYP:VVE:AXGXR, STPPTXX:VPT:SSLS:LKVYP:VVE:SXGXR, HVPKPXX:APT:SSLS:LKVYP:VVR:SXGXH, RVPSTXX:APV:SSLS:LKVYP:VEE:XGXL, ASAAPXX:VPQ:SSLS:LKVYP:VRS:XKXS, ASASPXX:VSQ:SSLS:LKVYP:VKS:XKXS, ASASPXX:VPQ:SSLS:LKVYP:VKS:XKXS, NDEGLEX:VPT:SSLS:LKVYP:QHN:KXEXR, NDEGLEX:VPT:SSLS:LKVYP:EHS:QXEXR, SSVKXQP:SRV:SSLS:LKVYP:EEH:LEXAXA, RNVQXRP:TQV:SSLS:LKVYP:EDH:LAXKXE, KIPKAXX:APT:NAIS:LKKYR:VVR:GXGXR, GIPEPXX:APT:NAIS:LKKYR:VVR:SXAXR, SIPKAXX:APT:NAIS:LKKYR:VVR:GXGXR, AVPKAXX:APT:NAIS:LKKYR:VVR:AXGXH, KVGKAXX:APT:NAIS:LKKYR:VVR:XGXR, KASKAXX:APT:NAIS:LKKYR:VVR:EXGXR, GSAGPXX:APT:NAIS:LKKYR:VVR:RXGXS, AAPASXX:APT:NAIS:LKKYR:VVR:AXGXR, STPPTXX:APT:NAIS:LKKYR:VVR:SXGXR, RVPSTXX:APT:NAIS:LKKYR:VVR:XGXL, ASAAPXX:APT:NAIS:LKKYR:VVR:XKXS, ASASPXX:APT:NAIS:LKKYR:VVR:XKXS, KIPKAXX:VPT:NAIS:LKKYR:VVE:GXGXR, GIPEPXX:VPE:NAIS:LKKYR:TVE:SXAXR, SIPKAXX:VPT:NAIS:LKKYR:VVE:GXGXR, AVPKAXX:APT:NAIS:LKKYR:VVK:AXGXH, KVGKAXX:VPT:NAIS:LKKYR:VAE:XGXR, KASKAXX:VPT:NAIS:LKKYR:AVS:EXGXR, GSAGPXX:TPT:NAIS:LKKYR:VVD:RXGXS, AAPASXX:VPA:NAIS:LKKYR:VVE:AXGXR, STPPTXX:VPT:NAIS:LKKYR:VVE:SXGXR, RVPSTXX:APV:NAIS:LKKYR:VEE:XGXL, ASAAPXX:VPQ:NAIS:LKKYR:VRS:XKXS, ASASPXX:VSQ:NAIS:LKKYR:VKS:XKXS, ASASPXX:VPQ:NAIS:LKKYR:VKS:XKXS, NDEGLEX:VPT:NAIS:LKKYR:QHN:KXEXR, NDEGLEX:VPT:NAIS:LKKYR:EHS:QXEXR, SSVKXQP:SRV:NAIS:LKKYR:EEH:LEXAXA, RNVQXRP:TQV:NAIS:LKKYR:EDH:LAXKXE, KIPKAXX:APT:SATS:LRKHR:VVK:GXGXR, GIPEPXX:APT:SATS:LRKHR:VVK:SXAXR, SIPKAXX:APT:SATS:LRKHR:VVK:GXGXR, HVTKPTX:APT:SATS:LRKHR:VVK:SXGXH, YVPKPXX:APT:SATS:LRKHR:VVK:SXGXH, TVPKPXX:APT:SATS:LRKHR:VVK:AXGXH, KVGKAXX:APT:SATS:LRKHR:VVK:XGXR, KASKAXX:APT:SATS:LRKHR:VVK:EXGXR, GSAGPXX:APT:SATS:LRKHR:VVK:RXGXS, AAPASXX:APT:SATS:LRKHR:VVK:AXGXR, STPPTXX:APT:SATS:LRKHR:VVK:SXGXR, HVPKPXX:APT:SATS:LRKHR:VVK:SXGXH, RVPSTXX:APT:SATS:LRKHR:VVK:XGXL, ASAAPXX:APT:SATS:LRKHR:VVK:XKXS, ASASPXX:APT:SATS:LRKHR:VVK:XKXS, KIPKAXX:VPT:SATS:LRKHR:VVE:GXGXR, GIPEPXX:VPE:SATS:LRKHR:TVE:SXAXR, SIPKAXX:VPT:SATS:LRKHR:VVE:GXGXR, HVTKPTX:APT:SATS:LRKHR:VVR:SXGXH, YVPKPXX:APT:SATS:LRKHR:VVR:SXGXH, TVPKPXX:APT:SATS:LRKHR:VVR:AXGXH, KVGKAXX:VPT:SATS:LRKHR:VAE:XGXR, KASKAXX:VPT:SATS:LRKHR:AVS:EXGXR, GSAGPXX:TPT:SATS:LRKHR:VVD:RXGXS, AAPASXX:VPA:SATS:LRKHR:VVE:AXGXR, STPPTXX:VPT:SATS:LRKHR:VVE:SXGXR, HVPKPXX:APT:SATS:LRKHR:VVR:SXGXH, RVPSTXX:APV:SATS:LRKHR:VEE:XGXL, ASAAPXX:VPQ:SATS:LRKHR:VRS:XKXS, ASASPXX:VSQ:SATS:LRKHR:VKS:XKXS, ASASPXX:VPQ:SATS:LRKHR:VKS:XKXS, NDEGLEX:VPT:SATS:LRKHR:QHN:KXEXR, NDEGLEX:VPT:SATS:LRKHR:EHS:QXEXR, SSVKXQP:SRV:SATS:LRKHR:EEH:LEXAXA, RNVQXRP:TQV:SATS:LRKHR:EDH:LAXKXE, KIPKAXX:VPT:SPIS:LKYHY:VAE:GXGXR, GIPEPXX:VPT:SPIS:LKYHY:VAE:SXAXR, SIPKAXX:VPT:SPIS:LKYHY:VAE:GXGXR, HVTKPTX:VPT:SPIS:LKYHY:VAE:SXGXH, YVPKPXX:VPT:SPIS:LKYHY:VAE:SXGXH, TVPKPXX:VPT:SPIS:LKYHY:VAE:AXGXH, AVPKAXX:VPT:SPIS:LKYHY:VAE:AXGXH, KASKAXX:VPT:SPIS:LKYHY:VAE:EXGXR, GSAGPXX:VPT:SPIS:LKYHY:VAE:RXGXS, AAPASXX:VPT:SPIS:LKYHY:VAE:AXGXR, STPPTXX:VPT:SPIS:LKYHY:VAE:SXGXR, HVPKPXX:VPT:SPIS:LKYHY:VAE:SXGXH, RVPSTXX:VPT:SPIS:LKYHY:VAE:XGXL, ASAAPXX:VPT:SPIS:LKYHY:VAE:XKXS, ASASPXX:VPT:SPIS:LKYHY:VAE:XKXS, KIPKAXX:VPT:SPIS:LKYHY:VVE:GXGXR, GIPEPXX:VPE:SPIS:LKYHY:TVE:SXAXR, SIPKAXX:VPT:SPIS:LKYHY:VVE:GXGXR, HVTKPTX:APT:SPIS:LKYHY:VVR:SXGXH, YVPKPXX:APT:SPIS:LKYHY:VVR:SXGXH, TVPKPXX:APT:SPIS:LKYHY:VVR:AXGXH, AVPKAXX:APT:SPIS:LKYHY:VVK:AXGXH, KASKAXX:VPT:SPIS:LKYHY:AVS:EXGXR, GSAGPXX:TPT:SPIS:LKYHY:VVD:RXGXS, AAPASXX:VPA:SPIS:LKYHY:VVE:AXGXR, STPPTXX:VPT:SPIS:LKYHY:VVE:SXGXR, HVPKPXX:APT:SPIS:LKYHY:VVR:SXGXH, RVPSTXX:APV:SPIS:LKYHY:VEE:XGXL, ASAAPXX:VPQ:SPIS:LKYHY:VRS:XKXS, ASASPXX:VSQ:SPIS:LKYHY:VKS:XKXS, ASASPXX:VPQ:SPIS:LKYHY:VKS:XKXS, NDEGLEX:VPT:SPIS:LKYHY:QHN:KXEXR, NDEGLEX:VPT:SPIS:LKYHY:EHS:QXEXR, SSVKXQP:SRV:SPIS:LKYHY:EEH:LEXAXA, RNVQXRP:TQV:SPIS:LKYHY:EDH:LAXKXE, KIPKAXX:VPT:EPIS:KFKYE:AVS:GXGXR, GIPEPXX:VPT:EPIS:KFKYE:AVS:SXAXR, SIPKAXX:VPT:EPIS:KFKYE:AVS:GXGXR, HVTKPTX:VPT:EPIS:KFKYE:AVS:SXGXH, YVPKPXX:VPT:EPIS:KFKYE:AVS:SXGXH, TVPKPXX:VPT:EPIS:KFKYE:AVS:AXGXH, AVPKAXX:VPT:EPIS:KFKYE:AVS:AXGXH, KVGKAXX:VPT:EPIS:KFKYE:AVS:XGXR, GSAGPXX:VPT:EPIS:KFKYE:AVS:RXGXS, AAPASXX:VPT:EPIS:KFKYE:AVS:AXGXR, STPPTXX:VPT:EPIS:KFKYE:AVS:SXGXR, HVPKPXX:VPT:EPIS:KFKYE:AVS:SXGXH, RVPSTXX:VPT:EPIS:KFKYE:AVS:XGXL, ASAAPXX:VPT:EPIS:KFKYE:AVS:XKXS, ASASPXX:VPT:EPIS:KFKYE:AVS:XKXS, KIPKAXX:VPT:EPIS:KFKYE:VVE:GXGXR, GIPEPXX:VPE:EPIS:KFKYE:TVE:SXAXR, SIPKAXX:VPT:EPIS:KFKYE:VVE:GXGXR, HVTKPTX:APT:EPIS:KFKYE:VVR:SXGXH, YVPKPXX:APT:EPIS:KFKYE:VVR:SXGXH, TVPKPXX:APT:EPIS:KFKYE:VVR:AXGXH, AVPKAXX:APT:EPIS:KFKYE:VVK:AXGXH, KVGKAXX:VPT:EPIS:KFKYE:VAE:XGXR, GSAGPXX:TPT:EPIS:KFKYE:VVD:RXGXS, AAPASXX:VPA:EPIS:KFKYE:VVE:AXGXR, STPPTXX:VPT:EPIS:KFKYE:VVE:SXGXR, HVPKPXX:APT:EPIS:KFKYE:VVR:SXGXH, RVPSTXX:APV:EPIS:KFKYE:VEE:XGXL, ASAAPXX:VPQ:EPIS:KFKYE:VRS:XKXS, ASASPXX:VSQ:EPIS:KFKYE:VKS:XKXS, ASASPXX:VPQ:EPIS:KFKYE:VKS:XKXS, NDEGLEX:VPT:EPIS:KFKYE:QHN:KXEXR, NDEGLEX:VPT:EPIS:KFKYE:EHS:QXEXR, SSVKXQP:SRV:EPIS:KFKYE:EEH:LEXAXA, RNVQXRP:TQV:EPIS:KFKYE:EDH:LAXKXE, KIPKAXX:TPT:SPIN:YGKIP:VVD:GXGXR, GIPEPXX:TPT:SPIN:YGKIP:VVD:SXAXR, SIPKAXX:TPT:SPIN:YGKIP:VVD:GXGXR, HVTKPTX:TPT:SPIN:YGKIP:VVD:SXGXH, YVPKPXX:TPT:SPIN:YGKIP:VVD:SXGXH, TVPKPXX:TPT:SPIN:YGKIP:VVD:AXGXH, AVPKAXX:TPT:SPIN:YGKIP:VVD:AXGXH, KVGKAXX:TPT:SPIN:YGKIP:VVD:XGXR, KASKAXX:TPT:SPIN:YGKIP:VVD:EXGXR, AAPASXX:TPT:SPIN:YGKIP:VVD:AXGXR, STPPTXX:TPT:SPIN:YGKIP:VVD:SXGXR, HVPKPXX:TPT:SPIN:YGKIP:VVD:SXGXH, RVPSTXX:TPT:SPIN:YGKIP:VVD:XGXL, ASAAPXX:TPT:SPIN:YGKIP:VVD:XKXS, ASASPXX:TPT:SPIN:YGKIP:VVD:XKXS, KIPKAXX:VPT:SPIN:YGKIP:VVE:GXGXR, GIPEPXX:VPE:SPIN:YGKIP:TVE:SXAXR, SIPKAXX:VPT:SPIN:YGKIP:VVE:GXGXR, HVTKPTX:APT:SPIN:YGKIP:VVR:SXGXH, YVPKPXX:APT:SPIN:YGKIP:VVR:SXGXH, TVPKPXX:APT:SPIN:YGKIP:VVR:AXGXH, AVPKAXX:APT:SPIN:YGKIP:VVK:AXGXH, KVGKAXX:VPT:SPIN:YGKIP:VAE:XGXR, KASKAXX:VPT:SPIN:YGKIP:AVS:EXGXR, AAPASXX:VPA:SPIN:YGKIP:VVE:AXGXR, STPPTXX:VPT:SPIN:YGKIP:VVE:SXGXR, HVPKPXX:APT:SPIN:YGKIP:VVR:SXGXH, RVPSTXX:APV:SPIN:YGKIP:VEE:XGXL, ASAAPXX:VPQ:SPIN:YGKIP:VRS:XKXS, ASASPXX:VSQ:SPIN:YGKIP:VKS:XKXS, ASASPXX:VPQ:SPIN:YGKIP:VKS:XKXS, NDEGLEX:VPT:SPIN:YGKIP:QHN:KXEXR, NDEGLEX:VPT:SPIN:YGKIP:EHS:QXEXR, SSVKXQP:SRV:SPIN:YGKIP:EEH:LEXAXA, RNVQXRP:TQV:SPIN:YGKIP:EDH:LAXKXE, KIPKAXX:VPA:SPIS:YKQYE:VVE:GXGXR, GIPEPXX:VPA:SPIS:YKQYE:VVE:SXAXR, SIPKAXX:VPA:SPIS:YKQYE:VVE:GXGXR, HVTKPTX:VPA:SPIS:YKQYE:VVE:SXGXH, YVPKPXX:VPA:SPIS:YKQYE:VVE:SXGXH, TVPKPXX:VPA:SPIS:YKQYE:VVE:AXGXH, AVPKAXX:VPA:SPIS:YKQYE:VVE:AXGXH, KVGKAXX:VPA:SPIS:YKQYE:VVE:XGXR, KASKAXX:VPA:SPIS:YKQYE:VVE:EXGXR, GSAGPXX:VPA:SPIS:YKQYE:VVE:RXGXS, STPPTXX:VPA:SPIS:YKQYE:VVE:SXGXR, HVPKPXX:VPA:SPIS:YKQYE:VVE:SXGXH, RVPSTXX:VPA:SPIS:YKQYE:VVE:XGXL, ASAAPXX:VPA:SPIS:YKQYE:VVE:XKXS, ASASPXX:VPA:SPIS:YKQYE:VVE:XKXS, KIPKAXX:VPT:SPIS:YKQYE:VVE:GXGXR, GIPEPXX:VPE:SPIS:YKQYE:TVE:SXAXR, SIPKAXX:VPT:SPIS:YKQYE:VVE:GXGXR, HVTKPTX:APT:SPIS:YKQYE:VVR:SXGXH, YVPKPXX:APT:SPIS:YKQYE:VVR:SXGXH, TVPKPXX:APT:SPIS:YKQYE:VVR:AXGXH, AVPKAXX:APT:SPIS:YKQYE:VVK:AXGXH, KVGKAXX:VPT:SPIS:YKQYE:VAE:XGXR, KASKAXX:VPT:SPIS:YKQYE:AVS:EXGXR, GSAGPXX:TPT:SPIS:YKQYE:VVD:RXGXS, STPPTXX:VPT:SPIS:YKQYE:VVE:SXGXR, HVPKPXX:APT:SPIS:YKQYE:VVR:SXGXH, RVPSTXX:APV:SPIS:YKQYE:VEE:XGXL, ASAAPXX:VPQ:SPIS:YKQYE:VRS:XKXS, ASASPXX:VSQ:SPIS:YKQYE:VKS:XKXS, ASASPXX:VPQ:SPIS:YKQYE:VKS:XKXS, NDEGLEX:VPT:SPIS:YKQYE:QHN:KXEXR, NDEGLEX:VPT:SPIS:YKQYE:EHS:QXEXR, SSVKXQP:SRV:SPIS:YKQYE:EEH:LEXAXA, RNVQXRP:TQV:SPIS:YKQYE:EDH:LAXKXE, GIPEPXX:VPT:SPIS:YKQYE:VVE:SXAXR, HVTKPTX:VPT:SPIS:YKQYE:VVE:SXGXH, YVPKPXX:VPT:SPIS:YKQYE:VVE:SXGXH, TVPKPXX:VPT:SPIS:YKQYE:VVE:AXGXH, AVPKAXX:VPT:SPIS:YKQYE:VVE:AXGXH, KVGKAXX:VPT:SPIS:YKQYE:VVE:XGXR, KASKAXX:VPT:SPIS:YKQYE:VVE:EXGXR, GSAGPXX:VPT:SPIS:YKQYE:VVE:RXGXS, AAPASXX:VPT:SPIS:YKQYE:VVE:AXGXR, HVPKPXX:VPT:SPIS:YKQYE:VVE:SXGXH, RVPSTXX:VPT:SPIS:YKQYE:VVE:XGXL, ASAAPXX:VPT:SPIS:YKQYE:VVE:XKXS, ASASPXX:VPT:SPIS:YKQYE:VVE:XKXS, AAPASXX:VPA:SPIS:YKQYE:VVE:AXGXR, KIPKAXX:APV:KPLS:DHHKD:VEE:GXGXR, GIPEPXX:APV:KPLS:DHHKD:VEE:SXAXR, SIPKAXX:APV:KPLS:DHHKD:VEE:GXGXR, HVTKPTX:APV:KPLS:DHHKD:VEE:SXGXH, YVPKPXX:APV:KPLS:DHHKD:VEE:SXGXH, TVPKPXX:APV:KPLS:DHHKD:VEE:AXGXH, AVPKAXX:APV:KPLS:DHHKD:VEE:AXGXH, KVGKAXX:APV:KPLS:DHHKD:VEE:XGXR, KASKAXX:APV:KPLS:DHHKD:VEE:EXGXR, GSAGPXX:APV:KPLS:DHHKD:VEE:RXGXS, AAPASXX:APV:KPLS:DHHKD:VEE:AXGXR, STPPTXX:APV:KPLS:DHHKD:VEE:SXGXR, HVPKPXX:APV:KPLS:DHHKD:VEE:SXGXH, ASAAPXX:APV:KPLS:DHHKD:VEE:XKXS, ASASPXX:APV:KPLS:DHHKD:VEE:XKXS, KIPKAXX:VPT:KPLS:DHHKD:VVE:GXGXR, GIPEPXX:VPE:KPLS:DHHKD:TVE:SXAXR, SIPKAXX:VPT:KPLS:DHHKD:VVE:GXGXR, HVTKPTX:APT:KPLS:DHHKD:VVR:SXGXH, YVPKPXX:APT:KPLS:DHHKD:VVR:SXGXH, TVPKPXX:APT:KPLS:DHHKD:VVR:AXGXH, AVPKAXX:APT:KPLS:DHHKD:VVK:AXGXH, KVGKAXX:VPT:KPLS:DHHKD:VAE:XGXR, KASKAXX:VPT:KPLS:DHHKD:AVS:EXGXR, GSAGPXX:TPT:KPLS:DHHKD:VVD:RXGXS, AAPASXX:VPA:KPLS:DHHKD:VVE:AXGXR, STPPTXX:VPT:KPLS:DHHKD:VVE:SXGXR, HVPKPXX:APT:KPLS:DHHKD:VVR:SXGXH, ASAAPXX:VPQ:KPLS:DHHKD:VRS:XKXS, ASASPXX:VSQ:KPLS:DHHKD:VKS:XKXS, ASASPXX:VPQ:KPLS:DHHKD:VKS:XKXS, NDEGLEX:VPT:KPLS:DHHKD:QHN:KXEXR, NDEGLEX:VPT:KPLS:DHHKD:EHS:QXEXR, SSVKXQP:SRV:KPLS:DHHKD:EEH:LEXAXA, RNVQXRP:TQV:KPLS:DHHKD:EDH:LAXKXE, KIPKAXX:VPQ:EPLP:EQLSN:VRS:GXGXR, GIPEPXX:VPQ:EPLP:EQLSN:VRS:SXAXR, SIPKAXX:VPQ:EPLP:EQLSN:VRS:GXGXR, HVTKPTX:VPQ:EPLP:EQLSN:VRS:SXGXH, YVPKPXX:VPQ:EPLP:EQLSN:VRS:SXGXH, TVPKPXX:VPQ:EPLP:EQLSN:VRS:AXGXH, AVPKAXX:VPQ:EPLP:EQLSN:VRS:AXGXH, KVGKAXX:VPQ:EPLP:EQLSN:VRS:XGXR, KASKAXX:VPQ:EPLP:EQLSN:VRS:EXGXR, GSAGPXX:VPQ:EPLP:EQLSN:VRS:RXGXS, AAPASXX:VPQ:EPLP:EQLSN:VRS:AXGXR, STPPTXX:VPQ:EPLP:EQLSN:VRS:SXGXR, HVPKPXX:VPQ:EPLP:EQLSN:VRS:SXGXH, RVPSTXX:VPQ:EPLP:EQLSN:VRS:XGXL, ASASPXX:VPQ:EPLP:EQLSN:VRS:XKXS, KIPKAXX:VPT:EPLP:EQLSN:VVE:GXGXR, GIPEPXX:VPE:EPLP:EQLSN:TVE:SXAXR, SIPKAXX:VPT:EPLP:EQLSN:VVE:GXGXR, HVTKPTX:APT:EPLP:EQLSN:VVR:SXGXH, YVPKPXX:APT:EPLP:EQLSN:VVR:SXGXH, TVPKPXX:APT:EPLP:EQLSN:VVR:AXGXH, AVPKAXX:APT:EPLP:EQLSN:VVK:AXGXH, KVGKAXX:VPT:EPLP:EQLSN:VAE:XGXR, KASKAXX:VPT:EPLP:EQLSN:AVS:EXGXR, GSAGPXX:TPT:EPLP:EQLSN:VVD:RXGXS, AAPASXX:VPA:EPLP:EQLSN:VVE:AXGXR, STPPTXX:VPT:EPLP:EQLSN:VVE:SXGXR, HVPKPXX:APT:EPLP:EQLSN:VVR:SXGXH, RVPSTXX:APV:EPLP:EQLSN:VEE:XGXL, ASASPXX:VSQ:EPLP:EQLSN:VKS:XKXS, ASASPXX:VPQ:EPLP:EQLSN:VKS:XKXS, NDEGLEX:VPT:EPLP:EQLSN:QHN:KXEXR, NDEGLEX:VPT:EPLP:EQLSN:EHS:QXEXR, SSVKXQP:SRV:EPLP:EQLSN:EEH:LEXAXA, RNVQXRP:TQV:EPLP:EQLSN:EDH:LAXKXE, KIPKAXX:VSQ:EPLT:EQLSN:VKS:GXGXR, GIPEPXX:VSQ:EPLT:EQLSN:VKS:SXAXR, SIPKAXX:VSQ:EPLT:EQLSN:VKS:GXGXR, HVTKPTX:VSQ:EPLT:EQLSN:VKS:SXGXH, YVPKPXX:VSQ:EPLT:EQLSN:VKS:SXGXH, TVPKPXX:VSQ:EPLT:EQLSN:VKS:AXGXH, AVPKAXX:VSQ:EPLT:EQLSN:VKS:AXGXH, KVGKAXX:VSQ:EPLT:EQLSN:VKS:XGXR, KASKAXX:VSQ:EPLT:EQLSN:VKS:EXGXR, GSAGPXX:VSQ:EPLT:EQLSN:VKS:RXGXS, AAPASXX:VSQ:EPLT:EQLSN:VKS:AXGXR, STPPTXX:VSQ:EPLT:EQLSN:VKS:SXGXR, HVPKPXX:VSQ:EPLT:EQLSN:VKS:SXGXH, RVPSTXX:VSQ:EPLT:EQLSN:VKS:XGXL, ASAAPXX:VSQ:EPLT:EQLSN:VKS:XKXS, ASASPXX:VSQ:EPLT:EQLSN:VKS:XKXS, KIPKAXX:VPT:EPLT:EQLSN:VVE:GXGXR, GIPEPXX:VPE:EPLT:EQLSN:TVE:SXAXR, SIPKAXX:VPT:EPLT:EQLSN:VVE:GXGXR, HVTKPTX:APT:EPLT:EQLSN:VVR:SXGXH, YVPKPXX:APT:EPLT:EQLSN:VVR:SXGXH, TVPKPXX:APT:EPLT:EQLSN:VVR:AXGXH, AVPKAXX:APT:EPLT:EQLSN:VVK:AXGXH, KVGKAXX:VPT:EPLT:EQLSN:VAE:XGXR, KASKAXX:VPT:EPLT:EQLSN:AVS:EXGXR, GSAGPXX:TPT:EPLT:EQLSN:VVD:RXGXS, AAPASXX:VPA:EPLT:EQLSN:VVE:AXGXR, STPPTXX:VPT:EPLT:EQLSN:VVE:SXGXR, HVPKPXX:APT:EPLT:EQLSN:VVR:SXGXH, RVPSTXX:APV:EPLT:EQLSN:VEE:XGXL, ASAAPXX:VPQ:EPLT:EQLSN:VRS:XKXS, NDEGLEX:VPT:EPLT:EQLSN:QHN:KXEXR, NDEGLEX:VPT:EPLT:EQLSN:EHS:QXEXR, SSVKXQP:SRV:EPLT:EQLSN:EEH:LEXAXA, RNVQXRP:TQV:EPLT:EQLSN:EDH:LAXKXE, KIPKAXX:VPQ:EPLT:EQLSN:VKS:GXGXR, GIPEPXX:VPQ:EPLT:EQLSN:VKS:SXAXR, SIPKAXX:VPQ:EPLT:EQLSN:VKS:GXGXR, HVTKPTX:VPQ:EPLT:EQLSN:VKS:SXGXH, YVPKPXX:VPQ:EPLT:EQLSN:VKS:SXGXH, TVPKPXX:VPQ:EPLT:EQLSN:VKS:AXGXH, AVPKAXX:VPQ:EPLT:EQLSN:VKS:AXGXH, KVGKAXX:VPQ:EPLT:EQLSN:VKS:XGXR, KASKAXX:VPQ:EPLT:EQLSN:VKS:EXGXR, GSAGPXX:VPQ:EPLT:EQLSN:VKS:RXGXS, AAPASXX:VPQ:EPLT:EQLSN:VKS:AXGXR, STPPTXX:VPQ:EPLT:EQLSN:VKS:SXGXR, HVPKPXX:VPQ:EPLT:EQLSN:VKS:SXGXH, RVPSTXX:VPQ:EPLT:EQLSN:VKS:XGXL, ASAAPXX:VPQ:EPLT:EQLSN:VKS:XKXS, ASASPXX:VPQ:EPLT:EQLSN:VKS:XKXS, NDEGLEX:VPT:SNIT:IGEMS:QHN:QXEXR, KIPKAXX:VPT:SNIT:IGEMS:VVE:GXGXR, GIPEPXX:VPE:SNIT:IGEMS:TVE:SXAXR, SIPKAXX:VPT:SNIT:IGEMS:VVE:GXGXR, HVTKPTX:APT:SNIT:IGEMS:VVR:SXGXH, YVPKPXX:APT:SNIT:IGEMS:VVR:SXGXH, TVPKPXX:APT:SNIT:IGEMS:VVR:AXGXH, AVPKAXX:APT:SNIT:IGEMS:VVK:AXGXH, KVGKAXX:VPT:SNIT:IGEMS:VAE:XGXR, KASKAXX:VPT:SNIT:IGEMS:AVS:EXGXR, GSAGPXX:TPT:SNIT:IGEMS:VVD:RXGXS, AAPASXX:VPA:SNIT:IGEMS:VVE:AXGXR, STPPTXX:VPT:SNIT:IGEMS:VVE:SXGXR, HVPKPXX:APT:SNIT:IGEMS:VVR:SXGXH, RVPSTXX:APV:SNIT:IGEMS:VEE:XGXL, ASAAPXX:VPQ:SNIT:IGEMS:VRS:XKXS, ASASPXX:VSQ:SNIT:IGEMS:VKS:XKXS, ASASPXX:VPQ:SNIT:IGEMS:VKS:XKXS, NDEGLEX:VPT:SNIT:IGEMS:EHS:QXEXR, SSVKXQP:SRV:SNIT:IGEMS:EEH:LEXAXA, RNVQXRP:TQV:SNIT:IGEMS:EDH:LAXKXE, NDEGLEX:VPT:SNIT:LGEMS:EHS:KXEXR, KIPKAXX:VPT:SNIT:LGEMS:VVE:GXGXR, GIPEPXX:VPE:SNIT:LGEMS:TVE:SXAXR, SIPKAXX:VPT:SNIT:LGEMS:VVE:GXGXR, HVTKPTX:APT:SNIT:LGEMS:VVR:SXGXH, YVPKPXX:APT:SNIT:LGEMS:VVR:SXGXH, TVPKPXX:APT:SNIT:LGEMS:VVR:AXGXH, AVPKAXX:APT:SNIT:LGEMS:VVK:AXGXH, KVGKAXX:VPT:SNIT:LGEMS:VAE:XGXR, KASKAXX:VPT:SNIT:LGEMS:AVS:EXGXR, GSAGPXX:TPT:SNIT:LGEMS:VVD:RXGXS, AAPASXX:VPA:SNIT:LGEMS:VVE:AXGXR, STPPTXX:VPT:SNIT:LGEMS:VVE:SXGXR, HVPKPXX:APT:SNIT:LG EMS:VVR:SXGXH, RVPSTXX:APV:SNIT:LGEMS:VEE:XGXL, ASAAPXX:VPQ:SNIT:LGEMS:VRS:XKXS, ASASPXX:VSQ:SNIT:LGEMS:VKS:XKXS, ASASPXX:VPQ:SNIT:LGEMS:VKS:XKXS, NDEGLEX:VPT:SNIT:LGEMS:QHN:KXEXR, SSVKXQP:SRV:SNIT:LGEMS:EEH:LEXAXA, RNVQXRP:TQV:SNIT:LGEMS:EDH:LAXKXE, RNVQXRP:SRV:RSVK:KEVQV:EEH:LAXKXE, KIPKAXX:VPT:RSVK:KEVQV:VVE:GXGXR, GIPEPXX:VPE:RSVK:KEVQV:TVE:SXAXR, SIPKAXX:VPT:RSVK:KEVQV:VVE:GXGXR, HVTKPTX:APT:RSVK:KEVQV:VVR:SXGXH, YVPKPXX:APT:RSVK:KEVQV:VVR:SXGXH, TVPKPXX:APT:RSVK:KEVQV:VVR:AXGXH, AVPKAXX:APT:RSVK:KEVQV:VVK:AXGXH, KVGKAXX:VPT:RSVK:KEVQV:VAE:XGXR, KASKAXX:VPT:RSVK:KEVQV:AVS:EXGXR, GSAGPXX:TPT:RSVK:KEVQV:VVD:RXGXS, AAPASXX:VPA:RSVK:KEVQV:VVE:AXGXR, STPPTXX:VPT:RSVK:KEVQV:VVE:SXGXR, HVPKPXX:APT:RSVK:KEVQV:VVR:SXGXH, RVPSTXX:APV:RSVK:KEVQV:VEE:XGXL, ASAAPXX:VPQ:RSVK:KEVQV:VRS:XKXS, ASASPXX:VSQ:RSVK:KEVQV:VKS:XKXS, ASASPXX:VPQ:RSVK:KEVQV:VKS:XKXS, NDEGLEX:VPT:RSVK:KEVQV:QHN:KXEXR, NDEGLEX:VPT:RSVK:KEVQV:EHS:QXEXR, RNVQXRP:TQV:RSVK:KEVQV:EDH:LAXKXE, SSVKXQP:TQV:RPVQ:KKATV:EDH:LEXAXA, KIPKAXX:VPT:RPVQ:KKATV:VVE:GXGXR, GIPEPXX:VPE:RPVQ:KKATV:TVE:SXAXR, SIPKAXX:VPT:RPVQ:KKATV:VVE:GXGXR, HVTKPTX:APT:RPVQ:KKATV:VVR:SXGXH, YVPKPXX:APT:RPVQ:KKATV:VVR:SXGXH, TVPKPXX:APT:RPVQ:KKATV:VVR:AXGXH, AVPKAXX:APT:RPVQ:KKATV:VVK:AXGXH, KVGKAXX:VPT:RPVQ:KKATV:VAE:XGXR, KASKAXX:VPT:RPVQ:KKATV:AVS:EXGXR, GSAGPXX:TPT:RPVQ:KKATV:VVD:RXGXS, AAPASXX:VPA:RPVQ:KKATV:VVE:AXGXR, STPPTXX:VPT:RPVQ:KKATV:VVE:SXGXR, HVPKPXX:APT:RPVQ:KKATV:VVR:SXGXH, RVPSTXX:APV:RPVQ:KKATV:VEE:XGXL, ASAAPXX:VPQ: RPVQ:KKATV:VRS:XKXS, ASASPXX:VSQ:RPVQ:KKATV:VKS:XKXS, ASASPXX:VPQ:RPVQ:KKATV:VKS:XKXS, NDEGLEX:VPT: RPVQ:KKATV:QHN:KXEXR, NDEGLEX:VPT:RPVQ:KKATV:EHS:QXEXR and SSVKXQP:SRV:RPVQ:KKATV:EEH:LEXAXA.

[0434] In particular, in certain embodiments, the hexaplet PEP7:PEP3:PEP12:PEP2:PEP4:PEP8 is selected from the group consisting of GIPEPXX:VPT:SAIS-AA¹⁷-LYL:LKNYQ:VVE:SXAXR, SIPKAXX:VPT:SAIS-AA¹⁷-LYL:LKNYQ:VVE:GXGXR, HVTKPTX:VPT:SAIS-AA¹⁷-LYL:LKNYQ:VVE:SXGXH, YVPKPXX:VPT:SAIS-AA¹⁷-LYL:LKNYQ:VVE:SXGXH, TVPKPXX:VPT:SAIS-AA¹⁷-LYL:LKNYQ:VVE:AXGXH, AVPKAXX:VPT:SAIS-AA¹⁷-LYL:LKNYQ:VVE:AXGXH, KVGKAXX:VPT:SAIS-AA¹⁷-LYL:LKNYQ:VVE:XGXR, KASKAXX:VPT:SAIS-AA¹⁷-LYL:LKNYQ:VVE:EXGXR, GSAGPXX:VPT:SAIS-AA¹⁷-LYL:LKNYQ:VVE:RXGXS, AAPASXX:VPT:SAIS-AA¹⁷-LYL:LKNYQ:VVE:AXGXR, STPPTXX:VPT:SAIS-AA¹⁷-LYL:LKNYQ:VVE:SXGXR, HVPKPXX:VPT:SAIS-AA¹⁷-LYL:LKNYQ:VVE:SXGXH, RVPSTXX:VPT:SAIS-AA¹⁷-LYL:LKNYQ:VVE:XGXL, ASAAPXX:VPT:SAIS-AA¹⁷-LYL:LKNYQ:VVE:XKXS, ASASPXX:VPT:SAIS-AA¹⁷-LYL:LKNYQ:VVE:XKXS, NDEGLEX:VPT:SAIS-AA¹⁷-LYL:LKNYQ:VVE:KXEXR, NDEGLEX:VPT:SAIS-AA¹⁷-LYL:LKNYQ:VVE:QXEXR, SSVKXQP:VPT:SAIS-AA¹⁷-LYL:LKNYQ:VVE:LEXAXA, RNVQXRP:VPT:SAIS-AA¹⁷-LYL:LKNYQ:VVE:LAXKXE, GIPEPXX:VPE:SAIS-AA¹⁷-LYL:LKNYQ:TVE:SXAXR, HVTKPTX:APT:SAIS-AA¹⁷-LYL:LKNYQ:VVR:SXGXH, YVPKPXX:APT:SAIS-AA¹⁷-LYL:LKNYQ:VVR:SXGXH, TVPKPXX:APT:SAIS-AA¹⁷-LYL:LKNYQ:VVR:AXGXH, AVPKAXX:APT:SAIS-AA¹⁷-LYL:LKNYQ:VVK:AXGXH, KVGKAXX:VPT:SAIS-AA¹⁷-LYL:LKNYQ:VAE:XGXR, KASKAXX:VPT:SAIS-AA¹⁷-LYL:LKNYQ:AVS:EXGXR, GSAGPXX:TPT:SAIS-AA¹⁷-LYL:LKNYQ:VVD:RXGXS, AAPASXX:VPA:SAIS-AA¹⁷-LYL:LKNYQ:VVE:AXGXR, HVPKPXX:APT:SAIS-AA¹⁷-LYL:LKNYQ:VVR:SXGXH, RVPSTXX:APV:SAIS-AA¹⁷-LYL:LKNYQ:VEE:XGXL, ASAAPXX:VPQ:SAIS-AA¹⁷-LYL:LKNYQ:VRS:XKXS, ASASPXX:VSQ:SAIS-AA¹⁷-LYL:LKNYQ:VKS:XKXS, ASASPXX:VPQ:SAIS-AA¹⁷-LYL:LKNYQ:VKS:XKXS, NDEGLEX:VPT:SAIS-AA¹⁷-LYL:LKNYQ:QHN:KXEXR, NDEGLEX:VPT:SAIS-AA¹⁷-LYL:LKNYQ:EHS:QXEXR, SSVKXQP:SRV:SAIS-AA¹⁷-LYL:LKNYQ:EEH:LEXAXA, RNVQXRP:TQV:SAIS-AA¹⁷-LYL:LKNYQ:EDH:LAXKXE, KIPKAXX:VPE:SSLS-AA¹⁷-LFF:LKVYP:TVE:GXGXR, SIPKAXX:VPE:SSLS-AA¹⁷-LFF:LKVYP:TVE:GXGXR, HVTKPTX:VPE:SSLS-AA¹⁷-LFF:LKVYP:TVE:SXGXH, YVPKPXX:VPE:SSLS-AA¹⁷-LFF:LKVYP:TVE:SXGXH, TVPKPXX:VPE:SSLS-AA¹⁷-LFF:LKVYP:TVE:AXGXH, AVPKAXX:VPE:SSLS-AA¹⁷-LFF:LKVYP:TVE:AXGXH, KVGKAXX:VPE:SSLS-AA¹⁷-LFF:LKVYP:TVE:XGXR, KASKAXX:VPE:SSLS-AA¹⁷-LFF:LKVYP:TVE:EXGXR, GSAGPXX:VPE:SSLS-AA¹⁷-LFF:LKVYP:TVE:RXGXS, AAPASXX:VPE:SSLS-AA¹⁷-LFF:LKVYP:TVE:AXGXR, STPPTXX:VPE:SSLS-AA¹⁷-LFF:LKVYP:TVE:SXGXR, HVPKPXX:VPE:SSLS-AA¹⁷-LFF:LKVYP:TVE:SXGXH, RVPSTXX:VPE:SSLS-AA¹⁷-LFF:LKVYP:TVE:XGXL, ASAAPXX:VPE:SSLS-AA¹⁷-LFF:LKVYP:TVE:XKXS, ASASPXX:VPE:SSLS-AA¹⁷-LFF:LKVYP:TVE:XKXS, NDEGLEX:VPE:SSLS-AA¹⁷-LFF:LKVYP:TVE:KXEXR, NDEGLEX:VPE:SSLS-AA¹⁷-LFF:LKVYP:TVE:QXEXR, SSVKXQP:VPE:SSLS-AA¹⁷-LFF:LKVYP:TVE:LEXAXA, RNVQXRP:VPE:SSLS-AA¹⁷-LFF:LKVYP:TVE:LAXKXE, KIPKAXX:VPT:SSLS-AA¹⁷-LFF:LKVYP:VVE:GXGXR, SIPKAXX:VPT:SSLS-AA¹⁷-LFF:LKVYP:VVE:GXGXR, HVTKPTX:APT:SSLS-AA¹⁷-LFF:LKVYP:VVR:SXGXH, YVPKPXX:APT:SSLS-AA¹⁷-LFF:LKVYP:VVR:SXGXH, TVPKPXX:APT:SSLS-AA¹⁷-LFF:LKVYP:VVR:AXGXH, AVPKAXX:APT:SSLS-AA¹⁷-LFF:LKVYP:VVK:AXGXH, KVGKAXX:VPT:SSLS-AA¹⁷-LFF:LKVYP:VAE:XGXR, KASKAXX:VPT:SSLS-AA¹⁷-LFF:LKVYP:AVS:EXGXR, GSAGPXX:TPT:SSLS-AA¹⁷-LFF:LKVYP:VVD:RXGXS, AAPASXX:VPA:SSLS-AA¹⁷-LFF:LKVYP:VVE:AXGXR, STPPTXX:VPT:SSLS-AA¹⁷-LFF:LKVYP:VVE:SXGXR, HVPKPXX:APT:SSLS-AA¹⁷-LFF:LKVYP:VVR:SXGXH, RVPSTXX:APV:SSLS-AA¹⁷-LFF:LKVYP:VEE:XGXL, ASAAPXX:VPQ:SSLS-AA¹⁷-LFF:LKVYP:VRS:XKXS, ASASPXX:VSQ:SSLS-AA¹⁷-LFF:LKVYP:VKS:XKXS, ASASPXX:VPQ:SSLS-AA¹⁷-LFF:LKVYP:VKS:XKXS, NDEGLEX:VPT:SSLS-AA¹⁷-LFF:LKVYP:QHN:KXEXR, NDEGLEX:VPT:SSLS-AA¹⁷-LFF:LKVYP:EHS:QXEXR, SSVKXQP:SRV:SSLS-AA¹⁷-LFF:LKVYP:EEH:LEXAXA, RNVQXRP:TQV:SSLS-AA¹⁷-LFF:LKVYP:EDH:LAXKXE, KIPKAXX:VPT:SAIS-AA¹⁷-LYL:LKNYQ:VVE:GXGXR, KIPKAXX:APT:NAIS-AA¹⁷-LYFIKKYR:VVR:GXGXR, GIPEPXX:APT:NAIS-AA¹⁷-LYFIKKYR:VVR:SXAXR, SIPKAXX:APT:NAIS-AA¹⁷-LYFIKKYR:VVR:GXGXR, YVPKPXX:APT:NAIS-AA¹⁷-LYFIKKYR:VVR:SXGXH, TVPKPXX:APT:NAIS-AA¹⁷-LYF:LKKYR:VVR:AXGXH, AVPKAXX:APT:NAIS-AA¹⁷-LYFIKKYR:VVR:AXGXH, KVGKAXX:APT:NAIS-AA¹⁷-LYFIKKYR:VVR:XGXR, KASKAXX:APT:NAIS-AA¹⁷-LYFIKKYR:VVR:EXGXR, GSAGPXX:APT:NAIS-AA¹⁷-LYFIKKYR:VVR:RXGXS, AAPASXX:APT:NAIS-AA¹⁷-LYF:LKKYR:VVR:AXGXR, STPPTXX:APT:NAIS-AA¹⁷-LYFIKKYR:VVR:SXGXR, HVPKPXX:APT:NAIS-AA¹⁷-LYFIKKYR:VVR:SXGXH, RVPSTXX:APT:NAIS-AA¹⁷-LYFIKKYR:VVR:XGXL, ASAAPXX:APT:NAIS-AA¹⁷-LYFIKKYR:VVR:XKXS, ASASPXX:APT:NAIS-AA¹⁷-LYFIKKYR:VVR:XKXS, NDEGLEX:APT:NAIS-AA¹⁷-LYFIKKYR:VVR:KXEXR, NDEGLEX:APT:NAIS-AA¹⁷-LYF:LKKYR:VVR:QXEXR, SSVKXQP:APT:NAIS-AA¹⁷-LYFIKKYR:VVR:LEXAXA, RNVQXRP:APT:NAIS-AA¹⁷-LYFIKKYR:VVR:LAXKXE, KIPKAXX:VPT:NAIS-AA¹⁷-LYFIKKYR:VVE:GXGXR, GIPEPXX:VPE:NAIS-AA¹⁷-LYFIKKYR:TVE:SXAXR, SIPKAXX:VPT:NAIS-AA¹⁷-LYF:LKKYR:VVE:GXGXR, AVPKAXX:APT:NAIS-AA¹⁷-LYFIKKYR:VVK:AXGXH, KVGKAXX:VPT:NAIS-AA¹⁷-LYFIKKYR:VAE:XGXR, KASKAXX:VPT:NAIS-AA¹⁷-LYFIKKYR:AVS:EXGXR, GSAGPXX:TPT:NAIS-AA¹⁷-LYFIKKYR:VVD:RXGXS, AAPASXX:VPA:NAIS-AA¹⁷-LYF:LKKYR:VVE:AXGXR, STPPTXX:VPT:NAIS-AA¹⁷-LYFIKKYR:VVE:SXGXR, RVPSTXX:APV:NAIS-AA¹⁷-LYFIKKYR:VEE:XGXL, ASAAPXX:VPQ:NAIS-AA¹⁷-LYFIKKYR:VRS:XKXS, ASASPXX:VSQ:NAIS-AA¹⁷-LYFIKKYR:VKS:XKXS, ASASPXX:VPQ:NAIS-AA¹⁷-LYFIKKYR:VKS:XKXS, NDEGLEX:VPT:NAIS-AA¹⁷-LYFIKKYR:QHN:KXEXR, NDEGLEX:VPT:NAIS-AA¹⁷-LYF:LKKYR:EHS:QXEXR, SSVKXQP:SRV:NAIS-AA¹⁷-LYF:LKKYR:EEH:LEXAXA, RNVQXRP:TQV:NAIS-AA¹⁷-LYFIKKYR: EDH:LAXKXE, HVTKPTX:APT:NAIS-AA¹⁷-LYF:LKKYR:VVR:SXGXH, KIPKAXX:APT:SATS-AA¹⁷-LYY:LRKHR:VVK:GXGXR, GIPEPXX:APT:SATS-AA¹⁷-LYY:LRKHR:VVK:SXAXR, SIPKAXX:APT:SATS-AA¹⁷-LYY:LRKHR:VVK:GXGXR, HVTKPTX:APT:SATS-AA¹⁷-LYY:LRKHR:VVK:SXGXH, YVPKPXX:APT:SATS-AA¹⁷-LYY:LRKHR:VVK:SXGXH, TVPKPXX:APT:SATS-AA¹⁷-LYY:LRKHR:VVK:AXGXH, KVGKAXX:APT:SATS-AA¹⁷-LYY:LRKHR:VVK:XGXR, KASKAXX:APT:SATS-AA¹⁷-LYY:LRKHR:VVK:EXGXR, GSAGPXX:APT:SATS-AA¹⁷-LYY:LRKHR:VVK:RXGXS, AAPASXX:APT:SATS-AA¹⁷-LYY:LRKHR:VVK:AXGXR, STPPTXX:APT:SATS-AA¹⁷-LYY:LRKHR:VVK:SXGXR, HVPKPXX:APT:SATS-AA¹⁷-LYY:LRKHR:VVK:SXGXH, RVPSTXX:APT:SATS-AA¹⁷-LYY:LRKHR:VVK:XGXL, ASAAPXX:APT:SATS-AA¹⁷-LYY:LRKHR:VVK:XKXS, ASASPXX:APT:SATS-AA¹⁷-LYY:LRKHR:VVK:XKXS, NDEGLEX:APT:SATS-AA¹⁷-LYY:LRKHR:VVK:KXEXR, NDEGLEX:APT:SATS-AA¹⁷-LYY:LRKHR:VVK:QXEXR, SSVKXQP:APT:SATS-AA¹⁷-LYY:LRKHR:VVK:LEXAXA, RNVQXRP:APT:SATS-AA¹⁷-LYY:LRKHR:VVK:LAXKXE, KIPKAXX:VPT:SATS-AA¹⁷-LYY:LRKHR:VVE:GXGXR, GIPEPXX:VPE:SATS-AA¹⁷-LYY:LRKHR:TVE:SXAXR, SIPKAXX:VPT:SATS-AA¹⁷-LYY:LRKHR:VVE:GXGXR, HVTKPTX:APT:SATS-AA¹⁷-LYY:LRKHR:VVR:SXGXH, YVPKPXX:APT:SATS-AA¹⁷-LYY:LRKHR:VVR:SXGXH, TVPKPXX:APT:SATS-AA¹⁷-LYY:LRKHR:VVR:AXGXH, KVGKAXX:VPT:SATS-AA¹⁷-LYY:LRKHR:VAE:XGXR, KASKAXX:VPT:SATS-AA¹⁷-LYY:LRKHR:AVS:EXGXR, GSAGPXX:TPT:SATS-AA¹⁷-LYY:LRKHR:VVD:RXGXS, AAPASXX:VPA:SATS-AA¹⁷-LYY:LRKHR:VVE:AXGXR, STPPTXX:VPT:SATS-AA¹⁷-LYY:LRKHR:VVE:SXGXR, HVPKPXX:APT:SATS-AA¹⁷-LYY:LRKHR:VVR:SXGXH, RVPSTXX:APV:SATS-AA¹⁷-LYY:LRKHR:VEE:XGXL, ASAAPXX:VPQ:SATS-AA¹⁷-LYY:LRKHR:VRS:XKXS, ASASPXX:VSQ:SATS-AA¹⁷-LYY:LRKHR:VKS:XKXS, ASASPXX:VPQ:SATS-AA¹⁷-LYY:LRKHR:VKS:XKXS, NDEGLEX:VPT:SATS-AA¹⁷-LYY:LRKHR:QHN:KXEXR, NDEGLEX:VPT:SATS-AA¹⁷-LYY:LRKHR:EHS:QXEXR, SSVKXQP:SRV:SATS-AA¹⁷-LYY:LRKHR:EEH:LEXAXA, RNVQXRP:TQV:SATS-AA¹⁷-LYY:LRKHR: EDH:LAXKXE, KIPKAXX:VPT:SPIS-AA¹⁷-LYK:LKYHY:VAE:GXGXR, GIPEPXX:VPT:SPIS-AA¹⁷-LYK:LKYHY:VAE:SXAXR, SIPKAXX:VPT:SPIS-AA¹⁷-LYK:LKYHY:VAE:GXGXR, HVTKPTX:VPT:SPIS-AA¹⁷-LYK:LKYHY:VAE:SXGXH, YVPKPXX:VPT:SPIS-AA¹⁷-LYK:LKYHY:VAE:SXGXH, TVPKPXX:VPT:SPIS-AA¹⁷-LYK:LKYHY:VAE:AXGXH, AVPKAXX:VPT:SPIS-AA¹⁷-LYK:LKYHY:VAE:AXGXH, KASKAXX:VPT:SPIS-AA¹⁷-LYK:LKYHY:VAE:EXGXR, GSAGPXX:VPT:SPIS-AA¹⁷-LYK:LKYHY:VAE:RXGXS, AAPASXX:VPT:SPIS-AA¹⁷-LYK:LKYHY:VAE:AXGXR, STPPTXX:VPT:SPIS-AA¹⁷-LYK:LKYHY:VAE:SXGXR, HVPKPXX:VPT:SPIS-AA¹⁷-LYK:LKYHY:VAE:SXGXH, RVPSTXX:VPT:SPIS-AA¹⁷-LYK:LKYHY:VAE:XGXL, ASAAPXX:VPT:SPIS-AA¹⁷-LYK:LKYHY:VAE:XKXS, ASASPXX:VPT:SPIS-AA¹⁷-LYK:LKYHY:VAE:XKXS, NDEGLEX:VPT:SPIS-AA¹⁷-LYK:LKYHY:VAE:KXEXR, NDEGLEX:VPT:SPIS-AA¹⁷-LYK:LKYHY:VAE:QXEXR, SSVKXQP:VPT:SPIS-AA¹⁷-LYK:LKYHY:VAE:LEXAXA, RNVQXRP:VPT:SPIS-AA¹⁷-LYK:LKYHY:VAE:LAXKXE, KIPKAXX:VPT:SPIS-AA¹⁷-LYK:LKYHY:VVE:GXGXR, GIPEPXX:VPE:SPIS-AA¹⁷-LYK:LKYHY:TVE:SXAXR, SIPKAXX:VPT:SPIS-AA¹⁷-LYK:LKYHY:VVE:GXGXR, HVTKPTX:APT:SPIS-AA¹⁷-LYK:LKYHY:VVR:SXGXH, YVPKPXX:APT:SPIS-AA¹⁷-LYK:LKYHY:VVR:SXGXH, TVPKPXX:APT:SPIS-AA¹⁷-LYK:LKYHY:VVR:AXGXH, AVPKAXX:APT:SPIS-AA¹⁷-LYK:LKYHY:VVK:AXGXH, KASKAXX:VPT:SPIS-AA¹⁷-LYK:LKYHY:AVS:EXGXR, GSAGPXX:TPT:SPIS-AA¹⁷-LYK:LKYHY:VVD:RXGXS, AAPASXX:VPA:SPIS-AA¹⁷-LYK:LKYHY:VVE:AXGXR, STPPTXX:VPT:SPIS-AA¹⁷-LYK:LKYHY:VVE:SXGXR, HVPKPXX:APT:SPIS-AA¹⁷-LYK:LKYHY:VVR:SXGXH, RVPSTXX:APV:SPIS-AA¹⁷-LYK:LKYHY:VEE:XGXL, ASAAPXX:VPQ:SPIS-AA¹⁷-LYK:LKYHY:VRS:XKXS, ASASPXX:VSQ:SPIS-AA¹⁷-LYK:LKYHY:VKS:XKXS, ASASPXX:VPQ:SPIS-AA¹⁷-LYK:LKYHY:VKS:XKXS, NDEGLEX:VPT:SPIS-AA¹⁷-LYK:LKYHY:QHN:KXEXR, NDEGLEX:VPT:SPIS-AA¹⁷-LYK:LKYHY:EHS:QXEXR, SSVKXQP:SRV:SPIS-AA¹⁷-LYK:LKYHY:EEH:LEXAXA, RNVQXRP:TQV:SPIS-AA¹⁷-LYK:LKYHY:EDH:LAXKXE, KIPKAXX:VPT:EPIS-AA¹⁷-LYL:KFKYE:AVS:GXGXR, GIPEPXX:VPT:EPIS-AA¹⁷-LYL:KFKYE:AVS:SXAXR, SIPKAXX:VPT:EPIS-AA¹⁷-LYL:KFKYE:AVS:GXGXR, HVTKPTX:VPT:EPIS-AA¹⁷-LYL:KFKYE:AVS:SXGXH, YVPKPXX:VPT:EPIS-AA¹⁷-LYL:KFKYE:AVS:SXGXH, TVPKPXX:VPT:EPIS-AA¹⁷-LYL:KFKYE:AVS:AXGXH, AVPKAXX:VPT:EPIS-AA¹⁷-LYL:KFKYE:AVS:AXGXH, KVGKAXX:VPT:EPIS-AA¹⁷-LYL:KFKYE:AVS:XGXR, GSAGPXX:VPT:EPIS-AA¹⁷-LYL:KFKYE:AVS:RXGXS, AAPASXX:VPT:EPIS-AA¹⁷-LYL:KFKYE:AVS:AXGXR, STPPTXX:VPT:EPIS-AA¹⁷-LYL:KFKYE:AVS:SXGXR, HVPKPXX:VPT:EPIS-AA¹⁷-LYL:KFKYE:AVS:SXGXH, RVPSTXX:VPT:EPIS-AA¹⁷-LYL:KFKYE:AVS:XGXL, ASAAPXX:VPT:EPIS-AA¹⁷-LYL:KFKYE:AVS:XKXS, ASASPXX:VPT:EPIS-AA¹⁷-LYL:KFKYE:AVS:XKXS, NDEGLEX:VPT:EPIS-AA¹⁷-LYL:KFKYE:AVS:KXEXR, NDEGLEX:VPT:EPIS-AA¹⁷-LYL:KFKYE:AVS:QXEXR, SSVKXQP:VPT:EPIS-AA¹⁷-LYL:KFKYE:AVS:LEXAXA, RNVQXRP:VPT:EPIS-AA¹⁷-LYL:KFKYE:AVS:LAXKXE, KIPKAXX:VPT:EPIS-AA¹⁷-LYL:KFKYE:VVE:GXGXR, GIPEPXX:VPE:EPIS-AA¹⁷-LYL:KFKYE:TVE:SXAXR, SIPKAXX:VPT:EPIS-AA¹⁷-LYL:KFKYE:VVE:GXGXR, HVTKPTX:APT:EPIS-AA¹⁷-LYL:KFKYE:VVR:SXGXH, YVPKPXX:APT:EPIS-AA¹⁷-LYL:KFKYE:VVR:SXGXH, TVPKPXX:APT:EPIS-AA¹⁷-LYL:KFKYE:VVR:AXGXH, AVPKAXX:APT:EPIS-AA¹⁷-LYL:KFKYE:VVK:AXGXH, KVGKAXX:VPT:EPIS-AA¹⁷-LYL:KFKYE:VAE:XGXR, GSAGPXX:TPT:EPIS-AA¹⁷-LYL:KFKYE:VVD:RXGXS, AAPASXX:VPA:EPIS-AA¹⁷-LYL:KFKYE:VVE:AXGXR, STPPTXX:VPT:EPIS-AA¹⁷-LYL:KFKYE:VVE:SXGXR, HVPKPXX:APT:EPIS-AA¹⁷-LYL:KFKYE:VVR:SXGXH, RVPSTXX:APV:EPIS-AA¹⁷-LYL:KFKYE:VEE:XGXL, ASAAPXX:VPQ:EPIS-AA¹⁷-LYL:KFKYE:VRS:XKXS, ASASPXX:VSQ:EPIS-AA¹⁷-LYL:KFKYE:VKS:XKXS, ASASPXX:VPQ:EPIS-AA¹⁷-LYL:KFKYE:VKS:XKXS, NDEGLEX:VPT:EPIS-AA¹⁷-LYL:KFKYE:QHN:KXEXR, NDEGLEX:VPT:EPIS-AA¹⁷-LYL:KFKYE:EHS:QXEXR, SSVKXQP:SRV:EPIS-AA¹⁷-LYL:KFKYE:EEH:LEXAXA, RNVQXRP:TQV:EPIS-AA¹⁷-LYL:KFKYE:EDH:LAXKXE, KIPKAXX:TPT:SPIN-AA¹⁷-LYF:YGKIP:VVD:GXGXR, GIPEPXX:TPT:SPIN-AA¹⁷-LYF:YGKIP:VVD:SXAXR, SIPKAXX:TPT:SPIN-AA¹⁷-LYF:YGKIP:VVD:GXGXR, HVTKPTX:TPT:SPIN-AA¹⁷-LYF:YGKIP:VVD:SXGXH, YVPKPXX:TPT:SPIN-AA¹⁷-LYF:YGKIP:VVD:SXGXH, TVPKPXX:TPT:SPIN-AA¹⁷-LYF:YGKIP:VVD:AXGXH, AVPKAXX:TPT:SPIN-AA¹⁷-LYF:YGKIP:VVD:AXGXH, KVGKAXX:TPT:SPIN-AA¹⁷-LYF:YGKIP:VVD:XGXR, KASKAXX:TPT:SPIN-AA¹⁷-LYF:YGKIP:VVD:EXGXR, AAPASXX:TPT:SPIN-AA¹⁷-LYF:YGKIP:VVD:AXGXR, STPPTXX:TPT:SPIN-AA¹⁷-LYF:YGKIP:VVD:SXGXR, HVPKPXX:TPT:SPIN-AA¹⁷-LYF:YGKIP:VVD:SXGXH, RVPSTXX:TPT:SPIN-AA¹⁷-LYF:YGKIP:VVD:XGXL, ASAAPXX:TPT:SPIN-AA¹⁷-LYF:YGKIP:VVD:XKXS, ASASPXX:TPT:SPIN-AA¹⁷-LYF:YGKIP:VVD:XKXS, NDEGLEX:TPT:SPIN-AA¹⁷-LYF:YGKIP:VVD:KXEXR, NDEGLEX:TPT:SPIN-AA¹⁷-LYF:YGKIP:VVD:QXEXR, SSVKXQP:TPT:SPIN-AA¹⁷-LYF:YGKIP:VVD:LEXAXA, RNVQXRP:TPT:SPIN-AA¹⁷-LYF:YGKIP:VVD:LAXKXE, KIPKAXX:VPT:SPIN-AA¹⁷-LYF:YGKIP:VVE:GXGXR, GIPEPXX:VPE:SPIN-AA¹⁷-LYF:YGKIP:TVE:SXAXR, SIPKAXX:VPT:SPIN-AA¹⁷-LYF:YGKIP:VVE:GXGXR, HVTKPTX:APT:SPIN-AA¹⁷-LYF:YGKIP:VVR:SXGXH, YVPKPXX:APT:SPIN-AA¹⁷-LYF:YGKIP:VVR:SXGXH, TVPKPXX:APT:SPIN-AA¹⁷-LYF:YGKIP:VVR:AXGXH, AVPKAXX:APT:SPIN-AA¹⁷-LYF:YGKIP:VVK:AXGXH, KVGKAXX:VPT:SPIN-AA¹⁷-LYF:YGKIP:VAE:XGXR, KASKAXX:VPT:SPIN-AA¹⁷-LYF:YGKIP:AVS:EXGXR, AAPASXX:VPA:SPIN-AA¹⁷-LYF:YGKIP:VVE:AXGXR, STPPTXX:VPT:SPIN-AA¹⁷-LYF:YGKIP:VVE:SXGXR, HVPKPXX:APT:SPIN-AA¹⁷-LYF:YGKIP:VVR:SXGXH, RVPSTXX:APV:SPIN-AA¹⁷-LYF:YGKIP:VEE:XGXL, ASAAPXX:VPQ:SPIN-AA¹⁷-LYF:YGKIP:VRS:XKXS, ASASPXX:VSQ:SPIN-AA¹⁷-LYF:YGKIP:VKS:XKXS, ASASPXX:VPQ:SPIN-AA¹⁷-LYF:YGKIP:VKS:XKXS, NDEGLEX:VPT:SPIN-AA¹⁷-LYF:YGKIP:QHN:KXEXR, NDEGLEX:VPT:SPIN-AA¹⁷-LYF:YGKIP:EHS:QXEXR, SSVKXQP:SRV:SPIN-AA¹⁷-LYF:YGKIP:EEH:LEXAXA, RNVQXRP:TQV:SPIN-AA¹⁷-LYF:YGKIREDH:LAXKXE, KIPKAXX:VPA:SPIS-AA¹⁷-LYI:YKQYE:VVE:GXGXR, GIPEPXX:VPA:SPIS-AA¹⁷-LYI:YKQYE:VVE:SXAXR, SIPKAXX:VPA:SPIS-AA¹⁷-LYI:YKQYE:VVE:GXGXR, HVTKPTX:VPA:SPIS-AA¹⁷-LYI:YKQYE:VVE:SXGXH, YVPKPXX:VPA:SPIS-AA¹⁷-LYI:YKQYE:VVE:SXGXH, TVPKPXX:VPA:SPIS-AA¹⁷-LYI:YKQYE:VVE:AXGXH, AVPKAXX:VPA:SPIS-AA¹⁷-LYI:YKQYE:VVE:AXGXH, KVGKAXX:VPA:SPIS-AA¹⁷-LYI:YKQYE:VVE:XGXR, KASKAXX:VPA:SPIS-AA¹⁷-LYI:YKQYE:VVE:EXGXR, GSAGPXX:VPA:SPIS-AA¹⁷-LYI:YKQYE:VVE:RXGXS, STPPTXX:VPA:SPIS-AA¹⁷-LYI:YKQYE:VVE:SXGXR, HVPKPXX:VPA:SPIS-AA¹⁷-LYI:YKQYE:VVE:SXGXH, RVPSTXX:VPA:SPIS-AA¹⁷-LYI:YKQYE:VVE:XGXL, ASAAPXX:VPA:SPIS-AA¹⁷-LYI:YKQYE:VVE:XKXS, ASASPXX:VPA:SPIS-AA¹⁷-LYI:YKQYE:VVE:XKXS, NDEGLEX:VPA:SPIS-AA¹⁷-LYI:YKQYE:VVE:KXEXR, NDEGLEX:VPA:SPIS-AA¹⁷-LYI:YKQYE:VVE:QXEXR, SSVKXQP:VPA:SPIS-AA¹⁷-LYI:YKQYE:VVE:LEXAXA, RNVQXRP:VPA:SPIS-AA¹⁷-LYI:YKQYE:VVE:LAXKXE, KIPKAXX:VPT:SPIS-AA¹⁷-LYI:YKQYE:VVE:GXGXR, GIPEPXX:VPE:SPIS-AA¹⁷-LYI:YKQYE:TVE:SXAXR, SIPKAXX:VPT:SPIS-AA¹⁷-LYI:YKQYE:VVE:GXGXR, HVTKPTX:APT:SPIS-AA¹⁷-LYI:YKQYE:VVR:SXGXH, YVPKPXX:APT:SPIS-AA¹⁷-LYI:YKQYE:VVR:SXGXH, TVPKPXX:APT:SPIS-AA¹⁷-LYI:YKQYE:VVR:AXGXH, AVPKAXX:APT:SPIS-AA¹⁷-LYI:YKQYE:VVK:AXGXH, KVGKAXX:VPT:SPIS-AA¹⁷-LYI:YKQYE:VAE:XGXR, KASKAXX:VPT:SPIS-AA¹⁷-LYI:YKQYE:AVS:EXGXR, GSAGPXX:TPT:SPIS-AA¹⁷-LYI:YKQYE:VVD:RXGXS, STPPTXX:VPT:SPIS-AA¹⁷-LYI:YKQYE:VVE:SXGXR, HVPKPXX:APT:SPIS-AA¹⁷-LYI:YKQYE:VVR:SXGXH, RVPSTXX:APV:SPIS-AA¹⁷-LYI:YKQYE:VEE:XGXL, ASAAPXX:VPQ:SPIS-AA¹⁷-LYI:YKQYE:VRS:XKXS, ASASPXX:VSQ:SPIS-AA¹⁷-LYI:YKQYE:VKS:XKXS, ASASPXX:VPQ:SPIS-AA¹⁷-LYI:YKQYE:VKS:XKXS, NDEGLEX:VPT:SPIS-AA¹⁷-LYI:YKQYE:QHN:KXEXR, NDEGLEX:VPT:SPIS-AA¹⁷-LYI:YKQYE:EHS:QXEXR, SSVKXQP:SRV:SPIS-AA¹⁷-LYI:YKQYE:EEH:LEXAXA, RNVQXRP:TQV:SPIS-AA¹⁷-LYI:YKQYE: EDH:LAXKXE, KIPKAXX:VPT:SPIS-AA¹⁷-LFINKQYE:VVE:GXGXR, GIPEPXX:VPT:SPIS-AA¹⁷-LFI:YKQYE:VVE:SXAXR, SIPKAXX:VPT:SPIS-AA¹⁷-LRYKQYE:VVE:GXGXR, HVTKPTX:VPT:SPIS-AA¹⁷-LFLYKQYE:VVE:SXGXH, YVPKPXX:VPT:SPIS-AA¹⁷-LFINKQYE:VVE:SXGXH, TVPKPXX:VPT:SPIS-AA¹⁷-LFLYKQYE:VVE:AXGXH, AVPKAXX:VPT:SPIS-AA¹⁷-LFI:YKQYE:VVE:AXGXH, KVGKAXX:VPT:SPIS-AA¹⁷-LFLYKQYE:VVE:XGXR, KASKAXX:VPT:SPIS-AA¹⁷-LFLYKQYE:VVE:EXGXR, GSAGPXX:VPT:SPIS-AA¹⁷-LFI:YKQYE:VVE:RXGXS, AAPASXX:VPT:SPIS-AA¹⁷-LFINKQYE:VVE:AXGXR, HVPKPXX:VPT:SPIS-AA¹⁷-LFI:YKQYE:VVE:SXGXH, RVPSTXX:VPT:SPIS-AA¹⁷-LFLYKQYE:VVE:XGXL, ASAAPXX:VPT:SPIS-AA¹⁷-LFLYKQYE:VVE:XKXS, ASASPXX:VPT:SPIS-AA¹⁷-LFINKQYE:VVE:XKXS, NDEGLEX:VPT:SPIS-AA¹⁷-LRYKQYE:VVE:KXEXR, NDEGLEX:VPT:SPIS-AA¹⁷-LRYKQYE:VVE:QXEXR, SSVKXQP:VPT:SPIS-AA¹⁷-LRYKQYE:VVE:LEXAXA, RNVQXRP:VPT:SPIS-AA¹⁷-LFI:YKQYE:VVE:LAXKXE, GIPEPXX:VPE:SPIS-AA¹⁷-LFINKQYE:TVE:SXAXR, HVTKPTX:APT:SPIS-AA¹⁷-LRYKQYE:VVR:SXGXH, YVPKPXX:APT:SPIS-AA¹⁷-LFINKQYE:VVR:SXGXH, TVPKPXX:APT:SPIS-AA¹⁷-LRYKQYE:VVR:AXGXH, AVPKAXX:APT:SPIS-AA¹⁷-LFI:YKQYE:VVK:AXGXH, KVGKAXX:VPT:SPIS-AA¹⁷-LFLYKQYE:VAE:XGXR, KASKAXX:VPT:SPIS-AA¹⁷-LFLYKQYE:AVS:EXGXR, GSAGPXX:TPT:SPIS-AA¹⁷-LF INKQYE:VVD:RXGXS, AAPASXX:VPA:SPIS-AA¹⁷-LRYKQYE:VVE:AXGXR, HVPKPXX:APT:SPIS-AA¹⁷-LFI:YKQYE:VVR:SXGXH, RVPSTXX:APV:SPIS-AA¹⁷-LRYKQYE:VEE:XGXL, ASAAPXX:VPQ:SPIS-AA¹⁷-LFLYKQYE:VRS:XKXS, ASASPXX:VSQ:SPIS-AA¹⁷-LFINKQYE:VKS:XKXS, ASASPXX:VPQ:SPIS-AA¹⁷-LFLYKQYE:VKS:XKXS, NDEGLEX:VPT:SPIS-AA¹⁷-LRYKQYE:QHN:KXEXR, NDEGLEX:VPT:SPIS-AA¹⁷-LRYKQYE:EHS:QXEXR, SSVKXQP:SRV:SPIS-AA¹⁷-LFI:YKQYE:EEH:LEXAXA, RNVQXRP:TQV:SPIS-AA¹⁷-LFLYKQYE:EDH:LAXKXE, KIPKAXX:APV:KPLS-AA¹⁷-LYV:DHHKD:VEE:GXGXR, GIPEPXX:APV:KPLS-AA¹⁷-LYV:DHHKD:VEE:SXAXR, SIPKAXX:APV:KPLS-AA¹⁷-LYV:DHHKD:VEE:GXGXR, HVTKPTX:APV:KPLS-AA¹⁷-LYV:DHHKD:VEE:SXGXH, YVPKPXX:APV:KPLS-AA¹⁷-LYV:DHHKD:VEE:SXGXH, TVPKPXX:APV:KPLS-AA¹⁷-LYV:DHHKD:VEE:AXGXH, AVPKAXX:APV:KPLS-AA¹⁷-LYV:DHHKD:VEE:AXGXH, KVGKAXX:APV:KPLS-AA¹⁷-LYV:DHHKD:VEE:XGXR, KASKAXX:APV:KPLS-AA¹⁷-LYV:DHHKD:VEE:EXGXR, GSAGPXX:APV:KPLS-AA¹⁷-LYV:DHHKD:VEE:RXGXS, AAPASXX:APV:KPLS-AA¹⁷-LYV:DHHKD:VEE:AXGXR, STPPTXX:APV:KPLS-AA¹⁷-LYV:DHHKD:VEE:SXGXR, HVPKPXX:APV:KPLS-AA¹⁷-LYV:DHHKD:VEE:SXGXH, ASAAPXX:APV:KPLS-AA¹⁷-LYV:DHHKD:VEE:XKXS, ASASPXX:APV:KPLS-AA¹⁷-LYV:DHHKD:VEE:XKXS, NDEGLEX:APV:KPLS-AA¹⁷-LYV:DHHKD:VEE:KXEXR, NDEGLEX:APV:KPLS-AA¹⁷-LYV:DHHKD:VEE:QXEXR, SSVKXQP:APV:KPLS-AA¹⁷-LYV:DHHKD:VEE:LEXAXA, RNVQXRP:APV:KPLS-AA¹⁷-LYV:DHHKD:VEE:LAXKXE, KIPKAXX:VPT:KPLS-AA¹⁷-LYV:DHHKD:VVE:GXGXR, GIPEPXX:VPE:KPLS-AA¹⁷-LYV:DHHKD:TVE:SXAXR, SIPKAXX:VPT:KPLS-AA¹⁷-LYV:DHHKD:VVE:GXGXR, HVTKPTX:APT:KPLS-AA¹⁷-LYV:DHHKD:VVR:SXGXH, YVPKPXX:APT:KPLS-AA¹⁷-LYV:DHHKD:VVR:SXGXH, TVPKPXX:APT:KPLS-AA¹⁷-LYV:DHHKD:VVR:AXGXH, AVPKAXX:APT:KPLS-AA¹⁷-LYV:DHHKD:VVK:AXGXH, KVGKAXX:VPT:KPLS-AA¹⁷-LYV:DHHKD:VAE:XGXR, KASKAXX:VPT:KPLS-AA¹⁷-LYV:DHHKD:AVS:EXGXR, GSAGPXX:TPT:KPLS-AA¹⁷-LYV:DHHKD:VVD:RXGXS, AAPASXX:VPA:KPLS-AA¹⁷-LYV:DHHKD:VVE:AXGXR, STPPTXX:VPT:KPLS-AA¹⁷-LYV:DHHKD:VVE:SXGXR, HVPKPXX:APT:KPLS-AA¹⁷-LYV:DHHKD:VVR:SXGXH, ASAAPXX:VPQ:KPLS-AA¹⁷-LYV:DHHKD:VRS:XKXS, ASASPXX:VSQ:KPLS-AA¹⁷-LYV:DHHKD:VKS:XKXS, ASASPXX:VPQ:KPLS-AA¹⁷-LYV:DHHKD:VKS:XKXS, NDEGLEX:VPT:KPLS-AA¹⁷-LYV:DHHKD:QHN:KXEXR, NDEGLEX:VPT:KPLS-AA¹⁷-LYV:DHHKD:EHS:QXEXR, SSVKXQP:SRV:KPLS-AA¹⁷-LYV:DHHKD:EEH:LEXAXA, RNVQXRP:TQV:KPLS-AA¹⁷-LYV:DHHKD:EDH:LAXKXE, KIPKAXX:VPQ:EPLP-AA¹⁷-VYY:EQLSN:VRS:GXGXR, GIPEPXX:VPQ:EPLP-AA¹⁷-VYY:EQLSN:VRS:SXAXR, SIPKAXX:VPQ:EPLP-AA¹⁷-VYY:EQLSN:VRS:GXGXR, HVTKPTX:VPQ:EPLP-AA¹⁷-VYY:EQLSN:VRS:SXGXH, YVPKPXX:VPQ:EPLP-AA¹⁷-VYY:EQLSN:VRS:SXGXH, TVPKPXX:VPQ:EPLP-AA¹⁷-VYY:EQLSN:VRS:AXGXH, AVPKAXX:VPQ:EPLP-AA¹⁷-VYY:EQLSN:VRS:AXGXH, KVGKAXX:VPQ:EPLP-AA¹⁷-VYY:EQLSN:VRS:XGXR, KASKAXX:VPQ:EPLP-AA¹⁷-VYY:EQLSN:VRS:EXGXR, GSAGPXX:VPQ:EPLP-AA¹⁷-VYY:EQLSN:VRS:RXGXS, AAPASXX:VPQ:EPLP-AA¹⁷-VYY:EQLSN:VRS:AXGXR, STPPTXX:VPQ:EPLP-AA¹⁷-VYY:EQLSN:VRS:SXGXR, HVPKPXX:VPQ:EPLP-AA¹⁷-VYY:EQLSN:VRS:SXGXH, RVPSTXX:VPQ:EPLP-AA¹⁷-VYY:EQLSN:VRS:XGXL, ASASPXX:VPQ:EPLP-AA¹⁷-VYY:EQLSN:VRS:XKXS, NDEGLEX:VPQ:EPLP-AA¹⁷-VYY:EQLSN:VRS:KXEXR, NDEGLEX:VPQ:EPLP-AA¹⁷-VYY:EQLSN:VRS:QXEXR, SSVKXQP:VPQ:EPLP-AA¹⁷-VYY:EQLSN:VRS:LEXAXA, RNVQXRP:VPQ:EPLP-AA¹⁷-VYY:EQLSN:VRS:LAXKXE, KIPKAXX:VPT:EPLP-AA¹⁷-VYY:EQLSN:VVE:GXGXR, GIPEPXX:VPE:EPLP-AA¹⁷-VYY:EQLSN:TVE:SXAXR, SIPKAXX:VPT:EPLP-AA¹⁷-VYY:EQLSN:VVE:GXGXR, HVTKPTX:APT:EPLP-AA¹⁷-VYY:EQLSN:VVR:SXGXH, YVPKPXX:APT:EPLP-AA¹⁷-VYY:EQLSN:VVR:SXGXH, TVPKPXX:APT:EPLP-AA¹⁷-VYY:EQLSN:VVR:AXGXH, AVPKAXX:APT:EPLP-AA¹⁷-VYY:EQLSN:VVK:AXGXH, KVGKAXX:VPT:EPLP-AA¹⁷-VYY:EQLSN:VAE:XGXR, KASKAXX:VPT:EPLP-AA¹⁷-VYY:EQLSN:AVS:EXGXR, GSAGPXX:TPT:EPLP-AA¹⁷-VYY:EQLSN:VVD:RXGXS, AAPASXX:VPA:EPLP-AA¹⁷-VYY:EQLSN:VVE:AXGXR, STPPTXX:VPT:EPLP-AA¹⁷-VYY:EQLSN:VVE:SXGXR, HVPKPXX:APT:EPLP-AA¹⁷-VYY:EQLSN:VVR:SXGXH, RVPSTXX:APV:EPLP-AA¹⁷-VYY:EQLSN:VEE:XGXL, ASASPXX:VSQ:EPLP-AA¹⁷-VYY:EQLSN:VKS:XKXS, ASASPXX:VPQ:EPLP-AA¹⁷-VYY:EQLSN:VKS:XKXS, NDEGLEX:VPT:EPLP-AA¹⁷-VYY:EQLSN:QHN:KXEXR, NDEGLEX:VPT:EPLP-AA¹⁷-VYY:EQLSN:EHS:QXEXR, SSVKXQP:SRV:EPLP-AA¹⁷-VYY:EQLSN:EEH:LEXAXA, RNVQXRP:TQV:EPLP-AA¹⁷-VYY:EQLSN:EDH:LAXKXE, KIPKAXX:VSQ:EPLT-AA¹⁷-LYY:EQLSN:VKS:GXGXR, GIPEPXX:VSQ:EPLT-AA¹⁷-LYY:EQLSN:VKS:SXAXR, SIPKAXX:VSQ:EPLT-AA¹⁷-LYY:EQLSN:VKS:GXGXR, HVTKPTX:VSQ:EPLT-AA¹⁷-LYY:EQLSN:VKS:SXGXH, YVPKPXX:VSQ:EPLT-AA¹⁷-LYY:EQLSN:VKS:SXGXH, TVPKPXX:VSQ:EPLT-AA¹⁷-LYY:EQLSN:VKS:AXGXH, AVPKAXX:VSQ:EPLT-AA¹⁷-LYY:EQLSN:VKS:AXGXH, KVGKAXX:VSQ:EPLT-AA¹⁷-LYY:EQLSN:VKS:XGXR, KASKAXX:VSQ:EPLT-AA¹⁷-LYY:EQLSN:VKS:EXGXR, GSAGPXX:VSQ:EPLT-AA¹⁷-LYY:EQLSN:VKS:RXGXS, AAPASXX:VSQ:EPLT-AA¹⁷-LYY:EQLSN:VKS:AXGXR, STPPTXX:VSQ:EPLT-AA¹⁷-LYY:EQLSN:VKS:SXGXR, HVPKPXX:VSQ:EPLT-AA¹⁷-LYY:EQLSN:VKS:SXGXH, RVPSTXX:VSQ:EPLT-AA¹⁷-LYY:EQLSN:VKS:XGXL, ASAAPXX:VSQ:EPLT-AA¹⁷-LYY:EQLSN:VKS:XKXS, ASASPXX:VSQ:EPLT-AA¹⁷-LYY:EQLSN:VKS:XKXS, NDEGLEX:VSQ:EPLT-AA¹⁷-LYY:EQLSN:VKS:KXEXR, NDEGLEX:VSQ:EPLT-AA¹⁷-LYY:EQLSN:VKS:QXEXR, SSVKXQP:VSQ:EPLT-AA¹⁷-LYY:EQLSN:VKS:LEXAXA, RNVQXRP:VSQ:EPLT-AA¹⁷-LYY:EQLSN:VKS:LAXKXE, KIPKAXX:VPT:EPLT-AA¹⁷-LYY:EQLSN:VVE:GXGXR, GIPEPXX:VPE:EPLT-AA¹⁷-LYY:EQLSN:TVE:SXAXR, SIPKAXX:VPT:EPLT-AA¹⁷-LYY:EQLSN:VVE:GXGXR, HVTKPTX:APT:EPLT-AA¹⁷-LYY:EQLSN:VVR:SXGXH, YVPKPXX:APT:EPLT-AA¹⁷-LYY:EQLSN:VVR:SXGXH, TVPKPXX:APT:EPLT-AA¹⁷-LYY:EQLSN:VVR:AXGXH, AVPKAXX:APT:EPLT-AA¹⁷-LYY:EQLSN:VVK:AXGXH, KVGKAXX:VPT:EPLT-AA¹⁷-LYY:EQLSN:VAE:XGXR, KASKAXX:VPT:EPLT-AA¹⁷-LYY:EQLSN:AVS:EXGXR, GSAGPXX:TPT:EPLT-AA¹⁷-LYY:EQLSN:VVD:RXGXS, AAPASXX:VPA:EPLT-AA¹⁷-LYY:EQLSN:VVE:AXGXR, STPPTXX:VPT:EPLT-AA¹⁷-LYY:EQLSN:VVE:SXGXR, HVPKPXX:APT:EPLT-AA¹⁷-LYY:EQLSN:VVR:SXGXH, RVPSTXX:APV:EPLT-AA¹⁷-LYY:EQLSN:VEE:XGXL, ASAAPXX:VPQ:EPLT-AA¹⁷-LYY:EQLSN:VRS:XKXS, ASASPXX:VPQ:EPLT-AA¹⁷-LYY:EQLSN:VKS:XKXS, NDEGLEX:VPT:EPLT-AA¹⁷-LYY:EQLSN:QHN:KXEXR, NDEGLEX:VPT:EPLT-AA¹⁷-LYY:EQLSN:EHS:QXEXR, SSVKXQP:SRV:EPLT-AA¹⁷-LYY:EQLSN:EEH:LEXAXA, RNVQXRP:TQV:EPLT-AA¹⁷-LYY:EQLSN:EDH:LAXKXE, KIPKAXX:VPQ:EPLT-AA¹⁷-LYY:EQLSN:VKS:GXGXR, GIPEPXX:VPQ:EPLT-AA¹⁷-LYY:EQLSN:VKS:SXAXR, SIPKAXX:VPQ:EPLT-AA¹⁷-LYY:EQLSN:VKS:GXGXR, HVTKPTX:VPQ:EPLT-AA¹⁷-LYY:EQLSN:VKS:SXGXH, YVPKPXX:VPQ:EPLT-AA¹⁷-LYY:EQLSN:VKS:SXGXH, TVPKPXX:VPQ:EPLT-AA¹⁷-LYY:EQLSN:VKS:AXGXH, AVPKAXX:VPQ:EPLT-AA¹⁷-LYY:EQLSN:VKS:AXGXH, KVGKAXX:VPQ:EPLT-AA¹⁷-LYY:EQLSN:VKS:XGXR, KASKAXX:VPQ:EPLT-AA¹⁷-LYY:EQLSN:VKS: EXGXR, GSAGPXX:VPQ:EPLT-AA¹⁷-LYY:EQLSN:VKS:RXGXS, AAPASXX:VPQ:EPLT-AA¹⁷-LYY:EQLSN:VKS:AXGXR, STPPTXX:VPQ:EPLT-AA¹⁷-LYY:EQLSN:VKS:SXGXR, HVPKPXX:VPQ:EPLT-AA¹⁷-LYY:EQLSN:VKS:SXGXH, RVPSTXX:VPQ:EPLT-AA¹⁷-LYY:EQLSN:VKS:XGXL, ASAAPXX:VPQ:EPLT-AA¹⁷-LYY:EQLSN:VKS:XKXS, NDEGLEX:VPQ:EPLT-AA¹⁷-LYY:EQLSN:VKS:KXEXR, NDEGLEX:VPQ:EPLT-AA¹⁷-LYY:EQLSN:VKS:QXEXR, SSVKXQP:VPQ:EPLT-AA¹⁷-LYY:EQLSN:VKS:LEXAXA, RNVQXRP:VPQ:EPLT-AA¹⁷-LYY:EQLSN:VKS:LAXKXE, KIPKAXX:VPT:SNIT-AA¹⁷-QIM:IGEMS:QHN:GXGXR, GIPEPXX:VPT:SNIT-AA¹⁷-QIM:IGEMS:QHN:SXAXR, SIPKAXX:VPT:SNIT-AA¹⁷-QIM:IGEMS:QHN:GXGXR, HVTKPTX:VPT:SNIT-AA¹⁷-QIM:IGEMS:QHN:SXGXH, YVPKPXX:VPT:SNIT-AA¹⁷-QIM:IGEMS:QHN:SXGXH, TVPKPXX:VPT:SNIT-AA¹⁷-QIM:IGEMS:QHN:AXGXH, AVPKAXX:VPT:SNIT-AA¹⁷-QIM:IGEMS:QHN:AXGXH, KVGKAXX:VPT:SNIT-AA¹⁷-QIM:IGEMS:QHN:XGXR, KASKAXX:VPT:SNIT-AA¹⁷-QIM:IGEMS:QHN:EXGXR, GSAGPXX:VPT:SNIT-AA¹⁷-QIM:IGEMS:QHN:RXGXS, AAPASXX:VPT:SNIT-AA¹⁷-QIM:IGEMS:QHN:AXGXR, STPPTXX:VPT:SNIT-AA¹⁷-QIM:IGEMS:QHN:SXGXR, HVPKPXX:VPT:SNIT-AA¹⁷-QIM:IGEMS:QHN:SXGXH, RVPSTXX:VPT:SNIT-AA¹⁷-QIM:IGEMS:QHN:XGXL, ASAAPXX:VPT:SNIT-AA¹⁷-QIM:IGEMS:QHN:XKXS, ASASPXX:VPT:SNIT-AA¹⁷-QIM:IGEMS:QHN:XKXS, NDEGLEX:VPT:SNIT-AA¹⁷-QIM:IGEMS:QHN:QXEXR, NDEGLEX:VPT:SNIT-AA¹⁷-QIM:IGEMS:QHN:KXEXR, SSVKXQP:VPT:SNIT-AA¹⁷-QIM:IGEMS:QHN:LEXAXA, RNVQXRP:VPT:SNIT-AA¹⁷-QIM:IGEMS:QHN:LAXKXE, KIPKAXX:VPT:SNIT-AA¹⁷-QIM:IGEMS:VVE:GXGXR, GIPEPXX:VPE:SNIT-AA¹⁷-QIM:IGEMS:TVE:SXAXR, SIPKAXX:VPT:SNIT-AA¹⁷-QIM:IGEMS:VVE:GXGXR, HVTKPTX:APT:SNIT-AA¹⁷-QIM:IGEMS:VVR:SXGXH, YVPKPXX:APT:SNIT-AA¹⁷-QIM:IGEMS:VVR:SXGXH, TVPKPXX:APT:SNIT-AA¹⁷-QIM:IGEMS:VVR:AXGXH, AVPKAXX:APT:SNIT-AA¹⁷-QIM:IGEMS:VVK:AXGXH, KVGKAXX:VPT:SNIT-AA¹⁷-QIM:IGEMS:VAE:XGXR, KASKAXX:VPT:SNIT-AA¹⁷-QIM:IGEMS:AVS:EXGXR, GSAGPXX:TPT:SNIT-AA¹⁷-QIM:IGEMS:VVD:RXGXS, AAPASXX:VPA:SNIT-AA¹⁷-QIM:IGEMS:VVE:AXGXR, STPPTXX:VPT:SNIT-AA¹⁷-QIM:IGEMS:VVE:SXGXR, HVPKPXX:APT:SNIT-AA¹⁷-QIM:IGEMS:VVR:SXGXH, RVPSTXX:APV:SNIT-AA¹⁷-QIM:IGEMS:VEE:XGXL, ASAAPXX:VPQ:SNIT-AA¹⁷-QIM:IGEMS:VRS:XKXS, ASASPXX:VSQ:SNIT-AA¹⁷-QIM:IGEMS:VKS:XKXS, ASASPXX:VPQ:SNIT-AA¹⁷-QIM:IGEMS:VKS:XKXS, NDEGLEX:VPT:SNIT-AA¹⁷-QIM:IGEMS:EHS:QXEXR, SSVKXQP:SRV:SNIT-AA¹⁷-QIM:IGEMS:EEH:LEXAXA, RNVQXRP:TQV:SNIT-AA¹⁷-QIM:IGEMS:EDH:LAXKXE, KIPKAXX:VPT:SNIT-AA¹⁷-QIM:LGEMS:EHS:GXGXR, GIPEPXX:VPT:SNIT-AA¹⁷-QIM:LGEMS:EHS:SXAXR, SIPKAXX:VPT:SNIT-AA¹⁷-QIM:LGEMS:EHS:GXGXR, HVTKPTX:VPT:SNIT-AA¹⁷-QIM:LGEMS:EHS:SXGXH, YVPKPXX:VPT:SNIT-AA¹⁷-QIM:LGEMS:EHS:SXGXH, TVPKPXX:VPT:SNIT-AA¹⁷-QIM:LGEMS:EHS:AXGXH, AVPKAXX:VPT:SNIT-AA¹⁷-QIM:LGEMS:EHS:AXGXH, KVGKAXX:VPT:SNIT-AA¹⁷-QIM:LGEMS:EHS:XGXR, KASKAXX:VPT:SNIT-AA¹⁷-QIM:LGEMS:EHS:EXGXR, GSAGPXX:VPT:SNIT-AA¹⁷-QIM:LGEMS:EHS:RXGXS, AAPASXX:VPT:SNIT-AA¹⁷-QIM:LGEMS:EHS:AXGXR, STPPTXX:VPT:SNIT-AA¹⁷-QIM:LGEMS:EHS:SXGXR, HVPKPXX:VPT:SNIT-AA¹⁷-QIM:LGEMS:EHS:SXGXH, RVPSTXX:VPT:SNIT-AA¹⁷-QIM:LGEMS:EHS:XGXL, ASAAPXX:VPT:SNIT-AA¹⁷-QIM:LGEMS:EHS:XKXS, ASASPXX:VPT:SNIT-AA¹⁷-QIM:LGEMS:EHS:XKXS, NDEGLEX:VPT:SNIT-AA¹⁷-QIM:LGEMS:EHS:KXEXR, SSVKXQP:VPT:SNIT-AA¹⁷-QIM:LGEMS:EHS:LEXAXA, RNVQXRP:VPT:SNIT-AA¹⁷-QIM:LGEMS:EHS:LAXKXE, KIPKAXX:VPT:SNIT-AA¹⁷-QIM:LGEMS:VVE:GXGXR, GIPEPXX:VPE:SNIT-AA¹⁷-QIM:LGEMS:TVE:SXAXR, SIPKAXX:VPT:SNIT-AA¹⁷-QIM:LGEMS:VVE:GXGXR, HVTKPTX:APT:SNIT-AA¹⁷-QIM:LGEMS:VVR:SXGXH, YVPKPXX:APT:SNIT-AA¹⁷-QIM:LGEMS:VVR:SXGXH, TVPKPXX:APT:SNIT-AA¹⁷-QIM:LGEMS:VVR:AXGXH, AVPKAXX:APT:SNIT-AA¹⁷-QIM:LGEMS:VVK:AXGXH, KVGKAXX:VPT:SNIT-AA¹⁷-QIM:LGEMS:VAE:XGXR, KASKAXX:VPT:SNIT-AA¹⁷-QIM:LGEMS:AVS:EXGXR, GSAGPXX:TPT:SNIT-AA¹⁷-QIM:LGEMS:VVD:RXGXS, AAPASXX:VPA:SNIT-AA¹⁷-QIM:LGEMS:VVE:AXGXR, STPPTXX:VPT:SNIT-AA¹⁷-QIM:LGEMS:VVE:SXGXR, HVPKPXX:APT:SNIT-AA¹⁷-QIM:LGEMS:VVR:SXGXH, RVPSTXX:APV:SNIT-AA¹⁷-QIM:LGEMS:VEE:XGXL, ASAAPXX:VPQ:SNIT-AA¹⁷-QIM:LGEMS:VRS:XKXS, ASASPXX:VSQ:SNIT-AA¹⁷-QIM:LGEMS:VKS:XKXS, ASASPXX:VPQ:SNIT-AA¹⁷-QIM:LGEMS:VKS:XKXS, NDEGLEX:VPT:SNIT-AA¹⁷-QIM:LGEMS:QHN:KXEXR, SSVKXQP:SRV:SNIT-AA¹⁷-QIM:LGEMS:EEH:LEXAXA, RNVQXRP:TQV:SNIT-AA¹⁷-QIM:LGEMS:EDH:LAXKXE, KIPKAXX:SRV:RSVK-AA¹⁷-AKV:KEVQV:EEH:GXGXR, GIPEPXX:SRV:RSVK-AA¹⁷-AKV:KEVQV:EEH:SXAXR, SIPKAXX:SRV:RSVK-AA¹⁷-AKV:KEVQV:EEH:GXGXR, HVTKPTX:SRV:RSVK-AA¹⁷-AKV:KEVQV:EEH:SXGXH, YVPKPXX:SRV:RSVK-AA¹⁷-AKV:KEVQV:EEH:SXGXH, TVPKPXX:SRV:RSVK-AA¹⁷-AKV:KEVQV:EEH:AXGXH, AVPKAXX:SRV:RSVK-AA¹⁷-AKV:KEVQV:EEH:AXGXH, KVGKAXX:SRV:RSVK-AA¹⁷-AKV:KEVQV:EEH:XGXR, KASKAXX:SRV:RSVK-AA¹⁷-AKV:KEVQV:EEH:EXGXR, GSAGPXX:SRV: RSVK-AA¹⁷-AKV:KEVQV:EEH:RXGXS, AAPASXX:SRV:RSVK-AA¹⁷-AKV:KEVQV:EEH:AXGXR, STPPTXX:SRV:RSVK-AA¹⁷-AKV:KEVQV:EEH:SXGXR, HVPKPXX:SRV:RSVK-AA¹⁷-AKV:KEVQV:EEH:SXGXH, RVPSTXX:SRV:RSVK-AA¹⁷-AKV:KEVQV:EEH:XGXL, ASAAPXX:SRV:RSVK-AA¹⁷-AKV:KEVQV:EEH:XKXS, ASASPXX:SRV: RSVK-AA¹⁷-AKV:KEVQV: EEH:XKXS, NDEGLEX:SRV: RSVK-AA¹⁷-AKV:KEVQV: EEH:KXEXR, NDEGLEX:SRV:RSVK-AA¹⁷-AKV:KEVQV:EEH:QXEXR, RNVQXRP:SRV:RSVK-AA¹⁷-AKV:KEVQV:EEH:LAXKXE, KIPKAXX:VPT:RSVK-AA¹⁷-AKV:KEVQV:VVE:GXGXR, GIPEPXX:VPE:RSVK-AA¹⁷-AKV:KEVQV:TVE:SXAXR, SIPKAXX:VPT:RSVK-AA¹⁷-AKV:KEVQV:VVE:GXGXR, HVTKPTX:APT:RSVK-AA¹⁷-AKV:KEVQV:VVR:SXGXH, YVPKPXX:APT:RSVK-AA¹⁷-AKV:KEVQV:VVR:SXGXH, TVPKPXX:APT:RSVK-AA¹⁷-AKV:KEVQV:VVR:AXGXH, AVPKAXX:APT:RSVK-AA¹⁷-AKV:KEVQV:VVK:AXGXH, KVGKAXX:VPT:RSVK-AA¹⁷-AKV:KEVQV:VAE:XGXR, KASKAXX:VPT:RSVK-AA¹⁷-AKV:KEVQV:AVS:EXGXR, GSAGPXX:TPT:RSVK-AA¹⁷-AKV:KEVQV:VVD:RXGXS, AAPASXX:VPA:RSVK-AA¹⁷-AKV:KEVQV:VVE:AXGXR, STPPTXX:VPT:RSVK-AA¹⁷-AKV:KEVQV:VVE:SXGXR, HVPKPXX:APT:RSVK-AA¹⁷-AKV:KEVQV:VVR:SXGXH, RVPSTXX:APV:RSVK-AA¹⁷-AKV:KEVQV:VEE:XGXL, ASAAPXX:VPQ:RSVK-AA¹⁷-AKV:KEVQV:VRS:XKXS, ASASPXX:VSQ:RSVK-AA¹⁷-AKV:KEVQV:VKS:XKXS, ASASPXX:VPQ:RSVK-AA¹⁷-AKV:KEVQV:VKS:XKXS, NDEGLEX:VPT:RSVK-AA¹⁷-AKV:KEVQV:QHN:KXEXR, NDEGLEX:VPT:RSVK-AA¹⁷-AKV:KEVQV:EHS:QXEXR, RNVQXRP:TQV:RSVK-AA¹⁷-AKV:KEVQV:EDH:LAXKXE, KIPKAXX:TQV:RPVQ-AA¹⁷-RKI:KKATV:EDH:GXGXR, GIPEPXX:TQV:RPVQ-AA¹⁷-RKI:KKATV:EDH:SXAXR, SIPKAXX:TQV:RPVQ-AA¹⁷-RKI:KKATV:EDH:GXGXR, HVTKPTX:TQV:RPVQ-AA¹⁷-RKI:KKATV:EDH:SXGXH, YVPKPXX:TQV:RPVQ-AA¹⁷-RKI:KKATV:EDH:SXGXH, TV PKPXX:TQV:RPVQ-AA¹⁷-RKI:KKATV:EDH:AXGXH, AVPKAXX:TQV:RPVQ-AA¹⁷-RKI:KKATV:EDH:AXGXH, KVGKAXX:TQV:RPVQ-AA¹⁷-RKI:KKATV:EDH:XGXR, KASKAXX:TQV:RPVQ-AA¹⁷-RKI:KKATV:EDH:EXGXR, GSAGPXX:TQV:RPVQ-AA¹⁷-RKI:KKATV:EDH:RXGXS, AAPASXX:TQV:RPVQ-AA¹⁷-RKI:KKATV:EDH:AXGXR, STPPTXX:TQV:RPVQ-AA¹⁷-RKI:KKATV:EDH:SXGXR, HVPKPXX:TQV:RPVQ-AA¹⁷-RKI:KKATV:EDH:SXGXH, RVPSTXX:TQV:RPVQ-AA¹⁷-RKI:KKATV:EDH:XGXL, ASAAPXX:TQV:RPVQ-AA¹⁷-RKI:KKATV:EDH:XKXS, ASASPXX:TQV:RPVQ-AA¹⁷-RKI:KKATV:EDH:XKXS, NDEGLEX:TQV:RPVQ-AA¹⁷-RKI:KKATV:EDH:KXEXR, NDEGLEX:TQV:RPVQ-AA¹⁷-RKI:KKATV:EDH:QXEXR, SSVKXQP:TQV:RPVQ-AA¹⁷-RKI:KKATV:EDH:LEXAXA, KIPKAXX:VPT:RPVQ-AA¹⁷-RKI:KKATV:VVE:GXGXR, GIPEPXX:VPE:RPVQ-AA¹⁷-RKI:KKATV:TVE:SXAXR, SIPKAXX:VPT:RPVQ-AA¹⁷-RKI:KKATV:VVE:GXGXR, HVTKPTX:APT:RPVQ-AA¹⁷-RKI:KKATV:VVR:SXGXH, YVPKPXX:APT:RPVQ-AA¹⁷-RKI:KKATV:VVR:SXGXH, TVPKPXX:APT:RPVQ-AA¹⁷-RKI:KKATV:VVR:AXGXH, AVPKAXX:APT:RPVQ-AA¹⁷-RKI:KKATV:VVK:AXGXH, KVGKAXX:VPT:RPVQ-AA¹⁷-RKI:KKATV:VAE:XGXR, KASKAXX:VPT:RPVQ-AA¹⁷-RKI:KKATV:AVS:EXGXR, GSAGPXX:TPT:RPVQ-AA¹⁷-RKI:KKATV:VVD:RXGXS, AAPASXX:VPA:RPVQ-AA¹⁷-RKI:KKATV:VVE:AXGXR, STPPTXX:VPT:RPVQ-AA¹⁷-RKI:KKATV:VVE:SXGXR, HVPKPXX:APT:RPVQ-AA¹⁷-RKI:KKATV:VVR:SXGXH, RVPSTXX:APV:RPVQ-AA¹⁷-RKI:KKATV:VEE:XGXL, ASAAPXX:VPQ:RPVQ-AA¹⁷-RKI:KKATV:VRS:XKXS, ASASPXX:VSQ:RPVQ-AA¹⁷-RKI:KKATV:VKS:XKXS, ASASPXX:VPQ:RPVQ-AA¹⁷-RKI:KKATV:VKS:XKXS, NDEGLEX:VPT:RPVQ-AA¹⁷-RKI:KKATV:QHN:KXEXR, NDEGLEX:VPT:RPVQ-AA¹⁷-RKI:KKATV:EHS:QXEXR and SSVKXQP:SRV:RPVQ-AA¹⁷-RKI:KKATV:EEH:LEXAXA; and wherein AA¹⁷ is selected from the group consisting of G, A, V, L, I, P, F, M, W, T and S (in particular is selected from the group consisting of M, I, L, V and T). More particularly, the hexaplet PEP7:PEP3:PEP12:PEP2:PEP4:PEP8 is selected from the group consisting of GIPEPXX:VPT:SAIS-AA¹⁷-LYL:LKNYQ:VVE:SXAXR, HVTKPTX:VPT:SAIS-AA¹⁷-LYL:LKNYQ:VVE:SXGXH, YVPKPXX:VPT:SAIS-AA¹⁷-LYL:LKNYQ:VVE:SXGXH, TVPKPXX:VPT:SAIS-AA¹⁷-LYL:LKNYQ:VVE:AXGXH, AVPKAXX:VPT:SAIS-AA¹⁷-LYL:LKNYQ:VVE:AXGXH, KVGKAXX:VPT:SAIS-AA¹⁷-LYL:LKNYQ:VVE:XGXR, KASKAXX:VPT:SAIS-AA¹⁷-LYL:LKNYQ:VVE:EXGXR, GSAGPXX:VPT:SAIS-AA¹⁷-LYL:LKNYQ:VVE:RXGXS, AAPASXX:VPT:SAIS-AA¹⁷-LYL:LKNYQ:VVE:AXGXR, STPPTXX:VPT:SAIS-AA¹⁷-LYL:LKNYQ:VVE:SXGXR, HVPKPXX:VPT:SAIS-AA¹⁷-LYL:LKNYQ:VVE:SXGXH, RVPSTXX:VPT:SAIS-AA¹⁷-LYL:LKNYQ:VVE:XGXL, ASAAPXX:VPT:SAIS-AA¹⁷-LYL:LKNYQ:VVE:XKXS, ASASPXX:VPT:SAIS-AA¹⁷-LYL:LKNYQ:VVE:XKXS, GIPEPXX:VPE:SAIS-AA¹⁷-LYL:LKNYQ:TVE:SXAXR, HVTKPTX:APT:SAIS-AA¹⁷-LYL:LKNYQ:VVR:SXGXH, YVPKPXX:APT:SAIS-AA¹⁷-LYL:LKNYQ:VVR:SXGXH, TVPKPXX:APT:SAIS-AA¹⁷-LYL:LKNYQ:VVR:AXGXH, AVPKAXX:APT:SAIS-AA¹⁷-LYL:LKNYQ:VVK:AXGXH, KVGKAXX:VPT:SAIS-AA¹⁷-LYL:LKNYQ:VAE:XGXR, KASKAXX:VPT:SAIS-AA¹⁷-LYL:LKNYQ:AVS:EXGXR, GSAGPXX:TPT:SAIS-AA¹⁷-LYL:LKNYQ:VVD:RXGXS, AAPASXX:VPA:SAIS-AA¹⁷-LYL:LKNYQ:VVE:AXGXR, HVPKPXX:APT:SAIS-AA¹⁷-LYL:LKNYQ:VVR:SXGXH, RVPSTXX:APV:SAIS-AA¹⁷-LYL:LKNYQ:VEE:XGXL, ASAAPXX:VPQ:SAIS-AA¹⁷-LYL:LKNYQ:VRS:XKXS, ASASPXX:VSQ:SAIS-AA¹⁷-LYL:LKNYQ:VKS:XKXS, ASASPXX:VPQ:SAIS-AA¹⁷-LYL:LKNYQ:VKS:XKXS, NDEGLEX:VPT:SAIS-AA¹⁷-LYL:LKNYQ:QHN:KXEXR, NDEGLEX:VPT:SAIS-AA¹⁷-LYL:LKNYQ:EHS:QXEXR, SSVKXQP:SRV:SAIS-AA¹⁷-LYL:LKNYQ:EEH:LEXAXA, RNVQXRP:TQV:SAIS-AA¹⁷-LYL:LKNYQ:EDH:LAXKXE, KIPKAXX:VPE:SSLS-AA¹⁷-LFF:LKVYP:TVE:GXGXR, SIPKAXX:VPE:SSLS-AA¹⁷-LFF:LKVYP:TVE:GXGXR, HVTKPTX:VPE:SSLS-AA¹⁷-LFF:LKVYP:TVE:SXGXH, YVPKPXX:VPE:SSLS-AA¹⁷-LFF:LKVYP:TVE:SXGXH, TVPKPXX:VPE:SSLS-AA¹⁷-LFF:LKVYP:TVE:AXGXH, AVPKAXX:VPE:SSLS-AA¹⁷-LFF:LKVYP:TVE:AXGXH, KVGKAXX:VPE:SSLS-AA¹⁷-LFF:LKVYP:TVE:XGXR, KASKAXX:VPE:SSLS-AA¹⁷-LFF:LKVYP:TVE:EXGXR, GSAGPXX:VPE:SSLS-AA¹⁷-LFF:LKVYP:TVE:RXGXS, AAPASXX:VPE:SSLS-AA¹⁷-LFF:LKVYP:TVE:AXGXR, STPPTXX:VPE:SSLS-AA¹⁷-LFF:LKVYP:TVE:SXGXR, HVPKPXX:VPE:SSLS-AA¹⁷-LFF:LKVYP:TVE:SXGXH, RVPSTXX:VPE:SSLS-AA¹⁷-LFF:LKVYP:TVE:XGXL, ASAAPXX:VPE:SSLS-AA¹⁷-LFF:LKVYP:TVE:XKXS, ASASPXX:VPE:SSLS-AA¹⁷-LFF:LKVYP:TVE:XKXS, KIPKAXX:VPT:SSLS-AA¹⁷-LFF:LKVYP:VVE:GXGXR, SIPKAXX:VPT:SSLS-AA¹⁷-LFF:LKVYP:VVE:GXGXR, HVTKPTX:APT:SSLS-AA¹⁷-LFF:LKVYP:VVR:SXGXH, YVPKPXX:APT:SSLS-AA¹⁷-LFF:LKVYP:VVR:SXGXH, TVPKPXX:APT:SSLS-AA¹⁷-LFF:LKVYP:VVR:AXGXH, AVPKAXX:APT:SSLS-AA¹⁷-LFF:LKVYP:VVK:AXGXH, KVGKAXX:VPT:SSLS-AA¹⁷-LFF:LKVYP:VAE:XGXR, KASKAXX:VPT:SSLS-AA¹⁷-LFF:LKVYP:AVS:EXGXR, GSAGPXX:TPT:SSLS-AA¹⁷-LFF:LKVYP:VVD:RXGXS, AAPASXX:VPA:SSLS-AA¹⁷-LFF:LKVYP:VVE:AXGXR, STPPTXX:VPT:SSLS-AA¹⁷-LFF:LKVYP:VVE:SXGXR, HVPKPXX:APT:SSLS-AA¹⁷-LFF:LKVYP:VVR:SXGXH, RVPSTXX:APV:SSLS-AA¹⁷-LFF:LKVYP:VEE:XGXL, ASAAPXX:VPQ:SSLS-AA¹⁷-LFF:LKVYP:VRS:XKXS, ASASPXX:VSQ:SSLS-AA¹⁷-LFF:LKVYP:VKS:XKXS, ASASPXX:VPQ:SSLS-AA¹⁷-LFF:LKVYP:VKS:XKXS, NDEGLEX:VPT:SSLS-AA¹⁷-LFF:LKVYP:QHN:KXEXR, NDEGLEX:VPT:SSLS-AA¹⁷-LFF:LKVYP:EHS:QXEXR, SSVKXQP:SRV:SSLS-AA¹⁷-LFF:LKVYP:EEH:LEXAXA, RNVQXRP:TQV:SSLS-AA¹⁷-LFF:LKVYP:EDH:LAXKXE, KIPKAXX:APT:NAIS-AA¹⁷-LYFIKKYR:VVR:GXGXR, GIPEPXX:APT:NAIS-AA¹⁷-LYFIKKYR:VVR:SXAXR, SIPKAXX:APT:NAIS-AA¹⁷-LYFIKKYR:VVR:GXGXR, AVPKAXX:APT:NAIS-AA¹⁷-LYF:LKKYR:VVR:AXGXH, KVGKAXX:APT:NAIS-AA¹⁷-LYFIKKYR:VVR:XGXR, KASKAXX:APT:NAIS-AA¹⁷-LYFIKKYR:VVR:EXGXR, GSAGPXX:APT:NAIS-AA¹⁷-LYFIKKYR:VVR:RXGXS, AAPASXX:APT:NAIS-AA¹⁷-LYFIKKYR:VVR:AXGXR, STPPTXX:APT:NAIS-AA¹⁷-LYF:LKKYR:VVR:SXGXR, RVPSTXX:APT:NAIS-AA¹⁷-LYFIKKYR:VVR:XGXL, ASAAPXX:APT:NAIS-AA¹⁷-LYFIKKYR:VVR:XKXS, ASASPXX:APT:NAIS-AA¹⁷-LYFIKKYR:VVR:XKXS, KIPKAXX:VPT:NAIS-AA¹⁷-LYFIKKYR:VVE:GXGXR, GIPEPXX:VPE:NAIS-AA¹⁷-LYFIKKYR:TVE:SXAXR, SIPKAXX:VPT:NAIS-AA¹⁷-LYFIKKYR:VVE:GXGXR, AVPKAXX:APT:NAIS-AA¹⁷-LYF:LKKYR:VVK:AXGXH, KVGKAXX:VPT:NAIS-AA¹⁷-LYFIKKYR:VAE:XGXR, KASKAXX:VPT:NAIS-AA¹⁷-LYFIKKYR:AVS:EXGXR, GSAGPXX:TPT:NAIS-AA¹⁷-LYFIKKYR:VVD:RXGXS, AAPASXX:VPA:NAIS-AA¹⁷-LYFIKKYR:VVE:AXGXR, STPPTXX:VPT:NAIS-AA¹⁷-LYF:LKKYR:VVE:SXGXR, RVPSTXX:APV:NAIS-AA¹⁷-LYFIKKYR:VEE:XGXL, ASAAPXX:VPQ:NAIS-AA¹⁷-LYFIKKYR:VRS:XKXS, ASASPXX:VSQ:NAIS-AA¹⁷-LYFIKKYR:VKS:XKXS, ASASPXX:VPQ:NAIS-AA¹⁷-LYFIKKYR:VKS:XKXS, NDEGLEX:VPT:NAIS-AA¹⁷-LYF:LKKYR:QHN:KXEXR, NDEGLEX:VPT:NAIS-AA¹⁷-LYFIKKYR:EHS:QXEXR, SSVKXQP:SRV:NAIS-AA¹⁷-LYFIKKYR:EEH:LEXAXA, RNVQXRP:TQV:NAIS-AA¹⁷-LYFIKKYR:EDH:LAXKXE, KIPKAXX:APT:SATS-AA¹⁷-LYY:LRKHR:VVK:GXGXR, GIPEPXX:APT:SATS-AA¹⁷-LYY:LRKHR:VVK:SXAXR, SIPKAXX:APT:SATS-AA¹⁷-LYY:LRKHR:VVK:GXGXR, HVTKPTX:APT:SATS-AA¹⁷-LYY:LRKHR:VVK:SXGXH, YVPKPXX:APT:SATS-AA¹⁷-LYY:LRKHR:VVK:SXGXH, TVPKPXX:APT:SATS-AA¹⁷-LYY:LRKHR:VVK:AXGXH, KVGKAXX:APT:SATS-AA¹⁷-LYY:LRKHR:VVK:XGXR, KASKAXX:APT:SATS-AA¹⁷-LYY:LRKHR:VVK:EXGXR, GSAGPXX:APT:SATS-AA¹⁷-LYY:LRKHR:VVK:RXGXS, AAPASXX:APT:SATS-AA¹⁷-LYY:LRKHR:VVK:AXGXR, STPPTXX:APT:SATS-AA¹⁷-LYY:LRKHR:VVK:SXGXR, HVPKPXX:APT:SATS-AA¹⁷-LYY:LRKHR:VVK:SXGXH, RVPSTXX:APT:SATS-AA¹⁷-LYY:LRKHR:VVK:XGXL, ASAAPXX:APT:SATS-AA¹⁷-LYY:LRKHR:VVK:XKXS, ASASPXX:APT:SATS-AA¹⁷-LYY:LRKHR:VVK:XKXS, KIPKAXX:VPT:SATS-AA¹⁷-LYY:LRKHR:VVE:GXGXR, GIPEPXX:VPE:SATS-AA¹⁷-LYY:LRKHR:TVE:SXAXR, SIPKAXX:VPT:SATS-AA¹⁷-LYY:LRKHR:VVE:GXGXR, HVTKPTX:APT:SATS-AA¹⁷-LYY:LRKHR:VVR:SXGXH, YVPKPXX:APT:SATS-AA¹⁷-LYY:LRKHR:VVR:SXGXH, TVPKPXX:APT:SATS-AA¹⁷-LYY:LRKHR:VVR:AXGXH, KVGKAXX:VPT:SATS-AA¹⁷-LYY:LRKHR:VAE:XGXR, KASKAXX:VPT:SATS-AA¹⁷-LYY:LRKHR:AVS:EXGXR, GSAGPXX:TPT:SATS-AA¹⁷-LYY:LRKHR:VVD:RXGXS, AAPASXX:VPA:SATS-AA¹⁷-LYY:LRKHR:VVE:AXGXR, STPPTXX:VPT:SATS-AA¹⁷-LYY:LRKHR:VVE:SXGXR, HVPKPXX:APT:SATS-AA¹⁷-LYY:LRKHR:VVR:SXGXH, RVPSTXX:APV:SATS-AA¹⁷-LYY:LRKHR:VEE:XGXL, ASAAPXX:VPQ:SATS-AA¹⁷-LYY:LRKHR:VRS:XKXS, ASASPXX:VSQ:SATS-AA¹⁷-LYY:LRKHR:VKS:XKXS, ASASPXX:VPQ:SATS-AA¹⁷-LYY:LRKHR:VKS:XKXS, NDEGLEX:VPT:SATS-AA¹⁷-LYY:LRKHR:QHN:KXEXR, NDEGLEX:VPT:SATS-AA¹⁷-LYY:LRKHR:EHS:QXEXR, SSVKXQP:SRV:SATS-AA¹⁷-LYY:LRKHR:EEH:LEXAXA, RNVQXRP:TQV:SATS-AA¹⁷-LYY:LRKHR:EDH:LAXKXE, KIPKAXX:VPT:SPIS-AA¹⁷-LYK:LKYHY:VAE:GXGXR, GIPEPXX:VPT:SPIS-AA¹⁷-LYK:LKYHY:VAE:SXAXR, SIPKAXX:VPT:SPIS-AA¹⁷-LYK:LKYHY:VAE:GXGXR, HVTKPTX:VPT:SPIS-AA¹⁷-LYK:LKYHY:VAE:SXGXH, YVPKPXX:VPT:SPIS-AA¹⁷-LYK:LKYHY:VAE:SXGXH, TVPKPXX:VPT:SPIS-AA¹⁷-LYK:LKYHY:VAE:AXGXH, AVPKAXX:VPT:SPIS-AA¹⁷-LYK:LKYHY:VAE:AXGXH, KASKAXX:VPT:SPIS-AA¹⁷-LYK:LKYHY:VAE:EXGXR, GSAGPXX:VPT:SPIS-AA¹⁷-LYK:LKYHY:VAE:RXGXS, AAPASXX:VPT:SPIS-AA¹⁷-LYK:LKYHY:VAE:AXGXR, STPPTXX:VPT:SPIS-AA¹⁷-LYK:LKYHY:VAE:SXGXR, HVPKPXX:VPT:SPIS-AA¹⁷-LYK:LKYHY:VAE:SXGXH, RVPSTXX:VPT:SPIS-AA¹⁷-LYK:LKYHY:VAE:XGXL, ASAAPXX:VPT:SPIS-AA¹⁷-LYK:LKYHY:VAE:XKXS, ASASPXX:VPT:SPIS-AA¹⁷-LYK:LKYHY:VAE:XKXS, KIPKAXX:VPT:SPIS-AA¹⁷-LYK:LKYHY:VVE:GXGXR, GIPEPXX:VPE:SPIS-AA¹⁷-LYK:LKYHY:TVE:SXAXR, SIPKAXX:VPT:SPIS-AA¹⁷-LYK:LKYHY:VVE:GXGXR, HVTKPTX:APT:SPIS-AA¹⁷-LYK:LKYHY:VVR:SXGXH, YVPKPXX:APT:SPIS-AA¹⁷-LYK:LKYHY:VVR:SXGXH, TVPKPXX:APT:SPIS-AA¹⁷-LYK:LKYHY:VVR:AXGXH, AVPKAXX:APT:SPIS-AA¹⁷-LYK:LKYHY:VVK:AXGXH, KASKAXX:VPT:SPIS-AA¹⁷-LYK:LKYHY:AVS:EXGXR, GSAGPXX:TPT:SPIS-AA¹⁷-LYK:LKYHY:VVD:RXGXS, AAPASXX:VPA:SPIS-AA¹⁷-LYK:LKYHY:VVE:AXGXR, STPPTXX:VPT:SPIS-AA¹⁷-LYK:LKYHY:VVE:SXGXR, HVPKPXX:APT:SPIS-AA¹⁷-LYK:LKYHY:VVR:SXGXH, RVPSTXX:APV:SPIS-AA¹⁷-LYK:LKYHY:VEE:XGXL, ASAAPXX:VPQ:SPIS-AA¹⁷-LYK:LKYHY:VRS:XKXS, ASASPXX:VSQ:SPIS-AA¹⁷-LYK:LKYHY:VKS:XKXS, ASASPXX:VPQ:SPIS-AA¹⁷-LYK:LKYHY:VKS:XKXS, NDEGLEX:VPT:SPIS-AA¹⁷-LYK:LKYHY:QHN:KXEXR, NDEGLEX:VPT:SPIS-AA¹⁷-LYK:LKYHY:EHS:QXEXR, SSVKXQP:SRV:SPIS-AA¹⁷-LYK:LKYHY:EEH:LEXAXA, RNVQXRP:TQV:SPIS-AA¹⁷-LYK:LKYHY:EDH:LAXKXE, KIPKAXX:VPT:EPIS-AA¹⁷-LYL:KFKYE:AVS:GXGXR, GIPEPXX:VPT:EPIS-AA¹⁷-LYL:KFKYE:AVS:SXAXR, SIPKAXX:VPT:EPIS-AA¹⁷-LYL:KFKYE:AVS:GXGXR, HVTKPTX:VPT:EPIS-AA¹⁷-LYL:KFKYE:AVS:SXGXH, YVPKPXX:VPT:EPIS-AA¹⁷-LYL:KFKYE:AVS:SXGXH, TVPKPXX:VPT:EPIS-AA¹⁷-LYL:KFKYE:AVS:AXGXH, AVPKAXX:VPT:EPIS-AA¹⁷-LYL:KFKYE:AVS:AXGXH, KVGKAXX:VPT:EPIS-AA¹⁷-LYL:KFKYE:AVS:XGXR, GSAGPXX:VPT:EPIS-AA¹⁷-LYL:KFKYE:AVS:RXGXS, AAPASXX:VPT:EPIS-AA¹⁷-LYL:KFKYE:AVS:AXGXR, STPPTXX:VPT:EPIS-AA¹⁷-LYL:KFKYE:AVS:SXGXR, HVPKPXX:VPT:EPIS-AA¹⁷-LYL:KFKYE:AVS:SXGXH, RVPSTXX:VPT:EPIS-AA¹⁷-LYL:KFKYE:AVS:XGXL, ASAAPXX:VPT:EPIS-AA¹⁷-LYL:KFKYE:AVS:XKXS, ASASPXX:VPT:EPIS-AA¹⁷-LYL:KFKYE:AVS:XKXS, KIPKAXX:VPT:EPIS-AA¹⁷-LYL:KFKYE:VVE:GXGXR, GIPEPXX:VPE:EPIS-AA¹⁷-LYL:KFKYE:TVE:SXAXR, SIPKAXX:VPT:EPIS-AA¹⁷-LYL:KFKYE:VVE:GXGXR, HVTKPTX:APT:EPIS-AA¹⁷-LYL:KFKYE:VVR:SXGXH, YVPKPXX:APT:EPIS-AA¹⁷-LYL:KFKYE:VVR:SXGXH, TVPKPXX:APT:EPIS-AA¹⁷-LYL:KFKYE:VVR:AXGXH, AVPKAXX:APT:EPIS-AA¹⁷-LYL:KFKYE:VVK:AXGXH, KVGKAXX:VPT:EPIS-AA¹⁷-LYL:KFKYE:VAE:XGXR, GSAGPXX:TPT:EPIS-AA¹⁷-LYL:KFKYE:VVD:RXGXS, AAPASXX:VPA:EPIS-AA¹⁷-LYL:KFKYE:VVE:AXGXR, STPPTXX:VPT:EPIS-AA¹⁷-LYL:KFKYE:VVE:SXGXR, HVPKPXX:APT:EPIS-AA¹⁷-LYL:KFKYE:VVR:SXGXH, RVPSTXX:APV:EPIS-AA¹⁷-LYL:KFKYE:VEE:XGXL, ASAAPXX:VPQ:EPIS-AA¹⁷-LYL:KFKYE:VRS:XKXS, ASASPXX:VSQ:EPIS-AA¹⁷-LYL:KFKYE:VKS:XKXS, ASASPXX:VPQ:EPIS-AA¹⁷-LYL:KFKYE:VKS:XKXS, NDEGLEX:VPT:EPIS-AA¹⁷-LYL:KFKYE:QHN:KXEXR, NDEGLEX:VPT:EPIS-AA¹⁷-LYL:KFKYE:EHS:QXEXR, SSVKXQP:SRV:EPIS-AA¹⁷-LYL:KFKYE:EEH:LEXAXA, RNVQXRP:TQV:EPIS-AA¹⁷-LYL:KFKYE:EDH:LAXKXE, KIPKAXX:TPT:SPIN-AA¹⁷-LYF:YGKIP:VVD:GXGXR, GIPEPXX:TPT:SPIN-AA¹⁷-LYF:YGKIP:VVD:SXAXR, SIPKAXX:TPT:SPIN-AA¹⁷-LYF:YGKIP:VVD:GXGXR, HVTKPTX:TPT:SPIN-AA¹⁷-LYF:YGKIP:VVD:SXGXH, YVPKPXX:TPT:SPIN-AA¹⁷-LYF:YGKIP:VVD:SXGXH, TVPKPXX:TPT:SPIN-AA¹⁷-LYF:YGKIP:VVD:AXGXH, AVPKAXX:TPT:SPIN-AA¹⁷-LYF:YGKIP:VVD:AXGXH, KVGKAXX:TPT:SPIN-AA¹⁷-LYF:YGKIP:VVD:XGXR, KASKAXX:TPT:SPIN-AA¹⁷-LYF:YGKIP:VVD:EXGXR, AAPASXX:TPT:SPIN-AA¹⁷-LYF:YGKIP:VVD:AXGXR, STPPTXX:TPT:SPIN-AA¹⁷-LYF:YGKIP:VVD:SXGXR, HVPKPXX:TPT:SPIN-AA¹⁷-LYF:YGKIP:VVD:SXGXH, RVPSTXX:TPT:SPIN-AA¹⁷-LYF:YGKIP:VVD:XGXL, ASAAPXX:TPT:SPIN-AA¹⁷-LYF:YGKIP:VVD:XKXS, ASASPXX:TPT:SPIN-AA¹⁷-LYF:YGKIP:VVD:XKXS, KIPKAXX:VPT:SPIN-AA¹⁷-LYF:YGKIP:VVE:GXGXR, GIPEPXX:VPE:SPIN-AA¹⁷-LYF:YGKIP:TVE:SXAXR, SIPKAXX:VPT:SPIN-AA¹⁷-LYF:YGKIP:VVE:GXGXR, HVTKPTX:APT:SPIN-AA¹⁷-LYF:YGKIP:VVR:SXGXH, YVPKPXX:APT:SPIN-AA¹⁷-LYF:YGKIP:VVR:SXGXH, TVPKPXX:APT:SPIN-AA¹⁷-LYF:YGKIP:VVR:AXGXH, AVPKAXX:APT:SPIN-AA¹⁷-LYF:YGKIP:VVK:AXGXH, KVGKAXX:VPT:SPIN-AA¹⁷-LYF:YGKIP:VAE:XGXR, KASKAXX:VPT:SPIN-AA¹⁷-LYF:YGKIP:AVS:EXGXR, AAPASXX:VPA:SPIN-AA¹⁷-LYF:YGKIP:VVE:AXGXR, STPPTXX:VPT:SPIN-AA¹⁷-LYF:YGKIP:VVE:SXGXR, HVPKPXX:APT:SPIN-AA¹⁷-LYF:YGKIP:VVR:SXGXH, RVPSTXX:APV:SPIN-AA¹⁷-LYF:YGKIP:VEE:XGXL, ASAAPXX:VPQ:SPIN-AA¹⁷-LYF:YGKIP:VRS:XKXS, ASASPXX:VSQ:SPIN-AA¹⁷-LYF:YGKIP:VKS:XKXS, ASASPXX:VPQ:SPIN-AA¹⁷-LYF:YGKIP:VKS:XKXS, NDEGLEX:VPT:SPIN-AA¹⁷-LYF:YGKIP:QHN:KXEXR, NDEGLEX:VPT:SPIN-AA¹⁷-LYF:YGKIP:EHS:QXEXR, SSVKXQP:SRV:SPIN-AA¹⁷-LYF:YGKIP:EEH:LEXAXA, RNVQXRP:TQV:SPIN-AA¹⁷-LYF:YGKIP:EDH:LAXKXE, KIPKAXX:VPA:SPIS-AA¹⁷-LYI:YKQYE:VVE:GXGXR, GIPEPXX:VPA:SPIS-AA¹⁷-LYI:YKQYE:VVE:SXAXR, SIPKAXX:VPA:SPIS-AA¹⁷-LYI:YKQYE:VVE:GXGXR, HVTKPTX:VPA:SPIS-AA¹⁷-LYI:YKQYE:VVE:SXGXH, YVPKPXX:VPA:SPIS-AA¹⁷-LYI:YKQYE:VVE:SXGXH, TVPKPXX:VPA:SPIS-AA¹⁷-LYI:YKQYE:VVE:AXGXH, AVPKAXX:VPA:SPIS-AA¹⁷-LYI:YKQYE:VVE:AXGXH, KVGKAXX:VPA:SPIS-AA¹⁷-LYI:YKQYE:VVE:XGXR, KASKAXX:VPA:SPIS-AA¹⁷-LYI:YKQYE:VVE:EXGXR, GSAGPXX:VPA:SPIS-AA¹⁷-LYI:YKQYE:VVE:RXGXS, STPPTXX:VPA:SPIS-AA¹⁷-LYI:YKQYE:VVE:SXGXR, HVPKPXX:VPA:SPIS-AA¹⁷-LYI:YKQYE:VVE:SXGXH, RVPSTXX:VPA:SPIS-AA¹⁷-LYI:YKQYE:VVE:XGXL, ASAAPXX:VPA:SPIS-AA¹⁷-LYI:YKQYE:VVE:XKXS, ASASPXX:VPA:SPIS-AA¹⁷-LYI:YKQYE:VVE:XKXS, KIPKAXX:VPT:SPIS-AA¹⁷-LYI:YKQYE:VVE:GXGXR, GIPEPXX:VPE:SPIS-AA¹⁷-LYI:YKQYE:TVE:SXAXR, SIPKAXX:VPT:SPIS-AA¹⁷-LYI:YKQYE:VVE:GXGXR, HVTKPTX:APT:SPIS-AA¹⁷-LYI:YKQYE:VVR:SXGXH, YVPKPXX:APT:SPIS-AA¹⁷-LYI:YKQYE:VVR:SXGXH, TVPKPXX:APT:SPIS-AA¹⁷-LYI:YKQYE:VVR:AXGXH, AVPKAXX:APT:SPIS-AA¹⁷-LYI:YKQYE:VVK:AXGXH, KVGKAXX:VPT:SPIS-AA¹⁷-LYI:YKQYE:VAE:XGXR, KASKAXX:VPT:SPIS-AA¹⁷-LYI:YKQYE:AVS:EXGXR, GSAGPXX:TPT:SPIS-AA¹⁷-LYI:YKQYE:VVD:RXGXS, STPPTXX:VPT:SPIS-AA¹⁷-LYI:YKQYE:VVE:SXGXR, HVPKPXX:APT:SPIS-AA¹⁷-LYI:YKQYE:VVR:SXGXH, RVPSTXX:APV:SPIS-AA¹⁷-LYI:YKQYE:VEE:XGXL, ASAAPXX:VPQ:SPIS-AA¹⁷-LYI:YKQYE:VRS:XKXS, ASASPXX:VSQ:SPIS-AA¹⁷-LYI:YKQYE:VKS:XKXS, ASASPXX:VPQ:SPIS-AA¹⁷-LYI:YKQYE:VKS:XKXS, NDEGLEX:VPT:SPIS-AA¹⁷-LYI:YKQYE:QHN:KXEXR, NDEGLEX:VPT:SPIS-AA¹⁷-LYI:YKQYE:EHS:QXEXR, SSVKXQP:SRV:SPIS-AA¹⁷-LYI:YKQYE:EEH:LEXAXA, RNVQXRP:TQV:SPIS-AA¹⁷-LYI:YKQYE: EDH:LAXKXE, KIPKAXX:VPT:SPIS-AA¹⁷-LFINKQYE:VVE:GXGXR, GIPEPXX:VPT:SPIS-AA¹⁷-LFI:YKQYE:VVE:SXAXR, SIPKAXX:VPT:SPIS-AA¹⁷-LRYKQYE:VVE:GXGXR, HVTKPTX:VPT:SPIS-AA¹⁷-LFLYKQYE:VVE:SXGXH, YVPKPXX:VPT:SPIS-AA¹⁷-LFINKQYE:VVE:SXGXH, TVPKPXX:VPT:SPIS-AA¹⁷-LFLYKQYE:VVE:AXGXH, AVPKAXX:VPT:SPIS-AA¹⁷-LFI:YKQYE:VVE:AXGXH, KVGKAXX:VPT:SPIS-AA¹⁷-LFLYKQYE:VVE:XGXR, KASKAXX:VPT:SPIS-AA¹⁷-LFLYKQYE:VVE:EXGXR, GSAGPXX:VPT:SPIS-AA¹⁷-LFI:YKQYE:VVE:RXGXS, AAPASXX:VPT:SPIS-AA¹⁷-LFINKQYE:VVE:AXGXR, HVPKPXX:VPT:SPIS-AA¹⁷-LFI:YKQYE:VVE:SXGXH, RVPSTXX:VPT:SPIS-AA¹⁷-LRYKQYE:VVE:XGXL, ASAAPXX:VPT:SPIS-AA¹⁷-LFLYKQYE:VVE:XKXS, ASASPXX:VPT:SPIS-AA¹⁷-LRYKQYE:VVE:XKXS, GIPEPXX:VPE:SPIS-AA¹⁷-LRYKQYE:TVE:SXAXR, HVTKPTX:APT:SPIS-AA¹⁷-LFINKQYE:VVR:SXGXH, YVPKPXX:APT:SPIS-AA¹⁷-LFINKQYE:VVR:SXGXH, TVPKPXX:APT:SPIS-AA¹⁷-LFI:YKQYE:VVR:AXGXH, AVPKAXX:APT:SPIS-AA¹⁷-LFINKQYE:VVK:AXGXH, KVGKAXX:VPT:SPIS-AA¹⁷-LFLYKQYE:VAE:XGXR, KASKAXX:VPT:SPIS-AA¹⁷-LFI:YKQYE:AVS: EXGXR, GSAGPXX:TPT:SPIS-AA¹⁷-LFLYKQYE:VVD:RXGXS, AAPASXX:VPA:SPIS-AA¹⁷-LFI:YKQYE:VVE:AXGXR, HVPKPXX:APT:SPIS-AA¹⁷-LFLYKQYE:VVR:SXGXH, RVPSTXX:APV:SPIS-AA¹⁷-LRYKQYE:VEE:XGXL, ASAAPXX:VPQ:SPIS-AA¹⁷-LFINKQYE:VRS:XKXS, ASASPXX:VSQ:SPIS-AA¹⁷-LFLYKQYE:VKS:XKXS, ASASPXX:VPQ:SPIS-AA¹⁷-LFLYKQYE:VKS:XKXS, NDEGLEX:VPT:SPIS-AA¹⁷-LFLYKQYE:QHN:KXEXR, NDEGLEX:VPT:SPIS-AA¹⁷-LRYKQYE:EHS:QXEXR, SSVKXQP:SRV:SPIS-AA¹⁷-LFINKQYE:EEH:LEXAXA, RNVQXRP:TQV:SPIS-AA¹⁷-LFI:YKQYE:EDH:LAXKXE, KIPKAXX:APV:KPLS-AA¹⁷-LYV:DHHKD:VEE:GXGXR, GIPEPXX:APV:KPLS-AA¹⁷-LYV:DHHKD:VEE:SXAXR, SIPKAXX:APV:KPLS-AA¹⁷-LYV:DHHKD:VEE:GXGXR, HVTKPTX:APV:KPLS-AA¹⁷-LYV:DHHKD:VEE:SXGXH, YVPKPXX:APV:KPLS-AA¹⁷-LYV:DHHKD:VEE:SXGXH, TVPKPXX:APV:KPLS-AA¹⁷-LYV:DHHKD:VEE:AXGXH, AVPKAXX:APV:KPLS-AA¹⁷-LYV:DHHKD:VEE:AXGXH, KVGKAXX:APV:KPLS-AA¹⁷-LYV:DHHKD:VEE:XGXR, KASKAXX:APV:KPLS-AA¹⁷-LYV:DHHKD:VEE:EXGXR, GSAGPXX:APV:KPLS-AA¹⁷-LYV:DHHKD:VEE:RXGXS, AAPASXX:APV:KPLS-AA¹⁷-LYV:DHHKD:VEE:AXGXR, STPPTXX:APV:KPLS-AA¹⁷-LYV:DHHKD:VEE:SXGXR, HVPKPXX:APV:KPLS-AA¹⁷-LYV:DHHKD:VEE:SXGXH, ASAAPXX:APV:KPLS-AA¹⁷-LYV:DHHKD:VEE:XKXS, ASASPXX:APV:KPLS-AA¹⁷-LYV:DHHKD:VEE:XKXS, KIPKAXX:VPT:KPLS-AA¹⁷-LYV:DHHKD:VVE:GXGXR, GIPEPXX:VPE:KPLS-AA¹⁷-LYV:DHHKD:TVE:SXAXR, SIPKAXX:VPT:KPLS-AA¹⁷-LYV:DHHKD:VVE:GXGXR, HVTKPTX:APT:KPLS-AA¹⁷-LYV:DHHKD:VVR:SXGXH, YVPKPXX:APT:KPLS-AA¹⁷-LYV:DHHKD:VVR:SXGXH, TVPKPXX:APT:KPLS-AA¹⁷-LYV:DHHKD:VVR:AXGXH, AVPKAXX:APT:KPLS-AA¹⁷-LYV:DHHKD:VVK:AXGXH, KVGKAXX:VPT:KPLS-AA¹⁷-LYV:DH HKD:VAE:XGXR, KASKAXX:VPT:KPLS-AA¹⁷-LYV:DHHKD:AVS:EXGXR, GSAGPXX:TPT:KPLS-AA¹⁷-LYV:DHHKD:VVD:RXGXS, AAPASXX:VPA:KPLS-AA¹⁷-LYV:DHHKD:VVE:AXGXR, STPPTXX:VPT:KPLS-AA¹⁷-LYV:DHHKD:VVE:SXGXR, HVPKPXX:APT:KPLS-AA¹⁷-LYV:DHHKD:VVR:SXGXH, ASAAPXX:VPQ:KPLS-AA¹⁷-LYV:DH HKD:VRS:XKXS, ASASPXX:VSQ:KPLS-AA¹⁷-LYV:DHHKD:VKS:XKXS, ASASPXX:VPQ:KPLS-AA¹⁷-LYV:DHHKD:VKS:XKXS, NDEGLEX:VPT:KPLS-AA¹⁷-LYV:DHHKD:QHN:KXEXR, NDEGLEX:VPT:KPLS-AA¹⁷-LYV:DHHKD:EHS:QXEXR, SSVKXQP:SRV:KPLS-AA¹⁷-LYV:DHHKD:EEH:LEXAXA, RNVQXRP:TQV:KPLS-AA¹⁷-LYV:DHHKD:EDH:LAXKXE, KIPKAXX:VPQ:EPLP-AA¹⁷-VYY:EQLSN:VRS:GXGXR, GIPEPXX:VPQ:EPLP-AA¹⁷-VYY:EQLSN:VRS:SXAXR, SIPKAXX:VPQ:EPLP-AA¹⁷-VYY:EQLSN:VRS:GXGXR, HVTKPTX:VPQ:EPLP-AA¹⁷-VYY:EQLSN:VRS:SXGXH, YVPKPXX:VPQ:EPLP-AA¹⁷-VYY:EQLSN:VRS:SXGXH, TVPKPXX:VPQ: EPLP-AA¹⁷-VYY:EQLSN:VRS:AXGXH, AVPKAXX:VPQ:EPLP-AA¹⁷-VYY:EQLSN:VRS:AXGXH, KVGKAXX:VPQ:EPLP-AA¹⁷-VYY:EQLSN:VRS:XGXR, KASKAXX:VPQ:EPLP-AA¹⁷-VYY:EQLSN:VRS:EXGXR, GSAGPXX:VPQ:EPLP-AA¹⁷-VYY:EQLSN:VRS:RXGXS, AAPASXX:VPQ:EPLP-AA¹⁷-VYY:EQLSN:VRS:AXGXR, STPPTXX:VPQ:EPLP-AA¹⁷-VYY:EQLSN:VRS:SXGXR, HVPKPXX:VPQ:EPLP-AA¹⁷-VYY:EQLSN:VRS:SXGXH, RVPSTXX:VPQ:EPLP-AA¹⁷-VYY:EQLSN:VRS:XGXL, ASASPXX:VPQ:EPLP-AA¹⁷-VYY:EQLSN:VRS:XKXS, KIPKAXX:VPT:EPLP-AA¹⁷-VYY:EQLSN:VVE:GXGXR, GIPEPXX:VPE:EPLP-AA¹⁷-VYY:EQLSN:TVE:SXAXR, SIPKAXX:VPT:EPLP-AA¹⁷-VYY:EQLSN:VVE:GXGXR, HVTKPTX:APT:EPLP-AA¹⁷-VYY:EQLSN:VVR:SXGXH, YVPKPXX:APT:EPLP-AA¹⁷-VYY:EQLSN:VVR:SXGXH, TVPKPXX:APT:EPLP-AA¹⁷-VYY:EQLSN:VVR:AXGXH, AVPKAXX:APT:EPLP-AA¹⁷-VYY:EQLSN:VVK:AXGXH, KVGKAXX:VPT:EPLP-AA¹⁷-VYY:EQLSN:VAE:XGXR, KASKAXX:VPT:EPLP-AA¹⁷-VYY:EQLSN:AVS:EXGXR, GSAGPXX:TPT:EPLP-AA¹⁷-VYY:EQLSN:VVD:RXGXS, AAPASXX:VPA:EPLP-AA¹⁷-VYY:EQLSN:VVE:AXGXR, STPPTXX:VPT:EPLP-AA¹⁷-VYY:EQLSN:VVE:SXGXR, HVPKPXX:APT:EPLP-AA¹⁷-VYY:EQLSN:VVR:SXGXH, RVPSTXX:APV:EPLP-AA¹⁷-VYY:EQLSN:VEE:XGXL, ASASPXX:VSQ:EPLP-AA¹⁷-VYY:EQLSN:VKS:XKXS, ASASPXX:VPQ:EPLP-AA¹⁷-VYY:EQLSN:VKS:XKXS, NDEGLEX:VPT:EPLP-AA¹⁷-VYY:EQLSN:QHN:KXEXR, NDEGLEX:VPT:EPLP-AA¹⁷-VYY:EQLSN:EHS:QXEXR, SSVKXQP:SRV:EPLP-AA¹⁷-VYY:EQLSN:EEH:LEXAXA, RNVQXRP:TQV:EPLP-AA¹⁷-VYY:EQLSN:EDH:LAXKXE, KIPKAXX:VSQ:EPLT-AA¹⁷-LYY:EQLSN:VKS:GXGXR, GIPEPXX:VSQ:EPLT-AA¹⁷-LYY:EQLSN:VKS:SXAXR, SIPKAXX:VSQ:EPLT-AA¹⁷-LYY:EQLSN:VKS:GXGXR, HVTKPTX:VSQ:EPLT-AA¹⁷-LYY:EQLSN:VKS:SXGXH, YVPKPXX:VSQ:EPLT-AA¹⁷-LYY:EQLSN:VKS:SXGXH, TVPKPXX:VSQ:EPLT-AA¹⁷-LYY:EQLSN:VKS:AXGXH, AVPKAXX:VSQ:EPLT-AA¹⁷-LYY:EQLSN:VKS:AXGXH, KVGKAXX:VSQ:EPLT-AA¹⁷-LYY:EQLSN:VKS:XGXR, KASKAXX:VSQ:EPLT-AA¹⁷-LYY:EQLSN:VKS:EXGXR, GSAGPXX:VSQ:EPLT-AA¹⁷-LYY:EQLSN:VKS:RXGXS, AAPASXX:VSQ:EPLT-AA¹⁷-LYY:EQLSN:VKS:AXGXR, STPPTXX:VSQ:EPLT-AA¹⁷-LYY:EQLSN:VKS:SXGXR, HVPKPXX:VSQ:EPLT-AA¹⁷-LYY:EQLSN:VKS:SXGXH, RVPSTXX:VSQ:EPLT-AA¹⁷-LYY:EQLSN:VKS:XGXL, ASAAPXX:VSQ:EPLT-AA¹⁷-LYY:EQLSN:VKS:XKXS, ASASPXX:VSQ:EPLT-AA¹⁷-LYY:EQLSN:VKS:XKXS, KIPKAXX:VPT:EPLT-AA¹⁷-LYY:EQLSN:VVE:GXGXR, GIPEPXX:VPE:EPLT-AA¹⁷-LYY:EQLSN:TVE:SXAXR, SIPKAXX:VPT:EPLT-AA¹⁷-LYY:EQLSN:VVE:GXGXR, HVTKPTX:APT:EPLT-AA¹⁷-LYY:EQLSN:VVR:SXGXH, YVPKPXX:APT:EPLT-AA¹⁷-LYY:EQLSN:VVR:SXGXH, TVPKPXX:APT:EPLT-AA¹⁷-LYY:EQLSN:VVR:AXGXH, AVPKAXX:APT:EPLT-AA¹⁷-LYY:EQLSN:VVK:AXGXH, KVGKAXX:VPT:EPLT-AA¹⁷-LYY:EQLSN:VAE:XGXR, KASKAXX:VPT:EPLT-AA¹⁷-LYY:EQLSN:AVS:EXGXR, GSAGPXX:TPT:EPLT-AA¹⁷-LYY:EQLSN:VVD:RXGXS, AAPASXX:VPA:EPLT-AA¹⁷-LYY:EQLSN:VVE:AXGXR, STPPTXX:VPT:EPLT-AA¹⁷-LYY:EQLSN:VVE:SXGXR, HVPKPXX:APT:EPLT-AA¹⁷-LYY:EQLSN:VVR:SXGXH, RVPSTXX:APV:EPLT-AA¹⁷-LYY:EQLSN:VEE:XGXL, ASAAPXX:VPQ:EPLT-AA¹⁷-LYY:EQLSN:VRS:XKXS, NDEGLEX:VPT:EPLT-AA¹⁷-LYY:EQLSN:QHN:KXEXR, NDEGLEX:VPT:EPLT-AA¹⁷-LYY:EQLSN:EHS:QXEXR, SSVKXQP:SRV:EPLT-AA¹⁷-LYY:EQLSN:EEH:LEXAXA, RNVQXRP:TQV:EPLT-AA¹⁷-LYY:EQLSN:EDH:LAXKXE, KIPKAXX:VPQ:EPLT-AA¹⁷-LYY:EQLSN:VKS:GXGXR, GIPEPXX:VPQ:EPLT-AA¹⁷-LYY:EQLSN:VKS:SXAXR, SIPKAXX:VPQ:EPLT-AA¹⁷-LYY:EQLSN:VKS:GXGXR, HVTKPTX:VPQ:EPLT-AA¹⁷-LYY:EQLSN:VKS:SXGXH, YVPKPXX:VPQ:EPLT-AA¹⁷-LYY:EQLSN:VKS:SXGXH, TVPKPXX:VPQ:EPLT-AA¹⁷-LYY:EQLSN:VKS:AXGXH, AVPKAXX:VPQ:EPLT-AA¹⁷-LYY:EQLSN:VKS:AXGXH, KVGKAXX:VPQ:EPLT-AA¹⁷-LYY:EQLSN:VKS:XGXR, KASKAXX:VPQ:EPLT-AA¹⁷-LYY:EQLSN:VKS: EXGXR, GSAGPXX:VPQ:EPLT-AA¹⁷-LYY:EQLSN:VKS:RXGXS, AAPASXX:VPQ:EPLT-AA¹⁷-LYY:EQLSN:VKS:AXGXR, STPPTXX:VPQ:EPLT-AA¹⁷-LYY:EQLSN:VKS:SXGXR, HVPKPXX:VPQ:EPLT-AA¹⁷-LYY:EQLSN:VKS:SXGXH, RVPSTXX:VPQ:EPLT-AA¹⁷-LYY:EQLSN:VKS:XGXL, ASAAPXX:VPQ:EPLT-AA¹⁷-LYY:EQLSN:VKS:XKXS, ASASPXX:VPQ:EPLT-AA¹⁷-LYY:EQLSN:VKS:XKXS, NDEGLEX:VPT:SNIT-AA¹⁷-QIM:IGEMS:QHN:QXEXR, KIPKAXX:VPT:SNIT-AA¹⁷-QIM:IGEMS:VVE:GXGXR, GIPEPXX:VPE:SNIT-AA¹⁷-QIM:IGEMS:TVE:SXAXR, SIPKAXX:VPT:SNIT-AA¹⁷-QIM:IGEMS:VVE:GXGXR, HVTKPTX:APT:SNIT-AA¹⁷-QIM:IGEMS:VVR:SXGXH, YVPKPXX:APT:SNIT-AA¹⁷-QIM:IGEMS:VVR:SXGXH, TVPKPXX:APT:SNIT-AA¹⁷-QIM:IGEMS:VVR:AXGXH, AVPKAXX:APT:SNIT-AA¹⁷-QIM:IGEMS:VVK:AXGXH, KVGKAXX:VPT:SNIT-AA¹⁷-QIM:IGEMS:VAE:XGXR, KASKAXX:VPT:SNIT-AA¹⁷-QIM:IGEMS:AVS:EXGXR, GSAGPXX:TPT:SNIT-AA¹⁷-QIM:IGEMS:VVD:RXGXS, AAPASXX:VPA:SNIT-AA¹⁷-QIM:IGEMS:VVE:AXGXR, STPPTXX:VPT:SNIT-AA¹⁷-QIM:IGEMS:VVE:SXGXR, HVPKPXX:APT:SNIT-AA¹⁷-QIM:IGEMS:VVR:SXGXH, RVPSTXX:APV:SNIT-AA¹⁷-QIM:IGEMS:VEE:XGXL, ASAAPXX:VPQ:SNIT-AA¹⁷-QIM:IGEMS:VRS:XKXS, ASASPXX:VSQ:SNIT-AA¹⁷-QIM:IGEMS:VKS:XKXS, ASASPXX:VPQ:SNIT-AA¹⁷-QIM:IGEMS:VKS:XKXS, NDEGLEX:VPT:SNIT-AA¹⁷-QIM:IGEMS:EHS:QXEXR, SSVKXQP:SRV:SNIT-AA¹⁷-QIM:IGEMS:EEH:LEXAXA, RNVQXRP:TQV:SNIT-AA¹⁷-QIM:IGEMS:EDH:LAXKXE, NDEGLEX:VPT:SNIT-AA¹⁷-QIM:LGEMS:EHS:KXEXR, KIPKAXX:VPT:SNIT-AA¹⁷-QIM:LGEMS:VVE:GXGXR, GIPEPXX:VPE:SNIT-AA¹⁷-QIMIGEMS:TVE:SXAXR, SIPKAXX:VPT:SNIT-AA¹⁷-QIM:LGEMS:VVE:GXGXR, HVTKPTX:APT:SNIT-AA¹⁷-QIM:LGEMS:VVR:SXGXH, YVPKPXX:APT:SNIT-AA¹⁷-QIM:LGEMS:VVR:SXGXH, TVPKPXX:APT:SNIT-AA¹⁷-QIM:LGEMS:VVR:AXGXH, AVPKAXX:APT:SNIT-AA¹⁷-QIM:LGEMS:VVK:AXGXH, KVGKAXX:VPT:SNIT-AA¹⁷-QIM:LGEMS:VAE:XGXR, KASKAXX:VPT:SNIT-AA¹⁷-QIM:LGEMS:AVS:EXGXR, GSAGPXX:TPT:SNIT-AA¹⁷-QIM:LGEMS:VVD:RXGXS, AAPASXX:VPA:SNIT-AA¹⁷-QIM:LGEMS:VVE:AXGXR, STPPTXX:VPT:SNIT-AA¹⁷-QIM:LGEMS:VVE:SXGXR, HVPKPXX:APT:SNIT-AA¹⁷-QIM:LGEMS:VVR:SXGXH, RVPSTXX:APV:SNIT-AA¹⁷-QIM:LGEMS:VEE:XGXL, ASAAPXX:VPQ:SNIT-AA¹⁷-QIM:LGEMS:VRS:XKXS, ASASPXX:VSQ:SNIT-AA¹⁷-QIM:LGEMS:VKS:XKXS, ASASPXX:VPQ:SNIT-AA¹⁷-QIM:LGEMS:VKS:XKXS, NDEGLEX:VPT:SNIT-AA¹⁷-QIM:LGEMS:QHN:KXEXR, SSVKXQP:SRV:SNIT-AA¹⁷-QIM:LG EMS: EEH:LEXAXA, RNVQXRP:TQV:SNIT-AA¹⁷-QIM:LGEMS:EDH:LAXKXE, RNVQXRP:SRV:RSVK-AA¹⁷-AKV:KEVQV:EEH:LAXKXE, KIPKAXX:VPT:RSVK-AA¹⁷-AKV:KEVQV:VVE:GXGXR, GIPEPXX:VPE:RSVK-AA¹⁷-AKV:KEVQV:TVE:SXAXR, SIPKAXX:VPT:RSVK-AA¹⁷-AKV:KEVQV:VVE:GXGXR, HVTKPTX:APT:RSVK-AA¹⁷-AKV:KEVQV:VVR:SXGXH, YVPKPXX:APT: RSVK-AA¹⁷-AKV:KEVQV:VVR:SXGXH, TVPKPXX:APT: RSVK-AA¹⁷-AKV:KEVQV:VVR:AXGXH, AVPKAXX:APT:RSVK-AA¹⁷-AKV:KEVQV:VVK:AXGXH, KVGKAXX:VPT:RSVK-AA¹⁷-AKV:KEVQV:VAE:XGXR, KASKAXX:VPT: RSVK-AA¹⁷-AKV:KEVQV:AVS:EXGXR, GSAGPXX:TPT:RSVK-AA¹⁷-AKV:KEVQV:VVD:RXGXS, AAPASXX:VPA:RSVK-AA¹⁷-AKV:KEVQV:VVE:AXGXR, STPPTXX:VPT:RSVK-AA¹⁷-AKV:KEVQV:VVE:SXGXR, HVPKPXX:APT:RSVK-AA¹⁷-AKV:KEVQV:VVR:SXGXH, RVPSTXX:APV:RSVK-AA¹⁷-AKV:KEVQV:VEE:XGXL, ASAAPXX:VPQ:RSVK-AA¹⁷-AKV:KEVQV:VRS:XKXS, ASASPXX:VSQ:RSVK-AA¹⁷-AKV:KEVQV:VKS:XKXS, ASASPXX:VPQ:RSVK-AA¹⁷-AKV:KEVQV:VKS:XKXS, NDEGLEX:VPT: RSVK-AA¹⁷-AKV:KEVQV:QHN:KXEXR, NDEGLEX:VPT:RSVK-AA¹⁷-AKV:KEVQV:EHS:QXEXR, RNVQXRP:TQV: RSVK-AA¹⁷-AKV:KEVQV:EDH:LAXKXE, SSVKXQP:TQV:RPVQ-AA¹⁷-RKI:KKATV:EDH:LEXAXA, KIPKAXX:VPT:RPVQ-AA¹⁷-RKI:KKATV:VVE:GXGXR, GIPEPXX:VPE:RPVQ-AA¹⁷-RKI:KKATV:TVE:SXAXR, SIPKAXX:VPT:RPVQ-AA¹⁷-RKI:KKATV:VVE:GXGXR, HVTKPTX:APT:RPVQ-AA¹⁷-RKI:KKATV:VVR:SXGXH, YVPKPXX:APT:RPVQ-AA¹⁷-RKI:KKATV:VVR:SXGXH, TVPKPXX:APT:RPVQ-AA¹⁷-RKI:KKATV:VVR:AXGXH, AVPKAXX:APT:RPVQ-AA¹⁷-RKI:KKATV:VVK:AXGXH, KVGKAXX:VPT:RPVQ-AA¹⁷-RKI:KKATV:VAE:XGXR, KASKAXX:VPT:RPVQ-AA¹⁷-RKI:KKATV:AVS:EXGXR, GSAGPXX:TPT:RPVQ-AA¹⁷-RKI:KKATV:VVD:RXGXS, AAPASXX:VPA:RPVQ-AA¹⁷-RKI:KKATV:VVE:AXGXR, STPPTXX:VPT:RPVQ-AA¹⁷-RKI:KKATV:VVE:SXGXR, HVPKPXX:APT:RPVQ-AA¹⁷-RKI:KKATV:VVR:SXGXH, RVPSTXX:APV:RPVQ-AA¹⁷-RKI:KKATV:VEE:XGXL, ASAAPXX:VPQ:RPVQ-AA¹⁷-RKI:KKATV:VRS:XKXS, ASASPXX:VSQ:RPVQ-AA¹⁷-RKI:KKATV:VKS:XKXS, ASASPXX:VPQ:RPVQ-AA¹⁷-RKI:KKATV:VKS:XKXS, NDEGLEX:VPT:RPVQ-AA¹⁷-RKI:KKATV:QHN:KXEXR, NDEGLEX:VPT:RPVQ-AA¹⁷-RKI:KKATV:EHS:QXEXR and SSVKXQP:SRV:RPVQ-AA¹⁷-RKI:KKATV:EEH:LEXAXA; and wherein AA¹⁷ is selected from the group consisting of G, A, V, L, I, P, F, M, W, T and S (in particular is selected from the group consisting of M, I, L, V and T).

[0435] In particular, in certain embodiments, the hexaplet PEP7:PEP5:PEP1:PEP2:PEP6:PEP8 is selected from the group consisting of GIPEPXX:VPTKM:SAIS:LKNYQ:NMVVE:SXAXR, SIPKAXX:VPTEL:SAIS:LKNYQ:EMVVE:GXGXR, HVTKPTX:VPTKL:SAIS:LKNYQ:NMVVE:SXGXH, YVPKPXX:VPTKL:SAIS:LKNYQ:NMVVE:SXGXH, TVPKPXX:VPTQL:SAIS:LKNYQ:NMVVE:AXGXH, AVPKAXX:VPTKL:SAIS:LKNYQ:NMVVE:AXGXH, KVGKAXX:VPTKL:SAIS:LKNYQ:EGMSVVE:XGXR, KASKAXX:VPTKL:SAIS:LKNYQ:GMVVE:EXGXR, GSAGPXX:VPTKM:SAIS:LKNYQ:GMVVE:RXGXS, AAPASXX:VPTRL:SAIS:LKNYQ:DMVVE:AXGXR, STPPTXX:VPTRL:SAIS:LKNYQ:DMVVE:SXGXR, HVPKPXX:VPTKL:SAIS:LKNYQ:NMVVE:SXGXH, RVPSTXX:VPTKT:SAIS:LKNYQ:MIVVE:XGXL, ASAAPXX:VPTAL:SAIS:LKNYQ:MIVVE:XKXS, ASASPXX:VPTDL:SAIS:LKNYQ:MIVVE:XKXS, ASASPXX:VPTDL:SAIS:LKNYQ:MVVVE:XKXS, NDEGLEX:VPTEE:SAIS:LKNYQ:FLVVE:KXEXR, NDEGLEX:VPTGQ:SAIS:LKNYQ:LEVVE:QXEXR, SSVKXQP:VPTHH:SAIS:LKNYQ:RLVVE:LEXAXA, RNVQXRP:VPTQL:SAIS:LKNYQ:TLVVE:LAXKXE, GIPEPXX:VPEKM:SAIS:LKNYQ:NMTVE:SXAXR, HVTKPTX:APTKL:SAIS:LKNYQ:NMVVR:SXGXH, YVPKPXX:APTKL:SAIS:LKNYQ:NMVVR:SXGXH, TVPKPXX:APTQL:SAIS:LKNYQ:NMVVR:AXGXH, AVPKAXX:APTKL:SAIS:LKNYQ:NMVVK:AXGXH, KVGKAXX:VPTKL:SAIS:LKNYQ:EGMSVAE:XGXR, KASKAXX:VPTKL:SAIS:LKNYQ:GMAVS:EXGXR, GSAGPXX:TPTKM:SAIS:LKNYQ:GMVVD:RXGXS, AAPASXX:VPARL:SAIS:LKNYQ:DMVVE:AXGXR, HVPKPXX:APTKL:SAIS:LKNYQ:NMVVR:SXGXH, RVPSTXX:APVKT:SAIS:LKNYQ:MIVEE:XGXL, ASAAPXX:VPQAL:SAIS:LKNYQ:MIVRS:XKXS, ASASPXX:VSQDL:SAIS:LKNYQ:MIVKS:XKXS, ASASPXX:VPQDL:SAIS:LKNYQ:MVVKS:XKXS, NDEGLEX:VPTEE:SAIS:LKNYQ:FLQHN:KXEXR, NDEGLEX:VPTGQ:SAIS:LKNYQ:LEEHS:QXEXR, SSVKXQP:SRVHH:SAIS:LKNYQ:RLEEH:LEXAXA, RNVQXRP:TQVQL:SAIS:LKNYQ:TLEDH:LAXKXE, KIPKAXX:VPEEL:SSLS:LKVYP:DMTVE:GXGXR, SIPKAXX:VPEEL:SSLS:LKVYP:EMTVE:GXGXR, HVTKPTX:VPEKL:SSLS:LKVYP:NMTVE:SXGXH, YVPKPXX:VPEKL:SSLS:LKVYP:NMTVE:SXGXH, TVPKPXX:VPEQL:SSLS:LKVYP:NMTVE:AXGXH, AVPKAXX:VPEKL:SSLS:LKVYP:NMTVE:AXGXH, KVGKAXX:VPEKL:SSLS:LKVYP:EGMSTVE:XGXR, KASKAXX:VPEKL:SSLS:LKVYP:GMTVE:EXGXR, GSAGPXX:VPEKM:SSLS:LKVYP:GMTVE:RXGXS, AAPASXX:VPERL:SSLS:LKVYP:DMTVE:AXGXR, STPPTXX:VPERL:SSLS:LKVYP:DMTVE:SXGXR, HVPKPXX:VPEKL:SSLS:LKVYP:NMTVE:SXGXH, RVPSTXX:VPEKT:SSLS:LKVYP:MITVE:XGXL, ASAAPXX:VPEAL:SSLS:LKVYP:MITVE:XKXS, ASASPXX:VPEDL:SSLS:LKVYP:MITVE:XKXS, ASASPXX:VPEDL:SSLS:LKVYP:MVTVE:XKXS, NDEGLEX:VPEEE:SSLS:LKVYP:FLTVE:KXEXR, NDEGLEX:VPEGQ:SSLS:LKVYP:LETVE:QXEXR, SSVKXQP:VPEHH:SSLS:LKVYP:RLTVE:LEXAXA, RNVQXRP:VPEQL:SSLS:LKVYP:TLTVE:LAXKXE, KIPKAXX:VPTEL:SSLS:LKVYP:DMVVE:GXGXR, SIPKAXX:VPTEL:SSLS:LKVYP:EMVVE:GXGXR, HVTKPTX:APTKL:SSLS:LKVYP:NMVVR:SXGXH, YVPKPXX:APTKL:SSLS:LKVYP:NMVVR:SXGXH, TVPKPXX:APTQL:SSLS:LKVYP:NMVVR:AXGXH, AVPKAXX:APTKL:SSLS:LKVYP:NMVVK:AXGXH, KVGKAXX:VPTKL:SSLS:LKVYP:EGMSVAE:XGXR, KASKAXX:VPTKL:SSLS:LKVYP:GMAVS:EXGXR, GSAGPXX:TPTKM:SSLS:LKVYP:GMVVD:RXGXS, AAPASXX:VPARL:SSLS:LKVYP:DMVVE:AXGXR, STPPTXX:VPTRL:SSLS:LKVYP:DMVVE:SXGXR, HVPKPXX:APTKL:SSLS:LKVYP:NMVVR:SXGXH, RVPSTXX:APVKT:SSLS:LKVYP:MIVEE:XGXL, ASAAPXX:VPQAL:SSLS:LKVYP:MIVRS:XKXS, ASASPXX:VSQDL:SSLS:LKVYP:MIVKS:XKXS, ASASPXX:VPQDL:SSLS:LKVYP:MVVKS:XKXS, NDEGLEX:VPTEE:SSLS:LKVYP:FLQHN:KXEXR, NDEGLEX:VPTGQ:SSLS:LKVYP:LEEHS:QXEXR, SSVKXQP:SRVHH:SSLS:LKVYP:RLEEH:LEXAXA, RNVQXRP:TQVQL:SSLS:LKVYP:TLEDH:LAXKXE, KIPKAXX:VPTEL:SAIS:LKNYQ:DMVVE:GXGXR, KIPKAXX:APTEL:NAIS:LKKYR:DMVVR:GXGXR, GIPEPXX:APTKM:NAIS:LKKYR:NMVVR:SXAXR, SIPKAXX:APTEL:NAIS:LKKYR:EMVVR:GXGXR, YVPKPXX:APTKL:NAIS:LKKYR:NMVVR:SXGXH, TVPKPXX:APTQL:NAIS:LKKYR:NMVVR:AXGXH, AVPKAXX:APTKL:NAIS:LKKYR:NMVVR:AXGXH, KVGKAXX:APTKL:NAIS:LKKYR:EGMSVVR:XGXR, KASKAXX:APTKL:NAIS:LKKYR:GMVVR:EXGXR, GSAGPXX:APTKM:NAIS:LKKYR:GMVVR:RXGXS, AAPASXX:APTRL:NAIS:LKKYR:DMVVR:AXGXR, STPPTXX:APTRL:NAIS:LKKYR:DMVVR:SXGXR, HVPKPXX:APTKL:NAIS:LKKYR:NMVVR:SXGXH, RVPSTXX:APTKT:NAIS:LKKYR:MIVVR:XGXL, ASAAPXX:APTAL:NAIS:LKKYR:MIVVR:XKXS, ASASPXX:APTDL:NAIS:LKKYR:MIVVR:XKXS, ASASPXX:APTDL:NAIS:LKKYR:MVVVR:XKXS, NDEGLEX:APTEE:NAIS:LKKYR:FLVVR:KXEXR, NDEGLEX:APTGQ:NAIS:LKKYR:LEVVR:QXEXR, SSVKXQP:APTHH:NAIS:LKKYR:RLVVR:LEXAXA, RNVQXRP:APTQL:NAIS:LKKYR:TLVVR:LAXKXE, KIPKAXX:VPTEL:NAIS:LKKYR:DMVVE:GXGXR, GIPEPXX:VPEKM:NAIS:LKKYR:NMTVE:SXAXR, SIPKAXX:VPTEL:NAIS:LKKYR:EMVVE:GXGXR, AVPKAXX:APTKL:NAIS:LKKYR:NMVVK:AXGXH, KVGKAXX:VPTKL:NAIS:LKKYR:EGMSVAE:XGXR, KASKAXX:VPTKL:NAIS:LKKYR:GMAVS:EXGXR, GSAGPXX:TPTKM:NAIS:LKKYR:GMVVD:RXGXS, AAPASXX:VPARL:NAIS:LKKYR:DMVVE:AXGXR, STPPTXX:VPTRL:NAIS:LKKYR:DMVVE:SXGXR, RVPSTXX:APVKT:NAIS:LKKYR:MIVEE:XGXL, ASAAPXX:VPQAL:NAIS:LKKYR:MIVRS:XKXS, ASASPXX:VSQDL:NAIS:LKKYR:MIVKS:XKXS, ASASPXX:VPQDL:NAIS:LKKYR:MVVKS:XKXS, NDEGLEX:VPTEE:NAIS:LKKYR:FLQHN:KXEXR, NDEGLEX:VPTGQ:NAIS:LKKYR:LEEHS:QXEXR, SSVKXQP:SRVHH:NAIS:LKKYR:RLEEH:LEXAXA, RNVQXRP:TQVQL:NAIS:LKKYR:TLEDH:LAXKXE, HVTKPTX:APTKL:NAIS:LKKYR:NMVVR:SXGXH, KIPKAXX:APTEL:SATS:LRKHR:DMVVK:GXGXR, GIPEPXX:APTKM:SATS:LRKHR:NMVVK:SXAXR, SIPKAXX:APTEL:SATS:LRKHR:EMVVK:GXGXR, HVTKPTX:APTKL:SATS:LRKHR:NMVVK:SXGXH, YVPKPXX:APTKL:SATS:LRKHR:NMVVK:SXGXH, TVPKPXX:APTQL:SATS:LRKHR:NMVVK:AXGXH, KVGKAXX:APTKL:SATS:LRKHR:EGMSVVK:XGXR, KASKAXX:APTKL:SATS:LRKHR:GMVVK:EXGXR, GSAGPXX:APTKM:SATS:LRKHR:GMVVK:RXGXS, AAPASXX:APTRL:SATS:LRKHR:DMVVK:AXGXR, STPPTXX:APTRL:SATS:LRKHR:DMVVK:SXGXR, HVPKPXX:APTKL:SATS:LRKHR:NMVVK:SXGXH, RVPSTXX:APTKT:SATS:LRKHR:MIVVK:XGXL, ASAAPXX:APTAL:SATS:LRKHR:MIVVK:XKXS, ASASPXX:APTDL:SATS:LRKHR:MIVVK:XKXS, ASASPXX:APTDL:SATS:LRKHR:MVVVK:XKXS, NDEGLEX:APTEE:SATS:LRKHR:FLVVK:KXEXR, NDEGLEX:APTGQ:SATS:LRKHR:LEVVK:QXEXR, SSVKXQP:APTHH:SATS:LRKHR:RLVVK:LEXAXA, RNVQXRP:APTQL:SATS:LRKHR:TLVVK:LAXKXE, KIPKAXX:VPTEL:SATS:LRKHR:DMVVE:GXGXR, GIPEPXX:VPEKM:SATS:LRKHR:NMTVE:SXAXR, SIPKAXX:VPTEL:SATS:LRKHR:EMVVE:GXGXR, HVTKPTX:APTKL:SATS:LRKHR:NMVVR:SXGXH, YVPKPXX:APTKL:SATS:LRKHR:NMVVR:SXGXH, TVPKPXX:APTQL:SATS:LRKHR:NMVVR:AXGXH, KVGKAXX:VPTKL:SATS:LRKHR:EGMSVAE:XGXR, KASKAXX:VPTKL:SATS:LRKHR:GMAVS:EXGXR, GSAGPXX:TPTKM:SATS:LRKHR:GMVVD:RXGXS, AAPASXX:VPARL:SATS:LRKHR:DMVVE:AXGXR, STPPTXX:VPTRL:SATS:LRKHR:DMVVE:SXGXR, HVPKPXX:APTKL:SATS:LRKHR:NMVVR:SXGXH, RVPSTXX:APVKT:SATS:LRKHR:MIVEE:XGXL, ASAAPXX:VPQAL:SATS:LRKHR:MIVRS:XKXS, ASASPXX:VSQDL:SATS:LRKHR:MIVKS:XKXS, ASASPXX:VPQDL:SATS:LRKHR:MVVKS:XKXS, NDEGLEX:VPTEE:SATS:LRKHR:FLQHN:KXEXR, NDEGLEX:VPTGQ:SATS:LRKHR:LEEHS:QXEXR, SSVKXQP:SRVHH:SATS:LRKHR:RLEEH:LEXAXA, RNVQXRP:TQVQL:SATS:LRKHR:TLEDH:LAXKXE, KIPKAXX:VPTEL:SPIS:LKYHY:DMVAE:GXGXR, GIPEPXX:VPTKM:SPIS:LKYHY:NMVAE:SXAXR, SIPKAXX:VPTEL:SPIS:LKYHY:EMVAE:GXGXR, HVTKPTX:VPTKL:SPIS:LKYHY:NMVAE:SXGXH, YVPKPXX:VPTKL:SPIS:LKYHY:NMVAE:SXGXH, TVPKPXX:VPTQL:SPIS:LKYHY:NMVAE:AXGXH, AVPKAXX:VPTKL:SPIS:LKYHY:NMVAE:AXGXH, KASKAXX:VPTKL:SPIS:LKYHY:GMVAE:EXGXR, GSAGPXX:VPTKM:SPIS:LKYHY:GMVAE:RXGXS, AAPASXX:VPTRL:SPIS:LKYHY:DMVAE:AXGXR, STPPTXX:VPTRL:SPIS:LKYHY:DMVAE:SXGXR, HVPKPXX:VPTKL:SPIS:LKYHY:NMVAE:SXGXH, RVPSTXX:VPTKT:SPIS:LKYHY:MIVAE:XGXL, ASAAPXX:VPTAL:SPIS:LKYHY:MIVAE:XKXS, ASASPXX:VPTDL:SPIS:LKYHY:MIVAE:XKXS, ASASPXX:VPTDL:SPIS:LKYHY:MVVAE:XKXS, NDEGLEX:VPTEE:SPIS:LKYHY:FLVAE:KXEXR, NDEGLEX:VPTGQ:SPIS:LKYHY:LEVAE:QXEXR, SSVKXQP:VPTHH:SPIS:LKYHY:RLVAE:LEXAXA, RNVQXRP:VPTQL:SPIS:LKYHY:TLVAE:LAXKXE, KIPKAXX:VPTEL:SPIS:LKYHY:DMVVE:GXGXR, GIPEPXX:VPEKM:SPIS:LKYHY:NMTVE:SXAXR, SIPKAXX:VPTEL:SPIS:LKYHY:EMVVE:GXGXR, HVTKPTX:APTKL:SPIS:LKYHY:NMVVR:SXGXH, YVPKPXX:APTKL:SPIS:LKYHY:NMVVR:SXGXH, TVPKPXX:APTQL:SPIS:LKYHY:NMVVR:AXGXH, AVPKAXX:APTKL:SPIS:LKYHY:NMVVK:AXGXH, KASKAXX:VPTKL:SPIS:LKYHY:GMAVS:EXGXR, GSAGPXX:TPTKM:SPIS:LKYHY:GMVVD:RXGXS, AAPASXX:VPARL:SPIS:LKYHY:DMVVE:AXGXR, STPPTXX:VPTRL:SPIS:LKYHY:DMVVE:SXGXR, HVPKPXX:APTKL:SPIS:LKYHY:NMVVR:SXGXH, RVPSTXX:APVKT:SPIS:LKYHY:MIVEE:XGXL, ASAAPXX:VPQAL:SPIS:LKYHY:MIVRS:XKXS, ASASPXX:VSQDL:SPIS:LKYHY:MIVKS:XKXS, ASASPXX:VPQDL:SPIS:LKYHY:MVVKS:XKXS, NDEGLEX:VPTEE:SPIS:LKYHY:FLQHN:KXEXR, NDEGLEX:VPTGQ:SPIS:LKYHY:LEEHS:QXEXR, SSVKXQP:SRVHH:SPIS:LKYHY:RLEEH:LEXAXA, RNVQXRP:TQVQL:SPIS:LKYHY:TLEDH:LAXKXE, KIPKAXX:VPTEL:EPIS:KFKYE:DMAVS:GXGXR, GIPEPXX:VPTKM:EPIS:KFKYE:NMAVS:SXAXR, SIPKAXX:VPTEL:EPIS:KFKYE:EMAVS:GXGXR, HVTKPTX:VPTKL:EPIS:KFKYE:NMAVS:SXGXH, YVPKPXX:VPTKL:EPIS:KFKYE:NMAVS:SXGXH, TVPKPXX:VPTQL:EPIS:KFKYE:NMAVS:AXGXH, AVPKAXX:VPTKL:EPIS:KFKYE:NMAVS:AXGXH, KVGKAXX:VPTKL:EPIS:KFKYE:EGMSAVS:XGXR, GSAGPXX:VPTKM:EPIS:KFKYE:GMAVS:RXGXS, AAPASXX:VPTRL:EPIS:KFKYE:DMAVS:AXGXR, STPPTXX:VPTRL:EPIS:KFKYE:DMAVS:SXGXR, HVPKPXX:VPTKL:EPIS:KFKYE:NMAVS:SXGXH, RVPSTXX:VPTKT:EPIS:KFKYE:MIAVS:XGXL, ASAAPXX:VPTAL:EPIS:KFKYE:MIAVS:XKXS, ASASPXX:VPTDL:EPIS:KFKYE:MIAVS:XKXS, ASASPXX:VPTDL:EPIS:KFKYE:MVAVS:XKXS, NDEGLEX:VPTEE:EPIS:KFKYE:FLAVS:KXEXR, NDEGLEX:VPTGQ:EPIS:KFKYE:LEAVS:QXEXR, SSVKXQP:VPTHH:EPIS:KFKYE:RLAVS:LEXAXA, RNVQXRP:VPTQL:EPIS:KFKYE:TLAVS:LAXKXE, KIPKAXX:VPTEL:EPIS:KFKYE:DMVVE:GXGXR, GIPEPXX:VPEKM:EPIS:KFKYE:NMTVE:SXAXR, SIPKAXX:VPTEL:EPIS:KFKYE:EMVVE:GXGXR, HVTKPTX:APTKL:EPIS:KFKYE:NMVVR:SXGXH, YVPKPXX:APTKL:EPIS:KFKYE:NMVVR:SXGXH, TVPKPXX:APTQL:EPIS:KFKYE:NMVVR:AXGXH, AVPKAXX:APTKL:EPIS:KFKYE:NMVVK:AXGXH, KVGKAXX:VPTKL:EPIS:KFKYE:EGMSVAE:XGXR, GSAGPXX:TPTKM:EPIS:KFKYE:GMVVD:RXGXS, AAPASXX:VPARL:EPIS:KFKYE:DMVVE:AXGXR, STPPTXX:VPTRL:EPIS:KFKYE:DMVVE:SXGXR, HVPKPXX:APTKL:EPIS:KFKYE:NMVVR:SXGXH, RVPSTXX:APVKT:EPIS:KFKYE:MIVEE:XGXL, ASAAPXX:VPQAL:EPIS:KFKYE:MIVRS:XKXS, ASASPXX:VSQDL:EPIS:KFKYE:MIVKS:XKXS, ASASPXX:VPQDL:EPIS:KFKYE:MVVKS:XKXS, NDEGLEX:VPTEE:EPIS:KFKYE:FLQHN:KXEXR, NDEGLEX:VPTGQ:EPIS:KFKYE:LEEHS:QXEXR, SSVKXQP:SRVHH:EPIS:KFKYE:RLEEH:LEXAXA, RNVQXRP:TQVQL:EPIS:KFKYE:TLEDH:LAXKXE, KIPKAXX:TPTEL:SPIN:YGKIP:DMVVD:GXGXR, GIPEPXX:TPTKM:SPIN:YGKIP:NMVVD:SXAXR, SIPKAXX:TPTEL:SPIN:YGKIP:EMVVD:GXGXR, HVTKPTX:TPTKL:SPIN:YGKIP:NMVVD:SXGXH, YVPKPXX:TPTKL:SPIN:YGKIP:NMVVD:SXGXH, TVPKPXX:TPTQL:SPIN:YGKIP:NMVVD:AXGXH, AVPKAXX:TPTKL:SPIN:YGKIP:NMVVD:AXGXH, KVGKAXX:TPTKL:SPIN:YGKIP:EGMSVVD:XGXR, KASKAXX:TPTKL:SPIN:YGKIP:GMVVD:EXGXR, AAPASXX:TPTRL:SPIN:YGKIP:DMVVD:AXGXR, STPPTXX:TPTRL:SPIN:YGKIP:DMVVD:SXGXR, HVPKPXX:TPTKL:SPIN:YGKIP:NMVVD:SXGXH, RVPSTXX:TPTKT:SPIN:YGKIP:MIVVD:XGXL, ASAAPXX:TPTAL:SPIN:YGKIP:MIVVD:XKXS, ASASPXX:TPTDL:SPIN:YGKIP:MIVVD:XKXS, ASASPXX:TPTDL:SPIN:YGKIP:MVVVD:XKXS, NDEGLEX:TPTEE:SPIN:YGKIP:FLVVD:KXEXR, NDEGLEX:TPTGQ:SPIN:YGKIP:LEVVD:QXEXR, SSVKXQP:TPTHH:SPIN:YGKIP:RLVVD:LEXAXA, RNVQXRP:TPTQL:SPIN:YGKIP:TLVVD:LAXKXE, KIPKAXX:VPTEL:SPIN:YGKIP:DMVVE:GXGXR, GIPEPXX:VPEKM:SPIN:YGKIP:NMTVE:SXAXR, SIPKAXX:VPTEL:SPIN:YGKIP:EMVVE:GXGXR, HVTKPTX:APTKL:SPIN:YGKIP:NMVVR:SXGXH, YVPKPXX:APTKL:SPIN:YGKIP:NMVVR:SXGXH, TVPKPXX:APTQL:SPIN:YGKIP:NMVVR:AXGXH, AVPKAXX:APTKL:SPIN:YGKIP:NMVVK:AXGXH, KVGKAXX:VPTKL:SPIN:YGKIP:EGMSVAE:XGXR, KASKAXX:VPTKL:SPIN:YGKIP:GMAVS:EXGXR, AAPASXX:VPARL:SPIN:YGKIP:DMVVE:AXGXR, STPPTXX:VPTRL:SPIN:YGKIP:DMVVE:SXGXR, HVPKPXX:APTKL:SPIN:YGKIP:NMVVR:SXGXH, RVPSTXX:APVKT:SPIN:YGKIP:MIVEE:XGXL, ASAAPXX:VPQAL:SPIN:YGKIP:MIVRS:XKXS, ASASPXX:VSQDL:SPIN:YGKIP:MIVKS:XKXS, ASASPXX:VPQDL:SPIN:YGKIP:MVVKS:XKXS, NDEGLEX:VPTEE:SPIN:YGKIP:FLQHN:KXEXR, NDEGLEX:VPTGQ:SPIN:YGKIP:LEEHS:QXEXR, SSVKXQP:SRVHH:SPIN:YGKIP:RLEEH:LEXAXA, RNVQXRP:TQVQL:SPIN:YGKIP:TLEDH:LAXKXE, KIPKAXX:VPAEL:SPIS:YKQYE:DMVVE:GXGXR, GIPEPXX:VPAKM:SPIS:YKQYE:NMVVE:SXAXR, SIPKAXX:VPAEL:SPIS:YKQYE:EMVVE:GXGXR, HVTKPTX:VPAKL:SPIS:YKQYE:NMVVE:SXGXH, YVPKPXX:VPAKL:SPIS:YKQYE:NMVVE:SXGXH, TVPKPXX:VPAQL:SPIS:YKQYE:NMVVE:AXGXH, AVPKAXX:VPAKL:SPIS:YKQYE:NMVVE:AXGXH, KVGKAXX:VPAKL:SPIS:YKQYE:EGMSVVE:XGXR, KASKAXX:VPAKL:SPIS:YKQYE:GMVVE:EXGXR, GSAGPXX:VPAKM:SPIS:YKQYE:GMVVE:RXGXS, STPPTXX:VPARL:SPIS:YKQYE:DMVVE:SXGXR, HVPKPXX:VPAKL:SPIS:YKQYE:NMVVE:SXGXH, RVPSTXX:VPAKT:SPIS:YKQYE:MIVVE:XGXL, ASAAPXX:VPAAL:SPIS:YKQYE:MIVVE:XKXS, ASASPXX:VPADL:SPIS:YKQYE:MIVVE:XKXS, ASASPXX:VPADL:SPIS:YKQYE:MVVVE:XKXS, NDEGLEX:VPAEE:SPIS:YKQYE:FLVVE:KXEXR, NDEGLEX:VPAGQ:SPIS:YKQYE:LEVVE:QXEXR, SSVKXQP:VPAHH:SPIS:YKQYE:RLVVE:LEXAXA, RNVQXRP:VPAQL:SPIS:YKQYE:TLVVE:LAXKXE, KIPKAXX:VPTEL:SPIS:YKQYE:DMVVE:GXGXR, GIPEPXX:VPEKM:SPIS:YKQYE:NMTVE:SXAXR, SIPKAXX:VPTEL:SPIS:YKQYE:EMVVE:GXGXR, HVTKPTX:APTKL:SPIS:YKQYE:NMVVR:SXGXH, YVPKPXX:APTKL:SPIS:YKQYE:NMVVR:SXGXH, TVPKPXX:APTQL:SPIS:YKQYE:NMVVR:AXGXH, AVPKAXX:APTKL:SPIS:YKQYE:NMVVK:AXGXH, KVGKAXX:VPTKL:SPIS:YKQYE:EGMSVAE:XGXR, KASKAXX:VPTKL:SPIS:YKQYE:GMAVS:EXGXR, GSAGPXX:TPTKM:SPIS:YKQYE:GMVVD:RXGXS, STPPTXX:VPTRL:SPIS:YKQYE:DMVVE:SXGXR, HVPKPXX:APTKL:SPIS:YKQYE:NMVVR:SXGXH, RVPSTXX:APVKT:SPIS:YKQYE:MIVEE:XGXL, ASAAPXX:VPQAL:SPIS:YKQYE:MIVRS:XKXS, ASASPXX:VSQDL:SPIS:YKQYE:MIVKS:XKXS, ASASPXX:VPQDL:SPIS:YKQYE:MVVKS:XKXS, NDEGLEX:VPTEE:SPIS:YKQYE:FLQHN:KXEXR, NDEGLEX:VPTGQ:SPIS:YKQYE:LEEHS:QXEXR, SSVKXQP:SRVHH:SPIS:YKQYE:RLEEH:LEXAXA, RNVQXRP:TQVQL:SPIS:YKQYE:TLEDH:LAXKXE, GIPEPXX:VPTKM:SPIS:YKQYE:NMVVE:SXAXR, HVTKPTX:VPTKL:SPIS:YKQYE:NMVVE:SXGXH, YVPKPXX:VPTKL:SPIS:YKQYE:NMVVE:SXGXH, TVPKPXX:VPTQL:SPIS:YKQYE:NMVVE:AXGXH, AVPKAXX:VPTKL:SPIS:YKQYE:NMVVE:AXGXH, KVGKAXX:VPTKL:SPIS:YKQYE:EGMSVVE:XGXR, KASKAXX:VPTKL:SPIS:YKQYE:GMVVE:EXGXR, GSAGPXX:VPTKM:SPIS:YKQYE:GMVVE:RXGXS, AAPASXX:VPTRL:SPIS:YKQYE:DMVVE:AXGXR, HVPKPXX:VPTKL:SPIS:YKQYE:NMVVE:SXGXH, RVPSTXX:VPTKT:SPIS:YKQYE:MIVVE:XGXL, ASAAPXX:VPTAL:SPIS:YKQYE:MIVVE:XKXS, ASASPXX:VPTDL:SPIS:YKQYE:MIVVE:XKXS, ASASPXX:VPTDL:SPIS:YKQYE:MVVVE:XKXS, NDEGLEX:VPTEE:SPIS:YKQYE:FLVVE:KXEXR, NDEGLEX:VPTGQ:SPIS:YKQYE:LEVVE:QXEXR, SSVKXQP:VPTHH:SPIS:YKQYE:RLVVE:LEXAXA, RNVQXRP:VPTQL:SPIS:YKQYE:TLVVE:LAXKXE, AAPASXX:VPARL:SPIS:YKQYE:DMVVE:AXGXR, KIPKAXX:APVEL:KPLS:DHHKD:DMVEE:GXGXR, GIPEPXX:APVKM:KPLS:DHHKD:NMVEE:SXAXR, SIPKAXX:APVEL:KPLS:DHHKD:EMVEE:GXGXR, HVTKPTX:APVKL:KPLS:DHHKD:NMVEE:SXGXH, YVPKPXX:APVKL:KPLS:DHHKD:NMVEE:SXGXH, TVPKPXX:APVQL:KPLS:DHHKD:NMVEE:AXGXH, AVPKAXX:APVKL:KPLS:DHHKD:NMVEE:AXGXH, KVGKAXX:APVKL:KPLS:DHHKD:EGMSVEE:XGXR, KASKAXX:APVKL:KPLS:DHHKD:GMVEE:EXGXR, GSAGPXX:APVKM:KPLS:DHHKD:GMVEE:RXGXS, AAPASXX:APVRL:KPLS:DHHKD:DMVEE:AXGXR, STPPTXX:APVRL:KPLS:DHHKD:DMVEE:SXGXR, HVPKPXX:APVKL:KPLS:DHHKD:NMVEE:SXGXH, ASAAPXX:APVAL:KPLS:DHHKD:MIVEE:XKXS, ASASPXX:APVDL:KPLS:DHHKD:MIVEE:XKXS, ASASPXX:APVDL:KPLS:DHHKD:MVVEE:XKXS, NDEGLEX:APVEE:KPLS:DHHKD:FLVEE:KXEXR, NDEGLEX:APVGQ:KPLS:DHHKD:LEVEE:QXEXR, SSVKXQP:APVHH:KPLS:DHHKD:RLVEE:LEXAXA, RNVQXRP:APVQL:KPLS:DHHKD:TLVEE:LAXKXE, KIPKAXX:VPTEL:KPLS:DHHKD:DMVVE:GXGXR, GIPEPXX:VPEKM:KPLS:DHHKD:NMTVE:SXAXR, SIPKAXX:VPTEL:KPLS:DHHKD:EMVVE:GXGXR, HVTKPTX:APTKL:KPLS:DHHKD:NMVVR:SXGXH, YVPKPXX:APTKL:KPLS:DHHKD:NMVVR:SXGXH, TVPKPXX:APTQL:KPLS:DHHKD:NMVVR:AXGXH, AVPKAXX:APTKL:KPLS:DHHKD:NMVVK:AXGXH, KVGKAXX:VPTKL:KPLS:DHHKD:EGMSVAE:XGXR, KASKAXX:VPTKL:KPLS:DHHKD:GMAVS:EXGXR, GSAGPXX:TPTKM:KPLS:DHHKD:GMVVD:RXGXS, AAPASXX:VPARL:KPLS:DHHKD:DMVVE:AXGXR, STPPTXX:VPTRL:KPLS:DHHKD:DMVVE:SXGXR, HVPKPXX:APTKL:KPLS:DHHKD:NMVVR:SXGXH, ASAAPXX:VPQAL:KPLS:DHHKD:MIVRS:XKXS, ASASPXX:VSQDL:KPLS:DHHKD:MIVKS:XKXS, ASASPXX:VPQDL:KPLS:DHHKD:MVVKS:XKXS, NDEGLEX:VPTEE:KPLS:DHHKD:FLQHN:KXEXR, NDEGLEX:VPTGQ:KPLS:DHHKD:LEEHS:QXEXR, SSVKXQP:SRVHH:KPLS:DHHKD:RLEEH:LEXAXA, RNVQXRP:TQVQL:KPLS:DHHKD:TLEDH:LAXKXE, KIPKAXX:VPQEL:EPLP:EQLSN:DMVRS:GXGXR, GIPEPXX:VPQKM:EPLP:EQLSN:NMVRS:SXAXR, SIPKAXX:VPQEL:EPLP:EQLSN:EMVRS:GXGXR, HVTKPTX:VPQKL:EPLP:EQLSN:NMVRS:SXGXH, YVPKPXX:VPQKL:EPLP:EQLSN:NMVRS:SXGXH, TVPKPXX:VPQQL:EPLP:EQLSN:NMVRS:AXGXH, AVPKAXX:VPQKL:EPLP:EQLSN:NMVRS:AXGXH, KVGKAXX:VPQKL:EPLP:EQLSN:EGMSVRS:XGXR, KASKAXX:VPQKL:EPLP:EQLSN:GMVRS:EXGXR, GSAGPXX:VPQKM:EPLP:EQLSN:GMVRS:RXGXS, AAPASXX:VPQRL:EPLP:EQLSN:DMVRS:AXGXR, STPPTXX:VPQRL:EPLP:EQLSN:DMVRS:SXGXR, HVPKPXX:VPQKL:EPLP:EQLSN:NMVRS:SXGXH, RVPSTXX:VPQKT:EPLP:EQLSN:MIVRS:XGXL, ASASPXX:VPQDL:EPLP:EQLSN:MIVRS:XKXS, ASASPXX:VPQDL:EPLP:EQLSN:MVVRS:XKXS, NDEGLEX:VPQEE:EPLP:EQLSN:FLVRS:KXEXR, NDEGLEX:VPQGQ:EPLP:EQLSN:LEVRS:QXEXR, SSVKXQP:VPQHH:EPLP:EQLSN:RLVRS:LEXAXA, RNVQXRP:VPQQL:EPLP:EQLSN:TLVRS:LAXKXE, KIPKAXX:VPTEL:EPLP:EQLSN:DMVVE:GXGXR, GIPEPXX:VPEKM:EPLP:EQLSN:NMTVE:SXAXR, SIPKAXX:VPTEL:EPLP:EQLSN:EMVVE:GXGXR, HVTKPTX:APTKL:EPLP:EQLSN:NMVVR:SXGXH, YVPKPXX:APTKL:EPLP:EQLSN:NMVVR:SXGXH, TVPKPXX:APTQL:EPLP:EQLSN:NMVVR:AXGXH, AVPKAXX:APTKL:EPLP:EQLSN:NMVVK:AXGXH, KVGKAXX:VPTKL:EPLP:EQLSN:EGMSVAE:XGXR, KASKAXX:VPTKL:EPLP:EQLSN:GMAVS:EXGXR, GSAGPXX:TPTKM:EPLP:EQLSN:GMVVD:RXGXS, AAPASXX:VPARL:EPLP:EQLSN:DMVVE:AXGXR, STPPTXX:VPTRL:EPLP:EQLSN:DMVVE:SXGXR, HVPKPXX:APTKL:EPLP:EQLSN:NMVVR:SXGXH, RVPSTXX:APVKT:EPLP:EQLSN:MIVEE:XGXL, ASASPXX:VSQDL:EPLP:EQLSN:MIVKS:XKXS, ASASPXX:VPQDL:EPLP:EQLSN:MVVKS:XKXS, NDEGLEX:VPTEE:EPLP:EQLSN:FLQHN:KXEXR, NDEGLEX:VPTGQ:EPLP:EQLSN:LEEHS:QXEXR, SSVKXQP:SRVHH:EPLP:EQLSN:RLEEH:LEXAXA, RNVQXRP:TQVQL:EPLP:EQLSN:TLEDH:LAXKXE, KIPKAXX:VSQEL:EPLT:EQLSN:DMVKS:GXGXR, GIPEPXX:VSQKM:EPLT:EQLSN:NMVKS:SXAXR, SIPKAXX:VSQEL:EPLT:EQLSN:EMVKS:GXGXR, HVTKPTX:VSQKL:EPLT:EQLSN:NMVKS:SXGXH, YVPKPXX:VSQKL:EPLT:EQLSN:NMVKS:SXGXH, TVPKPXX:VSQQL:EPLT:EQLSN:NMVKS:AXGXH, AVPKAXX:VSQKL:EPLT:EQLSN:NMVKS:AXGXH, KVGKAXX:VSQKL:EPLT:EQLSN:EGMSVKS:XGXR, KASKAXX:VSQKL:EPLT:EQLSN:GMVKS:EXGXR, GSAGPXX:VSQKM:EPLT:EQLSN:GMVKS:RXGXS, AAPASXX:VSQRL:EPLT:EQLSN:DMVKS:AXGXR, STPPTXX:VSQRL:EPLT:EQLSN:DMVKS:SXGXR, HVPKPXX:VSQKL:EPLT:EQLSN:NMVKS:SXGXH, RVPSTXX:VSQKT:EPLT:EQLSN:MIVKS:XGXL, ASAAPXX:VSQAL:EPLT:EQLSN:MIVKS:XKXS, ASASPXX:VSQDL:EPLT:EQLSN:MVVKS:XKXS, NDEGLEX:VSQEE:EPLT:EQLSN:FLVKS:KXEXR, NDEGLEX:VSQGQ:EPLT:EQLSN:LEVKS:QXEXR, SSVKXQP:VSQHH:EPLT:EQLSN:RLVKS:LEXAXA, RNVQXRP:VSQQL:EPLT:EQLSN:TLVKS:LAXKXE, KIPKAXX:VPTEL:EPLT:EQLSN:DMVVE:GXGXR, GIPEPXX:VPEKM:EPLT:EQLSN:NMTVE:SXAXR, SIPKAXX:VPTEL:EPLT:EQLSN:EMVVE:GXGXR, HVTKPTX:APTKL:EPLT:EQLSN:NMVVR:SXGXH, YVPKPXX:APTKL:EPLT:EQLSN:NMVVR:SXGXH, TVPKPXX:APTQL:EPLT:EQLSN:NMVVR:AXGXH, AVPKAXX:APTKL:EPLT:EQLSN:NMVVK:AXGXH, KVGKAXX:VPTKL:EPLT:EQLSN:EGMSVAE:XGXR, KASKAXX:VPTKL:EPLT:EQLSN:GMAVS:EXGXR, GSAGPXX:TPTKM:EPLT:EQLSN:GMVVD:RXGXS, AAPASXX:VPARL:EPLT:EQLSN:DMVVE:AXGXR, STPPTXX:VPTRL:EPLT:EQLSN:DMVVE:SXGXR, HVPKPXX:APTKL:EPLT:EQLSN:NMVVR:SXGXH, RVPSTXX:APVKT:EPLT:EQLSN:MIVEE:XGXL, ASAAPXX:VPQAL:EPLT:EQLSN:MIVRS:XKXS, ASASPXX:VPQDL:EPLT:EQLSN:MVVKS:XKXS, NDEGLEX:VPTEE:EPLT:EQLSN:FLQHN:KXEXR, NDEGLEX:VPTGQ:EPLT:EQLSN:LEEHS:QXEXR, SSVKXQP:SRVHH:EPLT:EQLSN:RLEEH:LEXAXA, RNVQXRP:TQVQL:EPLT:EQLSN:TLEDH:LAXKXE, KIPKAXX:VPQEL:EPLT:EQLSN:DMVKS:GXGXR, GIPEPXX:VPQKM:EPLT:EQLSN:NMVKS:SXAXR, SIPKAXX:VPQEL:EPLT:EQLSN:EMVKS:GXGXR, HVTKPTX:VPQKL:EPLT:EQLSN:NMVKS:SXGXH, YVPKPXX:VPQKL:EPLT:EQLSN:NMVKS:SXGXH, TVPKPXX:VPQQL:EPLT:EQLSN:NMVKS:AXGXH, AVPKAXX:VPQKL:EPLT:EQLSN:NMVKS:AXGXH, KVGKAXX:VPQKL:EPLT:EQLSN:EGMSVKS:XGXR, KASKAXX:VPQKL:EPLT:EQLSN:GMVKS:EXGXR, GSAGPXX:VPQKM:EPLT:EQLSN:GMVKS:RXGXS, AAPASXX:VPQRL:EPLT:EQLSN:DMVKS:AXGXR, STPPTXX:VPQRL:EPLT:EQLSN:DMVKS:SXGXR, HVPKPXX:VPQKL:EPLT:EQLSN:NMVKS:SXGXH, RVPSTXX:VPQKT:EPLT:EQLSN:MIVKS:XGXL, ASAAPXX:VPQAL:EPLT:EQLSN:MIVKS:XKXS, ASASPXX:VPQDL:EPLT:EQLSN:MIVKS:XKXS, NDEGLEX:VPQEE:EPLT:EQLSN:FLVKS:KXEXR, NDEGLEX:VPQGQ:EPLT:EQLSN:LEVKS:QXEXR, SSVKXQP:VPQHH:EPLT:EQLSN:RLVKS:LEXAXA, RNVQXRP:VPQQL:EPLT:EQLSN:TLVKS:LAXKXE, ASASPXX:VSQDL:EPLT:EQLSN:MIVKS:XKXS, KIPKAXX:VPTEL:SNIT:IGEMS:DMQHN:GXGXR, GIPEPXX:VPTKM:SNIT:IGEMS:NMQHN:SXAXR, SIPKAXX:VPTEL:SNIT:IGEMS:EMQHN:GXGXR, HVTKPTX:VPTKL:SNIT:IGEMS:NMQHN:SXGXH, YVPKPXX:VPTKL:SNIT:IGEMS:NMQHN:SXGXH, TVPKPXX:VPTQL:SNIT:IGEMS:NMQHN:AXGXH, AVPKAXX:VPTKL:SNIT:IGEMS:NMQHN:AXGXH, KVGKAXX:VPTKL:SNIT:IGEMS:EGMSQHN:XGXR, KASKAXX:VPTKL:SNIT:IGEMS:GMQHN:EXGXR, GSAGPXX:VPTKM:SNIT:IGEMS:GMQHN:RXGXS, AAPASXX:VPTRL:SNIT:IGEMS:DMQHN:AXGXR, STPPTXX:VPTRL:SNIT:IGEMS:DMQHN:SXGXR, HVPKPXX:VPTKL:SNIT:IGEMS:NMQHN:SXGXH, RVPSTXX:VPTKT:SNIT:IGEMS:MIQHN:XGXL, ASAAPXX:VPTAL:SNIT:IGEMS:MIQHN:XKXS, ASASPXX:VPTDL:SNIT:IGEMS:MIQHN:XKXS, ASASPXX:VPTDL:SNIT:IGEMS:MVQHN:XKXS, NDEGLEX:VPTGQ:SNIT:IGEMS:LEQHN:QXEXR, NDEGLEX:VPTEE:SNIT:IGEMS:FLQHN:KXEXR, SSVKXQP:VPTHH:SNIT:IGEMS:RLQHN:LEXAXA, RNVQXRP:VPTQL:SNIT:IGEMS:TLQHN:LAXKXE, KIPKAXX:VPTEL:SNIT:IGEMS:DMVVE:GXGXR, GIPEPXX:VPEKM:SNIT:IGEMS:NMTVE:SXAXR, SIPKAXX:VPTEL:SNIT:IGEMS:EMVVE:GXGXR, HVTKPTX:APTKL:SNIT:IGEMS:NMVVR:SXGXH, YVPKPXX:APTKL:SNIT:IGEMS:NMVVR:SXGXH, TVPKPXX:APTQL:SNIT:IGEMS:NMVVR:AXGXH, AVPKAXX:APTKL:SNIT:IGEMS:NMVVK:AXGXH, KVGKAXX:VPTKL:SNIT:IGEMS:EGMSVAE:XGXR, KASKAXX:VPTKL:SNIT:IGEMS:GMAVS:EXGXR, GSAGPXX:TPTKM:SNIT:IGEMS:GMVVD:RXGXS, AAPASXX:VPARL:SNIT:IGEMS:DMVVE:AXGXR, STPPTXX:VPTRL:SNIT:IGEMS:DMVVE:SXGXR, HVPKPXX:APTKL:SNIT:IGEMS:NMVVR:SXGXH, RVPSTXX:APVKT:SNIT:IGEMS:MIVEE:XGXL, ASAAPXX:VPQAL:SNIT:IGEMS:MIVRS:XKXS, ASASPXX:VSQDL:SNIT:IGEMS:MIVKS:XKXS, ASASPXX:VPQDL:SNIT:IGEMS:MVVKS:XKXS, NDEGLEX:VPTGQ:SNIT:IGEMS:LEEHS:QXEXR, SSVKXQP:SRVHH:SNIT:IGEMS:RLEEH:LEXAXA, RNVQXRP:TQVQL:SNIT:IGEMS:TLEDH:LAXKXE, KIPKAXX:VPTEL:SNIT:LGEMS:DMEHS:GXGXR, GIPEPXX:VPTKM:SNIT:LGEMS:NMEHS:SXAXR, SIPKAXX:VPTEL:SNIT:LGEMS:EMEHS:GXGXR, HVTKPTX:VPTKL:SNIT:LGEMS:NMEHS:SXGXH, YVPKPXX:VPTKL:SNIT:LGEMS:NMEHS:SXGXH, TVPKPXX:VPTQL:SNIT:LGEMS:NMEHS:AXGXH, AVPKAXX:VPTKL:SNIT:LGEMS:NMEHS:AXGXH, KVGKAXX:VPTKL:SNIT:LGEMS:EGMSEHS:XGXR, KASKAXX:VPTKL:SNIT:LGEMS:GMEHS:EXGXR, GSAGPXX:VPTKM:SNIT:LGEMS:GMEHS:RXGXS, AAPASXX:VPTRL:SNIT:LGEMS:DMEHS:AXGXR, STPPTXX:VPTRL:SNIT:LGEMS:DMEHS:SXGXR, HVPKPXX:VPTKL:SNIT:LGEMS:NMEHS:SXGXH, RVPSTXX:VPTKT:SNIT:LGEMS:MIEHS:XGXL, ASAAPXX:VPTAL:SNIT:LGEMS:MIEHS:XKXS, ASASPXX:VPTDL:SNIT:LGEMS:MIEHS:XKXS, ASASPXX:VPTDL:SNIT:LGEMS:MVEHS:XKXS, NDEGLEX:VPTEE:SNIT:LGEMS:FLEHS:KXEXR, SSVKXQP:VPTHH:SNIT:LGEMS:RLEHS:LEXAXA, RNVQXRP:VPTQL:SNIT:LGEMS:TLEHS:LAXKXE, KIPKAXX:VPTEL:SNIT:LGEMS:DMVVE:GXGXR, GIPEPXX:VPEKM:SNIT:LGEMS:NMTVE:SXAXR, SIPKAXX:VPTEL:SNIT:LGEMS:EMVVE:GXGXR, HVTKPTX:APTKL:SNIT:LGEMS:NMVVR:SXGXH, YVPKPXX:APTKL:SNIT:LGEMS:NMVVR:SXGXH, TVPKPXX:APTQL:SNIT:LGEMS:NMVVR:AXGXH, AVPKAXX:APTKL:SNIT:LGEMS:NMVVK:AXGXH, KVGKAXX:VPTKL:SNIT:LGEMS:EGMSVAE:XGXR, KASKAXX:VPTKL:SNIT:LGEMS:GMAVS:EXGXR, GSAGPXX:TPTKM:SNIT:LGEMS:GMVVD:RXGXS, AAPASXX:VPARL:SNIT:LGEMS:DMVVE:AXGXR, STPPTXX:VPTRL:SNIT:LGEMS:DMVVE:SXGXR, HVPKPXX:APTKL:SNIT:LGEMS:NMVVR:SXGXH, RVPSTXX:APVKT:SNIT:LGEMS:MIVEE:XGXL, ASAAPXX:VPQAL:SNIT:LGEMS:MIVRS:XKXS, ASASPXX:VSQDL:SNIT:LGEMS:MIVKS:XKXS, ASASPXX:VPQDL:SNIT:LGEMS:MVVKS:XKXS, NDEGLEX:VPTEE:SNIT:LGEMS:FLQHN:KXEXR, SSVKXQP:SRVHH:SNIT:LGEMS:RLEEH:LEXAXA, RNVQXRP:TQVQL:SNIT:LGEMS:TLEDH:LAXKXE, KIPKAXX:SRVEL:RSVK:KEVQV:DMEEH:GXGXR, GIPEPXX:SRVKM:RSVK:KEVQV:NMEEH:SXAXR, SIPKAXX:SRVEL:RSVK:KEVQV:EMEEH:GXGXR, HVTKPTX:SRVKL:RSVK:KEVQV:NMEEH:SXGXH, YVPKPXX:SRVKL:RSVK:KEVQV:NMEEH:SXGXH, TVPKPXX:SRVQL:RSVK:KEVQV:NMEEH:AXGXH, AVPKAXX:SRVKL:RSVK:KEVQV:NMEEH:AXGXH, KVGKAXX:SRVKL:RSVK:KEVQV:EGMSEEH:XGXR, KASKAXX:SRVKL:RSVK:KEVQV:GMEEH:EXGXR, GSAGPXX:SRVKM:RSVK:KEVQV:GMEEH:RXGXS, AAPASXX:SRVRL:RSVK:KEVQV:DMEEH:AXGXR, STPPTXX:SRVRL:RSVK:KEVQV:DMEEH:SXGXR, HVPKPXX:SRVKL:RSVK:KEVQV:NMEEH:SXGXH, RVPSTXX:SRVKT:RSVK:KEVQV:MIEEH:XGXL, ASAAPXX:SRVAL:RSVK:KEVQV:MIEEH:XKXS, ASASPXX:SRVDL:RSVK:KEVQV:MIEEH:XKXS, ASASPXX:SRVDL:RSVK:KEVQV:MVEEH:XKXS, NDEGLEX:SRVEE:RSVK:KEVQV:FLEEH:KXEXR, NDEGLEX:SRVGQ:RSVK:KEVQV:LEEEH:QXEXR, RNVQXRP:SRVQL:RSVK:KEVQV:TLEEH:LAXKXE, KIPKAXX:VPTEL:RSVK:KEVQV:DMVVE:GXGXR, GIPEPXX:VPEKM:RSVK:KEVQV:NMTVE:SXAXR, SIPKAXX:VPTEL:RSVK:KEVQV:EMVVE:GXGXR, HVTKPTX:APTKL:RSVK:KEVQV:NMVVR:SXGXH, YVPKPXX:APTKL:RSVK:KEVQV:NMVVR:SXGXH, TVPKPXX:APTQL:RSVK:KEVQV:NMVVR:AXGXH, AVPKAXX:APTKL:RSVK:KEVQV:NMVVK:AXGXH, KVGKAXX:VPTKL:RSVK:KEVQV:EGMSVAE:XGXR, KASKAXX:VPTKL:RSVK:KEVQV:GMAVS:EXGXR, GSAGPXX:TPTKM:RSVK:KEVQV:GMVVD:RXGXS, AAPASXX:VPARL:RSVK:KEVQV:DMVVE:AXGXR, STPPTXX:VPTRL:RSVK:KEVQV:DMVVE:SXGXR, HVPKPXX:APTKL:RSVK:KEVQV:NMVVR:SXGXH, RVPSTXX:APVKT:RSVK:KEVQV:MIVEE:XGXL, ASAAPXX:VPQAL:RSVK:KEVQV:MIVRS:XKXS, ASASPXX:VSQDL:RSVK:KEVQV:MIVKS:XKXS, ASASPXX:VPQDL:RSVK:KEVQV:MVVKS:XKXS, NDEGLEX:VPTEE:RSVK:KEVQV:FLQHN:KXEXR, NDEGLEX:VPTGQ:RSVK:KEVQV:LEEHS:QXEXR, RNVQXRP:TQVQL:RSVK:KEVQV:TLEDH:LAXKXE, KIPKAXX:TQVEL:RPVQ:KKATV:DMEDH:GXGXR, GIPEPXX:TQVKM:RPVQ:KKATV:NMEDH:SXAXR, SIPKAXX:TQVEL:RPVQ:KKATV:EMEDH:GXGXR, HVTKPTX:TQVKL:RPVQ:KKATV:NMEDH:SXGXH, YVPKPXX:TQVKL:RPVQ:KKATV:NMEDH:SXGXH, TVPKPXX:TQVQL:RPVQ:KKATV:NMEDH:AXGXH, AVPKAXX:TQVKL:RPVQ:KKATV:NMEDH:AXGXH, KVGKAXX:TQVKL:RPVQ:KKATV:EGMSEDH:XGXR, KASKAXX:TQVKL:RPVQ:KKATV:GMEDH:EXGXR, GSAGPXX:TQVKM:RPVQ:KKATV:GMEDH:RXGXS, AAPASXX:TQVRL:RPVQ:KKATV:DMEDH:AXGXR, STPPTXX:TQVRL:RPVQ:KKATV:DMEDH:SXGXR, HVPKPXX:TQVKL:RPVQ:KKATV:NMEDH:SXGXH, RVPSTXX:TQVKT:RPVQ:KKATV:MIEDH:XGXL, ASAAPXX:TQVAL:RPVQ:KKATV:MIEDH:XKXS, ASASPXX:TQVDL:RPVQ:KKATV:MIEDH:XKXS, ASASPXX:TQVDL:RPVQ:KKATV:MVEDH:XKXS, NDEGLEX:TQVEE:RPVQ:KKATV:FLEDH:KXEXR, NDEGLEX:TQVGQ:RPVQ:KKATV:LEEDH:QXEXR, SSVKXQP:TQVHH:RPVQ:KKATV:RLEDH:LEXAXA, KIPKAXX:VPTEL:RPVQ:KKATV:DMVVE:GXGXR, GIPEPXX:VPEKM:RPVQ:KKATV:NMTVE:SXAXR, SIPKAXX:VPTEL:RPVQ:KKATV:EMVVE:GXGXR, HVTKPTX:APTKL:RPVQ:KKATV:NMVVR:SXGXH, YVPKPXX:APTKL:RPVQ:KKATV:NMVVR:SXGXH, TVPKPXX:APTQL:RPVQ:KKATV:NMVVR:AXGXH, AVPKAXX:APTKL:RPVQ:KKATV:NMVVK:AXGXH, KVGKAXX:VPTKL:RPVQ:KKATV:EGMSVAE:XGXR, KASKAXX:VPTKL:RPVQ:KKATV:GMAVS:EXGXR, GSAGPXX:TPTKM:RPVQ:KKATV:GMVVD:RXGXS, AAPASXX:VPARL:RPVQ:KKATV:DMVVE:AXGXR, STPPTXX:VPTRL:RPVQ:KKATV:DMVVE:SXGXR, HVPKPXX:APTKL:RPVQ:KKATV:NMVVR:SXGXH, RVPSTXX:APVKT:RPVQ:KKATV:MIVEE:XGXL, ASAAPXX:VPQAL:RPVQ:KKATV:MIVRS:XKXS, ASASPXX:VSQDL:RPVQ:KKATV:MIVKS:XKXS, ASASPXX:VPQDL:RPVQ:KKATV:MVVKS:XKXS, NDEGLEX:VPTEE:RPVQ:KKATV:FLQHN:KXEXR, NDEGLEX:VPTGQ:RPVQ:KKATV:LEEHS:QXEXR and SSVKXQP:SRVHH:RPVQ:KKATV:RLEEH:LEXAXA. More particularly, the hexaplet PEP7:PEP5:PEP1:PEP2:PEP6:PEP8 is selected from the group consisting of GIPEPXX:VPTKM:SAIS:LKNYQ:NMVVE:SXAXR, HVTKPTX:VPTKL:SAIS:LKNYQ:NMVVE:SXGXH, YVPKPXX:VPTKL:SAIS:LKNYQ:NMVVE:SXGXH, TVPKPXX:VPTQL:SAIS:LKNYQ:NMVVE:AXGXH, AVPKAXX:VPTKL:SAIS:LKNYQ:NMVVE:AXGXH, KVGKAXX:VPTKL:SAIS:LKNYQ:EGMSVVE:XGXR, KASKAXX:VPTKL:SAIS:LKNYQ:GMVVE:EXGXR, GSAGPXX:VPTKM:SAIS:LKNYQ:GMVVE:RXGXS, AAPASXX:VPTRL:SAIS:LKNYQ:DMVVE:AXGXR, STPPTXX:VPTRL:SAIS:LKNYQ:DMVVE:SXGXR, HVPKPXX:VPTKL:SAIS:LKNYQ:NMVVE:SXGXH, RVPSTXX:VPTKT:SAIS:LKNYQ:MIVVE:XGXL, ASAAPXX:VPTAL:SAIS:LKNYQ:MIVVE:XKXS, ASASPXX:VPTDL:SAIS:LKNYQ:MIVVE:XKXS, ASASPXX:VPTDL:SAIS:LKNYQ:MVVVE:XKXS, GIPEPXX:VPEKM:SAIS:LKNYQ:NMTVE:SXAXR, HVTKPTX:APTKL:SAIS:LKNYQ:NMVVR:SXGXH, YVPKPXX:APTKL:SAIS:LKNYQ:NMVVR:SXGXH, TVPKPXX:APTQL:SAIS:LKNYQ:NMVVR:AXGXH, AVPKAXX:APTKL:SAIS:LKNYQ:NMVVK:AXGXH, KVGKAXX:VPTKL:SAIS:LKNYQ:EGMSVAE:XGXR, KASKAXX:VPTKL:SAIS:LKNYQ:GMAVS:EXGXR, GSAGPXX:TPTKM:SAIS:LKNYQ:GMVVD:RXGXS, AAPASXX:VPARL:SAIS:LKNYQ:DMVVE:AXGXR, HVPKPXX:APTKL:SAIS:LKNYQ:NMVVR:SXGXH, RVPSTXX:APVKT:SAIS:LKNYQ:MIVEE:XGXL, ASAAPXX:VPQAL:SAIS:LKNYQ:MIVRS:XKXS, ASASPXX:VSQDL:SAIS:LKNYQ:MIVKS:XKXS, ASASPXX:VPQDL:SAIS:LKNYQ:MVVKS:XKXS, NDEGLEX:VPTEE:SAIS:LKNYQ:FLQHN:KXEXR, NDEGLEX:VPTGQ:SAIS:LKNYQ:LEEHS:QXEXR, SSVKXQP:SRVHH:SAIS:LKNYQ:RLEEH:LEXAXA, RNVQXRP:TQVQL:SAIS:LKNYQ:TLEDH:LAXKXE, KIPKAXX:VPEEL:SSLS:LKVYP:DMTVE:GXGXR, SIPKAXX:VPEEL:SSLS:LKVYP:EMTVE:GXGXR, HVTKPTX:VPEKL:SSLS:LKVYP:NMTVE:SXGXH, YVPKPXX:VPEKL:SSLS:LKVYP:NMTVE:SXGXH, TVPKPXX:VPEQL:SSLS:LKVYP:NMTVE:AXGXH, AVPKAXX:VPEKL:SSLS:LKVYP:NMTVE:AXGXH, KVGKAXX:VPEKL:SSLS:LKVYP:EGMSTVE:XGXR, KASKAXX:VPEKL:SSLS:LKVYP:GMTVE:EXGXR, GSAGPXX:VPEKM:SSLS:LKVYP:GMTVE:RXGXS, AAPASXX:VPERL:SSLS:LKVYP:DMTVE:AXGXR, STPPTXX:VPERL:SSLS:LKVYP:DMTVE:SXGXR, HVPKPXX:VPEKL:SSLS:LKVYP:NMTVE:SXGXH, RVPSTXX:VPEKT:SSLS:LKVYP:MITVE:XGXL, ASAAPXX:VPEAL:SSLS:LKVYP:MITVE:XKXS, ASASPXX:VPEDL:SSLS:LKVYP:MITVE:XKXS, ASASPXX:VPEDL:SSLS:LKVYP:MVTVE:XKXS, KIPKAXX:VPTEL:SSLS:LKVYP:DMVVE:GXGXR, SIPKAXX:VPTEL:SSLS:LKVYP:EMVVE:GXGXR, HVTKPTX:APTKL:SSLS:LKVYP:NMVVR:SXGXH, YVPKPXX:APTKL:SSLS:LKVYP:NMVVR:SXGXH, TVPKPXX:APTQL:SSLS:LKVYP:NMVVR:AXGXH, AVPKAXX:APTKL:SSLS:LKVYP:NMVVK:AXGXH, KVGKAXX:VPTKL:SSLS:LKVYP:EGMSVAE:XGXR, KASKAXX:VPTKL:SSLS:LKVYP:GMAVS:EXGXR, GSAGPXX:TPTKM:SSLS:LKVYP:GMVVD:RXGXS, AAPASXX:VPARL:SSLS:LKVYP:DMVVE:AXGXR, STPPTXX:VPTRL:SSLS:LKVYP:DMVVE:SXGXR, HVPKPXX:APTKL:SSLS:LKVYP:NMVVR:SXGXH, RVPSTXX:APVKT:SSLS:LKVYP:MIVEE:XGXL, ASAAPXX:VPQAL:SSLS:LKVYP:MIVRS:XKXS, ASASPXX:VSQDL:SSLS:LKVYP:MIVKS:XKXS, ASASPXX:VPQDL:SSLS:LKVYP:MVVKS:XKXS, NDEGLEX:VPTEE:SSLS:LKVYP:FLQHN:KXEXR, NDEGLEX:VPTGQ:SSLS:LKVYP:LEEHS:QXEXR, SSVKXQP:SRVHH:SSLS:LKVYP:RLEEH:LEXAXA, RNVQXRP:TQVQL:SSLS:LKVYP:TLEDH:LAXKXE, KIPKAXX:APTEL:NAIS:LKKYR:DMVVR:GXGXR, GIPEPXX:APTKM:NAIS:LKKYR:NMVVR:SXAXR, SIPKAXX:APTEL:NAIS:LKKYR:EMVVR:GXGXR, AVPKAXX:APTKL:NAIS:LKKYR:NMVVR:AXGXH, KVGKAXX:APTKL:NAIS:LKKYR:EGMSVVR:XGXR, KASKAXX:APTKL:NAIS:LKKYR:GMVVR:EXGXR, GSAGPXX:APTKM:NAIS:LKKYR:GMVVR:RXGXS, AAPASXX:APTRL:NAIS:LKKYR:DMVVR:AXGXR, STPPTXX:APTRL:NAIS:LKKYR:DMVVR:SXGXR, RVPSTXX:APTKT:NAIS:LKKYR:MIVVR:XGXL, ASAAPXX:APTAL:NAIS:LKKYR:MIVVR:XKXS, ASASPXX:APTDL:NAIS:LKKYR:MIVVR:XKXS, ASASPXX:APTDL:NAIS:LKKYR:MVVVR:XKXS, KIPKAXX:VPTEL:NAIS:LKKYR:DMVVE:GXGXR, GIPEPXX:VPEKM:NAIS:LKKYR:NMTVE:SXAXR, SIPKAXX:VPTEL:NAIS:LKKYR:EMVVE:GXGXR, AVPKAXX:APTKL:NAIS:LKKYR:NMVVK:AXGXH, KVGKAXX:VPTKL:NAIS:LKKYR:EGMSVAE:XGXR, KASKAXX:VPTKL:NAIS:LKKYR:GMAVS:EXGXR, GSAGPXX:TPTKM:NAIS:LKKYR:GMVVD:RXGXS, AAPASXX:VPARL:NAIS:LKKYR:DMVVE:AXGXR, STPPTXX:VPTRL:NAIS:LKKYR:DMVVE:SXGXR, RVPSTXX:APVKT:NAIS:LKKYR:MIVEE:XGXL, ASAAPXX:VPQAL:NAIS:LKKYR:MIVRS:XKXS, ASASPXX:VSQDL:NAIS:LKKYR:MIVKS:XKXS, ASASPXX:VPQDL:NAIS:LKKYR:MVVKS:XKXS, NDEGLEX:VPTEE:NAIS:LKKYR:FLQHN:KXEXR, NDEGLEX:VPTGQ:NAIS:LKKYR:LEEHS:QXEXR, SSVKXQP:SRVHH:NAIS:LKKYR:RLEEH:LEXAXA, RNVQXRP:TQVQL:NAIS:LKKYR:TLEDH:LAXKXE, KIPKAXX:APTEL:SATS:LRKHR:DMVVK:GXGXR, GIPEPXX:APTKM:SATS:LRKHR:NMVVK:SXAXR, SIPKAXX:APTEL:SATS:LRKHR:EMVVK:GXGXR, HVTKPTX:APTKL:SATS:LRKHR:NMVVK:SXGXH, YVPKPXX:APTKL:SATS:LRKHR:NMVVK:SXGXH, TVPKPXX:APTQL:SATS:LRKHR:NMVVK:AXGXH, KVGKAXX:APTKL:SATS:LRKHR:EGMSVVK:XGXR, KASKAXX:APTKL:SATS:LRKHR:GMVVK:EXGXR, GSAGPXX:APTKM:SATS:LRKHR:GMVVK:RXGXS, AAPASXX:APTRL:SATS:LRKHR:DMVVK:AXGXR, STPPTXX:APTRL:SATS:LRKHR:DMVVK:SXGXR, HVPKPXX:APTKL:SATS:LRKHR:NMVVK:SXGXH, RVPSTXX:APTKT:SATS:LRKHR:MIVVK:XGXL, ASAAPXX:APTAL:SATS:LRKHR:MIVVK:XKXS, ASASPXX:APTDL:SATS:LRKHR:MIVVK:XKXS, ASASPXX:APTDL:SATS:LRKHR:MVVVK:XKXS, KIPKAXX:VPTEL:SATS:LRKHR:DMVVE:GXGXR, GIPEPXX:VPEKM:SATS:LRKHR:NMTVE:SXAXR, SIPKAXX:VPTEL:SATS:LRKHR:EMVVE:GXGXR, HVTKPTX:APTKL:SATS:LRKHR:NMVVR:SXGXH, YVPKPXX:APTKL:SATS:LRKHR:NMVVR:SXGXH, TVPKPXX:APTQL:SATS:LRKHR:NMVVR:AXGXH, KVGKAXX:VPTKL:SATS:LRKHR:EGMSVAE:XGXR, KASKAXX:VPTKL:SATS:LRKHR:GMAVS:EXGXR, GSAGPXX:TPTKM:SATS:LRKHR:GMVVD:RXGXS, AAPASXX:VPARL:SATS:LRKHR:DMVVE:AXGXR, STPPTXX:VPTRL:SATS:LRKHR:DMVVE:SXGXR, HVPKPXX:APTKL:SATS:LRKHR:NMVVR:SXGXH, RVPSTXX:APVKT:SATS:LRKHR:MIVEE:XGXL, ASAAPXX:VPQAL:SATS:LRKHR:MIVRS:XKXS, ASASPXX:VSQDL:SATS:LRKHR:MIVKS:XKXS, ASASPXX:VPQDL:SATS:LRKHR:MVVKS:XKXS, NDEGLEX:VPTEE:SATS:LRKHR:FLQHN:KXEXR, NDEGLEX:VPTGQ:SATS:LRKHR:LEEHS:QXEXR, SSVKXQP:SRVHH:SATS:LRKHR:RLEEH:LEXAXA, RNVQXRP:TQVQL:SATS:LRKHR:TLEDH:LAXKXE, KIPKAXX:VPTEL:SPIS:LKYHY:DMVAE:GXGXR, GIPEPXX:VPTKM:SPIS:LKYHY:NMVAE:SXAXR, SIPKAXX:VPTEL:SPIS:LKYHY:EMVAE:GXGXR, HVTKPTX:VPTKL:SPIS:LKYHY:NMVAE:SXGXH, YVPKPXX:VPTKL:SPIS:LKYHY:NMVAE:SXGXH, TVPKPXX:VPTQL:SPIS:LKYHY:NMVAE:AXGXH, AVPKAXX:VPTKL:SPIS:LKYHY:NMVAE:AXGXH, KASKAXX:VPTKL:SPIS:LKYHY:GMVAE:EXGXR, GSAGPXX:VPTKM:SPIS:LKYHY:GMVAE:RXGXS, AAPASXX:VPTRL:SPIS:LKYHY:DMVAE:AXGXR, STPPTXX:VPTRL:SPIS:LKYHY:DMVAE:SXGXR, HVPKPXX:VPTKL:SPIS:LKYHY:NMVAE:SXGXH, RVPSTXX:VPTKT:SPIS:LKYHY:MIVAE:XGXL, ASAAPXX:VPTAL:SPIS:LKYHY:MIVAE:XKXS, ASASPXX:VPTDL:SPIS:LKYHY:MIVAE:XKXS, ASASPXX:VPTDL:SPIS:LKYHY:MVVAE:XKXS, KIPKAXX:VPTEL:SPIS:LKYHY:DMVVE:GXGXR, GIPEPXX:VPEKM:SPIS:LKYHY:NMTVE:SXAXR, SIPKAXX:VPTEL:SPIS:LKYHY:EMVVE:GXGXR, HVTKPTX:APTKL:SPIS:LKYHY:NMVVR:SXGXH, YVPKPXX:APTKL:SPIS:LKYHY:NMVVR:SXGXH, TVPKPXX:APTQL:SPIS:LKYHY:NMVVR:AXGXH, AVPKAXX:APTKL:SPIS:LKYHY:NMVVK:AXGXH, KASKAXX:VPTKL:SPIS:LKYHY:GMAVS:EXGXR, GSAGPXX:TPTKM:SPIS:LKYHY:GMVVD:RXGXS, AAPASXX:VPARL:SPIS:LKYHY:DMVVE:AXGXR, STPPTXX:VPTRL:SPIS:LKYHY:DMVVE:SXGXR, HVPKPXX:APTKL:SPIS:LKYHY:NMVVR:SXGXH, RVPSTXX:APVKT:SPIS:LKYHY:MIVEE:XGXL, ASAAPXX:VPQAL:SPIS:LKYHY:MIVRS:XKXS, ASASPXX:VSQDL:SPIS:LKYHY:MIVKS:XKXS, ASASPXX:VPQDL:SPIS:LKYHY:MVVKS:XKXS, NDEGLEX:VPTEE:SPIS:LKYHY:FLQHN:KXEXR, NDEGLEX:VPTGQ:SPIS:LKYHY:LEEHS:QXEXR, SSVKXQP:SRVHH:SPIS:LKYHY:RLEEH:LEXAXA, RNVQXRP:TQVQL:SPIS:LKYHY:TLEDH:LAXKXE, KIPKAXX:VPTEL:EPIS:KFKYE:DMAVS:GXGXR, GIPEPXX:VPTKM:EPIS:KFKYE:NMAVS:SXAXR, SIPKAXX:VPTEL:EPIS:KFKYE:EMAVS:GXGXR, HVTKPTX:VPTKL:EPIS:KFKYE:NMAVS:SXGXH, YVPKPXX:VPTKL:EPIS:KFKYE:NMAVS:SXGXH, TVPKPXX:VPTQL:EPIS:KFKYE:NMAVS:AXGXH, AVPKAXX:VPTKL:EPIS:KFKYE:NMAVS:AXGXH, KVGKAXX:VPTKL:EPIS:KFKYE:EGMSAVS:XGXR, GSAGPXX:VPTKM:EPIS:KFKYE:GMAVS:RXGXS, AAPASXX:VPTRL:EPIS:KFKYE:DMAVS:AXGXR, STPPTXX:VPTRL:EPIS:KFKYE:DMAVS:SXGXR, HVPKPXX:VPTKL:EPIS:KFKYE:NMAVS:SXGXH, RVPSTXX:VPTKT:EPIS:KFKYE:MIAVS:XGXL, ASAAPXX:VPTAL:EPIS:KFKYE:MIAVS:XKXS, ASASPXX:VPTDL:EPIS:KFKYE:MIAVS:XKXS, ASASPXX:VPTDL:EPIS:KFKYE:MVAVS:XKXS, KIPKAXX:VPTEL:EPIS:KFKYE:DMVVE:GXGXR, GIPEPXX:VPEKM:EPIS:KFKYE:NMTVE:SXAXR, SIPKAXX:VPTEL:EPIS:KFKYE:EMVVE:GXGXR, HVTKPTX:APTKL:EPIS:KFKYE:NMVVR:SXGXH, YVPKPXX:APTKL:EPIS:KFKYE:NMVVR:SXGXH, TVPKPXX:APTQL:EPIS:KFKYE:NMVVR:AXGXH, AVPKAXX:APTKL:EPIS:KFKYE:NMVVK:AXGXH, KVGKAXX:VPTKL:EPIS:KFKYE:EGMSVAE:XGXR, GSAGPXX:TPTKM:EPIS:KFKYE:GMVVD:RXGXS, AAPASXX:VPARL:EPIS:KFKYE:DMVVE:AXGXR, STPPTXX:VPTRL:EPIS:KFKYE:DMVVE:SXGXR, HVPKPXX:APTKL:EPIS:KFKYE:NMVVR:SXGXH, RVPSTXX:APVKT:EPIS:KFKYE:MIVEE:XGXL, ASAAPXX:VPQAL:EPIS:KFKYE:MIVRS:XKXS, ASASPXX:VSQDL:EPIS:KFKYE:MIVKS:XKXS, ASASPXX:VPQDL:EPIS:KFKYE:MVVKS:XKXS, NDEGLEX:VPTEE:EPIS:KFKYE:FLQHN:KXEXR, NDEGLEX:VPTGQ:EPIS:KFKYE:LEEHS:QXEXR, SSVKXQP:SRVHH:EPIS:KFKYE:RLEEH:LEXAXA, RNVQXRP:TQVQL:EPIS:KFKYE:TLEDH:LAXKXE, KIPKAXX:TPTEL:SPIN:YGKIP:DMVVD:GXGXR, GIPEPXX:TPTKM:SPIN:YGKIP:NMVVD:SXAXR, SIPKAXX:TPTEL:SPIN:YGKIP:EMVVD:GXGXR, HVTKPTX:TPTKL:SPIN:YGKIP:NMVVD:SXGXH, YVPKPXX:TPTKL:SPIN:YGKIP:NMVVD:SXGXH, TVPKPXX:TPTQL:SPIN:YGKIP:NMVVD:AXGXH, AVPKAXX:TPTKL:SPIN:YGKIP:NMVVD:AXGXH, KVGKAXX:TPTKL:SPIN:YGKIP:EGMSVVD:XGXR, KASKAXX:TPTKL:SPIN:YGKIP:GMVVD:EXGXR, AAPASXX:TPTRL:SPIN:YGKIP:DMVVD:AXGXR, STPPTXX:TPTRL:SPIN:YGKIP:DMVVD:SXGXR, HVPKPXX:TPTKL:SPIN:YGKIP:NMVVD:SXGXH, RVPSTXX:TPTKT:SPIN:YGKIP:MIVVD:XGXL, ASAAPXX:TPTAL:SPIN:YGKIP:MIVVD:XKXS, ASASPXX:TPTDL:SPIN:YGKIP:MIVVD:XKXS, ASASPXX:TPTDL:SPIN:YGKIP:MVVVD:XKXS, KIPKAXX:VPTEL:SPIN:YGKIP:DMVVE:GXGXR, GIPEPXX:VPEKM:SPIN:YGKIP:NMTVE:SXAXR, SIPKAXX:VPTEL:SPIN:YGKIP:EMVVE:GXGXR, HVTKPTX:APTKL:SPIN:YGKIP:NMVVR:SXGXH, YVPKPXX:APTKL:SPIN:YGKIP:NMVVR:SXGXH, TVPKPXX:APTQL:SPIN:YGKIP:NMVVR:AXGXH, AVPKAXX:APTKL:SPIN:YGKIP:NMVVK:AXGXH, KVGKAXX:VPTKL:SPIN:YGKIP:EGMSVAE:XGXR, KASKAXX:VPTKL:SPIN:YGKIP:GMAVS:EXGXR, AAPASXX:VPARL:SPIN:YGKIP:DMVVE:AXGXR, STPPTXX:VPTRL:SPIN:YGKIP:DMVVE:SXGXR, HVPKPXX:APTKL:SPIN:YGKIP:NMVVR:SXGXH, RVPSTXX:APVKT:SPIN:YGKIP:MIVEE:XGXL, ASAAPXX:VPQAL:SPIN:YGKIP:MIVRS:XKXS, ASASPXX:VSQDL:SPIN:YGKIP:MIVKS:XKXS, ASASPXX:VPQDL:SPIN:YGKIP:MVVKS:XKXS, NDEGLEX:VPTEE:SPIN:YGKIP:FLQHN:KXEXR, NDEGLEX:VPTGQ:SPIN:YGKIP:LEEHS:QXEXR, SSVKXQP:SRVHH:SPIN:YGKIP:RLEEH:LEXAXA, RNVQXRP:TQVQL:SPIN:YGKIP:TLEDH:LAXKXE, KIPKAXX:VPAEL:SPIS:YKQYE:DMVVE:GXGXR, GIPEPXX:VPAKM:SPIS:YKQYE:NMVVE:SXAXR, SIPKAXX:VPAEL:SPIS:YKQYE:EMVVE:GXGXR, HVTKPTX:VPAKL:SPIS:YKQYE:NMVVE:SXGXH, YVPKPXX:VPAKL:SPIS:YKQYE:NMVVE:SXGXH, TVPKPXX:VPAQL:SPIS:YKQYE:NMVVE:AXGXH, AVPKAXX:VPAKL:SPIS:YKQYE:NMVVE:AXGXH, KVGKAXX:VPAKL:SPIS:YKQYE:EGMSVVE:XGXR, KASKAXX:VPAKL:SPIS:YKQYE:GMVVE:EXGXR, GSAGPXX:VPAKM:SPIS:YKQYE:GMVVE:RXGXS, STPPTXX:VPARL:SPIS:YKQYE:DMVVE:SXGXR, HVPKPXX:VPAKL:SPIS:YKQYE:NMVVE:SXGXH, RVPSTXX:VPAKT:SPIS:YKQYE:MIVVE:XGXL, ASAAPXX:VPAAL:SPIS:YKQYE:MIVVE:XKXS, ASASPXX:VPADL:SPIS:YKQYE:MIVVE:XKXS, ASASPXX:VPADL:SPIS:YKQYE:MVVVE:XKXS, KIPKAXX:VPTEL:SPIS:YKQYE:DMVVE:GXGXR, GIPEPXX:VPEKM:SPIS:YKQYE:NMTVE:SXAXR, SIPKAXX:VPTEL:SPIS:YKQYE:EMVVE:GXGXR, HVTKPTX:APTKL:SPIS:YKQYE:NMVVR:SXGXH, YVPKPXX:APTKL:SPIS:YKQYE:NMVVR:SXGXH, TVPKPXX:APTQL:SPIS:YKQYE:NMVVR:AXGXH, AVPKAXX:APTKL:SPIS:YKQYE:NMVVK:AXGXH, KVGKAXX:VPTKL:SPIS:YKQYE:EGMSVAE:XGXR, KASKAXX:VPTKL:SPIS:YKQYE:GMAVS:EXGXR, GSAGPXX:TPTKM:SPIS:YKQYE:GMVVD:RXGXS, STPPTXX:VPTRL:SPIS:YKQYE:DMVVE:SXGXR, HVPKPXX:APTKL:SPIS:YKQYE:NMVVR:SXGXH, RVPSTXX:APVKT:SPIS:YKQYE:MIVEE:XGXL, ASAAPXX:VPQAL:SPIS:YKQYE:MIVRS:XKXS, ASASPXX:VSQDL:SPIS:YKQYE:MIVKS:XKXS, ASASPXX:VPQDL:SPIS:YKQYE:MVVKS:XKXS, NDEGLEX:VPTEE:SPIS:YKQYE:FLQHN:KXEXR, NDEGLEX:VPTGQ:SPIS:YKQYE:LEEHS:QXEXR, SSVKXQP:SRVHH:SPIS:YKQYE:RLEEH:LEXAXA, RNVQXRP:TQVQL:SPIS:YKQYE:TLEDH:LAXKXE, GIPEPXX:VPTKM:SPIS:YKQYE:NMVVE:SXAXR, HVTKPTX:VPTKL:SPIS:YKQYE:NMVVE:SXGXH, YVPKPXX:VPTKL:SPIS:YKQYE:NMVVE:SXGXH, TVPKPXX:VPTQL:SPIS:YKQYE:NMVVE:AXGXH, AVPKAXX:VPTKL:SPIS:YKQYE:NMVVE:AXGXH, KVGKAXX:VPTKL:SPIS:YKQYE:EGMSVVE:XGXR, KASKAXX:VPTKL:SPIS:YKQYE:GMVVE:EXGXR, GSAGPXX:VPTKM:SPIS:YKQYE:GMVVE:RXGXS, AAPASXX:VPTRL:SPIS:YKQYE:DMVVE:AXGXR, HVPKPXX:VPTKL:SPIS:YKQYE:NMVVE:SXGXH, RVPSTXX:VPTKT:SPIS:YKQYE:MIVVE:XGXL, ASAAPXX:VPTAL:SPIS:YKQYE:MIVVE:XKXS, ASASPXX:VPTDL:SPIS:YKQYE:MIVVE:XKXS, ASASPXX:VPTDL:SPIS:YKQYE:MVVVE:XKXS, AAPASXX:VPARL:SPIS:YKQYE:DMVVE:AXGXR, KIPKAXX:APVEL:KPLS:DHHKD:DMVEE:GXGXR, GIPEPXX:APVKM:KPLS:DHHKD:NMVEE:SXAXR, SIPKAXX:APVEL:KPLS:DHHKD:EMVEE:GXGXR, HVTKPTX:APVKL:KPLS:DHHKD:NMVEE:SXGXH, YVPKPXX:APVKL:KPLS:DHHKD:NMVEE:SXGXH, TVPKPXX:APVQL:KPLS:DHHKD:NMVEE:AXGXH, AVPKAXX:APVKL:KPLS:DHHKD:NMVEE:AXGXH, KVGKAXX:APVKL:KPLS:DHHKD:EGMSVEE:XGXR, KASKAXX:APVKL:KPLS:DHHKD:GMVEE:EXGXR, GSAGPXX:APVKM:KPLS:DHHKD:GMVEE:RXGXS, AAPASXX:APVRL:KPLS:DHHKD:DMVEE:AXGXR, STPPTXX:APVRL:KPLS:DHHKD:DMVEE:SXGXR, HVPKPXX:APVKL:KPLS:DHHKD:NMVEE:SXGXH, ASAAPXX:APVAL:KPLS:DHHKD:MIVEE:XKXS, ASASPXX:APVDL:KPLS:DHHKD:MIVEE:XKXS, ASASPXX:APVDL:KPLS:DHHKD:MVVEE:XKXS, KIPKAXX:VPTEL:KPLS:DHHKD:DMVVE:GXGXR, GIPEPXX:VPEKM:KPLS:DHHKD:NMTVE:SXAXR, SIPKAXX:VPTEL:KPLS:DHHKD:EMVVE:GXGXR, HVTKPTX:APTKL:KPLS:DHHKD:NMVVR:SXGXH, YVPKPXX:APTKL:KPLS:DHHKD:NMVVR:SXGXH, TVPKPXX:APTQL:KPLS:DHHKD:NMVVR:AXGXH, AVPKAXX:APTKL:KPLS:DHHKD:NMVVK:AXGXH, KVGKAXX:VPTKL:KPLS:DHHKD:EGMSVAE:XGXR, KASKAXX:VPTKL:KPLS:DHHKD:GMAVS:EXGXR, GSAGPXX:TPTKM:KPLS:DHHKD:GMVVD:RXGXS, AAPASXX:VPARL:KPLS:DHHKD:DMVVE:AXGXR, STPPTXX:VPTRL:KPLS:DHHKD:DMVVE:SXGXR, HVPKPXX:APTKL:KPLS:DHHKD:NMVVR:SXGXH, ASAAPXX:VPQAL:KPLS:DHHKD:MIVRS:XKXS, ASASPXX:VSQDL:KPLS:DHHKD:MIVKS:XKXS, ASASPXX:VPQDL:KPLS:DHHKD:MVVKS:XKXS, NDEGLEX:VPTEE:KPLS:DHHKD:FLQHN:KXEXR, NDEGLEX:VPTGQ:KPLS:DHHKD:LEEHS:QXEXR, SSVKXQP:SRVHH:KPLS:DHHKD:RLEEH:LEXAXA, RNVQXRP:TQVQL:KPLS:DHHKD:TLEDH:LAXKXE, KIPKAXX:VPQEL:EPLP:EQLSN:DMVRS:GXGXR, GIPEPXX:VPQKM:EPLP:EQLSN:NMVRS:SXAXR, SIPKAXX:VPQEL:EPLP:EQLSN:EMVRS:GXGXR, HVTKPTX:VPQKL:EPLP:EQLSN:NMVRS:SXGXH, YVPKPXX:VPQKL:EPLP:EQLSN:NMVRS:SXGXH, TVPKPXX:VPQQL:EPLP:EQLSN:NMVRS:AXGXH, AVPKAXX:VPQKL:EPLP:EQLSN:NMVRS:AXGXH, KVGKAXX:VPQKL:EPLP:EQLSN:EGMSVRS:XGXR, KASKAXX:VPQKL:EPLP:EQLSN:GMVRS:EXGXR, GSAGPXX:VPQKM:EPLP:EQLSN:GMVRS:RXGXS, AAPASXX:VPQRL:EPLP:EQLSN:DMVRS:AXGXR, STPPTXX:VPQRL:EPLP:EQLSN:DMVRS:SXGXR, HVPKPXX:VPQKL:EPLP:EQLSN:NMVRS:SXGXH, RVPSTXX:VPQKT:EPLP:EQLSN:MIVRS:XGXL, ASASPXX:VPQDL:EPLP:EQLSN:MIVRS:XKXS, ASASPXX:VPQDL:EPLP:EQLSN:MVVRS:XKXS, KIPKAXX:VPTEL:EPLP:EQLSN:DMVVE:GXGXR, GIPEPXX:VPEKM:EPLP:EQLSN:NMTVE:SXAXR, SIPKAXX:VPTEL:EPLP:EQLSN:EMVVE:GXGXR, HVTKPTX:APTKL:EPLP:EQLSN:NMVVR:SXGXH, YVPKPXX:APTKL:EPLP:EQLSN:NMVVR:SXGXH, TVPKPXX:APTQL:EPLP:EQLSN:NMVVR:AXGXH, AVPKAXX:APTKL:EPLP:EQLSN:NMVVK:AXGXH, KVGKAXX:VPTKL:EPLP:EQLSN:EGMSVAE:XGXR, KASKAXX:VPTKL:EPLP:EQLSN:GMAVS:EXGXR, GSAGPXX:TPTKM:EPLP:EQLSN:GMVVD:RXGXS, AAPASXX:VPARL:EPLP:EQLSN:DMVVE:AXGXR, STPPTXX:VPTRL:EPLP:EQLSN:DMVVE:SXGXR, HVPKPXX:APTKL:EPLP:EQLSN:NMVVR:SXGXH, RVPSTXX:APVKT:EPLP:EQLSN:MIVEE:XGXL, ASASPXX:VSQDL:EPLP:EQLSN:MIVKS:XKXS, ASASPXX:VPQDL:EPLP:EQLSN:MVVKS:XKXS, NDEGLEX:VPTEE:EPLP:EQLSN:FLQHN:KXEXR, NDEGLEX:VPTGQ:EPLP:EQLSN:LEEHS:QXEXR, SSVKXQP:SRVHH:EPLP:EQLSN:RLEEH:LEXAXA, RNVQXRP:TQVQL:EPLP:EQLSN:TLEDH:LAXKXE, KIPKAXX:VSQEL:EPLT:EQLSN:DMVKS:GXGXR, GIPEPXX:VSQKM:EPLT:EQLSN:NMVKS:SXAXR, SIPKAXX:VSQEL:EPLT:EQLSN:EMVKS:GXGXR, HVTKPTX:VSQKL:EPLT:EQLSN:NMVKS:SXGXH, YVPKPXX:VSQKL:EPLT:EQLSN:NMVKS:SXGXH, TVPKPXX:VSQQL:EPLT:EQLSN:NMVKS:AXGXH, AVPKAXX:VSQKL:EPLT:EQLSN:NMVKS:AXGXH, KVGKAXX:VSQKL:EPLT:EQLSN:EGMSVKS:XGXR, KASKAXX:VSQKL:EPLT:EQLSN:GMVKS:EXGXR, GSAGPXX:VSQKM:EPLT:EQLSN:GMVKS:RXGXS, AAPASXX:VSQRL:EPLT:EQLSN:DMVKS:AXGXR, STPPTXX:VSQRL:EPLT:EQLSN:DMVKS:SXGXR, HVPKPXX:VSQKL:EPLT:EQLSN:NMVKS:SXGXH, RVPSTXX:VSQKT:EPLT:EQLSN:MIVKS:XGXL, ASAAPXX:VSQAL:EPLT:EQLSN:MIVKS:XKXS, ASASPXX:VSQDL:EPLT:EQLSN:MVVKS:XKXS, KIPKAXX:VPTEL:EPLT:EQLSN:DMVVE:GXGXR, GIPEPXX:VPEKM:EPLT:EQLSN:NMTVE:SXAXR, SIPKAXX:VPTEL:EPLT:EQLSN:EMVVE:GXGXR, HVTKPTX:APTKL:EPLT:EQLSN:NMVVR:SXGXH, YVPKPXX:APTKL:EPLT:EQLSN:NMVVR:SXGXH, TVPKPXX:APTQL:EPLT:EQLSN:NMVVR:AXGXH, AVPKAXX:APTKL:EPLT:EQLSN:NMVVK:AXGXH, KVGKAXX:VPTKL:EPLT:EQLSN:EGMSVAE:XGXR, KASKAXX:VPTKL:EPLT:EQLSN:GMAVS:EXGXR, GSAGPXX:TPTKM:EPLT:EQLSN:GMVVD:RXGXS, AAPASXX:VPARL:EPLT:EQLSN:DMVVE:AXGXR, STPPTXX:VPTRL:EPLT:EQLSN:DMVVE:SXGXR, HVPKPXX:APTKL:EPLT:EQLSN:NMVVR:SXGXH, RVPSTXX:APVKT:EPLT:EQLSN:MIVEE:XGXL, ASAAPXX:VPQAL:EPLT:EQLSN:MIVRS:XKXS, NDEGLEX:VPTEE:EPLT:EQLSN:FLQHN:KXEXR, NDEGLEX:VPTGQ:EPLT:EQLSN:LEEHS:QXEXR, SSVKXQP:SRVHH:EPLT:EQLSN:RLEEH:LEXAXA, RNVQXRP:TQVQL:EPLT:EQLSN:TLEDH:LAXKXE, KIPKAXX:VPQEL:EPLT:EQLSN:DMVKS:GXGXR, GIPEPXX:VPQKM:EPLT:EQLSN:NMVKS:SXAXR, SIPKAXX:VPQEL:EPLT:EQLSN:EMVKS:GXGXR, HVTKPTX:VPQKL:EPLT:EQLSN:NMVKS:SXGXH, YVPKPXX:VPQKL:EPLT:EQLSN:NMVKS:SXGXH, TVPKPXX:VPQQL:EPLT:EQLSN:NMVKS:AXGXH, AVPKAXX:VPQKL:EPLT:EQLSN:NMVKS:AXGXH, KVGKAXX:VPQKL:EPLT:EQLSN:EGMSVKS:XGXR, KASKAXX:VPQKL:EPLT:EQLSN:GMVKS:EXGXR, GSAGPXX:VPQKM:EPLT:EQLSN:GMVKS:RXGXS, AAPASXX:VPQRL:EPLT:EQLSN:DMVKS:AXGXR, STPPTXX:VPQRL:EPLT:EQLSN:DMVKS:SXGXR, HVPKPXX:VPQKL:EPLT:EQLSN:NMVKS:SXGXH, RVPSTXX:VPQKT:EPLT:EQLSN:MIVKS:XGXL, ASAAPXX:VPQAL:EPLT:EQLSN:MIVKS:XKXS, ASASPXX:VPQDL:EPLT:EQLSN:MIVKS:XKXS, NDEGLEX:VPTGQ:SNIT:IGEMS:LEQHN:QXEXR, KIPKAXX:VPTEL:SNIT:IGEMS:DMVVE:GXGXR, GIPEPXX:VPEKM:SNIT:IGEMS:NMTVE:SXAXR, SIPKAXX:VPTEL:SNIT:IGEMS:EMVVE:GXGXR, HVTKPTX:APTKL:SNIT:IGEMS:NMVVR:SXGXH, YVPKPXX:APTKL:SNIT:IGEMS:NMVVR:SXGXH, TVPKPXX:APTQL:SNIT:IGEMS:NMVVR:AXGXH, AVPKAXX:APTKL:SNIT:IGEMS:NMVVK:AXGXH, KVGKAXX:VPTKL:SNIT:IGEMS:EGMSVAE:XGXR, KASKAXX:VPTKL:SNIT:IGEMS:GMAVS:EXGXR, GSAGPXX:TPTKM:SNIT:IGEMS:GMVVD:RXGXS, AAPASXX:VPARL:SNIT:IGEMS:DMVVE:AXGXR, STPPTXX:VPTRL:SNIT:IGEMS:DMVVE:SXGXR, HVPKPXX:APTKL:SNIT:IGEMS:NMVVR:SXGXH, RVPSTXX:APVKT:SNIT:IGEMS:MIVEE:XGXL, ASAAPXX:VPQAL:SNIT:IGEMS:MIVRS:XKXS, ASASPXX:VSQDL:SNIT:IGEMS:MIVKS:XKXS, ASASPXX:VPQDL:SNIT:IGEMS:MVVKS:XKXS, NDEGLEX:VPTGQ:SNIT:IGEMS:LEEHS:QXEXR, SSVKXQP:SRVHH:SNIT:IGEMS:RLEEH:LEXAXA, RNVQXRP:TQVQL:SNIT:IGEMS:TLEDH:LAXKXE, NDEGLEX:VPTEE:SNIT:LGEMS:FLEHS:KXEXR, KIPKAXX:VPTEL:SNIT:LGEMS:DMVVE:GXGXR, GIPEPXX:VPEKM:SNIT:LGEMS:NMTVE:SXAXR, SIPKAXX:VPTEL:SNIT:LGEMS:EMVVE:GXGXR, HVTKPTX:APTKL:SNIT:LGEMS:NMVVR:SXGXH, YVPKPXX:APTKL:SNIT:LGEMS:NMVVR:SXGXH, TVPKPXX:APTQL:SNIT:LGEMS:NMVVR:AXGXH, AVPKAXX:APTKL:SNIT:LGEMS:NMVVK:AXGXH, KVGKAXX:VPTKL:SNIT:LGEMS:EGMSVAE:XGXR, KASKAXX:VPTKL:SNIT:LGEMS:GMAVS:EXGXR, GSAGPXX:TPTKM:SNIT:LGEMS:GMVVD:RXGXS, AAPASXX:VPARL:SNIT:LGEMS:DMVVE:AXGXR, STPPTXX:VPTRL:SNIT:LGEMS:DMVVE:SXGXR, HVPKPXX:APTKL:SNIT:LGEMS:NMVVR:SXGXH, RVPSTXX:APVKT:SNIT:LGEMS:MIVEE:XGXL, ASAAPXX:VPQAL:SNIT:LGEMS:MIVRS:XKXS, ASASPXX:VSQDL:SNIT:LGEMS:MIVKS:XKXS, ASASPXX:VPQDL:SNIT:LGEMS:MVVKS:XKXS, NDEGLEX:VPTEE:SNIT:LGEMS:FLQHN:KXEXR, SSVKXQP:SRVHH:SNIT:LGEMS:RLEEH:LEXAXA, RNVQXRP:TQVQL:SNIT:LGEMS:TLEDH:LAXKXE, RNVQXRP:SRVQL:RSVK:KEVQV:TLEEH:LAXKXE, KIPKAXX:VPTEL:RSVK:KEVQV:DMVVE:GXGXR, GIPEPXX:VPEKM:RSVK:KEVQV:NMTVE:SXAXR, SIPKAXX:VPTEL:RSVK:KEVQV:EMVVE:GXGXR, HVTKPTX:APTKL:RSVK:KEVQV:NMVVR:SXGXH, YVPKPXX:APTKL:RSVK:KEVQV:NMVVR:SXGXH, TVPKPXX:APTQL:RSVK:KEVQV:NMVVR:AXGXH, AVPKAXX:APTKL:RSVK:KEVQV:NMVVK:AXGXH, KVGKAXX:VPTKL:RSVK:KEVQV:EGMSVAE:XGXR, KASKAXX:VPTKL:RSVK:KEVQV:GMAVS:EXGXR, GSAGPXX:TPTKM:RSVK:KEVQV:GMVVD:RXGXS, AAPASXX:VPARL:RSVK:KEVQV:DMVVE:AXGXR, STPPTXX:VPTRL:RSVK:KEVQV:DMVVE:SXGXR, HVPKPXX:APTKL:RSVK:KEVQV:NMVVR:SXGXH, RVPSTXX:APVKT:RSVK:KEVQV:MIVEE:XGXL, ASAAPXX:VPQAL:RSVK:KEVQV:MIVRS:XKXS, ASASPXX:VSQDL:RSVK:KEVQV:MIVKS:XKXS, ASASPXX:VPQDL:RSVK:KEVQV:MVVKS:XKXS, NDEGLEX:VPTEE:RSVK:KEVQV:FLQHN:KXEXR, NDEGLEX:VPTGQ:RSVK:KEVQV:LEEHS:QXEXR, RNVQXRP:TQVQL:RSVK:KEVQV:TLEDH:LAXKXE, SSVKXQP:TQVHH:RPVQ:KKATV:RLEDH:LEXAXA, KIPKAXX:VPTEL:RPVQ:KKATV:DMVVE:GXGXR, GIPEPXX:VPEKM:RPVQ:KKATV:NMTVE:SXAXR, SIPKAXX:VPTEL:RPVQ:KKATV:EMVVE:GXGXR, HVTKPTX:APTKL:RPVQ:KKATV:NMVVR:SXGXH, YVPKPXX:APTKL:RPVQ:KKATV:NMVVR:SXGXH, TVPKPXX:APTQL:RPVQ:KKATV:NMVVR:AXGXH, AVPKAXX:APTKL:RPVQ:KKATV:NMVVK:AXGXH, KVGKAXX:VPTKL:RPVQ:KKATV:EGMSVAE:XGXR, KASKAXX:VPTKL:RPVQ:KKATV:GMAVS:EXGXR, GSAGPXX:TPTKM:RPVQ:KKATV:GMVVD:RXGXS, AAPASXX:VPARL:RPVQ:KKATV:DMVVE:AXGXR, STPPTXX:VPTRL:RPVQ:KKATV:DMVVE:SXGXR, HVPKPXX:APTKL:RPVQ:KKATV:NMVVR:SXGXH, RVPSTXX:APVKT:RPVQ:KKATV:MIVEE:XGXL, ASAAPXX:VPQAL:RPVQ:KKATV:MIVRS:XKXS, ASASPXX:VSQDL:RPVQ:KKATV:MIVKS:XKXS, ASASPXX:VPQDL:RPVQ:KKATV:MVVKS:XKXS, NDEGLEX:VPTEE:RPVQ:KKATV:FLQHN:KXEXR, NDEGLEX:VPTGQ:RPVQ:KKATV:LEEHS:QXEXR and SSVKXQP:SRVHH:RPVQ:KKATV:RLEEH:LEXAXA.

[0436] In particular, in certain embodiments, the hexaplet PEP7:PEP5:PEP12:PEP2:PEP6:PEP8 is selected from the group consisting of GIPEPXX:VPTKM:SAIS-AA¹⁷-LYL:LKNYQ:NMVVE:SXAXR, SIPKAXX:VPTEL:SAIS-AA¹⁷-LYL:LKNYQ:EMVVE:GXGXR, HVTKPTX:VPTKL:SAIS-AA¹⁷-LYL:LKNYQ:NMVVE:SXGXH, YVPKPXX:VPTKL:SAIS-AA¹⁷-LYL:LKNYQ:NMVVE:SXGXH, TVPKPXX:VPTQL:SAIS-AA¹⁷-LYL:LKNYQ:NMVVE:AXGXH, AVPKAXX:VPTKL:SAIS-AA¹⁷-LYL:LKNYQ:NMVVE:AXGXH, KVGKAXX:VPTKL:SAIS-AA¹⁷-LYL:LKNYQ:EGMSVVE:XGXR, KASKAXX:VPTKL:SAIS-AA¹⁷-LYL:LKNYQ:GMVVE:EXGXR, GSAGPXX:VPTKM:SAIS-AA¹⁷-LYL:LKNYQ:GMVVE:RXGXS, AAPASXX:VPTRL:SAIS-AA¹⁷-LYL:LKNYQ:DMVVE:AXGXR, STPPTXX:VPTRL:SAIS-AA¹⁷-LYL:LKNYQ:DMVVE:SXGXR, HVPKPXX:VPTKL:SAIS-AA¹⁷-LYL:LKNYQ:NMVVE:SXGXH, RVPSTXX:VPTKT:SAIS-AA¹⁷-LYL:LKNYQ:MIVVE:XGXL, ASAAPXX:VPTAL:SAIS-AA¹⁷-LYL:LKNYQ:MIVVE:XKXS, ASASPXX:VPTDL:SAIS-AA¹⁷-LYL:LKNYQ:MIVVE:XKXS, ASASPXX:VPTDL:SAIS-AA¹⁷-LYL:LKNYQ:MVVVE:XKXS, NDEGLEX:VPTEE:SAIS-AA¹⁷-LYL:LKNYQ:FLVVE:KXEXR, NDEGLEX:VPTGQ:SAIS-AA¹⁷-LYL:LKNYQ:LEVVE:QXEXR, SSVKXQP:VPTHH:SAIS-AA¹⁷-LYL:LKNYQ:RLVVE:LEXAXA, RNVQXRP:VPTQL:SAIS-AA¹⁷-LYL:LKNYQ:TLVVE:LAXKXE, GIPEPXX:VPEKM:SAIS-AA¹⁷-LYL:LKNYQ:NMTVE:SXAXR, HVTKPTX:APTKL:SAIS-AA¹⁷-LYL:LKNYQ:NMVVR:SXGXH, YVPKPXX:APTKL:SAIS-AA¹⁷-LYL:LKNYQ:NMVVR:SXGXH, TVPKPXX:APTQL:SAIS-AA¹⁷-LYL:LKNYQ:NMVVR:AXGXH, AVPKAXX:APTKL:SAIS-AA¹⁷-LYL:LKNYQ:NMVVK:AXGXH, KVGKAXX:VPTKL:SAIS-AA¹⁷-LYL:LKNYQ:EGMSVAE:XGXR, KASKAXX:VPTKL:SAIS-AA¹⁷-LYL:LKNYQ:GMAVS:EXGXR, GSAGPXX:TPTKM:SAIS-AA¹⁷-LYL:LKNYQ:GMVVD:RXGXS, AAPASXX:VPARL:SAIS-AA¹⁷-LYL:LKNYQ:DMVVE:AXGXR, HVPKPXX:APTKL:SAIS-AA¹⁷-LYL:LKNYQ:NMVVR:SXGXH, RVPSTXX:APVKT:SAIS-AA¹⁷-LYL:LKNYQ:MIVEE:XGXL, ASAAPXX:VPQAL:SAIS-AA¹⁷-LYL:LKNYQ:MIVRS:XKXS, ASASPXX:VSQDL:SAIS-AA¹⁷-LYL:LKNYQ:MIVKS:XKXS, ASASPXX:VPQDL:SAIS-AA¹⁷-LYL:LKNYQ:MVVKS:XKXS, NDEGLEX:VPTEE:SAIS-AA¹⁷-LYL:LKNYQ:FLQHN:KXEXR, NDEGLEX:VPTGQ:SAIS-AA¹⁷-LYL:LKNYQ:LEEHS:QXEXR, SSVKXQP:SRVHH:SAIS-AA¹⁷-LYL:LKNYQ:RLEEH:LEXAXA, RNVQXRP:TQVQL:SAIS-AA¹⁷-LYL:LKNYQ:TLEDH:LAXKXE, KIPKAXX:VPEEL:SSLS-AA¹⁷-LFF:LKVYP:DMTVE:GXGXR, SIPKAXX:VPEEL:SSLS-AA¹⁷-LFF:LKVYP:EMTVE:GXGXR, HVTKPTX:VPEKL:SSLS-AA¹⁷-LFF:LKVYP:NMTVE:SXGXH, YVPKPXX:VPEKL:SSLS-AA¹⁷-LFF:LKVYP:NMTVE:SXGXH, TVPKPXX:VPEQL:SSLS-AA¹⁷-LFF:LKVYP:NMTVE:AXGXH, AVPKAXX:VPEKL:SSLS-AA¹⁷-LFF:LKVYP:NMTVE:AXGXH, KVGKAXX:VPEKL:SSLS-AA¹⁷-LFF:LKVYP:EGMSTVE:XGXR, KASKAXX:VPEKL:SSLS-AA¹⁷-LFF:LKVYP:GMTVE:EXGXR, GSAGPXX:VPEKM:SSLS-AA¹⁷-LFF:LKVYP:GMTVE:RXGXS, AAPASXX:VPERL:SSLS-AA¹⁷-LFF:LKVYP:DMTVE:AXGXR, STPPTXX:VPERL:SSLS-AA¹⁷-LFF:LKVYP:DMTVE:SXGXR, HVPKPXX:VPEKL:SSLS-AA¹⁷-LFF:LKVYP:NMTVE:SXGXH, RVPSTXX:VPEKT:SSLS-AA¹⁷-LFF:LKVYP:MITVE:XGXL, ASAAPXX:VPEAL:SSLS-AA¹⁷-LFF:LKVYP:MITVE:XKXS, ASASPXX:VPEDL:SSLS-AA¹⁷-LFF:LKVYP:MITVE:XKXS, ASASPXX:VPEDL:SSLS-AA¹⁷-LFF:LKVYP:MVTVE:XKXS, NDEGLEX:VPEEE:SSLS-AA¹⁷-LFF:LKVYP:FLTVE:KXEXR, NDEGLEX:VPEGQ:SSLS-AA¹⁷-LFF:LKVYP:LETVE:QXEXR, SSVKXQP:VPEHH:SSLS-AA¹⁷-LFF:LKVYP:RLTVE:LEXAXA, RNVQXRP:VPEQL:SSLS-AA¹⁷-LFF:LKVYP:TLTVE:LAXKXE, KIPKAXX:VPTEL:SSLS-AA¹⁷-LFF:LKVYP:DMVVE:GXGXR, SIPKAXX:VPTEL:SSLS-AA¹⁷-LFF:LKVYP:EMVVE:GXGXR, HVTKPTX:APTKL:SSLS-AA¹⁷-LFF:LKVYP:NMVVR:SXGXH, YVPKPXX:APTKL:SSLS-AA¹⁷-LFF:LKVYP:NMVVR:SXGXH, TVPKPXX:APTQL:SSLS-AA¹⁷-LFF:LKVYP:NMVVR:AXGXH, AVPKAXX:APTKL:SSLS-AA¹⁷-LFF:LKVYP:NMVVK:AXGXH, KVGKAXX:VPTKL:SSLS-AA¹⁷-LFF:LKVYP:EGMSVAE:XGXR, KASKAXX:VPTKL:SSLS-AA¹⁷-LFF:LKVYP:GMAVS:EXGXR, GSAGPXX:TPTKM:SSLS-AA¹⁷-LFF:LKVYP:GMVVD:RXGXS, AAPASXX:VPARL:SSLS-AA¹⁷-LFF:LKVYP:DMVVE:AXGXR, STPPTXX:VPTRL:SSLS-AA¹⁷-LFF:LKVYP:DMVVE:SXGXR, HVPKPXX:APTKL:SSLS-AA¹⁷-LFF:LKVYP:NMVVR:SXGXH, RVPSTXX:APVKT:SSLS-AA¹⁷-LFF:LKVYP:MIVEE:XGXL, ASAAPXX:VPQAL:SSLS-AA¹⁷-LFF:LKVYP:MIVRS:XKXS, ASASPXX:VSQDL:SSLS-AA¹⁷-LFF:LKVYP:MIVKS:XKXS, ASASPXX:VPQDL:SSLS-AA¹⁷-LFF:LKVYP:MVVKS:XKXS, NDEGLEX:VPTEE:SSLS-AA¹⁷-LFF:LKVYP:FLQHN:KXEXR, NDEGLEX:VPTGQ:SSLS-AA¹⁷-LFF:LKVYPIEEHS:QXEXR, SSVKXQP:SRVHH:SSLS-AA¹⁷-LFF:LKVYP:RLEEH:LEXAXA, RNVQXRP:TQVQL:SSLS-AA¹⁷-LFF:LKVYP:TLEDH:LAXKXE, KIPKAXX:VPTEL:SAIS-AA¹⁷-LYL:LKNYQ:DMVVE:GXGXR, KIPKAXX:APTEL:NAIS-AA¹⁷-LYFIKKYR:DMVVR:GXGXR, GIPEPXX:APTKM:NAIS-AA¹⁷-LYF:LKKYR:NMVVR:SXAXR, SIPKAXX:APTEL:NAIS-AA¹⁷-LYF:LKKYR:EMVVR:GXGXR, YVPKPXX:APTKL:NAIS-AA¹⁷-LYF:LKKYR:NMVVR:SXGXH, TVPKPXX:APTQL:NAIS-AA¹⁷-LYFIKKYR:NMVVR:AXGXH, AVPKAXX:APTKL:NAIS-AA¹⁷-LYFIKKYR:NMVVR:AXGXH, KVGKAXX:APTKL:NAIS-AA¹⁷-LYFIKKYR:EGMSVVR:XGXR, KASKAXX:APTKL:NAIS-AA¹⁷-LYF:LKKYR:GMVVR:EXGXR, GSAGPXX:APTKM:NAIS-AA¹⁷-LYFIKKYR:GMVVR:RXGXS, AAPASXX:APTRL:NAIS-AA¹⁷-LYFIKKYR:DMVVR:AXGXR, STPPTXX:APTRL:NAIS-AA¹⁷-LYF:LKKYR:DMVVR:SXGXR, HVPKPXX:APTKL:NAIS-AA¹⁷-LYF:LKKYR:NMVVR:SXGXH, RVPSTXX:APTKT:NAIS-AA¹⁷-LYFIKKYR:MIVVR:XGXL, ASAAPXX:APTAL:NAIS-AA¹⁷-LYF:LKKYR:MIVVR:XKXS, ASASPXX:APTDL:NAIS-AA¹⁷-LYFIKKYR:MIVVR:XKXS, ASASPXX:APTDL:NAIS-AA¹⁷-LYFIKKYR:MVVVR:XKXS, NDEGLEX:APTEE:NAIS-AA¹⁷-LYF:LKKYR:FLVVR:KXEXR, NDEGLEX:APTGQ:NAIS-AA¹⁷-LYFIKKYR:LEVVR:QXEXR, SSVKXQP:APTHH:NAIS-AA¹⁷-LYFIKKYR:RLVVR:LEXAXA, RNVQXRP:APTQL:NAIS-AA¹⁷-LYFIKKYR:TLVVR:LAXKXE, KIPKAXX:VPTEL:NAIS-AA¹⁷-LYFIKKYR:DMVVE:GXGXR, GIPEPXX:VPEKM:NAIS-AA¹⁷-LYFIKKYR:NMTVE:SXAXR, SIPKAXX:VPTEL:NAIS-AA¹⁷-LYF:LKKYR:EMVVE:GXGXR, AVPKAXX:APTKL:NAIS-AA¹⁷-LYFIKKYR:NMVVK:AXGXH, KVGKAXX:VPTKL:NAIS-AA¹⁷-LYFIKKYR:EGMSVAE:XGXR, KASKAXX:VPTKL:NAIS-AA¹⁷-LYFIKKYR:GMAVS:EXGXR, GSAGPXX:TPTKM:NAIS-AA¹⁷-LYFIKKYR:GMVVD:RXGXS, AAPASXX:VPARL:NAIS-AA¹⁷-LYFIKKYR:DMVVE:AXGXR, STPPTXX:VPTRL:NAIS-AA¹⁷-LYF:LKKYR:DMVVE:SXGXR, RVPSTXX:APVKT:NAIS-AA¹⁷-LYFIKKYR:MIVEE:XGXL, ASAAPXX:VPQAL:NAIS-AA¹⁷-LYFIKKYR:MIVRS:XKXS, ASASPXX:VSQDL:NAIS-AA¹⁷-LYF:LKKYR:MIVKS:XKXS, ASASPXX:VPQDL:NAIS-AA¹⁷-LYFIKKYR:MVVKS:XKXS, NDEGLEX:VPTEE:NAIS-AA¹⁷-LYFIKKYR:FLQHN:KXEXR, NDEGLEX:VPTGQ:NAIS-AA¹⁷-LYFIKKYR:LEEHS:QXEXR, SSVKXQP:SRVHH:NAIS-AA¹⁷-LYFIKKYR:RLEEH:LEXAXA, RNVQXRP:TQVQL:NAIS-AA¹⁷-LYFIKKYR:TLEDH:LAXKXE, HVTKPTX:APTKL:NAIS-AA¹⁷-LYF:LKKYR:NMVVR:SXGXH, KIPKAXX:APTEL:SATS-AA¹⁷-LYY:LRKHR:DMVVK:GXGXR, GIPEPXX:APTKM:SATS-AA¹⁷-LYY:LRKHR:NMVVK:SXAXR, SIPKAXX:APTEL:SATS-AA¹⁷-LYY:LRKHR:EMVVK:GXGXR, HVTKPTX:APTKL:SATS-AA¹⁷-LYY:LRKHR:NMVVK:SXGXH, YVPKPXX:APTKL:SATS-AA¹⁷-LYY:LRKHR:NMVVK:SXGXH, TVPKPXX:APTQL:SATS-AA¹⁷-LYY:LRKHR:NMVVK:AXGXH, KVGKAXX:APTKL:SATS-AA¹⁷-LYY:LRKHR:EGMSVVK:XGXR, KASKAXX:APTKL:SATS-AA¹⁷-LYY:LRKHR:GMVVK:EXGXR, GSAGPXX:APTKM:SATS-AA¹⁷-LYY:LRKHR:GMVVK:RXGXS, AAPASXX:APTRL:SATS-AA¹⁷-LYY:LRKHR:DMVVK:AXGXR, STPPTXX:APTRL:SATS-AA¹⁷-LYY:LRKHR:DMVVK:SXGXR, HVPKPXX:APTKL:SATS-AA¹⁷-LYY:LRKHR:NMVVK:SXGXH, RVPSTXX:APTKT:SATS-AA¹⁷-LYY:LRKHR:MIVVK:XGXL, ASAAPXX:APTAL:SATS-AA¹⁷-LYY:LRKHR:MIVVK:XKXS, ASASPXX:APTDL:SATS-AA¹⁷-LYY:LRKHR:MIVVK:XKXS, ASASPXX:APTDL:SATS-AA¹⁷-LYY:LRKHR:MVVVK:XKXS, NDEGLEX:APTEE:SATS-AA¹⁷-LYY:LRKHR:FLVVK:KXEXR, NDEGLEX:APTGQ:SATS-AA¹⁷-LYY:LRKHR:LEVVK:QXEXR, SSVKXQP:APTHH:SATS-AA¹⁷-LYY:LRKHR:RLVVK:LEXAXA, RNVQXRP:APTQL:SATS-AA¹⁷-LYY:LRKHR:TLVVKIAXKXE, KIPKAXX:VPTEL:SATS-AA¹⁷-LYY:LRKHR:DMVVE:GXGXR, GIPEPXX:VPEKM:SATS-AA¹⁷-LYY:LRKHR:NMTVE:SXAXR, SIPKAXX:VPTEL:SATS-AA¹⁷-LYY:LRKHR:EMVVE:GXGXR, HVTKPTX:APTKL:SATS-AA¹⁷-LYY:LRKHR:NMVVR:SXGXH, YVPKPXX:APTKL:SATS-AA¹⁷-LYY:LRKHR:NMVVR:SXGXH, TVPKPXX:APTQL:SATS-AA¹⁷-LYY:LRKHR:NMVVR:AXGXH, KVGKAXX:VPTKL:SATS-AA¹⁷-LYY:LRKHR:EGMSVAE:XGXR, KASKAXX:VPTKL:SATS-AA¹⁷-LYY:LRKHR:GMAVS:EXGXR, GSAGPXX:TPTKM:SATS-AA¹⁷-LYY:LRKHR:GMVVD:RXGXS, AAPASXX:VPARL:SATS-AA¹⁷-LYY:LRKHR:DMVVE:AXGXR, STPPTXX:VPTRL:SATS-AA¹⁷-LYY:LRKHR:DMVVE:SXGXR, HVPKPXX:APTKL:SATS-AA¹⁷-LYY:LRKHR:NMVVR:SXGXH, RVPSTXX:APVKT:SATS-AA¹⁷-LYY:LRKHR:MIVEE:XGXL, ASAAPXX:VPQAL:SATS-AA¹⁷-LYY:LRKHR:MIVRS:XKXS, ASASPXX:VSQDL:SATS-AA¹⁷-LYY:LRKHR:MIVKS:XKXS, ASASPXX:VPQDL:SATS-AA¹⁷-LYY:LRKHR:MVVKS:XKXS, NDEGLEX:VPTEE:SATS-AA¹⁷-LYY:LRKHR:FLQHN:KXEXR, NDEGLEX:VPTGQ:SATS-AA¹⁷-LYY:LRKHR:LEEHS:QXEXR, SSVKXQP:SRVHH:SATS-AA¹⁷-LYY:LRKHR:RLEEH:LEXAXA, RNVQXRP:TQVQL:SATS-AA¹⁷-LYY:LRKHR:TLEDH:LAXKXE, KIPKAXX:VPTEL:SPIS-AA¹⁷-LYK:LKYHY:DMVAE:GXGXR, GIPEPXX:VPTKM:SPIS-AA¹⁷-LYK:LKYHY:NMVAE:SXAXR, SIPKAXX:VPTEL:SPIS-AA¹⁷-LYK:LKYHY:EMVAE:GXGXR, HVTKPTX:VPTKL:SPIS-AA¹⁷-LYK:LKYHY:NMVAE:SXGXH, YVPKPXX:VPTKL:SPIS-AA¹⁷-LYK:LKYHY:NMVAE:SXGXH, TVPKPXX:VPTQL:SPIS-AA¹⁷-LYK:LKYHY:NMVAE:AXGXH, AVPKAXX:VPTKL:SPIS-AA¹⁷-LYK:LKYHY:NMVAE:AXGXH, KASKAXX:VPTKL:SPIS-AA¹⁷-LYK:LKYHY:GMVAE:EXGXR, GSAGPXX:VPTKM:SPIS-AA¹⁷-LYK:LKYHY:GMVAE:RXGXS, AAPASXX:VPTRL:SPIS-AA¹⁷-LYK:LKYHY:DMVAE:AXGXR, STPPTXX:VPTRL:SPIS-AA¹⁷-LYK:LKYHY:DMVAE:SXGXR, HVPKPXX:VPTKL:SPIS-AA¹⁷-LYK:LKYHY:NMVAE:SXGXH, RVPSTXX:VPTKT:SPIS-AA¹⁷-LYK:LKYHY:MIVAE:XGXL, ASAAPXX:VPTAL:SPIS-AA¹⁷-LYK:LKYHY:MIVAE:XKXS, ASASPXX:VPTDL:SPIS-AA¹⁷-LYK:LKYHY:MIVAE:XKXS, ASASPXX:VPTDL:SPIS-AA¹⁷-LYK:LKYHY:MVVAE:XKXS, NDEGLEX:VPTEE:SPIS-AA¹⁷-LYK:LKYHY:FLVAE:KXEXR, NDEGLEX:VPTGQ:SPIS-AA¹⁷-LYK:LKYHY:LEVAE:QXEXR, SSVKXQP:VPTHH:SPIS-AA¹⁷-LYK:LKYHY:RLVAE:LEXAXA, RNVQXRP:VPTQL:SPIS-AA¹⁷-LYK:LKYHY:TLVAE:LAXKXE, KIPKAXX:VPTEL:SPIS-AA¹⁷-LYK:LKYHY:DMVVE:GXGXR, GIPEPXX:VPEKM:SPIS-AA¹⁷-LYK:LKYHY:NMTVE:SXAXR, SIPKAXX:VPTEL:SPIS-AA¹⁷-LYK:LKYHY:EMVVE:GXGXR, HVTKPTX:APTKL:SPIS-AA¹⁷-LYK:LKYHY:NMVVR:SXGXH, YVPKPXX:APTKL:SPIS-AA¹⁷-LYK:LKYHY:NMVVR:SXGXH, TVPKPXX:APTQL:SPIS-AA¹⁷-LYK:LKYHY:NMVVR:AXGXH, AVPKAXX:APTKL:SPIS-AA¹⁷-LYK:LKYHY:NMVVK:AXGXH, KASKAXX:VPTKL:SPIS-AA¹⁷-LYK:LKYHY:GMAVS:EXGXR, GSAGPXX:TPTKM:SPIS-AA¹⁷-LYK:LKYHY:GMVVD:RXGXS, AAPASXX:VPARL:SPIS-AA¹⁷-LYKIKYHY:DMVVE:AXGXR, STPPTXX:VPTRL:SPIS-AA¹⁷-LYK:LKYHY:DMVVE:SXGXR, HVPKPXX:APTKL:SPIS-AA¹⁷-LYK:LKYHY:NMVVR:SXGXH, RVPSTXX:APVKT:SPIS-AA¹⁷-LYK:LKYHY:MIVEE:XGXL, ASAAPXX:VPQAL:SPIS-AA¹⁷-LYK:LKYHY:MIVRS:XKXS, ASASPXX:VSQDL:SPIS-AA¹⁷-LYK:LKYHY:MIVKS:XKXS, ASASPXX:VPQDL:SPIS-AA¹⁷-LYK:LKYHY:MVVKS:XKXS, NDEGLEX:VPTEE:SPIS-AA¹⁷-LYK:LKYHY:FLQHN:KXEXR, NDEGLEX:VPTGQ:SPIS-AA¹⁷-LYK:LKYHY:LEEHS:QXEXR, SSVKXQP:SRVHH:SPIS-AA¹⁷-LYK:LKYHY:RLEEH:LEXAXA, RNVQXRP:TQVQL:SPIS-AA¹⁷-LYK:LKYHY:TLEDH:LAXKXE, KIPKAXX:VPTEL:EPIS-AA¹⁷-LYL:KFKYE:DMAVS:GXGXR, GIPEPXX:VPTKM:EPIS-AA¹⁷-LYL:KFKYE:NMAVS:SXAXR, SIPKAXX:VPTEL:EPIS-AA¹⁷-LYL:KFKYE:EMAVS:GXGXR, HVTKPTX:VPTKL:EPIS-AA¹⁷-LYL:KFKYE:NMAVS:SXGXH, YVPKPXX:VPTKL:EPIS-AA¹⁷-LYL:KFKYE:NMAVS:SXGXH, TVPKPXX:VPTQL:EPIS-AA¹⁷-LYL:KFKYE:NMAVS:AXGXH, AVPKAXX:VPTKL:EPIS-AA¹⁷-LYL:KFKYE:NMAVS:AXGXH, KVGKAXX:VPTKL:EPIS-AA¹⁷-LYL:KFKYE:EGMSAVS:XGXR, GSAGPXX:VPTKM:EPIS-AA¹⁷-LYL:KFKYE:GMAVS:RXGXS, AAPASXX:VPTRL:EPIS-AA¹⁷-LYL:KFKYE:DMAVS:AXGXR, STPPTXX:VPTRL:EPIS-AA¹⁷-LYL:KFKYE:DMAVS:SXGXR, HVPKPXX:VPTKL:EPIS-AA¹⁷-LYL:KFKYE:NMAVS:SXGXH, RVPSTXX:VPTKT:EPIS-AA¹⁷-LYL:KFKYE:MIAVS:XGXL, ASAAPXX:VPTAL:EPIS-AA¹⁷-LYL:KFKYE:MIAVS:XKXS, ASASPXX:VPTDLEPIS-AA¹⁷-LYL:KFKYE:MIAVS:XKXS, ASASPXX:VPTDLEPIS-AA¹⁷-LYL:KFKYE:MVAVS:XKXS, NDEGLEX:VPTEE:EPIS-AA¹⁷-LYL:KFKYE:FLAVS:KXEXR, NDEGLEX:VPTGQ:EPIS-AA¹⁷-LYL:KFKYE:LEAVS:QXEXR, SSVKXQP:VPTHH:EPIS-AA¹⁷-LYL:KFKYE:RLAVS:LEXAXA, RNVQXRP:VPTQL:EPIS-AA¹⁷-LYL:KFKYE:TLAVS:LAXKXE, KIPKAXX:VPTEL:EPIS-AA¹⁷-LYL:KFKYE:DMVVE:GXGXR, GIPEPXX:VPEKM:EPIS-AA¹⁷-LYL:KFKYE:NMTVE:SXAXR, SIPKAXX:VPTEL:EPIS-AA¹⁷-LYL:KFKYE:EMVVE:GXGXR, HVTKPTX:APTKL:EPIS-AA¹⁷-LYL:KFKYE:NMVVR:SXGXH, YVPKPXX:APTKL:EPIS-AA¹⁷-LYL:KFKYE:NMVVR:SXGXH, TVPKPXX:APTQL:EPIS-AA¹⁷-LYL:KFKYE:NMVVR:AXGXH, AVPKAXX:APTKL:EPIS-AA¹⁷-LYL:KFKYE:NMVVK:AXGXH, KVGKAXX:VPTKL:EPIS-AA¹⁷-LYL:KFKYE:EGMSVAE:XGXR, GSAGPXX:TPTKM:EPIS-AA¹⁷-LYL:KFKYE:GMVVD:RXGXS, AAPASXX:VPARL:EPIS-AA¹⁷-LYL:KFKYE:DMVVE:AXGXR, STPPTXX:VPTRL:EPIS-AA¹⁷-LYL:KFKYE:DMVVE:SXGXR, HVPKPXX:APTKL:EPIS-AA¹⁷-LYL:KFKYE:NMVVR:SXGXH, RVPSTXX:APVKT:EPIS-AA¹⁷-LYL:KFKYE:MIVEE:XGXL, ASAAPXX:VPQAL:EPIS-AA¹⁷-LYL:KFKYE:MIVRS:XKXS, ASASPXX:VSQDLEPIS-AA¹⁷-LYL:KFKYE:MIVKS:XKXS, ASASPXX:VPQDL:EPIS-AA¹⁷-LYL:KFKYE:MVVKS:XKXS, NDEGLEX:VPTEE:EPIS-AA¹⁷-LYL:KFKYE:FLQHN:KXEXR, NDEGLEX:VPTGQ:EPIS-AA¹⁷-LYL:KFKYE:LEEHS:QXEXR, SSVKXQP:SRVHH:EPIS-AA¹⁷-LYL:KFKYE:RLEEH:LEXAXA, RNVQXRP:TQVQL:EPIS-AA¹⁷-LYL:KFKYE:TLEDH:LAXKXE, KIPKAXX:TPTEL:SPIN-AA¹⁷-LYF:YGKIP:DMVVD:GXGXR, GIPEPXX:TPTKM:SPIN-AA¹⁷-LYF:YGKIP:NMVVD:SXAXR, SIPKAXX:TPTEL:SPIN-AA¹⁷-LYF:YGKIP:EMVVD:GXGXR, HVTKPTX:TPTKL:SPIN-AA¹⁷-LYF:YGKIP:NMVVD:SXGXH, YVPKPXX:TPTKL:SPIN-AA¹⁷-LYF:YGKIP:NMVVD:SXGXH, TVPKPXX:TPTQL:SPIN-AA¹⁷-LYF:YGKIP:NMVVD:AXGXH, AVPKAXX:TPTKL:SPIN-AA¹⁷-LYF:YGKIP:NMVVD:AXGXH, KVGKAXX:TPTKL:SPIN-AA¹⁷-LYF:YGKIP:EGMSVVD:XGXR, KASKAXX:TPTKL:SPIN-AA¹⁷-LYF:YGKIP:GMVVD:EXGXR, AAPASXX:TPTRL:SPIN-AA¹⁷-LYF:YGKIP:DMVVD:AXGXR, STPPTXX:TPTRL:SPIN-AA¹⁷-LYF:YGKIP:DMVVD:SXGXR, HVPKPXX:TPTKL:SPIN-AA¹⁷-LYF:YGKIP:NMVVD:SXGXH, RVPSTXX:TPTKT:SPIN-AA¹⁷-LYF:YGKIP:MIVVD:XGXL, ASAAPXX:TPTAL:SPIN-AA¹⁷-LYF:YGKIP:MIVVD:XKXS, ASASPXX:TPTDL:SPIN-AA¹⁷-LYF:YGKIP:MIVVD:XKXS, ASASPXX:TPTDL:SPIN-AA¹⁷-LYF:YGKIP:MVVVD:XKXS, NDEGLEX:TPTEE:SPIN-AA¹⁷-LYF:YGKIP:FLVVD:KXEXR, NDEGLEX:TPTGQ:SPIN-AA¹⁷-LYF:YGKIP:LEVVD:QXEXR, SSVKXQP:TPTHH:SPIN-AA¹⁷-LYF:YGKIP:RLVVD:LEXAXA, RNVQXRP:TPTQL:SPIN-AA¹⁷-LYF:YGKIP:TLVVD:LAXKXE, KIPKAXX:VPTEL:SPIN-AA¹⁷-LYF:YGKIP:DMVVE:GXGXR, GIPEPXX:VPEKM:SPIN-AA¹⁷-LYF:YGKIP:NMTVE:SXAXR, SIPKAXX:VPTEL:SPIN-AA¹⁷-LYF:YGKIP:EMVVE:GXGXR, HVTKPTX:APTKL:SPIN-AA¹⁷-LYF:YGKIP:NMVVR:SXGXH, YVPKPXX:APTKL:SPIN-AA¹⁷-LYF:YGKIP:NMVVR:SXGXH, TVPKPXX:APTQL:SPIN-AA¹⁷-LYF:YGKIP:NMVVR:AXGXH, AVPKAXX:APTKL:SPIN-AA¹⁷-LYF:YGKIP:NMVVK:AXGXH, KVGKAXX:VPTKL:SPIN-AA¹⁷-LYF:YGKIP:EGMSVAE:XGXR, KASKAXX:VPTKL:SPIN-AA¹⁷-LYF:YGKIP:GMAVS:EXGXR, AAPASXX:VPARL:SPIN-AA¹⁷-LYF:YGKIP:DMVVE:AXGXR, STPPTXX:VPTRL:SPIN-AA¹⁷-LYF:YGKIP:DMVVE:SXGXR, HVPKPXX:APTKL:SPIN-AA¹⁷-LYF:YGKIP:NMVVR:SXGXH, RVPSTXX:APVKT:SPIN-AA¹⁷-LYF:YGKIP:MIVEE:XGXL, ASAAPXX:VPQAL:SPIN-AA¹⁷-LYF:YGKIP:MIVRS:XKXS, ASASPXX:VSQDL:SPIN-AA¹⁷-LYF:YGKIP:MIVKS:XKXS, ASASPXX:VPQDL:SPIN-AA¹⁷-LYF:YGKIP:MVVKS:XKXS, NDEGLEX:VPTEE:SPIN-AA¹⁷-LYF:YGKIP:FLQHN:KXEXR, NDEGLEX:VPTGQ:SPIN-AA¹⁷-LYF:YGKIP:LEEHS:QXEXR, SSVKXQP:SRVHH:SPIN-AA¹⁷-LYF:YGKIP:RLEEH:LEXAXA, RNVQXRP:TQVQL:SPIN-AA¹⁷-LYF:YGKIP:TLEDH:LAXKXE, KIPKAXX:VPAEL:SPIS-AA¹⁷-LYI:YKQYE:DMVVE:GXGXR, GIPEPXX:VPAKM:SPIS-AA¹⁷-LYI:YKQYE:NMVVE:SXAXR, SIPKAXX:VPAEL:SPIS-AA¹⁷-LYI:YKQYE:EMVVE:GXGXR, HVTKPTX:VPAKL:SPIS-AA¹⁷-LYI:YKQYE:NMVVE:SXGXH, YVPKPXX:VPAKL:SPIS-AA¹⁷-LYI:YKQYE:NMVVE:SXGXH, TVPKPXX:VPAQL:SPIS-AA¹⁷-LYI:YKQYE:NMVVE:AXGXH, AVPKAXX:VPAKL:SPIS-AA¹⁷-LYI:YKQYE:NMVVE:AXGXH, KVGKAXX:VPAKL:SPIS-AA¹⁷-LYI:YKQYE:EGMSVVE:XGXR, KASKAXX:VPAKL:SPIS-AA¹⁷-LYI:YKQYE:GMVVE:EXGXR, GSAGPXX:VPAKM:SPIS-AA¹⁷-LYI:YKQYE:GMVVE:RXGXS, STPPTXX:VPARL:SPIS-AA¹⁷-LYI:YKQYE:DMVVE:SXGXR, HVPKPXX:VPAKL:SPIS-AA¹⁷-LYI:YKQYE:NMVVE:SXGXH, RVPSTXX:VPAKT:SPIS-AA¹⁷-LYI:YKQYE:MIVVE:XGXL, ASAAPXX:VPAAL:SPIS-AA¹⁷-LYI:YKQYE:MIVVE:XKXS, ASASPXX:VPADL:SPIS-AA¹⁷-LYI:YKQYE:MIVVE:XKXS, ASASPXX:VPADL:SPIS-AA¹⁷-LYI:YKQYE:MVVVE:XKXS, NDEGLEX:VPAEE:SPIS-AA¹⁷-LYI:YKQYE:FLVVE:KXEXR, NDEGLEX:VPAGQ:SPIS-AA¹⁷-LYI:YKQYE:LEVVE:QXEXR, SSVKXQP:VPAHH:SPIS-AA¹⁷-LYI:YKQYE:RLVVE:LEXAXA, RNVQXRP:VPAQL:SPIS-AA¹⁷-LYI:YKQYE:TLVVE:LAXKXE, KIPKAXX:VPTEL:SPIS-AA¹⁷-LYI:YKQYE:DMVVE:GXGXR, GIPEPXX:VPEKM:SPIS-AA¹⁷-LYI:YKQYE:NMTVE:SXAXR, SIPKAXX:VPTEL:SPIS-AA¹⁷-LYI:YKQYE:EMVVE:GXGXR, HVTKPTX:APTKL:SPIS-AA¹⁷-LYI:YKQYE:NMVVR:SXGXH, YVPKPXX:APTKL:SPIS-AA¹⁷-LYI:YKQYE:NMVVR:SXGXH, TVPKPXX:APTQL:SPIS-AA¹⁷-LYI:YKQYE:NMVVR:AXGXH, AVPKAXX:APTKL:SPIS-AA¹⁷-LYI:YKQYE:NMVVK:AXGXH, KVGKAXX:VPTKL:SPIS-AA¹⁷-LYI:YKQYE:EGMSVAE:XGXR, KASKAXX:VPTKL:SPIS-AA¹⁷-LYI:YKQYE:GMAVS:EXGXR, GSAGPXX:TPTKM:SPIS-AA¹⁷-LYI:YKQYE:GMVVD:RXGXS, STPPTXX:VPTRL:SPIS-AA¹⁷-LYI:YKQYE:DMVVE:SXGXR, HVPKPXX:APTKL:SPIS-AA¹⁷-LYI:YKQYE:NMVVR:SXGXH, RVPSTXX:APVKT:SPIS-AA¹⁷-LYI:YKQYE:MIVEE:XGXL, ASAAPXX:VPQAL:SPIS-AA¹⁷-LYI:YKQYE:MIVRS:XKXS, ASASPXX:VSQDL:SPIS-AA¹⁷-LYI:YKQYE:MIVKS:XKXS, ASASPXX:VPQDL:SPIS-AA¹⁷-LYI:YKQYE:MVVKS:XKXS, NDEGLEX:VPTEE:SPIS-AA¹⁷-LYI:YKQYE:FLQHN:KXEXR, NDEGLEX:VPTGQ:SPIS-AA¹⁷-LYI:YKQYE:LEEHS:QXEXR, SSVKXQP:SRVHH:SPIS-AA¹⁷-LYI:YKQYE:RLEEH:LEXAXA, RNVQXRP:TQVQL:SPIS-AA¹⁷-LYI:YKQYE:TLEDH:LAXKXE, KIPKAXX:VPTEL:SPIS-AA¹⁷-LFI:YKQYE:DMVVE:GXGXR, GIPEPXX:VPTKM:SPIS-AA¹⁷-LFINKQYE:NMVVE:SXAXR, SIPKAXX:VPTEL:SPIS-AA¹⁷-LFINKQYE:EMVVE:GXGXR, HVTKPTX:VPTKL:SPIS-AA¹⁷-LFI:YKQYE:NMVVE:SXGXH, YVPKPXX:VPTKL:SPIS-AA¹⁷-LFLYKQYE:NMVVE:SXGXH, TVPKPXX:VPTQL:SPIS-AA¹⁷-LFI:YKQYE:NMVVE:AXGXH, AVPKAXX:VPTKL:SPIS-AA¹⁷-LFI:YKQYE:NMVVE:AXGXH, KVGKAXX:VPTKL:SPIS-AA¹⁷-LFLYKQYE:EGMSVVE:XGXR, KASKAXX:VPTKL:SPIS-AA¹⁷-LFINKQYE:GMVVE:EXGXR, GSAGPXX:VPTKM:SPIS-AA¹⁷-LFI:YKQYE:GMVVE:RXGXS, AAPASXX:VPTRL:SPIS-AA¹⁷-LRYKQYE:DMVVE:AXGXR, HVPKPXX:VPTKL:SPIS-AA¹⁷-LFINKQYE:NMVVE:SXGXH, RVPSTXX:VPTKT:SPIS-AA¹⁷-LFI:YKQYE:MIVVE:XGXL, ASAAPXX:VPTAL:SPIS-AA¹⁷-LRYKQYE:MIVVE:XKXS, ASASPXX:VPTDL:SPIS-AA¹⁷-LFINKQYE:MIVVE:XKXS, ASASPXX:VPTDL:SPIS-AA¹⁷-LRYKQYE:MVVVE:XKXS, NDEGLEX:VPTEE:SPIS-AA¹⁷-LFINKQYE:FLVVE:KXEXR, NDEGLEX:VPTGQ:SPIS-AA¹⁷-LRYKQYE:LEVVE:QXEXR, SSVKXQP:VPTHH:SPIS-AA¹⁷-LFI:YKQYE:RLVVE:LEXAXA, RNVQXRP:VPTQL:SPIS-AA¹⁷-LRYKQYE:TLVVE:LAXKXE, GIPEPXX:VPEKM:SPIS-AA¹⁷-LFINKQYE:NMTVE:SXAXR, HVTKPTX:APTKL:SPIS-AA¹⁷-LFI:YKQYE:NMVVR:SXGXH, YVPKPXX:APTKL:SPIS-AA¹⁷-LFLYKQYE:NMVVR:SXGXH, TVPKPXX:APTQL:SPIS-AA¹⁷-LFINKQYE:NMVVR:AXGXH, AVPKAXX:APTKL:SPIS-AA¹⁷-LFI:YKQYE:NMVVK:AXGXH, KVGKAXX:VPTKL:SPIS-AA¹⁷-LFLYKQYE:EGMSVAE:XGXR, KASKAXX:VPTKL:SPIS-AA¹⁷-LFINKQYE:GMAVS:EXGXR, GSAGPXX:TPTKM:SPIS-AA¹⁷-LFI:YKQYE:GMVVD:RXGXS, AAPASXX:VPARL:SPIS-AA¹⁷-LRYKQYE:DMVVE:AXGXR, HVPKPXX:APTKL:SPIS-AA¹⁷-LFINKQYE:NMVVR:SXGXH, RVPSTXX:APVKT:SPIS-AA¹⁷-LRYKQYE:MIVEE:XGXL, ASAAPXX:VPQAL:SPIS-AA¹⁷-LFLYKQYE:MIVRS:XKXS, ASASPXX:VSQDL:SPIS-AA¹⁷-LFLYKQYE:MIVKS:XKXS, ASASPXX:VPQDL:SPIS-AA¹⁷-LFI:YKQYE:MVVKS:XKXS, NDEGLEX:VPTEE:SPIS-AA¹⁷-LRYKQYE:FLQHN:KXEXR, NDEGLEX:VPTGQ:SPIS-AA¹⁷-LRYKQYE:LEEHS:QXEXR, SSVKXQP:SRVHH:SPIS-AA¹⁷-LFI:YKQYE:RLEEH:LEXAXA, RNVQXRP:TQVQL:SPIS-AA¹⁷-LFLYKQYE:TLEDH:LAXKXE, KIPKAXX:APVEL:KPLS-AA¹⁷-LYV:DHHKD:DMVEE:GXGXR, GIPEPXX:APVKM:KPLS-AA¹⁷-LYV:DHHKD:NMVEE:SXAXR, SIPKAXX:APVEL:KPLS-AA¹⁷-LYV:DHHKD:EMVEE:GXGXR, HVTKPTX:APVKL:KPLS-AA¹⁷-LYV:DHHKD:NMVEE:SXGXH, YVPKPXX:APVKL:KPLS-AA¹⁷-LYV:DHHKD:NMVEE:SXGXH, TVPKPXX:APVQL:KPLS-AA¹⁷-LYV:DHHKD:NMVEE:AXGXH, AVPKAXX:APVKL:KPLS-AA¹⁷-LYV:DHHKD:NMVEE:AXGXH, KVGKAXX:APVKL:KPLS-AA¹⁷-LYV:DHHKD:EGMSVEE:XGXR, KASKAXX:APVKL:KPLS-AA¹⁷-LYV:DHHKD:GMVEE:EXGXR, GSAGPXX:APVKM:KPLS-AA¹⁷-LYV:DHHKD:GMVEE:RXGXS, AAPASXX:APVRL:KPLS-AA¹⁷-LYV:DHHKD:DMVEE:AXGXR, STPPTXX:APVRL:KPLS-AA¹⁷-LYV:DHHKD:DMVEE:SXGXR, HVPKPXX:APVKL:KPLS-AA¹⁷-LYV:DHHKD:NMVEE:SXGXH, ASAAPXX:APVAL:KPLS-AA¹⁷-LYV:DHHKD:MIVEE:XKXS, ASASPXX:APVDL:KPLS-AA¹⁷-LYV:DHHKD:MIVEE:XKXS, ASASPXX:APVDL:KPLS-AA¹⁷-LYV:DHHKD:MVVEE:XKXS, NDEGLEX:APVEE:KPLS-AA¹⁷-LYV:DHHKD:FLVEE:KXEXR, NDEGLEX:APVGQ:KPLS-AA¹⁷-LYV:DHHKDIEVEE:QXEXR, SSVKXQP:APVHH:KPLS-AA¹⁷-LYV:DHHKD:RLVEE:LEXAXA, RNVQXRP:APVQL:KPLS-AA¹⁷-LYV:DHHKD:TLVEE:LAXKXE, KIPKAXX:VPTEL:KPLS-AA¹⁷-LYV:DHHKD:DMVVE:GXGXR, GIPEPXX:VPEKM:KPLS-AA¹⁷-LYV:DHHKD:NMTVE:SXAXR, SIPKAXX:VPTEL:KPLS-AA¹⁷-LYV:DHHKD:EMVVE:GXGXR, HVTKPTX:APTKL:KPLS-AA¹⁷-LYV:DHHKD:NMVVR:SXGXH, YVPKPXX:APTKL:KPLS-AA¹⁷-LYV:DHHKD:NMVVR:SXGXH, TVPKPXX:APTQL:KPLS-AA¹⁷-LYV:DHHKD:NMVVR:AXGXH, AVPKAXX:APTKL:KPLS-AA¹⁷-LYV:DHHKD:NMVVK:AXGXH, KVGKAXX:VPTKL:KPLS-AA¹⁷-LYV:DHHKD:EGMSVAE:XGXR, KASKAXX:VPTKL:KPLS-AA¹⁷-LYV:DHHKD:GMAVS:EXGXR, GSAGPXX:TPTKM:KPLS-AA¹⁷-LYV:DHHKD:GMVVD:RXGXS, AAPASXX:VPARL:KPLS-AA¹⁷-LYV:DHHKD:DMVVE:AXGXR, STPPTXX:VPTRL:KPLS-AA¹⁷-LYV:DHHKD:DMVVE:SXGXR, HVPKPXX:APTKL:KPLS-AA¹⁷-LYV:DHHKD:NMVVR:SXGXH, ASAAPXX:VPQAL:KPLS-AA¹⁷-LYV:DHHKD:MIVRS:XKXS, ASASPXX:VSQDL:KPLS-AA¹⁷-LYV:DHHKD:MIVKS:XKXS, ASASPXX:VPQDL:KPLS-AA¹⁷-LYV:DHHKD:MVVKS:XKXS, NDEGLEX:VPTEE:KPLS-AA¹⁷-LYV:DHHKD:FLQHN:KXEXR, NDEGLEX:VPTGQ:KPLS-AA¹⁷-LYV:DHHKD:LEEHS:QXEXR, SSVKXQP:SRVHH:KPLS-AA¹⁷-LYV:DHHKD:RLEEH:LEXAXA, RNVQXRP:TQVQL:KPLS-AA¹⁷-LYV:DHHKD:TLEDH:LAXKXE, KIPKAXX:VPQEL:EPLP-AA¹⁷-VYY:EQLSN:DMVRS:GXGXR, GIPEPXX:VPQKM:EPLP-AA¹⁷-VYY:EQLSN:NMVRS:SXAXR, SIPKAXX:VPQEL:EPLP-AA¹⁷-VYY:EQLSN:EMVRS:GXGXR, HVTKPTX:VPQKL:EPLP-AA¹⁷-VYY:EQLSN:NMVRS:SXGXH, YVPKPXX:VPQKL:EPLP-AA¹⁷-VYY:EQLSN:NMVRS:SXGXH, TVPKPXX:VPQQL:EPLP-AA¹⁷-VYY:EQLSN:NMVRS:AXGXH, AVPKAXX:VPQKL:EPLP-AA¹⁷-VYY:EQLSN:NMVRS:AXGXH, KVGKAXX:VPQKL:EPLP-AA¹⁷-VYY:EQLSN:EGMSVRS:XGXR, KASKAXX:VPQKL:EPLP-AA¹⁷-VYY:EQLSN:GMVRS:EXGXR, GSAGPXX:VPQKM:EPLP-AA¹⁷-VYY:EQLSN:GMVRS:RXGXS, AAPASXX:VPQRL:EPLP-AA¹⁷-VYY:EQLSN:DMVRS:AXGXR, STPPTXX:VPQRL:EPLP-AA¹⁷-VYY:EQLSN:DMVRS:SXGXR, HVPKPXX:VPQKL:EPLP-AA¹⁷-VYY:EQLSN:NMVRS:SXGXH, RVPSTXX:VPQKT:EPLP-AA¹⁷-VYY:EQLSN:MIVRS:XGXL, ASASPXX:VPQDLEPLP-AA¹⁷-VYY:EQLSN:MIVRS:XKXS, ASASPXX:VPQDLEPLP-AA¹⁷-VYY:EQLSN:MVVRS:XKXS, NDEGLEX:VPQEE:EPLP-AA¹⁷-VYY:EQLSN:FLVRS:KXEXR, NDEGLEX:VPQGQ:EPLP-AA¹⁷-VYY:EQLSN:LEVRS:QXEXR, SSVKXQP:VPQHH:EPLP-AA¹⁷-VYY:EQLSN:RLVRS:LEXAXA, RNVQXRP:VPQQL:EPLP-AA¹⁷-VYY:EQLSN:TLVRS:LAXKXE, KIPKAXX:VPTEL:EPLP-AA¹⁷-VYY:EQLSN:DMVVE:GXGXR, GIPEPXX:VPEKM:EPLP-AA¹⁷-VYY:EQLSN:NMTVE:SXAXR, SIPKAXX:VPTEL:EPLP-AA¹⁷-VYY:EQLSN:EMVVE:GXGXR, HVTKPTX:APTKL:EPLP-AA¹⁷-VYY:EQLSN:NMVVR:SXGXH, YVPKPXX:APTKL:EPLP-AA¹⁷-VYY:EQLSN:NMVVR:SXGXH, TVPKPXX:APTQL:EPLP-AA¹⁷-VYY:EQLSN:NMVVR:AXGXH, AVPKAXX:APTKL:EPLP-AA¹⁷-VYY:EQLSN:NMVVK:AXGXH, KVGKAXX:VPTKL:EPLP-AA¹⁷-VYY:EQLSN:EGMSVAE:XGXR, KASKAXX:VPTKL:EPLP-AA¹⁷-VYY:EQLSN:GMAVS:EXGXR, GSAGPXX:TPTKM:EPLP-AA¹⁷-VYY:EQLSN:GMVVD:RXGXS, AAPASXX:VPARL:EPLP-AA¹⁷-VYY:EQLSN:DMVVE:AXGXR, STPPTXX:VPTRL:EPLP-AA¹⁷-VYY:EQLSN:DMVVE:SXGXR, HVPKPXX:APTKL:EPLP-AA¹⁷-VYY:EQLSN:NMVVR:SXGXH, RVPSTXX:APVKT:EPLP-AA¹⁷-VYY:EQLSN:MIVEE:XGXL, ASASPXX:VSQDLEPLP-AA¹⁷-VYY:EQLSN:MIVKS:XKXS, ASASPXX:VPQDLEPLP-AA¹⁷-VYY:EQLSN:MVVKS:XKXS, NDEGLEX:VPTEE:EPLP-AA¹⁷-VYY:EQLSN:FLQHN:KXEXR, NDEGLEX:VPTGQ:EPLP-AA¹⁷-VYY:EQLSN:LEEHS:QXEXR, SSVKXQP:SRVHH:EPLP-AA¹⁷-VYY:EQLSN:RLEEH:LEXAXA, RNVQXRP:TQVQL:EPLP-AA¹⁷-VYY:EQLSN:TLEDH:LAXKXE, KIPKAXX:VSQEL:EPLT-AA¹⁷-LYY:EQLSN:DMVKS:GXGXR, GIPEPXX:VSQKM:EPLT-AA¹⁷-LYY:EQLSN:NMVKS:SXAXR, SIPKAXX:VSQEL:EPLT-AA¹⁷-LYY:EQLSN:EMVKS:GXGXR, HVTKPTX:VSQKL:EPLT-AA¹⁷-LYY:EQLSN:NMVKS:SXGXH, YVPKPXX:VSQKL:EPLT-AA¹⁷-LYY:EQLSN:NMVKS:SXGXH, TVPKPXX:VSQQL:EPLT-AA¹⁷-LYY:EQLSN:NMVKS:AXGXH, AVPKAXX:VSQKL:EPLT-AA¹⁷-LYY:EQLSN:NMVKS:AXGXH, KVGKAXX:VSQKL:EPLT-AA¹⁷-LYY:EQLSN:EGMSVKS:XGXR, KASKAXX:VSQKL:EPLT-AA¹⁷-LYY:EQLSN:GMVKS:EXGXR, GSAGPXX:VSQKM:EPLT-AA¹⁷-LYY:EQLSN:GMVKS:RXGXS, AAPASXX:VSQRL:EPLT-AA¹⁷-LYY:EQLSN:DMVKS:AXGXR, STPPTXX:VSQRL:EPLT-AA¹⁷-LYY:EQLSN:DMVKS:SXGXR, HVPKPXX:VSQKL:EPLT-AA¹⁷-LYY:EQLSN:NMVKS:SXGXH, RVPSTXX:VSQKT:EPLT-AA¹⁷-LYY:EQLSN:MIVKS:XGXL, ASAAPXX:VSQAL:EPLT-AA¹⁷-LYY:EQLSN:MIVKS:XKXS, ASASPXX:VSQDL:EPLT-AA¹⁷-LYY:EQLSN:MVVKS:XKXS, NDEGLEX:VSQEE:EPLT-AA¹⁷-LYY:EQLSN:FLVKS:KXEXR, NDEGLEX:VSQGQ:EPLT-AA¹⁷-LYY:EQLSN:LEVKS:QXEXR, SSVKXQP:VSQHH:EPLT-AA¹⁷-LYY:EQLSN:RLVKS:LEXAXA, RNVQXRP:VSQQL:EPLT-AA¹⁷-LYY:EQLSN:TLVKS:LAXKXE, KIPKAXX:VPTEL:EPLT-AA¹⁷-LYY:EQLSN:DMVVE:GXGXR, GIPEPXX:VPEKM:EPLT-AA¹⁷-LYY:EQLSN:NMTVE:SXAXR, SIPKAXX:VPTEL:EPLT-AA¹⁷-LYY:EQLSN:EMVVE:GXGXR, HVTKPTX:APTKL:EPLT-AA¹⁷-LYY:EQLSN:NMVVR:SXGXH, YVPKPXX:APTKL:EPLT-AA¹⁷-LYY:EQLSN:NMVVR:SXGXH, TVPKPXX:APTQL:EPLT-AA¹⁷-LYY:EQLSN:NMVVR:AXGXH, AVPKAXX:APTKL:EPLT-AA¹⁷-LYY:EQLSN:NMVVK:AXGXH, KVGKAXX:VPTKL:EPLT-AA¹⁷-LYY:EQLSN:EGMSVAE:XGXR, KASKAXX:VPTKL:EPLT-AA¹⁷-LYY:EQLSN:GMAVS:EXGXR, GSAGPXX:TPTKM:EPLT-AA¹⁷-LYY:EQLSN:GMVVD:RXGXS, AAPASXX:VPARL:EPLT-AA¹⁷-LYY:EQLSN:DMVVE:AXGXR, STPPTXX:VPTRL:EPLT-AA¹⁷-LYY:EQLSN:DMVVE:SXGXR, HVPKPXX:APTKL:EPLT-AA¹⁷-LYY:EQLSN:NMVVR:SXGXH, RVPSTXX:APVKT:EPLT-AA¹⁷-LYY:EQLSN:MIVEE:XGXL, ASAAPXX:VPQAL:EPLT-AA¹⁷-LYY:EQLSN:MIVRS:XKXS, ASASPXX:VPQDL:EPLT-AA¹⁷-LYY:EQLSN:MVVKS:XKXS, NDEGLEX:VPTEE:EPLT-AA¹⁷-LYY:EQLSN:FLQHN:KXEXR, NDEGLEX:VPTGQ:EPLT-AA¹⁷-LYY:EQLSN:LEEHS:QXEXR, SSVKXQP:SRVHH:EPLT-AA¹⁷-LYY:EQLSN:RLEEH:LEXAXA, RNVQXRP:TQVQL:EPLT-AA¹⁷-LYY:EQLSN:TLEDH:LAXKXE, KIPKAXX:VPQEL:EPLT-AA¹⁷-LYY:EQLSN:DMVKS:GXGXR, GIPEPXX:VPQKM:EPLT-AA¹⁷-LYY:EQLSN:NMVKS:SXAXR, SIPKAXX:VPQEL:EPLT-AA¹⁷-LYY:EQLSN:EMVKS:GXGXR, HVTKPTX:VPQKL:EPLT-AA¹⁷-LYY:EQLSN:NMVKS:SXGXH, YVPKPXX:VPQKL:EPLT-AA¹⁷-LYY:EQLSN:NMVKS:SXGXH, TVPKPXX:VPQQL:EPLT-AA¹⁷-LYY:EQLSN:NMVKS:AXGXH, AVPKAXX:VPQKL:EPLT-AA¹⁷-LYY:EQLSN:NMVKS:AXGXH, KVGKAXX:VPQKL:EPLT-AA¹⁷-LYY:EQLSN:EGMSVKS:XGXR, KASKAXX:VPQKL:EPLT-AA¹⁷-LYY:EQLSN:GMVKS:EXGXR, GSAGPXX:VPQKM:EPLT-AA¹⁷-LYY:EQLSN:GMVKS:RXGXS, AAPASXX:VPQRL:EPLT-AA¹⁷-LYY:EQLSN:DMVKS:AXGXR, STPPTXX:VPQRL:EPLT-AA¹⁷-LYY:EQLSN:DMVKS:SXGXR, HVPKPXX:VPQKL:EPLT-AA¹⁷-LYY:EQLSN:NMVKS:SXGXH, RVPSTXX:VPQKT:EPLT-AA¹⁷-LYY:EQLSN:MIVKS:XGXL, ASAAPXX:VPQAL:EPLT-AA¹⁷-LYY:EQLSN:MIVKS:XKXS, ASASPXX:VPQDL:EPLT-AA¹⁷-LYY:EQLSN:MIVKS:XKXS, NDEGLEX:VPQEE:EPLT-AA¹⁷-LYY:EQLSN:FLVKS:KXEXR, NDEGLEX:VPQGQ:EPLT-AA¹⁷-LYY:EQLSN:LEVKS:QXEXR, SSVKXQP:VPQHH:EPLT-AA¹⁷-LYY:EQLSN:RLVKS:LEXAXA, RNVQXRP:VPQQL:EPLT-AA¹⁷-LYY:EQLSN:TLVKS:LAXKXE, ASASPXX:VSQDL:EPLT-AA¹⁷-LYY:EQLSN:MIVKS:XKXS, KIPKAXX:VPTEL:SNIT-AA¹⁷-QIM:IGEMS:DMQHN:GXGXR, GIPEPXX:VPTKM:SNIT-AA¹⁷-QIM:IGEMS:NMQHN:SXAXR, SIPKAXX:VPTEL:SNIT-AA¹⁷-QIM:IGEMS:EMQHN:GXGXR, HVTKPTX:VPTKL:SNIT-AA¹⁷-QIM:IGEMS:NMQHN:SXGXH, YVPKPXX:VPTKL:SNIT-AA¹⁷-QIM:IGEMS:NMQHN:SXGXH, TVPKPXX:VPTQL:SNIT-AA¹⁷-QIM:IGEMS:NMQHN:AXGXH, AVPKAXX:VPTKL:SNIT-AA¹⁷-QIM:IGEMS:NMQHN:AXGXH, KVGKAXX:VPTKL:SNIT-AA¹⁷-QIM:IGEMS:EGMSQHN:XGXR, KASKAXX:VPTKL:SNIT-AA¹⁷-QIM:IGEMS:GMQHN:EXGXR, GSAGPXX:VPTKM:SNIT-AA¹⁷-QIM:IGEMS:GMQHN:RXGXS, AAPASXX:VPTRL:SNIT-AA¹⁷-QIM:IGEMS:DMQHN:AXGXR, STPPTXX:VPTRL:SNIT-AA¹⁷-QIM:IGEMS:DMQHN:SXGXR, HVPKPXX:VPTKL:SNIT-AA¹⁷-QIM:IGEMS:NMQHN:SXGXH, RVPSTXX:VPTKT:SNIT-AA¹⁷-QIM:IGEMS:MIQHN:XGXL, ASAAPXX:VPTAL:SNIT-AA¹⁷-QIM:IGEMS:MIQHN:XKXS, ASASPXX:VPTDL:SNIT-AA¹⁷-QIM:IGEMS:MIQHN:XKXS, ASASPXX:VPTDL:SNIT-AA¹⁷-QIM:IGEMS:MVQHN:XKXS, NDEGLEX:VPTGQ:SNIT-AA¹⁷-QIM:IGEMS:LEQHN:QXEXR, NDEGLEX:VPTEE:SNIT-AA¹⁷-QIM:IGEMS:FLQHN:KXEXR, SSVKXQP:VPTHH:SNIT-AA¹⁷-QIM:IGEMS:RLQHN:LEXAXA, RNVQXRP:VPTQL:SNIT-AA¹⁷-QIM:IGEMS:TLQHN:LAXKXE, KIPKAXX:VPTEL:SNIT-AA¹⁷-QIM:IGEMS:DMVVE:GXGXR, GIPEPXX:VPEKM:SNIT-AA¹⁷-QIM:IGEMS:NMTVE:SXAXR, SIPKAXX:VPTEL:SNIT-AA¹⁷-QIM:IGEMS:EMVVE:GXGXR, HVTKPTX:APTKL:SNIT-AA¹⁷-QIM:IGEMS:NMVVR:SXGXH, YVPKPXX:APTKL:SNIT-AA¹⁷-QIM:IGEMS:NMVVR:SXGXH, TVPKPXX:APTQL:SNIT-AA¹⁷-QIM:IGEMS:NMVVR:AXGXH, AVPKAXX:APTKL:SNIT-AA¹⁷-QIM:IGEMS:NMVVK:AXGXH, KVGKAXX:VPTKL:SNIT-AA¹⁷-QIM:IGEMS:EGMSVAE:XGXR, KASKAXX:VPTKL:SNIT-AA¹⁷-QIM:IGEMS:GMAVS:EXGXR, GSAGPXX:TPTKM:SNIT-AA¹⁷-QIM:IGEMS:GMVVD:RXGXS, AAPASXX:VPARL:SNIT-AA¹⁷-QIM:IGEMS:DMVVE:AXGXR, STPPTXX:VPTRL:SNIT-AA¹⁷-QIM:IGEMS:DMVVE:SXGXR, HVPKPXX:APTKL:SNIT-AA¹⁷-QIM:IGEMS:NMVVR:SXGXH, RVPSTXX:APVKT:SNIT-AA¹⁷-QIM:IGEMS:MIVEE:XGXL, ASAAPXX:VPQAL:SNIT-AA¹⁷-QIM:IGEMS:MIVRS:XKXS, ASASPXX:VSQDL:SNIT-AA¹⁷-QIM:IGEMS:MIVKS:XKXS, ASASPXX:VPQDL:SNIT-AA¹⁷-QIM:IGEMS:MVVKS:XKXS, NDEGLEX:VPTGQ:SNIT-AA¹⁷-QIM:IGEMS:LEEHS:QXEXR, SSVKXQP:SRVHH:SNIT-AA¹⁷-QIM:IGEMS:RLEEH:LEXAXA, RNVQXRP:TQVQL:SNIT-AA¹⁷-QIM:IGEMS:TLEDH:LAXKXE, KIPKAXX:VPTEL:SNIT-AA¹⁷-QIM:LGEMS:DMEHS:GXGXR, GIPEPXX:VPTKM:SNIT-AA¹⁷-QIM:LGEMS:NMEHS:SXAXR, SIPKAXX:VPTEL:SNIT-AA¹⁷-QIM:LGEMS:EMEHS:GXGXR, HVTKPTX:VPTKL:SNIT-AA¹⁷-QIM:LGEMS:NMEHS:SXGXH, YVPKPXX:VPTKL:SNIT-AA¹⁷-QIM:LGEMS:NMEHS:SXGXH, TVPKPXX:VPTQL:SNIT-AA¹⁷-QIM:LGEMS:NMEHS:AXGXH, AVPKAXX:VPTKL:SNIT-AA¹⁷-QIM:LGEMS:NMEHS:AXGXH, KVGKAXX:VPTKL:SNIT-AA¹⁷-QIM:LGEMS:EGMSEHS:XGXR, KASKAXX:VPTKL:SNIT-AA¹⁷-QIM:LGEMS:GMEHS:EXGXR, GSAGPXX:VPTKM:SNIT-AA¹⁷-QIM:LGEMS:GMEHS:RXGXS, AAPASXX:VPTRL:SNIT-AA¹⁷-QIM:LGEMS:DMEHS:AXGXR, STPPTXX:VPTRL:SNIT-AA¹⁷-QIM:LGEMS:DMEHS:SXGXR, HVPKPXX:VPTKL:SNIT-AA¹⁷-QIM:LGEMS:NMEHS:SXGXH, RVPSTXX:VPTKT:SNIT-AA¹⁷-QIM:LGEMS:MIEHS:XGXL, ASAAPXX:VPTAL:SNIT-AA¹⁷-QIM:LGEMS:MIEHS:XKXS, ASASPXX:VPTDL:SNIT-AA¹⁷-QIM:LGEMS:MIEHS:XKXS, ASASPXX:VPTDL:SNIT-AA¹⁷-QIM:LGEMS:MVEHS:XKXS, NDEGLEX:VPTEE:SNIT-AA¹⁷-QIM:LGEMS:FLEHS:KXEXR, SSVKXQP:VPTHH:SNIT-AA¹⁷-QIM:LGEMS:RLEHS:LEXAXA, RNVQXRP:VPTQL:SNIT-AA¹⁷-QIM:LGEMS:TLEHS:LAXKXE, KIPKAXX:VPTEL:SNIT-AA¹⁷-QIM:LGEMS:DMVVE:GXGXR, GIPEPXX:VPEKM:SNIT-AA¹⁷-QIM:LGEMS:NMTVE:SXAXR, SIPKAXX:VPTEL:SNIT-AA¹⁷-QIM:LGEMS:EMVVE:GXGXR, HVTKPTX:APTKL:SNIT-AA¹⁷-QIM:LGEMS:NMVVR:SXGXH, YVPKPXX:APTKL:SNIT-AA¹⁷-QIM:LGEMS:NMVVR:SXGXH, TVPKPXX:APTQL:SNIT-AA¹⁷-QIM:LGEMS:NMVVR:AXGXH, AVPKAXX:APTKL:SNIT-AA¹⁷-QIM:LGEMS:NMVVK:AXGXH, KVGKAXX:VPTKL:SNIT-AA¹⁷-QIM:LGEMS:EGMSVAE:XGXR, KASKAXX:VPTKL:SNIT-AA¹⁷-QIM:LGEMS:GMAVS:EXGXR, GSAGPXX:TPTKM:SNIT-AA¹⁷-QIM:LGEMS:GMVVD:RXGXS, AAPASXX:VPARL:SNIT-AA¹⁷-QIM:LGEMS:DMVVE:AXGXR, STPPTXX:VPTRL:SNIT-AA¹⁷-QIM:LGEMS:DMVVE:SXGXR, HVPKPXX:APTKL:SNIT-AA¹⁷-QIM:LGEMS:NMVVR:SXGXH, RVPSTXX:APVKT:SNIT-AA¹⁷-QIM:LGEMS:MIVEE:XGXL, ASAAPXX:VPQAL:SNIT-AA¹⁷-QIM:LGEMS:MIVRS:XKXS, ASASPXX:VSQDL:SNIT-AA¹⁷-QIM:LGEMS:MIVKS:XKXS, ASASPXX:VPQDL:SNIT-AA¹⁷-QIM:LGEMS:MVVKS:XKXS, NDEGLEX:VPTEE:SNIT-AA¹⁷-QIM:LGEMS:FLQHN:KXEXR, SSVKXQP:SRVHH:SNIT-AA¹⁷-QIM:LGEMS:RLEEH:LEXAXA, RNVQXRP:TQVQL:SNIT-AA¹⁷-QIM:LGEMS:TLEDH:LAXKXE, KIPKAXX:SRVEL:RSVK-AA¹⁷-AKV:KEVQV:DMEEH:GXGXR, GIPEPXX:SRVKM:RSVK-AA¹⁷-AKV:KEVQV:NMEEH:SXAXR, SIPKAXX:SRVEL:RSVK-AA¹⁷-AKV:KEVQV:EMEEH:GXGXR, HVTKPTX:SRVKL:RSVK-AA¹⁷-AKV:KEVQV:NMEEH:SXGXH, YVPKPXX:SRVKL:RSVK-AA¹⁷-AKV:KEVQV:NMEEH:SXGXH, TVPKPXX:SRVQL:RSVK-AA¹⁷-AKV:KEVQV:NMEEH:AXGXH, AVPKAXX:SRVKL:RSVK-AA¹⁷-AKV:KEVQV:NMEEH:AXGXH, KVGKAXX:SRVKL:RSVK-AA¹⁷-AKV:KEVQV:EGMSEEH:XGXR, KASKAXX:SRVKL:RSVK-AA¹⁷-AKV:KEVQV:GMEEH:EXGXR, GSAGPXX:SRVKM:RSVK-AA¹⁷-AKV:KEVQV:GMEEH:RXGXS, AAPASXX:SRVRL:RSVK-AA¹⁷-AKV:KEVQV:DMEEH:AXGXR, STPPTXX:SRVRL:RSVK-AA¹⁷-AKV:KEVQV:DMEEH:SXGXR, HVPKPXX:SRVKL:RSVK-AA¹⁷-AKV:KEVQV:NMEEH:SXGXH, RVPSTXX:SRVKT:RSVK-AA¹⁷-AKV:KEVQV:MIEEH:XGXL, ASAAPXX:SRVAL:RSVK-AA¹⁷-AKV:KEVQV:MIEEH:XKXS, ASASPXX:SRVDL:RSVK-AA¹⁷-AKV:KEVQV:MIEEH:XKXS, ASASPXX:SRVDL:RSVK-AA¹⁷-AKV:KEVQV:MVEEH:XKXS, NDEGLEX:SRVEE:RSVK-AA¹⁷-AKV:KEVQV:FLEEH:KXEXR, NDEGLEX:SRVGQ:RSVK-AA¹⁷-AKV:KEVQVIEEEH:QXEXR, RNVQXRP:SRVQL:RSVK-AA¹⁷-AKV:KEVQV:TLEEH:LAXKXE, KIPKAXX:VPTEL:RSVK-AA¹⁷-AKV:KEVQV:DMVVE:GXGXR, GIPEPXX:VPEKM:RSVK-AA¹⁷-AKV:KEVQV:NMTVE:SXAXR, SIPKAXX:VPTEL:RSVK-AA¹⁷-AKV:KEVQV:EMVVE:GXGXR, HVTKPTX:APTKL:RSVK-AA¹⁷-AKV:KEVQV:NMVVR:SXGXH, YVPKPXX:APTKL:RSVK-AA¹⁷-AKV:KEVQV:NMVVR:SXGXH, TVPKPXX:APTQL:RSVK-AA¹⁷-AKV:KEVQV:NMVVR:AXGXH, AVPKAXX:APTKL:RSVK-AA¹⁷-AKV:KEVQV:NMVVK:AXGXH, KVGKAXX:VPTKL:RSVK-AA¹⁷-AKV:KEVQV:EGMSVAE:XGXR, KASKAXX:VPTKL:RSVK-AA¹⁷-AKV:KEVQV:GMAVS:EXGXR, GSAGPXX:TPTKM:RSVK-AA¹⁷-AKV:KEVQV:GMVVD:RXGXS, AAPASXX:VPARL:RSVK-AA¹⁷-AKV:KEVQV:DMVVE:AXGXR, STPPTXX:VPTRL:RSVK-AA¹⁷-AKV:KEVQV:DMVVE:SXGXR, HVPKPXX:APTKL:RSVK-AA¹⁷-AKV:KEVQV:NMVVR:SXGXH, RVPSTXX:APVKT:RSVK-AA¹⁷-AKV:KEVQV:MIVEE:XGXL, ASAAPXX:VPQAL:RSVK-AA¹⁷-AKV:KEVQV:MIVRS:XKXS, ASASPXX:VSQDL:RSVK-AA¹⁷-AKV:KEVQV:MIVKS:XKXS, ASASPXX:VPQDL:RSVK-AA¹⁷-AKV:KEVQV:MVVKS:XKXS, NDEGLEX:VPTEE:RSVK-AA¹⁷-AKV:KEVQV:FLQHN:KXEXR, NDEGLEX:VPTGQ:RSVK-AA¹⁷-AKV:KEVQVIEEHS:QXEXR, RNVQXRP:TQVQL:RSVK-AA¹⁷-AKV:KEVQV:TLEDH:LAXKXE, KIPKAXX:TQVEL:RPVQ-AA¹⁷-RKI:KKATV:DMEDH:GXGXR, GIPEPXX:TQVKM:RPVQ-AA¹⁷-RKI:KKATV:NMEDH:SXAXR, SIPKAXX:TQVEL:RPVQ-AA¹⁷-RKI:KKATV:EMEDH:GXGXR, HVTKPTX:TQVKL:RPVQ-AA¹⁷-RKI:KKATV:NMEDH:SXGXH, YVPKPXX:TQVKL:RPVQ-AA¹⁷-RKI:KKATV:NMEDH:SXGXH, TVPKPXX:TQVQL:RPVQ-AA¹⁷-RKI:KKATV:NMEDH:AXGXH, AVPKAXX:TQVKL:RPVQ-AA¹⁷-RKI:KKATV:NMEDH:AXGXH, KVGKAXX:TQVKL:RPVQ-AA¹⁷-RKI:KKATV:EGMSEDH:XGXR, KASKAXX:TQVKL:RPVQ-AA¹⁷-RKI:KKATV:GMEDH:EXGXR, GSAGPXX:TQVKM:RPVQ-AA¹⁷-RKI:KKATV:GMEDH:RXGXS, AAPASXX:TQVRL:RPVQ-AA¹⁷-RKI:KKATV:DMEDH:AXGXR, STPPTXX:TQVRL:RPVQ-AA¹⁷-RKI:KKATV:DMEDH:SXGXR, HVPKPXX:TQVKL:RPVQ-AA¹⁷-RKI:KKATV:NMEDH:SXGXH, RVPSTXX:TQVKT:RPVQ-AA¹⁷-RKI:KKATV:MI EDH:XGXL, ASAAPXX:TQVAL:RPVQ-AA¹⁷-RKI:KKATV:MIEDH:XKXS, ASASPXX:TQVDL:RPVQ-AA¹⁷-RKI:KKATV:MIEDH:XKXS, ASASPXX:TQVDL:RPVQ-AA¹⁷-RKI:KKATV:MVEDH:XKXS, NDEGLEX:TQVEE:RPVQ-AA¹⁷-RKI:KKATV:FLEDH:KXEXR, NDEGLEX:TQVGQ:RPVQ-AA¹⁷-RKI:KKATV:LEEDH:QXEXR, SSVKXQP:TQVHH:RPVQ-AA¹⁷-RKI:KKATV:RLEDH:LEXAXA, KIPKAXX:VPTEL:RPVQ-AA¹⁷-RKI:KKATV:DMVVE:GXGXR, GIPEPXX:VPEKM:RPVQ-AA¹⁷-RKI:KKATV:NMTVE:SXAXR, SIPKAXX:VPTEL:RPVQ-AA¹⁷-RKI:KKATV:EMVVE:GXGXR, HVTKPTX:APTKL:RPVQ-AA¹⁷-RKI:KKATV:NMVVR:SXGXH, YVPKPXX:APTKL:RPVQ-AA¹⁷-RKI:KKATV:NMVVR:SXGXH, TVPKPXX:APTQL:RPVQ-AA¹⁷-RKI:KKATV:NMVVR:AXGXH, AVPKAXX:APTKL:RPVQ-AA¹⁷-RKI:KKATV:NMVVK:AXGXH, KVGKAXX:VPTKL:RPVQ-AA¹⁷-RKI:KKATV:EGMSVAE:XGXR, KASKAXX:VPTKL:RPVQ-AA¹⁷-RKI:KKATV:GMAVS:EXGXR, GSAGPXX:TPTKM:RPVQ-AA¹⁷-RKI:KKATV:GMVVD:RXGXS, AAPASXX:VPARL:RPVQ-AA¹⁷-RKI:KKATV:DMVVE:AXGXR, STPPTXX:VPTRL:RPVQ-AA¹⁷-RKI:KKATV:DMVVE:SXGXR, HVPKPXX:APTKL:RPVQ-AA¹⁷-RKI:KKATV:NMVVR:SXGXH, RVPSTXX:APVKT:RPVQ-AA¹⁷-RKI:KKATV:MIVEE:XGXL, ASAAPXX:VPQAL:RPVQ-AA¹⁷-RKI:KKATV:MIVRS:XKXS, ASASPXX:VSQDL:RPVQ-AA¹⁷-RKI:KKATV:MIVKS:XKXS, ASASPXX:VPQDL:RPVQ-AA¹⁷-RKI:KKATV:MVVKS:XKXS, NDEGLEX:VPTEE:RPVQ-AA¹⁷-RKI:KKATV:FLQHN:KXEXR, NDEGLEX:VPTGQ:RPVQ-AA¹⁷-RKI:KKATV:LEEHS:QXEXR and SSVKXQP:SRVHH:RPVQ-AA¹⁷-RKI:KKATV:RLEEH:LEXAXA; and wherein AA¹⁷ is selected from the group consisting of G, A, V, L, I, P, F, M, W, T and S (in particular is selected from the group consisting of M, I, L, V and T). More particularly, the hexaplet PEP7:PEP5:PEP12:PEP2:PEP6:PEP8 is selected from the group consisting of GIPEPXX:VPTKM:SAIS-AA¹⁷-LYL:LKNYQ:NMVVE:SXAXR, HVTKPTX:VPTKL:SAIS-AA¹⁷-LYL:LKNYQ:NMVVE:SXGXH, YVPKPXX:VPTKL:SAIS-AA¹⁷-LYL:LKNYQ:NMVVE:SXGXH, TVPKPXX:VPTQL:SAIS-AA¹⁷-LYL:LKNYQ:NMVVE:AXGXH, AVPKAXX:VPTKL:SAIS-AA¹⁷-LYL:LKNYQ:NMVVE:AXGXH, KVGKAXX:VPTKL:SAIS-AA¹⁷-LYL:LKNYQ:EGMSVVE:XGXR, KASKAXX:VPTKL:SAIS-AA¹⁷-LYL:LKNYQ:GMVVE:EXGXR, GSAGPXX:VPTKM:SAIS-AA¹⁷-LYL:LKNYQ:GMVVE:RXGXS, AAPASXX:VPTRL:SAIS-AA¹⁷-LYL:LKNYQ:DMVVE:AXGXR, STPPTXX:VPTRL:SAIS-AA¹⁷-LYL:LKNYQ:DMVVE:SXGXR, HVPKPXX:VPTKL:SAIS-AA¹⁷-LYL:LKNYQ:NMVVE:SXGXH, RVPSTXX:VPTKT:SAIS-AA¹⁷-LYL:LKNYQ:MIVVE:XGXL, ASAAPXX:VPTAL:SAIS-AA¹⁷-LYL:LKNYQ:MIVVE:XKXS, ASASPXX:VPTDL:SAIS-AA¹⁷-LYL:LKNYQ:MIVVE:XKXS, ASASPXX:VPTDL:SAIS-AA¹⁷-LYL:LKNYQ:MVVVE:XKXS, GIPEPXX:VPEKM:SAIS-AA¹⁷-LYL:LKNYQ:NMTVE:SXAXR, HVTKPTX:APTKL:SAIS-AA¹⁷-LYL:LKNYQ:NMVVR:SXGXH, YVPKPXX:APTKL:SAIS-AA¹⁷-LYL:LKNYQ:NMVVR:SXGXH, TVPKPXX:APTQL:SAIS-AA¹⁷-LYL:LKNYQ:NMVVR:AXGXH, AVPKAXX:APTKL:SAIS-AA¹⁷-LYL:LKNYQ:NMVVK:AXGXH, KVGKAXX:VPTKL:SAIS-AA¹⁷-LYL:LKNYQ:EGMSVAE:XGXR, KASKAXX:VPTKL:SAIS-AA¹⁷-LYL:LKNYQ:GMAVS:EXGXR, GSAGPXX:TPTKM:SAIS-AA¹⁷-LYL:LKNYQ:GMVVD:RXGXS, AAPASXX:VPARL:SAIS-AA¹⁷-LYL:LKNYQ:DMVVE:AXGXR, HVPKPXX:APTKL:SAIS-AA¹⁷-LYL:LKNYQ:NMVVR:SXGXH, RVPSTXX:APVKT:SAIS-AA¹⁷-LYL:LKNYQ:MIVEE:XGXL, ASAAPXX:VPQAL:SAIS-AA¹⁷-LYL:LKNYQ:MIVRS:XKXS, ASASPXX:VSQDL:SAIS-AA¹⁷-LYL:LKNYQ:MIVKS:XKXS, ASASPXX:VPQDL:SAIS-AA¹⁷-LYL:LKNYQ:MVVKS:XKXS, NDEGLEX:VPTEE:SAIS-AA¹⁷-LYL:LKNYQ:FLQHN:KXEXR, NDEGLEX:VPTGQ:SAIS-AA¹⁷-LYL:LKNYQ:LEEHS:QXEXR, SSVKXQP:SRVHH:SAIS-AA¹⁷-LYL:LKNYQ:RLEEH:LEXAXA, RNVQXRP:TQVQL:SAIS-AA¹⁷-LYL:LKNYQ:TLEDH:LAXKXE, KIPKAXX:VPEEL:SSLS-AA¹⁷-LFF:LKVYP:DMTVE:GXGXR, SIPKAXX:VPEEL:SSLS-AA¹⁷-LFF:LKVYP: EMTVE:GXGXR, HVTKPTX:VPEKL:SSLS-AA¹⁷-LFF:LKVYP:NMTVE:SXGXH, YVPKPXX:VPEKL:SSLS-AA¹⁷-LFF:LKVYP:NMTVE:SXGXH, TVPKPXX:VPEQL:SSLS-AA¹⁷-LFF:LKVYP:NMTVE:AXGXH, AVPKAXX:VPEKL:SSLS-AA¹⁷-LFF:LKVYP:NMTVE:AXGXH, KVGKAXX:VPEKL:SSLS-AA¹⁷-LFF:LKVYP:EGMSTVE:XGXR, KASKAXX:VPEKL:SSLS-AA¹⁷-LFF:LKVYP:GMTVE:EXGXR, GSAGPXX:VPEKM:SSLS-AA¹⁷-LFF:LKVYP:GMTVE:RXGXS, AAPASXX:VPERL:SSLS-AA¹⁷-LFF:LKVYP:DMTVE:AXGXR, STPPTXX:VPERL:SSLS-AA¹⁷-LFF:LKVYP:DMTVE:SXGXR, HVPKPXX:VPEKL:SSLS-AA¹⁷-LFF:LKVYP:NMTVE:SXGXH, RVPSTXX:VPEKT:SSLS-AA¹⁷-LFF:LKVYP:MITVE:XGXL, ASAAPXX:VPEAL:SSLS-AA¹⁷-LFF:LKVYP:MITVE:XKXS, ASASPXX:VPEDL:SSLS-AA¹⁷-LFF:LKVYP:MITVE:XKXS, ASASPXX:VPEDL:SSLS-AA¹⁷-LFF:LKVYP:MVTVE:XKXS, KIPKAXX:VPTEL:SSLS-AA¹⁷-LFF:LKVYP:DMVVE:GXGXR, SIPKAXX:VPTEL:SSLS-AA¹⁷-LFF:LKVYP:EMVVE:GXGXR, HVTKPTX:APTKL:SSLS-AA¹⁷-LFF:LKVYP:NMVVR:SXGXH, YVPKPXX:APTKL:SSLS-AA¹⁷-LFF:LKVYP:NMVVR:SXGXH, TVPKPXX:APTQL:SSLS-AA¹⁷-LFF:LKVYP:NMVVR:AXGXH, AVPKAXX:APTKL:SSLS-AA¹⁷-LFF:LKVYP:NMVVK:AXGXH, KVGKAXX:VPTKL:SSLS-AA¹⁷-LFF:LKVYP: EGMSVAE:XGXR, KASKAXX:VPTKL:SSLS-AA¹⁷-LFF:LKVYP:GMAVS:EXGXR, GSAGPXX:TPTKM:SSLS-AA¹⁷-LFF:LKVYP:GMVVD:RXGXS, AAPASXX:VPARL:SSLS-AA¹⁷-LFF:LKVYP:DMVVE:AXGXR, STPPTXX:VPTRL:SSLS-AA¹⁷-LFF:LKVYP:DMVVE:SXGXR, HVPKPXX:APTKL:SSLS-AA¹⁷-LFF:LKVYP:NMVVR:SXGXH, RVPSTXX:APVKT:SSLS-AA¹⁷-LFF:LKVYP:MIVEE:XGXL, ASAAPXX:VPQAL:SSLS-AA¹⁷-LFF:LKVYP:MIVRS:XKXS, ASASPXX:VSQDL:SSLS-AA¹⁷-LFF:LKVYP:MIVKS:XKXS, ASASPXX:VPQDL:SSLS-AA¹⁷-LFF:LKVYP:MVVKS:XKXS, NDEGLEX:VPTEE:SSLS-AA¹⁷-LFF:LKVYP:FLQHN:KXEXR, NDEGLEX:VPTGQ:SSLS-AA¹⁷-LFF:LKVYP:LEEHS:QXEXR, SSVKXQP:SRVHH:SSLS-AA¹⁷-LFF:LKVYP:RLEEH:LEXAXA, RNVQXRP:TQVQL:SSLS-AA¹⁷-LFF:LKVYP:TLEDH:LAXKXE, KIPKAXX:APTEL:NAIS-AA¹⁷-LYF:LKKYR:DMVVR:GXGXR, GIPEPXX:APTKM:NAIS-AA¹⁷-LYF:LKKYR:NMVVR:SXAXR, SIPKAXX:APTEL:NAIS-AA¹⁷-LYF:LKKYR:EMVVR:GXGXR, AVPKAXX:APTKL:NAIS-AA¹⁷-LYF:LKKYR:NMVVR:AXGXH, KVGKAXX:APTKL:NAIS-AA¹⁷-LYF:LKKYR: EGMSVVR:XGXR, KASKAXX:APTKL:NAIS-AA¹⁷-LYF:LKKYR:GMVVR:EXGXR, GSAGPXX:APTKM:NAIS-AA¹⁷-LYF:LKKYR:GMVVR:RXGXS, AAPASXX:APTRL:NAIS-AA¹⁷-LYF:LKKYR:DMVVR:AXGXR, STPPTXX:APTRL:NAIS-AA¹⁷-LYF:LKKYR:DMVVR:SXGXR, RVPSTXX:APTKT:NAIS-AA¹⁷-LYF:LKKYR:MIVVR:XGXL, ASAAPXX:APTAL:NAIS-AA¹⁷-LYF:LKKYR:MIVVR:XKXS, ASASPXX:APTDL:NAIS-AA¹⁷-LYF:LKKYR:MIVVR:XKXS, ASASPXX:APTDL:NAIS-AA¹⁷-LYF:LKKYR:MVVVR:XKXS, KIPKAXX:VPTEL:NAIS-AA¹⁷-LYF:LKKYR:DMVVE:GXGXR, GIPEPXX:VPEKM:NAIS-AA¹⁷-LYF:LKKYR:NMTVE:SXAXR, SIPKAXX:VPTEL:NAIS-AA¹⁷-LYF:LKKYR:EMVVE:GXGXR, AVPKAXX:APTKL:NAIS-AA¹⁷-LYF:LKKYR:NMVVK:AXGXH, KVGKAXX:VPTKL:NAIS-AA¹⁷-LYF:LKKYR:EGMSVAE:XGXR, KASKAXX:VPTKL:NAIS-AA¹⁷-LYF:LKKYR:GMAVS:EXGXR, GSAGPXX:TPTKM:NAIS-AA¹⁷-LYF:LKKYR:GMVVD:RXGXS, AAPASXX:VPARL:NAIS-AA¹⁷-LYF:LKKYR:DMVVE:AXGXR, STPPTXX:VPTRL:NAIS-AA¹⁷-LYF:LKKYR:DMVVE:SXGXR, RVPSTXX:APVKT:NAIS-AA¹⁷-LYF:LKKYR:MIVE E:XGXL, ASAAPXX:VPQAL:NAIS-AA¹⁷-LYF:LKKYR:MIVRS:XKXS, ASASPXX:VSQDL:NAIS-AA¹⁷-LYF:LKKYR:MIVKS:XKXS, ASASPXX:VPQDL:NAIS-AA¹⁷-LYF:LKKYR:MVVKS:XKXS, NDEGLEX:VPTEE:NAIS-AA¹⁷-LYF:LKKYR:FLQHN:KXEXR, NDEGLEX:VPTGQ:NAIS-AA¹⁷-LYF:LKKYR:LEEHS:QXEXR, SSVKXQP:SRVHH:NAIS-AA¹⁷-LYF:LKKYR:RLEEH:LEXAXA, RNVQXRP:TQVQL:NAIS-AA¹⁷-LYF:LKKYR:TLEDH:LAXKXE, KIPKAXX:APTEL:SATS-AA¹⁷-LYY:LRKHR:DMVVK:GXGXR, GIPEPXX:APTKM:SATS-AA¹⁷-LYY:LRKHR:NMVVK:SXAXR, SIPKAXX:APTEL:SATS-AA¹⁷-LYY:LRKHR:EMVVK:GXGXR, HVTKPTX:APTKL:SATS-AA¹⁷-LYY:LRKHR:NMVVK:SXGXH, YVPKPXX:APTKL:SATS-AA¹⁷-LYY:LRKHR:NMVVK:SXGXH, TVPKPXX:APTQL:SATS-AA¹⁷-LYY:LRKHR:NMVVK:AXGXH, KVGKAXX:APTKL:SATS-AA¹⁷-LYY:LRKHR: EGMSVVK:XGXR, KASKAXX:APTKL:SATS-AA¹⁷-LYY:LRKHR:GMVVK:EXGXR, GSAGPXX:APTKM:SATS-AA¹⁷-LYY:LRKHR:GMVVK:RXGXS, AAPASXX:APTRL:SATS-AA¹⁷-LYY:LRKHR:DMVVK:AXGXR, STPPTXX:APTRL:SATS-AA¹⁷-LYY:LRKHR:DMVVK:SXGXR, HVPKPXX:APTKL:SATS-AA¹⁷-LYY:LRKHR:NMVVK:SXGXH, RVPSTXX:APTKT:SATS-AA¹⁷-LYY:LRKHR:MIVVK:XGXL, ASAAPXX:APTAL:SATS-AA¹⁷-LYY:LRKHR:MIVVK:XKXS, ASASPXX:APTDL:SATS-AA¹⁷-LYY:LRKHR:MIVVK:XKXS, ASASPXX:APTDL:SATS-AA¹⁷-LYY:LRKHR:MVVVK:XKXS, KIPKAXX:VPTEL:SATS-AA¹⁷-LYY:LRKHR:DMVVE:GXGXR, GIPEPXX:VPEKM:SATS-AA¹⁷-LYY:LRKHR:NMTVE:SXAXR, SIPKAXX:VPTEL:SATS-AA¹⁷-LYY:LRKHR:EMVVE:GXGXR, HVTKPTX:APTKL:SATS-AA¹⁷-LYY:LRKHR:NMVVR:SXGXH, YVPKPXX:APTKL:SATS-AA¹⁷-LYY:LRKHR:NMVVR:SXGXH, TVPKPXX:APTQL:SATS-AA¹⁷-LYY:LRKHR:NMVVR:AXGXH, KVGKAXX:VPTKL:SATS-AA¹⁷-LYY:LRKHR:EGMSVAE:XGXR, KASKAXX:VPTKL:SATS-AA¹⁷-LYY:LRKHR:G MAVS: EXGXR, GSAGPXX:TPTKM:SATS-AA¹⁷-LYY:LRKHR:GMVVD:RXGXS, AAPASXX:VPARL:SATS-AA¹⁷-LYY:LRKHR:DMVVE:AXGXR, STPPTXX:VPTRL:SATS-AA¹⁷-LYY:LRKHR:DMVVE:SXGXR, HVPKPXX:APTKL:SATS-AA¹⁷-LYY:LRKHR:NMVVR:SXGXH, RVPSTXX:APVKT:SATS-AA¹⁷-LYY:LRKHR:MIVEE:XGXL, ASAAPXX:VPQAL:SATS-AA¹⁷-LYY:LRKHR:MIVRS:XKXS, ASASPXX:VSQDL:SATS-AA¹⁷-LYY:LRKHR:MIVKS:XKXS, ASASPXX:VPQDL:SATS-AA¹⁷-LYY:LRKHR:MVVKS:XKXS, NDEGLEX:VPTEE:SATS-AA¹⁷-LYY:LRKHR:FLQHN:KXEXR, NDEGLEX:VPTGQ:SATS-AA¹⁷-LYY:LRKHR:LEEHS:QXEXR, SSVKXQP:SRVHH:SATS-AA¹⁷-LYY:LRKHR:RLEEH:LEXAXA, RNVQXRP:TQVQL:SATS-AA¹⁷-LYY:LRKHR:TLEDH:LAXKXE, KIPKAXX:VPTEL:SPIS-AA¹⁷-LYK:LKYHY:DMVAE:GXGXR, GIPEPXX:VPTKM:SPIS-AA¹⁷-LYK:LKYHY:NMVAE:SXAXR, SIPKAXX:VPTEL:SPIS-AA¹⁷-LYK:LKYHY:EMVAE:GXGXR, HVTKPTX:VPTKL:SPIS-AA¹⁷-LYK:LKYHY:NMVAE:SXGXH, YVPKPXX:VPTKL:SPIS-AA¹⁷-LYK:LKYHY:NMVAE:SXGXH, TVPKPXX:VPTQL:SPIS-AA¹⁷-LYK:LKYHY:NMVAE:AXGXH, AVPKAXX:VPTKL:SPIS-AA¹⁷-LYK:LKYHY:NMVAE:AXGXH, KASKAXX:VPTKL:SPIS-AA¹⁷-LYK:LKYHY:GMVAE: EXGXR, GSAGPXX:VPTKM:SPIS-AA¹⁷-LYK:LKYHY:GMVAE:RXGXS, AAPASXX:VPTRL:SPIS-AA¹⁷-LYK:LKYHY:DMVAE:AXGXR, STPPTXX:VPTRL:SPIS-AA¹⁷-LYK:LKYHY:DMVAE:SXGXR, HVPKPXX:VPTKL:SPIS-AA¹⁷-LYK:LKYHY:NMVAE:SXGXH, RVPSTXX:VPTKT:SPIS-AA¹⁷-LYK:LKYHY:MIVAE:XGXL, ASAAPXX:VPTAL:SPIS-AA¹⁷-LYK:LKYHY:MIVAE:XKXS, ASASPXX:VPTDL:SPIS-AA¹⁷-LYK:LKYHY:MIVAE:XKXS, ASASPXX:VPTDL:SPIS-AA¹⁷-LYK:LKYHY:MVVAE:XKXS, KIPKAXX:VPTEL:SPIS-AA¹⁷-LYK:LKYHY:DMVVE:GXGXR, GIPEPXX:VPEKM:SPIS-AA¹⁷-LYK:LKYHY:NMTVE:SXAXR, SIPKAXX:VPTEL:SPIS-AA¹⁷-LYK:LKYHY:EMVVE:GXGXR, HVTKPTX:APTKL:SPIS-AA¹⁷-LYK:LKYHY:NMVVR:SXGXH, YVPKPXX:APTKL:SPIS-AA¹⁷-LYK:LKYHY:NMVVR:SXGXH, TVPKPXX:APTQL:SPIS-AA¹⁷-LYK:LKYHY:NMVVR:AXGXH, AVPKAXX:APTKL:SPIS-AA¹⁷-LYK:LKYHY:NMVVK:AXGXH, KASKAXX:VPTKL:SPIS-AA¹⁷-LYK:LKYHY:GMAVS:EXGXR, GSAGPXX:TPTKM:SPIS-AA¹⁷-LYK:LKYHY:GMVVD:RXGXS, AAPASXX:VPARL:SPIS-AA¹⁷-LYK:LKYHY:DMVVE:AXGXR, STPPTXX:VPTRL:SPIS-AA¹⁷-LYK:LKYHY:DMVVE:SXGXR, HVPKPXX:APTKL:SPIS-AA¹⁷-LYK:LKYHY:NMVVR:SXGXH, RVPSTXX:APVKT:SPIS-AA¹⁷-LYK:LKYHY:MIVEE:XGXL, ASAAPXX:VPQAL:SPIS-AA¹⁷-LYK:LKYHY:MIVRS:XKXS, ASASPXX:VSQDL:SPIS-AA¹⁷-LYK:LKYHY:MIVKS:XKXS, ASASPXX:VPQDL:SPIS-AA¹⁷-LYK:LKYHY:MVVKS:XKXS, NDEGLEX:VPTEE:SPIS-AA¹⁷-LYK:LKYHY:FLQHN:KXEXR, NDEGLEX:VPTGQ:SPIS-AA¹⁷-LYK:LKYHY:LEEHS:QXEXR, SSVKXQP:SRVHH:SPIS-AA¹⁷-LYK:LKYHY:RLEEH:LEXAXA, RNVQXRP:TQVQL:SPIS-AA¹⁷-LYK:LKYHY:TLEDH:LAXKXE, KIPKAXX:VPTEL:EPIS-AA¹⁷-LYL:KFKYE:DMAVS:GXGXR, GIPEPXX:VPTKM:EPIS-AA¹⁷-LYL:KFKYE:NMAVS:SXAXR, SIPKAXX:VPTEL:EPIS-AA¹⁷-LYL:KFKYE:EMAVS:GXGXR, HVTKPTX:VPTKL:EPIS-AA¹⁷-LYL:KFKYE:NMAVS:SXGXH, YVPKPXX:VPTKL:EPIS-AA¹⁷-LYL:KFKYE:NMAVS:SXGXH, TVPKPXX:VPTQL:EPIS-AA¹⁷-LYL:KFKYE:NMAVS:AXGXH, AVPKAXX:VPTKL:EPIS-AA¹⁷-LYL:KFKYE:NMAVS:AXGXH, KVGKAXX:VPTKL:EPIS-AA¹⁷-LYL:KFKYE:EGMSAVS:XGXR, GSAGPXX:VPTKM:EPIS-AA¹⁷-LYL:KFKYE:GMAVS:RXGXS, AAPASXX:VPTRL:EPIS-AA¹⁷-LYL:KFKYE:DMAVS:AXGXR, STPPTXX:VPTRL:EPIS-AA¹⁷-LYL:KFKYE:DMAVS:SXGXR, HVPKPXX:VPTKL:EPIS-AA¹⁷-LYL:KFKYE:NMAVS:SXGXH, RVPSTXX:VPTKT:EPIS-AA¹⁷-LYL:KFKYE:MIAVS:XGXL, ASAAPXX:VPTAL:EPIS-AA¹⁷-LYL:KFKYE:MIAVS:XKXS, ASASPXX:VPTDL:EPIS-AA¹⁷-LYL:KFKYE:MIAVS:XKXS, ASASPXX:VPTDL:EPIS-AA¹⁷-LYL:KFKYE:MVAVS:XKXS, KIPKAXX:VPTEL:EPIS-AA¹⁷-LYL:KFKYE:DMVVE:GXGXR, GIPEPXX:VPEKM:EPIS-AA¹⁷-LYL:KFKYE:NMTVE:SXAXR, SIPKAXX:VPTEL:EPIS-AA¹⁷-LYL:KFKYE:EMVVE:GXGXR, HVTKPTX:APTKL:EPIS-AA¹⁷-LYL:KFKYE:NMVVR:SXGXH, YVPKPXX:APTKL:EPIS-AA¹⁷-LYL:KFKYE:NMVVR:SXGXH, TVPKPXX:APTQL:EPIS-AA¹⁷-LYL:KFKYE:NMVVR:AXGXH, AVPKAXX:APTKL:EPIS-AA¹⁷-LYL:KFKYE:NMVVK:AXGXH, KVGKAXX:VPTKL:EPIS-AA¹⁷-LYL:KFKYE:EGMSVAE:XGXR, GSAGPXX:TPTKM:EPIS-AA¹⁷-LYL:KFKYE:GMVVD:RXGXS, AAPASXX:VPARL:EPIS-AA¹⁷-LYL:KFKYE:DMVVE:AXGXR, STPPTXX:VPTRL:EPIS-AA¹⁷-LYL:KFKYE:DMVVE:SXGXR, HVPKPXX:APTKL:EPIS-AA¹⁷-LYL:KFKYE:NMVVR:SXGXH, RVPSTXX:APVKT:EPIS-AA¹⁷-LYL:KFKYE:MIVEE:XGXL, ASAAPXX:VPQAL:EPIS-AA¹⁷-LYL:KFKYE:MIVRS:XKXS, ASASPXX:VSQDL:EPIS-AA¹⁷-LYL:KF KYE:MIVKS:XKXS, ASASPXX:VPQDL:EPIS-AA¹⁷-LYL:KFKYE:MVVKS:XKXS, NDEGLEX:VPTEE:EPIS-AA¹⁷-LYL:KFKYE:FLQHN:KXEXR, NDEGLEX:VPTGQ:EPIS-AA¹⁷-LYL:KFKYE:LEEHS:QXEXR, SSVKXQP:SRVHH:EPIS-AA¹⁷-LYL:KFKYE:RLEEH:LEXAXA, RNVQXRP:TQVQL:EPIS-AA¹⁷-LYL:KFKYE:TLEDH:LAXKXE, KIPKAXX:TPTEL:SPIN-AA¹⁷-LYF:YGKIP:DMVVD:GXGXR, GIPEPXX:TPTKM:SPIN-AA¹⁷-LYF:YGKIP:NMVVD:SXAXR, SIPKAXX:TPTEL:SPIN-AA¹⁷-LYF:YGKIP:EMVVD:GXGXR, HVTKPTX:TPTKL:SPIN-AA¹⁷-LYF:YGKIP:NMVVD:SXGXH, YVPKPXX:TPTKL:SPIN-AA¹⁷-LYF:YGKIP:NMVVD:SXGXH, TVPKPXX:TPTQL:SPIN-AA¹⁷-LYF:YGKIP:NMVVD:AXGXH, AVPKAXX:TPTKL:SPIN-AA¹⁷-LYF:YGKIP:NMVVD:AXGXH, KVGKAXX:TPTKL:SPIN-AA¹⁷-LYF:YGKIP:EGMSVVD:XGXR, KASKAXX:TPTKL:SPIN-AA¹⁷-LYF:YGKIP:GMVVD:EXGXR, AAPASXX:TPTRL:SPIN-AA¹⁷-LYF:YGKIP:DMVVD:AXGXR, STPPTXX:TPTRL:SPIN-AA¹⁷-LYF:YGKIP:DMVVD:SXGXR, HVPKPXX:TPTKL:SPIN-AA¹⁷-LYF:YGKIP:NMVVD:SXGXH, RVPSTXX:TPTKT:SPIN-AA¹⁷-LYF:YGKIP:MIVVD:XGXL, ASAAPXX:TPTAL:SPIN-AA¹⁷-LYF:YGKIP:MIVVD:XKXS, ASASPXX:TPTDL:SPIN-AA¹⁷-LYF:YGKIP:MIVVD:XKXS, ASASPXX:TPTDL:SPIN-AA¹⁷-LYF:YGKIP:MVVVD:XKXS, KIPKAXX:VPTEL:SPIN-AA¹⁷-LYF:YGKIP:DMVVE:GXGXR, GIPEPXX:VPEKM:SPIN-AA¹⁷-LYF:YGKIP:NMTVE:SXAXR, SIPKAXX:VPTEL:SPIN-AA¹⁷-LYF:YGKIP:EMVVE:GXGXR, HVTKPTX:APTKL:SPIN-AA¹⁷-LYF:YGKIP:NMVVR:SXGXH, YVPKPXX:APTKL:SPIN-AA¹⁷-LYF:YGKIP:NMVVR:SXGXH, TVPKPXX:APTQL:SPIN-AA¹⁷-LYF:YGKIP:NMVVR:AXGXH, AVPKAXX:APTKL:SPIN-AA¹⁷-LYF:YGKIP:NMVVK:AXGXH, KVGKAXX:VPTKL:SPIN-AA¹⁷-LYF:YGKIP:EGMSVAE:XGXR, KASKAXX:VPTKL:SPIN-AA¹⁷-LYF:YGKIP:GMAVS:EXGXR, AAPASXX:VPARL:SPIN-AA¹⁷-LYF:YGKIP:DMVVE:AXGXR, STPPTXX:VPTRL:SPIN-AA¹⁷-LYF:YGKIP:DMVVE:SXGXR, HVPKPXX:APTKL:SPIN-AA¹⁷-LYF:YGKIP:NMVVR:SXGXH, RVPSTXX:APVKT:SPIN-AA¹⁷-LYF:YGKIP:MIVEE:XGXL, ASAAPXX:VPQAL:SPIN-AA¹⁷-LYF:YGKIP:MIVRS:XKXS, ASASPXX:VSQDL:SPIN-AA¹⁷-LYF:YGKIP:MIVKS:XKXS, ASASPXX:VPQDL:SPIN-AA¹⁷-LYF:YGKIP:MVVKS:XKXS, NDEGLEX:VPTEE:SPIN-AA¹⁷-LYF:YGKIP:FLQHN:KXEXR, NDEGLEX:VPTGQ:SPIN-AA¹⁷-LYF:YGKIP:LEEHS:QXEXR, SSVKXQP:SRVHH:SPIN-AA¹⁷-LYF:YGKIP:RLEEH:LEXAXA, RNVQXRP:TQVQL:SPIN-AA¹⁷-LYF:YGKIP:TLEDH:LAXKXE, KIPKAXX:VPAEL:SPIS-AA¹⁷-LYI:YKQYE:DMVVE:GXGXR, GIPEPXX:VPAKM:SPIS-AA¹⁷-LYI:YKQYE:NMVVE:SXAXR, SIPKAXX:VPAEL:SPIS-AA¹⁷-LYI:YKQYE:EMVVE:GXGXR, HVTKPTX:VPAKL:SPIS-AA¹⁷-LYI:YKQYE:NMVVE:SXGXH, YVPKPXX:VPAKL:SPIS-AA¹⁷-LYI:YKQYE:NMVVE:SXGXH, TVPKPXX:VPAQL:SPIS-AA¹⁷-LYI:YKQYE:NMVVE:AXGXH, AVPKAXX:VPAKL:SPIS-AA¹⁷-LYI:YKQYE:NMVVE:AXGXH, KVGKAXX:VPAKL:SPIS-AA¹⁷-LYI:YKQYE:EGMSVVE:XGXR, KASKAXX:VPAKL:SPIS-AA¹⁷-LYI:YKQYE:GMVVE:EXGXR, GSAGPXX:VPAKM:SPIS-AA¹⁷-LYI:YKQYE:GMVVE:RXGXS, STPPTXX:VPARL:SPIS-AA¹⁷-LYI:YKQYE:DMVVE:SXGXR, HVPKPXX:VPAKL:SPIS-AA¹⁷-LYI:YKQYE:NMVVE:SXGXH, RVPSTXX:VPAKT:SPIS-AA¹⁷-LYI:YKQYE:MIVVE:XGXL, ASAAPXX:VPAAL:SPIS-AA¹⁷-LYI:YKQYE:MIVVE:XKXS, ASASPXX:VPADL:SPIS-AA¹⁷-LYI:YKQYE:MIVVE:XKXS, ASASPXX:VPADL:SPIS-AA¹⁷-LYI:YKQYE:MVVVE:XKXS, KIPKAXX:VPTEL:SPIS-AA¹⁷-LYI:YKQYE:DMVVE:GXGXR, GIPEPXX:VPEKM:SPIS-AA¹⁷-LYI:YKQYE:NMTVE:SXAXR, SIPKAXX:VPTEL:SPIS-AA¹⁷-LYI:YKQYE:EMVVE:GXGXR, HVTKPTX:APTKL:SPIS-AA¹⁷-LYI:YKQYE:NMVVR:SXGXH, YVPKPXX:APTKL:SPIS-AA¹⁷-LYI:YKQYE:NMVVR:SXGXH, TVPKPXX:APTQL:SPIS-AA¹⁷-LYI:YKQYE:NMVVR:AXGXH, AVPKAXX:APTKL:SPIS-AA¹⁷-LYI:YKQYE:NMVVK:AXGXH, KVGKAXX:VPTKL:SPIS-AA¹⁷-LYI:YKQYE:EGMSVAE:XGXR, KASKAXX:VPTKL:SPIS-AA¹⁷-LYI:YKQYE:GMAVS:EXGXR, GSAGPXX:TPTKM:SPIS-AA¹⁷-LYI:YKQYE:GMVVD:RXGXS, STPPTXX:VPTRL:SPIS-AA¹⁷-LYI:YKQYE:DMVVE:SXGXR, HVPKPXX:APTKL:SPIS-AA¹⁷-LYI:YKQYE:NMVVR:SXGXH, RVPSTXX:APVKT:SPIS-AA¹⁷-LYI:YKQYE:MIVEE:XGXL, ASAAPXX:VPQAL:SPIS-AA¹⁷-LYI:YKQYE:MIVRS:XKXS, ASASPXX:VSQDL:SPIS-AA¹⁷-LYI:YKQYE:MIVKS:XKXS, ASASPXX:VPQDL:SPIS-AA¹⁷-LYI:YKQYE:MVVKS:XKXS, NDEGLEX:VPTEE:SPIS-AA¹⁷-LYI:YKQYE:FLQHN:KXEXR, NDEGLEX:VPTGQ:SPIS-AA¹⁷-LYI:YKQYE:LEEHS:QXEXR, SSVKXQP:SRVHH:SPIS-AA¹⁷-LYI:YKQYE:RLEEH:LEXAXA, RNVQXRP:TQVQL:SPIS-AA¹⁷-LYI:YKQYE:TLEDH:LAXKXE, KIPKAXX:VPTEL:SPIS-AA¹⁷-LFI:YKQYE:DMVVE:GXGXR, GIPEPXX:VPTKM:SPIS-AA¹⁷-LFI:YKQYE:NMVVE:SXAXR, SIPKAXX:VPTEL:SPIS-AA¹⁷-LFI:YKQYE:EMVVE:GXGXR, HVTKPTX:VPTKL:SPIS-AA¹⁷-LFI:YKQYE:NMVVE:SXGXH, YVPKPXX:VPTKL:SPIS-AA¹⁷-LFI:YKQYE:NMVVE:SXGXH, TVPKPXX:VPTQL:SPIS-AA¹⁷-LFI:YKQYE:NMVVE:AXGXH, AVPKAXX:VPTKL:SPIS-AA¹⁷-LFI:YKQYE:NMVVE:AXGXH, KVGKAXX:VPTKL:SPIS-AA¹⁷-LFI:YKQYE:EGMSVVE:XGXR, KASKAXX:VPTKL:SPIS-AA¹⁷-LFI:YKQYE:GMVVE:EXGXR, GSAGPXX:VPTKM:SPIS-AA¹⁷-LFI:YKQYE:GMVVE:RXGXS, AAPASXX:VPTRL:SPIS-AA¹⁷-LFI:YKQYE:DMVVE:AXGXR, HVPKPXX:VPTKL:SPIS-AA¹⁷-LFI:YKQYE:NMVVE:SXGXH, RVPSTXX:VPTKT:SPIS-AA¹⁷-LFI:YKQYE:MIVVE:XGXL, ASAAPXX:VPTAL:SPIS-AA¹⁷-LFI:YKQYE:MIVVE:XKXS, ASASPXX:VPTDL:SPIS-AA¹⁷-LFI:YKQYE:MIVVE:XKXS, ASASPXX:VPTDL:SPIS-AA¹⁷-LFI:YKQYE:MVVVE:XKXS, GIPEPXX:VPEKM:SPIS-AA¹⁷-LFI:YKQYE:NMTVE:SXAXR, HVTKPTX:APTKL:SPIS-AA¹⁷-LFI:YKQYE:NMVVR:SXGXH, YVPKPXX:APTKL:SPIS-AA¹⁷-LFI:YKQYE:NMVVR:SXGXH, TVPKPXX:APTQL:SPIS-AA¹⁷-LFI:YKQYE:NMVVR:AXGXH, AVPKAXX:APTKL:SPIS-AA¹⁷-LFI:YKQYE:NMVVK:AXGXH, KVGKAXX:VPTKL:SPIS-AA¹⁷-LFI:YKQYE:EGMSVAE:XGXR, KASKAXX:VPTKL:SPIS-AA¹⁷-LFI:YKQYE:GMAVS:EXGXR, GSAGPXX:TPTKM:SPIS-AA¹⁷-LFI:YKQYE:GMVVD:RXGXS, AAPASXX:VPARL:SPIS-AA¹⁷-LFI:YKQYE:DMVVE:AXGXR, HVPKPXX:APTKL:SPIS-AA¹⁷-LFI:YKQYE:NMVVR:SXGXH, RVPSTXX:APVKT:SPIS-AA¹⁷-LFI:YKQYE:MIVEE:XGXL, ASAAPXX:VPQAL:SPIS-AA¹⁷-LFI:YKQYE:MIVRS:XKXS, ASASPXX:VSQDL:SPIS-AA¹⁷-LFI:YKQYE:MIVKS:XKXS, ASASPXX:VPQDL:SPIS-AA¹⁷-LFI:YKQYE:MVVKS:XKXS, NDEGLEX:VPTEE:SPIS-AA¹⁷-LFI:YKQYE:FLQHN:KXEXR, NDEGLEX:VPTGQ:SPIS-AA¹⁷-LFI:YKQYE:LEEHS:QXEXR, SSVKXQP:SRVHH:SPIS-AA¹⁷-LFI:YKQYE:RLEEH:LEXAXA, RNVQXRP:TQVQL:SPIS-AA¹⁷-LFI:YKQYE:TLEDH:LAXKXE, KIPKAXX:APVEL:KPLS-AA¹⁷-LYV:DHHKD:DMVEE:GXGXR, GIPEPXX:APVKM:KPLS-AA¹⁷-LYV:DHHKD:NMVEE:SXAXR, SIPKAXX:APVEL:KPLS-AA¹⁷-LYV:DHHKD:EMVEE:GXGXR, HVTKPTX:APVKL:KPLS-AA¹⁷-LYV:DHHKD:NMVEE:SXGXH, YVPKPXX:APVKL:KPLS-AA¹⁷-LYV:DHHKD:NMVEE:SXGXH, TVPKPXX:APVQL:KPLS-AA¹⁷-LYV:DHHKD:NMVEE:AXGXH, AVPKAXX:APVKL:KPLS-AA¹⁷-LYV:DHHKD:NMVEE:AXGXH, KVGKAXX:APVKL:KPLS-AA¹⁷-LYV:DHHKD:EGMSVEE:XGXR, KASKAXX:APVKL:KPLS-AA¹⁷-LYV:DHHKD:GMVEE:EXGXR, GSAGPXX:APVKM:KPLS-AA¹⁷-LYV:DHHKD:GMVEE:RXGXS, AAPASXX:APVRL:KPLS-AA¹⁷-LYV:DHHKD:DMVEE:AXGXR, STPPTXX:APVRL:KPLS-AA¹⁷-LYV:DHHKD:DMVEE:SXGXR, HVPKPXX:APVKL:KPLS-AA¹⁷-LYV:DHHKD:NMVEE:SXGXH, ASAAPXX:APVAL:KPLS-AA¹⁷-LYV:DHHKD:MIVEE:XKXS, ASASPXX:APVDL:KPLS-AA¹⁷-LYV:DHHKD:MIVEE:XKXS, ASASPXX:APVDL:KPLS-AA¹⁷-LYV:DHHKD:MVVEE:XKXS, KIPKAXX:VPTEL:KPLS-AA¹⁷-LYV:DHHKD:DMVVE:GXGXR, GIPEPXX:VPEKM:KPLS-AA¹⁷-LYV:DHHKD:NMTVE:SXAXR, SIPKAXX:VPTEL:KPLS-AA¹⁷-LYV:DHHKD:EMVVE:GXGXR, HVTKPTX:APTKL:KPLS-AA¹⁷-LYV:DHHKD:NMVVR:SXGXH, YVPKPXX:APTKL:KPLS-AA¹⁷-LYV:DHHKD:NMVVR:SXGXH, TVPKPXX:APTQL:KPLS-AA¹⁷-LYV:DHHKD:NMVVR:AXGXH, AVPKAXX:APTKL:KPLS-AA¹⁷-LYV:DHHKD:NMVVK:AXGXH, KVGKAXX:VPTKL:KPLS-AA¹⁷-LYV:DHHKD:EGMSVAE:XGXR, KASKAXX:VPTKL:KPLS-AA¹⁷-LYV:DHHKD:GMAVS:EXGXR, GSAGPXX:TPTKM:KPLS-AA¹⁷-LYV:DHHKD:GMVVD:RXGXS, AAPASXX:VPARL:KPLS-AA¹⁷-LYV:DHHKD:DMVVE:AXGXR, STPPTXX:VPTRL:KPLS-AA¹⁷-LYV:DHHKD:DMVVE:SXGXR, HVPKPXX:APTKL:KPLS-AA¹⁷-LYV:DHHKD:NMVVR:SXGXH, ASAAPXX:VPQAL:KPLS-AA¹⁷-LYV:DHHKD:MIVRS:XKXS, ASASPXX:VSQDL:KPLS-AA¹⁷-LYV:DHHKD:MIVKS:XKXS, ASASPXX:VPQDL:KPLS-AA¹⁷-LYV:DHHKD:MVVKS:XKXS, NDEGLEX:VPTEE:KPLS-AA¹⁷-LYV:DHHKD:FLQHN:KXEXR, NDEGLEX:VPTGQ:KPLS-AA¹⁷-LYV:DHHKD:LEEHS:QXEXR, SSVKXQP:SRVHH:KPLS-AA¹⁷-LYV:DHHKD:RLEEH:LEXAXA, RNVQXRP:TQVQL:KPLS-AA¹⁷-LYV:DHHKD:TLEDH:LAXKXE, KIPKAXX:VPQEL:EPLP-AA¹⁷-VYY:EQLSN:DMVRS:GXGXR, GIPEPXX:VPQKM:EPLP-AA¹⁷-VYY: EQLSN:NMVRS:SXAXR, SIPKAXX:VPQEL:EPLP-AA¹⁷-VYY:EQLSN:EMVRS:GXGXR, HVTKPTX:VPQKL:EPLP-AA¹⁷-VYY:EQLSN:NMVRS:SXGXH, YVPKPXX:VPQKL:EPLP-AA¹⁷-VYY:EQLSN:NMVRS:SXGXH, TVPKPXX:VPQQL:EPLP-AA¹⁷-VYY:EQLSN:NMVRS:AXGXH, AVPKAXX:VPQKL:EPLP-AA¹⁷-VYY:EQLSN:NMVRS:AXGXH, KVGKAXX:VPQKL:EPLP-AA¹⁷-VYY:EQLSN: EGMSVRS:XGXR, KASKAXX:VPQKL:EPLP-AA¹⁷-VYY:EQLSN:GMVRS:EXGXR, GSAGPXX:VPQKM:EPLP-AA¹⁷-VYY:EQLSN:GMVRS:RXGXS, AAPASXX:VPQRL:EPLP-AA¹⁷-VYY: EQLSN:DMVRS:AXGXR, STPPTXX:VPQRL:EPLP-AA¹⁷-VYY:EQLSN:DMVRS:SXGXR, HVPKPXX:VPQKL:EPLP-AA¹⁷-VYY:EQLSN:NMVRS:SXGXH, RVPSTXX:VPQKT: EPLP-AA¹⁷-VYY: EQLSN:MIVRS:XGXL, ASASPXX:VPQDL:EPLP-AA¹⁷-VYY:EQLSN:MIVRS:XKXS, ASASPXX:VPQDL:EPLP-AA¹⁷-VYY:EQLSN:MVVRS:XKXS, KIPKAXX:VPTEL:EPLP-AA¹⁷-VYY:EQLSN:DMVVE:GXGXR, GIPEPXX:VPEKM:EPLP-AA¹⁷-VYY:EQLSN:NMTVE:SXAXR, SIPKAXX:VPTEL:EPLP-AA¹⁷-VYY:EQLSN:EMVVE:GXGXR, HVTKPTX:APTKL: EPLP-AA¹⁷-VYY: EQLSN:NMVVR:SXGXH, YVPKPXX:APTKL:EPLP-AA¹⁷-VYY:EQLSN:NMVVR:SXGXH, TVPKPXX:APTQL:EPLP-AA¹⁷-VYY:EQLSN:NMVVR:AXGXH, AVPKAXX:APTKL:EPLP-AA¹⁷-VYY:EQLSN:NMVVK:AXGXH, KVGKAXX:VPTKL:EPLP-AA¹⁷-VYY:EQLSN:EGMSVAE:XGXR, KASKAXX:VPTKL:EPLP-AA¹⁷-VYY:EQLSN:GMAVS:EXGXR, GSAGPXX:TPTKM:EPLP-AA¹⁷-VYY:EQLSN:GMVVD:RXGXS, AAPASXX:VPARL:EPLP-AA¹⁷-VYY:EQLSN:DMVVE:AXGXR, STPPTXX:VPTRL:EPLP-AA¹⁷-VYY:EQLSN:DMVVE:SXGXR, HVPKPXX:APTKL:EPLP-AA¹⁷-VYY:EQLSN:NMVVR:SXGXH, RVPSTXX:APVKT:EPLP-AA¹⁷-VYY:EQLSN:MIVEE:XGXL, ASASPXX:VSQDL:EPLP-AA¹⁷-VYY:EQLSN:MIVKS:XKXS, ASASPXX:VPQDL:EPLP-AA¹⁷-VYY:EQLSN:MVVKS:XKXS, NDEGLEX:VPTEE:EPLP-AA¹⁷-VYY:EQLSN:FLQHN:KXEXR, NDEGLEX:VPTGQ:EPLP-AA¹⁷-VYY:EQLSN:LEEHS:QXEXR, SSVKXQP:SRVHH:EPLP-AA¹⁷-VYY:EQLSN:RLEEH:LEXAXA, RNVQXRP:TQVQL:EPLP-AA¹⁷-VYY:EQLSN:TLEDH:LAXKXE, KIPKAXX:VSQEL:EPLT-AA¹⁷-LYY:EQLSN:DMVKS:GXGXR, GIPEPXX:VSQKM:EPLT-AA¹⁷-LYY:EQLSN:NMVKS:SXAXR, SIPKAXX:VSQEL:EPLT-AA¹⁷-LYY:EQLSN:EMVKS:GXGXR, HVTKPTX:VSQKL:EPLT-AA¹⁷-LYY:EQLSN:NMVKS:SXGXH, YVPKPXX:VSQKL:EPLT-AA¹⁷-LYY:EQLSN:NMVKS:SXGXH, TVPKPXX:VSQQL:EPLT-AA¹⁷-LYY:EQLSN:NMVKS:AXGXH, AVPKAXX:VSQKL:EPLT-AA¹⁷-LYY:EQLSN:NMVKS:AXGXH, KVGKAXX:VSQKL:EPLT-AA¹⁷-LYY:EQLSN:EGMSVKS:XGXR, KASKAXX:VSQKL:EPLT-AA¹⁷-LYY:EQLSN:GMVKS:EXGXR, GSAGPXX:VSQKM:EPLT-AA¹⁷-LYY:EQLSN:GMVKS:RXGXS, AAPASXX:VSQRL:EPLT-AA¹⁷-LYY:EQLSN:DMVKS:AXGXR, STPPTXX:VSQRL:EPLT-AA¹⁷-LYY:EQLSN:DMVKS:SXGXR, HVPKPXX:VSQKL:EPLT-AA¹⁷-LYY:EQLSN:NMVKS:SXGXH, RVPSTXX:VSQKT:EPLT-AA¹⁷-LYY:EQLSN:MIVKS:XGXL, ASAAPXX:VSQAL:EPLT-AA¹⁷-LYY:EQLSN:MIVKS:XKXS, ASASPXX:VSQDL:EPLT-AA¹⁷-LYY:EQLSN:MVVKS:XKXS, KIPKAXX:VPTEL:EPLT-AA¹⁷-LYY:EQLSN:DMVVE:GXGXR, GIPEPXX:VPEKM:EPLT-AA¹⁷-LYY:EQLSN:NMTVE:SXAXR, SIPKAXX:VPTEL:EPLT-AA¹⁷-LYY:EQLSN:EMVVE:GXGXR, HVTKPTX:APTKL:EPLT-AA¹⁷-LYY:EQLSN:NMVVR:SXGXH, YVPKPXX:APTKL:EPLT-AA¹⁷-LYY:EQLSN:NMVVR:SXGXH, TVPKPXX:APTQL:EPLT-AA¹⁷-LYY:EQLSN:NMVVR:AXGXH, AVPKAXX:APTKL:EPLT-AA¹⁷-LYY:EQLSN:NMVVK:AXGXH, KVGKAXX:VPTKL:EPLT-AA¹⁷-LYY:EQLSN:EGMSVAE:XGXR, KASKAXX:VPTKL:EPLT-AA¹⁷-LYY:EQLSN:GMAVS:EXGXR, GSAGPXX:TPTKM:EPLT-AA¹⁷-LYY:EQLSN:GMVVD:RXGXS, AAPASXX:VPARL:EPLT-AA¹⁷-LYY:EQLSN:DMVVE:AXGXR, STPPTXX:VPTRL:EPLT-AA¹⁷-LYY:EQLSN:DMVVE:SXGXR, HVPKPXX:APTKL:EPLT-AA¹⁷-LYY:EQLSN:NMVVR:SXGXH, RVPSTXX:APVKT:EPLT-AA¹⁷-LYY:EQLSN:MIVEE:XGXL, ASAAPXX:VPQAL:EPLT-AA¹⁷-LYY:EQLSN:MIVRS:XKXS, NDEGLEX:VPTEE:EPLT-AA¹⁷-LYY:EQLSN:FLQHN:KXEXR, NDEGLEX:VPTGQ:EPLT-AA¹⁷-LYY:EQLSN:LEEHS:QXEXR, SSVKXQP:SRVHH:EPLT-AA¹⁷-LYY:EQLSN:RLEEH:LEXAXA, RNVQXRP:TQVQL:EPLT-AA¹⁷-LYY:EQLSN:TLEDH:LAXKXE, KIPKAXX:VPQEL:EPLT-AA¹⁷-LYY:EQLSN:DMVKS:GXGXR, GIPEPXX:VPQKM:EPLT-AA¹⁷-LYY:EQLSN:NMVKS:SXAXR, SIPKAXX:VPQEL:EPLT-AA¹⁷-LYY:EQLSN:EMVKS:GXGXR, HVTKPTX:VPQKL:EPLT-AA¹⁷-LYY:EQLSN:NMVKS:SXGXH, YVPKPXX:VPQKL:EPLT-AA¹⁷-LYY:EQLSN:NMVKS:SXGXH, TVPKPXX:VPQQL:EPLT-AA¹⁷-LYY:EQLSN:NMVKS:AXGXH, AVPKAXX:VPQKL:EPLT-AA¹⁷-LYY:EQLSN:NMVKS:AXGXH, KVGKAXX:VPQKL:EPLT-AA¹⁷-LYY:EQLSN:EGMSVKS:XGXR, KASKAXX:VPQKL:EPLT-AA¹⁷-LYY:EQLSN:GMVKS:EXGXR, GSAGPXX:VPQKM:EPLT-AA¹⁷-LYY:EQLSN:GMVKS:RXGXS, AAPASXX:VPQRL:EPLT-AA¹⁷-LYY:EQLSN:DMVKS:AXGXR, STPPTXX:VPQRL:EPLT-AA¹⁷-LYY:EQLSN:DMVKS:SXGXR, HVPKPXX:VPQKL:EPLT-AA¹⁷-LYY:EQLSN:NMVKS:SXGXH, RVPSTXX:VPQKT:EPLT-AA¹⁷-LYY:EQLSN:MIVKS:XGXL, ASAAPXX:VPQAL:EPLT-AA¹⁷-LYY:EQLSN:MIVKS:XKXS, ASASPXX:VPQDL:EPLT-AA¹⁷-LYY:EQLSN:MIVKS:XKXS, NDEGLEX:VPTGQ:SNIT-AA¹⁷-QIM:IGEMS:LEQHN:QXEXR, KIPKAXX:VPTEL:SNIT-AA¹⁷-QIM:IGEMS:DMVVE:GXGXR, GIPEPXX:VPEKM:SNIT-AA¹⁷-QIM:IGEMS:NMTVE:SXAXR, SIPKAXX:VPTEL:SNIT-AA¹⁷-QIM:IGEMS: EMVVE:GXGXR, HVTKPTX:APTKL:SNIT-AA¹⁷-QIM:IGEMS:NMVVR:SXGXH, YVPKPXX:APTKL:SNIT-AA¹⁷-QIM:IGEMS:NMVVR:SXGXH, TVPKPXX:APTQL:SNIT-AA¹⁷-QIM:IGEMS:NMVVR:AXGXH, AVPKAXX:APTKL:SNIT-AA¹⁷-QIM:IGEMS:NMVVK:AXGXH, KVGKAXX:VPTKL:SNIT-AA¹⁷-QIM:IGEMS:EGMSVAE:XGXR, KASKAXX:VPTKL:SNIT-AA¹⁷-QIM:IGEMS:GMAVS:EXGXR, GSAGPXX:TPTKM:SNIT-AA¹⁷-QIM:IGEMS:GMVVD:RXGXS, AAPASXX:VPARL:SNIT-AA¹⁷-QIM:IGEMS:DMVVE:AXGXR, STPPTXX:VPTRL:SNIT-AA¹⁷-QIM:IGEMS:DMVVE:SXGXR, HVPKPXX:APTKL:SNIT-AA¹⁷-QIM:IGEMS:NMVVR:SXGXH, RVPSTXX:APVKT:SNIT-AA¹⁷-QIM:IGEMS:MIVEE:XGXL, ASAAPXX:VPQAL:SNIT-AA¹⁷-QIM:IGEMS:MIVRS:XKXS, ASASPXX:VSQDL:SNIT-AA¹⁷-QIM:IGEMS:MIVKS:XKXS, ASASPXX:VPQDL:SNIT-AA¹⁷-QIM:IGEMS:MVVKS:XKXS, NDEGLEX:VPTGQ:SNIT-AA¹⁷-QIM:IGEMS:LEEHS:QXEXR, SSVKXQP:SRVH H:SNIT-AA¹⁷-QIM: IGEMS:RLEEH:LEXAXA, RNVQXRP:TQVQL:SNIT-AA¹⁷-QIM:IGEMS:TLEDH:LAXKXE, NDEGLEX:VPTEE:SNIT-AA¹⁷-QIM:LGEMS:FLEHS:KXEXR, KIPKAXX:VPTEL:SNIT-AA¹⁷-QIM:LGEMS:DMVVE:GXGXR, GIPEPXX:VPEKM:SNIT-AA¹⁷-QIM:LGEMS:NMTVE:SXAXR, SIPKAXX:VPTEL:SNIT-AA¹⁷-QIM:LGEMS:EMVVE:GXGXR, HVTKPTX:APTKL:SNIT-AA¹⁷-QIM:LGEMS:NMVVR:SXGXH, YVPKPXX:APTKL:SNIT-AA¹⁷-QIM:LGEMS:NMVVR:SXGXH, TVPKPXX:APTQL:SNIT-AA¹⁷-QIM:LGEMS:NMVVR:AXGXH, AVPKAXX:APTKL:SNIT-AA¹⁷-QIM:LGEMS:NMVVK:AXGXH, KVGKAXX:VPTKL:SNIT-AA¹⁷-QIM:LGEMS:EGMSVAE:XGXR, KASKAXX:VPTKL:SNIT-AA¹⁷-QIM:LGEMS:GMAVS:EXGXR, GSAGPXX:TPTKM:SNIT-AA¹⁷-QIM:LGEMS:GMVVD:RXGXS, AAPASXX:VPARL:SNIT-AA¹⁷-QIM:LGEMS:DMVVE:AXGXR, STPPTXX:VPTRL:SNIT-AA¹⁷-QIM:LGEMS:DMVVE:SXGXR, HVPKPXX:APTKL:SNIT-AA¹⁷-QIM:LGEMS:NMVVR:SXGXH, RVPSTXX:APVKT:SNIT-AA¹⁷-QIM:LGEMS:MIVEE:XGXL, ASAAPXX:VPQAL:SNIT-AA¹⁷-QIM:LGEMS:MIVRS:XKXS, ASASPXX:VSQDL:SNIT-AA¹⁷-QIM:LGEMS:MIVKS:XKXS, ASASPXX:VPQDL:SNIT-AA¹⁷-QIM:LGEMS:MVVKS:XKXS, NDEGLEX:VPTEE:SNIT-AA¹⁷-QIM:LGEMS:FLQHN:KXEXR, SSVKXQP:SRVHH:SNIT-AA¹⁷-QIM:LGEMS:RLEEH:LEXAXA, RNVQXRP:TQVQL:SNIT-AA¹⁷-QIM:LGEMS:TLEDH:LAXKXE, RNVQXRP:SRVQL:RSVK-AA¹⁷-AKV:KEVQV:TLEEH:LAXKXE, KIPKAXX:VPTEL:RSVK-AA¹⁷-AKV:KEVQV:DMVVE:GXGXR, GIPEPXX:VPEKM:RSVK-AA¹⁷-AKV:KEVQV:NMTVE:SXAXR, SIPKAXX:VPTEL:RSVK-AA¹⁷-AKV:KEVQV:EMVVE:GXGXR, HVTKPTX:APTKL:RSVK-AA¹⁷-AKV:KEVQV:NMVVR:SXGXH, YVPKPXX:APTKL:RSVK-AA¹⁷-AKV:KEVQV:NMVVR:SXGXH, TVPKPXX:APTQL:RSVK-AA¹⁷-AKV:KEVQV:NMVVR:AXGXH, AVPKAXX:APTKL:RSVK-AA¹⁷-AKV:KEVQV:NMVVK:AXGXH, KVGKAXX:VPTKL:RSVK-AA¹⁷-AKV:KEVQV:EGMSVAE:XGXR, KASKAXX:VPTKL:RSVK-AA¹⁷-AKV:KEVQV:GMAVS:EXGXR, GSAGPXX:TPTKM:RSVK-AA¹⁷-AKV:KEVQV:GMVVD:RXGXS, AAPASXX:VPARL:RSVK-AA¹⁷-AKV:KEVQV:DMVVE:AXGXR, STPPTXX:VPTRL:RSVK-AA¹⁷-AKV:KEVQV:DMVVE:SXGXR, HVPKPXX:APTKL:RSVK-AA¹⁷-AKV:KEVQV:NMVVR:SXGXH, RVPSTXX:APVKT:RSVK-AA¹⁷-AKV:KEVQV:MIVEE:XGXL, ASAAPXX:VPQAL:RSVK-AA¹⁷-AKV:KEVQV:MIVRS:XKXS, ASASPXX:VSQDL:RSVK-AA¹⁷-AKV:KEVQV:MIVKS:XKXS, ASASPXX:VPQDL:RSVK-AA¹⁷-AKV:KEVQV:MVVKS:XKXS, NDEGLEX:VPTEE:RSVK-AA¹⁷-AKV:KEVQV:FLQHN:KXEXR, NDEGLEX:VPTGQ:RSVK-AA¹⁷-AKV:KEVQV:LEEHS:QXEXR, RNVQXRP:TQVQL:RSVK-AA¹⁷-AKV:KEVQV:TLEDH:LAXKXE, SSVKXQP:TQVHH:RPVQ-AA¹⁷-RKI:KKATV:RLEDH:LEXAXA, KIPKAXX:VPTEL:RPVQ-AA¹⁷-RKI:KKATV:DMVVE:GXGXR, GIPEPXX:VPEKM:RPVQ-AA¹⁷-RKI:KKATV:NMTVE:SXAXR, SIPKAXX:VPTEL:RPVQ-AA¹⁷-RKI:KKATV:EMVVE:GXGXR, HVTKPTX:APTKL:RPVQ-AA¹⁷-RKI:KKATV:NMVVR:SXGXH, YVPKPXX:APTKL:RPVQ-AA¹⁷-RKI:KKATV:NMVVR:SXGXH, TVPKPXX:APTQL:RPVQ-AA¹⁷-RKI:KKATV:NMVVR:AXGXH, AVPKAXX:APTKL:RPVQ-AA¹⁷-RKI:KKATV:NMVVK:AXGXH, KVGKAXX:VPTKL:RPVQ-AA¹⁷-RKI:KKATV:EGMSVAE:XGXR, KASKAXX:VPTKL:RPVQ-AA¹⁷-RKI:KKATV:GMAVS:EXGXR, GSAGPXX:TPTKM:RPVQ-AA¹⁷-RKI:KKATV:GMVVD:RXGXS, AAPASXX:VPARL:RPVQ-AA¹⁷-RKI:KKATV:DMVVE:AXGXR, STPPTXX:VPTRL:RPVQ-AA¹⁷-RKI:KKATV:DMVVE:SXGXR, HVPKPXX:APTKL:RPVQ-AA¹⁷-RKI:KKATV:NMVVR:SXGXH, RVPSTXX:APVKT:RPVQ-AA¹⁷-RKI:KKATV:MIVEE:XGXL, ASAAPXX:VPQAL:RPVQ-AA¹⁷-RKI:KKATV:MIVRS:XKXS, ASASPXX:VSQDL:RPVQ-AA¹⁷-RKI:KKATV:MIVKS:XKXS, ASASPXX:VPQDL:RPVQ-AA¹⁷-RKI:KKATV:MVVKS:XKXS, NDEGLEX:VPTEE:RPVQ-AA¹⁷-RKI:KKATV:FLQHN:KXEXR, NDEGLEX:VPTGQ:RPVQ-AA¹⁷-RKI:KKATV:LEEHS:QXEXR and SSVKXQP:SRVHH:RPVQ-AA¹⁷-RKI:KKATV:RLEEH:LEXAXA; and wherein AA¹⁷ is selected from the group consisting of G, A, V, L, I, P, F, M, W, T and S (in particular is selected from the group consisting of M, I, L, V and T).

[0437] In particular, in certain embodiments, the heptuplet PEP7:PEP3:PEP1:LINKER:PEP2:PEP4:PEP8 is selected from the group consisting of GIPEPXX:VPT:SAIS:DENKNVV:LKNYQ:VVE:SXAXR, SIPKAXX:VPT:SAIS:DEYDKVV:LKNYQ:VVE:GXGXR, HVTKPTX:VPT:SAIS:DDSSNVI:LKNYQ:VVE:SXGXH, YVPKPXX:VPT:SAIS:DDSSNVI:LKNYQ:VVE:SXGXH, TVPKPXX:VPT:SAIS:DDSSNVI:LKNYQ:VVE:AXGXH, AVPKAXX:VPT:SAIS:DSSNNVI:LKNYQ:VVE:AXGXH, KVGKAXX:VPT:SAIS:DDMGVPT:LKNYQ:VVE:XGXR, KASKAXX:VPT:SAIS:DKGVVTY:LKNYQ:VVE:EXGXR, GSAGPXX:VPT:SAIS:NDKQQII:LKNYQ:VVE:RXGXS, AAPASXX:VPT:SAIS:DAANNVV:LKNYQ:VVE:AXGXR, STPPTXX:VPT:SAIS:DSANNVV:LKNYQ:VVE:SXGXR, HVPKPXX:VPT:SAIS:DDSSNVI:LKNYQ:VVE:SXGXH, RVPSTXX:VPT:SAIS:DNGRVLL:LKNYQ:VVE:XGXL, ASAAPXX:VPT:SAIS:VGRKPKV:LKNYQ:VVE:XKXS, ASASPXX:VPT:SAIS:IGKTPKI:LKNYQ:VVE:XKXS, ASASPXX:VPT:SAIS:VGRTPKV:LKNYQ:VVE:XKXS, NDEGLEX:VPT:SAIS:RIKPHQGQH:LKNYQ:VVE:KXEXR, NDEGLEX:VPT:SAIS:RIKPHQGQH:LKNYQ:VVE:QXEXR, SSVKXQP:VPT:SAIS:EYVRKKPKL:LKNYQ:VVE:LEXAXA, RNVQXRP:VPT:SAIS:EIVRKKPIF:LKNYQ:VVE:LAXKXE, GIPEPXX:VPE:SAIS:DENKNVV:LKNYQ:TVE:SXAXR, HVTKPTX:APT:SAIS:DDSSNVI:LKNYQ:VVR:SXGXH, YVPKPXX:APT:SAIS:DDSSNVI:LKNYQ:VVR:SXGXH, TVPKPXX:APT:SAIS:DDSSNVI:LKNYQ:VVR:AXGXH, AVPKAXX:APT:SAIS:DSSNNVI:LKNYQ:VVK:AXGXH, KVGKAXX:VPT:SAIS:DDMGVPT:LKNYQ:VAE:XGXR, KASKAXX:VPT:SAIS:DKGVVTY:LKNYQ:AVS: EXGXR, GSAGPXX:TPT:SAIS:NDKQQII:LKNYQ:VVD:RXGXS, AAPASXX:VPA:SAIS:DAANNVV:LKNYQ:VVE:AXGXR, HVPKPXX:APT:SAIS:DDSSNVI:LKNYQ:VVR:SXGXH, RVPSTXX:APV:SAIS:DNGRVLL:LKNYQ:VEE:XGXL, ASAAPXX:VPQ:SAIS:VGRKPKV:LKNYQ:VRS:XKXS, ASASPXX:VSQ:SAIS:IGKTPKI:LKNYQ:VKS:XKXS, ASASPXX:VPQ:SAIS:VGRTPKV:LKNYQ:VKS:XKXS, NDEGLEX:VPT:SAIS:RIKPHQGQH:LKNYQ:QHN:KXEXR, NDEGLEX:VPT:SAIS:RIKPHQGQH:LKNYQ:EHS:QXEXR, SSVKXQP:SRV:SAIS:EYVRKKPKL:LKNYQ:EEH:LEXAXA, RNVQXRP:TQV:SAIS:EIVRKKPIF:LKNYQ:EDH:LAXKXE, KIPKAXX:VPE:SSLS:DENEKVV:LKVYP:TVE:GXGXR, SIPKAXX:VPE:SSLS:DEYDKVV:LKVYP:TVE:GXGXR, HVTKPTX:VPE:SSLS:DDSSNVI:LKVYP:TVE:SXGXH, YVPKPXX:VPE:SSLS:DDSSNVI:LKVYP:TVE:SXGXH, TVPKPXX:VPE:SSLS:DDSSNVI:LKVYP:TVE:AXGXH, AVPKAXX:VPE:SSLS:DSSNNVI:LKVYP:TVE:AXGXH, KVGKAXX:VPE:SSLS:DDMGVPT:LKVYP:TVE:XGXR, KASKAXX:VPE:SSLS:DKGVVTY:LKVYP:TVE:EXGXR, GSAGPXX:VPE:SSLS:NDKQQII:LKVYP:TVE:RXGXS, AAPASXX:VPE:SSLS:DAANNVV:LKVYP:TVE:AXGXR, STPPTXX:VPE:SSLS:DSANNVV:LKVYP:TVE:SXGXR, HVPKPXX:VPE:SSLS:DDSSNVI:LKVYP:TVE:SXGXH, RVPSTXX:VPE:SSLS:DNGRVLL:LKVYP:TVE:XGXL, ASAAPXX:VPE:SSLS:VGRKPKV:LKVYP:TVE:XKXS, ASASPXX:VPE:SSLS:IGKTPKI:LKVYP:TVE:XKXS, ASASPXX:VPE:SSLS:VGRTPKV:LKVYP:TVE:XKXS, NDEGLEX:VPE:SSLS:RIKPHQGQH:LKVYP:TVE:KXEXR, NDEGLEX:VPE:SSLS:RIKPHQGQH:LKVYP:TVE:QXEXR, SSVKXQP:VPE:SSLS:EYVRKKPKL:LKVYP:TVE:LEXAXA, RNVQXRP:VPE:SSLS:EIVRKKPIF:LKVYP:TVE:LAXKXE, KIPKAXX:VPT:SSLS:DENEKVV:LKVYP:VVE:GXGXR, SIPKAXX:VPT:SSLS:DEYDKVV:LKVYP:VVE:GXGXR, HVTKPTX:APT:SSLS:DDSSNVI:LKVYP:VVR:SXGXH, YVPKPXX:APT:SSLS:DDSSNVI:LKVYP:VVR:SXGXH, TVPKPXX:APT:SSLS:DDSSNVI:LKVYP:VVR:AXGXH, AVPKAXX:APT:SSLS:DSSNNVI:LKVYP:VVK:AXGXH, KVGKAXX:VPT:SSLS:DDMGVPT:LKVYP:VAE:XGXR, KASKAXX:VPT:SSLS:DKGVVTY:LKVYP:AVS:EXGXR, GSAGPXX:TPT:SSLS:NDKQQII:LKVYP:VVD:RXGXS, AAPASXX:VPA:SSLS:DAANNVV:LKVYP:VVE:AXGXR, STPPTXX:VPT:SSLS:DSANNVV:LKVYP:VVE:SXGXR, HVPKPXX:APT:SSLS:DDSSNVI:LKVYP:VVR:SXGXH, RVPSTXX:APV:SSLS:DNGRVLL:LKVYP:VEE:XGXL, ASAAPXX:VPQ:SSLS:VGRKPKV:LKVYP:VRS:XKXS, ASASPXX:VSQ:SSLS:IGKTPKI:LKVYP:VKS:XKXS, ASASPXX:VPQ:SSLS:VGRTPKV:LKVYP:VKS:XKXS, NDEGLEX:VPT:SSLS:RIKPHQGQH:LKVYP:QHN:KXEXR, NDEGLEX:VPT:SSLS:RIKPHQGQH:LKVYP:EHS:QXEXR, SSVKXQP:SRV:SSLS:EYVRKKPKL:LKVYP:EEH:LEXAXA, RNVQXRP:TQV:SSLS:EIVRKKPIF:LKVYP:EDH:LAXKXE, KIPKAXX:VPT:SAIS:DEN EKVV:LKNYQ:VVE:GXGXR, KIPKAXX:APT:NAIS:DENEKVV:LKKYR:VVR:GXGXR, GIPEPXX:APT:NAIS:DENKNVV:LKKYR:VVR:SXAXR, SIPKAXX:APT:NAIS:DEYDKVV:LKKYR:VVR:GXGXR, YVPKPXX:APT:NAIS:DDSSNVI:LKKYR:VVR:SXGXH, TVPKPXX:APT:NAIS:DDSSNVI:LKKYR:VVR:AXGXH, AVPKAXX:APT:NAIS:DSSNNVI:LKKYR:VVR:AXGXH, KVGKAXX:APT:NAIS:DDMGVPT:LKKYR:VVR:XGXR, KASKAXX:APT:NAIS:DKGVVTY:LKKYR:VVR:EXGXR, GSAGPXX:APT:NAIS:NDKQQII:LKKYR:VVR:RXGXS, AAPASXX:APT:NAIS:DAANNVV:LKKYR:VVR:AXGXR, STPPTXX:APT:NAIS:DSANNVV:LKKYR:VVR:SXGXR, HVPKPXX:APT:NAIS:DDSSNVI:LKKYR:VVR:SXGXH, RVPSTXX:APT:NAIS:DNGRVLL:LKKYR:VVR:XGXL, ASAAPXX:APT:NAIS:VGRKPKV:LKKYR:VVR:XKXS, ASASPXX:APT:NAIS:IGKTPKI:LKKYR:VVR:XKXS, ASASPXX:APT:NAIS:VGRTPKV:LKKYR:VVR:XKXS, NDEGLEX:APT:NAIS:RIKPHQGQH:LKKYR:VVR:KXEXR, NDEGLEX:APT:NAIS:RIKPHQGQH:LKKYR:VVR:QXEXR, SSVKXQP:APT:NAIS:EYVRKKPKL:LKKYR:VVR:LEXAXA, RNVQXRP:APT:NAIS:EIVRKKPIF:LKKYR:VVR:LAXKXE, KIPKAXX:VPT:NAIS:DENEKVV:LKKYR:VVE:GXGXR, GIPEPXX:VPE:NAIS:DENKNVV:LKKYR:TVE:SXAXR, SIPKAXX:VPT:NAIS:DEYDKVV:LKKYR:VVE:GXGXR, AVPKAXX:APT:NAIS:DSSNNVI:LKKYR:VVK:AXGXH, KVGKAXX:VPT:NAIS:DDMGVPT:LKKYR:VAE:XGXR, KASKAXX:VPT:NAIS:DKGVVTY:LKKYR:AVS:EXGXR, GSAGPXX:TPT:NAIS:NDKQQIIIKKYR:VVD:RXGXS, AAPASXX:VPA:NAIS:DAANNVV:LKKYR:VVE:AXGXR, STPPTXX:VPT:NAIS:DSANNVV:LKKYR:VVE:SXGXR, RVPSTXX:APV:NAIS:DNGRVLL:LKKYR:VEE:XGXL, ASAAPXX:VPQ:NAIS:VGRKPKV:LKKYR:VRS:XKXS, ASASPXX:VSQ:NAIS:IGKTPKI:LKKYR:VKS:XKXS, ASASPXX:VPQ:NAIS:VGRTPKV:LKKYR:VKS:XKXS, NDEGLEX:VPT:NAIS:RIKPHQGQH:LKKYR:QHN:KXEXR, NDEGLEX:VPT:NAIS:RIKPHQGQH:LKKYR:EHS:QXEXR, SSVKXQP:SRV:NAIS:EYVRKKPKL:LKKYR:EEH:LEXAXA, RNVQXRP:TQV:NAIS:EIVRKKPIF:LKKYR:EDH:LAXKXE, HVTKPTX:APT:NAIS:DDSSNVI:LKKYR:VVR:SXGXH, KIPKAXX:APT:SATS:DENEKVV:LRKHR:VVK:GXGXR, GIPEPXX:APT:SATS:DENKNVV:LRKHR:VVK:SXAXR, SIPKAXX:APT:SATS:DEYDKVV:LRKHR:VVK:GXGXR, HVTKPTX:APT:SATS:DDSSNVI:LRKHR:VVK:SXGXH, YVPKPXX:APT:SATS:DDSSNVI:LRKHR:VVK:SXGXH, TVPKPXX:APT:SATS:DDSSNVI:LRKHR:VVK:AXGXH, KVGKAXX:APT:SATS:DDMGVPT:LRKHR:VVK:XGXR, KASKAXX:APT:SATS:DKGVVTY:LRKHR:VVK:EXGXR, GSAGPXX:APT:SATS:NDKQQII:LRKHR:VVK:RXGXS, AAPASXX:APT:SATS:DAANNVV:LRKHR:VVK:AXGXR, STPPTXX:APT:SATS:DSANNVV:LRKHR:VVK:SXGXR, HVPKPXX:APT:SATS:DDSSNVI:LRKHR:VVK:SXGXH, RVPSTXX:APT:SATS:DNGRVLL:LRKHR:VVK:XGXL, ASAAPXX:APT:SATS:VGRKPKV:LRKHR:VVK:XKXS, ASASPXX:APT:SATS:IGKTPKI:LRKHR:VVK:XKXS, ASASPXX:APT:SATS:VGRTPKV:LRKHR:VVK:XKXS, NDEGLEX:APT:SATS:RIKPHQGQH:LRKHR:VVK:KXEXR, NDEGLEX:APT:SATS:RIKPHQGQH:LRKHR:VVK:QXEXR, SSVKXQP:APT:SATS:EYVRKKPKL:LRKHR:VVK:LEXAXA, RNVQXRP:APT:SATS:EIVRKKPIF:LRKHR:VVK:LAXKXE, KIPKAXX:VPT:SATS:DENEKVV:LRKHR:VVE:GXGXR, GIPEPXX:VPE:SATS:DENKNVV:LRKHR:TVE:SXAXR, SIPKAXX:VPT:SATS:DEYDKVV:LRKHR:VVE:GXGXR, HVTKPTX:APT:SATS:DDSSNVI:LRKHR:VVR:SXGXH, YVPKPXX:APT:SATS:DDSSNVI:LRKHR:VVR:SXGXH, TVPKPXX:APT:SATS:DDSSNVI:LRKHR:VVR:AXGXH, KVGKAXX:VPT:SATS:DDMGVPT:LRKHR:VAE:XGXR, KASKAXX:VPT:SATS:DKGVVTY:LRKHR:AVS:EXGXR, GSAGPXX:TPT:SATS:NDKQQIIIRKHR:VVD:RXGXS, AAPASXX:VPA:SATS:DAANNVV:LRKHR:VVE:AXGXR, STPPTXX:VPT:SATS:DSANNVV:LRKHR:VVE:SXGXR, HVPKPXX:APT:SATS:DDSSNVI:LRKHR:VVR:SXGXH, RVPSTXX:APV:SATS:DNGRVLL:LRKHR:VEE:XGXL, ASAAPXX:VPQ:SATS:VGRKPKV:LRKHR:VRS:XKXS, ASASPXX:VSQ:SATS:IGKTPKI:LRKHR:VKS:XKXS, ASASPXX:VPQ:SATS:VGRTPKV:LRKHR:VKS:XKXS, NDEGLEX:VPT:SATS:RIKPHQGQH:LRKHR:QHN:KXEXR, NDEGLEX:VPT:SATS:RIKPHQGQH:LRKHR:EHS:QXEXR, SSVKXQP:SRV:SATS:EYVRKKPKL:LRKHR:EEH:LEXAXA, RNVQXRP:TQV:SATS:EIVRKKPIF:LRKHR:EDH:LAXKXE, KIPKAXX:VPT:SPIS:DEN EKVV:LKYHY:VAE:GXGXR, GIPEPXX:VPT:SPIS:DENKNVV:LKYHY:VAE:SXAXR, SIPKAXX:VPT:SPIS:DEYDKVV:LKYHY:VAE:GXGXR, HVTKPTX:VPT:SPIS:DDSSNVI:LKYHY:VAE:SXGXH, YVPKPXX:VPT:SPIS:DDSSNVI:LKYHY:VAE:SXGXH, TVPKPXX:VPT:SPIS:DDSSNVI:LKYHY:VAE:AXGXH, AVPKAXX:VPT:SPIS:DSSNNVI:LKYHY:VAE:AXGXH, KASKAXX:VPT:SPIS:DKGVVTY:LKYHY:VAE:EXGXR, GSAGPXX:VPT:SPIS:NDKQQII:LKYHY:VAE:RXGXS, AAPASXX:VPT:SPIS:DAANNVV:LKYHY:VAE:AXGXR, STPPTXX:VPT:SPIS:DSANNVV:LKYHY:VAE:SXGXR, HVPKPXX:VPT:SPIS:DDSSNVI:LKYHY:VAE:SXGXH, RVPSTXX:VPT:SPIS:DNGRVLL:LKYHY:VAE:XGXL, ASAAPXX:VPT:SPIS:VGRKPKV:LKYHY:VAE:XKXS, ASASPXX:VPT:SPIS:IGKTPKI:LKYHY:VAE:XKXS, ASASPXX:VPT:SPIS:VGRTPKV:LKYHY:VAE:XKXS, NDEGLEX:VPT:SPIS:RIKPHQGQH:LKYHY:VAE:KXEXR, NDEGLEX:VPT:SPIS:RIKPHQGQH:LKYHY:VAE:QXEXR, SSVKXQP:VPT:SPIS:EYVRKKPKL:LKYHY:VAE:LEXAXA, RNVQXRP:VPT:SPIS:EIVRKKPIF:LKYHY:VAE:LAXKXE, KIPKAXX:VPT:SPIS:DEN EKVV:LKYHY:VVE:GXGXR, GIPEPXX:VPE:SPIS:DENKNVV:LKYHY:TVE:SXAXR, SIPKAXX:VPT:SPIS:DEYDKVV:LKYHY:VVE:GXGXR, HVTKPTX:APT:SPIS:DDSSNVI:LKYHY:VVR:SXGXH, YVPKPXX:APT:SPIS:DDSSNVI:LKYHY:VVR:SXGXH, TVPKPXX:APT:SPIS:DDSSNVI:LKYHY:VVR:AXGXH, AVPKAXX:APT:SPIS:DSSNNVI:LKYHY:VVK:AXGXH, KASKAXX:VPT:SPIS:DKGVVTY:LKYHY:AVS:EXGXR, GSAGPXX:TPT:SPIS:NDKQQII:LKYHY:VVD:RXGXS, AAPASXX:VPA:SPIS:DAANNVV:LKYHY:VVE:AXGXR, STPPTXX:VPT:SPIS:DSANNVV:LKYHY:VVE:SXGXR, HVPKPXX:APT:SPIS:DDSSNVI:LKYHY:VVR:SXGXH, RVPSTXX:APV:SPIS:DNGRVLL:LKYHY:VEE:XGXL, ASAAPXX:VPQ:SPIS:VGRKPKV:LKYHY:VRS:XKXS, ASASPXX:VSQ:SPIS:IGKTPKI:LKYHY:VKS:XKXS, ASASPXX:VPQ:SPIS:VGRTPKV:LKYHY:VKS:XKXS, NDEGLEX:VPT:SPIS:RIKPHQGQH:LKYHY:QHN:KXEXR, NDEGLEX:VPT:SPIS:RIKPHQGQH:LKYHY:EHS:QXEXR, SSVKXQP:SRV:SPIS:EYVRKKPKL:LKYHY:EEH:LEXAXA, RNVQXRP:TQV:SPIS:EIVRKKPIF:LKYHY:EDH:LAXKXE, KIPKAXX:VPT:EPIS:DENEKVV:KFKYE:AVS:GXGXR, GIPEPXX:VPT: EPIS:DENKNVV:KFKYE:AVS:SXAXR, SIPKAXX:VPT:EPIS:DEYDKVV:KFKYE:AVS:GXGXR, HVTKPTX:VPT:EPIS:DDSSNVI:KFKYE:AVS:SXGXH, YVPKPXX:VPT:EPIS:DDSSNVI:KFKYE:AVS:SXGXH, TVPKPXX:VPT:EPIS:DDSSNVI:KFKYE:AVS:AXGXH, AVPKAXX:VPT: EPIS:DSSNNVI:KFKYE:AVS:AXGXH, KVGKAXX:VPT:EPIS:DDMGVPT:KFKYE:AVS:XGXR, GSAGPXX:VPT: EPIS:NDKQQII:KFKYE:AVS:RXGXS, AAPASXX:VPT: EPIS:DAANNVV:KFKYE:AVS:AXGXR, STPPTXX:VPT:EPIS:DSANNVV:KFKYE:AVS:SXGXR, HVPKPXX:VPT:EPIS:DDSSNVI:KFKYE:AVS:SXGXH, RVPSTXX:VPT:EPIS:DNGRVLL:KFKYE:AVS:XGXL, ASAAPXX:VPT:EPIS:VGRKPKV:KFKYE:AVS:XKXS, ASASPXX:VPT:EPIS:IGKTPKI:KFKYE:AVS:XKXS, ASASPXX:VPT: EPIS:VGRTPKV:KFKYE:AVS:XKXS, NDEGLEX:VPT:EPIS:RIKPHQGQH:KFKYE:AVS:KXEXR, NDEGLEX:VPT:EPIS:RIKPHQGQH:KFKYE:AVS:QXEXR, SSVKXQP:VPT:EPIS:EYVRKKPKL:KFKYE:AVS:LEXAXA, RNVQXRP:VPT:EPIS:EIVRKKPIF:KFKYE:AVS:LAXKXE, KIPKAXX:VPT:EPIS:DENEKVV:KFKYE:VVE:GXGXR, GIPEPXX:VPE:EPIS:DENKNVV:KFKYE:TVE:SXAXR, SIPKAXX:VPT:EPIS:DEYDKVV:KFKYE:VVE:GXGXR, HVTKPTX:APT:EPIS:DDSSNVI:KFKYE:VVR:SXGXH, YVPKPXX:APT: EPIS:DDSSNVI:KFKYE:VVR:SXGXH, TVPKPXX:APT:EPIS:DDSSNVI:KFKYE:VVR:AXGXH, AVPKAXX:APT: EPIS:DSSNNVI:KFKYE:VVK:AXGXH, KVGKAXX:VPT:EPIS:DDMGVPT:KFKYE:VAE:XGXR, GSAGPXX:TPT:EPIS:NDKQQII:KFKYE:VVD:RXGXS, AAPASXX:VPA:EPIS:DAANNVV:KFKYE:VVE:AXGXR, STPPTXX:VPT:EPIS:DSANNVV:KFKYE:VVE:SXGXR, HVPKPXX:APT:EPIS:DDSSNVI:KFKYE:VVR:SXGXH, RVPSTXX:APV:EPIS:DNGRVLL:KFKYE:VEE:XGXL, ASAAPXX:VPQ:EPIS:VGRKPKV:KFKYE:VRS:XKXS, ASASPXX:VSQ:EPIS:IGKTPKI:KFKYE:VKS:XKXS, ASASPXX:VPQ:EPIS:VGRTPKV:KFKYE:VKS:XKXS, NDEGLEX:VPT:EPIS:RIKPHQGQH:KFKYE:QHN:KXEXR, NDEGLEX:VPT:EPIS:RIKPHQGQH:KFKYE:EHS:QXEXR, SSVKXQP:SRV:EPIS:EYVRKKPKL:KFKYE:EEH:LEXAXA, RNVQXRP:TQV:EPIS:EIVRKKPIF:KFKYE:EDH:LAXKXE, KIPKAXX:TPT:SPIN:DENEKVV:YGKIP:VVD:GXGXR, GIPEPXX:TPT:SPIN:DENKNVV:YGKIP:VVD:SXAXR, SIPKAXX:TPT:SPIN:DEYDKVV:YGKIP:VVD:GXGXR, HVTKPTX:TPT:SPIN:DDSSNVI:YGKIP:VVD:SXGXH, YVPKPXX:TPT:SPIN:DDSSNVI:YGKIP:VVD:SXGXH, TVPKPXX:TPT:SPIN:DDSSNVI:YGKIP:VVD:AXGXH, AVPKAXX:TPT:SPIN:DSSNNVI:YGKIP:VVD:AXGXH, KVGKAXX:TPT:SPIN:DDMGVPT:YGKIP:VVD:XGXR, KASKAXX:TPT:SPIN:DKGVVTY:YGKIP:VVD:EXGXR, AAPASXX:TPT:SPIN:DAANNVV:YGKIP:VVD:AXGXR, STPPTXX:TPT:SPIN:DSANNVV:YGKIP:VVD:SXGXR, HVPKPXX:TPT:SPIN:DDSSNVI:YGKIP:VVD:SXGXH, RVPSTXX:TPT:SPIN:DNGRVLL:YGKIP:VVD:XGXL, ASAAPXX:TPT:SPIN:VGRKPKV:YGKIP:VVD:XKXS, ASASPXX:TPT:SPIN:IGKTPKI:YGKIP:VVD:XKXS, ASASPXX:TPT:SPIN:VGRTPKV:YGKIP:VVD:XKXS, NDEGLEX:TPT:SPIN:RIKPHQGQH:YGKIP:VVD:KXEXR, NDEGLEX:TPT:SPIN:RIKPHQGQH:YGKIP:VVD:QXEXR, SSVKXQP:TPT:SPIN:EYVRKKPKL:YGKIP:VVD:LEXAXA, RNVQXRP:TPT:SPIN:EIVRKKPIF:YGKIP:VVD:LAXKXE, KIPKAXX:VPT:SPIN:DENEKVV:YGKIP:VVE:GXGXR, GIPEPXX:VPE:SPIN:DENKNVV:YGKIP:TVE:SXAXR, SIPKAXX:VPT:SPIN:DEYDKVV:YGKIP:VVE:GXGXR, HVTKPTX:APT:SPIN:DDSSNVI:YGKIP:VVR:SXGXH, YVPKPXX:APT:SPIN:DDSSNVI:YGKIP:VVR:SXGXH, TVPKPXX:APT:SPIN:DDSSNVI:YGKIP:VVR:AXGXH, AVPKAXX:APT:SPIN:DSSNNVI:YGKIP:VVK:AXGXH, KVGKAXX:VPT:SPIN:DDMGVPT:YGKIP:VAE:XGXR, KASKAXX:VPT:SPIN:DKGVVTY:YGKIP:AVS:EXGXR, AAPASXX:VPA:SPIN:DAANNVV:YGKIP:VVE:AXGXR, STPPTXX:VPT:SPIN:DSANNVV:YGKIP:VVE:SXGXR, HVPKPXX:APT:SPIN:DDSSNVI:YGKIP:VVR:SXGXH, RVPSTXX:APV:SPIN:DNGRVLL:YGKIP:VEE:XGXL, ASAAPXX:VPQ:SPIN:VGRKPKV:YGKIP:VRS:XKXS, ASASPXX:VSQ:SPIN:IGKTPKI:YGKIP:VKS:XKXS, ASASPXX:VPQ:SPIN:VGRTPKV:YGKIP:VKS:XKXS, NDEGLEX:VPT:SPIN:RIKPHQGQH:YGKIP:QHN:KXEXR, NDEGLEX:VPT:SPIN:RIKPHQGQH:YGKIP:EHS:QXEXR, SSVKXQP:SRV:SPIN:EYVRKKPKL:YGKIP:EEH:LEXAXA, RNVQXRP:TQV:SPIN:EIVRKKPIF:YGKIP:EDH:LAXKXE, KIPKAXX:VPA:SPIS:DENEKVV:YKQYE:VVE:GXGXR, GIPEPXX:VPA:SPIS:DENKNVV:YKQYE:VVE:SXAXR, SIPKAXX:VPA:SPIS:DEYDKVV:YKQYE:VVE:GXGXR, HVTKPTX:VPA:SPIS:DDSSNVI:YKQYE:VVE:SXGXH, YVPKPXX:VPA:SPIS:DDSSNVI:YKQYE:VVE:SXGXH, TVPKPXX:VPA:SPIS:DDSSNVI:YKQYE:VVE:AXGXH, AVPKAXX:VPA:SPIS:DSSNNVI:YKQYE:VVE:AXGXH, KVGKAXX:VPA:SPIS:DDMGVPT:YKQYE:VVE:XGXR, KASKAXX:VPA:SPIS:DKGVVTY:YKQYE:VVE:EXGXR, GSAGPXX:VPA:SPIS:NDKQQII:YKQYE:VVE:RXGXS, STPPTXX:VPA:SPIS:DSANNVV:YKQYE:VVE:SXGXR, HVPKPXX:VPA:SPIS:DDSSNVI:YKQYE:VVE:SXGXH, RVPSTXX:VPA:SPIS:DNGRVLL:YKQYE:VVE:XGXL, ASAAPXX:VPA:SPIS:VGRKPKV:YKQYE:VVE:XKXS, ASASPXX:VPA:SPIS:IGKTPKI:YKQYE:VVE:XKXS, ASASPXX:VPA:SPIS:VGRTPKV:YKQYE:VVE:XKXS, NDEGLEX:VPA:SPIS:RIKPHQGQH:YKQYE:VVE:KXEXR, NDEGLEX:VPA:SPIS:RIKPHQGQH:YKQYE:VVE:QXEXR, SSVKXQP:VPA:SPIS:EYVRKKPKL:YKQYE:VVE:LEXAXA, RNVQXRP:VPA:SPIS:EIVRKKPIF:YKQYE:VVE:LAXKXE, KIPKAXX:VPT:SPIS:DENEKVV:YKQYE:VVE:GXGXR, GIPEPXX:VPE:SPIS:DENKNVV:YKQYE:TVE:SXAXR, SIPKAXX:VPT:SPIS:DEYDKVV:YKQYE:VVE:GXGXR, HVTKPTX:APT:SPIS:DDSSNVI:YKQYE:VVR:SXGXH, YVPKPXX:APT:SPIS:DDSSNVI:YKQYE:VVR:SXGXH, TVPKPXX:APT:SPIS:DDSSNVI:YKQYE:VVR:AXGXH, AVPKAXX:APT:SPIS:DSSNNVI:YKQYE:VVK:AXGXH, KVGKAXX:VPT:SPIS:DDMGVPT:YKQYE:VAE:XGXR, KASKAXX:VPT:SPIS:DKGVVTY:YKQYE:AVS:EXGXR, GSAGPXX:TPT:SPIS:NDKQQII:YKQYE:VVD:RXGXS, STPPTXX:VPT:SPIS:DSANNVV:YKQYE:VVE:SXGXR, HVPKPXX:APT:SPIS:DDSSNVI:YKQYE:VVR:SXGXH, RVPSTXX:APV:SPIS:DNGRVLL:YKQYE:VEE:XGXL, ASAAPXX:VPQ:SPIS:VGRKPKV:YKQYE:VRS:XKXS, ASASPXX:VSQ:SPIS:IGKTPKI:YKQYE:VKS:XKXS, ASASPXX:VPQ:SPIS:VGRTPKV:YKQYE:VKS:XKXS, NDEGLEX:VPT:SPIS:RIKPHQGQH:YKQYE:QHN:KXEXR, NDEGLEX:VPT:SPIS:RIKPHQGQH:YKQYE:EHS:QXEXR, SSVKXQP:SRV:SPIS:EYVRKKPKL:YKQYE:EEH:LEXAXA, RNVQXRP:TQV:SPIS:EIVRKKPIF:YKQYE:EDH:LAXKXE, GIPEPXX:VPT:SPIS:DENKNVV:YKQYE:VVE:SXAXR, HVTKPTX:VPT:SPIS:DDSSNVI:YKQYE:VVE:SXGXH, YVPKPXX:VPT:SPIS:DDSSNVI:YKQYE:VVE:SXGXH, TVPKPXX:VPT:SPIS:DDSSNVI:YKQYE:VVE:AXGXH, AVPKAXX:VPT:SPIS:DSSNNVI:YKQYE:VVE:AXGXH, KVGKAXX:VPT:SPIS:DDMGVPT:YKQYE:VVE:XGXR, KASKAXX:VPT:SPIS:DKGVVTY:YKQYE:VVE:EXGXR, GSAGPXX:VPT:SPIS:NDKQQII:YKQYE:VVE:RXGXS, AAPASXX:VPT:SPIS:DAANNVV:YKQYE:VVE:AXGXR, HVPKPXX:VPT:SPIS:DDSSNVI:YKQYE:VVE:SXGXH, RVPSTXX:VPT:SPIS:DNGRVLL:YKQYE:VVE:XGXL, ASAAPXX:VPT:SPIS:VGRKPKV:YKQYE:VVE:XKXS, ASASPXX:VPT:SPIS:IGKTPKI:YKQYE:VVE:XKXS, ASASPXX:VPT:SPIS:VGRTPKV:YKQYE:VVE:XKXS, NDEGLEX:VPT:SPIS:RIKPHQGQH:YKQYE:VVE:KXEXR, NDEGLEX:VPT:SPIS:RIKPHQGQH:YKQYE:VVE:QXEXR, SSVKXQP:VPT:SPIS:EYVRKKPKL:YKQYE:VVE:LEXAXA, RNVQXRP:VPT:SPIS:EIVRKKPIF:YKQYE:VVE:LAXKXE, AAPASXX:VPA:SPIS:DAANNVV:YKQYE:VVE:AXGXR, KIPKAXX:APV:KPLS:DENEKVV:DHHKD:VEE:GXGXR, GIPEPXX:APV:KPLS:DENKNVV:DHHKD:VEE:SXAXR, SIPKAXX:APV:KPLS:DEYDKVV:DHHKD:VEE:GXGXR, HVTKPTX:APV:KPLS:DDSSNVI:DHHKD:VEE:SXGXH, YVPKPXX:APV:KPLS:DDSSNVI:DHHKD:VEE:SXGXH, TVPKPXX:APV:KPLS:DDSSNVI:DHHKD:VEE:AXGXH, AVPKAXX:APV:KPLS:DSSNNVI:DHHKD:VEE:AXGXH, KVGKAXX:APV:KPLS:DDMGVPT:DHHKD:VEE:XGXR, KASKAXX:APV:KPLS:DKGVVTY:DHHKD:VEE:EXGXR, GSAGPXX:APV:KPLS:NDKQQII:DHHKD:VEE:RXGXS, AAPASXX:APV:KPLS:DAANNVV:DHHKD:VEE:AXGXR, STPPTXX:APV:KPLS:DSANNVV:DHHKD:VEE:SXGXR, HVPKPXX:APV:KPLS:DDSSNVI:DHHKD:VEE:SXGXH, ASAAPXX:APV:KPLS:VGRKPKV:DHHKD:VEE:XKXS, ASASPXX:APV:KPLS:IGKTPKI:DHHKD:VEE:XKXS, ASASPXX:APV:KPLS:VGRTPKV:DHHKD:VEE:XKXS, NDEGLEX:APV:KPLS:RIKPHQGQH:DHHKD:VEE:KXEXR, NDEGLEX:APV:KPLS:RIKPHQGQH:DHHKD:VEE:QXEXR, SSVKXQP:APV:KPLS:EYVRKKPKL:DHHKD:VEE:LEXAXA, RNVQXRP:APV:KPLS:EIVRKKPIF:DHHKD:VEE:LAXKXE, KIPKAXX:VPT:KPLS:DEN EKVV:DHHKD:VVE:GXGXR, GIPEPXX:VPE:KPLS:DENKNVV:DHHKD:TVE:SXAXR, SIPKAXX:VPT:KPLS:DEYDKVV:DHHKD:VVE:GXGXR, HVTKPTX:APT:KPLS:DDSSNVI:DHHKD:VVR:SXGXH, YVPKPXX:APT:KPLS:DDSSNVI:DHHKD:VVR:SXGXH, TVPKPXX:APT:KPLS:DDSSNVI:DHHKD:VVR:AXGXH, AVPKAXX:APT:KPLS:DSSNNVI:DHHKD:VVK:AXGXH, KVGKAXX:VPT:KPLS:DDMGVPT:DHHKD:VAE:XGXR, KASKAXX:VPT:KPLS:DKGVVTY:DHHKD:AVS:EXGXR, GSAGPXX:TPT:KPLS:NDKQQII:DHHKD:VVD:RXGXS, AAPASXX:VPA:KPLS:DAANNVV:DHHKD:VVE:AXGXR, STPPTXX:VPT:KPLS:DSANNVV:DHHKD:VVE:SXGXR, HVPKPXX:APT:KPLS:DDSSNVI:DHHKD:VVR:SXGXH, ASAAPXX:VPQ:KPLS:VGRKPKV:DHHKD:VRS:XKXS, ASASPXX:VSQ:KPLS:IGKTPKI:DHHKD:VKS:XKXS, ASASPXX:VPQ:KPLS:VGRTPKV:DHHKD:VKS:XKXS, NDEGLEX:VPT:KPLS:RIKPHQGQH:DHHKD:QHN:KXEXR, NDEGLEX:VPT:KPLS:RIKPHQGQH:DHHKD:EHS:QXEXR, SSVKXQP:SRV:KPLS: EYVRKKPKL:DHHKD:EEH:LEXAXA, RNVQXRP:TQV:KPLS:EIVRKKPIF:DHHKD:EDH:LAXKXE, KIPKAXX:VPQ:EPLP:DENEKVV:EQLSN:VRS:GXGXR, GIPEPXX:VPQ:EPLP:DENKNVV:EQLSN:VRS:SXAXR, SIPKAXX:VPQ:EPLP:DEYDKVV:EQLSN:VRS:GXGXR, HVTKPTX:VPQ:EPLP:DDSSNVI:EQLSN:VRS:SXGXH, YVPKPXX:VPQ:EPLP:DDSSNVI:EQLSN:VRS:SXGXH, TVPKPXX:VPQ:EPLP:DDSSNVI:EQLSN:VRS:AXGXH, AVPKAXX:VPQ:EPLP:DSSNNVI:EQLSN:VRS:AXGXH, KVGKAXX:VPQ:EPLP:DDMGVPT:EQLSN:VRS:XGXR, KASKAXX:VPQ:EPLP:DKGVVTY:EQLSN:VRS:EXGXR, GSAGPXX:VPQ:EPLP:NDKQQII:EQLSN:VRS:RXGXS, AAPASXX:VPQ:EPLP:DAANNVV:EQLSN:VRS:AXGXR, STPPTXX:VPQ:EPLP:DSANNVV:EQLSN:VRS:SXGXR, HVPKPXX:VPQ: EPLP:DDSSNVI:EQLSN:VRS:SXGXH, RVPSTXX:VPQ:EPLP:DNGRVLL: EQLSN:VRS:XGXL, ASASPXX:VPQ:EPLP:IGKTPKI:EQLSN:VRS:XKXS, ASASPXX:VPQ:EPLP:VGRTPKV:EQLSN:VRS:XKXS, NDEGLEX:VPQ:EPLP:RIKPHQGQH:EQLSN:VRS:KXEXR, NDEGLEX:VPQ:EPLP:RIKPHQGQH:EQLSN:VRS:QXEXR, SSVKXQP:VPQ:EPLP:EYVRKKPKL:EQLSN:VRS:LEXAXA, RNVQXRP:VPQ:EPLP:EIVRKKPIF:EQLSN:VRS:LAXKXE, KIPKAXX:VPT:EPLP:DENEKVV:EQLSN:VVE:GXGXR, GIPEPXX:VPE:EPLP:DENKNVV:EQLSN:TVE:SXAXR, SIPKAXX:VPT: EPLP:DEYDKVV:EQLSN:VVE:GXGXR, HVTKPTX:APT:EPLP:DDSSNVI:EQLSN:VVR:SXGXH, YVPKPXX:APT: EPLP:DDSSNVI:EQLSN:VVR:SXGXH, TVPKPXX:APT:EPLP:DDSSNVI:EQLSN:VVR:AXGXH, AVPKAXX:APT:EPLP:DSSNNVI:EQLSN:VVK:AXGXH, KVGKAXX:VPT:EPLP:DDMGVPT:EQLSN:VAE:XGXR, KASKAXX:VPT: EPLP:DKGVVTY:EQLSN:AVS:EXGXR, GSAGPXX:TPT:EPLP:NDKQQII:EQLSN:VVD:RXGXS, AAPASXX:VPA:EPLP:DAANNVV:EQLSN:VVE:AXGXR, STPPTXX:VPT:EPLP:DSANNVV:EQLSN:VVE:SXGXR, HVPKPXX:APT:EPLP:DDSSNVI:EQLSN:VVR:SXGXH, RVPSTXX:APV:EPLP:DNGRVLL:EQLSN:VEE:XGXL, ASASPXX:VSQ:EPLP:IGKTPKI:EQLSN:VKS:XKXS, ASASPXX:VPQ:EPLP:VGRTPKV:EQLSN:VKS:XKXS, NDEGLEX:VPT:EPLP:RIKPHQGQH:EQLSN:QHN:KXEXR, NDEGLEX:VPT:EPLP:RIKPHQGQH:EQLSN:EHS:QXEXR, SSVKXQP:SRV:EPLP:EYVRKKPKL:EQLSN:EEH:LEXAXA, RNVQXRP:TQV:EPLP:EIVRKKPIF:EQLSN:EDH:LAXKXE, KIPKAXX:VSQ:EPLT:DENEKVV:EQLSN:VKS:GXGXR, GIPEPXX:VSQ:EPLT:DENKNVV:EQLSN:VKS:SXAXR, SIPKAXX:VSQ:EPLT:DEYDKVV:EQLSN:VKS:GXGXR, HVTKPTX:VSQ:EPLT:DDSSNVI:EQLSN:VKS:SXGXH, YVPKPXX:VSQ:EPLT:DDSSNVI:EQLSN:VKS:SXGXH, TVPKPXX:VSQ:EPLT:DDSSNVI:EQLSN:VKS:AXGXH, AVPKAXX:VSQ:EPLT:DSSNNVI:EQLSN:VKS:AXGXH, KVGKAXX:VSQ:EPLT:DDMGVPT:EQLSN:VKS:XGXR, KASKAXX:VSQ:EPLT:DKGVVTY:EQLSN:VKS:EXGXR, GSAGPXX:VSQ:EPLT:NDKQQII:EQLSN:VKS:RXGXS, AAPASXX:VSQ:EPLT:DAANNVV:EQLSN:VKS:AXGXR, STPPTXX:VSQ:EPLT:DSANNVV:EQLSN:VKS:SXGXR, HVPKPXX:VSQ:EPLT:DDSSNVI:EQLSN:VKS:SXGXH, RVPSTXX:VSQ:EPLT:DNGRVLL:EQLSN:VKS:XGXL, ASAAPXX:VSQ:EPLT:VGRKPKV:EQLSN:VKS:XKXS, ASASPXX:VSQ:EPLT:VGRTPKV:EQLSN:VKS:XKXS, NDEGLEX:VSQ:EPLT:RIKPHQGQH:EQLSN:VKS:KXEXR, NDEGLEX:VSQ:EPLT:RIKPHQGQH:EQLSN:VKS:QXEXR, SSVKXQP:VSQ:EPLT: EYVRKKPKL:EQLSN:VKS:LEXAXA, RNVQXRP:VSQ:EPLT:EIVRKKPIF:EQLSN:VKS:LAXKXE, KIPKAXX:VPT:EPLT:DENEKVV:EQLSN:VVE:GXGXR, GIPEPXX:VPE:EPLT:DENKNVV:EQLSN:TVE:SXAXR, SIPKAXX:VPT:EPLT:DEYDKVV:EQLSN:VVE:GXGXR, HVTKPTX:APT:EPLT:DDSSNVI:EQLSN:VVR:SXGXH, YVPKPXX:APT:EPLT:DDSSNVI:EQLSN:VVR:SXGXH, TVPKPXX:APT:EPLT:DDSSNVI:EQLSN:VVR:AXGXH, AVPKAXX:APT:EPLT:DSSNNVI:EQLSN:VVK:AXGXH, KVGKAXX:VPT:EPLT:DDMGVPT:EQLSN:VAE:XGXR, KASKAXX:VPT:EPLT:DKGVVTY:EQLSN:AVS:EXGXR, GSAGPXX:TPT:EPLT:NDKQQII:EQLSN:VVD:RXGXS, AAPASXX:VPA:EPLT:DAANNVV:EQLSN:VVE:AXGXR, STPPTXX:VPT:EPLT:DSANNVV:EQLSN:VVE:SXGXR, HVPKPXX:APT:EPLT:DDSSNVI:EQLSN:VVR:SXGXH, RVPSTXX:APV:EPLT:DNGRVLL:EQLSN:VEE:XGXL, ASAAPXX:VPQ:EPLT:VGRKPKV:EQLSN:VRS:XKXS, ASASPXX:VPQ:EPLT:VGRTPKV:EQLSN:VKS:XKXS, NDEGLEX:VPT:EPLT:RIKPHQGQH:EQLSN:QHN:KXEXR, NDEGLEX:VPT:EPLT:RIKPHQGQH:EQLSN:EHS:QXEXR, SSVKXQP:SRV:EPLT:EYVRKKPKL:EQLSN:EEH:LEXAXA, RNVQXRP:TQV:EPLT:EIVRKKPIF:EQLSN:EDH:LAXKXE, KIPKAXX:VPQ:EPLT:DENEKVV:EQLSN:VKS:GXGXR, GIPEPXX:VPQ:EPLT:DENKNVV:EQLSN:VKS:SXAXR, SIPKAXX:VPQ:EPLT:DEYDKVV:EQLSN:VKS:GXGXR, HVTKPTX:VPQ:EPLT:DDSSNVI:EQLSN:VKS:SXGXH, YVPKPXX:VPQ:EPLT:DDSSNVI:EQLSN:VKS:SXGXH, TVPKPXX:VPQ:EPLT:DDSSNVI:EQLSN:VKS:AXGXH, AVPKAXX:VPQ:EPLT:DSSNNVI:EQLSN:VKS:AXGXH, KVGKAXX:VPQ:EPLT:DDMGVPT:EQLSN:VKS:XGXR, KASKAXX:VPQ:EPLT:DKGVVTY:EQLSN:VKS:EXGXR, GSAGPXX:VPQ:EPLT:NDKQQII:EQLSN:VKS:RXGXS, AAPASXX:VPQ:EPLT:DAANNVV:EQLSN:VKS:AXGXR, STPPTXX:VPQ:EPLT:DSANNVV:EQLSN:VKS:SXGXR, HVPKPXX:VPQ:EPLT:DDSSNVI:EQLSN:VKS:SXGXH, RVPSTXX:VPQ:EPLT:DNGRVLL:EQLSN:VKS:XGXL, ASAAPXX:VPQ:EPLT:VGRKPKV:EQLSN:VKS:XKXS, ASASPXX:VPQ:EPLT:IGKTPKI:EQLSN:VKS:XKXS, NDEGLEX:VPQ:EPLT:RIKPHQGQH:EQLSN:VKS:KXEXR, NDEGLEX:VPQ:EPLT:RIKPHQGQH:EQLSN:VKS:QXEXR, SSVKXQP:VPQ:EPLT:EYVRKKPKL:EQLSN:VKS:LEXAXA, RNVQXRP:VPQ:EPLT:EIVRKKPIF:EQLSN:VKS:LAXKXE, ASASPXX:VSQ:EPLT:IGKTPKI:EQLSN:VKS:XKXS, KIPKAXX:VPT:SNIT:DENEKVV:IGEMS:QHN:GXGXR, GIPEPXX:VPT:SNIT:DENKNVV:IGEMS:QHN:SXAXR, SIPKAXX:VPT:SNIT:DEYDKVV:IGEMS:QHN:GXGXR, HVTKPTX:VPT:SNIT:DDSSNVI:IGEMS:QHN:SXGXH, YVPKPXX:VPT:SNIT:DDSSNVI:IGEMS:QHN:SXGXH, TVPKPXX:VPT:SNIT:DDSSNVI:IGEMS:QHN:AXGXH, AVPKAXX:VPT:SNIT:DSSNNVI:IGEMS:QHN:AXGXH, KVGKAXX:VPT:SNIT:DDMGVPT:IGEMS:QHN:XGXR, KASKAXX:VPT:SNIT:DKGVVTY:IGEMS:QHN:EXGXR, GSAGPXX:VPT:SNIT:NDKQQII:IGEMS:QHN:RXGXS, AAPASXX:VPT:SNIT:DAANNVV:IGEMS:QHN:AXGXR, STPPTXX:VPT:SNIT:DSANNVV:IGEMS:QHN:SXGXR, HVPKPXX:VPT:SNIT:DDSSNVI:IGEMS:QHN:SXGXH, RVPSTXX:VPT:SNIT:DNGRVLL:IGEMS:QHN:XGXL, ASAAPXX:VPT:SNIT:VGRKPKV:IGEMS:QHN:XKXS, ASASPXX:VPT:SNIT:IGKTPKI:IGEMS:QHN:XKXS, ASASPXX:VPT:SNIT:VGRTPKV:IGEMS:QHN:XKXS, NDEGLEX:VPT:SNIT:RIKPHQGQH:IGEMS:QHN:QXEXR, NDEGLEX:VPT:SNIT:RIKPHQGQH:IGEMS:QHN:KXEXR, SSVKXQP:VPT:SNIT:EYVRKKPKL:IGEMS:QHN:LEXAXA, RNVQXRP:VPT:SNIT:EIVRKKPIF:IGEMS:QHN:LAXKXE, KIPKAXX:VPT:SNIT:DENEKVV:IGEMS:VVE:GXGXR, GIPEPXX:VPE:SNIT:DENKNVV:IGEMS:TVE:SXAXR, SIPKAXX:VPT:SNIT:DEYDKVV:IGEMS:VVE:GXGXR, HVTKPTX:APT:SNIT:DDSSNVI:IGEMS:VVR:SXGXH, YVPKPXX:APT:SNIT:DDSSNVI:IGEMS:VVR:SXGXH, TVPKPXX:APT:SNIT:DDSSNVI:IGEMS:VVR:AXGXH, AVPKAXX:APT:SNIT:DSSNNVI:IGEMS:VVK:AXGXH, KVGKAXX:VPT:SNIT:DDMGVPT:IGEMS:VAE:XGXR, KASKAXX:VPT:SNIT:DKGVVTY:IGEMS:AVS:EXGXR, GSAGPXX:TPT:SNIT:NDKQQII:IGEMS:VVD:RXGXS, AAPASXX:VPA:SNIT:DAANNVV:IGEMS:VVE:AXGXR, STPPTXX:VPT:SNIT:DSANNVV:IGEMS:VVE:SXGXR, HVPKPXX:APT:SNIT:DDSSNVI:IGEMS:VVR:SXGXH, RVPSTXX:APV:SNIT:DNGRVLL:IGEMS:VEE:XGXL, ASAAPXX:VPQ:SNIT:VGRKPKV:IGEMS:VRS:XKXS, ASASPXX:VSQ:SNIT:IGKTPKI:IGEMS:VKS:XKXS, ASASPXX:VPQ:SNIT:VGRTPKV:IGEMS:VKS:XKXS, NDEGLEX:VPT:SNIT:RIKPHQGQH:IGEMS:EHS:QXEXR, SSVKXQP:SRV:SNIT:EYVRKKPKL:IGEMS:EEH:LEXAXA, RNVQXRP:TQV:SNIT:EIVRKKPIF:IGEMS:EDH:LAXKXE, KIPKAXX:VPT:SNIT:DENEKVV:LGEMS:EHS:GXGXR, GIPEPXX:VPT:SNIT:DENKNVV:LGEMS:EHS:SXAXR, SIPKAXX:VPT:SNIT:DEYDKVV:LGEMS:EHS:GXGXR, HVTKPTX:VPT:SNIT:DDSSNVI:LGEMS:EHS:SXGXH, YVPKPXX:VPT:SNIT:DDSSNVI:LGEMS:EHS:SXGXH, TVPKPXX:VPT:SNIT:DDSSNVI:LGEMS:EHS:AXGXH, AVPKAXX:VPT:SNIT:DSSNNVI:LGEMS:EHS:AXGXH, KVGKAXX:VPT:SNIT:DDMGVPT:LGEMS:EHS:XGXR, KASKAXX:VPT:SNIT:DKGVVTY:LGEMS:EHS:EXGXR, GSAGPXX:VPT:SNIT:NDKQQII:LGEMS:EHS:RXGXS, AAPASXX:VPT:SNIT:DAANNVV:LGEMS:EHS:AXGXR, STPPTXX:VPT:SNIT:DSANNVV:LGEMS:EHS:SXGXR, HVPKPXX:VPT:SNIT:DDSSNVI:LGEMS:EHS:SXGXH, RVPSTXX:VPT:SNIT:DNGRVLL:LGEMS:EHS:XGXL, ASAAPXX:VPT:SNIT:VGRKPKV:LGEMS:EHS:XKXS, ASASPXX:VPT:SNIT:IGKTPKI:LGEMS:EHS:XKXS, ASASPXX:VPT:SNIT:VGRTPKV:LGEMS:EHS:XKXS, NDEGLEX:VPT:SNIT:RIKPHQGQH:LGEMS:EHS:KXEXR, SSVKXQP:VPT:SNIT:EYVRKKPKL:LGEMS:EHS:LEXAXA, RNVQXRP:VPT:SNIT:EIVRKKPIF:LGEMS:EHS:LAXKXE, KIPKAXX:VPT:SNIT:DENEKVV:LGEMS:VVE:GXGXR, GIPEPXX:VPE:SNIT:DENKNVV:LGEMS:TVE:SXAXR, SIPKAXX:VPT:SNIT:DEYDKVV:LGEMS:VVE:GXGXR, HVTKPTX:APT:SNIT:DDSSNVI:LGEMS:VVR:SXGXH, YVPKPXX:APT:SNIT:DDSSNVI:LGEMS:VVR:SXGXH, TVPKPXX:APT:SNIT:DDSSNVI:LGEMS:VVR:AXGXH, AVPKAXX:APT:SNIT:DSSNNVI:LGEMS:VVK:AXGXH, KVGKAXX:VPT:SNIT:DDMGVPT:LGEMS:VAE:XGXR, KASKAXX:VPT:SNIT:DKGVVTY:LGEMS:AVS:EXGXR, GSAGPXX:TPT:SNIT:NDKQQII:LGEMS:VVD:RXGXS, AAPASXX:VPA:SNIT:DAANNVV:LGEMS:VVE:AXGXR, STPPTXX:VPT:SNIT:DSANNVV:LGEMS:VVE:SXGXR, HVPKPXX:APT:SNIT:DDSSNVI:LGEMS:VVR:SXGXH, RVPSTXX:APV:SNIT:DNGRVLL:LGEMS:VEE:XGXL, ASAAPXX:VPQ:SNIT:VGRKPKV:LGEMS:VRS:XKXS, ASASPXX:VSQ:SNIT:IGKTPKI:LGEMS:VKS:XKXS, ASASPXX:VPQ:SNIT:VGRTPKV:LGEMS:VKS:XKXS, NDEGLEX:VPT:SNIT:RIKPHQGQH:LGEMS:QHN:KXEXR, SSVKXQP:SRV:SNIT:EYVRKKPKL:LGEMS:EEH:LEXAXA, RNVQXRP:TQV:SNIT:EIVRKKPIF:LGEMS:EDH:LAXKXE, KIPKAXX:SRV: RSVK:DENEKVV:KEVQV:EEH:GXGXR, GIPEPXX:SRV:RSVK:DENKNVV:KEVQV:EEH:SXAXR, SIPKAXX:SRV: RSVK:DEYDKVV:KEVQV:EEH:GXGXR, HVTKPTX:SRV:RSVK:DDSSNVI:KEVQV:EEH:SXGXH, YVPKPXX:SRV:RSVK:DDSSNVI:KEVQV:EEH:SXGXH, TVPKPXX:SRV:RSVK:DDSSNVI:KEVQV:EEH:AXGXH, AVPKAXX:SRV:RSVK:DSSNNVI:KEVQV:EEH:AXGXH, KVGKAXX:SRV: RSVK:DDMGVPT:KEVQV:EEH:XGXR, KASKAXX:SRV:RSVK:DKGVVTY:KEVQV: EEH:EXGXR, GSAGPXX:SRV: RSVK:NDKQQII:KEVQV:EEH:RXGXS, AAPASXX:SRV:RSVK:DAANNVV:KEVQV:EEH:AXGXR, STPPTXX:SRV: RSVK:DSANNVV:KEVQV:EEH:SXGXR, HVPKPXX:SRV:RSVK:DDSSNVI:KEVQV:EEH:SXGXH, RVPSTXX:SRV:RSVK:DNGRVLL:KEVQV:EEH:XGXL, ASAAPXX:SRV:RSVK:VGRKPKV:KEVQV:EEH:XKXS, ASASPXX:SRV:RSVK:IGKTPKI:KEVQV:EEH:XKXS, ASASPXX:SRV:RSVK:VGRTPKV:KEVQV:EEH:XKXS, NDEGLEX:SRV: RSVK:RIKPHQGQH:KEVQV:EEH:KXEXR, NDEGLEX:SRV: RSVK:RIKPHQGQH:KEVQV:EEH:QXEXR, RNVQXRP:SRV:RSVK:EIVRKKPIF:KEVQV:EEH:LAXKXE, KIPKAXX:VPT:RSVK:DENEKVV:KEVQV:VVE:GXGXR, GIPEPXX:VPE:RSVK:DENKNVV:KEVQV:TVE:SXAXR, SIPKAXX:VPT: RSVK:DEYDKVV:KEVQV:VVE:GXGXR, HVTKPTX:APT:RSVK:DDSSNVI:KEVQV:VVR:SXGXH, YVPKPXX:APT: RSVK:DDSSNVI:KEVQV:VVR:SXGXH, TVPKPXX:APT:RSVK:DDSSNVI:KEVQV:VVR:AXGXH, AVPKAXX:APT:RSVK:DSSNNVI:KEVQV:VVK:AXGXH, KVGKAXX:VPT:RSVK:DDMGVPT:KEVQV:VAE:XGXR, KASKAXX:VPT:RSVK:DKGVVTY:KEVQV:AVS:EXGXR, GSAGPXX:TPT:RSVK:NDKQQII:KEVQV:VVD:RXGXS, AAPASXX:VPA:RSVK:DAANNVV:KEVQV:VVE:AXGXR, STPPTXX:VPT:RSVK:DSANNVV:KEVQV:VVE:SXGXR, HVPKPXX:APT:RSVK:DDSSNVI:KEVQV:VVR:SXGXH, RVPSTXX:APV:RSVK:DNGRVLL:KEVQV:VEE:XGXL, ASAAPXX:VPQ:RSVK:VGRKPKV:KEVQV:VRS:XKXS, ASASPXX:VSQ:RSVK:IGKTPKI:KEVQV:VKS:XKXS, ASASPXX:VPQ:RSVK:VGRTPKV:KEVQV:VKS:XKXS, NDEGLEX:VPT:RSVK:RIKPHQGQH:KEVQV:QHN:KXEXR, NDEGLEX:VPT:RSVK:RIKPHQGQH:KEVQV:EHS:QXEXR, RNVQXRP:TQV:RSVK:EIVRKKPIF:KEVQV:EDH:LAXKXE, KIPKAXX:TQV:RPVQ:DENEKVV:KKATV:EDH:GXGXR, GIPEPXX:TQV:RPVQ:DENKNVV:KKATV:EDH:SXAXR, SIPKAXX:TQV:RPVQ:DEYDKVV:KKATV:EDH:GXGXR, HVTKPTX:TQV:RPVQ:DDSSNVI:KKATV:EDH:SXGXH, YVPKPXX:TQV:RPVQ:DDSSNVI:KKATV:EDH:SXGXH, TVPKPXX:TQV:RPVQ:DDSSNVI:KKATV:EDH:AXGXH, AVPKAXX:TQV:RPVQ:DSSNNVI:KKATV:EDH:AXGXH, KVGKAXX:TQV: RPVQ:DDMGVPT:KKATV:EDH:XGXR, KASKAXX:TQV:RPVQ:DKGVVTY:KKATV:EDH:EXGXR, GSAGPXX:TQV:RPVQ:NDKQQII:KKATV:EDH:RXGXS, AAPASXX:TQV:RPVQ:DAANNVV:KKATV:EDH:AXGXR, STPPTXX:TQV:RPVQ:DSANNVV:KKATV:EDH:SXGXR, HVPKPXX:TQV:RPVQ:DDSSNVI:KKATV:EDH:SXGXH, RVPSTXX:TQV:RPVQ:DNGRVLL:KKATV:EDH:XGXL, ASAAPXX:TQV:RPVQ:VGRKPKV:KKATV:EDH:XKXS, ASASPXX:TQV:RPVQ:IGKTPKI:KKATV:EDH:XKXS, ASASPXX:TQV:RPVQ:VGRTPKV:KKATV:EDH:XKXS, NDEGLEX:TQV: RPVQ:RIKPHQGQH:KKATV:EDH:KXEXR, NDEGLEX:TQV: RPVQ:RIKPHQGQH:KKATV:EDH:QXEXR, SSVKXQP:TQV:RPVQ:EYVRKKPKL:KKATV:EDH:LEXAXA, KIPKAXX:VPT: RPVQ:DENEKVV:KKATV:VVE:GXGXR, GIPEPXX:VPE:RPVQ:DENKNVV:KKATV:TVE:SXAXR, SIPKAXX:VPT:RPVQ:DEYDKVV:KKATV:VVE:GXGXR, HVTKPTX:APT: RPVQ:DDSSNVI:KKATV:VVR:SXGXH, YVPKPXX:APT: RPVQ:DDSSNVI:KKATV:VVR:SXGXH, TVPKPXX:APT:RPVQ:DDSSNVI:KKATV:VVR:AXGXH, AVPKAXX:APT: RPVQ:DSSNNVI:KKATV:VVK:AXGXH, KVGKAXX:VPT:RPVQ:DDMGVPT:KKATV:VAE:XGXR, KASKAXX:VPT: RPVQ:DKGVVTY:KKATV:AVS: EXGXR, GSAGPXX:TPT:RPVQ:NDKQQII:KKATV:VVD:RXGXS, AAPASXX:VPA:RPVQ:DAANNVV:KKATV:VVE:AXGXR, STPPTXX:VPT:RPVQ:DSANNVV:KKATV:VVE:SXGXR, HVPKPXX:APT:RPVQ:DDSSNVI:KKATV:VVR:SXGXH, RVPSTXX:APV:RPVQ:DNGRVLL:KKATV:VEE:XGXL, ASAAPXX:VPQ:RPVQ:VGRKPKV:KKATV:VRS:XKXS, ASASPXX:VSQ:RPVQ:IGKTPKI:KKATV:VKS:XKXS, ASASPXX:VPQ:RPVQ:VGRTPKV:KKATV:VKS:XKXS, NDEGLEX:VPT:RPVQ:RIKPHQGQH:KKATV:QHN:KXEXR, NDEGLEX:VPT:RPVQ:RIKPHQGQH:KKATV:EHS:QXEXR and SSVKXQP:SRV:RPVQ:EYVRKKPKL:KKATV:EEH:LEXAXA. More particularly, in certain embodiments, the heptuplet PEP7:PEP3:PEP1:LINKER:PEP2:PEP4:PEP8 is selected from the group consisting of GIPEPXX:VPT:SAIS:DENKNVV:LKNYQ:VVE:SXAXR, HVTKPTX:VPT:SAIS:DDSSNVI:LKNYQ:VVE:SXGXH, YVPKPXX:VPT:SAIS:DDSSNVI:LKNYQ:VVE:SXGXH, TVPKPXX:VPT:SAIS:DDSSNVI:LKNYQ:VVE:AXGXH, AVPKAXX:VPT:SAIS:DSSNNVI:LKNYQ:VVE:AXGXH, KVGKAXX:VPT:SAIS:DDMGVPT:LKNYQ:VVE:XGXR, KASKAXX:VPT:SAIS:DKGVVTY:LKNYQ:VVE: EXGXR, GSAGPXX:VPT:SAIS:NDKQQII:LKNYQ:VVE:RXGXS, AAPASXX:VPT:SAIS:DAANNVV:LKNYQ:VVE:AXGXR, STPPTXX:VPT:SAIS:DSANNVV:LKNYQ:VVE:SXGXR, HVPKPXX:VPT:SAIS:DDSSNVI:LKNYQ:VVE:SXGXH, RVPSTXX:VPT:SAIS:DNGRVLL:LKNYQ:VVE:XGXL, ASAAPXX:VPT:SAIS:VGRKPKV:LKNYQ:VVE:XKXS, ASASPXX:VPT:SAIS:IGKTPKI:LKNYQ:VVE:XKXS, ASASPXX:VPT:SAIS:VGRTPKV:LKNYQ:VVE:XKXS, GIPEPXX:VPE:SAIS:DENKNVV:LKNYQ:TVE:SXAXR, HVTKPTX:APT:SAIS:DDSSNVI:LKNYQ:VVR:SXGXH, YVPKPXX:APT:SAIS:DDSSNVI:LKNYQ:VVR:SXGXH, TVPKPXX:APT:SAIS:DDSSNVI:LKNYQ:VVR:AXGXH, AVPKAXX:APT:SAIS:DSSNNVI:LKNYQ:VVK:AXGXH, KVGKAXX:VPT:SAIS:DDMGVPT:LKNYQ:VAE:XGXR, KASKAXX:VPT:SAIS:DKGVVTY:LKNYQ:AVS:EXGXR, GSAGPXX:TPT:SAIS:NDKQQII:LKNYQ:VVD:RXGXS, AAPASXX:VPA:SAIS:DAANNVV:LKNYQ:VVE:AXGXR, HVPKPXX:APT:SAIS:DDSSNVI:LKNYQ:VVR:SXGXH, RVPSTXX:APV:SAIS:DNGRVLL:LKNYQ:VEE:XGXL, ASAAPXX:VPQ:SAIS:VGRKPKV:LKNYQ:VRS:XKXS, ASASPXX:VSQ:SAIS:IGKTPKI:LKNYQ:VKS:XKXS, ASASPXX:VPQ:SAIS:VGRTPKV:LKNYQ:VKS:XKXS, NDEGLEX:VPT:SAIS:RIKPHQGQH:LKNYQ:QHN:KXEXR, NDEGLEX:VPT:SAIS:RIKPHQGQH:LKNYQ:EHS:QXEXR, SSVKXQP:SRV:SAIS:EYVRKKPKL:LKNYQ:EEH:LEXAXA, RNVQXRP:TQV:SAIS:EIVRKKPIF:LKNYQ:EDH:LAXKXE, KIPKAXX:VPE:SSLS:DENEKVV:LKVYP:TVE:GXGXR, SIPKAXX:VPE:SSLS:DEYDKVV:LKVYP:TVE:GXGXR, HVTKPTX:VPE:SSLS:DDSSNVI:LKVYP:TVE:SXGXH, YVPKPXX:VPE:SSLS:DDSSNVI:LKVYP:TVE:SXGXH, TVPKPXX:VPE:SSLS:DDSSNVI:LKVYP:TVE:AXGXH, AVPKAXX:VPE:SSLS:DSSNNVI:LKVYP:TVE:AXGXH, KVGKAXX:VPE:SSLS:DDMGVPT:LKVYP:TVE:XGXR, KASKAXX:VPE:SSLS:DKGVVTY:LKVYP:TVE:EXGXR, GSAGPXX:VPE:SSLS:NDKQQII:LKVYP:TVE:RXGXS, AAPASXX:VPE:SSLS:DAANNVV:LKVYP:TVE:AXGXR, STPPTXX:VPE:SSLS:DSANNVV:LKVYP:TVE:SXGXR, HVPKPXX:VPE:SSLS:DDSSNVI:LKVYP:TVE:SXGXH, RVPSTXX:VPE:SSLS:DNGRVLL:LKVYP:TVE:XGXL, ASAAPXX:VPE:SSLS:VGRKPKV:LKVYP:TVE:XKXS, ASASPXX:VPE:SSLS:IGKTPKI:LKVYP:TVE:XKXS, ASASPXX:VPE:SSLS:VGRTPKV:LKVYP:TVE:XKXS, KIPKAXX:VPT:SSLS:DENEKVV:LKVYP:VVE:GXGXR, SIPKAXX:VPT:SSLS:DEYDKVV:LKVYP:VVE:GXGXR, HVTKPTX:APT:SSLS:DDSSNVI:LKVYP:VVR:SXGXH, YVPKPXX:APT:SSLS:DDSSNVI:LKVYP:VVR:SXGXH, TVPKPXX:APT:SSLS:DDSSNVI:LKVYP:VVR:AXGXH, AVPKAXX:APT:SSLS:DSSNNVI:LKVYP:VVK:AXGXH, KVGKAXX:VPT:SSLS:DDMGVPT:LKVYP:VAE:XGXR, KASKAXX:VPT:SSLS:DKGVVTY:LKVYP:AVS:EXGXR, GSAGPXX:TPT:SSLS:NDKQQII:LKVYP:VVD:RXGXS, AAPASXX:VPA:SSLS:DAANNVV:LKVYP:VVE:AXGXR, STPPTXX:VPT:SSLS:DSANNVV:LKVYP:VVE:SXGXR, HVPKPXX:APT:SSLS:DDSSNVI:LKVYP:VVR:SXGXH, RVPSTXX:APV:SSLS:DNGRVLL:LKVYP:VEE:XGXL, ASAAPXX:VPQ:SSLS:VGRKPKV:LKVYP:VRS:XKXS, ASASPXX:VSQ:SSLS:IGKTPKI:LKVYP:VKS:XKXS, ASASPXX:VPQ:SSLS:VGRTPKV:LKVYP:VKS:XKXS, NDEGLEX:VPT:SSLS:RIKPHQGQH:LKVYP:QHN:KXEXR, NDEGLEX:VPT:SSLS:RIKPHQGQH:LKVYP:EHS:QXEXR, SSVKXQP:SRV:SSLS:EYVRKKPKL:LKVYP:EEH:LEXAXA, RNVQXRP:TQV:SSLS:EIVRKKPIF:LKVYP:EDH:LAXKXE, KIPKAXX:APT:NAIS:DENEKVV:LKKYR:VVR:GXGXR, GIPEPXX:APT:NAIS:DENKNVV:LKKYR:VVR:SXAXR, SIPKAXX:APT:NAIS:DEYDKVV:LKKYR:VVR:GXGXR, AVPKAXX:APT:NAIS:DSSNNVI:LKKYR:VVR:AXGXH, KVGKAXX:APT:NAIS:DDMGVPT:LKKYR:VVR:XGXR, KASKAXX:APT:NAIS:DKGVVTY:LKKYR:VVR:EXGXR, GSAGPXX:APT:NAIS:NDKQQII:LKKYR:VVR:RXGXS, AAPASXX:APT:NAIS:DAANNVV:LKKYR:VVR:AXGXR, STPPTXX:APT:NAIS:DSANNVV:LKKYR:VVR:SXGXR, RVPSTXX:APT:NAIS:DNGRVLL:LKKYR:VVR:XGXL, ASAAPXX:APT:NAIS:VGRKPKV:LKKYR:VVR:XKXS, ASASPXX:APT:NAIS:IGKTPKI:LKKYR:VVR:XKXS, ASASPXX:APT:NAIS:VGRTPKV:LKKYR:VVR:XKXS, KIPKAXX:VPT:NAIS:DENEKVV:LKKYR:VVE:GXGXR, GIPEPXX:VPE:NAIS:DENKNVV:LKKYR:TVE:SXAXR, SIPKAXX:VPT:NAIS:DEYDKVV:LKKYR:VVE:GXGXR, AVPKAXX:APT:NAIS:DSSNNVI:LKKYR:VVK:AXGXH, KVGKAXX:VPT:NAIS:DDMGVPT:LKKYR:VAE:XGXR, KASKAXX:VPT:NAIS:DKGVVTY:LKKYR:AVS:EXGXR, GSAGPXX:TPT:NAIS:NDKQQIIIKKYR:VVD:RXGXS, AAPASXX:VPA:NAIS:DAANNVV:LKKYR:VVE:AXGXR, STPPTXX:VPT:NAIS:DSANNVV:LKKYR:VVE:SXGXR, RVPSTXX:APV:NAIS:DNGRVLL:LKKYR:VEE:XGXL, ASAAPXX:VPQ:NAIS:VGRKPKV:LKKYR:VRS:XKXS, ASASPXX:VSQ:NAIS:IGKTPKI:LKKYR:VKS:XKXS, ASASPXX:VPQ:NAIS:VGRTPKV:LKKYR:VKS:XKXS, NDEGLEX:VPT:NAIS:RIKPHQGQH:LKKYR:QHN:KXEXR, NDEGLEX:VPT:NAIS:RIKPHQGQH:LKKYR:EHS:QXEXR, SSVKXQP:SRV:NAIS:EYVRKKPKL:LKKYR:EEH:LEXAXA, RNVQXRP:TQV:NAIS:EIVRKKPIF:LKKYR:EDH:LAXKXE, KIPKAXX:APT:SATS:DENEKVV:LRKHR:VVK:GXGXR, GIPEPXX:APT:SATS:DENKNVV:LRKHR:VVK:SXAXR, SIPKAXX:APT:SATS:DEYDKVV:LRKHR:VVK:GXGXR, HVTKPTX:APT:SATS:DDSSNVI:LRKHR:VVK:SXGXH, YVPKPXX:APT:SATS:DDSSNVI:LRKHR:VVK:SXGXH, TVPKPXX:APT:SATS:DDSSNVI:LRKHR:VVK:AXGXH, KVGKAXX:APT:SATS:DDMGVPT:LRKHR:VVK:XGXR, KASKAXX:APT:SATS:DKGVVTY:LRKHR:VVK:EXGXR, GSAGPXX:APT:SATS:NDKQQII:LRKHR:VVK:RXGXS, AAPASXX:APT:SATS:DAANNVV:LRKHR:VVK:AXGXR, STPPTXX:APT:SATS:DSANNVV:LRKHR:VVK:SXGXR, HVPKPXX:APT:SATS:DDSSNVI:LRKHR:VVK:SXGXH, RVPSTXX:APT:SATS:DNGRVLL:LRKHR:VVK:XGXL, ASAAPXX:APT:SATS:VGRKPKV:LRKHR:VVK:XKXS, ASASPXX:APT:SATS:IGKTPKI:LRKHR:VVK:XKXS, ASASPXX:APT:SATS:VGRTPKV:LRKHR:VVK:XKXS, KIPKAXX:VPT:SATS:DENEKVV:LRKHR:VVE:GXGXR, GIPEPXX:VPE:SATS:DENKNVV:LRKHR:TVE:SXAXR, SIPKAXX:VPT:SATS:DEYDKVV:LRKHR:VVE:GXGXR, HVTKPTX:APT:SATS:DDSSNVI:LRKHR:VVR:SXGXH, YVPKPXX:APT:SATS:DDSSNVI:LRKHR:VVR:SXGXH, TVPKPXX:APT:SATS:DDSSNVI:LRKHR:VVR:AXGXH, KVGKAXX:VPT:SATS:DDMGVPT:LRKHR:VAE:XGXR, KASKAXX:VPT:SATS:DKGVVTY:LRKHR:AVS:EXGXR, GSAGPXX:TPT:SATS:NDKQQIIIRKHR:VVD:RXGXS, AAPASXX:VPA:SATS:DAANNVV:LRKHR:VVE:AXGXR, STPPTXX:VPT:SATS:DSANNVV:LRKHR:VVE:SXGXR, HVPKPXX:APT:SATS:DDSSNVI:LRKHR:VVR:SXGXH, RVPSTXX:APV:SATS:DNGRVLL:LRKHR:VEE:XGXL, ASAAPXX:VPQ:SATS:VGRKPKV:LRKHR:VRS:XKXS, ASASPXX:VSQ:SATS:IGKTPKI:LRKHR:VKS:XKXS, ASASPXX:VPQ:SATS:VGRTPKV:LRKHR:VKS:XKXS, NDEGLEX:VPT:SATS:RIKPHQGQH:LRKHR:QHN:KXEXR, NDEGLEX:VPT:SATS:RIKPHQGQH:LRKHR:EHS:QXEXR, SSVKXQP:SRV:SATS:EYVRKKPKL:LRKHR:EEH:LEXAXA, RNVQXRP:TQV:SATS:EIVRKKPIF:LRKHR:EDH:LAXKXE, KIPKAXX:VPT:SPIS:DEN EKVV:LKYHY:VAE:GXGXR, GIPEPXX:VPT:SPIS:DENKNVV:LKYHY:VAE:SXAXR, SIPKAXX:VPT:SPIS:DEYDKVV:LKYHY:VAE:GXGXR, HVTKPTX:VPT:SPIS:DDSSNVI:LKYHY:VAE:SXGXH, YVPKPXX:VPT:SPIS:DDSSNVI:LKYHY:VAE:SXGXH, TVPKPXX:VPT:SPIS:DDSSNVI:LKYHY:VAE:AXGXH, AVPKAXX:VPT:SPIS:DSSNNVI:LKYHY:VAE:AXGXH, KASKAXX:VPT:SPIS:DKGVVTY:LKYHY:VAE:EXGXR, GSAGPXX:VPT:SPIS:NDKQQII:LKYHY:VAE:RXGXS, AAPASXX:VPT:SPIS:DAANNVV:LKYHY:VAE:AXGXR, STPPTXX:VPT:SPIS:DSANNVV:LKYHY:VAE:SXGXR, HVPKPXX:VPT:SPIS:DDSSNVI:LKYHY:VAE:SXGXH, RVPSTXX:VPT:SPIS:DNGRVLL:LKYHY:VAE:XGXL, ASAAPXX:VPT:SPIS:VGRKPKV:LKYHY:VAE:XKXS, ASASPXX:VPT:SPIS:IGKTPKI:LKYHY:VAE:XKXS, ASASPXX:VPT:SPIS:VGRTPKV:LKYHY:VAE:XKXS, KIPKAXX:VPT:SPIS:DEN EKVV:LKYHY:VVE:GXGXR, GIPEPXX:VPE:SPIS:DENKNVV:LKYHY:TVE:SXAXR, SIPKAXX:VPT:SPIS:DEYDKVV:LKYHY:VVE:GXGXR, HVTKPTX:APT:SPIS:DDSSNVI:LKYHY:VVR:SXGXH, YVPKPXX:APT:SPIS:DDSSNVI:LKYHY:VVR:SXGXH, TVPKPXX:APT:SPIS:DDSSNVI:LKYHY:VVR:AXGXH, AVPKAXX:APT:SPIS:DSSNNVI:LKYHY:VVK:AXGXH, KASKAXX:VPT:SPIS:DKGVVTY:LKYHY:AVS:EXGXR, GSAGPXX:TPT:SPIS:NDKQQII:LKYHY:VVD:RXGXS, AAPASXX:VPA:SPIS:DAANNVV:LKYHY:VVE:AXGXR, STPPTXX:VPT:SPIS:DSANNVV:LKYHY:VVE:SXGXR, HVPKPXX:APT:SPIS:DDSSNVI:LKYHY:VVR:SXGXH, RVPSTXX:APV:SPIS:DNGRVLL:LKYHY:VEE:XGXL, ASAAPXX:VPQ:SPIS:VGRKPKV:LKYHY:VRS:XKXS, ASASPXX:VSQ:SPIS:IGKTPKI:LKYHY:VKS:XKXS, ASASPXX:VPQ:SPIS:VGRTPKV:LKYHY:VKS:XKXS, NDEGLEX:VPT:SPIS:RIKPHQGQH:LKYHY:QHN:KXEXR, NDEGLEX:VPT:SPIS:RIKPHQGQH:LKYHY:EHS:QXEXR, SSVKXQP:SRV:SPIS:EYVRKKPKL:LKYHY:EEH:LEXAXA, RNVQXRP:TQV:SPIS:EIVRKKPIF:LKYHY:EDH:LAXKXE, KIPKAXX:VPT:EPIS:DENEKVV:KFKYE:AVS:GXGXR, GIPEPXX:VPT: EPIS:DENKNVV:KFKYE:AVS:SXAXR, SIPKAXX:VPT:EPIS:DEYDKVV:KFKYE:AVS:GXGXR, HVTKPTX:VPT:EPIS:DDSSNVI:KFKYE:AVS:SXGXH, YVPKPXX:VPT:EPIS:DDSSNVI:KFKYE:AVS:SXGXH, TVPKPXX:VPT:EPIS:DDSSNVI:KFKYE:AVS:AXGXH, AVPKAXX:VPT: EPIS:DSSNNVI:KFKYE:AVS:AXGXH, KVGKAXX:VPT:EPIS:DDMGVPT:KFKYE:AVS:XGXR, GSAGPXX:VPT: EPIS:NDKQQII:KFKYE:AVS:RXGXS, AAPASXX:VPT: EPIS:DAANNVV:KFKYE:AVS:AXGXR, STPPTXX:VPT:EPIS:DSANNVV:KFKYE:AVS:SXGXR, HVPKPXX:VPT:EPIS:DDSSNVI:KFKYE:AVS:SXGXH, RVPSTXX:VPT:EPIS:DNGRVLL:KFKYE:AVS:XGXL, ASAAPXX:VPT:EPIS:VGRKPKV:KFKYE:AVS:XKXS, ASASPXX:VPT:EPIS:IGKTPKI:KFKYE:AVS:XKXS, ASASPXX:VPT: EPIS:VGRTPKV:KFKYE:AVS:XKXS, KIPKAXX:VPT:EPIS:DENEKVV:KFKYE:VVE:GXGXR, GIPEPXX:VPE:EPIS:DENKNVV:KFKYE:TVE:SXAXR, SIPKAXX:VPT:EPIS:DEYDKVV:KFKYE:VVE:GXGXR, HVTKPTX:APT:EPIS:DDSSNVI:KFKYE:VVR:SXGXH, YVPKPXX:APT:EPIS:DDSSNVI:KFKYE:VVR:SXGXH, TVPKPXX:APT:EPIS:DDSSNVI:KFKYE:VVR:AXGXH, AVPKAXX:APT:EPIS:DSSNNVI:KFKYE:VVK:AXGXH, KVGKAXX:VPT:EPIS:DDMGVPT:KFKYE:VAE:XGXR, GSAGPXX:TPT:EPIS:NDKQQII:KFKYE:VVD:RXGXS, AAPASXX:VPA:EPIS:DAANNVV:KFKYE:VVE:AXGXR, STPPTXX:VPT:EPIS:DSANNVV:KFKYE:VVE:SXGXR, HVPKPXX:APT:EPIS:DDSSNVI:KFKYE:VVR:SXGXH, RVPSTXX:APV:EPIS:DNGRVLL:KFKYE:VEE:XGXL, ASAAPXX:VPQ:EPIS:VGRKPKV:KFKYE:VRS:XKXS, ASASPXX:VSQ:EPIS:IGKTPKI:KFKYE:VKS:XKXS, ASASPXX:VPQ:EPIS:VGRTPKV:KFKYE:VKS:XKXS, NDEGLEX:VPT:EPIS:RIKPHQGQH:KFKYE:QHN:KXEXR, NDEGLEX:VPT:EPIS:RIKPHQGQH:KFKYE:EHS:QXEXR, SSVKXQP:SRV:EPIS:EYVRKKPKL:KFKYE:EEH:LEXAXA, RNVQXRP:TQV:EPIS:EIVRKKPIF:KFKYE:EDH:LAXKXE, KIPKAXX:TPT:SPIN:DENEKVV:YGKIP:VVD:GXGXR, GIPEPXX:TPT:SPIN:DENKNVV:YGKIP:VVD:SXAXR, SIPKAXX:TPT:SPIN:DEYDKVV:YGKIP:VVD:GXGXR, HVTKPTX:TPT:SPIN:DDSSNVI:YGKIP:VVD:SXGXH, YVPKPXX:TPT:SPIN:DDSSNVI:YGKIP:VVD:SXGXH, TVPKPXX:TPT:SPIN:DDSSNVI:YGKIP:VVD:AXGXH, AVPKAXX:TPT:SPIN:DSSNNVI:YGKIP:VVD:AXGXH, KVGKAXX:TPT:SPIN:DDMGVPT:YGKIP:VVD:XGXR, KASKAXX:TPT:SPIN:DKGVVTY:YGKIP:VVD:EXGXR, AAPASXX:TPT:SPIN:DAANNVV:YGKIP:VVD:AXGXR, STPPTXX:TPT:SPIN:DSANNVV:YGKIP:VVD:SXGXR, HVPKPXX:TPT:SPIN:DDSSNVI:YGKIP:VVD:SXGXH, RVPSTXX:TPT:SPIN:DNGRVLL:YGKIP:VVD:XGXL, ASAAPXX:TPT:SPIN:VGRKPKV:YGKIP:VVD:XKXS, ASASPXX:TPT:SPIN:IGKTPKI:YGKIP:VVD:XKXS, ASASPXX:TPT:SPIN:VGRTPKV:YGKIP:VVD:XKXS, KIPKAXX:VPT:SPIN:DENEKVV:YGKIP:VVE:GXGXR, GIPEPXX:VPE:SPIN:DENKNVV:YGKIP:TVE:SXAXR, SIPKAXX:VPT:SPIN:DEYDKVV:YGKIP:VVE:GXGXR, HVTKPTX:APT:SPIN:DDSSNVI:YGKIP:VVR:SXGXH, YVPKPXX:APT:SPIN:DDSSNVI:YGKIP:VVR:SXGXH, TVPKPXX:APT:SPIN:DDSSNVI:YGKIP:VVR:AXGXH, AVPKAXX:APT:SPIN:DSSNNVI:YGKIP:VVK:AXGXH, KVGKAXX:VPT:SPIN:DDMGVPT:YGKIP:VAE:XGXR, KASKAXX:VPT:SPIN:DKGVVTY:YGKIP:AVS:EXGXR, AAPASXX:VPA:SPIN:DAANNVV:YGKIP:VVE:AXGXR, STPPTXX:VPT:SPIN:DSANNVV:YGKIP:VVE:SXGXR, HVPKPXX:APT:SPIN:DDSSNVI:YGKIP:VVR:SXGXH, RVPSTXX:APV:SPIN:DNGRVLL:YGKIP:VEE:XGXL, ASAAPXX:VPQ:SPIN:VGRKPKV:YGKIP:VRS:XKXS, ASASPXX:VSQ:SPIN:IGKTPKI:YGKIP:VKS:XKXS, ASASPXX:VPQ:SPIN:VGRTPKV:YGKIP:VKS:XKXS, NDEGLEX:VPT:SPIN:RIKPHQGQH:YGKIP:QHN:KXEXR, NDEGLEX:VPT:SPIN:RIKPHQGQH:YGKIP:EHS:QXEXR, SSVKXQP:SRV:SPIN:EYVRKKPKL:YGKIP:EEH:LEXAXA, RNVQXRP:TQV:SPIN:EIVRKKPIF:YGKIP:EDH:LAXKXE, KIPKAXX:VPA:SPIS:DENEKVV:YKQYE:VVE:GXGXR, GIPEPXX:VPA:SPIS:DENKNVV:YKQYE:VVE:SXAXR, SIPKAXX:VPA:SPIS:DEYDKVV:YKQYE:VVE:GXGXR, HVTKPTX:VPA:SPIS:DDSSNVI:YKQYE:VVE:SXGXH, YVPKPXX:VPA:SPIS:DDSSNVI:YKQYE:VVE:SXGXH, TVPKPXX:VPA:SPIS:DDSSNVI:YKQYE:VVE:AXGXH, AVPKAXX:VPA:SPIS:DSSNNVI:YKQYE:VVE:AXGXH, KVGKAXX:VPA:SPIS:DDMGVPT:YKQYE:VVE:XGXR, KASKAXX:VPA:SPIS:DKGVVTY:YKQYE:VVE:EXGXR, GSAGPXX:VPA:SPIS:NDKQQII:YKQYE:VVE:RXGXS, STPPTXX:VPA:SPIS:DSANNVV:YKQYE:VVE:SXGXR, HVPKPXX:VPA:SPIS:DDSSNVI:YKQYE:VVE:SXGXH, RVPSTXX:VPA:SPIS:DNGRVLL:YKQYE:VVE:XGXL, ASAAPXX:VPA:SPIS:VGRKPKV:YKQYE:VVE:XKXS, ASASPXX:VPA:SPIS:IGKTPKI:YKQYE:VVE:XKXS, ASASPXX:VPA:SPIS:VGRTPKV:YKQYE:VVE:XKXS, KIPKAXX:VPT:SPIS:DENEKVV:YKQYE:VVE:GXGXR, GIPEPXX:VPE:SPIS:DENKNVV:YKQYE:TVE:SXAXR, SIPKAXX:VPT:SPIS:DEYDKVV:YKQYE:VVE:GXGXR, HVTKPTX:APT:SPIS:DDSSNVI:YKQYE:VVR:SXGXH, YVPKPXX:APT:SPIS:DDSSNVI:YKQYE:VVR:SXGXH, TVPKPXX:APT:SPIS:DDSSNVI:YKQYE:VVR:AXGXH, AVPKAXX:APT:SPIS:DSSNNVI:YKQYE:VVK:AXGXH, KVGKAXX:VPT:SPIS:DDMGVPT:YKQYE:VAE:XGXR, KASKAXX:VPT:SPIS:DKGVVTY:YKQYE:AVS:EXGXR, GSAGPXX:TPT:SPIS:NDKQQII:YKQYE:VVD:RXGXS, STPPTXX:VPT:SPIS:DSANNVV:YKQYE:VVE:SXGXR, HVPKPXX:APT:SPIS:DDSSNVI:YKQYE:VVR:SXGXH, RVPSTXX:APV:SPIS:DNGRVLL:YKQYE:VEE:XGXL, ASAAPXX:VPQ:SPIS:VGRKPKV:YKQYE:VRS:XKXS, ASASPXX:VSQ:SPIS:IGKTPKI:YKQYE:VKS:XKXS, ASASPXX:VPQ:SPIS:VGRTPKV:YKQYE:VKS:XKXS, NDEGLEX:VPT:SPIS:RIKPHQGQH:YKQYE:QHN:KXEXR, NDEGLEX:VPT:SPIS:RIKPHQGQH:YKQYE:EHS:QXEXR, SSVKXQP:SRV:SPIS:EYVRKKPKL:YKQYE:EEH:LEXAXA, RNVQXRP:TQV:SPIS:EIVRKKPIF:YKQYE:EDH:LAXKXE, GIPEPXX:VPT:SPIS:DENKNVV:YKQYE:VVE:SXAXR, HVTKPTX:VPT:SPIS:DDSSNVI:YKQYE:VVE:SXGXH, YVPKPXX:VPT:SPIS:DDSSNVI:YKQYE:VVE:SXGXH, TVPKPXX:VPT:SPIS:DDSSNVI:YKQYE:VVE:AXGXH, AVPKAXX:VPT:SPIS:DSSNNVI:YKQYE:VVE:AXGXH, KVGKAXX:VPT:SPIS:DDMGVPT:YKQYE:VVE:XGXR, KASKAXX:VPT:SPIS:DKGVVTY:YKQYE:VVE:EXGXR, GSAGPXX:VPT:SPIS:NDKQQII:YKQYE:VVE:RXGXS, AAPASXX:VPT:SPIS:DAANNVV:YKQYE:VVE:AXGXR, HVPKPXX:VPT:SPIS:DDSSNVI:YKQYE:VVE:SXGXH, RVPSTXX:VPT:SPIS:DNGRVLL:YKQYE:VVE:XGXL, ASAAPXX:VPT:SPIS:VGRKPKV:YKQYE:VVE:XKXS, ASASPXX:VPT:SPIS:IGKTPKI:YKQYE:VVE:XKXS, ASASPXX:VPT:SPIS:VGRTPKV:YKQYE:VVE:XKXS, AAPASXX:VPA:SPIS:DAANNVV:YKQYE:VVE:AXGXR, KIPKAXX:APV:KPLS:DENEKVV:DHHKD:VEE:GXGXR, GIPEPXX:APV:KPLS:DENKNVV:DHHKD:VEE:SXAXR, SIPKAXX:APV:KPLS:DEYDKVV:DHHKD:VEE:GXGXR, HVTKPTX:APV:KPLS:DDSSNVI:DHHKD:VEE:SXGXH, YVPKPXX:APV:KPLS:DDSSNVI:DHHKD:VEE:SXGXH, TVPKPXX:APV:KPLS:DDSSNVI:DHHKD:VEE:AXGXH, AVPKAXX:APV:KPLS:DSSNNVI:DHHKD:VEE:AXGXH, KVGKAXX:APV:KPLS:DDMGVPT:DHHKD:VEE:XGXR, KASKAXX:APV:KPLS:DKGVVTY:DHHKD:VEE:EXGXR, GSAGPXX:APV:KPLS:NDKQQII:DHHKD:VEE:RXGXS, AAPASXX:APV:KPLS:DAANNVV:DHHKD:VEE:AXGXR, STPPTXX:APV:KPLS:DSANNVV:DHHKD:VEE:SXGXR, HVPKPXX:APV:KPLS:DDSSNVI:DHHKD:VEE:SXGXH, ASAAPXX:APV:KPLS:VGRKPKV:DHHKD:VEE:XKXS, ASASPXX:APV:KPLS:IGKTPKI:DHHKD:VEE:XKXS, ASASPXX:APV:KPLS:VGRTPKV:DHHKD:VEE:XKXS, KIPKAXX:VPT:KPLS:DEN EKVV:DHHKD:VVE:GXGXR, GIPEPXX:VPE:KPLS:DENKNVV:DHHKD:TVE:SXAXR, SIPKAXX:VPT:KPLS:DEYDKVV:DHHKD:VVE:GXGXR, HVTKPTX:APT:KPLS:DDSSNVI:DHHKD:VVR:SXGXH, YVPKPXX:APT:KPLS:DDSSNVI:DHHKD:VVR:SXGXH, TVPKPXX:APT:KPLS:DDSSNVI:DHHKD:VVR:AXGXH, AVPKAXX:APT:KPLS:DSSNNVI:DHHKD:VVK:AXGXH, KVGKAXX:VPT:KPLS:DDMGVPT:DHHKD:VAE:XGXR, KASKAXX:VPT:KPLS:DKGVVTY:DHHKD:AVS:EXGXR, GSAGPXX:TPT:KPLS:NDKQQII:DHHKD:VVD:RXGXS, AAPASXX:VPA:KPLS:DAANNVV:DHHKD:VVE:AXGXR, STPPTXX:VPT:KPLS:DSANNVV:DHHKD:VVE:SXGXR, HVPKPXX:APT:KPLS:DDSSNVI:DHHKD:VVR:SXGXH, ASAAPXX:VPQ:KPLS:VGRKPKV:DHHKD:VRS:XKXS, ASASPXX:VSQ:KPLS:IGKTPKI:DHHKD:VKS:XKXS, ASASPXX:VPQ:KPLS:VGRTPKV:DHHKD:VKS:XKXS, NDEGLEX:VPT:KPLS:RIKPHQGQH:DHHKD:QHN:KXEXR, NDEGLEX:VPT:KPLS:RIKPHQGQH:DHHKD:EHS:QXEXR, SSVKXQP:SRV:KPLS: EYVRKKPKL:DHHKD:EEH:LEXAXA, RNVQXRP:TQV:KPLS:EIVRKKPIF:DHHKD:EDH:LAXKXE, KIPKAXX:VPQ:EPLP:DENEKVV:EQLSN:VRS:GXGXR, GIPEPXX:VPQ:EPLP:DENKNVV:EQLSN:VRS:SXAXR, SIPKAXX:VPQ:EPLP:DEYDKVV:EQLSN:VRS:GXGXR, HVTKPTX:VPQ:EPLP:DDSSNVI:EQLSN:VRS:SXGXH, YVPKPXX:VPQ:EPLP:DDSSNVI:EQLSN:VRS:SXGXH, TVPKPXX:VPQ:EPLP:DDSSNVI:EQLSN:VRS:AXGXH, AVPKAXX:VPQ:EPLP:DSSNNVI:EQLSN:VRS:AXGXH, KVGKAXX:VPQ:EPLP:DDMGVPT:EQLSN:VRS:XGXR, KASKAXX:VPQ:EPLP:DKGVVTY:EQLSN:VRS:EXGXR, GSAGPXX:VPQ:EPLP:NDKQQII:EQLSN:VRS:RXGXS, AAPASXX:VPQ:EPLP:DAANNVV:EQLSN:VRS:AXGXR, STPPTXX:VPQ:EPLP:DSANNVV:EQLSN:VRS:SXGXR, HVPKPXX:VPQ: EPLP:DDSSNVI:EQLSN:VRS:SXGXH, RVPSTXX:VPQ:EPLP:DNGRVLL:EQLSN:VRS:XGXL, ASASPXX:VPQ:EPLP:IGKTPKI:EQLSN:VRS:XKXS, ASASPXX:VPQ:EPLP:VGRTPKV:EQLSN:VRS:XKXS, KIPKAXX:VPT:EPLP:DENEKVV:EQLSN:VVE:GXGXR, GIPEPXX:VPE:EPLP:DENKNVV:EQLSN:TVE:SXAXR, SIPKAXX:VPT: EPLP:DEYDKVV:EQLSN:VVE:GXGXR, HVTKPTX:APT:EPLP:DDSSNVI:EQLSN:VVR:SXGXH, YVPKPXX:APT: EPLP:DDSSNVI:EQLSN:VVR:SXGXH, TVPKPXX:APT:EPLP:DDSSNVI:EQLSN:VVR:AXGXH, AVPKAXX:APT:EPLP:DSSNNVI:EQLSN:VVK:AXGXH, KVGKAXX:VPT:EPLP:DDMGVPT:EQLSN:VAE:XGXR, KASKAXX:VPT: EPLP:DKGVVTY:EQLSN:AVS:EXGXR, GSAGPXX:TPT:EPLP:NDKQQII:EQLSN:VVD:RXGXS, AAPASXX:VPA:EPLP:DAANNVV:EQLSN:VVE:AXGXR, STPPTXX:VPT:EPLP:DSANNVV:EQLSN:VVE:SXGXR, HVPKPXX:APT:EPLP:DDSSNVI:EQLSN:VVR:SXGXH, RVPSTXX:APV:EPLP:DNGRVLL:EQLSN:VEE:XGXL, ASASPXX:VSQ:EPLP:IGKTPKI:EQLSN:VKS:XKXS, ASASPXX:VPQ:EPLP:VGRTPKV:EQLSN:VKS:XKXS, NDEGLEX:VPT:EPLP:RIKPHQGQH:EQLSN:QHN:KXEXR, NDEGLEX:VPT:EPLP:RIKPHQGQH:EQLSN:EHS:QXEXR, SSVKXQP:SRV:EPLP:EYVRKKPKL:EQLSN:EEH:LEXAXA, RNVQXRP:TQV:EPLP:EIVRKKPIF:EQLSN:EDH:LAXKXE, KIPKAXX:VSQ:EPLT:DENEKVV:EQLSN:VKS:GXGXR, GIPEPXX:VSQ:EPLT:DENKNVV:EQLSN:VKS:SXAXR, SIPKAXX:VSQ:EPLT:DEYDKVV:EQLSN:VKS:GXGXR, HVTKPTX:VSQ:EPLT:DDSSNVI:EQLSN:VKS:SXGXH, YVPKPXX:VSQ:EPLT:DDSSNVI:EQLSN:VKS:SXGXH, TVPKPXX:VSQ:EPLT:DDSSNVI:EQLSN:VKS:AXGXH, AVPKAXX:VSQ:EPLT:DSSNNVI:EQLSN:VKS:AXGXH, KVGKAXX:VSQ:EPLT:DDMGVPT:EQLSN:VKS:XGXR, KASKAXX:VSQ:EPLT:DKGVVTY:EQLSN:VKS:EXGXR, GSAGPXX:VSQ:EPLT:NDKQQII:EQLSN:VKS:RXGXS, AAPASXX:VSQ:EPLT:DAANNVV:EQLSN:VKS:AXGXR, STPPTXX:VSQ:EPLT:DSANNVV:EQLSN:VKS:SXGXR, HVPKPXX:VSQ:EPLT:DDSSNVI:EQLSN:VKS:SXGXH, RVPSTXX:VSQ:EPLT:DNGRVLL:EQLSN:VKS:XGXL, ASAAPXX:VSQ:EPLT:VGRKPKV:EQLSN:VKS:XKXS, ASASPXX:VSQ:EPLT:VGRTPKV:EQLSN:VKS:XKXS, KIPKAXX:VPT:EPLT:DENEKVV:EQLSN:VVE:GXGXR, GIPEPXX:VPE:EPLT:DENKNVV:EQLSN:TVE:SXAXR, SIPKAXX:VPT:EPLT:DEYDKVV:EQLSN:VVE:GXGXR, HVTKPTX:APT:EPLT:DDSSNVI:EQLSN:VVR:SXGXH, YVPKPXX:APT:EPLT:DDSSNVI:EQLSN:VVR:SXGXH, TVPKPXX:APT:EPLT:DDSSNVI:EQLSN:VVR:AXGXH, AVPKAXX:APT:EPLT:DSSNNVI:EQLSN:VVK:AXGXH, KVGKAXX:VPT:EPLT:DDMGVPT:EQLSN:VAE:XGXR, KASKAXX:VPT:EPLT:DKGVVTY:EQLSN:AVS:EXGXR, GSAGPXX:TPT:EPLT:NDKQQII:EQLSN:VVD:RXGXS, AAPASXX:VPA:EPLT:DAANNVV:EQLSN:VVE:AXGXR, STPPTXX:VPT:EPLT:DSANNVV:EQLSN:VVE:SXGXR, HVPKPXX:APT:EPLT:DDSSNVI:EQLSN:VVR:SXGXH, RVPSTXX:APV:EPLT:DNGRVLL:EQLSN:VEE:XGXL, ASAAPXX:VPQ:EPLT:VGRKPKV:EQLSN:VRS:XKXS, NDEGLEX:VPT:EPLT:RIKPHQGQH:EQLSN:QHN:KXEXR, NDEGLEX:VPT:EPLT:RIKPHQGQH:EQLSN:EHS:QXEXR, SSVKXQP:SRV:EPLT:EYVRKKPKL:EQLSN:EEH:LEXAXA, RNVQXRP:TQV:EPLT:EIVRKKPIF:EQLSN:EDH:LAXKXE, KIPKAXX:VPQ:EPLT:DENEKVV:EQLSN:VKS:GXGXR, GIPEPXX:VPQ:EPLT:DENKNVV:EQLSN:VKS:SXAXR, SIPKAXX:VPQ:EPLT:DEYDKVV:EQLSN:VKS:GXGXR, HVTKPTX:VPQ:EPLT:DDSSNVI:EQLSN:VKS:SXGXH, YVPKPXX:VPQ:EPLT:DDSSNVI:EQLSN:VKS:SXGXH, TVPKPXX:VPQ:EPLT:DDSSNVI:EQLSN:VKS:AXGXH, AVPKAXX:VPQ:EPLT:DSSNNVI:EQLSN:VKS:AXGXH, KVGKAXX:VPQ:EPLT:DDMGVPT:EQLSN:VKS:XGXR, KASKAXX:VPQ:EPLT:DKGVVTY:EQLSN:VKS:EXGXR, GSAGPXX:VPQ:EPLT:NDKQQII:EQLSN:VKS:RXGXS, AAPASXX:VPQ:EPLT:DAANNVV:EQLSN:VKS:AXGXR, STPPTXX:VPQ:EPLT:DSANNVV:EQLSN:VKS:SXGXR, HVPKPXX:VPQ:EPLT:DDSSNVI:EQLSN:VKS:SXGXH, RVPSTXX:VPQ:EPLT:DNGRVLL:EQLSN:VKS:XGXL, ASAAPXX:VPQ:EPLT:VGRKPKV:EQLSN:VKS:XKXS, ASASPXX:VPQ:EPLT:IGKTPKI:EQLSN:VKS:XKXS, NDEGLEX:VPT:SNIT:RIKPHQGQH:IGEMS:QHN:QXEXR, KIPKAXX:VPT:SNIT:DENEKVV:IGEMS:VVE:GXGXR, GIPEPXX:VPE:SNIT:DENKNVV:IGEMS:TVE:SXAXR, SIPKAXX:VPT:SNIT:DEYDKVV:IGEMS:VVE:GXGXR, HVTKPTX:APT:SNIT:DDSSNVI:IGEMS:VVR:SXGXH, YVPKPXX:APT:SNIT:DDSSNVI:IGEMS:VVR:SXGXH, TVPKPXX:APT:SNIT:DDSSNVI:IGEMS:VVR:AXGXH, AVPKAXX:APT:SNIT:DSSNNVI:IGEMS:VVK:AXGXH, KVGKAXX:VPT:SNIT:DDMGVPT:IGEMS:VAE:XGXR, KASKAXX:VPT:SNIT:DKGVVTY:IGEMS:AVS:EXGXR, GSAGPXX:TPT:SNIT:NDKQQII:IGEMS:VVD:RXGXS, AAPASXX:VPA:SNIT:DAANNVV:IGEMS:VVE:AXGXR, STPPTXX:VPT:SNIT:DSANNVV:IGEMS:VVE:SXGXR, HVPKPXX:APT:SNIT:DDSSNVI:IGEMS:VVR:SXGXH, RVPSTXX:APV:SNIT:DNGRVLL:IGEMS:VEE:XGXL, ASAAPXX:VPQ:SNIT:VGRKPKV:IGEMS:VRS:XKXS, ASASPXX:VSQ:SNIT:IGKTPKI:IGEMS:VKS:XKXS, ASASPXX:VPQ:SNIT:VGRTPKV:IGEMS:VKS:XKXS, NDEGLEX:VPT:SNIT:RIKPHQGQH:IGEMS:EHS:QXEXR, SSVKXQP:SRV:SNIT:EYVRKKPKL:IGEMS:EEH:LEXAXA, RNVQXRP:TQV:SNIT:EIVRKKPIF:IGEMS:EDH:LAXKXE, NDEGLEX:VPT:SNIT:RIKPHQGQH:LGEMS:EHS:KXEXR, KIPKAXX:VPT:SNIT:DENEKVV:LGEMS:VVE:GXGXR, GIPEPXX:VPE:SNIT:DENKNVV:LGEMS:TVE:SXAXR, SIPKAXX:VPT:SNIT:DEYDKVV:LGEMS:VVE:GXGXR, HVTKPTX:APT:SNIT:DDSSNVI:LGEMS:VVR:SXGXH, YVPKPXX:APT:SNIT:DDSSNVI:LGEMS:VVR:SXGXH, TVPKPXX:APT:SNIT:DDSSNVI:LGEMS:VVR:AXGXH, AVPKAXX:APT:SNIT:DSSNNVI:LGEMS:VVK:AXGXH, KVGKAXX:VPT:SNIT:DDMGVPT:LGEMS:VAE:XGXR, KASKAXX:VPT:SNIT:DKGVVTY:LGEMS:AVS:EXGXR, GSAGPXX:TPT:SNIT:NDKQQII:LGEMS:VVD:RXGXS, AAPASXX:VPA:SNIT:DAANNVV:LGEMS:VVE:AXGXR, STPPTXX:VPT:SNIT:DSANNVV:LGEMS:VVE:SXGXR, HVPKPXX:APT:SNIT:DDSSNVI:LGEMS:VVR:SXGXH, RVPSTXX:APV:SNIT:DNGRVLL:LGEMS:VEE:XGXL, ASAAPXX:VPQ:SNIT:VGRKPKV:LGEMS:VRS:XKXS, ASASPXX:VSQ:SNIT:IGKTPKI:LGEMS:VKS:XKXS, ASASPXX:VPQ:SNIT:VGRTPKV:LGEMS:VKS:XKXS, NDEGLEX:VPT:SNIT:RIKPHQGQH:LGEMS:QHN:KXEXR, SSVKXQP:SRV:SNIT:EYVRKKPKL:LGEMS:EEH:LEXAXA, RNVQXRP:TQV:SNIT:EIVRKKPIF:LGEMS:EDH:LAXKXE, RNVQXRP:SRV:RSVK:EIVRKKPIF:KEVQV:EEH:LAXKXE, KIPKAXX:VPT: RSVK:DENEKVV:KEVQV:VVE:GXGXR, GIPEPXX:VPE:RSVK:DENKNVV:KEVQV:TVE:SXAXR, SIPKAXX:VPT: RSVK:DEYDKVV:KEVQV:VVE:GXGXR, HVTKPTX:APT:RSVK:DDSSNVI:KEVQV:VVR:SXGXH, YVPKPXX:APT:RSVK:DDSSNVI:KEVQV:VVR:SXGXH, TVPKPXX:APT: RSVK:DDSSNVI:KEVQV:VVR:AXGXH, AVPKAXX:APT:RSVK:DSSNNVI:KEVQV:VVK:AXGXH, KVGKAXX:VPT:RSVK:DDMGVPT:KEVQV:VAE:XGXR, KASKAXX:VPT:RSVK:DKGVVTY:KEVQV:AVS:EXGXR, GSAGPXX:TPT:RSVK:NDKQQII:KEVQV:VVD:RXGXS, AAPASXX:VPA:RSVK:DAANNVV:KEVQV:VVE:AXGXR, STPPTXX:VPT:RSVK:DSANNVV:KEVQV:VVE:SXGXR, HVPKPXX:APT:RSVK:DDSSNVI:KEVQV:VVR:SXGXH, RVPSTXX:APV:RSVK:DNGRVLL:KEVQV:VEE:XGXL, ASAAPXX:VPQ:RSVK:VGRKPKV:KEVQV:VRS:XKXS, ASASPXX:VSQ:RSVK:IGKTPKI:KEVQV:VKS:XKXS, ASASPXX:VPQ:RSVK:VGRTPKV:KEVQV:VKS:XKXS, NDEGLEX:VPT:RSVK:RIKPHQGQH:KEVQV:QHN:KXEXR, NDEGLEX:VPT:RSVK:RIKPHQGQH:KEVQV:EHS:QXEXR, RNVQXRP:TQV:RSVK:EIVRKKPIF:KEVQV:EDH:LAXKXE, SSVKXQP:TQV: RPVQ:EYVRKKPKL:KKATV:EDH:LEXAXA, KIPKAXX:VPT: RPVQ:DENEKVV:KKATV:VVE:GXGXR, GIPEPXX:VPE:RPVQ:DENKNVV:KKATV:TVE:SXAXR, SIPKAXX:VPT:RPVQ:DEYDKVV:KKATV:VVE:GXGXR, HVTKPTX:APT: RPVQ:DDSSNVI:KKATV:VVR:SXGXH, YVPKPXX:APT: RPVQ:DDSSNVI:KKATV:VVR:SXGXH, TVPKPXX:APT:RPVQ:DDSSNVI:KKATV:VVR:AXGXH, AVPKAXX:APT: RPVQ:DSSNNVI:KKATV:VVK:AXGXH, KVGKAXX:VPT:RPVQ:DDMGVPT:KKATV:VAE:XGXR, KASKAXX:VPT: RPVQ:DKGVVTY:KKATV:AVS: EXGXR, GSAGPXX:TPT:RPVQ:NDKQQII:KKATV:VVD:RXGXS, AAPASXX:VPA:RPVQ:DAANNVV:KKATV:VVE:AXGXR, STPPTXX:VPT:RPVQ:DSANNVV:KKATV:VVE:SXGXR, HVPKPXX:APT:RPVQ:DDSSNVI:KKATV:VVR:SXGXH, RVPSTXX:APV:RPVQ:DNGRVLL:KKATV:VEE:XGXL, ASAAPXX:VPQ:RPVQ:VGRKPKV:KKATV:VRS:XKXS, ASASPXX:VSQ:RPVQ:IGKTPKI:KKATV:VKS:XKXS, ASASPXX:VPQ:RPVQ:VGRTPKV:KKATV:VKS:XKXS, NDEGLEX:VPT:RPVQ:RIKPHQGQH:KKATV:QHN:KXEXR, NDEGLEX:VPT:RPVQ:RIKPHQGQH:KKATV:EHS:QXEXR and SSVKXQP:SRV:RPVQ:EYVRKKPKL:KKATV:EEH:LEXAXA.

[0438] In particular, in certain embodiments, the heptuplet PEP7:PEP3:PEP12:LINKER:PEP2:PEP4:PEP8 is selected from the group consisting of GIPEPXX:VPT:SAIS-AA¹⁷-LYL:DENKNVVIKNYQ:VVE:SXAXR, SIPKAXX:VPT:SAIS-AA¹⁷-LYL:DEYDKVVIKNYQ:VVE:GXGXR, HVTKPTX:VPT:SAIS-AA¹⁷-LYL:DDSSNVI:LKNYQ:VVE:SXGXH, YVPKPXX:VPT:SAIS-AA¹⁷-LYL:DDSSNVI:LKNYQ:VVE:SXGXH, TVPKPXX:VPT:SAIS-AA¹⁷-LYL:DDSSNVI:LKNYQ:VVE:AXGXH, AVPKAXX:VPT:SAIS-AA¹⁷-LYL:DSSNNVI:LKNYQ:VVE:AXGXH, KVGKAXX:VPT:SAIS-AA¹⁷-LYL:DDMGVPTIKNYQ:VVE:XGXR, KASKAXX:VPT:SAIS-AA¹⁷-LYL:DKGVVTY:LKNYQ:VVE:EXGXR, GSAGPXX:VPT:SAIS-AA¹⁷-LYL:NDKQQII:LKNYQ:VVE:RXGXS, AAPASXX:VPT:SAIS-AA¹⁷-LYL:DAANNVVIKNYQ:VVE:AXGXR, STPPTXX:VPT:SAIS-AA¹⁷-LYL:DSANNVV:LKNYQ:VVE:SXGXR, HVPKPXX:VPT:SAIS-AA¹⁷-LYL:DDSSNVI:LKNYQ:VVE:SXGXH, RVPSTXX:VPT:SAIS-AA¹⁷-LYL:DNGRVLLIKNYQ:VVE:XGXL, ASAAPXX:VPT:SAIS-AA¹⁷-LYL:VGRKPKVIKNYQ:VVE:XKXS, ASASPXX:VPT:SAIS-AA¹⁷-LYL:IGKTPKI:LKNYQ:VVE:XKXS, ASASPXX:VPT:SAIS-AA¹⁷-LYL:VGRTPKVIKNYQ:VVE:XKXS, NDEGLEX:VPT:SAIS-AA¹⁷-LYL:RIKPHQGQH:LKNYQ:VVE:KXEXR, NDEGLEX:VPT:SAIS-AA¹⁷-LYL:RIKPHQGQH:LKNYQ:VVE:QXEXR, SSVKXQP:VPT:SAIS-AA¹⁷-LYL:EYVRKKPKL:LKNYQ:VVE:LEXAXA, RNVQXRP:VPT:SAIS-AA¹⁷-LYL:EIVRKKPIF:LKNYQ:VVE:LAXKXE, GIPEPXX:VPE:SAIS-AA¹⁷-LYL:DENKNVVIKNYQ:TVE:SXAXR, HVTKPTX:APT:SAIS-AA¹⁷-LYL:DDSSNVI:LKNYQ:VVR:SXGXH, YVPKPXX:APT:SAIS-AA¹⁷-LYL:DDSSNVI:LKNYQ:VVR:SXGXH, TVPKPXX:APT:SAIS-AA¹⁷-LYL:DDSSNVIIKNYQ:VVR:AXGXH, AVPKAXX:APT:SAIS-AA¹⁷-LYL:DSSNNVIIKNYQ:VVK:AXGXH, KVGKAXX:VPT:SAIS-AA¹⁷-LYL:DDMGVPT:LKNYQ:VAE:XGXR, KASKAXX:VPT:SAIS-AA¹⁷-LYL:DKGVVTY:LKNYQ:AVS:EXGXR, GSAGPXX:TPT:SAIS-AA¹⁷-LYL:NDKQQII:LKNYQ:VVD:RXGXS, AAPASXX:VPA:SAIS-AA¹⁷-LYL:DAANNVV:LKNYQ:VVE:AXGXR, HVPKPXX:APT:SAIS-AA¹⁷-LYL:DDSSNVI:LKNYQ:VVR:SXGXH, RVPSTXX:APV:SAIS-AA¹⁷-LYL:DNGRVLLIKNYQ:VEE:XGXL, ASAAPXX:VPQ:SAIS-AA¹⁷-LYL:VGRKPKV:LKNYQ:VRS:XKXS, ASASPXX:VSQ:SAIS-AA¹⁷-LYLIGKTPKI:LKNYQ:VKS:XKXS, ASASPXX:VPQ:SAIS-AA¹⁷-LYL:VGRTPKV:LKNYQ:VKS:XKXS, NDEGLEX:VPT:SAIS-AA¹⁷-LYL:RIKPHQGQH:LKNYQ:QHN:KXEXR, NDEGLEX:VPT:SAIS-AA¹⁷-LYL:RIKPHQGQH:LKNYQ:EHS:QXEXR, SSVKXQP:SRV:SAIS-AA¹⁷-LYL:EYVRKKPKL:LKNYQ:EEH:LEXAXA, RNVQXRP:TQV:SAIS-AA¹⁷-LYL:EIVRKKPIF:LKNYQ:EDH:LAXKXE, KIPKAXX:VPE:SSLS-AA¹⁷-LFF:DENEKVVIKVYP:TVE:GXGXR, SIPKAXX:VPE:SSLS-AA¹⁷-LFF:DEYDKVVIKVYP:TVE:GXGXR, HVTKPTX:VPE:SSLS-AA¹⁷-LFF:DDSSNVI:LKVYP:TVE:SXGXH, YVPKPXX:VPE:SSLS-AA¹⁷-LFF:DDSSNVIIKVYP:TVE:SXGXH, TVPKPXX:VPE:SSLS-AA¹⁷-LFF:DDSSNVIIKVYP:TVE:AXGXH, AVPKAXX:VPE:SSLS-AA¹⁷-LFF:DSSNNVI:LKVYP:TVE:AXGXH, KVGKAXX:VPE:SSLS-AA¹⁷-LFF:DDMGVPTIKVYP:TVE:XGXR, KASKAXX:VPE:SSLS-AA¹⁷-LFF:DKGVVTY:LKVYP:TVE:EXGXR, GSAGPXX:VPE:SSLS-AA¹⁷-LFF:NDKQQII:LKVYP:TVE:RXGXS, AAPASXX:VPE:SSLS-AA¹⁷-LFF:DAANNVVIKVYP:TVE:AXGXR, STPPTXX:VPE:SSLS-AA¹⁷-LFF:DSANNVVIKVYP:TVE:SXGXR, HVPKPXX:VPE:SSLS-AA¹⁷-LFF:DDSSNVI:LKVYP:TVE:SXGXH, RVPSTXX:VPE:SSLS-AA¹⁷-LFF:DNGRVLLIKVYP:TVE:XGXL, ASAAPXX:VPE:SSLS-AA¹⁷-LFF:VGRKPKVIKVYP:TVE:XKXS, ASASPXX:VPE:SSLS-AA¹⁷-LFF:IGKTPKIIKVYP:TVE:XKXS, ASASPXX:VPE:SSLS-AA¹⁷-LFF:VGRTPKVIKVYP:TVE:XKXS, NDEGLEX:VPE:SSLS-AA¹⁷-LFF:RIKPHQGQH:LKVYP:TVE:KXEXR, NDEGLEX:VPE:SSLS-AA¹⁷-LFF:RIKPHQGQH:LKVYP:TVE:QXEXR, SSVKXQP:VPE:SSLS-AA¹⁷-LFF:EYVRKKPKL:LKVYP:TVE:LEXAXA, RNVQXRP:VPE:SSLS-AA¹⁷-LFF:EIVRKKPIF:LKVYP:TVE:LAXKXE, KIPKAXX:VPT:SSLS-AA¹⁷-LFF:DENEKVVIKVYP:VVE:GXGXR, SIPKAXX:VPT:SSLS-AA¹⁷-LFF:DEYDKVVIKVYP:VVE:GXGXR, HVTKPTX:APT:SSLS-AA¹⁷-LFF:DDSSNVI:LKVYP:VVR:SXGXH, YVPKPXX:APT:SSLS-AA¹⁷-LFF:DDSSNVIIKVYP:VVR:SXGXH, TVPKPXX:APT:SSLS-AA¹⁷-LFF:DDSSNVIIKVYP:VVR:AXGXH, AVPKAXX:APT:SSLS-AA¹⁷-LFF:DSSNNVI:LKVYP:VVK:AXGXH, KVGKAXX:VPT:SSLS-AA¹⁷-LFF:DDMGVPTIKVYP:VAE:XGXR, KASKAXX:VPT:SSLS-AA¹⁷-LFF:DKGVVTY:LKVYP:AVS:EXGXR, GSAGPXX:TPT:SSLS-AA¹⁷-LFF:NDKQQII:LKVYP:VVD:RXGXS, AAPASXX:VPA:SSLS-AA¹⁷-LFF:DAANNVV:LKVYP:VVE:AXGXR, STPPTXX:VPT:SSLS-AA¹⁷-LFF:DSANNVVIKVYP:VVE:SXGXR, HVPKPXX:APT:SSLS-AA¹⁷-LFF:DDSSNVI:LKVYP:VVR:SXGXH, RVPSTXX:APV:SSLS-AA¹⁷-LFF:DNGRVLLIKVYP:VEE:XGXL, ASAAPXX:VPQ:SSLS-AA¹⁷-LFF:VGRKPKVIKVYP:VRS:XKXS, ASASPXX:VSQ:SSLS-AA¹⁷-LFF:IGKTPKI:LKVYP:VKS:XKXS, ASASPXX:VPQ:SSLS-AA¹⁷-LFF:VGRTPKVIKVYP:VKS:XKXS, NDEGLEX:VPT:SSLS-AA¹⁷-LFF:RIKPHQGQH:LKVYP:QHN:KXEXR, NDEGLEX:VPT:SSLS-AA¹⁷-LFF:RIKPHQGQH:LKVYP:EHS:QXEXR, SSVKXQP:SRV:SSLS-AA¹⁷-LFF:EYVRKKPKL:LKVYP:EEH:LEXAXA, RNVQXRP:TQV:SSLS-AA¹⁷-LFF:EIVRKKPIF:LKVYP:EDH:LAXKXE, KIPKAXX:VPT:SAIS-AA¹⁷-LYL:DENEKVVIKNYQ:VVE:GXGXR, KIPKAXX:APT:NAIS-AA¹⁷-LYF:DENEKVVIKKYR:VVR:GXGXR, GIPEPXX:APT:NAIS-AA¹⁷-LYF:DENKNVV:LKKYR:VVR:SXAXR, SIPKAXX:APT:NAIS-AA¹⁷-LYF:DEYDKVVIKKYR:VVR:GXGXR, YVPKPXX:APT:NAIS-AA¹⁷-LYF:DDSSNVIIKKYR:VVR:SXGXH, TVPKPXX:APT:NAIS-AA¹⁷-LYF:DDSSNVI:LKKYR:VVR:AXGXH, AVPKAXX:APT:NAIS-AA¹⁷-LYF:DSSNNVIIKKYR:VVR:AXGXH, KVGKAXX:APT:NAIS-AA¹⁷-LYF:DDMGVPTIKKYR:VVR:XGXR, KASKAXX:APT:NAIS-AA¹⁷-LYF:DKGVVTY:LKKYR:VVR:EXGXR, GSAGPXX:APT:NAIS-AA¹⁷-LYF:NDKQQIIIKKYR:VVR:RXGXS, AAPASXX:APT:NAIS-AA¹⁷-LYF:DAANNVVIKKYR:VVR:AXGXR, STPPTXX:APT:NAIS-AA¹⁷-LYF:DSANNVV:LKKYR:VVR:SXGXR, HVPKPXX:APT:NAIS-AA¹⁷-LYF:DDSSNVIIKKYR:VVR:SXGXH, RVPSTXX:APT:NAIS-AA¹⁷-LYF:DNGRVLLIKKYR:VVR:XGXL, ASAAPXX:APT:NAIS-AA¹⁷-LYF:VGRKPKVIKKYR:VVR:XKXS, ASASPXX:APT:NAIS-AA¹⁷-LYF:IGKTPKIIKKYR:VVR:XKXS, ASASPXX:APT:NAIS-AA¹⁷-LYF:VGRTPKVIKKYR:VVR:XKXS, NDEGLEX:APT:NAIS-AA¹⁷-LYF:RIKPHQGQH:LKKYR:VVR:KXEXR, NDEGLEX:APT:NAIS-AA¹⁷-LYF:RIKPHQGQH:LKKYR:VVR:QXEXR, SSVKXQP:APT:NAIS-AA¹⁷-LYF:EYVRKKPKLIKKYR:VVR:LEXAXA, RNVQXRP:APT:NAIS-AA¹⁷-LYF:EIVRKKPIF:LKKYR:VVR:LAXKXE, KIPKAXX:VPT:NAIS-AA¹⁷-LYF:DENEKVVIKKYR:VVE:GXGXR, GIPEPXX:VPE:NAIS-AA¹⁷-LYF:DENKNVVIKKYR:TVE:SXAXR, SIPKAXX:VPT:NAIS-AA¹⁷-LYF:DEYDKVV:LKKYR:VVE:GXGXR, AVPKAXX:APT:NAIS-AA¹⁷-LYF:DSSNNVIIKKYR:VVK:AXGXH, KVGKAXX:VPT:NAIS-AA¹⁷-LYF:DDMGVPTIKKYR:VAE:XGXR, KASKAXX:VPT:NAIS-AA¹⁷-LYF:DKGVVTY:LKKYR:AVS:EXGXR, GSAGPXX:TPT:NAIS-AA¹⁷-LYF:NDKQQIIIKKYR:VVD:RXGXS, AAPASXX:VPA:NAIS-AA¹⁷-LYF:DAANNVVIKKYR:VVE:AXGXR, STPPTXX:VPT:NAIS-AA¹⁷-LYF:DSANNVV:LKKYR:VVE:SXGXR, RVPSTXX:APV:NAIS-AA¹⁷-LYF:DNGRVLL:LKKYR:VEE:XGXL, ASAAPXX:VPQ:NAIS-AA¹⁷-LYF:VGRKPKVIKKYR:VRS:XKXS, ASASPXX:VSQ:NAIS-AA¹⁷-LYF:IGKTPKI:LKKYR:VKS:XKXS, ASASPXX:VPQ:NAIS-AA¹⁷-LYF:VGRTPKVIKKYR:VKS:XKXS, NDEGLEX:VPT:NAIS-AA¹⁷-LYF:RIKPHQGQH:LKKYR:QHN:KXEXR, NDEGLEX:VPT:NAIS-AA¹⁷-LYF:RIKPHQGQH:LKKYR:EHS:QXEXR, SSVKXQP:SRV:NAIS-AA¹⁷-LYF:EYVRKKPKL:LKKYR:EEH:LEXAXA, RNVQXRP:TQV:NAIS-AA¹⁷-LYF:EIVRKKPIF:LKKYR:EDH:LAXKXE, HVTKPTX:APT:NAIS-AA¹⁷-LYF:DDSSNVIIKKYR:VVR:SXGXH, KIPKAXX:APT:SATS-AA¹⁷-LYY:DENEKVVIRKHR:VVK:GXGXR, GIPEPXX:APT:SATS-AA¹⁷-LYY:DENKNVV:LRKHR:VVK:SXAXR, SIPKAXX:APT:SATS-AA¹⁷-LYY:DEYDKVVIRKHR:VVK:GXGXR, HVTKPTX:APT:SATS-AA¹⁷-LYY:DDSSNVIIRKHR:VVK:SXGXH, YVPKPXX:APT:SATS-AA¹⁷-LYY:DDSSNVI:LRKHR:VVK:SXGXH, TVPKPXX:APT:SATS-AA¹⁷-LYY:DDSSNVIIRKHR:VVK:AXGXH, KVGKAXX:APT:SATS-AA¹⁷-LYY:DDMGVPTIRKHR:VVK:XGXR, KASKAXX:APT:SATS-AA¹⁷-LYY:DKGVVTY:LRKHR:VVK:EXGXR, GSAGPXX:APT:SATS-AA¹⁷-LYY:NDKQQIIIRKHR:VVK:RXGXS, AAPASXX:APT:SATS-AA¹⁷-LYY:DAANNVVIRKHR:VVK:AXGXR, STPPTXX:APT:SATS-AA¹⁷-LYY:DSANNVV:LRKHR:VVK:SXGXR, HVPKPXX:APT:SATS-AA¹⁷-LYY:DDSSNVIIRKHR:VVK:SXGXH, RVPSTXX:APT:SATS-AA¹⁷-LYY:DNGRVLLIRKHR:VVK:XGXL, ASAAPXX:APT:SATS-AA¹⁷-LYY:VGRKPKV:LRKHR:VVK:XKXS, ASASPXX:APT:SATS-AA¹⁷-LYY:IGKTPKIIRKHR:VVK:XKXS, ASASPXX:APT:SATS-AA¹⁷-LYY:VGRTPKVIRKHR:VVK:XKXS, NDEGLEX:APT:SATS-AA¹⁷-LYY:RIKPHQGQH:LRKHR:VVK:KXEXR, NDEGLEX:APT:SATS-AA¹⁷-LYY:RIKPHQGQH:LRKHR:VVK:QXEXR, SSVKXQP:APT:SATS-AA¹⁷-LYY:EYVRKKPKL:LRKHR:VVK:LEXAXA, RNVQXRP:APT:SATS-AA¹⁷-LYY:EIVRKKPIF:LRKHR:VVK:LAXKXE, KIPKAXX:VPT:SATS-AA¹⁷-LYY:DENEKVV:LRKHR:VVE:GXGXR, GIPEPXX:VPE:SATS-AA¹⁷-LYY:DENKNVVIRKHR:TVE:SXAXR, SIPKAXX:VPT:SATS-AA¹⁷-LYY:DEYDKVVIRKHR:VVE:GXGXR, HVTKPTX:APT:SATS-AA¹⁷-LYY:DDSSNVI:LRKHR:VVR:SXGXH, YVPKPXX:APT:SATS-AA¹⁷-LYY:DDSSNVI:LRKHR:VVR:SXGXH, TVPKPXX:APT:SATS-AA¹⁷-LYY:DDSSNVIIRKHR:VVR:AXGXH, KVGKAXX:VPT:SATS-AA¹⁷-LYY:DDMGVPT:LRKHR:VAE:XGXR, KASKAXX:VPT:SATS-AA¹⁷-LYY:DKGVVTY:LRKHR:AVS:EXGXR, GSAGPXX:TPT:SATS-AA¹⁷-LYY:NDKQQIIIRKHR:VVD:RXGXS, AAPASXX:VPA:SATS-AA¹⁷-LYY:DAANNVVIRKHR:VVE:AXGXR, STPPTXX:VPT:SATS-AA¹⁷-LYY:DSANNVVIRKHR:VVE:SXGXR, HVPKPXX:APT:SATS-AA¹⁷-LYY:DDSSNVI:LRKHR:VVR:SXGXH, RVPSTXX:APV:SATS-AA¹⁷-LYY:DNGRVLL:LRKHR:VEE:XGXL, ASAAPXX:VPQ:SATS-AA¹⁷-LYY:VGRKPKVIRKHR:VRS:XKXS, ASASPXX:VSQ:SATS-AA¹⁷-LYY:IGKTPKIIRKHR:VKS:XKXS, ASASPXX:VPQ:SATS-AA¹⁷-LYY:VGRTPKV:LRKHR:VKS:XKXS, NDEGLEX:VPT:SATS-AA¹⁷-LYY:RIKPHQGQH:LRKHR:QHN:KXEXR, NDEGLEX:VPT:SATS-AA¹⁷-LYY:RIKPHQGQH:LRKHR:EHS:QXEXR, SSVKXQP:SRV:SATS-AA¹⁷-LYY:EYVRKKPKL:LRKHR:EEH:LEXAXA, RNVQXRP:TQV:SATS-AA¹⁷-LYY:EIVRKKPIF:LRKHR:EDH:LAXKXE, KIPKAXX:VPT:SPIS-AA¹⁷-LYK:DENEKVV:LKYHY:VAE:GXGXR, GIPEPXX:VPT:SPIS-AA¹⁷-LYK:DENKNVV:LKYHY:VAE:SXAXR, SIPKAXX:VPT:SPIS-AA¹⁷-LYK:DEYDKVV:LKYHY:VAE:GXGXR, HVTKPTX:VPT:SPIS-AA¹⁷-LYK:DDSSNVI:LKYHY:VAE:SXGXH, YVPKPXX:VPT:SPIS-AA¹⁷-LYK:DDSSNVI:LKYHY:VAE:SXGXH, TVPKPXX:VPT:SPIS-AA¹⁷-LYK:DDSSNVI:LKYHY:VAE:AXGXH, AVPKAXX:VPT:SPIS-AA¹⁷-LYK:DSSNNVI:LKYHY:VAE:AXGXH, KASKAXX:VPT:SPIS-AA¹⁷-LYK:DKGVVTY:LKYHY:VAE:EXGXR, GSAGPXX:VPT:SPIS-AA¹⁷-LYK:NDKQQII:LKYHY:VAE:RXGXS, AAPASXX:VPT:SPIS-AA¹⁷-LYK:DAANNVV:LKYHY:VAE:AXGXR, STPPTXX:VPT:SPIS-AA¹⁷-LYK:DSANNVV:LKYHY:VAE:SXGXR, HVPKPXX:VPT:SPIS-AA¹⁷-LYK:DDSSNVI:LKYHY:VAE:SXGXH, RVPSTXX:VPT:SPIS-AA¹⁷-LYK:DNGRVLL:LKYHY:VAE:XGXL, ASAAPXX:VPT:SPIS-AA¹⁷-LYK:VGRKPKV:LKYHY:VAE:XKXS, ASASPXX:VPT:SPIS-AA¹⁷-LYK:IGKTPKI:LKYHY:VAE:XKXS, ASASPXX:VPT:SPIS-AA¹⁷-LYK:VGRTPKV:LKYHY:VAE:XKXS, NDEGLEX:VPT:SPIS-AA¹⁷-LYK:RIKPHQGQH:LKYHY:VAE:KXEXR, NDEGLEX:VPT:SPIS-AA¹⁷-LYK:RIKPHQGQH:LKYHY:VAE:QXEXR, SSVKXQP:VPT:SPIS-AA¹⁷-LYK:EYVRKKPKL:LKYHY:VAE:LEXAXA, RNVQXRP:VPT:SPIS-AA¹⁷-LYK:EIVRKKPIF:LKYHY:VAE:LAXKXE, KIPKAXX:VPT:SPIS-AA¹⁷-LYK:DENEKVV:LKYHY:VVE:GXGXR, GIPEPXX:VPE:SPIS-AA¹⁷-LYK:DENKNVV:LKYHY:TVE:SXAXR, SIPKAXX:VPT:SPIS-AA¹⁷-LYK:DEYDKVV:LKYHY:VVE:GXGXR, HVTKPTX:APT:SPIS-AA¹⁷-LYK:DDSSNVI:LKYHY:VVR:SXGXH, YVPKPXX:APT:SPIS-AA¹⁷-LYK:DDSSNVI:LKYHY:VVR:SXGXH, TVPKPXX:APT:SPIS-AA¹⁷-LYK:DDSSNVI:LKYHY:VVR:AXGXH, AVPKAXX:APT:SPIS-AA¹⁷-LYK:DSSNNVI:LKYHY:VVK:AXGXH, KASKAXX:VPT:SPIS-AA¹⁷-LYK:DKGVVTY:LKYHY:AVS:EXGXR, GSAGPXX:TPT:SPIS-AA¹⁷-LYK:NDKQQII:LKYHY:VVD:RXGXS, AAPASXX:VPA:SPIS-AA¹⁷-LYK:DAANNVV:LKYHY:VVE:AXGXR, STPPTXX:VPT:SPIS-AA¹⁷-LYK:DSANNVV:LKYHY:VVE:SXGXR, HVPKPXX:APT:SPIS-AA¹⁷-LYK:DDSSNVI:LKYHY:VVR:SXGXH, RVPSTXX:APV:SPIS-AA¹⁷-LYK:DNGRVLL:LKYHY:VEE:XGXL, ASAAPXX:VPQ:SPIS-AA¹⁷-LYK:VGRKPKV:LKYHY:VRS:XKXS, ASASPXX:VSQ:SPIS-AA¹⁷-LYK:IGKTPKI:LKYHY:VKS:XKXS, ASASPXX:VPQ:SPIS-AA¹⁷-LYK:VGRTPKV:LKYHY:VKS:XKXS, NDEGLEX:VPT:SPIS-AA¹⁷-LYK:RIKPHQGQH:LKYHY:QHN:KXEXR, NDEGLEX:VPT:SPIS-AA¹⁷-LYK: RIKPHQGQH:LKYHY:EHS:QXEXR, SSVKXQP:SRV:SPIS-AA¹⁷-LYK:EYVRKKPKL:LKYHY:EEH:LEXAXA, RNVQXRP:TQV:SPIS-AA¹⁷-LYK:EIVRKKPIF:LKYHY:EDH:LAXKXE, KIPKAXX:VPT:EPIS-AA¹⁷-LYL:DENEKVV:KFKYE:AVS:GXGXR, GIPEPXX:VPT:EPIS-AA¹⁷-LYL:DENKNVV:KFKYE:AVS:SXAXR, SIPKAXX:VPT:EPIS-AA¹⁷-LYL:DEYDKVV:KFKYE:AVS:GXGXR, HVTKPTX:VPT:EPIS-AA¹⁷-LYL:DDSSNVI:KFKYE:AVS:SXGXH, YVPKPXX:VPT:EPIS-AA¹⁷-LYL:DDSSNVI:KFKYE:AVS:SXGXH, TVPKPXX:VPT:EPIS-AA¹⁷-LYL:DDSSNVI:KFKYE:AVS:AXGXH, AVPKAXX:VPT:EPIS-AA¹⁷-LYL:DSSNNVI:KFKYE:AVS:AXGXH, KVGKAXX:VPT:EPIS-AA¹⁷-LYL:DDMGVPT:KFKYE:AVS:XGXR, GSAGPXX:VPT:EPIS-AA¹⁷-LYL:NDKQQII:KFKYE:AVS:RXGXS, AAPASXX:VPT:EPIS-AA¹⁷-LYL:DAANNVV:KFKYE:AVS:AXGXR, STPPTXX:VPT:EPIS-AA¹⁷-LYL:DSANNVV:KFKYE:AVS:SXGXR, HVPKPXX:VPT:EPIS-AA¹⁷-LYL:DDSSNVI:KFKYE:AVS:SXGXH, RVPSTXX:VPT:EPIS-AA¹⁷-LYL:DNGRVLL:KFKYE:AVS:XGXL, ASAAPXX:VPT:EPIS-AA¹⁷-LYL:VGRKPKV:KFKYE:AVS:XKXS, ASASPXX:VPT:EP IS-AA¹⁷-LYL:IGKTPKI:KFKYE:AVS:XKXS, ASASPXX:VPT:EPIS-AA¹⁷-LYL:VGRTPKV:KFKYE:AVS:XKXS, NDEGLEX:VPT:EPIS-AA¹⁷-LYL:RIKPHQGQH:KFKYE:AVS:KXEXR, NDEGLEX:VPT:EPIS-AA¹⁷-LYL:RIKPHQGQH:KFKYE:AVS:QXEXR, SSVKXQP:VPT:EPIS-AA¹⁷-LYL:EYVRKKPKL:KFKYE:AVS:LEXAXA, RNVQXRP:VPT:EPIS-AA¹⁷-LYL:EIVRKKPIF:KFKYE:AVS:LAXKXE, KIPKAXX:VPT:EPIS-AA¹⁷-LYL:DENEKVV:KFKYE:VVE:GXGXR, GIPEPXX:VPE:EPIS-AA¹⁷-LYL:DENKNVV:KFKYE:TVE:SXAXR, SIPKAXX:VPT:EPIS-AA¹⁷-LYL:DEYDKVV:KFKYE:VVE:GXGXR, HVTKPTX:APT:EPIS-AA¹⁷-LYL:DDSSNVI:KFKYE:VVR:SXGXH, YVPKPXX:APT:EPIS-AA¹⁷-LYL:DDSSNVI:KFKYE:VVR:SXGXH, TVPKPXX:APT:EPIS-AA¹⁷-LYL:DDSSNVI:KFKYE:VVR:AXGXH, AVPKAXX:APT:EPIS-AA¹⁷-LYL:DSSNNVI:KFKYE:VVK:AXGXH, KVGKAXX:VPT:EPIS-AA¹⁷-LYL:DDMGVPT:KFKYE:VAE:XGXR, GSAGPXX:TPT:EPIS-AA¹⁷-LYL:NDKQQII:KFKYE:VVD:RXGXS, AAPASXX:VPA:EPIS-AA¹⁷-LYL:DAANNVV:KFKYE:VVE:AXGXR, STPPTXX:VPT:EPIS-AA¹⁷-LYL:DSANNVV:KFKYE:VVE:SXGXR, HVPKPXX:APT:EPIS-AA¹⁷-LYL:DDSSNVI:KFKYE:VVR:SXGXH, RVPSTXX:APV:EPIS-AA¹⁷-LYL:DNGRVLL:KFKYE:VEE:XGXL, ASAAPXX:VPQ:EPIS-AA¹⁷-LYL:VGRKPKV:KFKYE:VRS:XKXS, ASASPXX:VSQ:EPIS-AA¹⁷-LYL:IGKTPKI:KFKYE:VKS:XKXS, ASASPXX:VPQ:EPIS-AA¹⁷-LYL:VGRTPKV:KFKYE:VKS:XKXS, NDEGLEX:VPT:EPIS-AA¹⁷-LYL:RIKPHQGQH:KFKYE:QHN:KXEXR, NDEGLEX:VPT:EPIS-AA¹⁷-LYL:RIKPHQGQH:KFKYE:EHS:QXEXR, SSVKXQP:SRV:EPIS-AA¹⁷-LYL:EYVRKKPKL:KFKYE:EEH:LEXAXA, RNVQXRP:TQV:EPIS-AA¹⁷-LYL:EIVRKKPIF:KFKYE:EDH:LAXKXE, KIPKAXX:TPT:SPIN-AA¹⁷-LYF:DENEKVV:YGKIP:VVD:GXGXR, GIPEPXX:TPT:SPIN-AA¹⁷-LYF:DENKNVV:YGKIP:VVD:SXAXR, SIPKAXX:TPT:SPIN-AA¹⁷-LYF:DEYDKVV:YGKIP:VVD:GXGXR, HVTKPTX:TPT:SPIN-AA¹⁷-LYF:DDSSNVI:YGKIP:VVD:SXGXH, YVPKPXX:TPT:SPIN-AA¹⁷-LYF:DDSSNVI:YGKIP:VVD:SXGXH, TVPKPXX:TPT:SPIN-AA¹⁷-LYF:DDSSNVI:YGKIP:VVD:AXGXH, AVPKAXX:TPT:SPIN-AA¹⁷-LYF:DSSNNVI:YGKIP:VVD:AXGXH, KVGKAXX:TPT:SPIN-AA¹⁷-LYF:DDMGVPT:YGKIP:VVD:XGXR, KASKAXX:TPT:SPIN-AA¹⁷-LYF:DKGVVTY:YGKIP:VVD:EXGXR, AAPASXX:TPT:SPIN-AA¹⁷-LYF: DAANNVV:YGKIP:VVD:AXGXR, STPPTXX:TPT:SPIN-AA¹⁷-LYF: DSANNVV:YGKIP:VVD:SXGXR, HVPKPXX:TPT:SPIN-AA¹⁷-LYF:DDSSNVI:YGKIP:VVD:SXGXH, RVPSTXX:TPT:SPIN-AA¹⁷-LYF:DNGRVLLYGKIP:VVD:XGXL, ASAAPXX:TPT:SPIN-AA¹⁷-LYF:VGRKPKV:YGKIP:VVD:XKXS, ASASPXX:TPT:SPIN-AA¹⁷-LYF:IGKTPKI:YGKIP:VVD:XKXS, ASASPXX:TPT:SPIN-AA¹⁷-LYF:VGRTPKV:YGKIP:VVD:XKXS, NDEGLEX:TPT:SPIN-AA¹⁷-LYF:RIKPHQGQH:YGKIP:VVD:KXEXR, NDEGLEX:TPT:SPIN-AA¹⁷-LYF:RIKPHQGQH:YGKIP:VVD:QXEXR, SSVKXQP:TPT:SPIN-AA¹⁷-LYF:EYVRKKPKL:YGKIP:VVD:LEXAXA, RNVQXRP:TPT:SPIN-AA¹⁷-LYF:EIVRKKPIF:YGKIP:VVD:LAXKXE, KIPKAXX:VPT:SPIN-AA¹⁷-LYF:DENEKVV:YGKIP:VVE:GXGXR, GIPEPXX:VPE:SPIN-AA¹⁷-LYF:DENKNVV:YGKIP:TVE:SXAXR, SIPKAXX:VPT:SPIN-AA¹⁷-LYF:DEYDKVV:YGKIP:VVE:GXGXR, HVTKPTX:APT:SPIN-AA¹⁷-LYF:DDSSNVI:YGKIP:VVR:SXGXH, YVPKPXX:APT:SPIN-AA¹⁷-LYF:DDSSNVI:YGKIP:VVR:SXGXH, TVPKPXX:APT:SPIN-AA¹⁷-LYF:DDSSNVI:YGKIP:VVR:AXGXH, AVPKAXX:APT:SPIN-AA¹⁷-LYF:DSSNNVI:YGKIP:VVK:AXGXH, KVGKAXX:VPT:SPIN-AA¹⁷-LYF:DDMGVPT:YGKIP:VAE:XGXR, KASKAXX:VPT:SPIN-AA¹⁷-LYF:DKGVVTY:YGKIP:AVS:EXGXR, AAPASXX:VPA:SPIN-AA¹⁷-LYF:DAANNVV:YGKIP:VVE:AXGXR, STPPTXX:VPT:SPIN-AA¹⁷-LYF:DSANNVV:YGKIP:VVE:SXGXR, HVPKPXX:APT:SPIN-AA¹⁷-LYF:DDSSNVI:YGKIP:VVR:SXGXH, RVPSTXX:APV:SPIN-AA¹⁷-LYF:DNGRVLLYGKIP:VEE:XGXL, ASAAPXX:VPQ:SPIN-AA¹⁷-LYF:VGRKPKV:YGKIP:VRS:XKXS, ASASPXX:VSQ:SPIN-AA¹⁷-LYF:IGKTPKI:YGKIP:VKS:XKXS, ASASPXX:VPQ:SPIN-AA¹⁷-LYF:VGRTPKV:YGKIP:VKS:XKXS, NDEGLEX:VPT:SPIN-AA¹⁷-LYF:RIKPHQGQH:YGKIP:QHN:KXEXR, NDEGLEX:VPT:SPIN-AA¹⁷-LYF:RIKPHQGQH:YGKIP:EHS:QXEXR, SSVKXQP:SRV:SPIN-AA¹⁷-LYF:EYVRKKPKL:YGKIP:EEH:LEXAXA, RNVQXRP:TQV:SPIN-AA¹⁷-LYF:EIVRKKPIF:YGKIP:EDH:LAXKXE, KIPKAXX:VPA:SPIS-AA¹⁷-LYI:DENEKVV:YKQYE:VVE:GXGXR, GIPEPXX:VPA:SPIS-AA¹⁷-LYI:DENKNVV:YKQYE:VVE:SXAXR, SIPKAXX:VPA:SPIS-AA¹⁷-LYI:DEYDKVV:YKQYE:VVE:GXGXR, HVTKPTX:VPA:SPIS-AA¹⁷-LYI:DDSSNVI:YKQYE:VVE:SXGXH, YVPKPXX:VPA:SPIS-AA¹⁷-LYI:DDSSNVI:YKQYE:VVE:SXGXH, TVPKPXX:VPA:SPIS-AA¹⁷-LYI:DDSSNVI:YKQYE:VVE:AXGXH, AVPKAXX:VPA:SPIS-AA¹⁷-LYI:DSSNNVI:YKQYE:VVE:AXGXH, KVGKAXX:VPA:SPIS-AA¹⁷-LYI:DDMGVPT:YKQYE:VVE:XGXR, KASKAXX:VPA:SPIS-AA¹⁷-LYI:DKGVVTY:YKQYE:VVE:EXGXR, GSAGPXX:VPA:SPIS-AA¹⁷-LYI:NDKQQII:YKQYE:VVE:RXGXS, STPPTXX:VPA:SPIS-AA¹⁷-LYI:DSANNVV:YKQYE:VVE:SXGXR, HVPKPXX:VPA:SPIS-AA¹⁷-LYI:DDSSNVI:YKQYE:VVE:SXGXH, RVPSTXX:VPA:SPIS-AA¹⁷-LYI:DNGRVLLYKQYE:VVE:XGXL, ASAAPXX:VPA:SPIS-AA¹⁷-LYI:VGRKPKV:YKQYE:VVE:XKXS, ASASPXX:VPA:SPIS-AA¹⁷-LYI:IGKTPKI:YKQYE:VVE:XKXS, ASASPXX:VPA:SPIS-AA¹⁷-LYI:VGRTPKV:YKQYE:VVE:XKXS, NDEGLEX:VPA:SPIS-AA¹⁷-LYI:RIKPHQGQH:YKQYE:VVE:KXEXR, NDEGLEX:VPA:SPIS-AA¹⁷-LYI:RIKPHQGQH:YKQYE:VVE:QXEXR, SSVKXQP:VPA:SPIS-AA¹⁷-LYI:EYVRKKPKL:YKQYE:VVE:LEXAXA, RNVQXRP:VPA:SPIS-AA¹⁷-LYI:EIVRKKPIF:YKQYE:VVE:LAXKXE, KIPKAXX:VPT:SPIS-AA¹⁷-LYI:DENEKVV:YKQYE:VVE:GXGXR, GIPEPXX:VPE:SPIS-AA¹⁷-LYI:DENKNVV:YKQYE:TVE:SXAXR, SIPKAXX:VPT:SPIS-AA¹⁷-LYI:DEYDKVV:YKQYE:VVE:GXGXR, HVTKPTX:APT:SPIS-AA¹⁷-LYI:DDSSNVI:YKQYE:VVR:SXGXH, YVPKPXX:APT:SPIS-AA¹⁷-LYI:DDSSNVI:YKQYE:VVR:SXGXH, TVPKPXX:APT:SPIS-AA¹⁷-LYI:DDSSNVI:YKQYE:VVR:AXGXH, AVPKAXX:APT:SPIS-AA¹⁷-LYI:DSSNNVI:YKQYE:VVK:AXGXH, KVGKAXX:VPT:SPIS-AA¹⁷-LYI:DDMGVPT:YKQYE:VAE:XGXR, KASKAXX:VPT:SPIS-AA¹⁷-LYI:DKGVVTY:YKQYE:AVS:EXGXR, GSAGPXX:TPT:SPIS-AA¹⁷-LYI:NDKQQII:YKQYE:VVD:RXGXS, STPPTXX:VPT:SPIS-AA¹⁷-LYI:DSANNVV:YKQYE:VVE:SXGXR, HVPKPXX:APT:SPIS-AA¹⁷-LYI:DDSSNVI:YKQYE:VVR:SXGXH, RVPSTXX:APV:SPIS-AA¹⁷-LYI:DNGRVLLYKQYE:VEE:XGXL, ASAAPXX:VPQ:SPIS-AA¹⁷-LYI:VGRKPKV:YKQYE:VRS:XKXS, ASASPXX:VSQ:SPIS-AA¹⁷-LYI:IGKTPKI:YKQYE:VKS:XKXS, ASASPXX:VPQ:SPIS-AA¹⁷-LYI:VGRTPKV:YKQYE:VKS:XKXS, NDEGLEX:VPT:SPIS-AA¹⁷-LYI:RIKPHQGQH:YKQYE:QHN:KXEXR, NDEGLEX:VPT:SPIS-AA¹⁷-LYI:RIKPHQGQH:YKQYE:EHS:QXEXR, SSVKXQP:SRV:SPIS-AA¹⁷-LYI:EYVRKKPKL:YKQYE:EEH:LEXAXA, RNVQXRP:TQV:SPIS-AA¹⁷-LYI:EIVRKKPIF:YKQYE:EDH:LAXKXE, KIPKAXX:VPT:SPIS-AA¹⁷-LFI:DENEKVV:YKQYE:VVE:GXGXR, GIPEPXX:VPT:SPIS-AA¹⁷-LFI:DENKNVV:YKQYE:VVE:SXAXR, SIPKAXX:VPT:SPIS-AA¹⁷-LFI:DEYDKVV:YKQYE:VVE:GXGXR, HVTKPTX:VPT:SPIS-AA¹⁷-LFI:DDSSNVI:YKQYE:VVE:SXGXH, YVPKPXX:VPT:SPIS-AA¹⁷-LFI:DDSSNVI:YKQYE:VVE:SXGXH, TVPKPXX:VPT:SPIS-AA¹⁷-LFI:DDSSNVI:YKQYE:VVE:AXGXH, AVPKAXX:VPT:SPIS-AA¹⁷-LFI:DSSNNVI:YKQYE:VVE:AXGXH, KVGKAXX:VPT:SPIS-AA¹⁷-LFI:DDMGVPT:YKQYE:VVE:XGXR, KASKAXX:VPT:SPIS-AA¹⁷-LFI:DKGVVTY:YKQYE:VVE:EXGXR, GSAGPXX:VPT:SPIS-AA¹⁷-LFI:NDKQQII:YKQYE:VVE:RXGXS, AAPASXX:VPT:SPIS-AA¹⁷-LFI:DAANNVV:YKQYE:VVE:AXGXR, HVPKPXX:VPT:SPIS-AA¹⁷-LFI:DDSSNVI:YKQYE:VVE:SXGXH, RVPSTXX:VPT:SPIS-AA¹⁷-LFI:DNGRVLLYKQYE:VVE:XGXL, ASAAPXX:VPT:SPIS-AA¹⁷-LFI:VGRKPKV:YKQYE:VVE:XKXS, ASASPXX:VPT:SPIS-AA¹⁷-LFI:IGKTPKI:YKQYE:VVE:XKXS, ASASPXX:VPT:SPIS-AA¹⁷-LFI:VGRTPKV:YKQYE:VVE:XKXS, NDEGLEX:VPT:SPIS-AA¹⁷-LFI:RIKPHQGQH:YKQYE:VVE:KXEXR, NDEGLEX:VPT:SPIS-AA¹⁷-LFI:RIKPHQGQH:YKQYE:VVE:QXEXR, SSVKXQP:VPT:SPIS-AA¹⁷-LFI:EYVRKKPKLYKQYE:VVE:LEXAXA, RNVQXRP:VPT:SPIS-AA¹⁷-LFI:EIVRKKPIF:YKQYE:VVE:LAXKXE, GIPEPXX:VPE:SPIS-AA¹⁷-LFI:DENKNVV:YKQYE:TVE:SXAXR, HVTKPTX:APT:SPIS-AA¹⁷-LFI:DDSSNVI:YKQYE:VVR:SXGXH, YVPKPXX:APT:SPIS-AA¹⁷-LFI:DDSSNVI:YKQYE:VVR:SXGXH, TVPKPXX:APT:SPIS-AA¹⁷-LFI:DDSSNVI:YKQYE:VVR:AXGXH, AVPKAXX:APT:SPIS-AA¹⁷-LFI:DSSNNVI:YKQYE:VVK:AXGXH, KVGKAXX:VPT:SPIS-AA¹⁷-LFI:DDMGVPT:YKQYE:VAE:XGXR, KASKAXX:VPT:SPIS-AA¹⁷-LFI:DKGVVTY:YKQYE:AVS:EXGXR, GSAGPXX:TPT:SPIS-AA¹⁷-LFI:NDKQQII:YKQYE:VVD:RXGXS, AAPASXX:VPA:SPIS-AA¹⁷-LFI:DAANNVV:YKQYE:VVE:AXGXR, HVPKPXX:APT:SPIS-AA¹⁷-LFI:DDSSNVI:YKQYE:VVR:SXGXH, RVPSTXX:APV:SPIS-AA¹⁷-LFI:DNGRVLLYKQYE:VEE:XGXL, ASAAPXX:VPQ:SPIS-AA¹⁷-LFI:VGRKPKV:YKQYE:VRS:XKXS, ASASPXX:VSQ:SPIS-AA¹⁷-LFLIGKTPKI:YKQYE:VKS:XKXS, ASASPXX:VPQ:SPIS-AA¹⁷-LFI:VGRTPKV:YKQYE:VKS:XKXS, NDEGLEX:VPT:SPIS-AA¹⁷-LFI:RIKPHQGQH:YKQYE:QHN:KXEXR, NDEGLEX:VPT:SPIS-AA¹⁷-LFI:RIKPHQGQH:YKQYE:EHS:QXEXR, SSVKXQP:SRV:SPIS-AA¹⁷-LFI:EYVRKKPKL:YKQYE:EEH:LEXAXA, RNVQXRP:TQV:SPIS-AA¹⁷-LFI:EIVRKKPIF:YKQYE:EDH:LAXKXE, KIPKAXX:APV:KPLS-AA¹⁷-LYV:DENEKVV:DHHKD:VEE:GXGXR, GIPEPXX:APV:KPLS-AA¹⁷-LYV:DENKNVV:DHHKD:VEE:SXAXR, SIPKAXX:APV:KPLS-AA¹⁷-LYV:DEYDKVV:DHHKD:VEE:GXGXR, HVTKPTX:APV:KPLS-AA¹⁷-LYV:DDSSNVI:DHHKD:VEE:SXGXH, YVPKPXX:APV:KPLS-AA¹⁷-LYV:DDSSNVI:DHHKD:VEE:SXGXH, TVPKPXX:APV:KPLS-AA¹⁷-LYV:DDSSNVI:DHHKD:VEE:AXGXH, AVPKAXX:APV:KPLS-AA¹⁷-LYV:DSSNNVI:DHHKD:VEE:AXGXH, KVGKAXX:APV:KPLS-AA¹⁷-LYV:DDMGVPT:DHHKD:VEE:XGXR, KASKAXX:APV:KPLS-AA¹⁷-LYV:DKGVVTY:DHHKD:VEE:EXGXR, GSAGPXX:APV:KPLS-AA¹⁷-LYV:NDKQQII:DHHKD:VEE:RXGXS, AAPASXX:APV:KPLS-AA¹⁷-LYV:DAANNVV:DHHKD:VEE:AXGXR, STPPTXX:APV:KPLS-AA¹⁷-LYV:DSANNVV:DHHKD:VEE:SXGXR, HVPKPXX:APV:KPLS-AA¹⁷-LYV:DDSSNVI:DHHKD:VEE:SXGXH, ASAAPXX:APV:KPLS-AA¹⁷-LYV:VGRKPKV:DHHKD:VEE:XKXS, ASASPXX:APV:KPLS-AA¹⁷-LYV:IGKTPKI:DHHKD:VEE:XKXS, ASASPXX:APV:KPLS-AA¹⁷-LYV:VGRTPKV:DHHKD:VEE:XKXS, NDEGLEX:APV:KPLS-AA¹⁷-LYV:RIKPHQGQH:DHHKD:VEE:KXEXR, NDEGLEX:APV:KPLS-AA¹⁷-LYV:RIKPHQGQH:DHHKD:VEE:QXEXR, SSVKXQP:APV:KPLS-AA¹⁷-LYV:EYVRKKPKL:DHHKD:VEE:LEXAXA, RNVQXRP:APV:KPLS-AA¹⁷-LYV:EIVRKKPIF:DHHKD:VEE:LAXKXE, KIPKAXX:VPT:KPLS-AA¹⁷-LYV:DENEKVV:DHHKD:VVE:GXGXR, GIPEPXX:VPE:KPLS-AA¹⁷-LYV:DENKNVV:DHHKD:TVE:SXAXR, SIPKAXX:VPT:KPLS-AA¹⁷-LYV:DEYDKVV:DHHKD:VVE:GXGXR, HVTKPTX:APT:KPLS-AA¹⁷-LYV:DDSSNVI:DHHKD:VVR:SXGXH, YVPKPXX:APT:KPLS-AA¹⁷-LYV:DDSSNVI:DHHKD:VVR:SXGXH, TVPKPXX:APT:KPLS-AA¹⁷-LYV:DDSSNVI:DHHKD:VVR:AXGXH, AVPKAXX:APT:KPLS-AA¹⁷-LYV:DSSNNVI:DHHKD:VVK:AXGXH, KVGKAXX:VPT:KPLS-AA¹⁷-LYV:DDMGVPT:DHHKD:VAE:XGXR, KASKAXX:VPT:KPLS-AA¹⁷-LYV:DKGVVTY:DHHKD:AVS:EXGXR, GSAGPXX:TPT:KPLS-AA¹⁷-LYV:NDKQQII:DHHKD:VVD:RXGXS, AAPASXX:VPA:KPLS-AA¹⁷-LYV:DAANNVV:DHHKD:VVE:AXGXR, STPPTXX:VPT:KPLS-AA¹⁷-LYV:DSANNVV:DHHKD:VVE:SXGXR, HVPKPXX:APT:KPLS-AA¹⁷-LYV:DDSSNVI:DHHKD:VVR:SXGXH, ASAAPXX:VPQ:KPLS-AA¹⁷-LYV:VGRKPKV:DHHKD:VRS:XKXS, ASASPXX:VSQ:KPLS-AA¹⁷-LYV:IGKTPKI:DHHKD:VKS:XKXS, ASASPXX:VPQ:KPLS-AA¹⁷-LYV:VGRTPKV:DHHKD:VKS:XKXS, NDEGLEX:VPT:KPLS-AA¹⁷-LYV:RIKPHQGQH:DHHKD:QHN:KXEXR, NDEGLEX:VPT:KPLS-AA¹⁷-LYV:RIKPHQGQH:DHHKD:EHS:QXEXR, SSVKXQP:SRV:KPLS-AA¹⁷-LYV:EYVRKKPKL:DHHKD:EEH:LEXAXA, RNVQXRP:TQV:KPLS-AA¹⁷-LYV:EIVRKKPIF:DHHKD:EDH:LAXKXE, KIPKAXX:VPQ:EPLP-AA¹⁷-VYY:DENEKVV:EQLSN:VRS:GXGXR, GIPEPXX:VPQ:EPLP-AA¹⁷-VYY:DENKNVV:EQLSN:VRS:SXAXR, SIPKAXX:VPQ:EPLP-AA¹⁷-VYY:DEYDKVV:EQLSN:VRS:GXGXR, HVTKPTX:VPQ:EPLP-AA¹⁷-VYY:DDSSNVI:EQLSN:VRS:SXGXH, YVPKPXX:VPQ:EPLP-AA¹⁷-VYY:DDSSNVI:EQLSN:VRS:SXGXH, TVPKPXX:VPQ:EPLP-AA¹⁷-VYY:DDSSNVI:EQLSN:VRS:AXGXH, AVPKAXX:VPQ:EPLP-AA¹⁷-VYY:DSSNNVI:EQLSN:VRS:AXGXH, KVGKAXX:VPQ:EPLP-AA¹⁷-VYY:DDMGVPT:EQLSN:VRS:XGXR, KASKAXX:VPQ:EPLP-AA¹⁷-VYY:DKGVVTY:EQLSN:VRS:EXGXR, GSAGPXX:VPQ:EPLP-AA¹⁷-VYY:NDKQQII:EQLSN:VRS:RXGXS, AAPASXX:VPQ:EPLP-AA¹⁷-VYY:DAANNVV:EQLSN:VRS:AXGXR, STPPTXX:VPQ:EPLP-AA¹⁷-VYY:DSANNVV:EQLSN:VRS:SXGXR, HVPKPXX:VPQ:EPLP-AA¹⁷-VYY:DDSSNVI:EQLSN:VRS:SXGXH, RVPSTXX:VPQ:EPLP-AA¹⁷-VYY:DNGRVLL:EQLSN:VRS:XGXL, ASASPXX:VPQ:EPLP-AA¹⁷-VYY:IGKTPKI:EQLSN:VRS:XKXS, ASASPXX:VPQ:EPLP-AA¹⁷-VYY:VGRTPKV:EQLSN:VRS:XKXS, NDEGLEX:VPQ:EPLP-AA¹⁷-VYY:RIKPHQGQH:EQLSN:VRS:KXEXR, NDEGLEX:VPQ:EPLP-AA¹⁷-VYY:RIKPHQGQH:EQLSN:VRS:QXEXR, SSVKXQP:VPQ:EPLP-AA¹⁷-VYY:EYVRKKPKL:EQLSN:VRS:LEXAXA, RNVQXRP:VPQ:EPLP-AA¹⁷-VYY:EIVRKKPIF:EQLSN:VRS:LAXKXE, KIPKAXX:VPT:EPLP-AA¹⁷-VYY:DENEKVV:EQLSN:VVE:GXGXR, GIPEPXX:VPE:EPLP-AA¹⁷-VYY:DENKNVV:EQLSN:TVE:SXAXR, SIPKAXX:VPT:EPLP-AA¹⁷-VYY:DEYDKVV:EQLSN:VVE:GXGXR, HVTKPTX:APT:EPLP-AA¹⁷-VYY:DDSSNVI:EQLSN:VVR:SXGXH, YVPKPXX:APT:EPLP-AA¹⁷-VYY:DDSSNVI:EQLSN:VVR:SXGXH, TVPKPXX:APT:EPLP-AA¹⁷-VYY:DDSSNVI:EQLSN:VVR:AXGXH, AVPKAXX:APT:EPLP-AA¹⁷-VYY:DSSNNVI:EQLSN:VVK:AXGXH, KVGKAXX:VPT:EPLP-AA¹⁷-VYY:DDMGVPT:EQLSN:VAE:XGXR, KASKAXX:VPT:EPLP-AA¹⁷-VYY:DKGVVTY:EQLSN:AVS:EXGXR, GSAGPXX:TPT:EPLP-AA¹⁷-VYY:NDKQQII:EQLSN:VVD:RXGXS, AAPASXX:VPA:EPLP-AA¹⁷-VYY:DAANNVV:EQLSN:VVE:AXGXR, STPPTXX:VPT:EPLP-AA¹⁷-VYY:DSANNVV:EQLSN:VVE:SXGXR, HVPKPXX:APT:EPLP-AA¹⁷-VYY:DDSSNVI:EQLSN:VVR:SXGXH, RVPSTXX:APV:EPLP-AA¹⁷-VYY:DNGRVLL:EQLSN:VEE:XGXL, ASASPXX:VSQ:EPLP-AA¹⁷-VYY:IGKTPKI:EQLSN:VKS:XKXS, ASASPXX:VPQ:EPLP-AA¹⁷-VYY:VGRTPKV:EQLSN:VKS:XKXS, NDEGLEX:VPT:EPLP-AA¹⁷-VYY:RIKPHQGQH:EQLSN:QHN:KXEXR, NDEGLEX:VPT:EPLP-AA¹⁷-VYY:RIKPHQGQH:EQLSN:EHS:QXEXR, SSVKXQP:SRV:EPLP-AA¹⁷-VYY:EYVRKKPKL:EQLSN:EEH:LEXAXA, RNVQXRP:TQV:EPLP-AA¹⁷-VYY:EIVRKKPIF:EQLSN:EDH:LAXKXE, KIPKAXX:VSQ:EPLT-AA¹⁷-LYY:DENEKVV:EQLSN:VKS:GXGXR, GIPEPXX:VSQ:EPLT-AA¹⁷-LYY:DENKNVV:EQLSN:VKS:SXAXR, SIPKAXX:VSQ:EPLT-AA¹⁷-LYY:DEYDKVV:EQLSN:VKS:GXGXR, HVTKPTX:VSQ:EPLT-AA¹⁷-LYY:DDSSNVI:EQLSN:VKS:SXGXH, YVPKPXX:VSQ:EPLT-AA¹⁷-LYY:DDSSNVI:EQLSN:VKS:SXGXH, TVPKPXX:VSQ:EPLT-AA¹⁷-LYY:DDSSNVI:EQLSN:VKS:AXGXH, AVPKAXX:VSQ:EPLT-AA¹⁷-LYY:DSSNNVI:EQLSN:VKS:AXGXH, KVGKAXX:VSQ:EPLT-AA¹⁷-LYY:DDMGVPT:EQLSN:VKS:XGXR, KASKAXX:VSQ:EPLT-AA¹⁷-LYY:DKGVVTY:EQLSN:VKS:EXGXR, GSAGPXX:VSQ:EPLT-AA¹⁷-LYY:NDKQQII:EQLSN:VKS:RXGXS, AAPASXX:VSQ:EPLT-AA¹⁷-LYY:DAANNVV:EQLSN:VKS:AXGXR, STPPTXX:VSQ:EPLT-AA¹⁷-LYY:DSANNVV:EQLSN:VKS:SXGXR, HVPKPXX:VSQ:EPLT-AA¹⁷-LYY:DDSSNVI:EQLSN:VKS:SXGXH, RVPSTXX:VSQ:EPLT-AA¹⁷-LYY:DNGRVLL:EQLSN:VKS:XGXL, ASAAPXX:VSQ:EPLT-AA¹⁷-LYY:VGRKPKV:EQLSN:VKS:XKXS, ASASPXX:VSQ:EPLT-AA¹⁷-LYY:VGRTPKV:EQLSN:VKS:XKXS, NDEGLEX:VSQ:EPLT-AA¹⁷-LYY:RIKPHQGQH:EQLSN:VKS:KXEXR, NDEGLEX:VSQ:EPLT-AA¹⁷-LYY:RIKPHQGQH:EQLSN:VKS:QXEXR, SSVKXQP:VSQ:EPLT-AA¹⁷-LYY:EYVRKKPKL:EQLSN:VKS:LEXAXA, RNVQXRP:VSQ:EPLT-AA¹⁷-LYY:EIVRKKPIF:EQLSN:VKS:LAXKXE, KIPKAXX:VPT:EPLT-AA¹⁷-LYY:DENEKVV:EQLSN:VVE:GXGXR, GIPEPXX:VPE:EPLT-AA¹⁷-LYY:DENKNVV:EQLSN:TVE:SXAXR, SIPKAXX:VPT:EPLT-AA¹⁷-LYY:DEYDKVV:EQLSN:VVE:GXGXR, HVTKPTX:APT:EPLT-AA¹⁷-LYY:DDSSNVI:EQLSN:VVR:SXGXH, YVPKPXX:APT:EPLT-AA¹⁷-LYY:DDSSNVI:EQLSN:VVR:SXGXH, TVPKPXX:APT:EPLT-AA¹⁷-LYY:DDSSNVI:EQLSN:VVR:AXGXH, AVPKAXX:APT:EPLT-AA¹⁷-LYY:DSSNNVI:EQLSN:VVK:AXGXH, KVGKAXX:VPT:EPLT-AA¹⁷-LYY:DDMGVPT:EQLSN:VAE:XGXR, KASKAXX:VPT:EPLT-AA¹⁷-LYY:DKGVVTY:EQLSN:AVS:EXGXR, GSAGPXX:TPT:EPLT-AA¹⁷-LYY:NDKQQII:EQLSN:VVD:RXGXS, AAPASXX:VPA:EPLT-AA¹⁷-LYY:DAANNVV:EQLSN:VVE:AXGXR, STPPTXX:VPT:EPLT-AA¹⁷-LYY:DSANNVV:EQLSN:VVE:SXGXR, HVPKPXX:APT:EPLT-AA¹⁷-LYY:DDSSNVI:EQLSN:VVR:SXGXH, RVPSTXX:APV:EPLT-AA¹⁷-LYY:DNGRVLL:EQLSN:VEE:XGXL, ASAAPXX:VPQ:EPLT-AA¹⁷-LYY:VGRKPKV:EQLSN:VRS:XKXS, ASASPXX:VPQ:EPLT-AA¹⁷-LYY:VGRTPKV:EQLSN:VKS:XKXS, NDEGLEX:VPT:EPLT-AA¹⁷-LYY:RIKPHQGQH:EQLSN:QHN:KXEXR, NDEGLEX:VPT:EPLT-AA¹⁷-LYY:RIKPHQGQH:EQLSN:EHS:QXEXR, SSVKXQP:SRV:EPLT-AA¹⁷-LYY:EYVRKKPKL:EQLSN:EEH:LEXAXA, RNVQXRP:TQV:EPLT-AA¹⁷-LYY:EIVRKKPIF:EQLSN:EDH:LAXKXE, KIPKAXX:VPQ:EPLT-AA¹⁷-LYY:DENEKVV:EQLSN:VKS:GXGXR, GIPEPXX:VPQ:EPLT-AA¹⁷-LYY:DENKNVV:EQLSN:VKS:SXAXR, SIPKAXX:VPQ:EPLT-AA¹⁷-LYY:DEYDKVV:EQLSN:VKS:GXGXR, HVTKPTX:VPQ:EPLT-AA¹⁷-LYY:DDSSNVI:EQLSN:VKS:SXGXH, YVPKPXX:VPQ:EPLT-AA¹⁷-LYY:DDSSNVI:EQLSN:VKS:SXGXH, TVPKPXX:VPQ:EPLT-AA¹⁷-LYY:DDSSNVI:EQLSN:VKS:AXGXH, AVPKAXX:VPQ:EPLT-AA¹⁷-LYY:DSSNNVI:EQLSN:VKS:AXGXH, KVGKAXX:VPQ:EPLT-AA¹⁷-LYY:DDMGVPT:EQLSN:VKS:XGXR, KASKAXX:VPQ:EPLT-AA¹⁷-LYY:DKGVVTY:EQLSN:VKS:EXGXR, GSAGPXX:VPQ:EPLT-AA¹⁷-LYY:NDKQQII:EQLSN:VKS:RXGXS, AAPASXX:VPQ:EPLT-AA¹⁷-LYY:DAANNVV:EQLSN:VKS:AXGXR, STPPTXX:VPQ:EPLT-AA¹⁷-LYY:DSANNVV:EQLSN:VKS:SXGXR, HVPKPXX:VPQ:EPLT-AA¹⁷-LYY:DDSSNVI:EQLSN:VKS:SXGXH, RVPSTXX:VPQ:EPLT-AA¹⁷-LYY:DNGRVLL:EQLSN:VKS:XGXL, ASAAPXX:VPQ:EPLT-AA¹⁷-LYY:VGRKPKV:EQLSN:VKS:XKXS, ASASPXX:VPQ:EPLT-AA¹⁷-LYY:IGKTPKI:EQLSN:VKS:XKXS, NDEGLEX:VPQ:EPLT-AA¹⁷-LYY:RIKPHQGQH:EQLSN:VKS:KXEXR, NDEGLEX:VPQ:EPLT-AA¹⁷-LYY:RIKPHQGQH:EQLSN:VKS:QXEXR, SSVKXQP:VPQ:EPLT-AA¹⁷-LYY:EYVRKKPKL:EQLSN:VKS:LEXAXA, RNVQXRP:VPQ:EPLT-AA¹⁷-LYY:EIVRKKPIF:EQLSN:VKS:LAXKXE, ASASPXX:VSQ:EPLT-AA¹⁷-LYY:IGKTPKI:EQLSN:VKS:XKXS, KIPKAXX:VPT:SNIT-AA¹⁷-QIM:DENEKVV:IGEMS:QHN:GXGXR, GIPEPXX:VPT:SNIT-AA¹⁷-QIM:DENKNVV:IGEMS:QHN:SXAXR, SIPKAXX:VPT:SNIT-AA¹⁷-QIM:DEYDKVV:IGEMS:QHN:GXGXR, HVTKPTX:VPT:SNIT-AA¹⁷-QIM:DDSSNVI:IGEMS:QHN:SXGXH, YVPKPXX:VPT:SNIT-AA¹⁷-QIM:DDSSNVI:IGEMS:QHN:SXGXH, TVPKPXX:VPT:SNIT-AA¹⁷-QIM:DDSSNVI:IGEMS:QHN:AXGXH, AVPKAXX:VPT:SNIT-AA¹⁷-QIM:DSSNNVI:IGEMS:QHN:AXGXH, KVGKAXX:VPT:SNIT-AA¹⁷-QIM:DDMGVPT:IGEMS:QHN:XGXR, KASKAXX:VPT:SNIT-AA¹⁷-QIM:DKGVVTY:IGEMS:QHN:EXGXR, GSAGPXX:VPT:SNIT-AA¹⁷-QIM:NDKQQII:IGEMS:QHN:RXGXS, AAPASXX:VPT:SNIT-AA¹⁷-QIM:DAANNVV:IGEMS:QHN:AXGXR, STPPTXX:VPT:SNIT-AA¹⁷-QIM:DSANNVV:IGEMS:QHN:SXGXR, HVPKPXX:VPT:SNIT-AA¹⁷-QIM:DDSSNVI:IGEMS:QHN:SXGXH, RVPSTXX:VPT:SNIT-AA¹⁷-QIM:DNGRVLL:IGEMS:QHN:XGXL, ASAAPXX:VPT:SNIT-AA¹⁷-QIM:VGRKPKV:IGEMS:QHN:XKXS, ASASPXX:VPT:SNIT-AA¹⁷-QIM:IGKTPKI:IGEMS:QHN:XKXS, ASASPXX:VPT:SNIT-AA¹⁷-QIM:VGRTPKV:IGEMS:QHN:XKXS, NDEGLEX:VPT:SNIT-AA¹⁷-QIM:RIKPHQGQH:IGEMS:QHN:QXEXR, NDEGLEX:VPT:SNIT-AA¹⁷-QIM:RIKPHQGQH:IGEMS:QHN:KXEXR, SSVKXQP:VPT:SNIT-AA¹⁷-QIM:EYVRKKPKLIGEMS:QHN:LEXAXA, RNVQXRP:VPT:SNIT-AA¹⁷-QIM:EIVRKKPIF:IGEMS:QHN:LAXKXE, KIPKAXX:VPT:SNIT-AA¹⁷-QIM:DENEKVV:IGEMS:VVE:GXGXR, GIPEPXX:VPE:SNIT-AA¹⁷-QIM:DENKNVV:IGEMS:TVE:SXAXR, SIPKAXX:VPT:SNIT-AA¹⁷-QIM:DEYDKVV:IGEMS:VVE:GXGXR, HVTKPTX:APT:SNIT-AA¹⁷-QIM:DDSSNVI:IGEMS:VVR:SXGXH, YVPKPXX:APT:SNIT-AA¹⁷-QIM:DDSSNVI:IGEMS:VVR:SXGXH, TVPKPXX:APT:SNIT-AA¹⁷-QIM:DDSSNVI:IGEMS:VVR:AXGXH, AVPKAXX:APT:SNIT-AA¹⁷-QIM:DSSNNVI:IGEMS:VVK:AXGXH, KVGKAXX:VPT:SNIT-AA¹⁷-QIM:DDMGVPT:IGEMS:VAE:XGXR, KASKAXX:VPT:SNIT-AA¹⁷-QIM:DKGVVTY:IGEMS:AVS:EXGXR, GSAGPXX:TPT:SNIT-AA¹⁷-QIM:NDKQQII:IGEMS:VVD:RXGXS, AAPASXX:VPA:SNIT-AA¹⁷-QIM:DAANNVV:IGEMS:VVE:AXGXR, STPPTXX:VPT:SNIT-AA¹⁷-QIM:DSANNVV:IGEMS:VVE:SXGXR, HVPKPXX:APT:SNIT-AA¹⁷-QIM:DDSSNVI:IGEMS:VVR:SXGXH, RVPSTXX:APV:SNIT-AA¹⁷-QIM:DNGRVLL:IGEMS:VEE:XGXL, ASAAPXX:VPQ:SNIT-AA¹⁷-QIM:VGRKPKV:IGEMS:VRS:XKXS, ASASPXX:VSQ:SNIT-AA¹⁷-QIM:IGKTPKI:IGEMS:VKS:XKXS, ASASPXX:VPQ:SNIT-AA¹⁷-QIM:VGRTPKV:IGEMS:VKS:XKXS, NDEGLEX:VPT:SNIT-AA¹⁷-QIM:RIKPHQGQH:IGEMS:EHS:QXEXR, SSVKXQP:SRV:SNIT-AA¹⁷-QIM:EYVRKKPKL:IGEMS:EEH:LEXAXA, RNVQXRP:TQV:SNIT-AA¹⁷-QIM:EIVRKKPIF:IGEMS:EDH:LAXKXE, KIPKAXX:VPT:SNIT-AA¹⁷-QIM:DENEKVV:LGEMS:EHS:GXGXR, GIPEPXX:VPT:SNIT-AA¹⁷-QIM:DENKNVVIGEMS:EHS:SXAXR, SIPKAXX:VPT:SNIT-AA¹⁷-QIM:DEYDKVVIGEMS:EHS:GXGXR, HVTKPTX:VPT:SNIT-AA¹⁷-QIM:DDSSNVI:LGEMS:EHS:SXGXH, YVPKPXX:VPT:SNIT-AA¹⁷-QIM:DDSSNVI:LGEMS:EHS:SXGXH, TVPKPXX:VPT:SNIT-AA¹⁷-QIM:DDSSNVI:LGEMS:EHS:AXGXH, AVPKAXX:VPT:SNIT-AA¹⁷-QIM:DSSNNVI:LGEMS:EHS:AXGXH, KVGKAXX:VPT:SNIT-AA¹⁷-QIM:DDMGVPTIGEMS:EHS:XGXR, KASKAXX:VPT:SNIT-AA¹⁷-QIM:DKGVVTY:LGEMS:EHS:EXGXR, GSAGPXX:VPT:SNIT-AA¹⁷-QIM:NDKQQII:LGEMS:EHS:RXGXS, AAPASXX:VPT:SNIT-AA¹⁷-QIM:DAANNVVIGEMS:EHS:AXGXR, STPPTXX:VPT:SNIT-AA¹⁷-QIM:DSANNVVIGEMS:EHS:SXGXR, HVPKPXX:VPT:SNIT-AA¹⁷-QIM:DDSSNVI:LGEMS:EHS:SXGXH, RVPSTXX:VPT:SNIT-AA¹⁷-QIM:DNGRVLLIGEMS:EHS:XGXL, ASAAPXX:VPT:SNIT-AA¹⁷-QIM:VGRKPKVIGEMS:EHS:XKXS, ASASPXX:VPT:SNIT-AA¹⁷-QIM:IGKTPKI:LGEMS:EHS:XKXS, ASASPXX:VPT:SNIT-AA¹⁷-QIM:VGRTPKVIGEMS:EHS:XKXS, NDEGLEX:VPT:SNIT-AA¹⁷-QIM:RIKPHQGQH:LGEMS:EHS:KXEXR, SSVKXQP:VPT:SNIT-AA¹⁷-QIM:EYVRKKPKLIGEMS:EHS:LEXAXA, RNVQXRP:VPT:SNIT-AA¹⁷-QIM:EIVRKKPIF:LGEMS:EHS:LAXKXE, KIPKAXX:VPT:SNIT-AA¹⁷-QIM:DENEKVV:LGEMS:VVE:GXGXR, GIPEPXX:VPE:SNIT-AA¹⁷-QIM:DENKNVVIGEMS:TVE:SXAXR, SIPKAXX:VPT:SNIT-AA¹⁷-QIM:DEYDKVVIGEMS:VVE:GXGXR, HVTKPTX:APT:SNIT-AA¹⁷-QIM:DDSSNVI:LGEMS:VVR:SXGXH, YVPKPXX:APT:SNIT-AA¹⁷-QIM:DDSSNVI:LGEMS:VVR:SXGXH, TVPKPXX:APT:SNIT-AA¹⁷-QIM:DDSSNVI:LGEMS:VVR:AXGXH, AVPKAXX:APT:SNIT-AA¹⁷-QIM:DSSNNVI:LGEMS:VVK:AXGXH, KVGKAXX:VPT:SNIT-AA¹⁷-QIM:DDMGVPTIGEMS:VAE:XGXR, KASKAXX:VPT:SNIT-AA¹⁷-QIM:DKGVVTY:LGEMS:AVS:EXGXR, GSAGPXX:TPT:SNIT-AA¹⁷-QIM:NDKQQII:LGEMS:VVD:RXGXS, AAPASXX:VPA:SNIT-AA¹⁷-QIM:DAANNVVIGEMS:VVE:AXGXR, STPPTXX:VPT:SNIT-AA¹⁷-QIM:DSANNVVIGEMS:VVE:SXGXR, HVPKPXX:APT:SNIT-AA¹⁷-QIM:DDSSNVI:LGEMS:VVR:SXGXH, RVPSTXX:APV:SNIT-AA¹⁷-QIM:DNGRVLLIGEMS:VEE:XGXL, ASAAPXX:VPQ:SNIT-AA¹⁷-QIM:VGRKPKVIGEMS:VRS:XKXS, ASASPXX:VSQ:SNIT-AA¹⁷-QIM:IGKTPKI:LGEMS:VKS:XKXS, ASASPXX:VPQ:SNIT-AA¹⁷-QIM:VGRTPKVIGEMS:VKS:XKXS, NDEGLEX:VPT:SNIT-AA¹⁷-QIM:RIKPHQGQH:LGEMS:QHN:KXEXR, SSVKXQP:SRV:SNIT-AA¹⁷-QIM:EYVRKKPKL:LGEMS:EEH:LEXAXA, RNVQXRP:TQV:SNIT-AA¹⁷-QIM:EIVRKKPIF:LGEMS:EDH:LAXKXE, KIPKAXX:SRV:RSVK-AA¹⁷-AKV:DENEKVV:KEVQV:EEH:GXGXR, GIPEPXX:SRV:RSVK-AA¹⁷-AKV:DENKNVV:KEVQV:EEH:SXAXR, SIPKAXX:SRV:RSVK-AA¹⁷-AKV:DEYDKVV:KEVQV:EEH:GXGXR, HVTKPTX:SRV:RSVK-AA¹⁷-AKV:DDSSNVI:KEVQV:EEH:SXGXH, YVPKPXX:SRV:RSVK-AA¹⁷-AKV:DDSSNVI:KEVQV:EEH:SXGXH, TVPKPXX:SRV:RSVK-AA¹⁷-AKV:DDSSNVI:KEVQV:EEH:AXGXH, AVPKAXX:SRV:RSVK-AA¹⁷-AKV:DSSNNVI:KEVQV:EEH:AXGXH, KVGKAXX:SRV:RSVK-AA¹⁷-AKV:DDMGVPT:KEVQV:EEH:XGXR, KASKAXX:SRV:RSVK-AA¹⁷-AKV:DKGVVTY:KEVQV:EEH:EXGXR, GSAGPXX:SRV:RSVK-AA¹⁷-AKV:NDKQQII:KEVQV:EEH:RXGXS, AAPASXX:SRV:RSVK-AA¹⁷-AKV:DAANNVV:KEVQV:EEH:AXGXR, STPPTXX:SRV:RSVK-AA¹⁷-AKV:DSANNVV:KEVQV:EEH:SXGXR, HVPKPXX:SRV:RSVK-AA¹⁷-AKV:DDSSNVI:KEVQV:EEH:SXGXH, RVPSTXX:SRV:RSVK-AA¹⁷-AKV:DNGRVLL:KEVQV:EEH:XGXL, ASAAPXX:SRV:RSVK-AA¹⁷-AKV:VGRKPKV:KEVQV:EEH:XKXS, ASASPXX:SRV:RSVK-AA¹⁷-AKV:IGKTPKI:KEVQV:EEH:XKXS, ASASPXX:SRV:RSVK-AA¹⁷-AKV:VGRTPKV:KEVQV:EEH:XKXS, NDEGLEX:SRV:RSVK-AA¹⁷-AKV:RIKPHQGQH:KEVQV:EEH:KXEXR, NDEGLEX:SRV:RSVK-AA¹⁷-AKV:RIKPHQGQH:KEVQV:EEH:QXEXR, RNVQXRP:SRV:RSVK-AA¹⁷-AKV:EIVRKKPIF:KEVQV:EEH:LAXKXE, KIPKAXX:VPT:RSVK-AA¹⁷-AKV:DENEKVV:KEVQV:VVE:GXGXR, GIPEPXX:VPE:RSVK-AA¹⁷-AKV:DENKNVV:KEVQV:TVE:SXAXR, SIPKAXX:VPT:RSVK-AA¹⁷-AKV:DEYDKVV:KEVQV:VVE:GXGXR, HVTKPTX:APT:RSVK-AA¹⁷-AKV:DDSSNVI:KEVQV:VVR:SXGXH, YVPKPXX:APT:RSVK-AA¹⁷-AKV:DDSSNVI:KEVQV:VVR:SXGXH, TVPKPXX:APT:RSVK-AA¹⁷-AKV:DDSSNVI:KEVQV:VVR:AXGXH, AVPKAXX:APT:RSVK-AA¹⁷-AKV:DSSNNVI:KEVQV:VVK:AXGXH, KVGKAXX:VPT:RSVK-AA¹⁷-AKV:DDMGVPT:KEVQV:VAE:XGXR, KASKAXX:VPT:RSVK-AA¹⁷-AKV:DKGVVTY:KEVQV:AVS:EXGXR, GSAGPXX:TPT:RSVK-AA¹⁷-AKV:NDKQQII:KEVQV:VVD:RXGXS, AAPASXX:VPA:RSVK-AA¹⁷-AKV:DAANNVV:KEVQV:VVE:AXGXR, STPPTXX:VPT:RSVK-AA¹⁷-AKV:DSANNVV:KEVQV:VVE:SXGXR, HVPKPXX:APT:RSVK-AA¹⁷-AKV:DDSSNVI:KEVQV:VVR:SXGXH, RVPSTXX:APV:RSVK-AA¹⁷-AKV:DNGRVLL:KEVQV:VEE:XGXL, ASAAPXX:VPQ:RSVK-AA¹⁷-AKV:VGRKPKV:KEVQV:VRS:XKXS, ASASPXX:VSQ:RSVK-AA¹⁷-AKV:IGKTPKI:KEVQV:VKS:XKXS, ASASPXX:VPQ:RSVK-AA¹⁷-AKV:VGRTPKV:KEVQV:VKS:XKXS, NDEGLEX:VPT:RSVK-AA¹⁷-AKV:RIKPHQGQH:KEVQV:QHN:KXEXR, NDEGLEX:VPT:RSVK-AA¹⁷-AKV:RIKPHQGQH:KEVQV:EHS:QXEXR, RNVQXRP:TQV:RSVK-AA¹⁷-AKV:EIVRKKPIF:KEVQV:EDH:LAXKXE, KIPKAXX:TQV:RPVQ-AA¹⁷-RKI:DENEKVV:KKATV:EDH:GXGXR, GIPEPXX:TQV:RPVQ-AA¹⁷-RKI:DENKNVV:KKATV:EDH:SXAXR, SIPKAXX:TQV:RPVQ-AA¹⁷-RKI:DEYDKVV:KKATV:EDH:GXGXR, HVTKPTX:TQV:RPVQ-AA¹⁷-RKI:DDSSNVI:KKATV:EDH:SXGXH, YVPKPXX:TQV:RPVQ-AA¹⁷-RKI:DDSSNVI:KKATV:EDH:SXGXH, TVPKPXX:TQV:RPVQ-AA¹⁷-RKI:DDSSNVI:KKATV:EDH:AXGXH, AVPKAXX:TQV:RPVQ-AA¹⁷-RKI:DSSNNVI:KKATV:EDH:AXGXH, KVGKAXX:TQV:RPVQ-AA¹⁷-RKI:DDMGVPT:KKATV:EDH:XGXR, KASKAXX:TQV:RPVQ-AA¹⁷-RKI:DKGVVTY:KKATV:EDH:EXGXR, GSAGPXX:TQV:RPVQ-AA¹⁷-RKI:NDKQQII:KKATV:EDH:RXGXS, AAPASXX:TQV:RPVQ-AA¹⁷-RKI:DAANNVV:KKATV:EDH:AXGXR, STPPTXX:TQV:RPVQ-AA¹⁷-RKI:DSANNVV:KKATV:EDH:SXGXR, HVPKPXX:TQV:RPVQ-AA¹⁷-RKI:DDSSNVI:KKATV:EDH:SXGXH, RVPSTXX:TQV:RPVQ-AA¹⁷-RKI:DNGRVLL:KKATV:EDH:XGXL, ASAAPXX:TQV:RPVQ-AA¹⁷-RKI:VGRKPKV:KKATV:EDH:XKXS, ASASPXX:TQV:RPVQ-AA¹⁷-RKI:IGKTPKI:KKATV:EDH:XKXS, ASASPXX:TQV:RPVQ-AA¹⁷-RKI:VGRTPKV:KKATV:EDH:XKXS, NDEGLEX:TQV:RPVQ-AA¹⁷-RKI:RIKPHQGQH:KKATV:EDH:KXEXR, NDEGLEX:TQV:RPVQ-AA¹⁷-RKI:RIKPHQGQH:KKATV:EDH:QXEXR, SSVKXQP:TQV:RPVQ-AA¹⁷-RKI:EYVRKKPKL:KKATV:EDH:LEXAXA, KIPKAXX:VPT:RPVQ-AA¹⁷-RKI:DENEKVV:KKATV:VVE:GXGXR, GIPEPXX:VPE:RPVQ-AA¹⁷-RKI:DENKNVV:KKATV:TVE:SXAXR, SIPKAXX:VPT:RPVQ-AA¹⁷-RKI:DEYDKVV:KKATV:VVE:GXGXR, HVTKPTX:APT:RPVQ-AA¹⁷-RKI:DDSSNVI:KKATV:VVR:SXGXH, YVPKPXX:APT:RPVQ-AA¹⁷-RKI:DDSSNVI:KKATV:VVR:SXGXH, TVPKPXX:APT:RPVQ-AA¹⁷-RKI:DDSSNVI:KKATV:VVR:AXGXH, AVPKAXX:APT:RPVQ-AA¹⁷-RKI:DSSNNVI:KKATV:VVK:AXGXH, KVGKAXX:VPT:RPVQ-AA¹⁷-RKI:DDMGVPT:KKATV:VAE:XGXR, KASKAXX:VPT:RPVQ-AA¹⁷-RKI:DKGVVTY:KKATV:AVS:EXGXR, GSAGPXX:TPT:RPVQ-AA¹⁷-RKI:NDKQQII:KKATV:VVD:RXGXS, AAPASXX:VPA:RPVQ-AA¹⁷-RKI:DAANNVV:KKATV:VVE:AXGXR, STPPTXX:VPT:RPVQ-AA¹⁷-RKI:DSANNVV:KKATV:VVE:SXGXR, HVPKPXX:APT:RPVQ-AA¹⁷-RKI:DDSSNVI:KKATV:VVR:SXGXH, RVPSTXX:APV:RPVQ-AA¹⁷-RKI:DNGRVLL:KKATV:VEE:XGXL, ASAAPXX:VPQ:RPVQ-AA¹⁷-RKI:VGRKPKV:KKATV:VRS:XKXS, ASASPXX:VSQ:RPVQ-AA¹⁷-RKI:IGKTPKI:KKATV:VKS:XKXS, ASASPXX:VPQ:RPVQ-AA¹⁷-RKI:VGRTPKV:KKATV:VKS:XKXS, NDEGLEX:VPT:RPVQ-AA¹⁷-RKI: RIKPHQGQH:KKATV:QHN:KXEXR, NDEGLEX:VPT:RPVQ-AA¹⁷-RKI:RIKPHQGQH:KKATV:EHS:QXEXR and SSVKXQP:SRV:RPVQ-AA¹⁷-RKI:EYVRKKPKL:KKATV:EEH:LEXAXA; and wherein AA¹⁷ is selected from the group consisting of G, A, V, L, I, P, F, M, W, T and S (in particular is selected from the group consisting of M, I, L, V and T). More particularly, the heptuplet PEP7:PEP3:PEP12:LINKER:PEP2:PEP4:PEP8 is selected from the group consisting of GIPEPXX:VPT:SAIS-AA¹⁷-LYL:DENKNVVIKNYQ:VVE:SXAXR, HVTKPTX:VPT:SAIS-AA¹⁷-LYL:DDSSNVI:LKNYQ:VVE:SXGXH, YVPKPXX:VPT:SAIS-AA¹⁷-LYL:DDSSNVI:LKNYQ:VVE:SXGXH, TVPKPXX:VPT:SAIS-AA¹⁷-LYL:DDSSNVI:LKNYQ:VVE:AXGXH, AVPKAXX:VPT:SAIS-AA¹⁷-LYL:DSSNNVI:LKNYQ:VVE:AXGXH, KVGKAXX:VPT:SAIS-AA¹⁷-LYL:DDMGVPTIKNYQ:VVE:XGXR, KASKAXX:VPT:SAIS-AA¹⁷-LYL:DKGVVTY:LKNYQ:VVE:EXGXR, GSAGPXX:VPT:SAIS-AA¹⁷-LYL:NDKQQII:LKNYQ:VVE:RXGXS, AAPASXX:VPT:SAIS-AA¹⁷-LYL:DAANNVVIKNYQ:VVE:AXGXR, STPPTXX:VPT:SAIS-AA¹⁷-LYL:DSANNVV:LKNYQ:VVE:SXGXR, HVPKPXX:VPT:SAIS-AA¹⁷-LYL:DDSSNVI:LKNYQ:VVE:SXGXH, RVPSTXX:VPT:SAIS-AA¹⁷-LYL:DNGRVLLIKNYQ:VVE:XGXL, ASAAPXX:VPT:SAIS-AA¹⁷-LYL:VGRKPKVIKNYQ:VVE:XKXS, ASASPXX:VPT:SAIS-AA¹⁷-LYL:IGKTPKI:LKNYQ:VVE:XKXS, ASASPXX:VPT:SAIS-AA¹⁷-LYL:VGRTPKVIKNYQ:VVE:XKXS, GIPEPXX:VPE:SAIS-AA¹⁷-LYL:DENKNVVIKNYQ:TVE:SXAXR, HVTKPTX:APT:SAIS-AA¹⁷-LYL:DDSSNVI:LKNYQ:VVR:SXGXH, YVPKPXX:APT:SAIS-AA¹⁷-LYL:DDSSNVI:LKNYQ:VVR:SXGXH, TVPKPXX:APT:SAIS-AA¹⁷-LYL:DDSSNVIIKNYQ:VVR:AXGXH, AVPKAXX:APT:SAIS-AA¹⁷-LYL:DSSNNVI:LKNYQ:VVK:AXGXH, KVGKAXX:VPT:SAIS-AA¹⁷-LYL:DDMGVPTIKNYQ:VAE:XGXR, KASKAXX:VPT:SAIS-AA¹⁷-LYL:DKGVVTY:LKNYQ:AVS:EXGXR, GSAGPXX:TPT:SAIS-AA¹⁷-LYL:NDKQQII:LKNYQ:VVD:RXGXS, AAPASXX:VPA:SAIS-AA¹⁷-LYL:DAANNVVIKNYQ:VVE:AXGXR, HVPKPXX:APT:SAIS-AA¹⁷-LYL:DDSSNVI:LKNYQ:VVR:SXGXH, RVPSTXX:APV:SAIS-AA¹⁷-LYL:DNGRVLL:LKNYQ:VEE:XGXL, ASAAPXX:VPQ:SAIS-AA¹⁷-LYL:VGRKPKV:LKNYQ:VRS:XKXS, ASASPXX:VSQ:SAIS-AA¹⁷-LYLIGKTPKI:LKNYQ:VKS:XKXS, ASASPXX:VPQ:SAIS-AA¹⁷-LYL:VGRTPKV:LKNYQ:VKS:XKXS, NDEGLEX:VPT:SAIS-AA¹⁷-LYL:RIKPHQGQH:LKNYQ:QHN:KXEXR, NDEGLEX:VPT:SAIS-AA¹⁷-LYL:RIKPHQGQH:LKNYQ:EHS:QXEXR, SSVKXQP:SRV:SAIS-AA¹⁷-LYL:EYVRKKPKL:LKNYQ:EEH:LEXAXA, RNVQXRP:TQV:SAIS-AA¹⁷-LYL:EIVRKKPIF:LKNYQ:EDH:LAXKXE, KIPKAXX:VPE:SSLS-AA¹⁷-LFF:DENEKVVIKVYP:TVE:GXGXR, SIPKAXX:VPE:SSLS-AA¹⁷-LFF:DEYDKVVIKVYP:TVE:GXGXR, HVTKPTX:VPE:SSLS-AA¹⁷-LFF:DDSSNVI:LKVYP:TVE:SXGXH, YVPKPXX:VPE:SSLS-AA¹⁷-LFF:DDSSNVI:LKVYP:TVE:SXGXH, TVPKPXX:VPE:SSLS-AA¹⁷-LFF:DDSSNVIIKVYP:TVE:AXGXH, AVPKAXX:VPE:SSLS-AA¹⁷-LFF:DSSNNVI:LKVYP:TVE:AXGXH, KVGKAXX:VPE:SSLS-AA¹⁷-LFF:DDMGVPTIKVYP:TVE:XGXR, KASKAXX:VPE:SSLS-AA¹⁷-LFF:DKGVVTY:LKVYP:TVE:EXGXR, GSAGPXX:VPE:SSLS-AA¹⁷-LFF:NDKQQII:LKVYP:TVE:RXGXS, AAPASXX:VPE:SSLS-AA¹⁷-LFF:DAANNVVIKVYP:TVE:AXGXR, STPPTXX:VPE:SSLS-AA¹⁷-LFF:DSANNVVIKVYP:TVE:SXGXR, HVPKPXX:VPE:SSLS-AA¹⁷-LFF:DDSSNVI:LKVYP:TVE:SXGXH, RVPSTXX:VPE:SSLS-AA¹⁷-LFF:DNGRVLLIKVYP:TVE:XGXL, ASAAPXX:VPE:SSLS-AA¹⁷-LFF:VGRKPKVIKVYP:TVE:XKXS, ASASPXX:VPE:SSLS-AA¹⁷-LFF:IGKTPKIIKVYP:TVE:XKXS, ASASPXX:VPE:SSLS-AA¹⁷-LFF:VGRTPKVIKVYP:TVE:XKXS, KIPKAXX:VPT:SSLS-AA¹⁷-LFF:DENEKVVIKVYP:VVE:GXGXR, SIPKAXX:VPT:SSLS-AA¹⁷-LFF:DEYDKVV:LKVYP:VVE:GXGXR, HVTKPTX:APT:SSLS-AA¹⁷-LFF:DDSSNVIIKVYP:VVR:SXGXH, YVPKPXX:APT:SSLS-AA¹⁷-LFF:DDSSNVIIKVYP:VVR:SXGXH, TVPKPXX:APT:SSLS-AA¹⁷-LFF:DDSSNVI:LKVYP:VVR:AXGXH, AVPKAXX:APT:SSLS-AA¹⁷-LFF:DSSNNVIIKVYP:VVK:AXGXH, KVGKAXX:VPT:SSLS-AA¹⁷-LFF:DDMGVPTIKVYP:VAE:XGXR, KASKAXX:VPT:SSLS-AA¹⁷-LFF:DKGVVTY:LKVYP:AVS:EXGXR, GSAGPXX:TPT:SSLS-AA¹⁷-LFF:NDKQQIIIKVYP:VVD:RXGXS, AAPASXX:VPA:SSLS-AA¹⁷-LFF:DAANNVVIKVYP:VVE:AXGXR, STPPTXX:VPT:SSLS-AA¹⁷-LFF:DSANNVV:LKVYP:VVE:SXGXR, HVPKPXX:APT:SSLS-AA¹⁷-LFF:DDSSNVIIKVYP:VVR:SXGXH, RVPSTXX:APV:SSLS-AA¹⁷-LFF:DNGRVLLIKVYP:VEE:XGXL, ASAAPXX:VPQ:SSLS-AA¹⁷-LFF:VGRKPKV:LKVYP:VRS:XKXS, ASASPXX:VSQ:SSLS-AA¹⁷-LFF:IGKTPKI:LKVYP:VKS:XKXS, ASASPXX:VPQ:SSLS-AA¹⁷-LFF:VGRTPKVIKVYP:VKS:XKXS, NDEGLEX:VPT:SSLS-AA¹⁷-LFF:RIKPHQGQH:LKVYP:QHN:KXEXR, NDEGLEX:VPT:SSLS-AA¹⁷-LFF:RIKPHQGQH:LKVYP:EHS:QXEXR, SSVKXQP:SRV:SSLS-AA¹⁷-LFF:EYVRKKPKLIKVYP:EEH:LEXAXA, RNVQXRP:TQV:SSLS-AA¹⁷-LFF:EIVRKKPIF:LKVYP:EDH:LAXKXE, KIPKAXX:APT:NAIS-AA¹⁷-LYF:DENEKVVIKKYR:VVR:GXGXR, GIPEPXX:APT:NAIS-AA¹⁷-LYF:DENKNVVIKKYR:VVR:SXAXR, SIPKAXX:APT:NAIS-AA¹⁷-LYF:DEYDKVV:LKKYR:VVR:GXGXR, AVPKAXX:APT:NAIS-AA¹⁷-LYF:DSSNNVIIKKYR:VVR:AXGXH, KVGKAXX:APT:NAIS-AA¹⁷-LYF:DDMGVPTIKKYR:VVR:XGXR, KASKAXX:APT:NAIS-AA¹⁷-LYF:DKGVVTY:LKKYR:VVR:EXGXR, GSAGPXX:APT:NAIS-AA¹⁷-LYF:NDKQQIIIKKYR:VVR:RXGXS, AAPASXX:APT:NAIS-AA¹⁷-LYF:DAANNVVIKKYR:VVR:AXGXR, STPPTXX:APT:NAIS-AA¹⁷-LYF:DSANNVVIKKYR:VVR:SXGXR, RVPSTXX:APT:NAIS-AA¹⁷-LYF:DNGRVLLIKKYR:VVR:XGXL, ASAAPXX:APT:NAIS-AA¹⁷-LYF:VGRKPKVIKKYR:VVR:XKXS, ASASPXX:APT:NAIS-AA¹⁷-LYF:IGKTPKI:LKKYR:VVR:XKXS, ASASPXX:APT:NAIS-AA¹⁷-LYF:VGRTPKVIKKYR:VVR:XKXS, KIPKAXX:VPT:NAIS-AA¹⁷-LYF:DENEKVVIKKYR:VVE:GXGXR, GIPEPXX:VPE:NAIS-AA¹⁷-LYF:DENKNVV:LKKYR:TVE:SXAXR, SIPKAXX:VPT:NAIS-AA¹⁷-LYF:DEYDKVVIKKYR:VVE:GXGXR, AVPKAXX:APT:NAIS-AA¹⁷-LYF:DSSNNVIIKKYR:VVK:AXGXH, KVGKAXX:VPT:NAIS-AA¹⁷-LYF:DDMGVPT:LKKYR:VAE:XGXR, KASKAXX:VPT:NAIS-AA¹⁷-LYF:DKGVVTYIKKYR:AVS:EXGXR, GSAGPXX:TPT:NAIS-AA¹⁷-LYF:NDKQQIIIKKYR:VVD:RXGXS, AAPASXX:VPA:NAIS-AA¹⁷-LYF:DAANNVV:LKKYR:VVE:AXGXR, STPPTXX:VPT:NAIS-AA¹⁷-LYF:DSANNVVIKKYR:VVE:SXGXR, RVPSTXX:APV:NAIS-AA¹⁷-LYF:DNGRVLLIKKYR:VEE:XGXL, ASAAPXX:VPQ:NAIS-AA¹⁷-LYF:VGRKPKV:LKKYR:VRS:XKXS, ASASPXX:VSQ:NAIS-AA¹⁷-LYF:IGKTPKIIKKYR:VKS:XKXS, ASASPXX:VPQ:NAIS-AA¹⁷-LYF:VGRTPKVIKKYR:VKS:XKXS, NDEGLEX:VPT:NAIS-AA¹⁷-LYF:RIKPHQGQH:LKKYR:QHN:KXEXR, NDEGLEX:VPT:NAIS-AA¹⁷-LYF:RIKPHQGQH:LKKYR:EHS:QXEXR, SSVKXQP:SRV:NAIS-AA¹⁷-LYF:EYVRKKPKL:LKKYR:EEH:LEXAXA, RNVQXRP:TQV:NAIS-AA¹⁷-LYF:EIVRKKPIF:LKKYR:EDH:LAXKXE, KIPKAXX:APT:SATS-AA¹⁷-LYY:DENEKVV:LRKHR:VVK:GXGXR, GIPEPXX:APT:SATS-AA¹⁷-LYY:DENKNVVIRKHR:VVK:SXAXR, SIPKAXX:APT:SATS-AA¹⁷-LYY:DEYDKVVIRKHR:VVK:GXGXR, HVTKPTX:APT:SATS-AA¹⁷-LYY:DDSSNVI:LRKHR:VVK:SXGXH, YVPKPXX:APT:SATS-AA¹⁷-LYY:DDSSNVIIRKHR:VVK:SXGXH, TVPKPXX:APT:SATS-AA¹⁷-LYY:DDSSNVIIRKHR:VVK:AXGXH, KVGKAXX:APT:SATS-AA¹⁷-LYY:DDMGVPT:LRKHR:VVK:XGXR, KASKAXX:APT:SATS-AA¹⁷-LYY:DKGVVTY:LRKHR:VVK:EXGXR, GSAGPXX:APT:SATS-AA¹⁷-LYY:NDKQQIIIRKHR:VVK:RXGXS, AAPASXX:APT:SATS-AA¹⁷-LYY:DAANNVV:LRKHR:VVK:AXGXR, STPPTXX:APT:SATS-AA¹⁷-LYY:DSANNVVIRKHR:VVK:SXGXR, HVPKPXX:APT:SATS-AA¹⁷-LYY:DDSSNVIIRKHR:VVK:SXGXH, RVPSTXX:APT:SATS-AA¹⁷-LYY:DNGRVLL:LRKHR:VVK:XGXL, ASAAPXX:APT:SATS-AA¹⁷-LYY:VGRKPKVIRKHR:VVK:XKXS, ASASPXX:APT:SATS-AA¹⁷-LYY:IGKTPKI:LRKHR:VVK:XKXS, ASASPXX:APT:SATS-AA¹⁷-LYY:VGRTPKVIRKHR:VVK:XKXS, KIPKAXX:VPT:SATS-AA¹⁷-LYY:DENEKVVIRKHR:VVE:GXGXR, GIPEPXX:VPE:SATS-AA¹⁷-LYY:DENKNVVIRKHR:TVE:SXAXR, SIPKAXX:VPT:SATS-AA¹⁷-LYY:DEYDKVVIRKHR:VVE:GXGXR, HVTKPTX:APT:SATS-AA¹⁷-LYY:DDSSNVIIRKHR:VVR:SXGXH, YVPKPXX:APT:SATS-AA¹⁷-LYY:DDSSNVIIRKHR:VVR:SXGXH, TVPKPXX:APT:SATS-AA¹⁷-LYY:DDSSNVI:LRKHR:VVR:AXGXH, KVGKAXX:VPT:SATS-AA¹⁷-LYY:DDMGVPTIRKHR:VAE:XGXR, KASKAXX:VPT:SATS-AA¹⁷-LYY:DKGVVTY:LRKHR:AVS:EXGXR, GSAGPXX:TPT:SATS-AA¹⁷-LYY:NDKQQII:LRKHR:VVD:RXGXS, AAPASXX:VPA:SATS-AA¹⁷-LYY:DAANNVVIRKHR:VVE:AXGXR, STPPTXX:VPT:SATS-AA¹⁷-LYY:DSANNVVIRKHR:VVE:SXGXR, HVPKPXX:APT:SATS-AA¹⁷-LYY:DDSSNVI:LRKHR:VVR:SXGXH, RVPSTXX:APV:SATS-AA¹⁷-LYY:DNGRVLLIRKHR:VEE:XGXL, ASAAPXX:VPQ:SATS-AA¹⁷-LYY:VGRKPKVIRKHR:VRS:XKXS, ASASPXX:VSQ:SATS-AA¹⁷-LYY:IGKTPKI:LRKHR:VKS:XKXS, ASASPXX:VPQ:SATS-AA¹⁷-LYY:VGRTPKVIRKHR:VKS:XKXS, NDEGLEX:VPT:SATS-AA¹⁷-LYY:RIKPHQGQH:LRKHR:QHN:KXEXR, NDEGLEX:VPT:SATS-AA¹⁷-LYY:RIKPHQGQH:LRKHR:EHS:QXEXR, SSVKXQP:SRV:SATS-AA¹⁷-LYY:EYVRKKPKL:LRKHR:EEH:LEXAXA, RNVQXRP:TQV:SATS-AA¹⁷-LYY:EIVRKKPIF:LRKHR:EDH:LAXKXE, KIPKAXX:VPT:SPIS-AA¹⁷-LYK:DENEKVV:LKYHY:VAE:GXGXR, GIPEPXX:VPT:SPIS-AA¹⁷-LYK:DENKNVV:LKYHY:VAE:SXAXR, SIPKAXX:VPT:SPIS-AA¹⁷-LYK:DEYDKVV:LKYHY:VAE:GXGXR, HVTKPTX:VPT:SPIS-AA¹⁷-LYK:DDSSNVI:LKYHY:VAE:SXGXH, YVPKPXX:VPT:SPIS-AA¹⁷-LYK:DDSSNVI:LKYHY:VAE:SXGXH, TVPKPXX:VPT:SPIS-AA¹⁷-LYK:DDSSNVI:LKYHY:VAE:AXGXH, AVPKAXX:VPT:SPIS-AA¹⁷-LYK:DSSNNVI:LKYHY:VAE:AXGXH, KASKAXX:VPT:SPIS-AA¹⁷-LYK:DKGVVTY:LKYHY:VAE:EXGXR, GSAGPXX:VPT:SPIS-AA¹⁷-LYK:NDKQQII:LKYHY:VAE:RXGXS, AAPASXX:VPT:SPIS-AA¹⁷-LYK:DAANNVV:LKYHY:VAE:AXGXR, STPPTXX:VPT:SPIS-AA¹⁷-LYK:DSANNVV:LKYHY:VAE:SXGXR, HVPKPXX:VPT:SPIS-AA¹⁷-LYK:DDSSNVI:LKYHY:VAE:SXGXH, RVPSTXX:VPT:SPIS-AA¹⁷-LYK:DNGRVLL:LKYHY:VAE:XGXL, ASAAPXX:VPT:SPIS-AA¹⁷-LYK:VGRKPKV:LKYHY:VAE:XKXS, ASASPXX:VPT:SPIS-AA¹⁷-LYK:IGKTPKI:LKYHY:VAE:XKXS, ASASPXX:VPT:SPIS-AA¹⁷-LYK:VGRTPKV:LKYHY:VAE:XKXS, KIPKAXX:VPT:SPIS-AA¹⁷-LYK:DENEKVV:LKYHY:VVE:GXGXR, GIPEPXX:VPE:SPIS-AA¹⁷-LYK:DENKNVV:LKYHY:TVE:SXAXR, SIPKAXX:VPT:SPIS-AA¹⁷-LYK:DEYDKVV:LKYHY:VVE:GXGXR, HVTKPTX:APT:SPIS-AA¹⁷-LYK:DDSSNVI:LKYHY:VVR:SXGXH, YVPKPXX:APT:SPIS-AA¹⁷-LYK:DDSSNVI:LKYHY:VVR:SXGXH, TVPKPXX:APT:SPIS-AA¹⁷-LYK:DDSSNVI:LKYHY:VVR:AXGXH, AVPKAXX:APT:SPIS-AA¹⁷-LYK:DSSNNVI:LKYHY:VVK:AXGXH, KASKAXX:VPT:SPIS-AA¹⁷-LYK:DKGVVTY:LKYHY:AVS:EXGXR, GSAGPXX:TPT:SPIS-AA¹⁷-LYK:NDKQQII:LKYHY:VVD:RXGXS, AAPASXX:VPA:SPIS-AA¹⁷-LYK:DAANNVV:LKYHY:VVE:AXGXR, STPPTXX:VPT:SPIS-AA¹⁷-LYK:DSANNVV:LKYHY:VVE:SXGXR, HVPKPXX:APT:SPIS-AA¹⁷-LYK:DDSSNVI:LKYHY:VVR:SXGXH, RVPSTXX:APV:SPIS-AA¹⁷-LYK:DNGRVLL:LKYHY:VEE:XGXL, ASAAPXX:VPQ:SPIS-AA¹⁷-LYK:VGRKPKV:LKYHY:VRS:XKXS, ASASPXX:VSQ:SPIS-AA¹⁷-LYK:IGKTPKI:LKYHY:VKS:XKXS, ASASPXX:VPQ:SPIS-AA¹⁷-LYK:VGRTPKV:LKYHY:VKS:XKXS, NDEGLEX:VPT:SPIS-AA¹⁷-LYK:RIKPHQGQH:LKYHY:QHN:KXEXR, NDEGLEX:VPT:SPIS-AA¹⁷-LYK:RIKPHQGQH:LKYHY:EHS:QXEXR, SSVKXQP:SRV:SPIS-AA¹⁷-LYK:EYVRKKPKL:LKYHY:EEH:LEXAXA, RNVQXRP:TQV:SPIS-AA¹⁷-LYK:EIVRKKPIF:LKYHY:EDH:LAXKXE, KIPKAXX:VPT:EPIS-AA¹⁷-LYL:DENEKVV:KFKYE:AVS:GXGXR, GIPEPXX:VPT:EPIS-AA¹⁷-LYL:DENKNVV:KFKYE:AVS:SXAXR, SIPKAXX:VPT:EPIS-AA¹⁷-LYL:DEYDKVV:KFKYE:AVS:GXGXR, HVTKPTX:VPT:EPIS-AA¹⁷-LYL:DDSSNVI:KFKYE:AVS:SXGXH, YVPKPXX:VPT:EPIS-AA¹⁷-LYL:DDSSNVI:KFKYE:AVS:SXGXH, TVPKPXX:VPT:EPIS-AA¹⁷-LYL:DDSSNVI:KFKYE:AVS:AXGXH, AVPKAXX:VPT:EPIS-AA¹⁷-LYL:DSSNNVI:KFKYE:AVS:AXGXH, KVGKAXX:VPT:EPIS-AA¹⁷-LYL:DDMGVPT:KFKYE:AVS:XGXR, GSAGPXX:VPT:EPIS-AA¹⁷-LYL:NDKQQII:KFKYE:AVS:RXGXS, AAPASXX:VPT:EPIS-AA¹⁷-LYL:DAANNVV:KFKYE:AVS:AXGXR, STPPTXX:VPT:EPIS-AA¹⁷-LYL:DSANNVV:KFKYE:AVS:SXGXR, HVPKPXX:VPT:EPIS-AA¹⁷-LYL:DDSSNVI:KFKYE:AVS:SXGXH, RVPSTXX:VPT:EPIS-AA¹⁷-LYL:DNGRVLL:KFKYE:AVS:XGXL, ASAAPXX:VPT:EPIS-AA¹⁷-LYL:VGRKPKV:KFKYE:AVS:XKXS, ASASPXX:VPT:EPIS-AA¹⁷-LYL:IGKTPKI:KFKYE:AVS:XKXS, ASASPXX:VPT:EPIS-AA¹⁷-LYL:VGRTPKV:KFKYE:AVS:XKXS, KIPKAXX:VPT:EPIS-AA¹⁷-LYL:DENEKVV:KFKYE:VVE:GXGXR, GIPEPXX:VPE:EPIS-AA¹⁷-LYL:DENKNVV:KFKYE:TVE:SXAXR, SIPKAXX:VPT:EPIS-AA¹⁷-LYL:DEYDKVV:KFKYE:VVE:GXGXR, HVTKPTX:APT:EPIS-AA¹⁷-LYL:DDSSNVI:KFKYE:VVR:SXGXH, YVPKPXX:APT:EPIS-AA¹⁷-LYL:DDSSNVI:KFKYE:VVR:SXGXH, TVPKPXX:APT:EPIS-AA¹⁷-LYL:DDSSNVI:KFKYE:VVR:AXGXH, AVPKAXX:APT:EPIS-AA¹⁷-LYL:DSSNNVI:KFKYE:VVK:AXGXH, KVGKAXX:VPT:EPIS-AA¹⁷-LYL:DDMGVPT:KFKYE:VAE:XGXR, GSAGPXX:TPT:EPIS-AA¹⁷-LYL:NDKQQII:KFKYE:VVD:RXGXS, AAPASXX:VPA:EPIS-AA¹⁷-LYL:DAANNVV:KFKYE:VVE:AXGXR, STPPTXX:VPT:EPIS-AA¹⁷-LYL:DSANNVV:KFKYE:VVE:SXGXR, HVPKPXX:APT:EPIS-AA¹⁷-LYL:DDSSNVI:KFKYE:VVR:SXGXH, RVPSTXX:APV:EPIS-AA¹⁷-LYL:DNGRVLL:KFKYE:VEE:XGXL, ASAAPXX:VPQ:EPIS-AA¹⁷-LYL:VGRKPKV:KFKYE:VRS:XKXS, ASASPXX:VSQ:EPIS-AA¹⁷-LYLIGKTPKI:KFKYE:VKS:XKXS, ASASPXX:VPQ:EPIS-AA¹⁷-LYL:VGRTPKV:KFKYE:VKS:XKXS, NDEGLEX:VPT:EPIS-AA¹⁷-LYL:RIKPHQGQH:KFKYE:QHN:KXEXR, NDEGLEX:VPT:EPIS-AA¹⁷-LYL:RIKPHQGQH:KFKYE:EHS:QXEXR, SSVKXQP:SRV:EPIS-AA¹⁷-LYL:EYVRKKPKL:KFKYE:EEH:LEXAXA, RNVQXRP:TQV:EPIS-AA¹⁷-LYL:EIVRKKPIF:KFKYE:EDH:LAXKXE, KIPKAXX:TPT:SPIN-AA¹⁷-LYF:DENEKVV:YGKIP:VVD:GXGXR, GIPEPXX:TPT:SPIN-AA¹⁷-LYF:DENKNVV:YGKIP:VVD:SXAXR, SIPKAXX:TPT:SPIN-AA¹⁷-LYF:DEYDKVV:YGKIP:VVD:GXGXR, HVTKPTX:TPT:SPIN-AA¹⁷-LYF:DDSSNVI:YGKIP:VVD:SXGXH, YVPKPXX:TPT:SPIN-AA¹⁷-LYF:DDSSNVI:YGKIP:VVD:SXGXH, TVPKPXX:TPT:SPIN-AA¹⁷-LYF:DDSSNVI:YGKIP:VVD:AXGXH, AVPKAXX:TPT:SPIN-AA¹⁷-LYF:DSSNNVI:YGKIP:VVD:AXGXH, KVGKAXX:TPT:SPIN-AA¹⁷-LYF:DDMGVPT:YGKIP:VVD:XGXR, KASKAXX:TPT:SPIN-AA¹⁷-LYF:DKGVVTY:YGKIP:VVD:EXGXR, AAPASXX:TPT:SPIN-AA¹⁷-LYF:DAANNVV:YGKIP:VVD:AXGXR, STPPTXX:TPT:SPIN-AA¹⁷-LYF:DSANNVV:YGKIP:VVD:SXGXR, HVPKPXX:TPT:SPIN-AA¹⁷-LYF:DDSSNVI:YGKIP:VVD:SXGXH, RVPSTXX:TPT:SPIN-AA¹⁷-LYF:DNGRVLLYGKIP:VVD:XGXL, ASAAPXX:TPT:SPIN-AA¹⁷-LYF:VGRKPKV:YGKIP:VVD:XKXS, ASASPXX:TPT:SPIN-AA¹⁷-LYF:IGKTPKI:YGKIP:VVD:XKXS, ASASPXX:TPT:SPIN-AA¹⁷-LYF:VGRTPKV:YGKIP:VVD:XKXS, KIPKAXX:VPT:SPIN-AA¹⁷-LYF:DENEKVV:YGKIP:VVE:GXGXR, GIPEPXX:VPE:SPIN-AA¹⁷-LYF:DENKNVV:YGKIP:TVE:SXAXR, SIPKAXX:VPT:SPIN-AA¹⁷-LYF:DEYDKVV:YGKIP:VVE:GXGXR, HVTKPTX:APT:SPIN-AA¹⁷-LYF:DDSSNVI:YGKIP:VVR:SXGXH, YVPKPXX:APT:SPIN-AA¹⁷-LYF:DDSSNVI:YGKIP:VVR:SXGXH, TVPKPXX:APT:SPIN-AA¹⁷-LYF:DDSSNVI:YGKIP:VVR:AXGXH, AVPKAXX:APT:SPIN-AA¹⁷-LYF:DSSNNVI:YGKIP:VVK:AXGXH, KVGKAXX:VPT:SPIN-AA¹⁷-LYF:DDMGVPT:YGKIP:VAE:XGXR, KASKAXX:VPT:SPIN-AA¹⁷-LYF:DKGVVTY:YGKIP:AVS:EXGXR, AAPASXX:VPA:SPIN-AA¹⁷-LYF:DAANNVV:YGKIP:VVE:AXGXR, STPPTXX:VPT:SPIN-AA¹⁷-LYF:DSANNVV:YGKIP:VVE:SXGXR, HVPKPXX:APT:SPIN-AA¹⁷-LYF:DDSSNVI:YGKIP:VVR:SXGXH, RVPSTXX:APV:SPIN-AA¹⁷-LYF:DNGRVLLYGKIP:VEE:XGXL, ASAAPXX:VPQ:SPIN-AA¹⁷-LYF:VGRKPKV:YGKIP:VRS:XKXS, ASASPXX:VSQ:SPIN-AA¹⁷-LYF:IGKTPKI:YGKIP:VKS:XKXS, ASASPXX:VPQ:SPIN-AA¹⁷-LYF:VGRTPKV:YGKIP:VKS:XKXS, NDEGLEX:VPT:SPIN-AA¹⁷-LYF:RIKPHQGQH:YGKIP:QHN:KXEXR, NDEGLEX:VPT:SPIN-AA¹⁷-LYF:RIKPHQGQH:YGKIP:EHS:QXEXR, SSVKXQP:SRV:SPIN-AA¹⁷-LYF:EYVRKKPKL:YGKIP:EEH:LEXAXA, RNVQXRP:TQV:SPIN-AA¹⁷-LYF:EIVRKKPIF:YGKIP:EDH:LAXKXE, KIPKAXX:VPA:SPIS-AA¹⁷-LYI:DENEKVV:YKQYE:VVE:GXGXR, GIPEPXX:VPA:SPIS-AA¹⁷-LYI:DENKNVV:YKQYE:VVE:SXAXR, SIPKAXX:VPA:SPIS-AA¹⁷-LYI:DEYDKVV:YKQYE:VVE:GXGXR, HVTKPTX:VPA:SPIS-AA¹⁷-LYI:DDSSNVI:YKQYE:VVE:SXGXH, YVPKPXX:VPA:SPIS-AA¹⁷-LYI:DDSSNVI:YKQYE:VVE:SXGXH, TVPKPXX:VPA:SPIS-AA¹⁷-LYI:DDSSNVI:YKQYE:VVE:AXGXH, AVPKAXX:VPA:SPIS-AA¹⁷-LYI:DSSNNVI:YKQYE:VVE:AXGXH, KVGKAXX:VPA:SPIS-AA¹⁷-LYI:DDMGVPT:YKQYE:VVE:XGXR, KASKAXX:VPA:SPIS-AA¹⁷-LYI:DKGVVTY:YKQYE:VVE:EXGXR, GSAGPXX:VPA:SPIS-AA¹⁷-LYI:NDKQQII:YKQYE:VVE:RXGXS, STPPTXX:VPA:SPIS-AA¹⁷-LYI:DSANNVV:YKQYE:VVE:SXGXR, HVPKPXX:VPA:SPIS-AA¹⁷-LYI:DDSSNVI:YKQYE:VVE:SXGXH, RVPSTXX:VPA:SPIS-AA¹⁷-LYI:DNGRVLLYKQYE:VVE:XGXL, ASAAPXX:VPA:SPIS-AA¹⁷-LYI:VGRKPKV:YKQYE:VVE:XKXS, ASASPXX:VPA:SPIS-AA¹⁷-LYI:IGKTPKI:YKQYE:VVE:XKXS, ASASPXX:VPA:SPIS-AA¹⁷-LYI:VGRTPKV:YKQYE:VVE:XKXS, KIPKAXX:VPT:SPIS-AA¹⁷-LYI:DENEKVV:YKQYE:VVE:GXGXR, GIPEPXX:VPE:SPIS-AA¹⁷-LYI:DENKNVV:YKQYE:TVE:SXAXR, SIPKAXX:VPT:SPIS-AA¹⁷-LYI:DEYDKVV:YKQYE:VVE:GXGXR, HVTKPTX:APT:SPIS-AA¹⁷-LYI:DDSSNVI:YKQYE:VVR:SXGXH, YVPKPXX:APT:SPIS-AA¹⁷-LYI:DDSSNVI:YKQYE:VVR:SXGXH, TVPKPXX:APT:SPIS-AA¹⁷-LYI:DDSSNVI:YKQYE:VVR:AXGXH, AVPKAXX:APT:SPIS-AA¹⁷-LYI:DSSNNVI:YKQYE:VVK:AXGXH, KVGKAXX:VPT:SPIS-AA¹⁷-LYI:DDMGVPT:YKQYE:VAE:XGXR, KASKAXX:VPT:SPIS-AA¹⁷-LYI:DKGVVTY:YKQYE:AVS:EXGXR, GSAGPXX:TPT:SPIS-AA¹⁷-LYI:NDKQQII:YKQYE:VVD:RXGXS, STPPTXX:VPT:SPIS-AA¹⁷-LYI:DSANNVV:YKQYE:VVE:SXGXR, HVPKPXX:APT:SPIS-AA¹⁷-LYI:DDSSNVI:YKQYE:VVR:SXGXH, RVPSTXX:APV:SPIS-AA¹⁷-LYI:DNGRVLLYKQYE:VEE:XGXL, ASAAPXX:VPQ:SPIS-AA¹⁷-LYI:VGRKPKV:YKQYE:VRS:XKXS, ASASPXX:VSQ:SPIS-AA¹⁷-LYI:IGKTPKI:YKQYE:VKS:XKXS, ASASPXX:VPQ:SPIS-AA¹⁷-LYI:VGRTPKV:YKQYE:VKS:XKXS, NDEGLEX:VPT:SPIS-AA¹⁷-LYI:RIKPHQGQH:YKQYE:QHN:KXEXR, NDEGLEX:VPT:SPIS-AA¹⁷-LYI:RIKPHQGQH:YKQYE:EHS:QXEXR, SSVKXQP:SRV:SPIS-AA¹⁷-LYI:EYVRKKPKL:YKQYE:EEH:LEXAXA, RNVQXRP:TQV:SPIS-AA¹⁷-LYI:EIVRKKPIF:YKQYE:EDH:LAXKXE, KIPKAXX:VPT:SPIS-AA¹⁷-LFI:DENEKVV:YKQYE:VVE:GXGXR, GIPEPXX:VPT:SPIS-AA¹⁷-LFI:DENKNVV:YKQYE:VVE:SXAXR, SIPKAXX:VPT:SPIS-AA¹⁷-LFI:DEYDKVV:YKQYE:VVE:GXGXR, HVTKPTX:VPT:SPIS-AA¹⁷-LFI:DDSSNVI:YKQYE:VVE:SXGXH, YVPKPXX:VPT:SPIS-AA¹⁷-LFI:DDSSNVI:YKQYE:VVE:SXGXH, TVPKPXX:VPT:SPIS-AA¹⁷-LFI:DDSSNVI:YKQYE:VVE:AXGXH, AVPKAXX:VPT:SPIS-AA¹⁷-LFI:DSSNNVI:YKQYE:VVE:AXGXH, KVGKAXX:VPT:SPIS-AA¹⁷-LFI:DDMGVPT:YKQYE:VVE:XGXR, KASKAXX:VPT:SPIS-AA¹⁷-LFI:DKGVVTY:YKQYE:VVE:EXGXR, GSAGPXX:VPT:SPIS-AA¹⁷-LFI:NDKQQII:YKQYE:VVE:RXGXS, AAPASXX:VPT:SPIS-AA¹⁷-LFI:DAANNVV:YKQYE:VVE:AXGXR, HVPKPXX:VPT:SPIS-AA¹⁷-LFI:DDSSNVI:YKQYE:VVE:SXGXH, RVPSTXX:VPT:SPIS-AA¹⁷-LFI:DNGRVLLYKQYE:VVE:XGXL, ASAAPXX:VPT:SPIS-AA¹⁷-LFI:VGRKPKV:YKQYE:VVE:XKXS, ASASPXX:VPT:SPIS-AA¹⁷-LFI:IGKTPKI:YKQYE:VVE:XKXS, ASASPXX:VPT:SPIS-AA¹⁷-LFI:VGRTPKV:YKQYE:VVE:XKXS, GIPEPXX:VPE:SPIS-AA¹⁷-LFI:DENKNVV:YKQYE:TVE:SXAXR, HVTKPTX:APT:SPIS-AA¹⁷-LFI:DDSSNVI:YKQYE:VVR:SXGXH, YVPKPXX:APT:SPIS-AA¹⁷-LFI:DDSSNVI:YKQYE:VVR:SXGXH, TVPKPXX:APT:SPIS-AA¹⁷-LFI:DDSSNVI:YKQYE:VVR:AXGXH, AVPKAXX:APT:SPIS-AA¹⁷-LFI:DSSNNVI:YKQYE:VVK:AXGXH, KVGKAXX:VPT:SPIS-AA¹⁷-LFI:DDMGVPT:YKQYE:VAE:XGXR, KASKAXX:VPT:SPIS-AA¹⁷-LFI:DKGVVTY:YKQYE:AVS:EXGXR, GSAGPXX:TPT:SPIS-AA¹⁷-LFI:NDKQQII:YKQYE:VVD:RXGXS, AAPASXX:VPA:SPIS-AA¹⁷-LFI:DAANNVV:YKQYE:VVE:AXGXR, HVPKPXX:APT:SPIS-AA¹⁷-LFI:DDSSNVI:YKQYE:VVR:SXGXH, RVPSTXX:APV:SPIS-AA¹⁷-LFI:DNGRVLL:YKQYE:VEE:XGXL, ASAAPXX:VPQ:SPIS-AA¹⁷-LFI:VGRKPKV:YKQYE:VRS:XKXS, ASASPXX:VSQ:SPIS-AA¹⁷-LFLIGKTPKI:YKQYE:VKS:XKXS, ASASPXX:VPQ:SPIS-AA¹⁷-LFI:VGRTPKV:YKQYE:VKS:XKXS, NDEGLEX:VPT:SPIS-AA¹⁷-LFI:RIKPHQGQH:YKQYE:QHN:KXEXR, NDEGLEX:VPT:SPIS-AA¹⁷-LFI:RIKPHQGQH:YKQYE:EHS:QXEXR, SSVKXQP:SRV:SPIS-AA¹⁷-LFI:EYVRKKPKL:YKQYE:EEH:LEXAXA, RNVQXRP:TQV:SPIS-AA¹⁷-LFI:EIVRKKPIF:YKQYE:EDH:LAXKXE, KIPKAXX:APV:KPLS-AA¹⁷-LYV:DENEKVV:DHHKD:VEE:GXGXR, GIPEPXX:APV:KPLS-AA¹⁷-LYV:DENKNVV:DHHKD:VEE:SXAXR, SIPKAXX:APV:KPLS-AA¹⁷-LYV:DEYDKVV:DHHKD:VEE:GXGXR, HVTKPTX:APV:KPLS-AA¹⁷-LYV:DDSSNVI:DHHKD:VEE:SXGXH, YVPKPXX:APV:KPLS-AA¹⁷-LYV:DDSSNVI:DHHKD:VEE:SXGXH, TVPKPXX:APV:KPLS-AA¹⁷-LYV:DDSSNVI:DHHKD:VEE:AXGXH, AVPKAXX:APV:KPLS-AA¹⁷-LYV:DSSNNVI:DHHKD:VEE:AXGXH, KVGKAXX:APV:KPLS-AA¹⁷-LYV:DDMGVPT:DHHKD:VEE:XGXR, KASKAXX:APV:KPLS-AA¹⁷-LYV:DKGVVTY:DHHKD:VEE:EXGXR, GSAGPXX:APV:KPLS-AA¹⁷-LYV:NDKQQII:DHHKD:VEE:RXGXS, AAPASXX:APV:KPLS-AA¹⁷-LYV:DAANNVV:DHHKD:VEE:AXGXR, STPPTXX:APV:KPLS-AA¹⁷-LYV:DSANNVV:DHHKD:VEE:SXGXR, HVPKPXX:APV:KPLS-AA¹⁷-LYV:DDSSNVI:DHHKD:VEE:SXGXH, ASAAPXX:APV:KPLS-AA¹⁷-LYV:VGRKPKV:DHHKD:VEE:XKXS, ASASPXX:APV:KPLS-AA¹⁷-LYV:IGKTPKI:DHHKD:VEE:XKXS, ASASPXX:APV:KPLS-AA¹⁷-LYV:VGRTPKV:DHHKD:VEE:XKXS, KIPKAXX:VPT:KPLS-AA¹⁷-LYV:DENEKVV:DHHKD:VVE:GXGXR, GIPEPXX:VPE:KPLS-AA¹⁷-LYV:DENKNVV:DHHKD:TVE:SXAXR, SIPKAXX:VPT:KPLS-AA¹⁷-LYV:DEYDKVV:DHHKD:VVE:GXGXR, HVTKPTX:APT:KPLS-AA¹⁷-LYV:DDSSNVI:DHHKD:VVR:SXGXH, YVPKPXX:APT:KPLS-AA¹⁷-LYV:DDSSNVI:DHHKD:VVR:SXGXH, TVPKPXX:APT:KPLS-AA¹⁷-LYV:DDSSNVI:DHHKD:VVR:AXGXH, AVPKAXX:APT:KPLS-AA¹⁷-LYV:DSSNNVI:DHHKD:VVK:AXGXH, KVGKAXX:VPT:KPLS-AA¹⁷-LYV:DDMGVPT:DHHKD:VAE:XGXR, KASKAXX:VPT:KPLS-AA¹⁷-LYV:DKGVVTY:DHHKD:AVS:EXGXR, GSAGPXX:TPT:KPLS-AA¹⁷-LYV:NDKQQII:DHHKD:VVD:RXGXS, AAPASXX:VPA:KPLS-AA¹⁷-LYV:DAANNVV:DHHKD:VVE:AXGXR, STPPTXX:VPT:KPLS-AA¹⁷-LYV:DSANNVV:DHHKD:VVE:SXGXR, HVPKPXX:APT:KPLS-AA¹⁷-LYV:DDSSNVI:DHHKD:VVR:SXGXH, ASAAPXX:VPQ:KPLS-AA¹⁷-LYV:VGRKPKV:DHHKD:VRS:XKXS, ASASPXX:VSQ:KPLS-AA¹⁷-LYV:IGKTPKI:DHHKD:VKS:XKXS, ASASPXX:VPQ:KPLS-AA¹⁷-LYV:VGRTPKV:DHHKD:VKS:XKXS, NDEGLEX:VPT:KPLS-AA¹⁷-LYV:RIKPHQGQH:DHHKD:QHN:KXEXR, NDEGLEX:VPT:KPLS-AA¹⁷-LYV:RIKPHQGQH:DHHKD:EHS:QXEXR, SSVKXQP:SRV:KPLS-AA¹⁷-LYV:EYVRKKPKL:DHHKD:EEH:LEXAXA, RNVQXRP:TQV:KPLS-AA¹⁷-LYV:EIVRKKPIF:DHHKD:EDH:LAXKXE, KIPKAXX:VPQ:EPLP-AA¹⁷-VYY:DENEKVV:EQLSN:VRS:GXGXR, GIPEPXX:VPQ:EPLP-AA¹⁷-VYY:DENKNVV:EQLSN:VRS:SXAXR, SIPKAXX:VPQ:EPLP-AA¹⁷-VYY:DEYDKVV:EQLSN:VRS:GXGXR, HVTKPTX:VPQ:EPLP-AA¹⁷-VYY:DDSSNVI:EQLSN:VRS:SXGXH, YVPKPXX:VPQ:EPLP-AA¹⁷-VYY:DDSSNVI:EQLSN:VRS:SXGXH, TVPKPXX:VPQ:EPLP-AA¹⁷-VYY:DDSSNVI:EQLSN:VRS:AXGXH, AVPKAXX:VPQ:EPLP-AA¹⁷-VYY:DSSNNVI:EQLSN:VRS:AXGXH, KVGKAXX:VPQ:EPLP-AA¹⁷-VYY:DDMGVPT:EQLSN:VRS:XGXR, KASKAXX:VPQ:EPLP-AA¹⁷-VYY:DKGVVTY:EQLSN:VRS:EXGXR, GSAGPXX:VPQ:EPLP-AA¹⁷-VYY:NDKQQII:EQLSN:VRS:RXGXS, AAPASXX:VPQ:EPLP-AA¹⁷-VYY:DAANNVV:EQLSN:VRS:AXGXR, STPPTXX:VPQ:EPLP-AA¹⁷-VYY:DSANNVV:EQLSN:VRS:SXGXR, HVPKPXX:VPQ:EPLP-AA¹⁷-VYY:DDSSNVI:EQLSN:VRS:SXGXH, RVPSTXX:VPQ:EPLP-AA¹⁷-VYY:DNGRVLL:EQLSN:VRS:XGXL, ASASPXX:VPQ:EPLP-AA¹⁷-VYY:IGKTPKI:EQLSN:VRS:XKXS, ASASPXX:VPQ:EPLP-AA¹⁷-VYY:VGRTPKV:EQLSN:VRS:XKXS, KIPKAXX:VPT:EPLP-AA¹⁷-VYY:DENEKVV:EQLSN:VVE:GXGXR, GIPEPXX:VPE:EPLP-AA¹⁷-VYY:DENKNVV:EQLSN:TVE:SXAXR, SIPKAXX:VPT:EPLP-AA¹⁷-VYY:DEYDKVV:EQLSN:VVE:GXGXR, HVTKPTX:APT:EPLP-AA¹⁷-VYY:DDSSNVI:EQLSN:VVR:SXGXH, YVPKPXX:APT:EPLP-AA¹⁷-VYY:DDSSNVI:EQLSN:VVR:SXGXH, TVPKPXX:APT:EPLP-AA¹⁷-VYY:DDSSNVI:EQLSN:VVR:AXGXH, AVPKAXX:APT:EPLP-AA¹⁷-VYY:DSSNNVI:EQLSN:VVK:AXGXH, KVGKAXX:VPT:EPLP-AA¹⁷-VYY:DDMGVPT:EQLSN:VAE:XGXR, KASKAXX:VPT:EPLP-AA¹⁷-VYY:DKGVVTY:EQLSN:AVS:EXGXR, GSAGPXX:TPT:EPLP-AA¹⁷-VYY:NDKQQII:EQLSN:VVD:RXGXS, AAPASXX:VPA:EPLP-AA¹⁷-VYY:DAANNVV:EQLSN:VVE:AXGXR, STPPTXX:VPT:EPLP-AA¹⁷-VYY:DSANNVV:EQLSN:VVE:SXGXR, HVPKPXX:APT:EPLP-AA¹⁷-VYY:DDSSNVI:EQLSN:VVR:SXGXH, RVPSTXX:APV:EPLP-AA¹⁷-VYY:DNGRVLL:EQLSN:VEE:XGXL, ASASPXX:VSQ:EPLP-AA¹⁷-VYY:IGKTPKI:EQLSN:VKS:XKXS, ASASPXX:VPQ:EPLP-AA¹⁷-VYY:VGRTPKV:EQLSN:VKS:XKXS, NDEGLEX:VPT:EPLP-AA¹⁷-VYY:RIKPHQGQH:EQLSN:QHN:KXEXR, NDEGLEX:VPT:EPLP-AA¹⁷-VYY:RIKPHQGQH:EQLSN:EHS:QXEXR, SSVKXQP:SRV:EPLP-AA¹⁷-VYY:EYVRKKPKL:EQLSN:EEH:LEXAXA, RNVQXRP:TQV:EPLP-AA¹⁷-VYY:EIVRKKPIF:EQLSN:EDH:LAXKXE, KIPKAXX:VSQ:EPLT-AA¹⁷-LYY:DENEKVV:EQLSN:VKS:GXGXR, GIPEPXX:VSQ:EPLT-AA¹⁷-LYY:DENKNVV:EQLSN:VKS:SXAXR, SIPKAXX:VSQ:EPLT-AA¹⁷-LYY:DEYDKVV:EQLSN:VKS:GXGXR, HVTKPTX:VSQ:EPLT-AA¹⁷-LYY:DDSSNVI:EQLSN:VKS:SXGXH, YVPKPXX:VSQ:EPLT-AA¹⁷-LYY:DDSSNVI:EQLSN:VKS:SXGXH, TVPKPXX:VSQ:EPLT-AA¹⁷-LYY:DDSSNVI:EQLSN:VKS:AXGXH, AVPKAXX:VSQ:EPLT-AA¹⁷-LYY:DSSNNVI:EQLSN:VKS:AXGXH, KVGKAXX:VSQ:EPLT-AA¹⁷-LYY:DDMGVPT:EQLSN:VKS:XGXR, KASKAXX:VSQ:EPLT-AA¹⁷-LYY:DKGVVTY:EQLSN:VKS:EXGXR, GSAGPXX:VSQ:EPLT-AA¹⁷-LYY:NDKQQII:EQLSN:VKS:RXGXS, AAPASXX:VSQ:EPLT-AA¹⁷-LYY:DAANNVV:EQLSN:VKS:AXGXR, STPPTXX:VSQ:EPLT-AA¹⁷-LYY:DSANNVV:EQLSN:VKS:SXGXR, HVPKPXX:VSQ:EPLT-AA¹⁷-LYY:DDSSNVI:EQLSN:VKS:SXGXH, RVPSTXX:VSQ:EPLT-AA¹⁷-LYY:DNGRVLL:EQLSN:VKS:XGXL, ASAAPXX:VSQ:EPLT-AA¹⁷-LYY:VGRKPKV:EQLSN:VKS:XKXS, ASASPXX:VSQ:EPLT-AA¹⁷-LYY:VGRTPKV:EQLSN:VKS:XKXS, KIPKAXX:VPT:EPLT-AA¹⁷-LYY:DENEKVV:EQLSN:VVE:GXGXR, GIPEPXX:VPE:EPLT-AA¹⁷-LYY:DENKNVV:EQLSN:TVE:SXAXR, SIPKAXX:VPT:EPLT-AA¹⁷-LYY:DEYDKVV:EQLSN:VVE:GXGXR, HVTKPTX:APT:EPLT-AA¹⁷-LYY:DDSSNVI:EQLSN:VVR:SXGXH, YVPKPXX:APT:EPLT-AA¹⁷-LYY:DDSSNVI:EQLSN:VVR:SXGXH, TVPKPXX:APT:EPLT-AA¹⁷-LYY:DDSSNVI:EQLSN:VVR:AXGXH, AVPKAXX:APT:EPLT-AA¹⁷-LYY:DSSNNVI:EQLSN:VVK:AXGXH, KVGKAXX:VPT:EPLT-AA¹⁷-LYY:DDMGVPT:EQLSN:VAE:XGXR, KASKAXX:VPT:EPLT-AA¹⁷-LYY:DKGVVTY:EQLSN:AVS:EXGXR, GSAGPXX:TPT:EPLT-AA¹⁷-LYY:NDKQQII:EQLSN:VVD:RXGXS, AAPASXX:VPA:EPLT-AA¹⁷-LYY:DAANNVV:EQLSN:VVE:AXGXR, STPPTXX:VPT:EPLT-AA¹⁷-LYY:DSANNVV:EQLSN:VVE:SXGXR, HVPKPXX:APT:EPLT-AA¹⁷-LYY:DDSSNVI:EQLSN:VVR:SXGXH, RVPSTXX:APV:EPLT-AA¹⁷-LYY:DNGRVLL:EQLSN:VEE:XGXL, ASAAPXX:VPQ:EPLT-AA¹⁷-LYY:VGRKPKV:EQLSN:VRS:XKXS, NDEGLEX:VPT:EPLT-AA¹⁷-LYY:RIKPHQGQH:EQLSN:QHN:KXEXR, NDEGLEX:VPT:EPLT-AA¹⁷-LYY:RIKPHQGQH:EQLSN:EHS:QXEXR, SSVKXQP:SRV:EPLT-AA¹⁷-LYY:EYVRKKPKL:EQLSN:EEH:LEXAXA, RNVQXRP:TQV:EPLT-AA¹⁷-LYY:EIVRKKPIF:EQLSN:EDH:LAXKXE, KIPKAXX:VPQ:EPLT-AA¹⁷-LYY:DENEKVV:EQLSN:VKS:GXGXR, GIPEPXX:VPQ:EPLT-AA¹⁷-LYY:DENKNVV:EQLSN:VKS:SXAXR, SIPKAXX:VPQ:EPLT-AA¹⁷-LYY:DEYDKVV:EQLSN:VKS:GXGXR, HVTKPTX:VPQ:EPLT-AA¹⁷-LYY:DDSSNVI:EQLSN:VKS:SXGXH, YVPKPXX:VPQ:EPLT-AA¹⁷-LYY:DDSSNVI:EQLSN:VKS:SXGXH, TVPKPXX:VPQ:EPLT-AA¹⁷-LYY:DDSSNVI:EQLSN:VKS:AXGXH, AVPKAXX:VPQ:EPLT-AA¹⁷-LYY:DSSNNVI:EQLSN:VKS:AXGXH, KVGKAXX:VPQ:EPLT-AA¹⁷-LYY:DDMGVPT:EQLSN:VKS:XGXR, KASKAXX:VPQ:EPLT-AA¹⁷-LYY:DKGVVTY:EQLSN:VKS:EXGXR, GSAGPXX:VPQ:EPLT-AA¹⁷-LYY:NDKQQII:EQLSN:VKS:RXGXS, AAPASXX:VPQ:EPLT-AA¹⁷-LYY:DAANNVV:EQLSN:VKS:AXGXR, STPPTXX:VPQ:EPLT-AA¹⁷-LYY:DSANNVV:EQLSN:VKS:SXGXR, HVPKPXX:VPQ:EPLT-AA¹⁷-LYY:DDSSNVI:EQLSN:VKS:SXGXH, RVPSTXX:VPQ:EPLT-AA¹⁷-LYY:DNGRVLL:EQLSN:VKS:XGXL, ASAAPXX:VPQ:EPLT-AA¹⁷-LYY:VGRKPKV:EQLSN:VKS:XKXS, ASASPXX:VPQ:EPLT-AA¹⁷-LYY:IGKTPKI:EQLSN:VKS:XKXS, NDEGLEX:VPT:SNIT-AA¹⁷-QIM:RIKPHQGQH:IGEMS:QHN:QXEXR, KIPKAXX:VPT:SNIT-AA¹⁷-QIM:DENEKVV:IGEMS:VVE:GXGXR, GIPEPXX:VPE:SNIT-AA¹⁷-QIM:DENKNVV:IGEMS:TVE:SXAXR, SIPKAXX:VPT:SNIT-AA¹⁷-QIM:DEYDKVV:IGEMS:VVE:GXGXR, HVTKPTX:APT:SNIT-AA¹⁷-QIM:DDSSNVI:IGEMS:VVR:SXGXH, YVPKPXX:APT:SNIT-AA¹⁷-QIM:DDSSNVI:IGEMS:VVR:SXGXH, TVPKPXX:APT:SNIT-AA¹⁷-QIM:DDSSNVI:IGEMS:VVR:AXGXH, AVPKAXX:APT:SNIT-AA¹⁷-QIM:DSSNNVI:IGEMS:VVK:AXGXH, KVGKAXX:VPT:SNIT-AA¹⁷-QIM:DDMGVPT:IGEMS:VAE:XGXR, KASKAXX:VPT:SNIT-AA¹⁷-QIM:DKGVVTY:IGEMS:AVS:EXGXR, GSAGPXX:TPT:SNIT-AA¹⁷-QIM:NDKQQII:IGEMS:VVD:RXGXS, AAPASXX:VPA:SNIT-AA¹⁷-QIM:DAANNVV:IGEMS:VVE:AXGXR, STPPTXX:VPT:SNIT-AA¹⁷-QIM:DSANNVV:IGEMS:VVE:SXGXR, HVPKPXX:APT:SNIT-AA¹⁷-QIM:DDSSNVI:IGEMS:VVR:SXGXH, RVPSTXX:APV:SNIT-AA¹⁷-QIM:DNGRVLL:IGEMS:VEE:XGXL, ASAAPXX:VPQ:SNIT-AA¹⁷-QIM:VGRKPKV:IGEMS:VRS:XKXS, ASASPXX:VSQ:SNIT-AA¹⁷-QIM:IGKTPKI:IGEMS:VKS:XKXS, ASASPXX:VPQ:SNIT-AA¹⁷-QIM:VGRTPKV:IGEMS:VKS:XKXS, NDEGLEX:VPT:SNIT-AA¹⁷-QIM:RIKPHQGQH:IGEMS:EHS:QXEXR, SSVKXQP:SRV:SNIT-AA¹⁷-QIM:EYVRKKPKIAGEMS:EEH:LEXAXA, RNVQXRP:TQV:SNIT-AA¹⁷-QIM:EIVRKKPIF:IGEMS:EDH:LAXKXE, NDEGLEX:VPT:SNIT-AA¹⁷-QIM:RIKPHQGQH:LGEMS:EHS:KXEXR, KIPKAXX:VPT:SNIT-AA¹⁷-QIM:DENEKVV:LGEMS:VVE:GXGXR, GIPEPXX:VPE:SNIT-AA¹⁷-QIM:DENKNVVIGEMS:TVE:SXAXR, SIPKAXX:VPT:SNIT-AA¹⁷-QIM:DEYDKVVIGEMS:VVE:GXGXR, HVTKPTX:APT:SNIT-AA¹⁷-QIM:DDSSNVI:LGEMS:VVR:SXGXH, YVPKPXX:APT:SNIT-AA¹⁷-QIM:DDSSNVI:LGEMS:VVR:SXGXH, TVPKPXX:APT:SNIT-AA¹⁷-QIM:DDSSNVI:LGEMS:VVR:AXGXH, AVPKAXX:APT:SNIT-AA¹⁷-QIM:DSSNNVI:LGEMS:VVK:AXGXH, KVGKAXX:VPT:SNIT-AA¹⁷-QIM:DDMGVPTIGEMS:VAE:XGXR, KASKAXX:VPT:SNIT-AA¹⁷-QIM:DKGVVTY:LGEMS:AVS:EXGXR, GSAGPXX:TPT:SNIT-AA¹⁷-QIM:NDKQQII:LGEMS:VVD:RXGXS, AAPASXX:VPA:SNIT-AA¹⁷-QIM:DAANNVVIGEMS:VVE:AXGXR, STPPTXX:VPT:SNIT-AA¹⁷-QIM:DSANNVVIGEMS:VVE:SXGXR, HVPKPXX:APT:SNIT-AA¹⁷-QIM:DDSSNVI:LGEMS:VVR:SXGXH, RVPSTXX:APV:SNIT-AA¹⁷-QIM:DNGRVLLIGEMS:VEE:XGXL, ASAAPXX:VPQ:SNIT-AA¹⁷-QIM:VGRKPKVIGEMS:VRS:XKXS, ASASPXX:VSQ:SNIT-AA¹⁷-QIM:IGKTPKI:LGEMS:VKS:XKXS, ASASPXX:VPQ:SNIT-AA¹⁷-QIM:VGRTPKVIGEMS:VKS:XKXS, NDEGLEX:VPT:SNIT-AA¹⁷-QIM:RIKPHQGQH:LGEMS:QHN:KXEXR, SSVKXQP:SRV:SNIT-AA¹⁷-QIM:EYVRKKPKL:LGEMS:EEH:LEXAXA, RNVQXRP:TQV:SNIT-AA¹⁷-QIM:EIVRKKPIF:LGEMS:EDH:LAXKXE, RNVQXRP:SRV:RSVK-AA¹⁷-AKV:EIVRKKPIF:KEVQV:EEH:LAXKXE, KIPKAXX:VPT:RSVK-AA¹⁷-AKV:DENEKVV:KEVQV:VVE:GXGXR, GIPEPXX:VPE:RSVK-AA¹⁷-AKV:DENKNVV:KEVQV:TVE:SXAXR, SIPKAXX:VPT:RSVK-AA¹⁷-AKV:DEYDKVV:KEVQV:VVE:GXGXR, HVTKPTX:APT:RSVK-AA¹⁷-AKV:DDSSNVI:KEVQV:VVR:SXGXH, YVPKPXX:APT:RSVK-AA¹⁷-AKV:DDSSNVI:KEVQV:VVR:SXGXH, TVPKPXX:APT:RSVK-AA¹⁷-AKV:DDSSNVI:KEVQV:VVR:AXGXH, AVPKAXX:APT:RSVK-AA¹⁷-AKV:DSSNNVI:KEVQV:VVK:AXGXH, KVGKAXX:VPT:RSVK-AA¹⁷-AKV:DDMGVPT:KEVQV:VAE:XGXR, KASKAXX:VPT:RSVK-AA¹⁷-AKV:DKGVVTY:KEVQV:AVS:EXGXR, GSAGPXX:TPT:RSVK-AA¹⁷-AKV:NDKQQII:KEVQV:VVD:RXGXS, AAPASXX:VPA:RSVK-AA¹⁷-AKV:DAANNVV:KEVQV:VVE:AXGXR, STPPTXX:VPT:RSVK-AA¹⁷-AKV:DSANNVV:KEVQV:VVE:SXGXR, HVPKPXX:APT:RSVK-AA¹⁷-AKV:DDSSNVI:KEVQV:VVR:SXGXH, RVPSTXX:APV:RSVK-AA¹⁷-AKV:DNGRVLL:KEVQV:VEE:XGXL, ASAAPXX:VPQ:RSVK-AA¹⁷-AKV:VGRKPKV:KEVQV:VRS:XKXS, ASASPXX:VSQ:RSVK-AA¹⁷-AKV:IGKTPKI:KEVQV:VKS:XKXS, ASASPXX:VPQ:RSVK-AA¹⁷-AKV:VGRTPKV:KEVQV:VKS:XKXS, NDEGLEX:VPT:RSVK-AA¹⁷-AKV:RIKPHQGQH:KEVQV:QHN:KXEXR, NDEGLEX:VPT:RSVK-AA¹⁷-AKV:RIKPHQGQH:KEVQV:EHS:QXEXR, RNVQXRP:TQV:RSVK-AA¹⁷-AKV:EIVRKKPIF:KEVQV:EDH:LAXKXE, SSVKXQP:TQV:RPVQ-AA¹⁷-RKI:EYVRKKPKL:KKATV:EDH:LEXAXA, KIPKAXX:VPT:RPVQ-AA¹⁷-RKI:DENEKVV:KKATV:VVE:GXGXR, GIPEPXX:VPE:RPVQ-AA¹⁷-RKI:DENKNVV:KKATV:TVE:SXAXR, SIPKAXX:VPT:RPVQ-AA¹⁷-RKI:DEYDKVV:KKATV:VVE:GXGXR, HVTKPTX:APT:RPVQ-AA¹⁷-RKI:DDSSNVI:KKATV:VVR:SXGXH, YVPKPXX:APT:RPVQ-AA¹⁷-RKI:DDSSNVI:KKATV:VVR:SXGXH, TVPKPXX:APT:RPVQ-AA¹⁷-RKI:DDSSNVI:KKATV:VVR:AXGXH, AVPKAXX:APT:RPVQ-AA¹⁷-RKI:DSSNNVI:KKATV:VVK:AXGXH, KVGKAXX:VPT:RPVQ-AA¹⁷-RKI:DDMGVPT:KKATV:VAE:XGXR, KASKAXX:VPT:RPVQ-AA¹⁷-RKI:DKGVVTY:KKATV:AVS:EXGXR, GSAGPXX:TPT:RPVQ-AA¹⁷-RKI:NDKQQII:KKATV:VVD:RXGXS, AAPASXX:VPA:RPVQ-AA¹⁷-RKI:DAANNVV:KKATV:VVE:AXGXR, STPPTXX:VPT:RPVQ-AA¹⁷-RKI:DSANNVV:KKATV:VVE:SXGXR, HVPKPXX:APT:RPVQ-AA¹⁷-RKI:DDSSNVI:KKATV:VVR:SXGXH, RVPSTXX:APV:RPVQ-AA¹⁷-RKI:DNGRVLL:KKATV:VEE:XGXL, ASAAPXX:VPQ:RPVQ-AA¹⁷-RKI:VGRKPKV:KKATV:VRS:XKXS, ASASPXX:VSQ:RPVQ-AA¹⁷-RKI:IGKTPKI:KKATV:VKS:XKXS, ASASPXX:VPQ:RPVQ-AA¹⁷-RKI:VGRTPKV:KKATV:VKS:XKXS, NDEGLEX:VPT:RPVQ-AA¹⁷-RKI: RIKPHQGQH:KKATV:QHN:KXEXR, NDEGLEX:VPT:RPVQ-AA¹⁷-RKI:RIKPHQGQH:KKATV:EHS:QXEXR and SSVKXQP:SRV:RPVQ-AA¹⁷-RKI:EYVRKKPKL:KKATV:EEH:LEXAXA; and wherein AA¹⁷ is selected from the group consisting of G, A, V, L, I, P, F, M, W, T and S (in particular is selected from the group consisting of M, I, L, V and T).

[0439] In particular, in certain embodiments, the heptuplet PEP7:PEP5:PEP1:LINKER:PEP2:PEP6:PEP8 is selected from the group consisting of GIPEPXX:VPTKM:SAIS:DENKNVV:LKNYQ:NMVVE:SXAXR, SIPKAXX:VPTEL:SAIS:DEYDKVV:LKNYQ:EMVVE:GXGXR, HVTKPTX:VPTKL:SAIS:DDSSNVI:LKNYQ:NMVVE:SXGXH, YVPKPXX:VPTKL:SAIS:DDSSNVI:LKNYQ:NMVVE:SXGXH, TVPKPXX:VPTQL:SAIS:DDSSNVI:LKNYQ:NMVVE:AXGXH, AVPKAXX:VPTKL:SAIS:DSSNNVI:LKNYQ:NMVVE:AXGXH, KVGKAXX:VPTKL:SAIS:DDMGVPT:LKNYQ:EGMSVVE:XGXR, KASKAXX:VPTKL:SAIS:DKGVVTY:LKNYQ:GMVVE:EXGXR, GSAGPXX:VPTKM:SAIS:NDKQQII:LKNYQ:GMVVE:RXGXS, AAPASXX:VPTRL:SAIS:DAANNVV:LKNYQ:DMVVE:AXGXR, STPPTXX:VPTRL:SAIS:DSANNVV:LKNYQ:DMVVE:SXGXR, HVPKPXX:VPTKL:SAIS:DDSSNVI:LKNYQ:NMVVE:SXGXH, RVPSTXX:VPTKT:SAIS:DNGRVLL:LKNYQ:MIVVE:XGXL, ASAAPXX:VPTAL:SAIS:VGRKPKV:LKNYQ:MIVVE:XKXS, ASASPXX:VPTDL:SAIS:IGKTPKI:LKNYQ:MIVVE:XKXS, ASASPXX:VPTDL:SAIS:VGRTPKV:LKNYQ:MVVVE:XKXS, NDEGLXS:VPTEE:SAIS:RIKPHQGQH:LKNYQ:FLVVE:KXEXR, NDEGLXS:VPTGQ:SAIS:RIKPHQGQH:LKNYQ:LEVVE:QXEXR, SSVKXQP:VPTHH:SAIS:EYVRKKPKL:LKNYQ:RLVVE:LEXAXA, RNVQXRP:VPTQL:SAIS:EIVRKKPIF:LKNYQ:TLVVE:LAXKXE, GIPEPXX:VPEKM:SAIS:DENKNVV:LKNYQ:NMTVE:SXAXR, HVTKPTX:APTKL:SAIS:DDSSNVI:LKNYQ:NMVVR:SXGXH, YVPKPXX:APTKL:SAIS:DDSSNVI:LKNYQ:NMVVR:SXGXH, TVPKPXX:APTQL:SAIS:DDSSNVI:LKNYQ:NMVVR:AXGXH, AVPKAXX:APTKL:SAIS:DSSNNVI:LKNYQ:NMVVK:AXGXH, KVGKAXX:VPTKL:SAIS:DDMGVPT:LKNYQ:EGMSVAE:XGXR, KASKAXX:VPTKL:SAIS:DKGVVTY:LKNYQ:GMAVS:EXGXR, GSAGPXX:TPTKM:SAIS:NDKQQII:LKNYQ:GMVVD:RXGXS, AAPASXX:VPARL:SAIS:DAANNVV:LKNYQ:DMVVE:AXGXR, HVPKPXX:APTKL:SAIS:DDSSNVI:LKNYQ:NMVVR:SXGXH, RVPSTXX:APVKT:SAIS:DNGRVLL:LKNYQ:MIVEE:XGXL, ASAAPXX:VPQAL:SAIS:VGRKPKV:LKNYQ:MIVRS:XKXS, ASASPXX:VSQDL:SAIS:IGKTPKI:LKNYQ:MIVKS:XKXS, ASASPXX:VPQDL:SAIS:VGRTPKV:LKNYQ:MVVKS:XKXS, NDEGLXS:VPTEE:SAIS:RIKPHQGQH:LKNYQ:FLQHN:KXEXR, NDEGLXS:VPTGQ:SAIS:RIKPHQGQH:LKNYQ:LEEHS:QXEXR, SSVKXQP:SRVHH:SAIS:EYVRKKPKL:LKNYQ:RLEEH:LEXAXA, RNVQXRP:TQVQL:SAIS: EIVRKKPIF:LKNYQ:TLEDH:LAXKXE, KIPKAXX:VPEEL:SSLS:DENEKVV:LKVYP:DMTVE:GXGXR, SIPKAXX:VPEEL:SSLS:DEYDKVV:LKVYP:EMTVE:GXGXR, HVTKPTX:VPEKL:SSLS:DDSSNVI:LKVYP:NMTVE:SXGXH, YVPKPXX:VPEKL:SSLS:DDSSNVI:LKVYP:NMTVE:SXGXH, TVPKPXX:VPEQL:SSLS:DDSSNVI:LKVYP:NMTVE:AXGXH, AVPKAXX:VPEKL:SSLS:DSSNNVI:LKVYP:NMTVE:AXGXH, KVGKAXX:VPEKL:SSLS:DDMGVPT:LKVYP:EGMSTVE:XGXR, KASKAXX:VPEKL:SSLS:DKGVVTY:LKVYP:GMTVE:EXGXR, GSAGPXX:VPEKM:SSLS:NDKQQII:LKVYP:GMTVE:RXGXS, AAPASXX:VPERL:SSLS:DAANNVV:LKVYP:DMTVE:AXGXR, STPPTXX:VPERL:SSLS:DSANNVV:LKVYP:DMTVE:SXGXR, HVPKPXX:VPEKL:SSLS:DDSSNVI:LKVYP:NMTVE:SXGXH, RVPSTXX:VPEKT:SSLS:DNGRVLL:LKVYP:MITVE:XGXL, ASAAPXX:VPEAL:SSLS:VGRKPKV:LKVYP:MITVE:XKXS, ASASPXX:VPEDL:SSLS:IGKTPKI:LKVYP:MITVE:XKXS, ASASPXX:VPEDL:SSLS:VGRTPKV:LKVYP:MVTVE:XKXS, NDEGLXS:VPEEE:SSLS:RIKPHQGQH:LKVYP:FLTVE:KXEXR, NDEGLXS:VPEGQ:SSLS:RIKPHQGQH:LKVYP:LETVE:QXEXR, SSVKXQP:VPEHH:SSLS:EYVRKKPKL:LKVYP:RLTVE:LEXAXA, RNVQXRP:VPEQL:SSLS: EIVRKKPIF:LKVYP:TLTVE:LAXKXE, KIPKAXX:VPTEL:SSLS:DEN EKVV:LKVYP:DMVVE:GXGXR, SIPKAXX:VPTEL:SSLS:DEYDKVV:LKVYP:EMVVE:GXGXR, HVTKPTX:APTKL:SSLS:DDSSNVI:LKVYP:NMVVR:SXGXH, YVPKPXX:APTKL:SSLS:DDSSNVI:LKVYP:NMVVR:SXGXH, TVPKPXX:APTQL:SSLS:DDSSNVI:LKVYP:NMVVR:AXGXH, AVPKAXX:APTKL:SSLS:DSSNNVI:LKVYP:NMVVK:AXGXH, KVGKAXX:VPTKL:SSLS:DDMGVPT:LKVYP:EGMSVAE:XGXR, KASKAXX:VPTKL:SSLS:DKGVVTY:LKVYP:GMAVS:EXGXR, GSAGPXX:TPTKM:SSLS:NDKQQIIIKVYP:GMVVD:RXGXS, AAPASXX:VPARL:SSLS:DAANNVV:LKVYP:DMVVE:AXGXR, STPPTXX:VPTRL:SSLS:DSANNVV:LKVYP:DMVVE:SXGXR, HVPKPXX:APTKL:SSLS:DDSSNVI:LKVYP:NMVVR:SXGXH, RVPSTXX:APVKT:SSLS:DNGRVLL:LKVYP:MIVEE:XGXL, ASAAPXX:VPQAL:SSLS:VGRKPKV:LKVYP:MIVRS:XKXS, ASASPXX:VSQDL:SSLS:IGKTPKI:LKVYP:MIVKS:XKXS, ASASPXX:VPQDL:SSLS:VGRTPKV:LKVYP:MVVKS:XKXS, NDEGLXS:VPTEE:SSLS: RIKPHQGQH:LKVYP:FLQHN:KXEXR, NDEGLXS:VPTGQ:SSLS: RIKPHQGQH:LKVYP:LEEHS:QXEXR, SSVKXQP:SRVHH:SSLS: EYVRKKPKL:LKVYP:RLEEH:LEXAXA, RNVQXRP:TQVQL:SSLS: EIVRKKPIF:LKVYP:TLEDH:LAXKXE, KIPKAXX:VPTEL:SAIS:DENEKVV:LKNYQ:DMVVE:GXGXR, KIPKAXX:APTEL:NAIS:DEN EKVV:LKKYR:DMVVR:GXGXR, GIPEPXX:APTKM:NAIS:DENKNVV:LKKYR:NMVVR:SXAXR, SIPKAXX:APTEL:NAIS:DEYDKVV:LKKYR:EMVVR:GXGXR, YVPKPXX:APTKL:NAIS:DDSSNVI:LKKYR:NMVVR:SXGXH, TVPKPXX:APTQL:NAIS:DDSSNVI:LKKYR:NMVVR:AXGXH, AVPKAXX:APTKL:NAIS:DSSNNVI:LKKYR:NMVVR:AXGXH, KVGKAXX:APTKL:NAIS:DDMGVPT:LKKYR:EGMSVVR:XGXR, KASKAXX:APTKL:NAIS:DKGVVTY:LKKYR:GMVVR: EXGXR, GSAGPXX:APTKM:NAIS:NDKQQII:LKKYR:GMVVR:RXGXS, AAPASXX:APTRL:NAIS:DAANNVV:LKKYR:DMVVR:AXGXR, STPPTXX:APTRL:NAIS:DSANNVV:LKKYR:DMVVR:SXGXR, HVPKPXX:APTKL:NAIS:DDSSNVI:LKKYR:NMVVR:SXGXH, RVPSTXX:APTKT:NAIS:DNGRVLL:LKKYR:MIVVR:XGXL, ASAAPXX:APTAL:NAIS:VGRKPKV:LKKYR:MIVVR:XKXS, ASASPXX:APTDL:NAIS:IGKTPKI:LKKYR:MIVVR:XKXS, ASASPXX:APTDL:NAIS:VGRTPKV:LKKYR:MVVVR:XKXS, NDEGLXS:APTEE:NAIS:RIKPHQGQH:LKKYR:FLVVR:KXEXR, NDEGLXS:APTGQ:NAIS: RIKPHQGQH:LKKYR:LEVVR:QXEXR, SSVKXQP:APTHH:NAIS:EYVRKKPKL:LKKYR:RLVVR:LEXAXA, RNVQXRP:APTQL:NAIS:EIVRKKPIF:LKKYR:TLVVR:LAXKXE, KIPKAXX:VPTEL:NAIS:DENEKVV:LKKYR:DMVVE:GXGXR, GIPEPXX:VPEKM:NAIS:DENKNVV:LKKYR:NMTVE:SXAXR, SIPKAXX:VPTEL:NAIS:DEYDKVV:LKKYR:EMVVE:GXGXR, AVPKAXX:APTKL:NAIS:DSSNNVI:LKKYR:NMVVK:AXGXH, KVGKAXX:VPTKL:NAIS:DDMGVPT:LKKYR:EGMSVAE:XGXR, KASKAXX:VPTKL:NAIS:DKGVVTY:LKKYR:GMAVS:EXGXR, GSAGPXX:TPTKM:NAIS:NDKQQIIIKKYR:GMVVD:RXGXS, AAPASXX:VPARL:NAIS:DAANNVV:LKKYR:DMVVE:AXGXR, STPPTXX:VPTRL:NAIS:DSANNVV:LKKYR:DMVVE:SXGXR, RVPSTXX:APVKT:NAIS:DNGRVLL:LKKYR:MIVEE:XGXL, ASAAPXX:VPQAL:NAIS:VGRKPKV:LKKYR:MIVRS:XKXS, ASASPXX:VSQDL:NAIS:IGKTPKI:LKKYR:MIVKS:XKXS, ASASPXX:VPQDL:NAIS:VGRTPKV:LKKYR:MVVKS:XKXS, NDEGLXS:VPTEE:NAIS:RIKPHQGQH:LKKYR:FLQHN:KXEXR, NDEGLXS:VPTGQ:NAIS: RIKPHQGQH:LKKYR:LEEHS:QXEXR, SSVKXQP:SRVHH:NAIS: EYVRKKPKL:LKKYR:RLEEH:LEXAXA, RNVQXRP:TQVQL:NAIS:EIVRKKPIF:LKKYR:TLEDH:LAXKXE, HVTKPTX:APTKL:NAIS:DDSSNVI:LKKYR:NMVVR:SXGXH, KIPKAXX:APTEL:SATS:DENEKVV:LRKHR:DMVVK:GXGXR, GIPEPXX:APTKM:SATS:DENKNVV:LRKHR:NMVVK:SXAXR, SIPKAXX:APTEL:SATS:DEYDKVV:LRKHR:EMVVK:GXGXR, HVTKPTX:APTKL:SATS:DDSSNVI:LRKHR:NMVVK:SXGXH, YVPKPXX:APTKL:SATS:DDSSNVI:LRKHR:NMVVK:SXGXH, TVPKPXX:APTQL:SATS:DDSSNVI:LRKHR:NMVVK:AXGXH, KVGKAXX:APTKL:SATS:DDMGVPT:LRKHR:EGMSVVK:XGXR, KASKAXX:APTKL:SATS:DKGVVTY:LRKHR:GMVVK:EXGXR, GSAGPXX:APTKM:SATS:NDKQQII:LRKHR:GMVVK:RXGXS, AAPASXX:APTRL:SATS:DAANNVV:LRKHR:DMVVK:AXGXR, STPPTXX:APTRL:SATS:DSANNVV:LRKHR:DMVVK:SXGXR, HVPKPXX:APTKL:SATS:DDSSNVI:LRKHR:NMVVK:SXGXH, RVPSTXX:APTKT:SATS:DNGRVLL:LRKHR:MIVVK:XGXL, ASAAPXX:APTAL:SATS:VGRKPKV:LRKHR:MIVVK:XKXS, ASASPXX:APTDL:SATS:IGKTPKI:LRKHR:MIVVK:XKXS, ASASPXX:APTDL:SATS:VGRTPKV:LRKHR:MVVVK:XKXS, NDEGLXS:APTEE:SATS:RIKPHQGQH:LRKHR:FLVVK:KXEXR, NDEGLXS:APTGQ:SATS: RIKPHQGQH:LRKHR:LEVVK:QXEXR, SSVKXQP:APTHH:SATS:EYVRKKPKL:LRKHR:RLVVK:LEXAXA, RNVQXRP:APTQL:SATS: EIVRKKPIF:LRKHR:TLVVK:LAXKXE, KIPKAXX:VPTEL:SATS:DENEKVV:LRKHR:DMVVE:GXGXR, GIPEPXX:VPEKM:SATS:DENKNVV:LRKHR:NMTVE:SXAXR, SIPKAXX:VPTEL:SATS:DEYDKVV:LRKHR:EMVVE:GXGXR, HVTKPTX:APTKL:SATS:DDSSNVI:LRKHR:NMVVR:SXGXH, YVPKPXX:APTKL:SATS:DDSSNVI:LRKHR:NMVVR:SXGXH, TVPKPXX:APTQL:SATS:DDSSNVI:LRKHR:NMVVR:AXGXH, KVGKAXX:VPTKL:SATS:DDMGVPT:LRKHR:EGMSVAE:XGXR, KASKAXX:VPTKL:SATS:DKGVVTY:LRKHR:GMAVS:EXGXR, GSAGPXX:TPTKM:SATS:NDKQQIIIRKHR:GMVVD:RXGXS, AAPASXX:VPARL:SATS:DAANNVV:LRKHR:DMVVE:AXGXR, STPPTXX:VPTRL:SATS:DSANNVV:LRKHR:DMVVE:SXGXR, HVPKPXX:APTKL:SATS:DDSSNVI:LRKHR:NMVVR:SXGXH, RVPSTXX:APVKT:SATS:DNGRVLL:LRKHR:MIVEE:XGXL, ASAAPXX:VPQAL:SATS:VGRKPKV:LRKHR:MIVRS:XKXS, ASASPXX:VSQDL:SATS:IGKTPKI:LRKHR:MIVKS:XKXS, ASASPXX:VPQDL:SATS:VGRTPKV:LRKHR:MVVKS:XKXS, NDEGLXS:VPTEE:SATS:RIKPHQGQH:LRKHR:FLQHN:KXEXR, NDEGLXS:VPTGQ:SATS: RIKPHQGQH:LRKHR:LEEHS:QXEXR, SSVKXQP:SRVHH:SATS:EYVRKKPKL:LRKHR:RLEEH:LEXAXA, RNVQXRP:TQVQL:SATS:EIVRKKPIF:LRKHR:TLEDH:LAXKXE, KIPKAXX:VPTEL:SPIS:DEN EKVV:LKYHY:DMVAE:GXGXR, GIPEPXX:VPTKM:SPIS:DENKNVV:LKYHY:NMVAE:SXAXR, SIPKAXX:VPTEL:SPIS:DEYDKVV:LKYHY:EMVAE:GXGXR, HVTKPTX:VPTKL:SPIS:DDSSNVI:LKYHY:NMVAE:SXGXH, YVPKPXX:VPTKL:SPIS:DDSSNVI:LKYHY:NMVAE:SXGXH, TVPKPXX:VPTQL:SPIS:DDSSNVI:LKYHY:NMVAE:AXGXH, AVPKAXX:VPTKL:SPIS:DSSNNVI:LKYHY:NMVAE:AXGXH, KASKAXX:VPTKL:SPIS:DKGVVTY:LKYHY:GMVAE:EXGXR, GSAGPXX:VPTKM:SPIS:NDKQQII:LKYHY:GMVAE:RXGXS, AAPASXX:VPTRL:SPIS:DAANNVV:LKYHY:DMVAE:AXGXR, STPPTXX:VPTRL:SPIS:DSANNVV:LKYHY:DMVAE:SXGXR, HVPKPXX:VPTKL:SPIS:DDSSNVI:LKYHY:NMVAE:SXGXH, RVPSTXX:VPTKT:SPIS:DNGRVLL:LKYHY:MIVAE:XGXL, ASAAPXX:VPTAL:SPIS:VGRKPKV:LKYHY:MIVAE:XKXS, ASASPXX:VPTDL:SPIS:IGKTPKI:LKYHY:MIVAE:XKXS, ASASPXX:VPTDL:SPIS:VGRTPKV:LKYHY:MVVAE:XKXS, NDEGLXS:VPTEE:SPIS:RIKPHQGQH:LKYHY:FLVAE:KXEXR, NDEGLXS:VPTGQ:SPIS:RIKPHQGQH:LKYHY:LEVAE:QXEXR, SSVKXQP:VPTHH:SPIS:EYVRKKPKL:LKYHY:RLVAE:LEXAXA, RNVQXRP:VPTQL:SPIS:EIVRKKPIF:LKYHY:TLVAE:LAXKXE, KIPKAXX:VPTEL:SPIS:DEN EKVV:LKYHY:DMVVE:GXGXR, GIPEPXX:VPEKM:SPIS:DENKNVV:LKYHY:NMTVE:SXAXR, SIPKAXX:VPTEL:SPIS:DEYDKVV:LKYHY:EMVVE:GXGXR, HVTKPTX:APTKL:SPIS:DDSSNVI:LKYHY:NMVVR:SXGXH, YVPKPXX:APTKL:SPIS:DDSSNVI:LKYHY:NMVVR:SXGXH, TVPKPXX:APTQL:SPIS:DDSSNVI:LKYHY:NMVVR:AXGXH, AVPKAXX:APTKL:SPIS:DSSNNVI:LKYHY:NMVVK:AXGXH, KASKAXX:VPTKL:SPIS:DKGVVTY:LKYHY:GMAVS:EXGXR, GSAGPXX:TPTKM:SPIS:NDKQQII:LKYHY:GMVVD:RXGXS, AAPASXX:VPARL:SPIS:DAANNVV:LKYHY:DMVVE:AXGXR, STPPTXX:VPTRL:SPIS:DSANNVV:LKYHY:DMVVE:SXGXR, HVPKPXX:APTKL:SPIS:DDSSNVI:LKYHY:NMVVR:SXGXH, RVPSTXX:APVKT:SPIS:DNGRVLL:LKYHY:MIVEE:XGXL, ASAAPXX:VPQAL:SPIS:VGRKPKV:LKYHY:MIVRS:XKXS, ASASPXX:VSQDL:SPIS:IGKTPKI:LKYHY:MIVKS:XKXS, ASASPXX:VPQDL:SPIS:VGRTPKV:LKYHY:MVVKS:XKXS, NDEGLXS:VPTEE:SPIS:RIKPHQGQH:LKYHY:FLQHN:KXEXR, NDEGLXS:VPTGQ:SPIS:RIKPHQGQH:LKYHY:LEEHS:QXEXR, SSVKXQP:SRVHH:SPIS:EYVRKKPKL:LKYHY: RLEEH:LEXAXA, RNVQXRP:TQVQL:SPIS:EIVRKKPIF:LKYHY:TLEDH:LAXKXE, KIPKAXX:VPTEL: EPIS:DEN EKVV:KFKYE:DMAVS:GXGXR, GIPEPXX:VPTKM:EPIS:DENKNVV:KFKYE:NMAVS:SXAXR, SIPKAXX:VPTEL:EPIS:DEYDKVV:KFKYE:EMAVS:GXGXR, HVTKPTX:VPTKL:EPIS:DDSSNVI:KFKYE:NMAVS:SXGXH, YVPKPXX:VPTKL: EPIS:DDSSNVI:KFKYE:NMAVS:SXGXH, TVPKPXX:VPTQL:EPIS:DDSSNVI:KFKYE:NMAVS:AXGXH, AVPKAXX:VPTKL: EPIS:DSSNNVI:KFKYE:NMAVS:AXGXH, KVGKAXX:VPTKL:EPIS:DDMGVPT:KFKYE:EGMSAVS:XGXR, GSAGPXX:VPTKM:EPIS:NDKQQII:KFKYE:GMAVS:RXGXS, AAPASXX:VPTRL:EPIS:DAANNVV:KFKYE:DMAVS:AXGXR, STPPTXX:VPTRL:EPIS:DSANNVV:KFKYE:DMAVS:SXGXR, HVPKPXX:VPTKL:EPIS:DDSSNVI:KFKYE:NMAVS:SXGXH, RVPSTXX:VPTKT:EPIS:DNGRVLL:KFKYE:MIAVS:XGXL, ASAAPXX:VPTAL:EPIS:VGRKPKV:KFKYE:MIAVS:XKXS, ASASPXX:VPTDL:EPIS:IGKTPKI:KFKYE:MIAVS:XKXS, ASASPXX:VPTDL:EPIS:VGRTPKV:KFKYE:MVAVS:XKXS, NDEGLXS:VPTEE:EPIS:RIKPHQGQH:KFKYE:FLAVS:KXEXR, NDEGLXS:VPTGQ:EPIS:RIKPHQGQH:KFKYE:LEAVS:QXEXR, SSVKXQP:VPTHH:EPIS:EYVRKKPKL:KFKYE:RLAVS:LEXAXA, RNVQXRP:VPTQL:EPIS:EIVRKKPIF:KFKYE:TLAVS:LAXKXE, KIPKAXX:VPTEL: EPIS:DEN EKVV:KFKYE:DMVVE:GXGXR, GIPEPXX:VPEKM:EPIS:DENKNVV:KFKYE:NMTVE:SXAXR, SIPKAXX:VPTEL:EPIS:DEYDKVV:KFKYE:EMVVE:GXGXR, HVTKPTX:APTKL:EPIS:DDSSNVI:KFKYE:NMVVR:SXGXH, YVPKPXX:APTKL: EPIS:DDSSNVI:KFKYE:NMVVR:SXGXH, TVPKPXX:APTQL:EPIS:DDSSNVI:KFKYE:NMVVR:AXGXH, AVPKAXX:APTKL: EPIS:DSSNNVI:KFKYE:NMVVK:AXGXH, KVGKAXX:VPTKL:EPIS:DDMGVPT:KFKYE:EGMSVAE:XGXR, GSAGPXX:TPTKM:EPIS:NDKQQII:KFKYE:GMVVD:RXGXS, AAPASXX:VPARL:EPIS:DAANNVV:KFKYE:DMVVE:AXGXR, STPPTXX:VPTRL:EPIS:DSANNVV:KFKYE:DMVVE:SXGXR, HVPKPXX:APTKL:EPIS:DDSSNVI:KFKYE:NMVVR:SXGXH, RVPSTXX:APVKT:EPIS:DNGRVLL:KFKYE:MIVEE:XGXL, ASAAPXX:VPQAL:EPIS:VGRKPKV:KFKYE:MIVRS:XKXS, ASASPXX:VSQDL:EPIS:IGKTPKI:KFKYE:MIVKS:XKXS, ASASPXX:VPQDL: EPIS:VGRTPKV:KFKYE:MVVKS:XKXS, NDEGLXS:VPTEE:EPIS:RIKPHQGQH:KFKYE:FLQHN:KXEXR, NDEGLXS:VPTGQ:EPIS:RIKPHQGQH:KFKYE:LEEHS:QXEXR, SSVKXQP:SRVHH:EPIS:EYVRKKPKL:KFKYE:RLEEH:LEXAXA, RNVQXRP:TQVQL:EPIS:EIVRKKPIF:KFKYE:TLEDH:LAXKXE, KIPKAXX:TPTEL:SPIN:DENEKVV:YGKIP:DMVVD:GXGXR, GIPEPXX:TPTKM:SPIN:DENKNVV:YGKIP:NMVVD:SXAXR, SIPKAXX:TPTEL:SPIN:DEYDKVV:YGKIP:EMVVD:GXGXR, HVTKPTX:TPTKL:SPIN:DDSSNVI:YGKIP:NMVVD:SXGXH, YVPKPXX:TPTKL:SPIN:DDSSNVI:YGKIP:NMVVD:SXGXH, TVPKPXX:TPTQL:SPIN:DDSSNVI:YGKIP:NMVVD:AXGXH, AVPKAXX:TPTKL:SPIN:DSSNNVI:YGKIP:NMVVD:AXGXH, KVGKAXX:TPTKL:SPIN:DDMGVPT:YGKIP:EGMSVVD:XGXR, KASKAXX:TPTKL:SPIN:DKGVVTY:YGKIP:GMVVD:EXGXR, AAPASXX:TPTRL:SPIN:DAANNVV:YGKIP:DMVVD:AXGXR, STPPTXX:TPTRL:SPIN:DSANNVV:YGKIP:DMVVD:SXGXR, HVPKPXX:TPTKL:SPIN:DDSSNVI:YGKIP:NMVVD:SXGXH, RVPSTXX:TPTKT:SPIN:DNGRVLL:YGKIP:MIVVD:XGXL, ASAAPXX:TPTAL:SPIN:VGRKPKV:YGKIP:MIVVD:XKXS, ASASPXX:TPTDL:SPIN:IGKTPKI:YGKIP:MIVVD:XKXS, ASASPXX:TPTDL:SPIN:VGRTPKV:YGKIP:MVVVD:XKXS, NDEGLXS:TPTEE:SPIN:RIKPHQGQH:YGKIP:FLVVD:KXEXR, NDEGLXS:TPTGQ:SPIN:RIKPHQGQH:YGKIP:LEVVD:QXEXR, SSVKXQP:TPTHH:SPIN:EYVRKKPKL:YGKIP:RLVVD:LEXAXA, RNVQXRP:TPTQL:SPIN:EIVRKKPIF:YGKIP:TLVVD:LAXKXE, KIPKAXX:VPTEL:SPIN:DENEKVV:YGKIP:DMVVE:GXGXR, GIPEPXX:VPEKM:SPIN:DENKNVV:YGKIP:NMTVE:SXAXR, SIPKAXX:VPTEL:SPIN:DEYDKVV:YGKIP:EMVVE:GXGXR, HVTKPTX:APTKL:SPIN:DDSSNVI:YGKIP:NMVVR:SXGXH, YVPKPXX:APTKL:SPIN:DDSSNVI:YGKIP:NMVVR:SXGXH, TVPKPXX:APTQL:SPIN:DDSSNVI:YGKIP:NMVVR:AXGXH, AVPKAXX:APTKL:SPIN:DSSNNVI:YGKIP:NMVVK:AXGXH, KVGKAXX:VPTKL:SPIN:DDMGVPT:YGKIP:EGMSVAE:XGXR, KASKAXX:VPTKL:SPIN:DKGVVTY:YGKIP:GMAVS:EXGXR, AAPASXX:VPARL:SPIN:DAANNVV:YGKIP:DMVVE:AXGXR, STPPTXX:VPTRL:SPIN:DSANNVV:YGKIP:DMVVE:SXGXR, HVPKPXX:APTKL:SPIN:DDSSNVI:YGKIP:NMVVR:SXGXH, RVPSTXX:APVKT:SPIN:DNGRVLL:YGKIP:MIVEE:XGXL, ASAAPXX:VPQAL:SPIN:VGRKPKV:YGKIP:MIVRS:XKXS, ASASPXX:VSQDL:SPIN:IGKTPKI:YGKIP:MIVKS:XKXS, ASASPXX:VPQDL:SPIN:VGRTPKV:YGKIP:MVVKS:XKXS, NDEGLXS:VPTEE:SPIN:RIKPHQGQH:YGKIP:FLQHN:KXEXR, NDEGLXS:VPTGQ:SPIN: RIKPHQGQH:YGKIP:LEEHS:QXEXR, SSVKXQP:SRVHH:SPIN:EYVRKKPKL:YGKIP:RLEEH:LEXAXA, RNVQXRP:TQVQL:SPIN:EIVRKKPIF:YGKIP:TLEDH:LAXKXE, KIPKAXX:VPAEL:SPIS:DENEKVV:YKQYE:DMVVE:GXGXR, GIPEPXX:VPAKM:SPIS:DENKNVV:YKQYE:NMVVE:SXAXR, SIPKAXX:VPAEL:SPIS:DEYDKVV:YKQYE:EMVVE:GXGXR, HVTKPTX:VPAKL:SPIS:DDSSNVI:YKQYE:NMVVE:SXGXH, YVPKPXX:VPAKL:SPIS:DDSSNVI:YKQYE:NMVVE:SXGXH, TVPKPXX:VPAQL:SPIS:DDSSNVI:YKQYE:NMVVE:AXGXH, AVPKAXX:VPAKL:SPIS:DSSNNVI:YKQYE:NMVVE:AXGXH, KVGKAXX:VPAKL:SPIS:DDMGVPT:YKQYE:EGMSVVE:XGXR, KASKAXX:VPAKL:SPIS:DKGVVTY:YKQYE:GMVVE:EXGXR, GSAGPXX:VPAKM:SPIS:NDKQQII:YKQYE:GMVVE:RXGXS, STPPTXX:VPARL:SPIS:DSANNVV:YKQYE:DMVVE:SXGXR, HVPKPXX:VPAKL:SPIS:DDSSNVI:YKQYE:NMVVE:SXGXH, RVPSTXX:VPAKT:SPIS:DNGRVLL:YKQYE:MIVVE:XGXL, ASAAPXX:VPAAL:SPIS:VGRKPKV:YKQYE:MIVVE:XKXS, ASASPXX:VPADL:SPIS:IGKTPKI:YKQYE:MIVVE:XKXS, ASASPXX:VPADL:SPIS:VGRTPKV:YKQYE:MVVVE:XKXS, NDEGLXS:VPAEE:SPIS:RIKPHQGQH:YKQYE:FLVVE:KXEXR, NDEGLXS:VPAGQ:SPIS:RIKPHQGQH:YKQYE:LEVVE:QXEXR, SSVKXQP:VPAHH:SPIS:EYVRKKPKL:YKQYE:RLVVE:LEXAXA, RNVQXRP:VPAQL:SPIS:EIVRKKPIF:YKQYE:TLVVE:LAXKXE, KIPKAXX:VPTEL:SPIS:DEN EKVV:YKQYE:DMVVE:GXGXR, GIPEPXX:VPEKM:SPIS:DENKNVV:YKQYE:NMTVE:SXAXR, SIPKAXX:VPTEL:SPIS:DEYDKVV:YKQYE:EMVVE:GXGXR, HVTKPTX:APTKL:SPIS:DDSSNVI:YKQYE:NMVVR:SXGXH, YVPKPXX:APTKL:SPIS:DDSSNVI:YKQYE:NMVVR:SXGXH, TVPKPXX:APTQL:SPIS:DDSSNVI:YKQYE:NMVVR:AXGXH, AVPKAXX:APTKL:SPIS:DSSNNVI:YKQYE:NMVVK:AXGXH, KVGKAXX:VPTKL:SPIS:DDMGVPT:YKQYE: EGMSVAE:XGXR, KASKAXX:VPTKL:SPIS:DKGVVTY:YKQYE:GMAVS:EXGXR, GSAGPXX:TPTKM:SPIS:NDKQQII:YKQYE:GMVVD:RXGXS, STPPTXX:VPTRL:SPIS:DSANNVV:YKQYE:DMVVE:SXGXR, HVPKPXX:APTKL:SPIS:DDSSNVI:YKQYE:NMVVR:SXGXH, RVPSTXX:APVKT:SPIS:DNGRVLL:YKQYE:MIVEE:XGXL, ASAAPXX:VPQAL:SPIS:VGRKPKV:YKQYE:MIVRS:XKXS, ASASPXX:VSQDL:SPIS:IGKTPKI:YKQYE:MIVKS:XKXS, ASASPXX:VPQDL:SPIS:VGRTPKV:YKQYE:MVVKS:XKXS, NDEGLXS:VPTEE:SPIS:RIKPHQGQH:YKQYE:FLQHN:KXEXR, NDEGLXS:VPTGQ:SPIS:RIKPHQGQH:YKQYE:LEEHS:QXEXR, SSVKXQP:SRVHH:SPIS:EYVRKKPKL:YKQYE:RLEEH:LEXAXA, RNVQXRP:TQVQL:SPIS: EIVRKKPIF:YKQYE:TLEDH:LAXKXE, GIPEPXX:VPTKM:SPIS:DENKNVV:YKQYE:NMVVE:SXAXR, HVTKPTX:VPTKL:SPIS:DDSSNVI:YKQYE:NMVVE:SXGXH, YVPKPXX:VPTKL:SPIS:DDSSNVI:YKQYE:NMVVE:SXGXH, TVPKPXX:VPTQL:SPIS:DDSSNVI:YKQYE:NMVVE:AXGXH, AVPKAXX:VPTKL:SPIS:DSSNNVI:YKQYE:NMVVE:AXGXH, KVGKAXX:VPTKL:SPIS:DDMGVPT:YKQYE:EGMSVVE:XGXR, KASKAXX:VPTKL:SPIS:DKGVVTY:YKQYE:GMVVE: EXGXR, GSAGPXX:VPTKM:SPIS:NDKQQII:YKQYE:GMVVE:RXGXS, AAPASXX:VPTRL:SPIS:DAANNVV:YKQYE:DMVVE:AXGXR, HVPKPXX:VPTKL:SPIS:DDSSNVI:YKQYE:NMVVE:SXGXH, RVPSTXX:VPTKT:SPIS:DNGRVLL:YKQYE:MIVVE:XGXL, ASAAPXX:VPTAL:SPIS:VGRKPKV:YKQYE:MIVVE:XKXS, ASASPXX:VPTDL:SPIS:IGKTPKI:YKQYE:MIVVE:XKXS, ASASPXX:VPTDL:SPIS:VGRTPKV:YKQYE:MVVVE:XKXS, NDEGLXS:VPTEE:SPIS:RIKPHQGQH:YKQYE:FLVVE:KXEXR, NDEGLXS:VPTGQ:SPIS:RIKPHQGQH:YKQYE:LEVVE:QXEXR, SSVKXQP:VPTHH:SPIS:EYVRKKPKL:YKQYE:RLVVE:LEXAXA, RNVQXRP:VPTQL:SPIS:EIVRKKPIF:YKQYE:TLVVE:LAXKXE, AAPASXX:VPARL:SPIS:DAANNVV:YKQYE:DMVVE:AXGXR, KIPKAXX:APVEL:KPLS:DENEKVV:DHHKD:DMVEE:GXGXR, GIPEPXX:APVKM:KPLS:DENKNVV:DHHKD:NMVEE:SXAXR, SIPKAXX:APVEL:KPLS:DEYDKVV:DHHKD:EMVEE:GXGXR, HVTKPTX:APVKL:KPLS:DDSSNVI:DHHKD:NMVEE:SXGXH, YVPKPXX:APVKL:KPLS:DDSSNVI:DHHKD:NMVEE:SXGXH, TVPKPXX:APVQL:KPLS:DDSSNVI:DHHKD:NMVEE:AXGXH, AVPKAXX:APVKL:KPLS:DSSNNVI:DHHKD:NMVEE:AXGXH, KVGKAXX:APVKL:KPLS:DDMGVPT:DHHKD:EGMSVEE:XGXR, KASKAXX:APVKL:KPLS:DKGVVTY:DHHKD:GMVEE:EXGXR, GSAGPXX:APVKM:KPLS:NDKQQII:DHHKD:GMVEE:RXGXS, AAPASXX:APVRL:KPLS:DAANNVV:DHHKD:DMVEE:AXGXR, STPPTXX:APVRL:KPLS:DSANNVV:DHHKD:DMVEE:SXGXR, HVPKPXX:APVKL:KPLS:DDSSNVI:DHHKD:NMVEE:SXGXH, ASAAPXX:APVAL:KPLS:VGRKPKV:DHHKD:MIVEE:XKXS, ASASPXX:APVDL:KPLS:IGKTPKI:DHHKD:MIVEE:XKXS, ASASPXX:APVDL:KPLS:VGRTPKV:DHHKD:MVVEE:XKXS, NDEGLXS:APVEE:KPLS:RIKPHQGQH:DHHKD:FLVEE:KXEXR, NDEGLXS:APVGQ:KPLS: RIKPHQGQH:DHHKD:LEVEE:QXEXR, SSVKXQP:APVHH:KPLS:EYVRKKPKL:DHHKD:RLVEE:LEXAXA, RNVQXRP:APVQL:KPLS: EIVRKKPIF:DHHKD:TLVEE:LAXKXE, KIPKAXX:VPTEL:KPLS:DEN EKVV:DHHKD:DMVVE:GXGXR, GIPEPXX:VPEKM:KPLS:DENKNVV:DHHKD:NMTVE:SXAXR, SIPKAXX:VPTEL:KPLS:DEYDKVV:DHHKD: EMVVE:GXGXR, HVTKPTX:APTKL:KPLS:DDSSNVI:DHHKD:NMVVR:SXGXH, YVPKPXX:APTKL:KPLS:DDSSNVI:DHHKD:NMVVR:SXGXH, TVPKPXX:APTQL:KPLS:DDSSNVI:DHHKD:NMVVR:AXGXH, AVPKAXX:APTKL:KPLS:DSSNNVI:DHHKD:NMVVK:AXGXH, KVGKAXX:VPTKL:KPLS:DDMGVPT:DHHKD:EGMSVAE:XGXR, KASKAXX:VPTKL:KPLS:DKGVVTY:DHHKD:GMAVS:EXGXR, GSAGPXX:TPTKM:KPLS:NDKQQII:DHHKD:GMVVD:RXGXS, AAPASXX:VPARL:KPLS:DAANNVV:DHHKD:DMVVE:AXGXR, STPPTXX:VPTRL:KPLS:DSANNVV:DHHKD:DMVVE:SXGXR, HVPKPXX:APTKL:KPLS:DDSSNVI:DHHKD:NMVVR:SXGXH, ASAAPXX:VPQAL:KPLS:VGRKPKV:DHHKD:MIVRS:XKXS, ASASPXX:VSQDL:KPLS:IGKTPKI:DHHKD:MIVKS:XKXS, ASASPXX:VPQDL:KPLS:VGRTPKV:DHHKD:MVVKS:XKXS, NDEGLXS:VPTEE:KPLS: RIKPHQGQH:DHHKD:FLQHN:KXEXR, NDEGLXS:VPTGQ:KPLS: RIKPHQGQH:DHHKD:LEEHS:QXEXR, SSVKXQP:SRVHH:KPLS: EYVRKKPKL:DHHKD:RLEEH:LEXAXA, RNVQXRP:TQVQL:KPLS: EIVRKKPIF:DHHKD:TLEDH:LAXKXE, KIPKAXX:VPQEL:EPLP:DENEKVV:EQLSN:DMVRS:GXGXR, GIPEPXX:VPQKM:EPLP:DENKNVV:EQLSN:NMVRS:SXAXR, SIPKAXX:VPQEL:EPLP:DEYDKVV:EQLSN:EMVRS:GXGXR, HVTKPTX:VPQKL:EPLP:DDSSNVI:EQLSN:NMVRS:SXGXH, YVPKPXX:VPQKL:EPLP:DDSSNVI:EQLSN:NMVRS:SXGXH, TVPKPXX:VPQQL:EPLP:DDSSNVI:EQLSN:NMVRS:AXGXH, AVPKAXX:VPQKL:EPLP:DSSNNVI:EQLSN:NMVRS:AXGXH, KVGKAXX:VPQKL:EPLP:DDMGVPT:EQLSN:EGMSVRS:XGXR, KASKAXX:VPQKL:EPLP:DKGVVTY:EQLSN:GMVRS:EXGXR, GSAGPXX:VPQKM:EPLP:NDKQQII:EQLSN:GMVRS:RXGXS, AAPASXX:VPQRL:EPLP:DAANNVV:EQLSN:DMVRS:AXGXR, STPPTXX:VPQRL:EPLP:DSANNVV:EQLSN:DMVRS:SXGXR, HVPKPXX:VPQKL:EPLP:DDSSNVI:EQLSN:NMVRS:SXGXH, RVPSTXX:VPQKT:EPLP:DNGRVLL:EQLSN:MIVRS:XGXL, ASASPXX:VPQDL: EPLP:IGKTPKI:EQLSN:MIVRS:XKXS, ASASPXX:VPQDL: EPLP:VGRTPKV:EQLSN:MVVRS:XKXS, NDEGLXS:VPQEE:EPLP:RIKPHQGQH:EQLSN:FLVRS:KXEXR, NDEGLXS:VPQGQ:EPLP:RIKPHQGQH:EQLSN:LEVRS:QXEXR, SSVKXQP:VPQHH:EPLP: EYVRKKPKL:EQLSN:RLVRS:LEXAXA, RNVQXRP:VPQQL:EPLP:EIVRKKPIF:EQLSN:TLVRS:LAXKXE, KIPKAXX:VPTEL:EPLP:DENEKVV:EQLSN:DMVVE:GXGXR, GIPEPXX:VPEKM:EPLP:DENKNVV:EQLSN:NMTVE:SXAXR, SIPKAXX:VPTEL: EPLP:DEYDKVV:EQLSN:EMVVE:GXGXR, HVTKPTX:APTKL:EPLP:DDSSNVI:EQLSN:NMVVR:SXGXH, YVPKPXX:APTKL: EPLP:DDSSNVI:EQLSN:NMVVR:SXGXH, TVPKPXX:APTQL:EPLP:DDSSNVI:EQLSN:NMVVR:AXGXH, AVPKAXX:APTKL:EPLP:DSSNNVI:EQLSN:NMVVK:AXGXH, KVGKAXX:VPTKL:EPLP:DDMGVPT:EQLSN:EGMSVAE:XGXR, KASKAXX:VPTKL: EPLP:DKGVVTY:EQLSN:GMAVS:EXGXR, GSAGPXX:TPTKM:EPLP:NDKQQII:EQLSN:GMVVD:RXGXS, AAPASXX:VPARL:EPLP:DAANNVV:EQLSN:DMVVE:AXGXR, STPPTXX:VPTRL:EPLP:DSANNVV:EQLSN:DMVVE:SXGXR, HVPKPXX:APTKL:EPLP:DDSSNVI:EQLSN:NMVVR:SXGXH, RVPSTXX:APVKT:EPLP:DNGRVLL:EQLSN:MIVEE:XGXL, ASASPXX:VSQDL: EPLP:IGKTPKI:EQLSN:MIVKS:XKXS, ASASPXX:VPQDL:EPLP:VGRTPKV:EQLSN:MVVKS:XKXS, NDEGLXS:VPTEE:EPLP: RIKPHQGQH:EQLSN:FLQHN:KXEXR, NDEGLXS:VPTGQ:EPLP: RIKPHQGQH:EQLSN:LEEHS:QXEXR, SSVKXQP:SRVHH:EPLP:EYVRKKPKL:EQLSN:RLEEH:LEXAXA, RNVQXRP:TQVQL:EPLP:EIVRKKPIF:EQLSN:TLEDH:LAXKXE, KIPKAXX:VSQEL:EPLT:DENEKVV:EQLSN:DMVKS:GXGXR, GIPEPXX:VSQKM:EPLT:DENKNVV:EQLSN:NMVKS:SXAXR, SIPKAXX:VSQEL:EPLT:DEYDKVV:EQLSN:EMVKS:GXGXR, HVTKPTX:VSQKL:EPLT:DDSSNVI:EQLSN:NMVKS:SXGXH, YVPKPXX:VSQKL:EPLT:DDSSNVI:EQLSN:NMVKS:SXGXH, TVPKPXX:VSQQL:EPLT:DDSSNVI:EQLSN:NMVKS:AXGXH, AVPKAXX:VSQKL:EPLT:DSSNNVI:EQLSN:NMVKS:AXGXH, KVGKAXX:VSQKL:EPLT:DDMGVPT:EQLSN:EGMSVKS:XGXR, KASKAXX:VSQKL:EPLT:DKGVVTY:EQLSN:GMVKS:EXGXR, GSAGPXX:VSQKM:EPLT:NDKQQII:EQLSN:GMVKS:RXGXS, AAPASXX:VSQRL:EPLT:DAANNVV:EQLSN:DMVKS:AXGXR, STPPTXX:VSQRL:EPLT:DSANNVV:EQLSN:DMVKS:SXGXR, HVPKPXX:VSQKL:EPLT:DDSSNVI:EQLSN:NMVKS:SXGXH, RVPSTXX:VSQKT:EPLT:DNGRVLL:EQLSN:MIVKS:XGXL, ASAAPXX:VSQAL:EPLT:VGRKPKV:EQLSN:MIVKS:XKXS, ASASPXX:VSQDL:EPLT:VGRTPKV:EQLSN:MVVKS:XKXS, NDEGLXS:VSQEE:EPLT:RIKPHQGQH:EQLSN:FLVKS:KXEXR, NDEGLXS:VSQGQ:EPLT:RIKPHQGQH:EQLSN:LEVKS:QXEXR, SSVKXQP:VSQHH:EPLT:EYVRKKPKL:EQLSN:RLVKS:LEXAXA, RNVQXRP:VSQQL:EPLT: EIVRKKPIF:EQLSN:TLVKS:LAXKXE, KIPKAXX:VPTEL:EPLT:DENEKVV:EQLSN:DMVVE:GXGXR, GIPEPXX:VPEKM:EPLT:DENKNVV:EQLSN:NMTVE:SXAXR, SIPKAXX:VPTEL:EPLT:DEYDKVV:EQLSN:EMVVE:GXGXR, HVTKPTX:APTKL:EPLT:DDSSNVI: EQLSN:NMVVR:SXGXH, YVPKPXX:APTKL:EPLT:DDSSNVI:EQLSN:NMVVR:SXGXH, TVPKPXX:APTQL:EPLT:DDSSNVI:EQLSN:NMVVR:AXGXH, AVPKAXX:APTKL:EPLT:DSSNNVI:EQLSN:NMVVK:AXGXH, KVGKAXX:VPTKL:EPLT:DDMGVPT:EQLSN:EGMSVAE:XGXR, KASKAXX:VPTKL:EPLT:DKGVVTY:EQLSN:GMAVS:EXGXR, GSAGPXX:TPTKM:EPLT:NDKQQII:EQLSN:GMVVD:RXGXS, AAPASXX:VPARL:EPLT:DAANNVV:EQLSN:DMVVE:AXGXR, STPPTXX:VPTRL:EPLT:DSANNVV:EQLSN:DMVVE:SXGXR, HVPKPXX:APTKL:EPLT:DDSSNVI:EQLSN:NMVVR:SXGXH, RVPSTXX:APVKT:EPLT:DNGRVLL:EQLSN:MIVEE:XGXL, ASAAPXX:VPQAL:EPLT:VGRKPKV:EQLSN:MIVRS:XKXS, ASASPXX:VPQDL:EPLT:VGRTPKV:EQLSN:MVVKS:XKXS, NDEGLXS:VPTEE:EPLT:RIKPHQGQH:EQLSN:FLQHN:KXEXR, NDEGLXS:VPTGQ:EPLT:RIKPHQGQH:EQLSN:LEEHS:QXEXR, SSVKXQP:SRVHH:EPLT:EYVRKKPKL:EQLSN:RLEEH:LEXAXA, RNVQXRP:TQVQL:EPLT: EIVRKKPIF:EQLSN:TLEDH:LAXKXE, KIPKAXX:VPQEL:EPLT:DENEKVV: EQLSN:DMVKS:GXGXR, GIPEPXX:VPQKM:EPLT:DENKNVV:EQLSN:NMVKS:SXAXR, SIPKAXX:VPQEL:EPLT:DEYDKVV:EQLSN:EMVKS:GXGXR, HVTKPTX:VPQKL:EPLT:DDSSNVI:EQLSN:NMVKS:SXGXH, YVPKPXX:VPQKL:EPLT:DDSSNVI: EQLSN:NMVKS:SXGXH, TVPKPXX:VPQQL:EPLT:DDSSNVI:EQLSN:NMVKS:AXGXH, AVPKAXX:VPQKL:EPLT:DSSNNVI:EQLSN:NMVKS:AXGXH, KVGKAXX:VPQKL:EPLT:DDMGVPT:EQLSN:EGMSVKS:XGXR, KASKAXX:VPQKL:EPLT:DKGVVTY:EQLSN:GMVKS:EXGXR, GSAGPXX:VPQKM:EPLT:NDKQQII:EQLSN:GMVKS:RXGXS, AAPASXX:VPQRL:EPLT:DAANNVV:EQLSN:DMVKS:AXGXR, STPPTXX:VPQRL:EPLT:DSANNVV:EQLSN:DMVKS:SXGXR, HVPKPXX:VPQKL:EPLT:DDSSNVI:EQLSN:NMVKS:SXGXH, RVPSTXX:VPQKT:EPLT:DNGRVLL:EQLSN:MIVKS:XGXL, ASAAPXX:VPQAL:EPLT:VGRKPKV:EQLSN:MIVKS:XKXS, ASASPXX:VPQDL:EPLT:IGKTPKI:EQLSN:MIVKS:XKXS, NDEGLXS:VPQEE:EPLT:RIKPHQGQH:EQLSN:FLVKS:KXEXR, NDEGLXS:VPQGQ:EPLT:RIKPHQGQH:EQLSN:LEVKS:QXEXR, SSVKXQP:VPQHH:EPLT:EYVRKKPKL:EQLSN:RLVKS:LEXAXA, RNVQXRP:VPQQL:EPLT:EIVRKKPIF:EQLSN:TLVKS:LAXKXE, ASASPXX:VSQDL:EPLT:IGKTPKI:EQLSN:MIVKS:XKXS, KIPKAXX:VPTEL:SNIT:DENEKVV:IGEMS:DMQHN:GXGXR, GIPEPXX:VPTKM:SNIT:DENKNVV:IGEMS:NMQHN:SXAXR, SIPKAXX:VPTEL:SNIT:DEYDKVV:IGEMS:EMQHN:GXGXR, HVTKPTX:VPTKL:SNIT:DDSSNVI:IGEMS:NMQHN:SXGXH, YVPKPXX:VPTKL:SNIT:DDSSNVI:IGEMS:NMQHN:SXGXH, TVPKPXX:VPTQL:SNIT:DDSSNVI:IGEMS:NMQHN:AXGXH, AVPKAXX:VPTKL:SNIT:DSSNNVI:IGEMS:NMQHN:AXGXH, KVGKAXX:VPTKL:SNIT:DDMGVPT:IGEMS:EGMSQHN:XGXR, KASKAXX:VPTKL:SNIT:DKGVVTY:IGEMS:GMQHN:EXGXR, GSAGPXX:VPTKM:SNIT:NDKQQII:IGEMS:GMQHN:RXGXS, AAPASXX:VPTRL:SNIT:DAANNVV:IGEMS:DMQHN:AXGXR, STPPTXX:VPTRL:SNIT:DSANNVV:IGEMS:DMQHN:SXGXR, HVPKPXX:VPTKL:SNIT:DDSSNVI:IGEMS:NMQHN:SXGXH, RVPSTXX:VPTKT:SNIT:DNGRVLL:IGEMS:MIQHN:XGXL, ASAAPXX:VPTAL:SNIT:VGRKPKV:IGEMS:MIQHN:XKXS, ASASPXX:VPTDL:SNIT:IGKTPKI:IGEMS:MIQHN:XKXS, ASASPXX:VPTDL:SNIT:VGRTPKV:IGEMS:MVQHN:XKXS, NDEGLXS:VPTGQ:SNIT:RIKPHQGQH:IGEMS:LEQHN:QXEXR, NDEGLXS:VPTEE:SNIT:RIKPHQGQH:IGEMS:FLQHN:KXEXR, SSVKXQP:VPTHH:SNIT:EYVRKKPKL:IGEMS:RLQHN:LEXAXA, RNVQXRP:VPTQL:SNIT:EIVRKKPIF:IGEMS:TLQHN:LAXKXE, KIPKAXX:VPTEL:SNIT:DENEKVV:IGEMS:DMVVE:GXGXR, GIPEPXX:VPEKM:SNIT:DENKNVV:IGEMS:NMTVE:SXAXR, SIPKAXX:VPTEL:SNIT:DEYDKVV:IGEMS:EMVVE:GXGXR, HVTKPTX:APTKL:SNIT:DDSSNVI:IGEMS:NMVVR:SXGXH, YVPKPXX:APTKL:SNIT:DDSSNVI:IGEMS:NMVVR:SXGXH, TVPKPXX:APTQL:SNIT:DDSSNVI:IGEMS:NMVVR:AXGXH, AVPKAXX:APTKL:SNIT:DSSNNVI:IGEMS:NMVVK:AXGXH, KVGKAXX:VPTKL:SNIT:DDMGVPT:IGEMS:EGMSVAE:XGXR, KASKAXX:VPTKL:SNIT:DKGVVTY:IGEMS:GMAVS: EXGXR, GSAGPXX:TPTKM:SNIT:NDKQQII:IGEMS:GMVVD:RXGXS, AAPASXX:VPARL:SNIT:DAANNVV:IGEMS:DMVVE:AXGXR, STPPTXX:VPTRL:SNIT:DSANNVV:IGEMS:DMVVE:SXGXR, HVPKPXX:APTKL:SNIT:DDSSNVI:IGEMS:NMVVR:SXGXH, RVPSTXX:APVKT:SNIT:DNGRVLL:IGEMS:MIVEE:XGXL, ASAAPXX:VPQAL:SNIT:VGRKPKV:IGEMS:MIVRS:XKXS, ASASPXX:VSQDL:SNIT:IGKTPKI:IGEMS:MIVKS:XKXS, ASASPXX:VPQDL:SNIT:VGRTPKV:IGEMS:MVVKS:XKXS, NDEGLXS:VPTGQ:SNIT:RIKPHQGQH:IGEMS:LEEHS:QXEXR, SSVKXQP:SRVHH:SNIT:EYVRKKPKL:IGEMS:RLEEH:LEXAXA, RNVQXRP:TQVQL:SNIT: EIVRKKPIF:IGEMS:TLEDH:LAXKXE, KIPKAXX:VPTEL:SNIT:DENEKVV:LGEMS:DMEHS:GXGXR, GIPEPXX:VPTKM:SNIT:DENKNVV:LGEMS:NMEHS:SXAXR, SIPKAXX:VPTEL:SNIT:DEYDKVV:LGEMS:EMEHS:GXGXR, HVTKPTX:VPTKL:SNIT:DDSSNVI:LGEMS:NMEHS:SXGXH, YVPKPXX:VPTKL:SNIT:DDSSNVI:LGEMS:NMEHS:SXGXH, TVPKPXX:VPTQL:SNIT:DDSSNVI:LGEMS:NMEHS:AXGXH, AVPKAXX:VPTKL:SNIT:DSSNNVI:LGEMS:NMEHS:AXGXH, KVGKAXX:VPTKL:SNIT:DDMGVPT:LGEMS:EGMSEHS:XGXR, KASKAXX:VPTKL:SNIT:DKGVVTY:LGEMS:GMEHS:EXGXR, GSAGPXX:VPTKM:SNIT:NDKQQII:LGEMS:GMEHS:RXGXS, AAPASXX:VPTRL:SNIT:DAANNVV:LGEMS:DMEHS:AXGXR, STPPTXX:VPTRL:SNIT:DSANNVV:LGEMS:DMEHS:SXGXR, HVPKPXX:VPTKL:SNIT:DDSSNVI:LGEMS:NMEHS:SXGXH, RVPSTXX:VPTKT:SNIT:DNGRVLL:LGEMS:MIEHS:XGXL, ASAAPXX:VPTAL:SNIT:VGRKPKV:LGEMS:MIEHS:XKXS, ASASPXX:VPTDL:SNIT:IGKTPKI:LGEMS:MI EHS:XKXS, ASASPXX:VPTDL:SNIT:VGRTPKV:LGEMS:MVEHS:XKXS, NDEGLXS:VPTEE:SNIT:RIKPHQGQH:LGEMS:FLEHS:KXEXR, SSVKXQP:VPTHH:SNIT:EYVRKKPKL:LGEMS:RLEHS:LEXAXA, RNVQXRP:VPTQL:SNIT:EIVRKKPIF:LGEMS:TLEHS:LAXKXE, KIPKAXX:VPTEL:SNIT:DENEKVV:LGEMS:DMVVE:GXGXR, GIPEPXX:VPEKM:SNIT:DENKNVV:LGEMS:NMTVE:SXAXR, SIPKAXX:VPTEL:SNIT:DEYDKVV:LGEMS:EMVVE:GXGXR, HVTKPTX:APTKL:SNIT:DDSSNVI:LGEMS:NMVVR:SXGXH, YVPKPXX:APTKL:SNIT:DDSSNVI:LGEMS:NMVVR:SXGXH, TVPKPXX:APTQL:SNIT:DDSSNVI:LGEMS:NMVVR:AXGXH, AVPKAXX:APTKL:SNIT:DSSNNVI:LGEMS:NMVVK:AXGXH, KVGKAXX:VPTKL:SNIT:DDMGVPT:LGEMS:EGMSVAE:XGXR, KASKAXX:VPTKL:SNIT:DKGVVTY:LGEMS:GMAVS:EXGXR, GSAGPXX:TPTKM:SNIT:NDKQQII:LGEMS:GMVVD:RXGXS, AAPASXX:VPARL:SNIT:DAANNVV:LGEMS:DMVVE:AXGXR, STPPTXX:VPTRL:SNIT:DSANNVV:LGEMS:DMVVE:SXGXR, HVPKPXX:APTKL:SNIT:DDSSNVI:LGEMS:NMVVR:SXGXH, RVPSTXX:APVKT:SNIT:DNGRVLL:LGEMS:MIVEE:XGXL, ASAAPXX:VPQAL:SNIT:VGRKPKV:LGEMS:MIVRS:XKXS, ASASPXX:VSQDL:SNIT:IGKTPKI:LGEMS:MIVKS:XKXS, ASASPXX:VPQDL:SNIT:VGRTPKV:LGEMS:MVVKS:XKXS, NDEGLXS:VPTEE:SNIT:RIKPHQGQH:LGEMS:FLQHN:KXEXR, SSVKXQP:SRVHH:SNIT:EYVRKKPKL:LGEMS:RLEEH:LEXAXA, RNVQXRP:TQVQL:SNIT: EIVRKKPIF:LGEMS:TLEDH:LAXKXE, KIPKAXX:SRVEL:RSVK:DENEKVV:KEVQV:DMEEH:GXGXR, GIPEPXX:SRVKM:RSVK:DENKNVV:KEVQV:NMEEH:SXAXR, SIPKAXX:SRVEL:RSVK:DEYDKVV:KEVQV:EMEEH:GXGXR, HVTKPTX:SRVKL:RSVK:DDSSNVI:KEVQV:NMEEH:SXGXH, YVPKPXX:SRVKL:RSVK:DDSSNVI:KEVQV:NMEEH:SXGXH, TVPKPXX:SRVQL:RSVK:DDSSNVI:KEVQV:NMEEH:AXGXH, AVPKAXX:SRVKL:RSVK:DSSNNVI:KEVQV:NMEEH:AXGXH, KVGKAXX:SRVKL:RSVK:DDMGVPT:KEVQV:EGMSEEH:XGXR, KASKAXX:SRVKL:RSVK:DKGVVTY:KEVQV:GMEEH:EXGXR, GSAGPXX:SRVKM:RSVK:NDKQQII:KEVQV:GMEEH:RXGXS, AAPASXX:SRVRL:RSVK:DAANNVV:KEVQV:DMEEH:AXGXR, STPPTXX:SRVRL:RSVK:DSANNVV:KEVQV:DMEEH:SXGXR, HVPKPXX:SRVKL:RSVK:DDSSNVI:KEVQV:NMEEH:SXGXH, RVPSTXX:SRVKT:RSVK:DNGRVLL:KEVQV:MIEEH:XGXL, ASAAPXX:SRVAL:RSVK:VGRKPKV:KEVQV:MIEEH:XKXS, ASASPXX:SRVDL:RSVK:IGKTPKI:KEVQV:MIEEH:XKXS, ASASPXX:SRVDL:RSVK:VGRTPKV:KEVQV:MVEEH:XKXS, NDEGLXS:SRVEE:RSVK: RIKPHQGQH:KEVQV:FLEEH:KXEXR, NDEGLXS:SRVGQ: RSVK:RIKPHQGQH:KEVQV:LEEEH:QXEXR, RNVQXRP:SRVQL:RSVK:EIVRKKPIF:KEVQV:TLEEH:LAXKXE, KIPKAXX:VPTEL:RSVK:DENEKVV:KEVQV:DMVVE:GXGXR, GIPEPXX:VPEKM:RSVK:DENKNVV:KEVQV:NMTVE:SXAXR, SIPKAXX:VPTEL:RSVK:DEYDKVV:KEVQV:EMVVE:GXGXR, HVTKPTX:APTKL: RSVK:DDSSNVI:KEVQV:NMVVR:SXGXH, YVPKPXX:APTKL:RSVK:DDSSNVI:KEVQV:NMVVR:SXGXH, TVPKPXX:APTQL:RSVK:DDSSNVI:KEVQV:NMVVR:AXGXH, AVPKAXX:APTKL:RSVK:DSSNNVI:KEVQV:NMVVK:AXGXH, KVGKAXX:VPTKL:RSVK:DDMGVPT:KEVQV:EGMSVAE:XGXR, KASKAXX:VPTKL: RSVK:DKGVVTY:KEVQV:GMAVS: EXGXR, GSAGPXX:TPTKM:RSVK:NDKQQII:KEVQV:GMVVD:RXGXS, AAPASXX:VPARL:RSVK:DAANNVV:KEVQV:DMVVE:AXGXR, STPPTXX:VPTRL:RSVK:DSANNVV:KEVQV:DMVVE:SXGXR, HVPKPXX:APTKL:RSVK:DDSSNVI:KEVQV:NMVVR:SXGXH, RVPSTXX:APVKT:RSVK:DNGRVLL:KEVQV:MIVEE:XGXL, ASAAPXX:VPQAL:RSVK:VGRKPKV:KEVQV:MIVRS:XKXS, ASASPXX:VSQDL:RSVK:IGKTPKI:KEVQV:MIVKS:XKXS, ASASPXX:VPQDL:RSVK:VGRTPKV:KEVQV:MVVKS:XKXS, NDEGLXS:VPTEE:RSVK:RIKPHQGQH:KEVQV:FLQHN:KXEXR, NDEGLXS:VPTGQ:RSVK:RIKPHQGQH:KEVQV:LEEHS:QXEXR, RNVQXRP:TQVQL:RSVK:EIVRKKPIF:KEVQV:TLEDH:LAXKXE, KIPKAXX:TQVEL: RPVQ:DENEKVV:KKATV:DMEDH:GXGXR, GIPEPXX:TQVKM:RPVQ:DENKNVV:KKATV:NMEDH:SXAXR, SIPKAXX:TQVEL:RPVQ:DEYDKVV:KKATV:EMEDH:GXGXR, HVTKPTX:TQVKL:RPVQ:DDSSNVI:KKATV:NMEDH:SXGXH, YVPKPXX:TQVKL:RPVQ:DDSSNVI:KKATV:NMEDH:SXGXH, TVPKPXX:TQVQL:RPVQ:DDSSNVI:KKATV:NMEDH:AXGXH, AVPKAXX:TQVKL:RPVQ:DSSNNVI:KKATV:NMEDH:AXGXH, KVGKAXX:TQVKL: RPVQ:DDMGVPT:KKATV:EGMSEDH:XGXR, KASKAXX:TQVKL:RPVQ:DKGVVTY:KKATV:GMEDH:EXGXR, GSAGPXX:TQVKM: RPVQ:NDKQQII:KKATV:GMEDH:RXGXS, AAPASXX:TQVRL:RPVQ:DAANNVV:KKATV:DMEDH:AXGXR, STPPTXX:TQVRL:RPVQ:DSANNVV:KKATV:DMEDH:SXGXR, HVPKPXX:TQVKL:RPVQ:DDSSNVI:KKATV:NMEDH:SXGXH, RVPSTXX:TQVKT:RPVQ:DNGRVLL:KKATV:MIEDH:XGXL, ASAAPXX:TQVAL:RPVQ:VGRKPKV:KKATV:MIEDH:XKXS, ASASPXX:TQVDL:RPVQ:IGKTPKI:KKATV:MIEDH:XKXS, ASASPXX:TQVDL:RPVQ:VGRTPKV:KKATV:MVEDH:XKXS, NDEGLXS:TQVEE:RPVQ:RIKPHQGQH:KKATV:FLEDH:KXEXR, NDEGLXS:TQVGQ:RPVQ:RIKPHQGQH:KKATV:LEEDH:QXEXR, SSVKXQP:TQVHH:RPVQ:EYVRKKPKL:KKATV:RLEDH:LEXAXA, KIPKAXX:VPTEL:RPVQ:DENEKVV:KKATV:DMVVE:GXGXR, GIPEPXX:VPEKM:RPVQ:DENKNVV:KKATV:NMTVE:SXAXR, SIPKAXX:VPTEL:RPVQ:DEYDKVV:KKATV:EMVVE:GXGXR, HVTKPTX:APTKL:RPVQ:DDSSNVI:KKATV:NMVVR:SXGXH, YVPKPXX:APTKL: RPVQ:DDSSNVI:KKATV:NMVVR:SXGXH, TVPKPXX:APTQL:RPVQ:DDSSNVI:KKATV:NMVVR:AXGXH, AVPKAXX:APTKL:RPVQ:DSSNNVI:KKATV:NMVVK:AXGXH, KVGKAXX:VPTKL:RPVQ:DDMGVPT:KKATV:EGMSVAE:XGXR, KASKAXX:VPTKL:RPVQ:DKGVVTY:KKATV:GMAVS:EXGXR, GSAGPXX:TPTKM:RPVQ:NDKQQII:KKATV:GMVVD:RXGXS, AAPASXX:VPARL:RPVQ:DAANNVV:KKATV:DMVVE:AXGXR, STPPTXX:VPTRL: RPVQ:DSANNVV:KKATV:DMVVE:SXGXR, HVPKPXX:APTKL:RPVQ:DDSSNVI:KKATV:NMVVR:SXGXH, RVPSTXX:APVKT:RPVQ:DNGRVLL:KKATV:MIVEE:XGXL, ASAAPXX:VPQAL:RPVQ:VGRKPKV:KKATV:MIVRS:XKXS, ASASPXX:VSQDL: RPVQ:IGKTPKI:KKATV:MIVKS:XKXS, ASASPXX:VPQDL: RPVQ:VGRTPKV: KKATV:MVVKS:XKXS, NDEGLXS:VPTEE:RPVQ:RIKPHQGQH:KKATV:FLQHN:KXEXR, NDEGLXS:VPTGQ:RPVQ:RIKPHQGQH:KKATV:LEEHS:QXEXR, SSVKXQP:SRVHH:RPVQ:EYVRKKPKL:KKATV:RLEEH:LEXAXA. More particularly, the heptuplet PEP7:PEP5:PEP1:LINKER:PEP2:PEP6:PEP8 is selected from the group consisting of GIPEPXX:VPTKM:SAIS:DENKNVV:LKNYQ:NMVVE:SXAXR, HVTKPTX:VPTKL:SAIS:DDSSNVI:LKNYQ:NMVVE:SXGXH, YVPKPXX:VPTKL:SAIS:DDSSNVI:LKNYQ:NMVVE:SXGXH, TVPKPXX:VPTQL:SAIS:DDSSNVI:LKNYQ:NMVVE:AXGXH, AVPKAXX:VPTKL:SAIS:DSSNNVI:LKNYQ:NMVVE:AXGXH, KVGKAXX:VPTKL:SAIS:DDMGVPT:LKNYQ:EGMSVVE:XGXR, KASKAXX:VPTKL:SAIS:DKGVVTY:LKNYQ:GMVVE:EXGXR, GSAGPXX:VPTKM:SAIS:NDKQQII:LKNYQ:GMVVE:RXGXS, AAPASXX:VPTRL:SAIS:DAANNVV:LKNYQ:DMVVE:AXGXR, STPPTXX:VPTRL:SAIS:DSANNVV:LKNYQ:DMVVE:SXGXR, HVPKPXX:VPTKL:SAIS:DDSSNVI:LKNYQ:NMVVE:SXGXH, RVPSTXX:VPTKT:SAIS:DNGRVLL:LKNYQ:MIVVE:XGXL, ASAAPXX:VPTAL:SAIS:VGRKPKV:LKNYQ:MIVVE:XKXS, ASASPXX:VPTDL:SAIS:IGKTPKI:LKNYQ:MIVVE:XKXS, ASASPXX:VPTDL:SAIS:VGRTPKV:LKNYQ:MVVVE:XKXS, GIPEPXX:VPEKM:SAIS:DENKNVV:LKNYQ:NMTVE:SXAXR, HVTKPTX:APTKL:SAIS:DDSSNVI:LKNYQ:NMVVR:SXGXH, YVPKPXX:APTKL:SAIS:DDSSNVI:LKNYQ:NMVVR:SXGXH, TVPKPXX:APTQL:SAIS:DDSSNVI:LKNYQ:NMVVR:AXGXH, AVPKAXX:APTKL:SAIS:DSSNNVI:LKNYQ:NMVVK:AXGXH, KVGKAXX:VPTKL:SAIS:DDMGVPT:LKNYQ:EGMSVAE:XGXR, KASKAXX:VPTKL:SAIS:DKGVVTY:LKNYQ:GMAVS:EXGXR, GSAGPXX:TPTKM:SAIS:NDKQQII:LKNYQ:GMVVD:RXGXS, AAPASXX:VPARL:SAIS:DAANNVV:LKNYQ:DMVVE:AXGXR, HVPKPXX:APTKL:SAIS:DDSSNVI:LKNYQ:NMVVR:SXGXH, RVPSTXX:APVKT:SAIS:DNGRVLL:LKNYQ:MIVEE:XGXL, ASAAPXX:VPQAL:SAIS:VGRKPKV:LKNYQ:MIVRS:XKXS, ASASPXX:VSQDL:SAIS:IGKTPKI:LKNYQ:MIVKS:XKXS, ASASPXX:VPQDL:SAIS:VGRTPKV:LKNYQ:MVVKS:XKXS, NDEGLEX:VPTEE:SAIS:RIKPHQGQH:LKNYQ:FLQHN:KXEXR, NDEGLEX:VPTGQ:SAIS:RIKPHQGQH:LKNYQ:LEEHS:QXEXR, SSVKXQP:SRVHH:SAIS:EYVRKKPKL:LKNYQ:RLEEH:LEXAXA, RNVQXRP:TQVQL:SAIS: EIVRKKPIF:LKNYQ:TLEDH:LAXKXE, KIPKAXX:VPEEL:SSLS:DENEKVV:LKVYP:DMTVE:GXGXR, SIPKAXX:VPEEL:SSLS:DEYDKVV:LKVYP:EMTVE:GXGXR, HVTKPTX:VPEKL:SSLS:DDSSNVI:LKVYP:NMTVE:SXGXH, YVPKPXX:VPEKL:SSLS:DDSSNVI:LKVYP:NMTVE:SXGXH, TVPKPXX:VPEQL:SSLS:DDSSNVI:LKVYP:NMTVE:AXGXH, AVPKAXX:VPEKL:SSLS:DSSNNVI:LKVYP:NMTVE:AXGXH, KVGKAXX:VPEKL:SSLS:DDMGVPT:LKVYP:EGMSTVE:XGXR, KASKAXX:VPEKL:SSLS:DKGVVTY:LKVYP:GMTVE:EXGXR, GSAGPXX:VPEKM:SSLS:NDKQQII:LKVYP:GMTVE:RXGXS, AAPASXX:VPERL:SSLS:DAANNVV:LKVYP:DMTVE:AXGXR, STPPTXX:VPERL:SSLS:DSANNVV:LKVYP:DMTVE:SXGXR, HVPKPXX:VPEKL:SSLS:DDSSNVI:LKVYP:NMTVE:SXGXH, RVPSTXX:VPEKT:SSLS:DNGRVLL:LKVYP:MITVE:XGXL, ASAAPXX:VPEAL:SSLS:VGRKPKV:LKVYP:MITVE:XKXS, ASASPXX:VPEDL:SSLS:IGKTPKI:LKVYP:MITVE:XKXS, ASASPXX:VPEDL:SSLS:VGRTPKV:LKVYP:MVTVE:XKXS, KIPKAXX:VPTEL:SSLS:DEN EKVV:LKVYP:DMVVE:GXGXR, SIPKAXX:VPTEL:SSLS:DEYDKVV:LKVYP:EMVVE:GXGXR, HVTKPTX:APTKL:SSLS:DDSSNVI:LKVYP:NMVVR:SXGXH, YVPKPXX:APTKL:SSLS:DDSSNVI:LKVYP:NMVVR:SXGXH, TVPKPXX:APTQL:SSLS:DDSSNVI:LKVYP:NMVVR:AXGXH, AVPKAXX:APTKL:SSLS:DSSNNVI:LKVYP:NMVVK:AXGXH, KVGKAXX:VPTKL:SSLS:DDMGVPT:LKVYP:EGMSVAE:XGXR, KASKAXX:VPTKL:SSLS:DKGVVTY:LKVYP:GMAVS:EXGXR, GSAGPXX:TPTKM:SSLS:NDKQQIIIKVYP:GMVVD:RXGXS, AAPASXX:VPARL:SSLS:DAANNVV:LKVYP:DMVVE:AXGXR, STPPTXX:VPTRL:SSLS:DSANNVV:LKVYP:DMVVE:SXGXR, HVPKPXX:APTKL:SSLS:DDSSNVI:LKVYP:NMVVR:SXGXH, RVPSTXX:APVKT:SSLS:DNGRVLL:LKVYP:MIVEE:XGXL, ASAAPXX:VPQAL:SSLS:VGRKPKV:LKVYP:MIVRS:XKXS, ASASPXX:VSQDL:SSLS:IGKTPKI:LKVYP:MIVKS:XKXS, ASASPXX:VPQDL:SSLS:VGRTPKV:LKVYP:MVVKS:XKXS, NDEGLEX:VPTEE:SSLS: RIKPHQGQH:LKVYP:FLQHN:KXEXR, NDEGLEX:VPTGQ:SSLS: RIKPHQGQH:LKVYP:LEEHS:QXEXR, SSVKXQP:SRVHH:SSLS: EYVRKKPKL:LKVYP:RLEEH:LEXAXA, RNVQXRP:TQVQL:SSLS: EIVRKKPIF:LKVYP:TLEDH:LAXKXE, KIPKAXX:APTEL:NAIS:DEN EKVV:LKKYR:DMVVR:GXGXR, GIPEPXX:APTKM:NAIS:DENKNVV:LKKYR:NMVVR:SXAXR, SIPKAXX:APTEL:NAIS:DEYDKVV:LKKYR:EMVVR:GXGXR, AVPKAXX:APTKL:NAIS:DSSNNVI:LKKYR:NMVVR:AXGXH, KVGKAXX:APTKL:NAIS:DDMGVPT:LKKYR: EGMSVVR:XGXR, KASKAXX:APTKL:NAIS:DKGVVTY:LKKYR:GMVVR: EXGXR, GSAGPXX:APTKM:NAIS:NDKQQII:LKKYR:GMVVR:RXGXS, AAPASXX:APTRL:NAIS:DAANNVV:LKKYR:DMVVR:AXGXR, STPPTXX:APTRL:NAIS:DSANNVV:LKKYR:DMVVR:SXGXR, RVPSTXX:APTKT:NAIS:DNGRVLL:LKKYR:MIVVR:XGXL, ASAAPXX:APTAL:NAIS:VGRKPKV:LKKYR:MIVVR:XKXS, ASASPXX:APTDL:NAIS:IGKTPKI:LKKYR:MIVVR:XKXS, ASASPXX:APTDL:NAIS:VGRTPKV:LKKYR:MVVVR:XKXS, KIPKAXX:VPTEL:NAIS:DENEKVV:LKKYR:DMVVE:GXGXR, GIPEPXX:VPEKM:NAIS:DENKNVV:LKKYR:NMTVE:SXAXR, SIPKAXX:VPTEL:NAIS:DEYDKVV:LKKYR:EMVVE:GXGXR, AVPKAXX:APTKL:NAIS:DSSNNVI:LKKYR:NMVVK:AXGXH, KVGKAXX:VPTKL:NAIS:DDMGVPT:LKKYR:EGMSVAE:XGXR, KASKAXX:VPTKL:NAIS:DKGVVTY:LKKYR:GMAVS:EXGXR, GSAGPXX:TPTKM:NAIS:NDKQQIIIKKYR:GMVVD:RXGXS, AAPASXX:VPARL:NAIS:DAANNVV:LKKYR:DMVVE:AXGXR, STPPTXX:VPTRL:NAIS:DSANNVV:LKKYR:DMVVE:SXGXR, RVPSTXX:APVKT:NAIS:DNGRVLL:LKKYR:MIVEE:XGXL, ASAAPXX:VPQAL:NAIS:VGRKPKV:LKKYR:MIVRS:XKXS, ASASPXX:VSQDL:NAIS:IGKTPKI:LKKYR:MIVKS:XKXS, ASASPXX:VPQDL:NAIS:VGRTPKV:LKKYR:MVVKS:XKXS, NDEGLEX:VPTEE:NAIS:RIKPHQGQH:LKKYR:FLQHN:KXEXR, NDEGLEX:VPTGQ:NAIS: RIKPHQGQH:LKKYR:LEEHS:QXEXR, SSVKXQP:SRVHH:NAIS: EYVRKKPKL:LKKYR:RLEEH:LEXAXA, RNVQXRP:TQVQL:NAIS:EIVRKKPIF:LKKYR:TLEDH:LAXKXE, KIPKAXX:APTEL:SATS:DENEKVV:LRKHR:DMVVK:GXGXR, GIPEPXX:APTKM:SATS:DENKNVV:LRKHR:NMVVK:SXAXR, SIPKAXX:APTEL:SATS:DEYDKVV:LRKHR:EMVVK:GXGXR, HVTKPTX:APTKL:SATS:DDSSNVI:LRKHR:NMVVK:SXGXH, YVPKPXX:APTKL:SATS:DDSSNVI:LRKHR:NMVVK:SXGXH, TVPKPXX:APTQL:SATS:DDSSNVI:LRKHR:NMVVK:AXGXH, KVGKAXX:APTKL:SATS:DDMGVPT:LRKHR: EGMSVVK:XGXR, KASKAXX:APTKL:SATS:DKGVVTY:LRKHR:GMVVK:EXGXR, GSAGPXX:APTKM:SATS:NDKQQII:LRKHR:GMVVK:RXGXS, AAPASXX:APTRL:SATS:DAANNVV:LRKHR:DMVVK:AXGXR, STPPTXX:APTRL:SATS:DSANNVV:LRKHR:DMVVK:SXGXR, HVPKPXX:APTKL:SATS:DDSSNVI:LRKHR:NMVVK:SXGXH, RVPSTXX:APTKT:SATS:DNGRVLL:LRKHR:MIVVK:XGXL, ASAAPXX:APTAL:SATS:VGRKPKV:LRKHR:MIVVK:XKXS, ASASPXX:APTDL:SATS:IGKTPKI:LRKHR:MIVVK:XKXS, ASASPXX:APTDL:SATS:VGRTPKV:LRKHR:MVVVK:XKXS, KIPKAXX:VPTEL:SATS:DENEKVV:LRKHR:DMVVE:GXGXR, GIPEPXX:VPEKM:SATS:DENKNVV:LRKHR:NMTVE:SXAXR, SIPKAXX:VPTEL:SATS:DEYDKVV:LRKHR:EMVVE:GXGXR, HVTKPTX:APTKL:SATS:DDSSNVI:LRKHR:NMVVR:SXGXH, YVPKPXX:APTKL:SATS:DDSSNVI:LRKHR:NMVVR:SXGXH, TVPKPXX:APTQL:SATS:DDSSNVI:LRKHR:NMVVR:AXGXH, KVGKAXX:VPTKL:SATS:DDMGVPT:LRKHR: EGMSVAE:XGXR, KASKAXX:VPTKL:SATS:DKGVVTY:LRKHR:GMAVS:EXGXR, GSAGPXX:TPTKM:SATS:NDKQQIIIRKHR:GMVVD:RXGXS, AAPASXX:VPARL:SATS:DAANNVV:LRKHR:DMVVE:AXGXR, STPPTXX:VPTRL:SATS:DSANNVV:LRKHR:DMVVE:SXGXR, HVPKPXX:APTKL:SATS:DDSSNVI:LRKHR:NMVVR:SXGXH, RVPSTXX:APVKT:SATS:DNGRVLL:LRKHR:MIVEE:XGXL, ASAAPXX:VPQAL:SATS:VGRKPKV:LRKHR:MIVRS:XKXS, ASASPXX:VSQDL:SATS:IGKTPKI:LRKHR:MIVKS:XKXS, ASASPXX:VPQDL:SATS:VGRTPKV:LRKHR:MVVKS:XKXS, NDEGLEX:VPTEE:SATS:RIKPHQGQH:LRKHR:FLQHN:KXEXR, NDEGLEX:VPTGQ:SATS: RIKPHQGQH:LRKHR:LEEHS:QXEXR, SSVKXQP:SRVHH:SATS: EYVRKKPKL:LRKHR:RLEEH:LEXAXA, RNVQXRP:TQVQL:SATS:EIVRKKPIF:LRKHR:TLEDH:LAXKXE, KIPKAXX:VPTEL:SPIS:DENEKVV:LKYHY:DMVAE:GXGXR, GIPEPXX:VPTKM:SPIS:DENKNVV:LKYHY:NMVAE:SXAXR, SIPKAXX:VPTEL:SPIS:DEYDKVV:LKYHY:EMVAE:GXGXR, HVTKPTX:VPTKL:SPIS:DDSSNVI:LKYHY:NMVAE:SXGXH, YVPKPXX:VPTKL:SPIS:DDSSNVI:LKYHY:NMVAE:SXGXH, TVPKPXX:VPTQL:SPIS:DDSSNVI:LKYHY:NMVAE:AXGXH, AVPKAXX:VPTKL:SPIS:DSSNNVI:LKYHY:NMVAE:AXGXH, KASKAXX:VPTKL:SPIS:DKGVVTY:LKYHY:GMVAE:EXGXR, GSAGPXX:VPTKM:SPIS:NDKQQII:LKYHY:GMVAE:RXGXS, AAPASXX:VPTRL:SPIS:DAANNVV:LKYHY:DMVAE:AXGXR, STPPTXX:VPTRL:SPIS:DSANNVV:LKYHY:DMVAE:SXGXR, HVPKPXX:VPTKL:SPIS:DDSSNVI:LKYHY:NMVAE:SXGXH, RVPSTXX:VPTKT:SPIS:DNGRVLL:LKYHY:MIVAE:XGXL, ASAAPXX:VPTAL:SPIS:VGRKPKV:LKYHY:MIVAE:XKXS, ASASPXX:VPTDL:SPIS:IGKTPKI:LKYHY:MIVAE:XKXS, ASASPXX:VPTDL:SPIS:VGRTPKV:LKYHY:MVVAE:XKXS, KIPKAXX:VPTEL:SPIS:DEN EKVV:LKYHY:DMVVE:GXGXR, GIPEPXX:VPEKM:SPIS:DENKNVV:LKYHY:NMTVE:SXAXR, SIPKAXX:VPTEL:SPIS:DEYDKVV:LKYHY:EMVVE:GXGXR, HVTKPTX:APTKL:SPIS:DDSSNVI:LKYHY:NMVVR:SXGXH, YVPKPXX:APTKL:SPIS:DDSSNVI:LKYHY:NMVVR:SXGXH, TVPKPXX:APTQL:SPIS:DDSSNVI:LKYHY:NMVVR:AXGXH, AVPKAXX:APTKL:SPIS:DSSNNVI:LKYHY:NMVVK:AXGXH, KASKAXX:VPTKL:SPIS:DKGVVTY:LKYHY:GMAVS:EXGXR, GSAGPXX:TPTKM:SPIS:NDKQQII:LKYHY:GMVVD:RXGXS, AAPASXX:VPARL:SPIS:DAANNVV:LKYHY:DMVVE:AXGXR, STPPTXX:VPTRL:SPIS:DSANNVV:LKYHY:DMVVE:SXGXR, HVPKPXX:APTKL:SPIS:DDSSNVI:LKYHY:NMVVR:SXGXH, RVPSTXX:APVKT:SPIS:DNGRVLL:LKYHY:MIVEE:XGXL, ASAAPXX:VPQAL:SPIS:VGRKPKV:LKYHY:MIVRS:XKXS, ASASPXX:VSQDL:SPIS:IGKTPKI:LKYHY:MIVKS:XKXS, ASASPXX:VPQDL:SPIS:VGRTPKV:LKYHY:MVVKS:XKXS, NDEGLEX:VPTEE:SPIS:RIKPHQGQH:LKYHY:FLQHN:KXEXR, NDEGLEX:VPTGQ:SPIS:RIKPHQGQH:LKYHY:LEEHS:QXEXR, SSVKXQP:SRVHH:SPIS:EYVRKKPKL:LKYHY: RLEEH:LEXAXA, RNVQXRP:TQVQL:SPIS:EIVRKKPIF:LKYHY:TLEDH:LAXKXE, KIPKAXX:VPTEL: EPIS:DEN EKVV:KFKYE:DMAVS:GXGXR, GIPEPXX:VPTKM: EPIS:DENKNVV:KFKYE:NMAVS:SXAXR, SIPKAXX:VPTEL:EPIS:DEYDKVV:KFKYE:EMAVS:GXGXR, HVTKPTX:VPTKL:EPIS:DDSSNVI:KFKYE:NMAVS:SXGXH, YVPKPXX:VPTKL: EPIS:DDSSNVI:KFKYE:NMAVS:SXGXH, TVPKPXX:VPTQL:EPIS:DDSSNVI:KFKYE:NMAVS:AXGXH, AVPKAXX:VPTKL: EPIS:DSSNNVI:KFKYE:NMAVS:AXGXH, KVGKAXX:VPTKL:EPIS:DDMGVPT:KFKYE:EGMSAVS:XGXR, GSAGPXX:VPTKM:EPIS:NDKQQII:KFKYE:GMAVS:RXGXS, AAPASXX:VPTRL:EPIS:DAANNVV:KFKYE:DMAVS:AXGXR, STPPTXX:VPTRL:EPIS:DSANNVV:KFKYE:DMAVS:SXGXR, HVPKPXX:VPTKL:EPIS:DDSSNVI:KFKYE:NMAVS:SXGXH, RVPSTXX:VPTKT:EPIS:DNGRVLL:KFKYE:MIAVS:XGXL, ASAAPXX:VPTAL:EPIS:VGRKPKV:KFKYE:MIAVS:XKXS, ASASPXX:VPTDL:EPIS:IGKTPKI:KFKYE:MIAVS:XKXS, ASASPXX:VPTDL:EPIS:VGRTPKV:KFKYE:MVAVS:XKXS, KIPKAXX:VPTEL:EPIS:DENEKVV:KFKYE:DMVVE:GXGXR, GIPEPXX:VPEKM:EPIS:DENKNVV:KFKYE:NMTVE:SXAXR, SIPKAXX:VPTEL: EPIS:DEYDKVV:KFKYE:EMVVE:GXGXR, HVTKPTX:APTKL:EPIS:DDSSNVI:KFKYE:NMVVR:SXGXH, YVPKPXX:APTKL: EPIS:DDSSNVI:KFKYE:NMVVR:SXGXH, TVPKPXX:APTQL:EPIS:DDSSNVI:KFKYE:NMVVR:AXGXH, AVPKAXX:APTKL: EPIS:DSSNNVI:KFKYE:NMVVK:AXGXH, KVGKAXX:VPTKL:EPIS:DDMGVPT:KFKYE:EGMSVAE:XGXR, GSAGPXX:TPTKM:EPIS:NDKQQII:KFKYE:GMVVD:RXGXS, AAPASXX:VPARL:EPIS:DAANNVV:KFKYE:DMVVE:AXGXR, STPPTXX:VPTRL:EPIS:DSANNVV:KFKYE:DMVVE:SXGXR, HVPKPXX:APTKL:EPIS:DDSSNVI:KFKYE:NMVVR:SXGXH, RVPSTXX:APVKT:EPIS:DNGRVLL:KFKYE:MIVEE:XGXL, ASAAPXX:VPQAL:EPIS:VGRKPKV:KFKYE:MIVRS:XKXS, ASASPXX:VSQDL:EPIS:IGKTPKI:KFKYE:MIVKS:XKXS, ASASPXX:VPQDL:EPIS:VGRTPKV:KFKYE:MVVKS:XKXS, NDEGLEX:VPTEE:EPIS:RIKPHQGQH:KFKYE:FLQHN:KXEXR, NDEGLEX:VPTGQ:EPIS:RIKPHQGQH:KFKYE:LEEHS:QXEXR, SSVKXQP:SRVHH:EPIS:EYVRKKPKL:KFKYE:RLEEH:LEXAXA, RNVQXRP:TQVQL:EPIS:EIVRKKPIF:KFKYE:TLEDH:LAXKXE, KIPKAXX:TPTEL:SPIN:DENEKVV:YGKIP:DMVVD:GXGXR, GIPEPXX:TPTKM:SPIN:DENKNVV:YGKIP:NMVVD:SXAXR, SIPKAXX:TPTEL:SPIN:DEYDKVV:YGKIP:EMVVD:GXGXR, HVTKPTX:TPTKL:SPIN:DDSSNVI:YGKIP:NMVVD:SXGXH, YVPKPXX:TPTKL:SPIN:DDSSNVI:YGKIP:NMVVD:SXGXH, TVPKPXX:TPTQL:SPIN:DDSSNVI:YGKIP:NMVVD:AXGXH, AVPKAXX:TPTKL:SPIN:DSSNNVI:YGKIP:NMVVD:AXGXH, KVGKAXX:TPTKL:SPIN:DDMGVPT:YGKIP:EGMSVVD:XGXR, KASKAXX:TPTKL:SPIN:DKGVVTY:YGKIP:GMVVD:EXGXR, AAPASXX:TPTRL:SPIN:DAANNVV:YGKIP:DMVVD:AXGXR, STPPTXX:TPTRL:SPIN:DSANNVV:YGKIP:DMVVD:SXGXR, HVPKPXX:TPTKL:SPIN:DDSSNVI:YGKIP:NMVVD:SXGXH, RVPSTXX:TPTKT:SPIN:DNGRVLL:YGKIP:MIVVD:XGXL, ASAAPXX:TPTAL:SPIN:VGRKPKV:YGKIP:MIVVD:XKXS, ASASPXX:TPTDL:SPIN:IGKTPKI:YGKIP:MIVVD:XKXS, ASASPXX:TPTDL:SPIN:VGRTPKV:YGKIP:MVVVD:XKXS, KIPKAXX:VPTEL:SPIN:DENEKVV:YGKIP:DMVVE:GXGXR, GIPEPXX:VPEKM:SPIN:DENKNVV:YGKIP:NMTVE:SXAXR, SIPKAXX:VPTEL:SPIN:DEYDKVV:YGKIP:EMVVE:GXGXR, HVTKPTX:APTKL:SPIN:DDSSNVI:YGKIP:NMVVR:SXGXH, YVPKPXX:APTKL:SPIN:DDSSNVI:YGKIP:NMVVR:SXGXH, TVPKPXX:APTQL:SPIN:DDSSNVI:YGKIP:NMVVR:AXGXH, AVPKAXX:APTKL:SPIN:DSSNNVI:YGKIP:NMVVK:AXGXH, KVGKAXX:VPTKL:SPIN:DDMGVPT:YGKIP:EGMSVAE:XGXR, KASKAXX:VPTKL:SPIN:DKGVVTY:YGKIP:GMAVS:EXGXR, AAPASXX:VPARL:SPIN:DAANNVV:YGKIP:DMVVE:AXGXR, STPPTXX:VPTRL:SPIN:DSANNVV:YGKIP:DMVVE:SXGXR, HVPKPXX:APTKL:SPIN:DDSSNVI:YGKIP:NMVVR:SXGXH, RVPSTXX:APVKT:SPIN:DNGRVLL:YGKIP:MIVEE:XGXL, ASAAPXX:VPQAL:SPIN:VGRKPKV:YGKIP:MIVRS:XKXS, ASASPXX:VSQDL:SPIN:IGKTPKI:YGKIP:MIVKS:XKXS, ASASPXX:VPQDL:SPIN:VGRTPKV:YGKIP:MVVKS:XKXS, NDEGLEX:VPTEE:SPIN:RIKPHQGQH:YGKIP:FLQHN:KXEXR, NDEGLEX:VPTGQ:SPIN: RIKPHQGQH:YGKIP:LEEHS:QXEXR, SSVKXQP:SRVHH:SPIN:EYVRKKPKL:YGKIP:RLEEH:LEXAXA, RNVQXRP:TQVQL:SPIN:EIVRKKPIF:YGKIP:TLEDH:LAXKXE, KIPKAXX:VPAEL:SPIS:DENEKVV:YKQYE:DMVVE:GXGXR, GIPEPXX:VPAKM:SPIS:DENKNVV:YKQYE:NMVVE:SXAXR, SIPKAXX:VPAEL:SPIS:DEYDKVV:YKQYE:EMVVE:GXGXR, HVTKPTX:VPAKL:SPIS:DDSSNVI:YKQYE:NMVVE:SXGXH, YVPKPXX:VPAKL:SPIS:DDSSNVI:YKQYE:NMVVE:SXGXH, TVPKPXX:VPAQL:SPIS:DDSSNVI:YKQYE:NMVVE:AXGXH, AVPKAXX:VPAKL:SPIS:DSSNNVI:YKQYE:NMVVE:AXGXH, KVGKAXX:VPAKL:SPIS:DDMGVPT:YKQYE:EGMSVVE:XGXR, KASKAXX:VPAKL:SPIS:DKGVVTY:YKQYE:GMVVE:EXGXR, GSAGPXX:VPAKM:SPIS:NDKQQII:YKQYE:GMVVE:RXGXS, STPPTXX:VPARL:SPIS:DSANNVV:YKQYE:DMVVE:SXGXR, HVPKPXX:VPAKL:SPIS:DDSSNVI:YKQYE:NMVVE:SXGXH, RVPSTXX:VPAKT:SPIS:DNGRVLL:YKQYE:MIVVE:XGXL, ASAAPXX:VPAAL:SPIS:VGRKPKV:YKQYE:MIVVE:XKXS, ASASPXX:VPADL:SPIS:IGKTPKI:YKQYE:MIVVE:XKXS, ASASPXX:VPADL:SPIS:VGRTPKV:YKQYE:MVVVE:XKXS, KIPKAXX:VPTEL:SPIS:DEN EKVV:YKQYE:DMVVE:GXGXR, GIPEPXX:VPEKM:SPIS:DENKNVV:YKQYE:NMTVE:SXAXR, SIPKAXX:VPTEL:SPIS:DEYDKVV:YKQYE:EMVVE:GXGXR, HVTKPTX:APTKL:SPIS:DDSSNVI:YKQYE:NMVVR:SXGXH, YVPKPXX:APTKL:SPIS:DDSSNVI:YKQYE:NMVVR:SXGXH, TVPKPXX:APTQL:SPIS:DDSSNVI:YKQYE:NMVVR:AXGXH, AVPKAXX:APTKL:SPIS:DSSNNVI:YKQYE:NMVVK:AXGXH, KVGKAXX:VPTKL:SPIS:DDMGVPT:YKQYE:EGMSVAE:XGXR, KASKAXX:VPTKL:SPIS:DKGVVTY:YKQYE:GMAVS: EXGXR, GSAGPXX:TPTKM:SPIS:NDKQQII:YKQYE:GMVVD:RXGXS, STPPTXX:VPTRL:SPIS:DSANNVV:YKQYE:DMVVE:SXGXR, HVPKPXX:APTKL:SPIS:DDSSNVI:YKQYE:NMVVR:SXGXH, RVPSTXX:APVKT:SPIS:DNGRVLL:YKQYE:MIVEE:XGXL, ASAAPXX:VPQAL:SPIS:VGRKPKV:YKQYE:MIVRS:XKXS, ASASPXX:VSQDL:SPIS:IGKTPKI:YKQYE:MIVKS:XKXS, ASASPXX:VPQDL:SPIS:VGRTPKV:YKQYE:MVVKS:XKXS, NDEGLEX:VPTEE:SPIS:RIKPHQGQH:YKQYE:FLQHN:KXEXR, NDEGLEX:VPTGQ:SPIS:RIKPHQGQH:YKQYE:LEEHS:QXEXR, SSVKXQP:SRVHH:SPIS:EYVRKKPKL:YKQYE:RLEEH:LEXAXA, RNVQXRP:TQVQL:SPIS: EIVRKKPIF:YKQYE:TLEDH:LAXKXE, GIPEPXX:VPTKM:SPIS:DENKNVV:YKQYE:NMVVE:SXAXR, HVTKPTX:VPTKL:SPIS:DDSSNVI:YKQYE:NMVVE:SXGXH, YVPKPXX:VPTKL:SPIS:DDSSNVI:YKQYE:NMVVE:SXGXH, TVPKPXX:VPTQL:SPIS:DDSSNVI:YKQYE:NMVVE:AXGXH, AVPKAXX:VPTKL:SPIS:DSSNNVI:YKQYE:NMVVE:AXGXH, KVGKAXX:VPTKL:SPIS:DDMGVPT:YKQYE: EGMSVVE:XGXR, KASKAXX:VPTKL:SPIS:DKGVVTY:YKQYE:GMVVE: EXGXR, GSAGPXX:VPTKM:SPIS:NDKQQII:YKQYE:GMVVE:RXGXS, AAPASXX:VPTRL:SPIS:DAANNVV:YKQYE:DMVVE:AXGXR, HVPKPXX:VPTKL:SPIS:DDSSNVI:YKQYE:NMVVE:SXGXH, RVPSTXX:VPTKT:SPIS:DNGRVLL:YKQYE:MIVVE:XGXL, ASAAPXX:VPTAL:SPIS:VGRKPKV:YKQYE:MIVVE:XKXS, ASASPXX:VPTDL:SPIS:IGKTPKI:YKQYE:MIVVE:XKXS, ASASPXX:VPTDL:SPIS:VGRTPKV:YKQYE:MVVVE:XKXS, AAPASXX:VPARL:SPIS:DAANNVV:YKQYE:DMVVE:AXGXR, KIPKAXX:APVEL:KPLS:DENEKVV:DHHKD:DMVEE:GXGXR, GIPEPXX:APVKM:KPLS:DENKNVV:DHHKD:NMVEE:SXAXR, SIPKAXX:APVEL:KPLS:DEYDKVV:DHHKD:EMVEE:GXGXR, HVTKPTX:APVKL:KPLS:DDSSNVI:DHHKD:NMVEE:SXGXH, YVPKPXX:APVKL:KPLS:DDSSNVI:DHHKD:NMVEE:SXGXH, TVPKPXX:APVQL:KPLS:DDSSNVI:DHHKD:NMVEE:AXGXH, AVPKAXX:APVKL:KPLS:DSSNNVI:DHHKD:NMVEE:AXGXH, KVGKAXX:APVKL:KPLS:DDMGVPT:DHHKD:EGMSVEE:XGXR, KASKAXX:APVKL:KPLS:DKGVVTY:DHHKD:GMVEE:EXGXR, GSAGPXX:APVKM:KPLS:NDKQQII:DHHKD:GMVEE:RXGXS, AAPASXX:APVRL:KPLS:DAANNVV:DHHKD:DMVEE:AXGXR, STPPTXX:APVRL:KPLS:DSANNVV:DHHKD:DMVEE:SXGXR, HVPKPXX:APVKL:KPLS:DDSSNVI:DHHKD:NMVEE:SXGXH, ASAAPXX:APVAL:KPLS:VGRKPKV:DHHKD:MIVEE:XKXS, ASASPXX:APVDL:KPLS:IGKTPKI:DHHKD:MIVEE:XKXS, ASASPXX:APVDL:KPLS:VGRTPKV:DHHKD:MVVEE:XKXS, KIPKAXX:VPTEL:KPLS:DEN EKVV:DHHKD:DMVVE:GXGXR, GIPEPXX:VPEKM:KPLS:DENKNVV:DHHKD:NMTVE:SXAXR, SIPKAXX:VPTEL:KPLS:DEYDKVV:DHHKD: EMVVE:GXGXR, HVTKPTX:APTKL:KPLS:DDSSNVI:DHHKD:NMVVR:SXGXH, YVPKPXX:APTKL:KPLS:DDSSNVI:DHHKD:NMVVR:SXGXH, TVPKPXX:APTQL:KPLS:DDSSNVI:DHHKD:NMVVR:AXGXH, AVPKAXX:APTKL:KPLS:DSSNNVI:DHHKD:NMVVK:AXGXH, KVGKAXX:VPTKL:KPLS:DDMGVPT:DHHKD:EGMSVAE:XGXR, KASKAXX:VPTKL:KPLS:DKGVVTY:DHHKD:GMAVS:EXGXR, GSAGPXX:TPTKM:KPLS:NDKQQII:DHHKD:GMVVD:RXGXS, AAPASXX:VPARL:KPLS:DAANNVV:DHHKD:DMVVE:AXGXR, STPPTXX:VPTRL:KPLS:DSANNVV:DHHKD:DMVVE:SXGXR, HVPKPXX:APTKL:KPLS:DDSSNVI:DHHKD:NMVVR:SXGXH, ASAAPXX:VPQAL:KPLS:VGRKPKV:DHHKD:MIVRS:XKXS, ASASPXX:VSQDL:KPLS:IGKTPKI:DHHKD:MIVKS:XKXS, ASASPXX:VPQDL:KPLS:VGRTPKV:DHHKD:MVVKS:XKXS, NDEGLEX:VPTEE:KPLS: RIKPHQGQH:DHHKD:FLQHN:KXEXR, NDEGLEX:VPTGQ:KPLS: RIKPHQGQH:DHHKD:LEEHS:QXEXR, SSVKXQP:SRVHH:KPLS: EYVRKKPKL:DHHKD:RLEEH:LEXAXA, RNVQXRP:TQVQL:KPLS: EIVRKKPIF:DHHKD:TLEDH:LAXKXE, KIPKAXX:VPQEL:EPLP:DENEKVV:EQLSN:DMVRS:GXGXR, GIPEPXX:VPQKM:EPLP:DENKNVV:EQLSN:NMVRS:SXAXR, SIPKAXX:VPQEL:EPLP:DEYDKVV:EQLSN:EMVRS:GXGXR, HVTKPTX:VPQKL:EPLP:DDSSNVI:EQLSN:NMVRS:SXGXH, YVPKPXX:VPQKL:EPLP:DDSSNVI:EQLSN:NMVRS:SXGXH, TVPKPXX:VPQQL:EPLP:DDSSNVI:EQLSN:NMVRS:AXGXH, AVPKAXX:VPQKL:EPLP:DSSNNVI:EQLSN:NMVRS:AXGXH, KVGKAXX:VPQKL:EPLP:DDMGVPT:EQLSN:EGMSVRS:XGXR, KASKAXX:VPQKL:EPLP:DKGVVTY:EQLSN:GMVRS:EXGXR, GSAGPXX:VPQKM:EPLP:NDKQQII:EQLSN:GMVRS:RXGXS, AAPASXX:VPQRL:EPLP:DAANNVV:EQLSN:DMVRS:AXGXR, STPPTXX:VPQRL:EPLP:DSANNVV:EQLSN:DMVRS:SXGXR, HVPKPXX:VPQKL:EPLP:DDSSNVI:EQLSN:NMVRS:SXGXH, RVPSTXX:VPQKT:EPLP:DNGRVLL:EQLSN:MIVRS:XGXL, ASASPXX:VPQDL: EPLP:IGKTPKI:EQLSN:MIVRS:XKXS, ASASPXX:VPQDL: EPLP:VGRTPKV:EQLSN:MVVRS:XKXS, KIPKAXX:VPTEL:EPLP:DENEKVV:EQLSN:DMVVE:GXGXR, GIPEPXX:VPEKM:EPLP:DENKNVV:EQLSN:NMTVE:SXAXR, SIPKAXX:VPTEL: EPLP:DEYDKVV:EQLSN:EMVVE:GXGXR, HVTKPTX:APTKL:EPLP:DDSSNVI:EQLSN:NMVVR:SXGXH, YVPKPXX:APTKL:EPLP:DDSSNVI:EQLSN:NMVVR:SXGXH, TVPKPXX:APTQL:EPLP:DDSSNVI:EQLSN:NMVVR:AXGXH, AVPKAXX:APTKL:EPLP:DSSNNVI:EQLSN:NMVVK:AXGXH, KVGKAXX:VPTKL:EPLP:DDMGVPT:EQLSN:EGMSVAE:XGXR, KASKAXX:VPTKL: EPLP:DKGVVTY:EQLSN:GMAVS:EXGXR, GSAGPXX:TPTKM:EPLP:NDKQQII:EQLSN:GMVVD:RXGXS, AAPASXX:VPARL:EPLP:DAANNVV:EQLSN:DMVVE:AXGXR, STPPTXX:VPTRL:EPLP:DSANNVV:EQLSN:DMVVE:SXGXR, HVPKPXX:APTKL:EPLP:DDSSNVI:EQLSN:NMVVR:SXGXH, RVPSTXX:APVKT:EPLP:DNGRVLL:EQLSN:MIVEE:XGXL, ASASPXX:VSQDL: EPLP:IGKTPKI:EQLSN:MIVKS:XKXS, ASASPXX:VPQDL: EPLP:VGRTPKV:EQLSN:MVVKS:XKXS, NDEGLEX:VPTEE:EPLP: RIKPHQGQH:EQLSN:FLQHN:KXEXR, NDEGLEX:VPTGQ:EPLP: RIKPHQGQH:EQLSN:LEEHS:QXEXR, SSVKXQP:SRVHH:EPLP:EYVRKKPKL:EQLSN:RLEEH:LEXAXA, RNVQXRP:TQVQL:EPLP: EIVRKKPIF:EQLSN:TLEDH:LAXKXE, KIPKAXX:VSQEL:EPLT:DENEKVV: EQLSN:DMVKS:GXGXR, GIPEPXX:VSQKM:EPLT:DENKNVV:EQLSN:NMVKS:SXAXR, SIPKAXX:VSQEL:EPLT:DEYDKVV:EQLSN:EMVKS:GXGXR, HVTKPTX:VSQKL:EPLT:DDSSNVI:EQLSN:NMVKS:SXGXH, YVPKPXX:VSQKL:EPLT:DDSSNVI:EQLSN:NMVKS:SXGXH, TVPKPXX:VSQQL:EPLT:DDSSNVI:EQLSN:NMVKS:AXGXH, AVPKAXX:VSQKL:EPLT:DSSNNVI:EQLSN:NMVKS:AXGXH, KVGKAXX:VSQKL:EPLT:DDMGVPT:EQLSN:EGMSVKS:XGXR, KASKAXX:VSQKL:EPLT:DKGVVTY:EQLSN:GMVKS:EXGXR, GSAGPXX:VSQKM:EPLT:NDKQQII:EQLSN:GMVKS:RXGXS, AAPASXX:VSQRL:EPLT:DAANNVV:EQLSN:DMVKS:AXGXR, STPPTXX:VSQRL:EPLT:DSANNVV:EQLSN:DMVKS:SXGXR, HVPKPXX:VSQKL:EPLT:DDSSNVI:EQLSN:NMVKS:SXGXH, RVPSTXX:VSQKT:EPLT:DNGRVLL:EQLSN:MIVKS:XGXL, ASAAPXX:VSQAL:EPLT:VGRKPKV:EQLSN:MIVKS:XKXS, ASASPXX:VSQDL:EPLT:VGRTPKV:EQLSN:MVVKS:XKXS, KIPKAXX:VPTEL:EPLT:DENEKVV:EQLSN:DMVVE:GXGXR, GIPEPXX:VPEKM:EPLT:DENKNVV:EQLSN:NMTVE:SXAXR, SIPKAXX:VPTEL:EPLT:DEYDKVV:EQLSN:EMVVE:GXGXR, HVTKPTX:APTKL:EPLT:DDSSNVI: EQLSN:NMVVR:SXGXH, YVPKPXX:APTKL:EPLT:DDSSNVI:EQLSN:NMVVR:SXGXH, TVPKPXX:APTQL:EPLT:DDSSNVI:EQLSN:NMVVR:AXGXH, AVPKAXX:APTKL:EPLT:DSSNNVI:EQLSN:NMVVK:AXGXH, KVGKAXX:VPTKL:EPLT:DDMGVPT:EQLSN:EGMSVAE:XGXR, KASKAXX:VPTKL:EPLT:DKGVVTY:EQLSN:GMAVS:EXGXR, GSAGPXX:TPTKM:EPLT:NDKQQII:EQLSN:GMVVD:RXGXS, AAPASXX:VPARL:EPLT:DAANNVV:EQLSN:DMVVE:AXGXR, STPPTXX:VPTRL:EPLT:DSANNVV:EQLSN:DMVVE:SXGXR, HVPKPXX:APTKL:EPLT:DDSSNVI:EQLSN:NMVVR:SXGXH, RVPSTXX:APVKT:EPLT:DNGRVLL:EQLSN:MIVEE:XGXL, ASAAPXX:VPQAL:EPLT:VGRKPKV:EQLSN:MIVRS:XKXS, NDEGLEX:VPTEE:EPLT:RIKPHQGQH:EQLSN:FLQHN:KXEXR, NDEGLEX:VPTGQ:EPLT:RIKPHQGQH:EQLSN:LEEHS:QXEXR, SSVKXQP:SRVHH:EPLT:EYVRKKPKL:EQLSN:RLEEH:LEXAXA, RNVQXRP:TQVQL:EPLT: EIVRKKPIF:EQLSN:TLEDH:LAXKXE, KIPKAXX:VPQEL:EPLT:DENEKVV: EQLSN:DMVKS:GXGXR, GIPEPXX:VPQKM:EPLT:DENKNVV:EQLSN:NMVKS:SXAXR, SIPKAXX:VPQEL:EPLT:DEYDKVV:EQLSN:EMVKS:GXGXR, HVTKPTX:VPQKL:EPLT:DDSSNVI:EQLSN:NMVKS:SXGXH, YVPKPXX:VPQKL:EPLT:DDSSNVI:EQLSN:NMVKS:SXGXH, TVPKPXX:VPQQL:EPLT:DDSSNVI:EQLSN:NMVKS:AXGXH, AVPKAXX:VPQKL:EPLT:DSSNNVI:EQLSN:NMVKS:AXGXH, KVGKAXX:VPQKL:EPLT:DDMGVPT:EQLSN:EGMSVKS:XGXR, KASKAXX:VPQKL:EPLT:DKGVVTY:EQLSN:GMVKS:EXGXR, GSAGPXX:VPQKM:EPLT:NDKQQII:EQLSN:GMVKS:RXGXS, AAPASXX:VPQRL:EPLT:DAANNVV:EQLSN:DMVKS:AXGXR, STPPTXX:VPQRL:EPLT:DSANNVV:EQLSN:DMVKS:SXGXR, HVPKPXX:VPQKL:EPLT:DDSSNVI:EQLSN:NMVKS:SXGXH, RVPSTXX:VPQKT:EPLT:DNGRVLL:EQLSN:MIVKS:XGXL, ASAAPXX:VPQAL:EPLT:VGRKPKV:EQLSN:MIVKS:XKXS, ASASPXX:VPQDL:EPLT:IGKTPKI:EQLSN:MIVKS:XKXS, NDEGLEX:VPTGQ:SNIT:RIKPHQGQH:IGEMS:LEQHN:QXEXR, KIPKAXX:VPTEL:SNIT:DENEKVV:IGEMS:DMVVE:GXGXR, GIPEPXX:VPEKM:SNIT:DENKNVV:IGEMS:NMTVE:SXAXR, SIPKAXX:VPTEL:SNIT:DEYDKVV:IGEMS:EMVVE:GXGXR, HVTKPTX:APTKL:SNIT:DDSSNVI:IGEMS:NMVVR:SXGXH, YVPKPXX:APTKL:SNIT:DDSSNVI:IGEMS:NMVVR:SXGXH, TVPKPXX:APTQL:SNIT:DDSSNVI:IGEMS:NMVVR:AXGXH, AVPKAXX:APTKL:SNIT:DSSNNVI:IGEMS:NMVVK:AXGXH, KVGKAXX:VPTKL:SNIT:DDMGVPT:IGEMS:EGMSVAE:XGXR, KASKAXX:VPTKL:SNIT:DKGVVTY:IGEMS:GMAVS: EXGXR, GSAGPXX:TPTKM:SNIT:NDKQQII:IGEMS:GMVVD:RXGXS, AAPASXX:VPARL:SNIT:DAANNVV:IGEMS:DMVVE:AXGXR, STPPTXX:VPTRL:SNIT:DSANNVV:IGEMS:DMVVE:SXGXR, HVPKPXX:APTKL:SNIT:DDSSNVI:IGEMS:NMVVR:SXGXH, RVPSTXX:APVKT:SNIT:DNGRVLL:IGEMS:MIVEE:XGXL, ASAAPXX:VPQAL:SNIT:VGRKPKV:IGEMS:MIVRS:XKXS, ASASPXX:VSQDL:SNIT:IGKTPKI:IGEMS:MIVKS:XKXS, ASASPXX:VPQDL:SNIT:VGRTPKV:IGEMS:MVVKS:XKXS, NDEGLEX:VPTGQ:SNIT:RIKPHQGQH:IGEMS:LEEHS:QXEXR, SSVKXQP:SRVHH:SNIT:EYVRKKPKL:IGEMS:RLEEH:LEXAXA, RNVQXRP:TQVQL:SNIT: EIVRKKPIF:IGEMS:TLEDH:LAXKXE, NDEGLEX:VPTEE:SNIT:RIKPHQGQH:LGEMS:FLEHS:KXEXR, KIPKAXX:VPTEL:SNIT:DENEKVV:LGEMS:DMVVE:GXGXR, GIPEPXX:VPEKM:SNIT:DENKNVV:LGEMS:NMTVE:SXAXR, SIPKAXX:VPTEL:SNIT:DEYDKVV:LGEMS:EMVVE:GXGXR, HVTKPTX:APTKL:SNIT:DDSSNVI:LGEMS:NMVVR:SXGXH, YVPKPXX:APTKL:SNIT:DDSSNVI:LGEMS:NMVVR:SXGXH, TVPKPXX:APTQL:SNIT:DDSSNVI:LGEMS:NMVVR:AXGXH, AVPKAXX:APTKL:SNIT:DSSNNVI:LGEMS:NMVVK:AXGXH, KVGKAXX:VPTKL:SNIT:DDMGVPT:LGEMS:EGMSVAE:XGXR, KASKAXX:VPTKL:SNIT:DKGVVTY:LGEMS:GMAVS:EXGXR, GSAGPXX:TPTKM:SNIT:NDKQQII:LGEMS:GMVVD:RXGXS, AAPASXX:VPARL:SNIT:DAANNVV:LGEMS:DMVVE:AXGXR, STPPTXX:VPTRL:SNIT:DSANNVV:LGEMS:DMVVE:SXGXR, HVPKPXX:APTKL:SNIT:DDSSNVI:LGEMS:NMVVR:SXGXH, RVPSTXX:APVKT:SNIT:DNGRVLL:LGEMS:MIVEE:XGXL, ASAAPXX:VPQAL:SNIT:VGRKPKV:LGEMS:MIVRS:XKXS, ASASPXX:VSQDL:SNIT:IGKTPKI:LGEMS:MIVKS:XKXS, ASASPXX:VPQDL:SNIT:VGRTPKV:LGEMS:MVVKS:XKXS, NDEGLEX:VPTEE:SNIT:RIKPHQGQH:LGEMS:FLQHN:KXEXR, SSVKXQP:SRVHH:SNIT:EYVRKKPKL:LGEMS:RLEEH:LEXAXA, RNVQXRP:TQVQL:SNIT: EIVRKKPIF:LGEMS:TLEDH:LAXKXE, RNVQXRP:SRVQL:RSVK:EIVRKKPIF:KEVQV:TLEEH:LAXKXE, KIPKAXX:VPTEL: RSVK:DENEKVV:KEVQV:DMVVE:GXGXR, GIPEPXX:VPEKM:RSVK:DENKNVV:KEVQV:NMTVE:SXAXR, SIPKAXX:VPTEL:RSVK:DEYDKVV:KEVQV:EMVVE:GXGXR, HVTKPTX:APTKL: RSVK:DDSSNVI:KEVQV:NMVVR:SXGXH, YVPKPXX:APTKL: RSVK:DDSSNVI:KEVQV:NMVVR:SXGXH, TVPKPXX:APTQL:RSVK:DDSSNVI:KEVQV:NMVVR:AXGXH, AVPKAXX:APTKL:RSVK:DSSNNVI:KEVQV:NMVVK:AXGXH, KVGKAXX:VPTKL:RSVK:DDMGVPT:KEVQV:EGMSVAE:XGXR, KASKAXX:VPTKL: RSVK:DKGVVTY:KEVQV:GMAVS: EXGXR, GSAGPXX:TPTKM:RSVK:NDKQQII:KEVQV:GMVVD:RXGXS, AAPASXX:VPARL:RSVK:DAANNVV:KEVQV:DMVVE:AXGXR, STPPTXX:VPTRL:RSVK:DSANNVV:KEVQV:DMVVE:SXGXR, HVPKPXX:APTKL:RSVK:DDSSNVI:KEVQV:NMVVR:SXGXH, RVPSTXX:APVKT:RSVK:DNGRVLL:KEVQV:MIVEE:XGXL, ASAAPXX:VPQAL:RSVK:VGRKPKV:KEVQV:MIVRS:XKXS, ASASPXX:VSQDL:RSVK:IGKTPKI:KEVQV:MIVKS:XKXS, ASASPXX:VPQDL:RSVK:VGRTPKV:KEVQV:MVVKS:XKXS, NDEGLEX:VPTEE:RSVK:RIKPHQGQH:KEVQV:FLQHN:KXEXR, NDEGLEX:VPTGQ: RSVK: RIKPHQGQH:KEVQV:LEEHS:QXEXR, RNVQXRP:TQVQL:RSVK:EIVRKKPIF:KEVQV:TLEDH:LAXKXE, SSVKXQP:TQVHH:RPVQ:EYVRKKPKL:KKATV:RLEDH:LEXAXA, KIPKAXX:VPTEL:RPVQ:DENEKVV:KKATV:DMVVE:GXGXR, GIPEPXX:VPEKM:RPVQ:DENKNVV:KKATV:NMTVE:SXAXR, SIPKAXX:VPTEL:RPVQ:DEYDKVV:KKATV:EMVVE:GXGXR, HVTKPTX:APTKL: RPVQ:DDSSNVI:KKATV:NMVVR:SXGXH, YVPKPXX:APTKL: RPVQ:DDSSNVI:KKATV:NMVVR:SXGXH, TVPKPXX:APTQL:RPVQ:DDSSNVI:KKATV:NMVVR:AXGXH, AVPKAXX:APTKL:RPVQ:DSSNNVI:KKATV:NMVVK:AXGXH, KVGKAXX:VPTKL:RPVQ:DDMGVPT:KKATV:EGMSVAE:XGXR, KASKAXX:VPTKL: RPVQ:DKGVVTY:KKATV:GMAVS: EXGXR, GSAGPXX:TPTKM:RPVQ:NDKQQII:KKATV:GMVVD:RXGXS, AAPASXX:VPARL:RPVQ:DAANNVV:KKATV:DMVVE:AXGXR, STPPTXX:VPTRL: RPVQ:DSANNVV:KKATV:DMVVE:SXGXR, HVPKPXX:APTKL:RPVQ:DDSSNVI:KKATV:NMVVR:SXGXH, RVPSTXX:APVKT:RPVQ:DNGRVLL:KKATV:MIVEE:XGXL, ASAAPXX:VPQAL:RPVQ:VGRKPKV:KKATV:MIVRS:XKXS, ASASPXX:VSQDL:RPVQ:IGKTPKI:KKATV:MIVKS:XKXS, ASASPXX:VPQDL:RPVQ:VGRTPKV:KKATV:MVVKS:XKXS, NDEGLEX:VPTEE:RPVQ:RIKPHQGQH:KKATV:FLQHN:KXEXR, NDEGLEX:VPTGQ:RPVQ:RIKPHQGQH:KKATV:LEEHS:QXEXR and SSVKXQP:SRVHH:RPVQ:EYVRKKPKL:KKATV:RLEEH:LEXAXA.

[0440] In particular, in certain embodiments, the heptuplet PEP7:PEP5:PEP12:LINKER:PEP2:PEP6:PEP8 is selected from the group consisting of GIPEPXX:VPTKM:SAIS-AA¹⁷-LYL:DENKNVV:LKNYQ:NMVVE:SXAXR, SIPKAXX:VPTEL:SAIS-AA¹⁷-LYL:DEYDKVV:LKNYQ:EMVVE:GXGXR, HVTKPTX:VPTKL:SAIS-AA¹⁷-LYL:DDSSNVI:LKNYQ:NMVVE:SXGXH, YVPKPXX:VPTKL:SAIS-AA¹⁷-LYL:DDSSNVI:LKNYQ:NMVVE:SXGXH, TVPKPXX:VPTQL:SAIS-AA¹⁷-LYL:DDSSNVI:LKNYQ:NMVVE:AXGXH, AVPKAXX:VPTKL:SAIS-AA¹⁷-LYL:DSSNNVI:LKNYQ:NMVVE:AXGXH, KVGKAXX:VPTKL:SAIS-AA¹⁷-LYL:DDMGVPT:LKNYQ:EGMSVVE:XGXR, KASKAXX:VPTKL:SAIS-AA¹⁷-LYL:DKGVVTY:LKNYQ:GMVVE:EXGXR, GSAGPXX:VPTKM:SAIS-AA¹⁷-LYL:NDKQQII:LKNYQ:GMVVE:RXGXS, AAPASXX:VPTRL:SAIS-AA¹⁷-LYL:DAANNVV:LKNYQ:DMVVE:AXGXR, STPPTXX:VPTRL:SAIS-AA¹⁷-LYL:DSANNVV:LKNYQ:DMVVE:SXGXR, HVPKPXX:VPTKL:SAIS-AA¹⁷-LYL:DDSSNVI:LKNYQ:NMVVE:SXGXH, RVPSTXX:VPTKT:SAIS-AA¹⁷-LYL:DNGRVLL:LKNYQ:MIVVE:XGXL, ASAAPXX:VPTAL:SAIS-AA¹⁷-LYL:VGRKPKV:LKNYQ:MIVVE:XKXS, ASASPXX:VPTDL:SAIS-AA¹⁷-LYL:IGKTPKI:LKNYQ:MIVVE:XKXS, ASASPXX:VPTDL:SAIS-AA¹⁷-LYL:VGRTPKVIKNYQ:MVVVE:XKXS, NDEGLEX:VPTEE:SAIS-AA¹⁷-LYL:RIKPHQGQH:LKNYQ:FLVVE:KXEXR, NDEGLEX:VPTGQ:SAIS-AA¹⁷-LYL:RIKPHQGQH:LKNYQ:LEVVE:QXEXR, SSVKXQP:VPTHH:SAIS-AA¹⁷-LYL:EYVRKKPKL:LKNYQ:RLVVE:LEXAXA, RNVQXRP:VPTQL:SAIS-AA¹⁷-LYL:EIVRKKPIF:LKNYQ:TLVVE:LAXKXE, GIPEPXX:VPEKM:SAIS-AA¹⁷-LYL:DENKNVV:LKNYQ:NMTVE:SXAXR, HVTKPTX:APTKL:SAIS-AA¹⁷-LYL:DDSSNVI:LKNYQ:NMVVR:SXGXH, YVPKPXX:APTKL:SAIS-AA¹⁷-LYL:DDSSNVI:LKNYQ:NMVVR:SXGXH, TVPKPXX:APTQL:SAIS-AA¹⁷-LYL:DDSSNVI:LKNYQ:NMVVR:AXGXH, AVPKAXX:APTKL:SAIS-AA¹⁷-LYL:DSSNNVI:LKNYQ:NMVVK:AXGXH, KVGKAXX:VPTKL:SAIS-AA¹⁷-LYL:DDMGVPT:LKNYQ:EGMSVAE:XGXR, KASKAXX:VPTKL:SAIS-AA¹⁷-LYL:DKGVVTY:LKNYQ:GMAVS:EXGXR, GSAGPXX:TPTKM:SAIS-AA¹⁷-LYL:NDKQQII:LKNYQ:GMVVD:RXGXS, AAPASXX:VPARL:SAIS-AA¹⁷-LYL:DAANNVV:LKNYQ:DMVVE:AXGXR, HVPKPXX:APTKL:SAIS-AA¹⁷-LYL:DDSSNVI:LKNYQ:NMVVR:SXGXH, RVPSTXX:APVKT:SAIS-AA¹⁷-LYL:DNGRVLL:LKNYQ:MIVEE:XGXL, ASAAPXX:VPQAL:SAIS-AA¹⁷-LYL:VGRKPKV:LKNYQ:MIVRS:XKXS, ASASPXX:VSQDL:SAIS-AA¹⁷-LYL:IGKTPKI:LKNYQ:MIVKS:XKXS, ASASPXX:VPQDL:SAIS-AA¹⁷-LYL:VGRTPKV:LKNYQ:MVVKS:XKXS, NDEGLEX:VPTEE:SAIS-AA¹⁷-LYL:RIKPHQGQH:LKNYQ:FLQHN:KXEXR, NDEGLEX:VPTGQ:SAIS-AA¹⁷-LYL:RIKPHQGQH:LKNYQ:LEEHS:QXEXR, SSVKXQP:SRVHH:SAIS-AA¹⁷-LYL:EYVRKKPKL:LKNYQ:RLEEH:LEXAXA, RNVQXRP:TQVQL:SAIS-AA¹⁷-LYL:EIVRKKPIF:LKNYQ:TLEDH:LAXKXE, KIPKAXX:VPEEL:SSLS-AA¹⁷-LFF:DENEKVV:LKVYP:DMTVE:GXGXR, SIPKAXX:VPEEL:SSLS-AA¹⁷-LFF:DEYDKVV:LKVYP:EMTVE:GXGXR, HVTKPTX:VPEKL:SSLS-AA¹⁷-LFF:DDSSNVI:LKVYP:NMTVE:SXGXH, YVPKPXX:VPEKL:SSLS-AA¹⁷-LFF:DDSSNVI:LKVYP:NMTVE:SXGXH, TVPKPXX:VPEQL:SSLS-AA¹⁷-LFF:DDSSNVI:LKVYP:NMTVE:AXGXH, AVPKAXX:VPEKL:SSLS-AA¹⁷-LFF:DSSNNVI:LKVYP:NMTVE:AXGXH, KVGKAXX:VPEKL:SSLS-AA¹⁷-LFF:DDMGVPT:LKVYP:EGMSTVE:XGXR, KASKAXX:VPEKL:SSLS-AA¹⁷-LFF:DKGVVTY:LKVYP:GMTVE:EXGXR, GSAGPXX:VPEKM:SSLS-AA¹⁷-LFF:NDKQQIIIKVYP:GMTVE:RXGXS, AAPASXX:VPERL:SSLS-AA¹⁷-LFF:DAANNVV:LKVYP:DMTVE:AXGXR, STPPTXX:VPERL:SSLS-AA¹⁷-LFF:DSANNVV:LKVYP:DMTVE:SXGXR, HVPKPXX:VPEKL:SSLS-AA¹⁷-LFF:DDSSNVI:LKVYP:NMTVE:SXGXH, RVPSTXX:VPEKT:SSLS-AA¹⁷-LFF:DNGRVLLIKVYP:MITVE:XGXL, ASAAPXX:VPEAL:SSLS-AA¹⁷-LFF:VGRKPKV:LKVYP:MITVE:XKXS, ASASPXX:VPEDL:SSLS-AA¹⁷-LFF:IGKTPKIIKVYP:MITVE:XKXS, ASASPXX:VPEDL:SSLS-AA¹⁷-LFF:VGRTPKV:LKVYP:MVTVE:XKXS, NDEGLEX:VPEEE:SSLS-AA¹⁷-LFF:RIKPHQGQH:LKVYP:FLTVE:KXEXR, NDEGLEX:VPEGQ:SSLS-AA¹⁷-LFF:RIKPHQGQH:LKVYP:LETVE:QXEXR, SSVKXQP:VPEHH:SSLS-AA¹⁷-LFF:EYVRKKPKL:LKVYP:RLTVE:LEXAXA, RNVQXRP:VPEQL:SSLS-AA¹⁷-LFF:EIVRKKPIF:LKVYP:TLTVE:LAXKXE, KIPKAXX:VPTEL:SSLS-AA¹⁷-LFF:DENEKVV:LKVYP:DMVVE:GXGXR, SIPKAXX:VPTEL:SSLS-AA¹⁷-LFF:DEYDKVV:LKVYP:EMVVE:GXGXR, HVTKPTX:APTKL:SSLS-AA¹⁷-LFF:DDSSNVI:LKVYP:NMVVR:SXGXH, YVPKPXX:APTKL:SSLS-AA¹⁷-LFF:DDSSNVI:LKVYP:NMVVR:SXGXH, TVPKPXX:APTQL:SSLS-AA¹⁷-LFF:DDSSNVI:LKVYP:NMVVR:AXGXH, AVPKAXX:APTKL:SSLS-AA¹⁷-LFF:DSSNNVI:LKVYP:NMVVK:AXGXH, KVGKAXX:VPTKL:SSLS-AA¹⁷-LFF:DDMGVPT:LKVYP:EGMSVAE:XGXR, KASKAXX:VPTKL:SSLS-AA¹⁷-LFF:DKGVVTY:LKVYP:GMAVS:EXGXR, GSAGPXX:TPTKM:SSLS-AA¹⁷-LFF:NDKQQII:LKVYP:GMVVD:RXGXS, AAPASXX:VPARL:SSLS-AA¹⁷-LFF:DAANNVV:LKVYP:DMVVE:AXGXR, STPPTXX:VPTRL:SSLS-AA¹⁷-LFF:DSANNVVIKVYP:DMVVE:SXGXR, HVPKPXX:APTKL:SSLS-AA¹⁷-LFF:DDSSNVI:LKVYP:NMVVR:SXGXH, RVPSTXX:APVKT:SSLS-AA¹⁷-LFF:DNGRVLL:LKVYP:MIVEE:XGXL, ASAAPXX:VPQAL:SSLS-AA¹⁷-LFF:VGRKPKV:LKVYP:MIVRS:XKXS, ASASPXX:VSQDL:SSLS-AA¹⁷-LFF:IGKTPKI:LKVYP:MIVKS:XKXS, ASASPXX:VPQDL:SSLS-AA¹⁷-LFF:VGRTPKV:LKVYP:MVVKS:XKXS, NDEGLEX:VPTEE:SSLS-AA¹⁷-LFF:RIKPHQGQH:LKVYP:FLQHN:KXEXR, NDEGLEX:VPTGQ:SSLS-AA¹⁷-LFF:RIKPHQGQH:LKVYP:LEEHS:QXEXR, SSVKXQP:SRVHH:SSLS-AA¹⁷-LFF:EYVRKKPKL:LKVYP:RLEEH:LEXAXA, RNVQXRP:TQVQL:SSLS-AA¹⁷-LFF:EIVRKKPIF:LKVYP:TLEDH:LAXKXE, KIPKAXX:VPTEL:SAIS-AA¹⁷-LYL:DENEKVV:LKNYQ:DMVVE:GXGXR, KIPKAXX:APTEL:NAIS-AA¹⁷-LYF:DENEKVV:LKKYR:DMVVR:GXGXR, GIPEPXX:APTKM:NAIS-AA¹⁷-LYF:DENKNVV:LKKYR:NMVVR:SXAXR, SIPKAXX:APTEL:NAIS-AA¹⁷-LYF:DEYDKVV:LKKYR:EMVVR:GXGXR, YVPKPXX:APTKL:NAIS-AA¹⁷-LYF:DDSSNVIIKKYR:NMVVR:SXGXH, TVPKPXX:APTQL:NAIS-AA¹⁷-LYF:DDSSNVI:LKKYR:NMVVR:AXGXH, AVPKAXX:APTKL:NAIS-AA¹⁷-LYF:DSSNNVIIKKYR:NMVVR:AXGXH, KVGKAXX:APTKL:NAIS-AA¹⁷-LYF:DDMGVPT:LKKYR:EGMSVVR:XGXR, KASKAXX:APTKL:NAIS-AA¹⁷-LYF:DKGVVTY:LKKYR:GMVVR:EXGXR, GSAGPXX:APTKM:NAIS-AA¹⁷-LYF:NDKQQII:LKKYR:GMVVR:RXGXS, AAPASXX:APTRL:NAIS-AA¹⁷-LYF:DAANNVVIKKYR:DMVVR:AXGXR, STPPTXX:APTRL:NAIS-AA¹⁷-LYF:DSANNVV:LKKYR:DMVVR:SXGXR, HVPKPXX:APTKL:NAIS-AA¹⁷-LYF:DDSSNVI:LKKYR:NMVVR:SXGXH, RVPSTXX:APTKT:NAIS-AA¹⁷-LYF:DNGRVLLIKKYR:MIVVR:XGXL, ASAAPXX:APTAL:NAIS-AA¹⁷-LYF:VGRKPKVIKKYR:MIVVR:XKXS, ASASPXX:APTDL:NAIS-AA¹⁷-LYF:IGKTPKI:LKKYR:MIVVR:XKXS, ASASPXX:APTDL:NAIS-AA¹⁷-LYF:VGRTPKV:LKKYR:MVVVR:XKXS, NDEGLEX:APTEE:NAIS-AA¹⁷-LYF:RIKPHQGQH:LKKYR:FLVVR:KXEXR, NDEGLEX:APTGQ:NAIS-AA¹⁷-LYF:RIKPHQGQH:LKKYR:LEVVR:QXEXR, SSVKXQP:APTHH:NAIS-AA¹⁷-LYF:EYVRKKPKLIKKYR:RLVVR:LEXAXA, RNVQXRP:APTQL:NAIS-AA¹⁷-LYF:EIVRKKPIF:LKKYR:TLVVR:LAXKXE, KIPKAXX:VPTEL:NAIS-AA¹⁷-LYF:DENEKVV:LKKYR:DMVVE:GXGXR, GIPEPXX:VPEKM:NAIS-AA¹⁷-LYF:DENKNVV:LKKYR:NMTVE:SXAXR, SIPKAXX:VPTEL:NAIS-AA¹⁷-LYF:DEYDKVV:LKKYR:EMVVE:GXGXR, AVPKAXX:APTKL:NAIS-AA¹⁷-LYF:DSSNNVIIKKYR:NMVVK:AXGXH, KVGKAXX:VPTKL:NAIS-AA¹⁷-LYF:DDMGVPT:LKKYR:EGMSVAE:XGXR, KASKAXX:VPTKL:NAIS-AA¹⁷-LYF:DKGVVTY:LKKYR:GMAVS:EXGXR, GSAGPXX:TPTKM:NAIS-AA¹⁷-LYF:NDKQQIIIKKYR:GMVVD:RXGXS, AAPASXX:VPARL:NAIS-AA¹⁷-LYF:DAANNVV:LKKYR:DMVVE:AXGXR, STPPTXX:VPTRL:NAIS-AA¹⁷-LYF:DSANNVV:LKKYR:DMVVE:SXGXR, RVPSTXX:APVKT:NAIS-AA¹⁷-LYF:DNGRVLL:LKKYR:MIVEE:XGXL, ASAAPXX:VPQAL:NAIS-AA¹⁷-LYF:VGRKPKVIKKYR:MIVRS:XKXS, ASASPXX:VSQDL:NAIS-AA¹⁷-LYF:IGKTPKIIKKYR:MIVKS:XKXS, ASASPXX:VPQDL:NAIS-AA¹⁷-LYF:VGRTPKV:LKKYR:MVVKS:XKXS, NDEGLEX:VPTEE:NAIS-AA¹⁷-LYF:RIKPHQGQH:LKKYR:FLQHN:KXEXR, NDEGLEX:VPTGQ:NAIS-AA¹⁷-LYF:RIKPHQGQH:LKKYR:LEEHS:QXEXR, SSVKXQP:SRVHH:NAIS-AA¹⁷-LYF:EYVRKKPKL:LKKYR:RLEEH:LEXAXA, RNVQXRP:TQVQL:NAIS-AA¹⁷-LYF:EIVRKKPIF:LKKYR:TLEDH:LAXKXE, HVTKPTX:APTKL:NAIS-AA¹⁷-LYF:DDSSNVI:LKKYR:NMVVR:SXGXH, KIPKAXX:APTEL:SATS-AA¹⁷-LYY:DENEKVV:LRKHR:DMVVK:GXGXR, GIPEPXX:APTKM:SATS-AA¹⁷-LYY:DENKNVV:LRKHR:NMVVK:SXAXR, SIPKAXX:APTEL:SATS-AA¹⁷-LYY:DEYDKVV:LRKHR:EMVVK:GXGXR, HVTKPTX:APTKL:SATS-AA¹⁷-LYY:DDSSNVI:LRKHR:NMVVK:SXGXH, YVPKPXX:APTKL:SATS-AA¹⁷-LYY:DDSSNVI:LRKHR:NMVVK:SXGXH, TVPKPXX:APTQL:SATS-AA¹⁷-LYY:DDSSNVIIRKHR:NMVVK:AXGXH, KVGKAXX:APTKL:SATS-AA¹⁷-LYY:DDMGVPT:LRKHR:EGMSVVK:XGXR, KASKAXX:APTKL:SATS-AA¹⁷-LYY:DKGVVTY:LRKHR:GMVVK:EXGXR, GSAGPXX:APTKM:SATS-AA¹⁷-LYY:NDKQQIIIRKHR:GMVVK:RXGXS, AAPASXX:APTRL:SATS-AA¹⁷-LYY:DAANNVV:LRKHR:DMVVK:AXGXR, STPPTXX:APTRL:SATS-AA¹⁷-LYY:DSANNVV:LRKHR:DMVVK:SXGXR, HVPKPXX:APTKL:SATS-AA¹⁷-LYY:DDSSNVI:LRKHR:NMVVK:SXGXH, RVPSTXX:APTKT:SATS-AA¹⁷-LYY:DNGRVLL:LRKHR:MIVVK:XGXL, ASAAPXX:APTAL:SATS-AA¹⁷-LYY:VGRKPKVIRKHR:MIVVK:XKXS, ASASPXX:APTDL:SATS-AA¹⁷-LYY:IGKTPKI:LRKHR:MIVVK:XKXS, ASASPXX:APTDL:SATS-AA¹⁷-LYY:VGRTPKV:LRKHR:MVVVK:XKXS, NDEGLEX:APTEE:SATS-AA¹⁷-LYY:RIKPHQGQH:LRKHR:FLVVK:KXEXR, NDEGLEX:APTGQ:SATS-AA¹⁷-LYY:RIKPHQGQH:LRKHR:LEVVK:QXEXR, SSVKXQP:APTHH:SATS-AA¹⁷-LYY:EYVRKKPKL:LRKHR:RLVVK:LEXAXA, RNVQXRP:APTQL:SATS-AA¹⁷-LYY:EIVRKKPIF:LRKHR:TLVVK:LAXKXE, KIPKAXX:VPTEL:SATS-AA¹⁷-LYY:DENEKVV:LRKHR:DMVVE:GXGXR, GIPEPXX:VPEKM:SATS-AA¹⁷-LYY:DENKNVV:LRKHR:NMTVE:SXAXR, SIPKAXX:VPTEL:SATS-AA¹⁷-LYY:DEYDKVV:LRKHR:EMVVE:GXGXR, HVTKPTX:APTKL:SATS-AA¹⁷-LYY:DDSSNVI:LRKHR:NMVVR:SXGXH, YVPKPXX:APTKL:SATS-AA¹⁷-LYY:DDSSNVI:LRKHR:NMVVR:SXGXH, TVPKPXX:APTQL:SATS-AA¹⁷-LYY:DDSSNVI:LRKHR:NMVVR:AXGXH, KVGKAXX:VPTKL:SATS-AA¹⁷-LYY:DDMGVPT:LRKHR:EGMSVAE:XGXR, KASKAXX:VPTKL:SATS-AA¹⁷-LYY:DKGVVTY:LRKHR:GMAVS:EXGXR, GSAGPXX:TPTKM:SATS-AA¹⁷-LYY:NDKQQII:LRKHR:GMVVD:RXGXS, AAPASXX:VPARL:SATS-AA¹⁷-LYY:DAANNVV:LRKHR:DMVVE:AXGXR, STPPTXX:VPTRL:SATS-AA¹⁷-LYY:DSANNVV:LRKHR:DMVVE:SXGXR, HVPKPXX:APTKL:SATS-AA¹⁷-LYY:DDSSNVI:LRKHR:NMVVR:SXGXH, RVPSTXX:APVKT:SATS-AA¹⁷-LYY:DNGRVLL:LRKHR:MIVEE:XGXL, ASAAPXX:VPQAL:SATS-AA¹⁷-LYY:VGRKPKV:LRKHR:MIVRS:XKXS, ASASPXX:VSQDL:SATS-AA¹⁷-LYY:IGKTPKIIRKHR:MIVKS:XKXS, ASASPXX:VPQDL:SATS-AA¹⁷-LYY:VGRTPKVIRKHR:MVVKS:XKXS, NDEGLEX:VPTEE:SATS-AA¹⁷-LYY:RIKPHQGQH:LRKHR:FLQHN:KXEXR, NDEGLEX:VPTGQ:SATS-AA¹⁷-LYY:RIKPHQGQH:LRKHR:LEEHS:QXEXR, SSVKXQP:SRVHH:SATS-AA¹⁷-LYY:EYVRKKPKL:LRKHR:RLEEH:LEXAXA, RNVQXRP:TQVQL:SATS-AA¹⁷-LYY:EIVRKKPIFIRKHR:TLEDH:LAXKXE, KIPKAXX:VPTEL:SPIS-AA¹⁷-LYK:DENEKVV:LKYHY:DMVAE:GXGXR, GIPEPXX:VPTKM:SPIS-AA¹⁷-LYK:DENKNVV:LKYHY:NMVAE:SXAXR, SIPKAXX:VPTEL:SPIS-AA¹⁷-LYK:DEYDKVV:LKYHY:EMVAE:GXGXR, HVTKPTX:VPTKL:SPIS-AA¹⁷-LYK:DDSSNVI:LKYHY:NMVAE:SXGXH, YVPKPXX:VPTKL:SPIS-AA¹⁷-LYK:DDSSNVI:LKYHY:NMVAE:SXGXH, TVPKPXX:VPTQL:SPIS-AA¹⁷-LYK:DDSSNVI:LKYHY:NMVAE:AXGXH, AVPKAXX:VPTKL:SPIS-AA¹⁷-LYK:DSSNNVI:LKYHY:NMVAE:AXGXH, KASKAXX:VPTKL:SPIS-AA¹⁷-LYK:DKGVVTY:LKYHY:GMVAE:EXGXR, GSAGPXX:VPTKM:SPIS-AA¹⁷-LYK:NDKQQII:LKYHY:GMVAE:RXGXS, AAPASXX:VPTRL:SPIS-AA¹⁷-LYK:DAANNVV:LKYHY:DMVAE:AXGXR, STPPTXX:VPTRL:SPIS-AA¹⁷-LYK:DSANNVV:LKYHY:DMVAE:SXGXR, HVPKPXX:VPTKL:SPIS-AA¹⁷-LYK:DDSSNVI:LKYHY:NMVAE:SXGXH, RVPSTXX:VPTKT:SPIS-AA¹⁷-LYK:DNGRVLL:LKYHY:MIVAE:XGXL, ASAAPXX:VPTAL:SPIS-AA¹⁷-LYK:VGRKPKV:LKYHY:MIVAE:XKXS, ASASPXX:VPTDL:SPIS-AA¹⁷-LYK:IGKTPKI:LKYHY:MIVAE:XKXS, ASASPXX:VPTDL:SPIS-AA¹⁷-LYK:VGRTPKV:LKYHY:MVVAE:XKXS, NDEGLEX:VPTEE:SPIS-AA¹⁷-LYK: RIKPHQGQH:LKYHY: FLVAE:KXEXR, NDEGLEX:VPTGQ:SPIS-AA¹⁷-LYK:RIKPHQGQH:LKYHY:LEVAE:QXEXR, SSVKXQP:VPTHH:SPIS-AA¹⁷-LYK:EYVRKKPKL:LKYHY:RLVAE:LEXAXA, RNVQXRP:VPTQL:SPIS-AA¹⁷-LYK:EIVRKKPIF:LKYHY:TLVAE:LAXKXE, KIPKAXX:VPTEL:SPIS-AA¹⁷-LYK:DENEKVV:LKYHY:DMVVE:GXGXR, GIPEPXX:VPEKM:SPIS-AA¹⁷-LYK:DENKNVV:LKYHY:NMTVE:SXAXR, SIPKAXX:VPTEL:SPIS-AA¹⁷-LYK:DEYDKVV:LKYHY:EMVVE:GXGXR, HVTKPTX:APTKL:SPIS-AA¹⁷-LYK:DDSSNVI:LKYHY:NMVVR:SXGXH, YVPKPXX:APTKL:SPIS-AA¹⁷-LYK:DDSSNVI:LKYHY:NMVVR:SXGXH, TVPKPXX:APTQL:SPIS-AA¹⁷-LYK:DDSSNVI:LKYHY:NMVVR:AXGXH, AVPKAXX:APTKL:SPIS-AA¹⁷-LYK:DSSNNVI:LKYHY:NMVVK:AXGXH, KASKAXX:VPTKL:SPIS-AA¹⁷-LYK:DKGVVTY:LKYHY:GMAVS:EXGXR, GSAGPXX:TPTKM:SPIS-AA¹⁷-LYK:NDKQQII:LKYHY:GMVVD:RXGXS, AAPASXX:VPARL:SPIS-AA¹⁷-LYK:DAANNVV:LKYHY:DMVVE:AXGXR, STPPTXX:VPTRL:SPIS-AA¹⁷-LYK:DSANNVV:LKYHY:DMVVE:SXGXR, HVPKPXX:APTKL:SPIS-AA¹⁷-LYK:DDSSNVI:LKYHY:NMVVR:SXGXH, RVPSTXX:APVKT:SPIS-AA¹⁷-LYK:DNGRVLL:LKYHY:MIVEE:XGXL, ASAAPXX:VPQAL:SPIS-AA¹⁷-LYK:VGRKPKV:LKYHY:MIVRS:XKXS, ASASPXX:VSQDL:SPIS-AA¹⁷-LYK:IGKTPKI:LKYHY:MIVKS:XKXS, ASASPXX:VPQDL:SPIS-AA¹⁷-LYK:VGRTPKV:LKYHY:MVVKS:XKXS, NDEGLEX:VPTEE:SPIS-AA¹⁷-LYK:RIKPHQGQH:LKYHY:FLQHN:KXEXR, NDEGLEX:VPTGQ:SPIS-AA¹⁷-LYK:RIKPHQGQH:LKYHY:LEEHS:QXEXR, SSVKXQP:SRVHH:SPIS-AA¹⁷-LYK:EYVRKKPKL:LKYHY:RLEEH:LEXAXA, RNVQXRP:TQVQL:SPIS-AA¹⁷-LYK:EIVRKKPIF:LKYHY:TLEDH:LAXKXE, KIPKAXX:VPTEL:EPIS-AA¹⁷-LYL:DENEKVV:KFKYE:DMAVS:GXGXR, GIPEPXX:VPTKM:EPIS-AA¹⁷-LYL:DENKNVV:KFKYE:NMAVS:SXAXR, SIPKAXX:VPTEL:EPIS-AA¹⁷-LYL:DEYDKVV:KFKYE:EMAVS:GXGXR, HVTKPTX:VPTKL:EPIS-AA¹⁷-LYL:DDSSNVI:KFKYE:NMAVS:SXGXH, YVPKPXX:VPTKL:EPIS-AA¹⁷-LYL:DDSSNVI:KFKYE:NMAVS:SXGXH, TVPKPXX:VPTQL:EPIS-AA¹⁷-LYL:DDSSNVI:KFKYE:NMAVS:AXGXH, AVPKAXX:VPTKL:EPIS-AA¹⁷-LYL:DSSNNVI:KFKYE:NMAVS:AXGXH, KVGKAXX:VPTKL:EPIS-AA¹⁷-LYL:DDMGVPT:KFKYE:EGMSAVS:XGXR, GSAGPXX:VPTKM:EPIS-AA¹⁷-LYL:NDKQQII:KFKYE:GMAVS:RXGXS, AAPASXX:VPTRL:EPIS-AA¹⁷-LYL:DAANNVV:KFKYE:DMAVS:AXGXR, STPPTXX:VPTRL:EPIS-AA¹⁷-LYL:DSANNVV:KFKYE:DMAVS:SXGXR, HVPKPXX:VPTKL:EPIS-AA¹⁷-LYL:DDSSNVI:KFKYE:NMAVS:SXGXH, RVPSTXX:VPTKT:EPIS-AA¹⁷-LYL:DNGRVLL:KFKYE:MIAVS:XGXL, ASAAPXX:VPTAL:EPIS-AA¹⁷-LYL:VGRKPKV:KFKYE:MIAVS:XKXS, ASASPXX:VPTDLEPIS-AA¹⁷-LYL:IGKTPKI:KFKYE:MIAVS:XKXS, ASASPXX:VPTDLEPIS-AA¹⁷-LYL:VGRTPKV:KFKYE:MVAVS:XKXS, NDEGLEX:VPTEE:EPIS-AA¹⁷-LYL:RIKPHQGQH:KFKYE:FLAVS:KXEXR, NDEGLEX:VPTGQ:EPIS-AA¹⁷-LYL:RIKPHQGQH:KFKYE:LEAVS:QXEXR, SSVKXQP:VPTHH:EPIS-AA¹⁷-LYL:EYVRKKPKL:KFKYE:RLAVS:LEXAXA, RNVQXRP:VPTQL:EPIS-AA¹⁷-LYL:EIVRKKPIF:KFKYE:TLAVS:LAXKXE, KIPKAXX:VPTEL:EPIS-AA¹⁷-LYL:DENEKVV:KFKYE:DMVVE:GXGXR, GIPEPXX:VPEKM:EPIS-AA¹⁷-LYL:DENKNVV:KFKYE:NMTVE:SXAXR, SIPKAXX:VPTEL:EPIS-AA¹⁷-LYL:DEYDKVV:KFKYE:EMVVE:GXGXR, HVTKPTX:APTKL:EPIS-AA¹⁷-LYL:DDSSNVI:KFKYE:NMVVR:SXGXH, YVPKPXX:APTKL:EPIS-AA¹⁷-LYL:DDSSNVI:KFKYE:NMVVR:SXGXH, TVPKPXX:APTQL:EPIS-AA¹⁷-LYL:DDSSNVI:KFKYE:NMVVR:AXGXH, AVPKAXX:APTKL:EPIS-AA¹⁷-LYL:DSSNNVI:KFKYE:NMVVK:AXGXH, KVGKAXX:VPTKL:EPIS-AA¹⁷-LYL:DDMGVPT:KFKYE:EGMSVAE:XGXR, GSAGPXX:TPTKM:EPIS-AA¹⁷-LYL:NDKQQII:KFKYE:GMVVD:RXGXS, AAPASXX:VPARL:EPIS-AA¹⁷-LYL:DAANNVV:KFKYE:DMVVE:AXGXR, STPPTXX:VPTRL:EPIS-AA¹⁷-LYL:DSANNVV:KFKYE:DMVVE:SXGXR, HVPKPXX:APTKL:EPIS-AA¹⁷-LYL:DDSSNVI:KFKYE:NMVVR:SXGXH, RVPSTXX:APVKT:EPIS-AA¹⁷-LYL:DNGRVLL:KFKYE:MIVEE:XGXL, ASAAPXX:VPQAL:EPIS-AA¹⁷-LYL:VGRKPKV:KFKYE:MIVRS:XKXS, ASASPXX:VSQDLEPIS-AA¹⁷-LYL:IGKTPKI:KFKYE:MIVKS:XKXS, ASASPXX:VPQDLEPIS-AA¹⁷-LYL:VGRTPKV:KFKYE:MVVKS:XKXS, NDEGLEX:VPTEE:EPIS-AA¹⁷-LYL:RIKPHQGQH:KFKYE:FLQHN:KXEXR, NDEGLEX:VPTGQ:EPIS-AA¹⁷-LYL:RIKPHQGQH:KFKYE:LEEHS:QXEXR, SSVKXQP:SRVHH:EPIS-AA¹⁷-LYL:EYVRKKPKL:KFKYE:RLEEH:LEXAXA, RNVQXRP:TQVQL:EPIS-AA¹⁷-LYL:EIVRKKPIF:KFKYE:TLEDH:LAXKXE, KIPKAXX:TPTEL:SPIN-AA¹⁷-LYF:DENEKVV:YGKIP:DMVVD:GXGXR, GIPEPXX:TPTKM:SPIN-AA¹⁷-LYF:DENKNVV:YGKIP:NMVVD:SXAXR, SIPKAXX:TPTEL:SPIN-AA¹⁷-LYF:DEYDKVV:YGKIP:EMVVD:GXGXR, HVTKPTX:TPTKL:SPIN-AA¹⁷-LYF:DDSSNVI:YGKIP:NMVVD:SXGXH, YVPKPXX:TPTKL:SPIN-AA¹⁷-LYF:DDSSNVI:YGKIP:NMVVD:SXGXH, TVPKPXX:TPTQL:SPIN-AA¹⁷-LYF:DDSSNVI:YGKIP:NMVVD:AXGXH, AVPKAXX:TPTKL:SPIN-AA¹⁷-LYF:DSSNNVI:YGKIP:NMVVD:AXGXH, KVGKAXX:TPTKL:SPIN-AA¹⁷-LYF:DDMGVPT:YGKIP:EGMSVVD:XGXR, KASKAXX:TPTKL:SPIN-AA¹⁷-LYF:DKGVVTY:YGKIP:GMVVD:EXGXR, AAPASXX:TPTRL:SPIN-AA¹⁷-LYF:DAANNVV:YGKIP:DMVVD:AXGXR, STPPTXX:TPTRL:SPIN-AA¹⁷-LYF:DSANNVV:YGKIP:DMVVD:SXGXR, HVPKPXX:TPTKL:SPIN-AA¹⁷-LYF:DDSSNVI:YGKIP:NMVVD:SXGXH, RVPSTXX:TPTKT:SPIN-AA¹⁷-LYF:DNGRVLL:YGKIP:MIVVD:XGXL, ASAAPXX:TPTAL:SPIN-AA¹⁷-LYF:VGRKPKV:YGKIP:MIVVD:XKXS, ASASPXX:TPTDL:SPIN-AA¹⁷-LYF:IGKTPKI:YGKIP:MIVVD:XKXS, ASASPXX:TPTDL:SPIN-AA¹⁷-LYF:VGRTPKV:YGKIP:MVVVD:XKXS, NDEGLEX:TPTEE:SPIN-AA¹⁷-LYF:RIKPHQGQH:YGKIP:FLVVD:KXEXR, NDEGLEX:TPTGQ:SPIN-AA¹⁷-LYF:RIKPHQGQH:YGKIP:LEVVD:QXEXR, SSVKXQP:TPTHH:SPIN-AA¹⁷-LYF:EYVRKKPKL:YGKIP:RLVVD:LEXAXA, RNVQXRP:TPTQL:SPIN-AA¹⁷-LYF:EIVRKKPIF:YGKIP:TLVVD:LAXKXE, KIPKAXX:VPTEL:SPIN-AA¹⁷-LYF:DENEKVV:YGKIP:DMVVE:GXGXR, GIPEPXX:VPEKM:SPIN-AA¹⁷-LYF:DENKNVV:YGKIP:NMTVE:SXAXR, SIPKAXX:VPTEL:SPIN-AA¹⁷-LYF:DEYDKVV:YGKIP:EMVVE:GXGXR, HVTKPTX:APTKL:SPIN-AA¹⁷-LYF:DDSSNVI:YGKIP:NMVVR:SXGXH, YVPKPXX:APTKL:SPIN-AA¹⁷-LYF:DDSSNVI:YGKIP:NMVVR:SXGXH, TVPKPXX:APTQL:SPIN-AA¹⁷-LYF:DDSSNVI:YGKIP:NMVVR:AXGXH, AVPKAXX:APTKL:SPIN-AA¹⁷-LYF:DSSNNVI:YGKIP:NMVVK:AXGXH, KVGKAXX:VPTKL:SPIN-AA¹⁷-LYF:DDMGVPT:YGKIP:EGMSVAE:XGXR, KASKAXX:VPTKL:SPIN-AA¹⁷-LYF:DKGVVTY:YGKIP:GMAVS:EXGXR, AAPASXX:VPARL:SPIN-AA¹⁷-LYF:DAANNVV:YGKIP:DMVVE:AXGXR, STPPTXX:VPTRL:SPIN-AA¹⁷-LYF:DSANNVV:YGKIP:DMVVE:SXGXR, HVPKPXX:APTKL:SPIN-AA¹⁷-LYF:DDSSNVI:YGKIP:NMVVR:SXGXH, RVPSTXX:APVKT:SPIN-AA¹⁷-LYF:DNGRVLLYGKIP:MIVEE:XGXL, ASAAPXX:VPQAL:SPIN-AA¹⁷-LYF:VGRKPKV:YGKIP:MIVRS:XKXS, ASASPXX:VSQDL:SPIN-AA¹⁷-LYF:IGKTPKI:YGKIP:MIVKS:XKXS, ASASPXX:VPQDL:SPIN-AA¹⁷-LYF:VGRTPKV:YGKIP:MVVKS:XKXS, NDEGLEX:VPTEE:SPIN-AA¹⁷-LYF:RIKPHQGQH:YGKIP:FLQHN:KXEXR, NDEGLEX:VPTGQ:SPIN-AA¹⁷-LYF:RIKPHQGQH:YGKIP:LEEHS:QXEXR, SSVKXQP:SRVHH:SPIN-AA¹⁷-LYF:EYVRKKPKL:YGKIP:RLEEH:LEXAXA, RNVQXRP:TQVQL:SPIN-AA¹⁷-LYF:EIVRKKPIF:YGKIP:TLEDH:LAXKXE, KIPKAXX:VPAEL:SPIS-AA¹⁷-LYI:DENEKVV:YKQYE:DMVVE:GXGXR, GIPEPXX:VPAKM:SPIS-AA¹⁷-LYI:DENKNVV:YKQYE:NMVVE:SXAXR, SIPKAXX:VPAEL:SPIS-AA¹⁷-LYI:DEYDKVV:YKQYE:EMVVE:GXGXR, HVTKPTX:VPAKL:SPIS-AA¹⁷-LYI:DDSSNVI:YKQYE:NMVVE:SXGXH, YVPKPXX:VPAKL:SPIS-AA¹⁷-LYI:DDSSNVI:YKQYE:NMVVE:SXGXH, TVPKPXX:VPAQL:SPIS-AA¹⁷-LYI:DDSSNVI:YKQYE:NMVVE:AXGXH, AVPKAXX:VPAKL:SPIS-AA¹⁷-LYI:DSSNNVI:YKQYE:NMVVE:AXGXH, KVGKAXX:VPAKL:SPIS-AA¹⁷-LYI:DDMGVPT:YKQYE:EGMSVVE:XGXR, KASKAXX:VPAKL:SPIS-AA¹⁷-LYI:DKGVVTY:YKQYE:GMVVE:EXGXR, GSAGPXX:VPAKM:SPIS-AA¹⁷-LYI:NDKQQII:YKQYE:GMVVE:RXGXS, STPPTXX:VPARL:SPIS-AA¹⁷-LYI:DSANNVV:YKQYE:DMVVE:SXGXR, HVPKPXX:VPAKL:SPIS-AA¹⁷-LYI:DDSSNVI:YKQYE:NMVVE:SXGXH, RVPSTXX:VPAKT:SPIS-AA¹⁷-LYI:DNGRVLL:YKQYE:MIVVE:XGXL, ASAAPXX:VPAAL:SPIS-AA¹⁷-LYI:VGRKPKV:YKQYE:MIVVE:XKXS, ASASPXX:VPADL:SPIS-AA¹⁷-LYI:IGKTPKI:YKQYE:MIVVE:XKXS, ASASPXX:VPADL:SPIS-AA¹⁷-LYI:VGRTPKV:YKQYE:MVVVE:XKXS, NDEGLEX:VPAEE:SPIS-AA¹⁷-LYI:RIKPHQGQH:YKQYE:FLVVE:KXEXR, NDEGLEX:VPAGQ:SPIS-AA¹⁷-LYI:RIKPHQGQH:YKQYE:LEVVE:QXEXR, SSVKXQP:VPAHH:SPIS-AA¹⁷-LYI:EYVRKKPKL:YKQYE:RLVVE:LEXAXA, RNVQXRP:VPAQL:SPIS-AA¹⁷-LYI:EIVRKKPIF:YKQYE:TLVVE:LAXKXE, KIPKAXX:VPTEL:SPIS-AA¹⁷-LYI:DENEKVV:YKQYE:DMVVE:GXGXR, GIPEPXX:VPEKM:SPIS-AA¹⁷-LYI:DENKNVV:YKQYE:NMTVE:SXAXR, SIPKAXX:VPTEL:SPIS-AA¹⁷-LYI:DEYDKVV:YKQYE:EMVVE:GXGXR, HVTKPTX:APTKL:SPIS-AA¹⁷-LYI:DDSSNVI:YKQYE:NMVVR:SXGXH, YVPKPXX:APTKL:SPIS-AA¹⁷-LYI:DDSSNVI:YKQYE:NMVVR:SXGXH, TVPKPXX:APTQL:SPIS-AA¹⁷-LYI:DDSSNVI:YKQYE:NMVVR:AXGXH, AVPKAXX:APTKL:SPIS-AA¹⁷-LYI:DSSNNVI:YKQYE:NMVVK:AXGXH, KVGKAXX:VPTKL:SPIS-AA¹⁷-LYI:DDMGVPT:YKQYE:EGMSVAE:XGXR, KASKAXX:VPTKL:SPIS-AA¹⁷-LYI:DKGVVTY:YKQYE:GMAVS:EXGXR, GSAGPXX:TPTKM:SPIS-AA¹⁷-LYI:NDKQQII:YKQYE:GMVVD:RXGXS, STPPTXX:VPTRL:SPIS-AA¹⁷-LYI:DSANNVV:YKQYE:DMVVE:SXGXR, HVPKPXX:APTKL:SPIS-AA¹⁷-LYI:DDSSNVI:YKQYE:NMVVR:SXGXH, RVPSTXX:APVKT:SPIS-AA¹⁷-LYI:DNGRVLL:YKQYE:MIVEE:XGXL, ASAAPXX:VPQAL:SPIS-AA¹⁷-LYI:VGRKPKV:YKQYE:MIVRS:XKXS, ASASPXX:VSQDL:SPIS-AA¹⁷-LYI:IGKTPKI:YKQYE:MIVKS:XKXS, ASASPXX:VPQDL:SPIS-AA¹⁷-LYI:VGRTPKV:YKQYE:MVVKS:XKXS, NDEGLEX:VPTEE:SPIS-AA¹⁷-LYI:RIKPHQGQH:YKQYE:FLQHN:KXEXR, NDEGLEX:VPTGQ:SPIS-AA¹⁷-LYI:RIKPHQGQH:YKQYE:LEEHS:QXEXR, SSVKXQP:SRVHH:SPIS-AA¹⁷-LYI:EYVRKKPKL:YKQYE:RLEEH:LEXAXA, RNVQXRP:TQVQL:SPIS-AA¹⁷-LYI:EIVRKKPIF:YKQYE:TLEDH:LAXKXE, KIPKAXX:VPTEL:SPIS-AA¹⁷-LFI:DENEKVV:YKQYE:DMVVE:GXGXR, GIPEPXX:VPTKM:SPIS-AA¹⁷-LFI:DENKNVV:YKQYE:NMVVE:SXAXR, SIPKAXX:VPTEL:SPIS-AA¹⁷-LFI:DEYDKVV:YKQYE:EMVVE:GXGXR, HVTKPTX:VPTKL:SPIS-AA¹⁷-LFI:DDSSNVI:YKQYE:NMVVE:SXGXH, YVPKPXX:VPTKL:SPIS-AA¹⁷-LFI:DDSSNVI:YKQYE:NMVVE:SXGXH, TVPKPXX:VPTQL:SPIS-AA¹⁷-LFI:DDSSNVI:YKQYE:NMVVE:AXGXH, AVPKAXX:VPTKL:SPIS-AA¹⁷-LFI:DSSNNVI:YKQYE:NMVVE:AXGXH, KVGKAXX:VPTKL:SPIS-AA¹⁷-LFI:DDMGVPT:YKQYE:EGMSVVE:XGXR, KASKAXX:VPTKL:SPIS-AA¹⁷-LFI:DKGVVTY:YKQYE:GMVVE:EXGXR, GSAGPXX:VPTKM:SPIS-AA¹⁷-LFI:NDKQQII:YKQYE:GMVVE:RXGXS, AAPASXX:VPTRL:SPIS-AA¹⁷-LFI:DAANNVV:YKQYE:DMVVE:AXGXR, HVPKPXX:VPTKL:SPIS-AA¹⁷-LFI:DDSSNVI:YKQYE:NMVVE:SXGXH, RVPSTXX:VPTKT:SPIS-AA¹⁷-LFI:DNGRVLL:YKQYE:MIVVE:XGXL, ASAAPXX:VPTAL:SPIS-AA¹⁷-LFI:VGRKPKV:YKQYE:MIVVE:XKXS, ASASPXX:VPTDL:SPIS-AA¹⁷-LFLIGKTPKI:YKQYE:MIVVE:XKXS, ASASPXX:VPTDL:SPIS-AA¹⁷-LFI:VGRTPKV:YKQYE:MVVVE:XKXS, NDEGLEX:VPTEE:SPIS-AA¹⁷-LFI:RIKPHQGQH:YKQYE:FLVVE:KXEXR, NDEGLEX:VPTGQ:SPIS-AA¹⁷-LFI:RIKPHQGQH:YKQYE:LEVVE:QXEXR, SSVKXQP:VPTHH:SPIS-AA¹⁷-LFI:EYVRKKPKL:YKQYE:RLVVE:LEXAXA, RNVQXRP:VPTQL:SPIS-AA¹⁷-LFI:EIVRKKPIF:YKQYE:TLVVE:LAXKXE, GIPEPXX:VPEKM:SPIS-AA¹⁷-LFI:DENKNVV:YKQYE:NMTVE:SXAXR, HVTKPTX:APTKL:SPIS-AA¹⁷-LFI:DDSSNVI:YKQYE:NMVVR:SXGXH, YVPKPXX:APTKL:SPIS-AA¹⁷-LFI:DDSSNVI:YKQYE:NMVVR:SXGXH, TVPKPXX:APTQL:SPIS-AA¹⁷-LFI:DDSSNVI:YKQYE:NMVVR:AXGXH, AVPKAXX:APTKL:SPIS-AA¹⁷-LFI:DSSNNVI:YKQYE:NMVVK:AXGXH, KVGKAXX:VPTKL:SPIS-AA¹⁷-LFI:DDMGVPT:YKQYE:EGMSVAE:XGXR, KASKAXX:VPTKL:SPIS-AA¹⁷-LFI:DKGVVTY:YKQYE:GMAVS:EXGXR, GSAGPXX:TPTKM:SPIS-AA¹⁷-LFI:NDKQQII:YKQYE:GMVVD:RXGXS, AAPASXX:VPARL:SPIS-AA¹⁷-LFI:DAANNVV:YKQYE:DMVVE:AXGXR, HVPKPXX:APTKL:SPIS-AA¹⁷-LFI:DDSSNVI:YKQYE:NMVVR:SXGXH, RVPSTXX:APVKT:SPIS-AA¹⁷-LFI:DNGRVLL:YKQYE:MIVEE:XGXL, ASAAPXX:VPQAL:SPIS-AA¹⁷-LFI:VGRKPKV:YKQYE:MIVRS:XKXS, ASASPXX:VSQDL:SPIS-AA¹⁷-LFLIGKTPKI:YKQYE:MIVKS:XKXS, ASASPXX:VPQDL:SPIS-AA¹⁷-LFI:VGRTPKV:YKQYE:MVVKS:XKXS, NDEGLEX:VPTEE:SPIS-AA¹⁷-LFI:RIKPHQGQH:YKQYE:FLQHN:KXEXR, NDEGLEX:VPTGQ:SPIS-AA¹⁷-LFI:RIKPHQGQH:YKQYE:LEEHS:QXEXR, SSVKXQP:SRVHH:SPIS-AA¹⁷-LFI:EYVRKKPKL:YKQYE:RLEEH:LEXAXA, RNVQXRP:TQVQL:SPIS-AA¹⁷-LFI:EIVRKKPIF:YKQYE:TLEDH:LAXKXE, KIPKAXX:APVEL:KPLS-AA¹⁷-LYV:DENEKVV:DHHKD:DMVEE:GXGXR, GIPEPXX:APVKM:KPLS-AA¹⁷-LYV:DENKNVV:DHHKD:NMVEE:SXAXR, SIPKAXX:APVEL:KPLS-AA¹⁷-LYV:DEYDKVV:DHHKD:EMVEE:GXGXR, HVTKPTX:APVKL:KPLS-AA¹⁷-LYV:DDSSNVI:DHHKD:NMVEE:SXGXH, YVPKPXX:APVKL:KPLS-AA¹⁷-LYV:DDSSNVI:DHHKD:NMVEE:SXGXH, TVPKPXX:APVQL:KPLS-AA¹⁷-LYV:DDSSNVI:DHHKD:NMVEE:AXGXH, AVPKAXX:APVKL:KPLS-AA¹⁷-LYV:DSSNNVI:DHHKD:NMVEE:AXGXH, KVGKAXX:APVKL:KPLS-AA¹⁷-LYV:DDMGVPT:DHHKD:EGMSVEE:XGXR, KASKAXX:APVKL:KPLS-AA¹⁷-LYV:DKGVVTY:DHHKD:GMVEE:EXGXR, GSAGPXX:APVKM:KPLS-AA¹⁷-LYV:NDKQQII:DHHKD:GMVEE:RXGXS, AAPASXX:APVRL:KPLS-AA¹⁷-LYV:DAANNVV:DHHKD:DMVEE:AXGXR, STPPTXX:APVRL:KPLS-AA¹⁷-LYV:DSANNVV:DHHKD:DMVEE:SXGXR, HVPKPXX:APVKL:KPLS-AA¹⁷-LYV:DDSSNVI:DHHKD:NMVEE:SXGXH, ASAAPXX:APVAL:KPLS-AA¹⁷-LYV:VGRKPKV:DHHKD:MIVEE:XKXS, ASASPXX:APVDL:KPLS-AA¹⁷-LYV:IGKTPKI:DHHKD:MIVEE:XKXS, ASASPXX:APVDL:KPLS-AA¹⁷-LYV:VGRTPKV:DHHKD:MVVEE:XKXS, NDEGLEX:APVEE:KPLS-AA¹⁷-LYV:RIKPHQGQH:DHHKD:FLVEE:KXEXR, NDEGLEX:APVGQ:KPLS-AA¹⁷-LYV:RIKPHQGQH:DHHKD:LEVEE:QXEXR, SSVKXQP:APVHH:KPLS-AA¹⁷-LYV:EYVRKKPKL:DHHKD:RLVEE:LEXAXA, RNVQXRP:APVQL:KPLS-AA¹⁷-LYV:EIVRKKPIF:DHHKD:TLVEE:LAXKXE, KIPKAXX:VPTEL:KPLS-AA¹⁷-LYV:DENEKVV:DHHKD:DMVVE:GXGXR, GIPEPXX:VPEKM:KPLS-AA¹⁷-LYV:DENKNVV:DHHKD:NMTVE:SXAXR, SIPKAXX:VPTEL:KPLS-AA¹⁷-LYV:DEYDKVV:DHHKD:EMVVE:GXGXR, HVTKPTX:APTKL:KPLS-AA¹⁷-LYV:DDSSNVI:DHHKD:NMVVR:SXGXH, YVPKPXX:APTKL:KPLS-AA¹⁷-LYV:DDSSNVI:DHHKD:NMVVR:SXGXH, TVPKPXX:APTQL:KPLS-AA¹⁷-LYV:DDSSNVI:DHHKD:NMVVR:AXGXH, AVPKAXX:APTKL:KPLS-AA¹⁷-LYV:DSSNNVI:DHHKD:NMVVK:AXGXH, KVGKAXX:VPTKL:KPLS-AA¹⁷-LYV:DDMGVPT:DHHKD:EGMSVAE:XGXR, KASKAXX:VPTKL:KPLS-AA¹⁷-LYV:DKGVVTY:DHHKD:GMAVS:EXGXR, GSAGPXX:TPTKM:KPLS-AA¹⁷-LYV:NDKQQII:DHHKD:GMVVD:RXGXS, AAPASXX:VPARL:KPLS-AA¹⁷-LYV:DAANNVV:DHHKD:DMVVE:AXGXR, STPPTXX:VPTRL:KPLS-AA¹⁷-LYV:DSANNVV:DHHKD:DMVVE:SXGXR, HVPKPXX:APTKL:KPLS-AA¹⁷-LYV:DDSSNVI:DHHKD:NMVVR:SXGXH, ASAAPXX:VPQAL:KPLS-AA¹⁷-LYV:VGRKPKV:DHHKD:MIVRS:XKXS, ASASPXX:VSQDL:KPLS-AA¹⁷-LYV:IGKTPKI:DHHKD:MIVKS:XKXS, ASASPXX:VPQDL:KPLS-AA¹⁷-LYV:VGRTPKV:DHHKD:MVVKS:XKXS, NDEGLEX:VPTEE:KPLS-AA¹⁷-LYV:RIKPHQGQH:DHHKD:FLQHN:KXEXR, NDEGLEX:VPTGQ:KPLS-AA¹⁷-LYV: RIKPHQGQH:DHHKD:LEEHS:QXEXR, SSVKXQP:SRVHH:KPLS-AA¹⁷-LYV:EYVRKKPKL:DHHKD:RLEEH:LEXAXA, RNVQXRP:TQVQL:KPLS-AA¹⁷-LYV:EIVRKKPIF:DHHKD:TLEDH:LAXKXE, KIPKAXX:VPQEL:EPLP-AA¹⁷-VYY:DENEKVV:EQLSN:DMVRS:GXGXR, GIPEPXX:VPQKM:EPLP-AA¹⁷-VYY:DENKNVV:EQLSN:NMVRS:SXAXR, SIPKAXX:VPQEL:EPLP-AA¹⁷-VYY:DEYDKVV:EQLSN:EMVRS:GXGXR, HVTKPTX:VPQKL:EPLP-AA¹⁷-VYY:DDSSNVI:EQLSN:NMVRS:SXGXH, YVPKPXX:VPQKL:EPLP-AA¹⁷-VYY:DDSSNVI:EQLSN:NMVRS:SXGXH, TVPKPXX:VPQQL:EPLP-AA¹⁷-VYY:DDSSNVI:EQLSN:NMVRS:AXGXH, AVPKAXX:VPQKL:EPLP-AA¹⁷-VYY:DSSNNVI:EQLSN:NMVRS:AXGXH, KVGKAXX:VPQKL:EPLP-AA¹⁷-VYY:DDMGVPT:EQLSN:EGMSVRS:XGXR, KASKAXX:VPQKL:EPLP-AA¹⁷-VYY:DKGVVTY:EQLSN:GMVRS:EXGXR, GSAGPXX:VPQKM:EPLP-AA¹⁷-VYY:NDKQQII:EQLSN:GMVRS:RXGXS, AAPASXX:VPQRL:EPLP-AA¹⁷-VYY:DAANNVV:EQLSN:DMVRS:AXGXR, STPPTXX:VPQRL:EPLP-AA¹⁷-VYY:DSANNVV:EQLSN:DMVRS:SXGXR, HVPKPXX:VPQKL:EPLP-AA¹⁷-VYY:DDSSNVI:EQLSN:NMVRS:SXGXH, RVPSTXX:VPQKT:EPLP-AA¹⁷-VYY:DNGRVLL:EQLSN:MIVRS:XGXL, ASASPXX:VPQDLEPLP-AA¹⁷-VYY:IGKTPKI:EQLSN:MIVRS:XKXS, ASASPXX:VPQDLEPLP-AA¹⁷-VYY:VGRTPKV:EQLSN:MVVRS:XKXS, NDEGLEX:VPQEE:EPLP-AA¹⁷-VYY:RIKPHQGQH:EQLSN:FLVRS:KXEXR, NDEGLEX:VPQGQ:EPLP-AA¹⁷-VYY:RIKPHQGQH:EQLSN:LEVRS:QXEXR, SSVKXQP:VPQHH:EPLP-AA¹⁷-VYY:EYVRKKPKL:EQLSN:RLVRS:LEXAXA, RNVQXRP:VPQQL:EPLP-AA¹⁷-VYY:EIVRKKPIF:EQLSN:TLVRS:LAXKXE, KIPKAXX:VPTEL:EPLP-AA¹⁷-VYY:DENEKVV:EQLSN:DMVVE:GXGXR, GIPEPXX:VPEKM:EPLP-AA¹⁷-VYY:DENKNVV:EQLSN:NMTVE:SXAXR, SIPKAXX:VPTEL:EPLP-AA¹⁷-VYY:DEYDKVV:EQLSN:EMVVE:GXGXR, HVTKPTX:APTKL:EPLP-AA¹⁷-VYY:DDSSNVI:EQLSN:NMVVR:SXGXH, YVPKPXX:APTKL:EPLP-AA¹⁷-VYY:DDSSNVI:EQLSN:NMVVR:SXGXH, TVPKPXX:APTQL:EPLP-AA¹⁷-VYY:DDSSNVI:EQLSN:NMVVR:AXGXH, AVPKAXX:APTKL:EPLP-AA¹⁷-VYY:DSSNNVI:EQLSN:NMVVK:AXGXH, KVGKAXX:VPTKL:EPLP-AA¹⁷-VYY:DDMGVPT:EQLSN:EGMSVAE:XGXR, KASKAXX:VPTKL:EPLP-AA¹⁷-VYY:DKGVVTY:EQLSN:GMAVS:EXGXR, GSAGPXX:TPTKM:EPLP-AA¹⁷-VYY:NDKQQII:EQLSN:GMVVD:RXGXS, AAPASXX:VPARL:EPLP-AA¹⁷-VYY:DAANNVV:EQLSN:DMVVE:AXGXR, STPPTXX:VPTRL:EPLP-AA¹⁷-VYY:DSANNVV:EQLSN:DMVVE:SXGXR, HVPKPXX:APTKL:EPLP-AA¹⁷-VYY:DDSSNVI:EQLSN:NMVVR:SXGXH, RVPSTXX:APVKT:EPLP-AA¹⁷-VYY:DNGRVLL:EQLSN:MIVEE:XGXL, ASASPXX:VSQDLEPLP-AA¹⁷-VYY:IGKTPKI:EQLSN:MIVKS:XKXS, ASASPXX:VPQDLEPLP-AA¹⁷-VYY:VGRTPKV:EQLSN:MVVKS:XKXS, NDEGLEX:VPTEE:EPLP-AA¹⁷-VYY:RIKPHQGQH:EQLSN:FLQHN:KXEXR, NDEGLEX:VPTGQ:EPLP-AA¹⁷-VYY:RIKPHQGQH:EQLSN:LEEHS:QXEXR, SSVKXQP:SRVHH:EPLP-AA¹⁷-VYY:EYVRKKPKL:EQLSN:RLEEH:LEXAXA, RNVQXRP:TQVQL:EPLP-AA¹⁷-VYY:EIVRKKPIF:EQLSN:TLEDH:LAXKXE, KIPKAXX:VSQEL:EPLT-AA¹⁷-LYY:DENEKVV:EQLSN:DMVKS:GXGXR, GIPEPXX:VSQKM:EPLT-AA¹⁷-LYY:DENKNVV:EQLSN:NMVKS:SXAXR, SIPKAXX:VSQEL:EPLT-AA¹⁷-LYY:DEYDKVV:EQLSN:EMVKS:GXGXR, HVTKPTX:VSQKL:EPLT-AA¹⁷-LYY:DDSSNVI:EQLSN:NMVKS:SXGXH, YVPKPXX:VSQKL:EPLT-AA¹⁷-LYY:DDSSNVI:EQLSN:NMVKS:SXGXH, TVPKPXX:VSQQL:EPLT-AA¹⁷-LYY:DDSSNVI:EQLSN:NMVKS:AXGXH, AVPKAXX:VSQKL:EPLT-AA¹⁷-LYY:DSSNNVI:EQLSN:NMVKS:AXGXH, KVGKAXX:VSQKL:EPLT-AA¹⁷-LYY:DDMGVPT:EQLSN:EGMSVKS:XGXR, KASKAXX:VSQKL:EPLT-AA¹⁷-LYY:DKGVVTY:EQLSN:GMVKS:EXGXR, GSAGPXX:VSQKM:EPLT-AA¹⁷-LYY:NDKQQII:EQLSN:GMVKS:RXGXS, AAPASXX:VSQRL:EPLT-AA¹⁷-LYY:DAANNVV:EQLSN:DMVKS:AXGXR, STPPTXX:VSQRL:EPLT-AA¹⁷-LYY:DSANNVV:EQLSN:DMVKS:SXGXR, HVPKPXX:VSQKL:EPLT-AA¹⁷-LYY:DDSSNVI:EQLSN:NMVKS:SXGXH, RVPSTXX:VSQKT:EPLT-AA¹⁷-LYY:DNGRVLL:EQLSN:MIVKS:XGXL, ASAAPXX:VSQAL:EPLT-AA¹⁷-LYY:VGRKPKV:EQLSN:MIVKS:XKXS, ASASPXX:VSQDL:EPLT-AA¹⁷-LYY:VGRTPKV:EQLSN:MVVKS:XKXS, NDEGLEX:VSQEE:EPLT-AA¹⁷-LYY:RIKPHQGQH:EQLSN:FLVKS:KXEXR, NDEGLEX:VSQGQ:EPLT-AA¹⁷-LYY:RIKPHQGQH:EQLSN:LEVKS:QXEXR, SSVKXQP:VSQHH:EPLT-AA¹⁷-LYY:EYVRKKPKL:EQLSN:RLVKS:LEXAXA, RNVQXRP:VSQQL:EPLT-AA¹⁷-LYY:EIVRKKPIF:EQLSN:TLVKS:LAXKXE, KIPKAXX:VPTEL:EPLT-AA¹⁷-LYY:DENEKVV:EQLSN:DMVVE:GXGXR, GIPEPXX:VPEKM:EPLT-AA¹⁷-LYY:DENKNVV:EQLSN:NMTVE:SXAXR, SIPKAXX:VPTEL:EPLT-AA¹⁷-LYY:DEYDKVV:EQLSN:EMVVE:GXGXR, HVTKPTX:APTKL:EPLT-AA¹⁷-LYY:DDSSNVI:EQLSN:NMVVR:SXGXH, YVPKPXX:APTKL:EPLT-AA¹⁷-LYY:DDSSNVI:EQLSN:NMVVR:SXGXH, TVPKPXX:APTQL:EPLT-AA¹⁷-LYY:DDSSNVI:EQLSN:NMVVR:AXGXH, AVPKAXX:APTKL:EPLT-AA¹⁷-LYY:DSSNNVI:EQLSN:NMVVK:AXGXH, KVGKAXX:VPTKL:EPLT-AA¹⁷-LYY:DDMGVPT:EQLSN:EGMSVAE:XGXR, KASKAXX:VPTKL:EPLT-AA¹⁷-LYY:DKGVVTY:EQLSN:GMAVS:EXGXR, GSAGPXX:TPTKM:EPLT-AA¹⁷-LYY:NDKQQII:EQLSN:GMVVD:RXGXS, AAPASXX:VPARL:EPLT-AA¹⁷-LYY:DAANNVV:EQLSN:DMVVE:AXGXR, STPPTXX:VPTRL:EPLT-AA¹⁷-LYY:DSANNVV:EQLSN:DMVVE:SXGXR, HVPKPXX:APTKL:EPLT-AA¹⁷-LYY:DDSSNVI:EQLSN:NMVVR:SXGXH, RVPSTXX:APVKT:EPLT-AA¹⁷-LYY:DNGRVLL:EQLSN:MIVEE:XGXL, ASAAPXX:VPQAL:EPLT-AA¹⁷-LYY:VGRKPKV:EQLSN:MIVRS:XKXS, ASASPXX:VPQDL:EPLT-AA¹⁷-LYY:VGRTPKV:EQLSN:MVVKS:XKXS, NDEGLEX:VPTEE:EPLT-AA¹⁷-LYY:RIKPHQGQH:EQLSN:FLQHN:KXEXR, NDEGLEX:VPTGQ:EPLT-AA¹⁷-LYY: RIKPHQGQH:EQLSN:LEEHS:QXEXR, SSVKXQP:SRVHH:EPLT-AA¹⁷-LYY:EYVRKKPKL:EQLSN:RLEEH:LEXAXA, RNVQXRP:TQVQL:EPLT-AA¹⁷-LYY:EIVRKKPIF:EQLSN:TLEDH:LAXKXE, KIPKAXX:VPQEL:EPLT-AA¹⁷-LYY:DENEKVV:EQLSN:DMVKS:GXGXR, GIPEPXX:VPQKM:EPLT-AA¹⁷-LYY:DENKNVV:EQLSN:NMVKS:SXAXR, SIPKAXX:VPQEL:EPLT-AA¹⁷-LYY:DEYDKVV:EQLSN:EMVKS:GXGXR, HVTKPTX:VPQKL:EPLT-AA¹⁷-LYY:DDSSNVI:EQLSN:NMVKS:SXGXH, YVPKPXX:VPQKL:EPLT-AA¹⁷-LYY:DDSSNVI:EQLSN:NMVKS:SXGXH, TVPKPXX:VPQQL:EPLT-AA¹⁷-LYY:DDSSNVI:EQLSN:NMVKS:AXGXH, AVPKAXX:VPQKL:EPLT-AA¹⁷-LYY:DSSNNVI:EQLSN:NMVKS:AXGXH, KVGKAXX:VPQKL:EPLT-AA¹⁷-LYY:DDMGVPT:EQLSN:EGMSVKS:XGXR, KASKAXX:VPQKL:EPLT-AA¹⁷-LYY:DKGVVTY:EQLSN:GMVKS:EXGXR, GSAGPXX:VPQKM:EPLT-AA¹⁷-LYY:NDKQQII:EQLSN:GMVKS:RXGXS, AAPASXX:VPQRL:EPLT-AA¹⁷-LYY:DAANNVV:EQLSN:DMVKS:AXGXR, STPPTXX:VPQRL:EPLT-AA¹⁷-LYY:DSANNVV:EQLSN:DMVKS:SXGXR, HVPKPXX:VPQKL:EPLT-AA¹⁷-LYY:DDSSNVI:EQLSN:NMVKS:SXGXH, RVPSTXX:VPQKT:EPLT-AA¹⁷-LYY:DNGRVLL:EQLSN:MIVKS:XGXL, ASAAPXX:VPQAL:EPLT-AA¹⁷-LYY:VGRKPKV:EQLSN:MIVKS:XKXS, ASASPXX:VPQDL:EPLT-AA¹⁷-LYY:IGKTPKI:EQLSN:MIVKS:XKXS, NDEGLEX:VPQEE:EPLT-AA¹⁷-LYY:RIKPHQGQH:EQLSN:FLVKS:KXEXR, NDEGLEX:VPQGQ:EPLT-AA¹⁷-LYY:RIKPHQGQH:EQLSN:LEVKS:QXEXR, SSVKXQP:VPQHH:EPLT-AA¹⁷-LYY:EYVRKKPKL:EQLSN:RLVKS:LEXAXA, RNVQXRP:VPQQL:EPLT-AA¹⁷-LYY:EIVRKKPIF:EQLSN:TLVKS:LAXKXE, ASASPXX:VSQDL:EPLT-AA¹⁷-LYY:IGKTPKI:EQLSN:MIVKS:XKXS, KIPKAXX:VPTEL:SNIT-AA¹⁷-QIM:DENEKVV:IGEMS:DMQHN:GXGXR, GIPEPXX:VPTKM:SNIT-AA¹⁷-QIM:DENKNVV:IGEMS:NMQHN:SXAXR, SIPKAXX:VPTEL:SNIT-AA¹⁷-QIM:DEYDKVV:IGEMS:EMQHN:GXGXR, HVTKPTX:VPTKL:SNIT-AA¹⁷-QIM:DDSSNVI:IGEMS:NMQHN:SXGXH, YVPKPXX:VPTKL:SNIT-AA¹⁷-QIM:DDSSNVI:IGEMS:NMQHN:SXGXH, TVPKPXX:VPTQL:SNIT-AA¹⁷-QIM:DDSSNVI:IGEMS:NMQHN:AXGXH, AVPKAXX:VPTKL:SNIT-AA¹⁷-QIM:DSSNNVI:IGEMS:NMQHN:AXGXH, KVGKAXX:VPTKL:SNIT-AA¹⁷-QIM:DDMGVPT:IGEMS:EGMSQHN:XGXR, KASKAXX:VPTKL:SNIT-AA¹⁷-QIM:DKGVVTY:IGEMS:GMQHN:EXGXR, GSAGPXX:VPTKM:SNIT-AA¹⁷-QIM:NDKQQII:IGEMS:GMQHN:RXGXS, AAPASXX:VPTRL:SNIT-AA¹⁷-QIM:DAANNVV:IGEMS:DMQHN:AXGXR, STPPTXX:VPTRL:SNIT-AA¹⁷-QIM:DSANNVV:IGEMS:DMQHN:SXGXR, HVPKPXX:VPTKL:SNIT-AA¹⁷-QIM:DDSSNVI:IGEMS:NMQHN:SXGXH, RVPSTXX:VPTKT:SNIT-AA¹⁷-QIM:DNGRVLL:IGEMS:MIQHN:XGXL, ASAAPXX:VPTAL:SNIT-AA¹⁷-QIM:VGRKPKV:IGEMS:MIQHN:XKXS, ASASPXX:VPTDL:SNIT-AA¹⁷-QIM:IGKTPKI:IGEMS:MIQHN:XKXS, ASASPXX:VPTDL:SNIT-AA¹⁷-QIM:VGRTPKV:IGEMS:MVQHN:XKXS, NDEGLEX:VPTGQ:SNIT-AA¹⁷-QIM:RIKPHQGQH:IGEMS:LEQHN:QXEXR, NDEGLEX:VPTEE:SNIT-AA¹⁷-QIM:RIKPHQGQH:IGEMS:FLQHN:KXEXR, SSVKXQP:VPTHH:SNIT-AA¹⁷-QIM:EYVRKKPKL:IGEMS:RLQHN:LEXAXA, RNVQXRP:VPTQL:SNIT-AA¹⁷-QIM:EIVRKKPIF:IGEMS:TLQHN:LAXKXE, KIPKAXX:VPTEL:SNIT-AA¹⁷-QIM:DENEKVV:IGEMS:DMVVE:GXGXR, GIPEPXX:VPEKM:SNIT-AA¹⁷-QIM:DENKNVV:IGEMS:NMTVE:SXAXR, SIPKAXX:VPTEL:SNIT-AA¹⁷-QIM:DEYDKVV:IGEMS:EMVVE:GXGXR, HVTKPTX:APTKL:SNIT-AA¹⁷-QIM:DDSSNVI:IGEMS:NMVVR:SXGXH, YVPKPXX:APTKL:SNIT-AA¹⁷-QIM:DDSSNVI:IGEMS:NMVVR:SXGXH, TVPKPXX:APTQL:SNIT-AA¹⁷-QIM:DDSSNVI:IGEMS:NMVVR:AXGXH, AVPKAXX:APTKL:SNIT-AA¹⁷-QIM:DSSNNVI:IGEMS:NMVVK:AXGXH, KVGKAXX:VPTKL:SNIT-AA¹⁷-QIM:DDMGVPT:IGEMS:EGMSVAE:XGXR, KASKAXX:VPTKL:SNIT-AA¹⁷-QIM:DKGVVTY:IGEMS:GMAVS:EXGXR, GSAGPXX:TPTKM:SNIT-AA¹⁷-QIM:NDKQQII:IGEMS:GMVVD:RXGXS, AAPASXX:VPARL:SNIT-AA¹⁷-QIM:DAANNVV:IGEMS:DMVVE:AXGXR, STPPTXX:VPTRL:SNIT-AA¹⁷-QIM:DSANNVV:IGEMS:DMVVE:SXGXR, HVPKPXX:APTKL:SNIT-AA¹⁷-QIM:DDSSNVI:IGEMS:NMVVR:SXGXH, RVPSTXX:APVKT:SNIT-AA¹⁷-QIM:DNGRVLL:IGEMS:MIVEE:XGXL, ASAAPXX:VPQAL:SNIT-AA¹⁷-QIM:VGRKPKV:IGEMS:MIVRS:XKXS, ASASPXX:VSQDL:SNIT-AA¹⁷-QIM:IGKTPKI:IGEMS:MIVKS:XKXS, ASASPXX:VPQDL:SNIT-AA¹⁷-QIM:VGRTPKV:IGEMS:MVVKS:XKXS, NDEGLEX:VPTGQ:SNIT-AA¹⁷-QIM:RIKPHQGQH:IGEMS:LEEHS:QXEXR, SSVKXQP:SRVHH:SNIT-AA¹⁷-QIM:EYVRKKPKL:IGEMS:RLEEH:LEXAXA, RNVQXRP:TQVQL:SNIT-AA¹⁷-QIM:EIVRKKPIF:IGEMS:TLEDH:LAXKXE, KIPKAXX:VPTEL:SNIT-AA¹⁷-QIM:DENEKVV:LGEMS:DMEHS:GXGXR, GIPEPXX:VPTKM:SNIT-AA¹⁷-QIM:DENKNVV:LGEMS:NMEHS:SXAXR, SIPKAXX:VPTEL:SNIT-AA¹⁷-QIM:DEYDKVV:LGEMS:EMEHS:GXGXR, HVTKPTX:VPTKL:SNIT-AA¹⁷-QIM:DDSSNVI:LGEMS:NMEHS:SXGXH, YVPKPXX:VPTKL:SNIT-AA¹⁷-QIM:DDSSNVI:LGEMS:NMEHS:SXGXH, TVPKPXX:VPTQL:SNIT-AA¹⁷-QIM:DDSSNVI:LGEMS:NMEHS:AXGXH, AVPKAXX:VPTKL:SNIT-AA¹⁷-QIM:DSSNNVI:LGEMS:NMEHS:AXGXH, KVGKAXX:VPTKL:SNIT-AA¹⁷-QIM:DDMGVPTIGEMS:EGMSEHS:XGXR, KASKAXX:VPTKL:SNIT-AA¹⁷-QIM:DKGVVTY:LGEMS:GMEHS:EXGXR, GSAGPXX:VPTKM:SNIT-AA¹⁷-QIM:NDKQQII:LGEMS:GMEHS:RXGXS, AAPASXX:VPTRL:SNIT-AA¹⁷-QIM:DAANNVV:LGEMS:DMEHS:AXGXR, STPPTXX:VPTRL:SNIT-AA¹⁷-QIM:DSANNVV:LGEMS:DMEHS:SXGXR, HVPKPXX:VPTKL:SNIT-AA¹⁷-QIM:DDSSNVI:LGEMS:NMEHS:SXGXH, RVPSTXX:VPTKT:SNIT-AA¹⁷-QIM:DNGRVLLIGEMS:MIEHS:XGXL, ASAAPXX:VPTAL:SNIT-AA¹⁷-QIM:VGRKPKVIGEMS:MIEHS:XKXS, ASASPXX:VPTDL:SNIT-AA¹⁷-QIM:IGKTPKI:LGEMS:MIEHS:XKXS, ASASPXX:VPTDL:SNIT-AA¹⁷-QIM:VGRTPKV:LGEMS:MVEHS:XKXS, NDEGLEX:VPTEE:SNIT-AA¹⁷-QIM:RIKPHQGQH:LGEMS:FLEHS:KXEXR, SSVKXQP:VPTHH:SNIT-AA¹⁷-QIM:EYVRKKPKLIGEMS:RLEHS:LEXAXA, RNVQXRP:VPTQL:SNIT-AA¹⁷-QIM:EIVRKKPIF:LGEMS:TLEHS:LAXKXE, KIPKAXX:VPTEL:SNIT-AA¹⁷-QIM:DENEKVV:LGEMS:DMVVE:GXGXR, GIPEPXX:VPEKM:SNIT-AA¹⁷-QIM:DENKNVV:LGEMS:NMTVE:SXAXR, SIPKAXX:VPTEL:SNIT-AA¹⁷-QIM:DEYDKVV:LGEMS:EMVVE:GXGXR, HVTKPTX:APTKL:SNIT-AA¹⁷-QIM:DDSSNVI:LGEMS:NMVVR:SXGXH, YVPKPXX:APTKL:SNIT-AA¹⁷-QIM:DDSSNVI:LGEMS:NMVVR:SXGXH, TVPKPXX:APTQL:SNIT-AA¹⁷-QIM:DDSSNVI:LGEMS:NMVVR:AXGXH, AVPKAXX:APTKL:SNIT-AA¹⁷-QIM:DSSNNVI:LGEMS:NMVVK:AXGXH, KVGKAXX:VPTKL:SNIT-AA¹⁷-QIM:DDMGVPTIGEMS:EGMSVAE:XGXR, KASKAXX:VPTKL:SNIT-AA¹⁷-QIM:DKGVVTY:LGEMS:GMAVS:EXGXR, GSAGPXX:TPTKM:SNIT-AA¹⁷-QIM:NDKQQII:LGEMS:GMVVD:RXGXS, AAPASXX:VPARL:SNIT-AA¹⁷-QIM:DAANNVVIGEMS:DMVVE:AXGXR, STPPTXX:VPTRL:SNIT-AA¹⁷-QIM:DSANNVVIGEMS:DMVVE:SXGXR, HVPKPXX:APTKL:SNIT-AA¹⁷-QIM:DDSSNVI:LGEMS:NMVVR:SXGXH, RVPSTXX:APVKT:SNIT-AA¹⁷-QIM:DNGRVLL:LGEMS:MIVEE:XGXL, ASAAPXX:VPQAL:SNIT-AA¹⁷-QIM:VGRKPKVIGEMS:MIVRS:XKXS, ASASPXX:VSQDL:SNIT-AA¹⁷-QIM:IGKTPKI:LGEMS:MIVKS:XKXS, ASASPXX:VPQDL:SNIT-AA¹⁷-QIM:VGRTPKV:LGEMS:MVVKS:XKXS, NDEGLEX:VPTEE:SNIT-AA¹⁷-QIM:RIKPHQGQH:LGEMS:FLQHN:KXEXR, SSVKXQP:SRVHH:SNIT-AA¹⁷-QIM:EYVRKKPKL:LGEMS:RLEEH:LEXAXA, RNVQXRP:TQVQL:SNIT-AA¹⁷-QIM:EIVRKKPIFIGEMS:TLEDH:LAXKXE, KIPKAXX:SRVEL:RSVK-AA¹⁷-AKV:DENEKVV:KEVQV:DMEEH:GXGXR, GIPEPXX:SRVKM:RSVK-AA¹⁷-AKV:DENKNVV:KEVQV:NMEEH:SXAXR, SIPKAXX:SRVEL:RSVK-AA¹⁷-AKV:DEYDKVV:KEVQV:EMEEH:GXGXR, HVTKPTX:SRVKL:RSVK-AA¹⁷-AKV:DDSSNVI:KEVQV:NMEEH:SXGXH, YVPKPXX:SRVKL:RSVK-AA¹⁷-AKV:DDSSNVI:KEVQV:NMEEH:SXGXH, TVPKPXX:SRVQL:RSVK-AA¹⁷-AKV:DDSSNVI:KEVQV:NMEEH:AXGXH, AVPKAXX:SRVKL:RSVK-AA¹⁷-AKV:DSSNNVI:KEVQV:NMEEH:AXGXH, KVGKAXX:SRVKL:RSVK-AA¹⁷-AKV:DDMGVPT:KEVQV:EGMSEEH:XGXR, KASKAXX:SRVKL:RSVK-AA¹⁷-AKV:DKGVVTY:KEVQV:GMEEH:EXGXR, GSAGPXX:SRVKM:RSVK-AA¹⁷-AKV:NDKQQII:KEVQV:GMEEH:RXGXS, AAPASXX:SRVRL:RSVK-AA¹⁷-AKV:DAANNVV:KEVQV:DMEEH:AXGXR, STPPTXX:SRVRL:RSVK-AA¹⁷-AKV:DSANNVV:KEVQV:DMEEH:SXGXR, HVPKPXX:SRVKL:RSVK-AA¹⁷-AKV:DDSSNVI:KEVQV:NMEEH:SXGXH, RVPSTXX:SRVKT:RSVK-AA¹⁷-AKV:DNGRVLL:KEVQV:MIEEH:XGXL, ASAAPXX:SRVAL:RSVK-AA¹⁷-AKV:VGRKPKV:KEVQV:MIEEH:XKXS, ASASPXX:SRVDL:RSVK-AA¹⁷-AKV:IGKTPKI:KEVQV:MIEEH:XKXS, ASASPXX:SRVDL:RSVK-AA¹⁷-AKV:VGRTPKV:KEVQV:MVEEH:XKXS, NDEGLEX:SRVEE:RSVK-AA¹⁷-AKV:RIKPHQGQH:KEVQV:FLEEH:KXEXR, NDEGLEX:SRVGQ:RSVK-AA¹⁷-AKV:RIKPHQGQH:KEVQV:LEEEH:QXEXR, RNVQXRP:SRVQL:RSVK-AA¹⁷-AKV:EIVRKKPIF:KEVQV:TLEEH:LAXKXE, KIPKAXX:VPTEL:RSVK-AA¹⁷-AKV:DENEKVV:KEVQV:DMVVE:GXGXR, GIPEPXX:VPEKM:RSVK-AA¹⁷-AKV:DENKNVV:KEVQV:NMTVE:SXAXR, SIPKAXX:VPTEL:RSVK-AA¹⁷-AKV:DEYDKVV:KEVQV:EMVVE:GXGXR, HVTKPTX:APTKL:RSVK-AA¹⁷-AKV:DDSSNVI:KEVQV:NMVVR:SXGXH, YVPKPXX:APTKL:RSVK-AA¹⁷-AKV:DDSSNVI:KEVQV:NMVVR:SXGXH, TVPKPXX:APTQL:RSVK-AA¹⁷-AKV:DDSSNVI:KEVQV:NMVVR:AXGXH, AVPKAXX:APTKL:RSVK-AA¹⁷-AKV:DSSNNVI:KEVQV:NMVVK:AXGXH, KVGKAXX:VPTKL:RSVK-AA¹⁷-AKV:DDMGVPT:KEVQV:EGMSVAE:XGXR, KASKAXX:VPTKL:RSVK-AA¹⁷-AKV:DKGVVTY:KEVQV:GMAVS:EXGXR, GSAGPXX:TPTKM:RSVK-AA¹⁷-AKV:NDKQQII:KEVQV:GMVVD:RXGXS, AAPASXX:VPARL:RSVK-AA¹⁷-AKV:DAANNVV:KEVQV:DMVVE:AXGXR, STPPTXX:VPTRL:RSVK-AA¹⁷-AKV:DSANNVV:KEVQV:DMVVE:SXGXR, HVPKPXX:APTKL:RSVK-AA¹⁷-AKV:DDSSNVI:KEVQV:NMVVR:SXGXH, RVPSTXX:APVKT:RSVK-AA¹⁷-AKV:DNGRVLL:KEVQV:MIVEE:XGXL, ASAAPXX:VPQAL:RSVK-AA¹⁷-AKV:VGRKPKV:KEVQV:MIVRS:XKXS, ASASPXX:VSQDL:RSVK-AA¹⁷-AKV:IGKTPKI:KEVQV:MIVKS:XKXS, ASASPXX:VPQDL:RSVK-AA¹⁷-AKV:VGRTPKV:KEVQV:MVVKS:XKXS, NDEGLEX:VPTEE:RSVK-AA¹⁷-AKV:RIKPHQGQH:KEVQV:FLQHN:KXEXR, NDEGLEX:VPTGQ:RSVK-AA¹⁷-AKV:RIKPHQGQH:KEVQVIEEHS:QXEXR, RNVQXRP:TQVQL:RSVK-AA¹⁷-AKV:EIVRKKPIF:KEVQV:TLEDH:LAXKXE, KIPKAXX:TQVEL:RPVQ-AA¹⁷-RKI:DENEKVV:KKATV:DMEDH:GXGXR, GIPEPXX:TQVKM:RPVQ-AA¹⁷-RKI:DENKNVV:KKATV:NMEDH:SXAXR, SIPKAXX:TQVEL:RPVQ-AA¹⁷-RKI:DEYDKVV:KKATV:EMEDH:GXGXR, HVTKPTX:TQVKL:RPVQ-AA¹⁷-RKI:DDSSNVI:KKATV:NMEDH:SXGXH, YVPKPXX:TQVKL:RPVQ-AA¹⁷-RKI:DDSSNVI:KKATV:NMEDH:SXGXH, TVPKPXX:TQVQL:RPVQ-AA¹⁷-RKI:DDSSNVI:KKATV:NMEDH:AXGXH, AVPKAXX:TQVKL:RPVQ-AA¹⁷-RKI:DSSNNVI:KKATV:NMEDH:AXGXH, KVGKAXX:TQVKL:RPVQ-AA¹⁷-RKI:DDMGVPT:KKATV:EGMSEDH:XGXR, KASKAXX:TQVKL:RPVQ-AA¹⁷-RKI:DKGVVTY:KKATV:GMEDH:EXGXR, GSAGPXX:TQVKM:RPVQ-AA¹⁷-RKI:NDKQQII:KKATV:GMEDH:RXGXS, AAPASXX:TQVRL:RPVQ-AA¹⁷-RKI:DAANNVV:KKATV:DMEDH:AXGXR, STPPTXX:TQVRL:RPVQ-AA¹⁷-RKI:DSANNVV:KKATV:DMEDH:SXGXR, HVPKPXX:TQVKL:RPVQ-AA¹⁷-RKI:DDSSNVI:KKATV:NMEDH:SXGXH, RVPSTXX:TQVKT:RPVQ-AA¹⁷-RKI:DNGRVLL:KKATV:MIEDH:XGXL, ASAAPXX:TQVAL:RPVQ-AA¹⁷-RKI:VGRKPKV:KKATV:MIEDH:XKXS, ASASPXX:TQVDL:RPVQ-AA¹⁷-RKI:IGKTPKI:KKATV:MIEDH:XKXS, ASASPXX:TQVDL:RPVQ-AA¹⁷-RKI:VGRTPKV:KKATV:MVEDH:XKXS, NDEGLEX:TQVEE:RPVQ-AA¹⁷-RKI:RIKPHQGQH:KKATV:FLEDH:KXEXR, NDEGLEX:TQVGQ:RPVQ-AA¹⁷-RKI:RIKPHQGQH:KKATV:LEEDH:QXEXR, SSVKXQP:TQVHH:RPVQ-AA¹⁷-RKI:EYVRKKPKL:KKATV:RLEDH:LEXAXA, KIPKAXX:VPTEL:RPVQ-AA¹⁷-RKI:DENEKVV:KKATV:DMVVE:GXGXR, GIPEPXX:VPEKM:RPVQ-AA¹⁷-RKI:DENKNVV:KKATV:NMTVE:SXAXR, SIPKAXX:VPTEL:RPVQ-AA¹⁷-RKI:DEYDKVV:KKATV:EMVVE:GXGXR, HVTKPTX:APTKL:RPVQ-AA¹⁷-RKI:DDSSNVI:KKATV:NMVVR:SXGXH, YVPKPXX:APTKL:RPVQ-AA¹⁷-RKI:DDSSNVI:KKATV:NMVVR:SXGXH, TVPKPXX:APTQL:RPVQ-AA¹⁷-RKI:DDSSNVI:KKATV:NMVVR:AXGXH, AVPKAXX:APTKL:RPVQ-AA¹⁷-RKI:DSSNNVI:KKATV:NMVVK:AXGXH, KVGKAXX:VPTKL:RPVQ-AA¹⁷-RKI:DDMGVPT:KKATV:EGMSVAE:XGXR, KASKAXX:VPTKL:RPVQ-AA¹⁷-RKI:DKGVVTY:KKATV:GMAVS:EXGXR, GSAGPXX:TPTKM:RPVQ-AA¹⁷-RKI:NDKQQII:KKATV:GMVVD:RXGXS, AAPASXX:VPARL:RPVQ-AA¹⁷-RKI:DAANNVV:KKATV:DMVVE:AXGXR, STPPTXX:VPTRL:RPVQ-AA¹⁷-RKI:DSANNVV:KKATV:DMVVE:SXGXR, HVPKPXX:APTKL:RPVQ-AA¹⁷-RKI:DDSSNVI:KKATV:NMVVR:SXGXH, RVPSTXX:APVKT:RPVQ-AA¹⁷-RKI:DNGRVLL:KKATV:MIVEE:XGXL, ASAAPXX:VPQAL:RPVQ-AA¹⁷-RKI:VGRKPKV:KKATV:MIVRS:XKXS, ASASPXX:VSQDL:RPVQ-AA¹⁷-RKI:IGKTPKI:KKATV:MIVKS:XKXS, ASASPXX:VPQDL:RPVQ-AA¹⁷-RKI:VGRTPKV:KKATV:MVVKS:XKXS, NDEGLEX:VPTEE:RPVQ-AA¹⁷-RKI:RIKPHQGQH:KKATV:FLQHN:KXEXR, NDEGLEX:VPTGQ:RPVQ-AA¹⁷-RKI:RIKPHQGQH:KKATV:LEEHS:QXEXR and SSVKXQP:SRVHH:RPVQ-AA¹⁷-RKI:EYVRKKPKL:KKATV:RLEEH:LEXAXA; and wherein AA¹⁷ is selected from the group consisting of G, A, V, L, I, P, F, M, W, T and S (in particular is selected from the group consisting of M, I, L, V and T). More particularly, the heptuplet PEP7:PEP5:PEP12:LINKER:PEP2:PEP6:PEP8 is selected from the group consisting of GIPEPXX:VPTKM:SAIS-AA¹⁷-LYL:DENKNVVIKNYQ:NMVVE:SXAXR, HVTKPTX:VPTKL:SAIS-AA¹⁷-LYL:DDSSNVI:LKNYQ:NMVVE:SXGXH, YVPKPXX:VPTKL:SAIS-AA¹⁷-LYL:DDSSNVI:LKNYQ:NMVVE:SXGXH, TVPKPXX:VPTQL:SAIS-AA¹⁷-LYL:DDSSNVI:LKNYQ:NMVVE:AXGXH, AVPKAXX:VPTKL:SAIS-AA¹⁷-LYL:DSSNNVI:LKNYQ:NMVVE:AXGXH, KVGKAXX:VPTKL:SAIS-AA¹⁷-LYL:DDMGVPT:LKNYQ:EGMSVVE:XGXR, KASKAXX:VPTKL:SAIS-AA¹⁷-LYL:DKGVVTY:LKNYQ:GMVVE:EXGXR, GSAGPXX:VPTKM:SAIS-AA¹⁷-LYL:NDKQQII:LKNYQ:GMVVE:RXGXS, AAPASXX:VPTRL:SAIS-AA¹⁷-LYL:DAANNVV:LKNYQ:DMVVE:AXGXR, STPPTXX:VPTRL:SAIS-AA¹⁷-LYL:DSANNVV:LKNYQ:DMVVE:SXGXR, HVPKPXX:VPTKL:SAIS-AA¹⁷-LYL:DDSSNVI:LKNYQ:NMVVE:SXGXH, RVPSTXX:VPTKT:SAIS-AA¹⁷-LYL:DNGRVLL:LKNYQ:MIVVE:XGXL, ASAAPXX:VPTAL:SAIS-AA¹⁷-LYL:VGRKPKV:LKNYQ:MIVVE:XKXS, ASASPXX:VPTDL:SAIS-AA¹⁷-LYL:IGKTPKI:LKNYQ:MIVVE:XKXS, ASASPXX:VPTDL:SAIS-AA¹⁷-LYL:VGRTPKVIKNYQ:MVVVE:XKXS, GIPEPXX:VPEKM:SAIS-AA¹⁷-LYL:DENKNVV:LKNYQ:NMTVE:SXAXR, HVTKPTX:APTKL:SAIS-AA¹⁷-LYL:DDSSNVI:LKNYQ:NMVVR:SXGXH, YVPKPXX:APTKL:SAIS-AA¹⁷-LYL:DDSSNVI:LKNYQ:NMVVR:SXGXH, TVPKPXX:APTQL:SAIS-AA¹⁷-LYL:DDSSNVI:LKNYQ:NMVVR:AXGXH, AVPKAXX:APTKL:SAIS-AA¹⁷-LYL:DSSNNVI:LKNYQ:NMVVK:AXGXH, KVGKAXX:VPTKL:SAIS-AA¹⁷-LYL:DDMGVPT:LKNYQ:EGMSVAE:XGXR, KASKAXX:VPTKL:SAIS-AA¹⁷-LYL:DKGVVTY:LKNYQ:GMAVS:EXGXR, GSAGPXX:TPTKM:SAIS-AA¹⁷-LYL:NDKQQII:LKNYQ:GMVVD:RXGXS, AAPASXX:VPARL:SAIS-AA¹⁷-LYL:DAANNVV:LKNYQ:DMVVE:AXGXR, HVPKPXX:APTKL:SAIS-AA¹⁷-LYL:DDSSNVI:LKNYQ:NMVVR:SXGXH, RVPSTXX:APVKT:SAIS-AA¹⁷-LYL:DNGRVLL:LKNYQ:MIVEE:XGXL, ASAAPXX:VPQAL:SAIS-AA¹⁷-LYL:VGRKPKV:LKNYQ:MIVRS:XKXS, ASASPXX:VSQDL:SAIS-AA¹⁷-LYL:IGKTPKI:LKNYQ:MIVKS:XKXS, ASASPXX:VPQDL:SAIS-AA¹⁷-LYL:VGRTPKV:LKNYQ:MVVKS:XKXS, NDEGLEX:VPTEE:SAIS-AA¹⁷-LYL:RIKPHQGQH:LKNYQ:FLQHN:KXEXR, NDEGLEX:VPTGQ:SAIS-AA¹⁷-LYL:RIKPHQGQH:LKNYQ:LEEHS:QXEXR, SSVKXQP:SRVHH:SAIS-AA¹⁷-LYL:EYVRKKPKL:LKNYQ:RLEEH:LEXAXA, RNVQXRP:TQVQL:SAIS-AA¹⁷-LYL:EIVRKKPIF:LKNYQ:TLEDH:LAXKXE, KIPKAXX:VPEEL:SSLS-AA¹⁷-LFF:DENEKVV:LKVYP:DMTVE:GXGXR, SIPKAXX:VPEEL:SSLS-AA¹⁷-LFF:DEYDKVV:LKVYP:EMTVE:GXGXR, HVTKPTX:VPEKL:SSLS-AA¹⁷-LFF:DDSSNVI:LKVYP:NMTVE:SXGXH, YVPKPXX:VPEKL:SSLS-AA¹⁷-LFF:DDSSNVI:LKVYP:NMTVE:SXGXH, TVPKPXX:VPEQL:SSLS-AA¹⁷-LFF:DDSSNVI:LKVYP:NMTVE:AXGXH, AVPKAXX:VPEKL:SSLS-AA¹⁷-LFF:DSSNNVI:LKVYP:NMTVE:AXGXH, KVGKAXX:VPEKL:SSLS-AA¹⁷-LFF:DDMGVPT:LKVYP:EGMSTVE:XGXR, KASKAXX:VPEKL:SSLS-AA¹⁷-LFF:DKGVVTY:LKVYP:GMTVE:EXGXR, GSAGPXX:VPEKM:SSLS-AA¹⁷-LFF:NDKQQIIIKVYP:GMTVE:RXGXS, AAPASXX:VPERL:SSLS-AA¹⁷-LFF:DAANNVV:LKVYP:DMTVE:AXGXR, STPPTXX:VPERL:SSLS-AA¹⁷-LFF:DSANNVV:LKVYP:DMTVE:SXGXR, HVPKPXX:VPEKL:SSLS-AA¹⁷-LFF:DDSSNVI:LKVYP:NMTVE:SXGXH, RVPSTXX:VPEKT:SSLS-AA¹⁷-LFF:DNGRVLLIKVYP:MITVE:XGXL, ASAAPXX:VPEAL:SSLS-AA¹⁷-LFF:VGRKPKV:LKVYP:MITVE:XKXS, ASASPXX:VPEDL:SSLS-AA¹⁷-LFF:IGKTPKI:LKVYP:MITVE:XKXS, ASASPXX:VPEDL:SSLS-AA¹⁷-LFF:VGRTPKV:LKVYP:MVTVE:XKXS, KIPKAXX:VPTEL:SSLS-AA¹⁷-LFF:DENEKVV:LKVYP:DMVVE:GXGXR, SIPKAXX:VPTEL:SSLS-AA¹⁷-LFF:DEYDKVV:LKVYP:EMVVE:GXGXR, HVTKPTX:APTKL:SSLS-AA¹⁷-LFF:DDSSNVI:LKVYP:NMVVR:SXGXH, YVPKPXX:APTKL:SSLS-AA¹⁷-LFF:DDSSNVI:LKVYP:NMVVR:SXGXH, TVPKPXX:APTQL:SSLS-AA¹⁷-LFF:DDSSNVI:LKVYP:NMVVR:AXGXH, AVPKAXX:APTKL:SSLS-AA¹⁷-LFF:DSSNNVI:LKVYP:NMVVK:AXGXH, KVGKAXX:VPTKL:SSLS-AA¹⁷-LFF:DDMGVPT:LKVYP:EGMSVAE:XGXR, KASKAXX:VPTKL:SSLS-AA¹⁷-LFF:DKGVVTY:LKVYP:GMAVS:EXGXR, GSAGPXX:TPTKM:SSLS-AA¹⁷-LFF:NDKQQII:LKVYP:GMVVD:RXGXS, AAPASXX:VPARL:SSLS-AA¹⁷-LFF:DAANNVV:LKVYP:DMVVE:AXGXR, STPPTXX:VPTRL:SSLS-AA¹⁷-LFF:DSANNVVIKVYP:DMVVE:SXGXR, HVPKPXX:APTKL:SSLS-AA¹⁷-LFF:DDSSNVI:LKVYP:NMVVR:SXGXH, RVPSTXX:APVKT:SSLS-AA¹⁷-LFF:DNGRVLL:LKVYP:MIVEE:XGXL, ASAAPXX:VPQAL:SSLS-AA¹⁷-LFF:VGRKPKV:LKVYP:MIVRS:XKXS, ASASPXX:VSQDL:SSLS-AA¹⁷-LFF:IGKTPKI:LKVYP:MIVKS:XKXS, ASASPXX:VPQDL:SSLS-AA¹⁷-LFF:VGRTPKV:LKVYP:MVVKS:XKXS, NDEGLEX:VPTEE:SSLS-AA¹⁷-LFF:RIKPHQGQH:LKVYP:FLQHN:KXEXR, NDEGLEX:VPTGQ:SSLS-AA¹⁷-LFF:RIKPHQGQH:LKVYP:LEEHS:QXEXR, SSVKXQP:SRVHH:SSLS-AA¹⁷-LFF:EYVRKKPKLIKVYP:RLEEH:LEXAXA, RNVQXRP:TQVQL:SSLS-AA¹⁷-LFF:EIVRKKPIF:LKVYP:TLEDH:LAXKXE, KIPKAXX:APTEL:NAIS-AA¹⁷-LYF:DENEKVV:LKKYR:DMVVR:GXGXR, GIPEPXX:APTKM:NAIS-AA¹⁷-LYF:DENKNVV:LKKYR:NMVVR:SXAXR, SIPKAXX:APTEL:NAIS-AA¹⁷-LYF:DEYDKVV:LKKYR:EMVVR:GXGXR, AVPKAXX:APTKL:NAIS-AA¹⁷-LYF:DSSNNVIIKKYR:NMVVR:AXGXH, KVGKAXX:APTKL:NAIS-AA¹⁷-LYF:DDMGVPT:LKKYR:EGMSVVR:XGXR, KASKAXX:APTKL:NAIS-AA¹⁷-LYF:DKGVVTY:LKKYR:GMVVR:EXGXR, GSAGPXX:APTKM:NAIS-AA¹⁷-LYF:NDKQQII:LKKYR:GMVVR:RXGXS, AAPASXX:APTRL:NAIS-AA¹⁷-LYF:DAANNVVIKKYR:DMVVR:AXGXR, STPPTXX:APTRL:NAIS-AA¹⁷-LYF:DSANNVV:LKKYR:DMVVR:SXGXR, RVPSTXX:APTKT:NAIS-AA¹⁷-LYF:DNGRVLL:LKKYR:MIVVR:XGXL, ASAAPXX:APTAL:NAIS-AA¹⁷-LYF:VGRKPKV:LKKYR:MIVVR:XKXS, ASASPXX:APTDL:NAIS-AA¹⁷-LYF:IGKTPKIIKKYR:MIVVR:XKXS, ASASPXX:APTDL:NAIS-AA¹⁷-LYF:VGRTPKV:LKKYR:MVVVR:XKXS, KIPKAXX:VPTEL:NAIS-AA¹⁷-LYF:DENEKVV:LKKYR:DMVVE:GXGXR, GIPEPXX:VPEKM:NAIS-AA¹⁷-LYF:DENKNVV:LKKYR:NMTVE:SXAXR, SIPKAXX:VPTEL:NAIS-AA¹⁷-LYF:DEYDKVV:LKKYR:EMVVE:GXGXR, AVPKAXX:APTKL:NAIS-AA¹⁷-LYF:DSSNNVIIKKYR:NMVVK:AXGXH, KVGKAXX:VPTKL:NAIS-AA¹⁷-LYF:DDMGVPT:LKKYR:EGMSVAE:XGXR, KASKAXX:VPTKL:NAIS-AA¹⁷-LYF:DKGVVTY:LKKYR:GMAVS:EXGXR, GSAGPXX:TPTKM:NAIS-AA¹⁷-LYF:NDKQQIIIKKYR:GMVVD:RXGXS, AAPASXX:VPARL:NAIS-AA¹⁷-LYF:DAANNVV:LKKYR:DMVVE:AXGXR, STPPTXX:VPTRL:NAIS-AA¹⁷-LYF:DSANNVV:LKKYR:DMVVE:SXGXR, RVPSTXX:APVKT:NAIS-AA¹⁷-LYF:DNGRVLL:LKKYR:MIVEE:XGXL, ASAAPXX:VPQAL:NAIS-AA¹⁷-LYF:VGRKPKVIKKYR:MIVRS:XKXS, ASASPXX:VSQDL:NAIS-AA¹⁷-LYF:IGKTPKIIKKYR:MIVKS:XKXS, ASASPXX:VPQDL:NAIS-AA¹⁷-LYF:VGRTPKV:LKKYR:MVVKS:XKXS, NDEGLEX:VPTEE:NAIS-AA¹⁷-LYF:RIKPHQGQH:LKKYR:FLQHN:KXEXR, NDEGLEX:VPTGQ:NAIS-AA¹⁷-LYF:RIKPHQGQH:LKKYR:LEEHS:QXEXR, SSVKXQP:SRVHH:NAIS-AA¹⁷-LYF:EYVRKKPKL:LKKYR:RLEEH:LEXAXA, RNVQXRP:TQVQL:NAIS-AA¹⁷-LYF:EIVRKKPIF:LKKYR:TLEDH:LAXKXE, KIPKAXX:APTEL:SATS-AA¹⁷-LYY:DENEKVV:LRKHR:DMVVK:GXGXR, GIPEPXX:APTKM:SATS-AA¹⁷-LYY:DENKNVVIRKHR:NMVVK:SXAXR, SIPKAXX:APTEL:SATS-AA¹⁷-LYY:DEYDKVV:LRKHR:EMVVK:GXGXR, HVTKPTX:APTKL:SATS-AA¹⁷-LYY:DDSSNVI:LRKHR:NMVVK:SXGXH, YVPKPXX:APTKL:SATS-AA¹⁷-LYY:DDSSNVI:LRKHR:NMVVK:SXGXH, TVPKPXX:APTQL:SATS-AA¹⁷-LYY:DDSSNVI:LRKHR:NMVVK:AXGXH, KVGKAXX:APTKL:SATS-AA¹⁷-LYY:DDMGVPT:LRKHR:EGMSVVK:XGXR, KASKAXX:APTKL:SATS-AA¹⁷-LYY:DKGVVTY:LRKHR:GMVVK:EXGXR, GSAGPXX:APTKM:SATS-AA¹⁷-LYY:NDKQQII:LRKHR:GMVVK:RXGXS, AAPASXX:APTRL:SATS-AA¹⁷-LYY:DAANNVV:LRKHR:DMVVK:AXGXR, STPPTXX:APTRL:SATS-AA¹⁷-LYY:DSANNVV:LRKHR:DMVVK:SXGXR, HVPKPXX:APTKL:SATS-AA¹⁷-LYY:DDSSNVI:LRKHR:NMVVK:SXGXH, RVPSTXX:APTKT:SATS-AA¹⁷-LYY:DNGRVLL:LRKHR:MIVVK:XGXL, ASAAPXX:APTAL:SATS-AA¹⁷-LYY:VGRKPKVIRKHR:MIVVK:XKXS, ASASPXX:APTDL:SATS-AA¹⁷-LYY:IGKTPKI:LRKHR:MIVVK:XKXS, ASASPXX:APTDL:SATS-AA¹⁷-LYY:VGRTPKV:LRKHR:MVVVK:XKXS, KIPKAXX:VPTEL:SATS-AA¹⁷-LYY:DENEKVV:LRKHR:DMVVE:GXGXR, GIPEPXX:VPEKM:SATS-AA¹⁷-LYY:DENKNVV:LRKHR:NMTVE:SXAXR, SIPKAXX:VPTEL:SATS-AA¹⁷-LYY:DEYDKVV:LRKHR:EMVVE:GXGXR, HVTKPTX:APTKL:SATS-AA¹⁷-LYY:DDSSNVI:LRKHR:NMVVR:SXGXH, YVPKPXX:APTKL:SATS-AA¹⁷-LYY:DDSSNVI:LRKHR:NMVVR:SXGXH, TVPKPXX:APTQL:SATS-AA¹⁷-LYY:DDSSNVI:LRKHR:NMVVR:AXGXH, KVGKAXX:VPTKL:SATS-AA¹⁷-LYY:DDMGVPT:LRKHR:EGMSVAE:XGXR, KASKAXX:VPTKL:SATS-AA¹⁷-LYY:DKGVVTY:LRKHR:GMAVS:EXGXR, GSAGPXX:TPTKM:SATS-AA¹⁷-LYY:NDKQQIIIRKHR:GMVVD:RXGXS, AAPASXX:VPARL:SATS-AA¹⁷-LYY:DAANNVV:LRKHR:DMVVE:AXGXR, STPPTXX:VPTRL:SATS-AA¹⁷-LYY:DSANNVV:LRKHR:DMVVE:SXGXR, HVPKPXX:APTKL:SATS-AA¹⁷-LYY:DDSSNVI:LRKHR:NMVVR:SXGXH, RVPSTXX:APVKT:SATS-AA¹⁷-LYY:DNGRVLL:LRKHR:MIVEE:XGXL, ASAAPXX:VPQAL:SATS-AA¹⁷-LYY:VGRKPKVIRKHR:MIVRS:XKXS, ASASPXX:VSQDL:SATS-AA¹⁷-LYY:IGKTPKIIRKHR:MIVKS:XKXS, ASASPXX:VPQDL:SATS-AA¹⁷-LYY:VGRTPKVIRKHR:MVVKS:XKXS, NDEGLEX:VPTEE:SATS-AA¹⁷-LYY:RIKPHQGQH:LRKHR:FLQHN:KXEXR, NDEGLEX:VPTGQ:SATS-AA¹⁷-LYY:RIKPHQGQH:LRKHR:LEEHS:QXEXR, SSVKXQP:SRVHH:SATS-AA¹⁷-LYY:EYVRKKPKLIRKHR:RLEEH:LEXAXA, RNVQXRP:TQVQL:SATS-AA¹⁷-LYY:EIVRKKPIFIRKHR:TLEDH:LAXKXE, KIPKAXX:VPTEL:SPIS-AA¹⁷-LYK:DENEKVV:LKYHY:DMVAE:GXGXR, GIPEPXX:VPTKM:SPIS-AA¹⁷-LYK:DENKNVV:LKYHY:NMVAE:SXAXR, SIPKAXX:VPTEL:SPIS-AA¹⁷-LYK:DEYDKVV:LKYHY:EMVAE:GXGXR, HVTKPTX:VPTKL:SPIS-AA¹⁷-LYK:DDSSNVI:LKYHY:NMVAE:SXGXH, YVPKPXX:VPTKL:SPIS-AA¹⁷-LYK:DDSSNVI:LKYHY:NMVAE:SXGXH, TVPKPXX:VPTQL:SPIS-AA¹⁷-LYK:DDSSNVI:LKYHY:NMVAE:AXGXH, AVPKAXX:VPTKL:SPIS-AA¹⁷-LYK:DSSNNVI:LKYHY:NMVAE:AXGXH, KASKAXX:VPTKL:SPIS-AA¹⁷-LYK:DKGVVTY:LKYHY:GMVAE:EXGXR, GSAGPXX:VPTKM:SPIS-AA¹⁷-LYK:NDKQQII:LKYHY:GMVAE:RXGXS, AAPASXX:VPTRL:SPIS-AA¹⁷-LYK:DAANNVV:LKYHY:DMVAE:AXGXR, STPPTXX:VPTRL:SPIS-AA¹⁷-LYK:DSANNVV:LKYHY:DMVAE:SXGXR, HVPKPXX:VPTKL:SPIS-AA¹⁷-LYK:DDSSNVI:LKYHY:NMVAE:SXGXH, RVPSTXX:VPTKT:SPIS-AA¹⁷-LYK:DNGRVLL:LKYHY:MIVAE:XGXL, ASAAPXX:VPTAL:SPIS-AA¹⁷-LYK:VGRKPKV:LKYHY:MIVAE:XKXS, ASASPXX:VPTDL:SPIS-AA¹⁷-LYK:IGKTPKI:LKYHY:MIVAE:XKXS, ASASPXX:VPTDL:SPIS-AA¹⁷-LYK:VGRTPKV:LKYHY:MVVAE:XKXS, KIPKAXX:VPTEL:SPIS-AA¹⁷-LYK:DENEKVV:LKYHY:DMVVE:GXGXR, GIPEPXX:VPEKM:SPIS-AA¹⁷-LYK:DENKNVV:LKYHY:NMTVE:SXAXR, SIPKAXX:VPTEL:SPIS-AA¹⁷-LYK:DEYDKVV:LKYHY:EMVVE:GXGXR, HVTKPTX:APTKL:SPIS-AA¹⁷-LYK:DDSSNVI:LKYHY:NMVVR:SXGXH, YVPKPXX:APTKL:SPIS-AA¹⁷-LYK:DDSSNVI:LKYHY:NMVVR:SXGXH, TVPKPXX:APTQL:SPIS-AA¹⁷-LYK:DDSSNVI:LKYHY:NMVVR:AXGXH, AVPKAXX:APTKL:SPIS-AA¹⁷-LYK:DSSNNVI:LKYHY:NMVVK:AXGXH, KASKAXX:VPTKL:SPIS-AA¹⁷-LYK:DKGVVTY:LKYHY:GMAVS:EXGXR, GSAGPXX:TPTKM:SPIS-AA¹⁷-LYK:NDKQQII:LKYHY:GMVVD:RXGXS, AAPASXX:VPARL:SPIS-AA¹⁷-LYK:DAANNVV:LKYHY:DMVVE:AXGXR, STPPTXX:VPTRL:SPIS-AA¹⁷-LYK:DSANNVV:LKYHY:DMVVE:SXGXR, HVPKPXX:APTKL:SPIS-AA¹⁷-LYK:DDSSNVI:LKYHY:NMVVR:SXGXH, RVPSTXX:APVKT:SPIS-AA¹⁷-LYK:DNGRVLL:LKYHY:MIVEE:XGXL, ASAAPXX:VPQAL:SPIS-AA¹⁷-LYK:VGRKPKV:LKYHY:MIVRS:XKXS, ASASPXX:VSQDL:SPIS-AA¹⁷-LYK:IGKTPKI:LKYHY:MIVKS:XKXS, ASASPXX:VPQDL:SPIS-AA¹⁷-LYK:VGRTPKV:LKYHY:MVVKS:XKXS, NDEGLEX:VPTEE:SPIS-AA¹⁷-LYK:RIKPHQGQH:LKYHY:FLQHN:KXEXR, NDEGLEX:VPTGQ:SPIS-AA¹⁷-LYK:RIKPHQGQH:LKYHY:LEEHS:QXEXR, SSVKXQP:SRVHH:SPIS-AA¹⁷-LYK:EYVRKKPKL:LKYHY:RLEEH:LEXAXA, RNVQXRP:TQVQL:SPIS-AA¹⁷-LYK:EIVRKKPIF:LKYHY:TLEDH:LAXKXE, KIPKAXX:VPTEL:EPIS-AA¹⁷-LYL:DENEKVV:KFKYE:DMAVS:GXGXR, GIPEPXX:VPTKM:EPIS-AA¹⁷-LYL:DENKNVV:KFKYE:NMAVS:SXAXR, SIPKAXX:VPTEL:EPIS-AA¹⁷-LYL:DEYDKVV:KFKYE:EMAVS:GXGXR, HVTKPTX:VPTKL:EPIS-AA¹⁷-LYL:DDSSNVI:KFKYE:NMAVS:SXGXH, YVPKPXX:VPTKL:EPIS-AA¹⁷-LYL:DDSSNVI:KFKYE:NMAVS:SXGXH, TVPKPXX:VPTQL:EPIS-AA¹⁷-LYL:DDSSNVI:KFKYE:NMAVS:AXGXH, AVPKAXX:VPTKL:EPIS-AA¹⁷-LYL:DSSNNVI:KFKYE:NMAVS:AXGXH, KVGKAXX:VPTKL:EPIS-AA¹⁷-LYL:DDMGVPT:KFKYE:EGMSAVS:XGXR, GSAGPXX:VPTKM:EPIS-AA¹⁷-LYL:NDKQQII:KFKYE:GMAVS:RXGXS, AAPASXX:VPTRL:EPIS-AA¹⁷-LYL:DAANNVV:KFKYE:DMAVS:AXGXR, STPPTXX:VPTRL:EPIS-AA¹⁷-LYL:DSANNVV:KFKYE:DMAVS:SXGXR, HVPKPXX:VPTKL:EPIS-AA¹⁷-LYL:DDSSNVI:KFKYE:NMAVS:SXGXH, RVPSTXX:VPTKT:EPIS-AA¹⁷-LYL:DNGRVLL:KFKYE:MIAVS:XGXL, ASAAPXX:VPTAL:EPIS-AA¹⁷-LYL:VGRKPKV:KFKYE:MIAVS:XKXS, ASASPXX:VPTDLEPIS-AA¹⁷-LYL:IGKTPKI:KFKYE:MIAVS:XKXS, ASASPXX:VPTDLEPIS-AA¹⁷-LYL:VGRTPKV:KFKYE:MVAVS:XKXS, KIPKAXX:VPTEL:EPIS-AA¹⁷-LYL:DENEKVV:KFKYE:DMVVE:GXGXR, GIPEPXX:VPEKM:EPIS-AA¹⁷-LYL:DENKNVV:KFKYE:NMTVE:SXAXR, SIPKAXX:VPTEL:EPIS-AA¹⁷-LYL:DEYDKVV:KFKYE:EMVVE:GXGXR, HVTKPTX:APTKL:EPIS-AA¹⁷-LYL:DDSSNVI:KFKYE:NMVVR:SXGXH, YVPKPXX:APTKL:EPIS-AA¹⁷-LYL:DDSSNVI:KFKYE:NMVVR:SXGXH, TVPKPXX:APTQL:EPIS-AA¹⁷-LYL:DDSSNVI:KFKYE:NMVVR:AXGXH, AVPKAXX:APTKL:EPIS-AA¹⁷-LYL:DSSNNVI:KFKYE:NMVVK:AXGXH, KVGKAXX:VPTKL:EPIS-AA¹⁷-LYL:DDMGVPT:KFKYE:EGMSVAE:XGXR, GSAGPXX:TPTKM:EPIS-AA¹⁷-LYL:NDKQQII:KFKYE:GMVVD:RXGXS, AAPASXX:VPARL:EPIS-AA¹⁷-LYL:DAANNVV:KFKYE:DMVVE:AXGXR, STPPTXX:VPTRL:EPIS-AA¹⁷-LYL:DSANNVV:KFKYE:DMVVE:SXGXR, HVPKPXX:APTKL:EPIS-AA¹⁷-LYL:DDSSNVI:KFKYE:NMVVR:SXGXH, RVPSTXX:APVKT:EPIS-AA¹⁷-LYL:DNGRVLL:KFKYE:MIVEE:XGXL, ASAAPXX:VPQAL:EPIS-AA¹⁷-LYL:VGRKPKV:KFKYE:MIVRS:XKXS, ASASPXX:VSQDLEPIS-AA¹⁷-LYL:IGKTPKI:KFKYE:MIVKS:XKXS, ASASPXX:VPQDLEPIS-AA¹⁷-LYL:VGRTPKV:KFKYE:MVVKS:XKXS, NDEGLEX:VPTEE:EPIS-AA¹⁷-LYL:RIKPHQGQH:KFKYE:FLQHN:KXEXR, NDEGLEX:VPTGQ:EPIS-AA¹⁷-LYL:RIKPHQGQH:KFKYE:LEEHS:QXEXR, SSVKXQP:SRVHH:EPIS-AA¹⁷-LYL:EYVRKKPKL:KFKYE:RLEEH:LEXAXA, RNVQXRP:TQVQL:EPIS-AA¹⁷-LYL:EIVRKKPIF:KFKYE:TLEDH:LAXKXE, KIPKAXX:TPTEL:SPIN-AA¹⁷-LYF:DENEKVV:YGKIP:DMVVD:GXGXR, GIPEPXX:TPTKM:SPIN-AA¹⁷-LYF:DENKNVV:YGKIP:NMVVD:SXAXR, SIPKAXX:TPTEL:SPIN-AA¹⁷-LYF:DEYDKVV:YGKIP:EMVVD:GXGXR, HVTKPTX:TPTKL:SPIN-AA¹⁷-LYF:DDSSNVI:YGKIP:NMVVD:SXGXH, YVPKPXX:TPTKL:SPIN-AA¹⁷-LYF:DDSSNVI:YGKIP:NMVVD:SXGXH, TVPKPXX:TPTQL:SPIN-AA¹⁷-LYF:DDSSNVI:YGKIP:NMVVD:AXGXH, AVPKAXX:TPTKL:SPIN-AA¹⁷-LYF:DSSNNVI:YGKIP:NMVVD:AXGXH, KVGKAXX:TPTKL:SPIN-AA¹⁷-LYF:DDMGVPT:YGKIP:EGMSVVD:XGXR, KASKAXX:TPTKL:SPIN-AA¹⁷-LYF:DKGVVTY:YGKIP:GMVVD:EXGXR, AAPASXX:TPTRL:SPIN-AA¹⁷-LYF:DAANNVV:YGKIP:DMVVD:AXGXR, STPPTXX:TPTRL:SPIN-AA¹⁷-LYF:DSANNVV:YGKIP:DMVVD:SXGXR, HVPKPXX:TPTKL:SPIN-AA¹⁷-LYF:DDSSNVI:YGKIP:NMVVD:SXGXH, RVPSTXX:TPTKT:SPIN-AA¹⁷-LYF:DNGRVLL:YGKIP:MIVVD:XGXL, ASAAPXX:TPTAL:SPIN-AA¹⁷-LYF:VGRKPKV:YGKIP:MIVVD:XKXS, ASASPXX:TPTDL:SPIN-AA¹⁷-LYF:IGKTPKI:YGKIP:MIVVD:XKXS, ASASPXX:TPTDL:SPIN-AA¹⁷-LYF:VGRTPKV:YGKIP:MVVVD:XKXS, KIPKAXX:VPTEL:SPIN-AA¹⁷-LYF:DENEKVV:YGKIP:DMVVE:GXGXR, GIPEPXX:VPEKM:SPIN-AA¹⁷-LYF:DENKNVV:YGKIP:NMTVE:SXAXR, SIPKAXX:VPTEL:SPIN-AA¹⁷-LYF:DEYDKVV:YGKIP:EMVVE:GXGXR, HVTKPTX:APTKL:SPIN-AA¹⁷-LYF:DDSSNVI:YGKIP:NMVVR:SXGXH, YVPKPXX:APTKL:SPIN-AA¹⁷-LYF:DDSSNVI:YGKIP:NMVVR:SXGXH, TVPKPXX:APTQL:SPIN-AA¹⁷-LYF:DDSSNVI:YGKIP:NMVVR:AXGXH, AVPKAXX:APTKL:SPIN-AA¹⁷-LYF:DSSNNVI:YGKIP:NMVVK:AXGXH, KVGKAXX:VPTKL:SPIN-AA¹⁷-LYF:DDMGVPT:YGKIP:EGMSVAE:XGXR, KASKAXX:VPTKL:SPIN-AA¹⁷-LYF:DKGVVTY:YGKIP:GMAVS:EXGXR, AAPASXX:VPARL:SPIN-AA¹⁷-LYF:DAANNVV:YGKIP:DMVVE:AXGXR, STPPTXX:VPTRL:SPIN-AA¹⁷-LYF:DSANNVV:YGKIP:DMVVE:SXGXR, HVPKPXX:APTKL:SPIN-AA¹⁷-LYF:DDSSNVI:YGKIP:NMVVR:SXGXH, RVPSTXX:APVKT:SPIN-AA¹⁷-LYF:DNGRVLL:YGKIP:MIVEE:XGXL, ASAAPXX:VPQAL:SPIN-AA¹⁷-LYF:VGRKPKV:YGKIP:MIVRS:XKXS, ASASPXX:VSQDL:SPIN-AA¹⁷-LYF:IGKTPKI:YGKIP:MIVKS:XKXS, ASASPXX:VPQDL:SPIN-AA¹⁷-LYF:VGRTPKV:YGKIP:MVVKS:XKXS, NDEGLEX:VPTEE:SPIN-AA¹⁷-LYF:RIKPHQGQH:YGKIP:FLQHN:KXEXR, NDEGLEX:VPTGQ:SPIN-AA¹⁷-LYF:RIKPHQGQH:YGKIP:LEEHS:QXEXR, SSVKXQP:SRVHH:SPIN-AA¹⁷-LYF:EYVRKKPKL:YGKIP:RLEEH:LEXAXA, RNVQXRP:TQVQL:SPIN-AA¹⁷-LYF:EIVRKKPIF:YGKIP:TLEDH:LAXKXE, KIPKAXX:VPAEL:SPIS-AA¹⁷-LYI:DENEKVV:YKQYE:DMVVE:GXGXR, GIPEPXX:VPAKM:SPIS-AA¹⁷-LYI:DENKNVV:YKQYE:NMVVE:SXAXR, SIPKAXX:VPAEL:SPIS-AA¹⁷-LYI:DEYDKVV:YKQYE:EMVVE:GXGXR, HVTKPTX:VPAKL:SPIS-AA¹⁷-LYI:DDSSNVI:YKQYE:NMVVE:SXGXH, YVPKPXX:VPAKL:SPIS-AA¹⁷-LYI:DDSSNVI:YKQYE:NMVVE:SXGXH, TVPKPXX:VPAQL:SPIS-AA¹⁷-LYI:DDSSNVI:YKQYE:NMVVE:AXGXH, AVPKAXX:VPAKL:SPIS-AA¹⁷-LYI:DSSNNVI:YKQYE:NMVVE:AXGXH, KVGKAXX:VPAKL:SPIS-AA¹⁷-LYI:DDMGVPT:YKQYE:EGMSVVE:XGXR, KASKAXX:VPAKL:SPIS-AA¹⁷-LYI:DKGVVTY:YKQYE:GMVVE:EXGXR, GSAGPXX:VPAKM:SPIS-AA¹⁷-LYI:NDKQQII:YKQYE:GMVVE:RXGXS, STPPTXX:VPARL:SPIS-AA¹⁷-LYI:DSANNVV:YKQYE:DMVVE:SXGXR, HVPKPXX:VPAKL:SPIS-AA¹⁷-LYI:DDSSNVI:YKQYE:NMVVE:SXGXH, RVPSTXX:VPAKT:SPIS-AA¹⁷-LYI:DNGRVLL:YKQYE:MIVVE:XGXL, ASAAPXX:VPAAL:SPIS-AA¹⁷-LYI:VGRKPKV:YKQYE:MIVVE:XKXS, ASASPXX:VPADL:SPIS-AA¹⁷-LYI:IGKTPKI:YKQYE:MIVVE:XKXS, ASASPXX:VPADL:SPIS-AA¹⁷-LYI:VGRTPKV:YKQYE:MVVVE:XKXS, KIPKAXX:VPTEL:SPIS-AA¹⁷-LYI:DENEKVV:YKQYE:DMVVE:GXGXR, GIPEPXX:VPEKM:SPIS-AA¹⁷-LYI:DENKNVV:YKQYE:NMTVE:SXAXR, SIPKAXX:VPTEL:SPIS-AA¹⁷-LYI:DEYDKVV:YKQYE:EMVVE:GXGXR, HVTKPTX:APTKL:SPIS-AA¹⁷-LYI:DDSSNVI:YKQYE:NMVVR:SXGXH, YVPKPXX:APTKL:SPIS-AA¹⁷-LYI:DDSSNVI:YKQYE:NMVVR:SXGXH, TVPKPXX:APTQL:SPIS-AA¹⁷-LYI:DDSSNVI:YKQYE:NMVVR:AXGXH, AVPKAXX:APTKL:SPIS-AA¹⁷-LYI:DSSNNVI:YKQYE:NMVVK:AXGXH, KVGKAXX:VPTKL:SPIS-AA¹⁷-LYI:DDMGVPT:YKQYE:EGMSVAE:XGXR, KASKAXX:VPTKL:SPIS-AA¹⁷-LYI:DKGVVTY:YKQYE:GMAVS:EXGXR, GSAGPXX:TPTKM:SPIS-AA¹⁷-LYI:NDKQQII:YKQYE:GMVVD:RXGXS, STPPTXX:VPTRL:SPIS-AA¹⁷-LYI:DSANNVV:YKQYE:DMVVE:SXGXR, HVPKPXX:APTKL:SPIS-AA¹⁷-LYI:DDSSNVI:YKQYE:NMVVR:SXGXH, RVPSTXX:APVKT:SPIS-AA¹⁷-LYI:DNGRVLL:YKQYE:MIVEE:XGXL, ASAAPXX:VPQAL:SPIS-AA¹⁷-LYI:VGRKPKV:YKQYE:MIVRS:XKXS, ASASPXX:VSQDL:SPIS-AA¹⁷-LYI:IGKTPKI:YKQYE:MIVKS:XKXS, ASASPXX:VPQDL:SPIS-AA¹⁷-LYI:VGRTPKV:YKQYE:MVVKS:XKXS, NDEGLEX:VPTEE:SPIS-AA¹⁷-LYI:RIKPHQGQH:YKQYE:FLQHN:KXEXR, NDEGLEX:VPTGQ:SPIS-AA¹⁷-LYI:RIKPHQGQH:YKQYE:LEEHS:QXEXR, SSVKXQP:SRVHH:SPIS-AA¹⁷-LYI:EYVRKKPKL:YKQYE:RLEEH:LEXAXA, RNVQXRP:TQVQL:SPIS-AA¹⁷-LYI:EIVRKKPIF:YKQYE:TLEDH:LAXKXE, KIPKAXX:VPTEL:SPIS-AA¹⁷-LFI:DENEKVV:YKQYE:DMVVE:GXGXR, GIPEPXX:VPTKM:SPIS-AA¹⁷-LFI:DENKNVV:YKQYE:NMVVE:SXAXR, SIPKAXX:VPTEL:SPIS-AA¹⁷-LFI:DEYDKVV:YKQYE:EMVVE:GXGXR, HVTKPTX:VPTKL:SPIS-AA¹⁷-LFI:DDSSNVI:YKQYE:NMVVE:SXGXH, YVPKPXX:VPTKL:SPIS-AA¹⁷-LFI:DDSSNVI:YKQYE:NMVVE:SXGXH, TVPKPXX:VPTQL:SPIS-AA¹⁷-LFI:DDSSNVI:YKQYE:NMVVE:AXGXH, AVPKAXX:VPTKL:SPIS-AA¹⁷-LFI:DSSNNVI:YKQYE:NMVVE:AXGXH, KVGKAXX:VPTKL:SPIS-AA¹⁷-LFI:DDMGVPT:YKQYE:EGMSVVE:XGXR, KASKAXX:VPTKL:SPIS-AA¹⁷-LFI:DKGVVTY:YKQYE:GMVVE:EXGXR, GSAGPXX:VPTKM:SPIS-AA¹⁷-LFI:NDKQQII:YKQYE:GMVVE:RXGXS, AAPASXX:VPTRL:SPIS-AA¹⁷-LFI:DAANNVV:YKQYE:DMVVE:AXGXR, HVPKPXX:VPTKL:SPIS-AA¹⁷-LFI:DDSSNVI:YKQYE:NMVVE:SXGXH, RVPSTXX:VPTKT:SPIS-AA¹⁷-LFI:DNGRVLL:YKQYE:MIVVE:XGXL, ASAAPXX:VPTAL:SPIS-AA¹⁷-LFI:VGRKPKV:YKQYE:MIVVE:XKXS, ASASPXX:VPTDL:SPIS-AA¹⁷-LFLIGKTPKI:YKQYE:MIVVE:XKXS, ASASPXX:VPTDL:SPIS-AA¹⁷-LFI:VGRTPKV:YKQYE:MVVVE:XKXS, GIPEPXX:VPEKM:SPIS-AA¹⁷-LFI:DENKNVV:YKQYE:NMTVE:SXAXR, HVTKPTX:APTKL:SPIS-AA¹⁷-LFI:DDSSNVI:YKQYE:NMVVR:SXGXH, YVPKPXX:APTKL:SPIS-AA¹⁷-LFI:DDSSNVI:YKQYE:NMVVR:SXGXH, TVPKPXX:APTQL:SPIS-AA¹⁷-LFI:DDSSNVI:YKQYE:NMVVR:AXGXH, AVPKAXX:APTKL:SPIS-AA¹⁷-LFI:DSSNNVI:YKQYE:NMVVK:AXGXH, KVGKAXX:VPTKL:SPIS-AA¹⁷-LFI:DDMGVPT:YKQYE:EGMSVAE:XGXR, KASKAXX:VPTKL:SPIS-AA¹⁷-LFI:DKGVVTY:YKQYE:GMAVS:EXGXR, GSAGPXX:TPTKM:SPIS-AA¹⁷-LFI:NDKQQII:YKQYE:GMVVD:RXGXS, AAPASXX:VPARL:SPIS-AA¹⁷-LFI:DAANNVV:YKQYE:DMVVE:AXGXR, HVPKPXX:APTKL:SPIS-AA¹⁷-LFI:DDSSNVI:YKQYE:NMVVR:SXGXH, RVPSTXX:APVKT:SPIS-AA¹⁷-LFI:DNGRVLL:YKQYE:MIVEE:XGXL, ASAAPXX:VPQAL:SPIS-AA¹⁷-LFI:VGRKPKV:YKQYE:MIVRS:XKXS, ASASPXX:VSQDL:SPIS-AA¹⁷-LFLIGKTPKI:YKQYE:MIVKS:XKXS, ASASPXX:VPQDL:SPIS-AA¹⁷-LFI:VGRTPKV:YKQYE:MVVKS:XKXS, NDEGLEX:VPTEE:SPIS-AA¹⁷-LFI:RIKPHQGQH:YKQYE:FLQHN:KXEXR, NDEGLEX:VPTGQ:SPIS-AA¹⁷-LFI:RIKPHQGQH:YKQYE:LEEHS:QXEXR, SSVKXQP:SRVHH:SPIS-AA¹⁷-LFI:EYVRKKPKL:YKQYE:RLEEH:LEXAXA, RNVQXRP:TQVQL:SPIS-AA¹⁷-LFI:EIVRKKPIF:YKQYE:TLEDH:LAXKXE, KIPKAXX:APVEL:KPLS-AA¹⁷-LYV:DENEKVV:DHHKD:DMVEE:GXGXR, GIPEPXX:APVKM:KPLS-AA¹⁷-LYV:DENKNVV:DHHKD:NMVEE:SXAXR, SIPKAXX:APVEL:KPLS-AA¹⁷-LYV:DEYDKVV:DHHKD:EMVEE:GXGXR, HVTKPTX:APVKL:KPLS-AA¹⁷-LYV:DDSSNVI:DHHKD:NMVEE:SXGXH, YVPKPXX:APVKL:KPLS-AA¹⁷-LYV:DDSSNVI:DHHKD:NMVEE:SXGXH, TVPKPXX:APVQL:KPLS-AA¹⁷-LYV:DDSSNVI:DHHKD:NMVEE:AXGXH, AVPKAXX:APVKL:KPLS-AA¹⁷-LYV:DSSNNVI:DHHKD:NMVEE:AXGXH, KVGKAXX:APVKL:KPLS-AA¹⁷-LYV:DDMGVPT:DHHKD:EGMSVEE:XGXR, KASKAXX:APVKL:KPLS-AA¹⁷-LYV:DKGVVTY:DHHKD:GMVEE:EXGXR, GSAGPXX:APVKM:KPLS-AA¹⁷-LYV:NDKQQII:DHHKD:GMVEE:RXGXS, AAPASXX:APVRL:KPLS-AA¹⁷-LYV:DAANNVV:DHHKD:DMVEE:AXGXR, STPPTXX:APVRL:KPLS-AA¹⁷-LYV:DSANNVV:DHHKD:DMVEE:SXGXR, HVPKPXX:APVKL:KPLS-AA¹⁷-LYV:DDSSNVI:DHHKD:NMVEE:SXGXH, ASAAPXX:APVAL:KPLS-AA¹⁷-LYV:VGRKPKV:DHHKD:MIVEE:XKXS, ASASPXX:APVDL:KPLS-AA¹⁷-LYV:IGKTPKI:DHHKD:MIVEE:XKXS, ASASPXX:APVDL:KPLS-AA¹⁷-LYV:VGRTPKV:DHHKD:MVVEE:XKXS, KIPKAXX:VPTEL:KPLS-AA¹⁷-LYV:DENEKVV:DHHKD:DMVVE:GXGXR, GIPEPXX:VPEKM:KPLS-AA¹⁷-LYV:DENKNVV:DHHKD:NMTVE:SXAXR, SIPKAXX:VPTEL:KPLS-AA¹⁷-LYV:DEYDKVV:DHHKD:EMVVE:GXGXR, HVTKPTX:APTKL:KPLS-AA¹⁷-LYV:DDSSNVI:DHHKD:NMVVR:SXGXH, YVPKPXX:APTKL:KPLS-AA¹⁷-LYV:DDSSNVI:DHHKD:NMVVR:SXGXH, TVPKPXX:APTQL:KPLS-AA¹⁷-LYV:DDSSNVI:DHHKD:NMVVR:AXGXH, AVPKAXX:APTKL:KPLS-AA¹⁷-LYV:DSSNNVI:DHHKD:NMVVK:AXGXH, KVGKAXX:VPTKL:KPLS-AA¹⁷-LYV:DDMGVPT:DHHKD:EGMSVAE:XGXR, KASKAXX:VPTKL:KPLS-AA¹⁷-LYV:DKGVVTY:DHHKD:GMAVS:EXGXR, GSAGPXX:TPTKM:KPLS-AA¹⁷-LYV:NDKQQII:DHHKD:GMVVD:RXGXS, AAPASXX:VPARL:KPLS-AA¹⁷-LYV:DAANNVV:DHHKD:DMVVE:AXGXR, STPPTXX:VPTRL:KPLS-AA¹⁷-LYV:DSANNVV:DHHKD:DMVVE:SXGXR, HVPKPXX:APTKL:KPLS-AA¹⁷-LYV:DDSSNVI:DHHKD:NMVVR:SXGXH, ASAAPXX:VPQAL:KPLS-AA¹⁷-LYV:VGRKPKV:DHHKD:MIVRS:XKXS, ASASPXX:VSQDL:KPLS-AA¹⁷-LYV:IGKTPKI:DHHKD:MIVKS:XKXS, ASASPXX:VPQDL:KPLS-AA¹⁷-LYV:VGRTPKV:DHHKD:MVVKS:XKXS, NDEGLEX:VPTEE:KPLS-AA¹⁷-LYV:RIKPHQGQH:DHHKD:FLQHN:KXEXR, NDEGLEX:VPTGQ:KPLS-AA¹⁷-LYV: RIKPHQGQH:DHHKD:LEEHS:QXEXR, SSVKXQP:SRVHH:KPLS-AA¹⁷-LYV:EYVRKKPKL:DHHKD:RLEEH:LEXAXA, RNVQXRP:TQVQL:KPLS-AA¹⁷-LYV:EIVRKKPIF:DHHKD:TLEDH:LAXKXE, KIPKAXX:VPQEL:EPLP-AA¹⁷-VYY:DENEKVV:EQLSN:DMVRS:GXGXR, GIPEPXX:VPQKM:EPLP-AA¹⁷-VYY:DENKNVV:EQLSN:NMVRS:SXAXR, SIPKAXX:VPQEL:EPLP-AA¹⁷-VYY:DEYDKVV:EQLSN:EMVRS:GXGXR, HVTKPTX:VPQKL:EPLP-AA¹⁷-VYY:DDSSNVI:EQLSN:NMVRS:SXGXH, YVPKPXX:VPQKL:EPLP-AA¹⁷-VYY:DDSSNVI:EQLSN:NMVRS:SXGXH, TVPKPXX:VPQQL:EPLP-AA¹⁷-VYY:DDSSNVI:EQLSN:NMVRS:AXGXH, AVPKAXX:VPQKL:EPLP-AA¹⁷-VYY:DSSNNVI:EQLSN:NMVRS:AXGXH, KVGKAXX:VPQKL:EPLP-AA¹⁷-VYY:DDMGVPT:EQLSN:EGMSVRS:XGXR, KASKAXX:VPQKL:EPLP-AA¹⁷-VYY:DKGVVTY:EQLSN:GMVRS:EXGXR, GSAGPXX:VPQKM:EPLP-AA¹⁷-VYY:NDKQQII:EQLSN:GMVRS:RXGXS, AAPASXX:VPQRL:EPLP-AA¹⁷-VYY:DAANNVV:EQLSN:DMVRS:AXGXR, STPPTXX:VPQRL:EPLP-AA¹⁷-VYY:DSANNVV:EQLSN:DMVRS:SXGXR, HVPKPXX:VPQKL:EPLP-AA¹⁷-VYY:DDSSNVI:EQLSN:NMVRS:SXGXH, RVPSTXX:VPQKT:EPLP-AA¹⁷-VYY:DNGRVLL:EQLSN:MIVRS:XGXL, ASASPXX:VPQDLEPLP-AA¹⁷-VYY:IGKTPKI:EQLSN:MIVRS:XKXS, ASASPXX:VPQDLEPLP-AA¹⁷-VYY:VGRTPKV:EQLSN:MVVRS:XKXS, KIPKAXX:VPTEL:EPLP-AA¹⁷-VYY:DENEKVV:EQLSN:DMVVE:GXGXR, GIPEPXX:VPEKM:EPLP-AA¹⁷-VYY:DENKNVV:EQLSN:NMTVE:SXAXR, SIPKAXX:VPTEL:EPLP-AA¹⁷-VYY:DEYDKVV:EQLSN:EMVVE:GXGXR, HVTKPTX:APTKL:EPLP-AA¹⁷-VYY:DDSSNVI:EQLSN:NMVVR:SXGXH, YVPKPXX:APTKL:EPLP-AA¹⁷-VYY:DDSSNVI:EQLSN:NMVVR:SXGXH, TVPKPXX:APTQL:EPLP-AA¹⁷-VYY:DDSSNVI:EQLSN:NMVVR:AXGXH, AVPKAXX:APTKL:EPLP-AA¹⁷-VYY:DSSNNVI:EQLSN:NMVVK:AXGXH, KVGKAXX:VPTKL:EPLP-AA¹⁷-VYY:DDMGVPT:EQLSN:EGMSVAE:XGXR, KASKAXX:VPTKL:EPLP-AA¹⁷-VYY:DKGVVTY:EQLSN:GMAVS:EXGXR, GSAGPXX:TPTKM:EPLP-AA¹⁷-VYY:NDKQQII:EQLSN:GMVVD:RXGXS, AAPASXX:VPARL:EPLP-AA¹⁷-VYY:DAANNVV:EQLSN:DMVVE:AXGXR, STPPTXX:VPTRL:EPLP-AA¹⁷-VYY:DSANNVV:EQLSN:DMVVE:SXGXR, HVPKPXX:APTKL:EPLP-AA¹⁷-VYY:DDSSNVI:EQLSN:NMVVR:SXGXH, RVPSTXX:APVKT:EPLP-AA¹⁷-VYY:DNGRVLL:EQLSN:MIVEE:XGXL, ASASPXX:VSQDLEPLP-AA¹⁷-VYY:IGKTPKI:EQLSN:MIVKS:XKXS, ASASPXX:VPQDLEPLP-AA¹⁷-VYY:VGRTPKV:EQLSN:MVVKS:XKXS, NDEGLEX:VPTEE:EPLP-AA¹⁷-VYY:RIKPHQGQH:EQLSN:FLQHN:KXEXR, NDEGLEX:VPTGQ:EPLP-AA¹⁷-VYY:RIKPHQGQH:EQLSN:LEEHS:QXEXR, SSVKXQP:SRVHH:EPLP-AA¹⁷-VYY:EYVRKKPKL:EQLSN:RLEEH:LEXAXA, RNVQXRP:TQVQL:EPLP-AA¹⁷-VYY:EIVRKKPIF:EQLSN:TLEDH:LAXKXE, KIPKAXX:VSQEL:EPLT-AA¹⁷-LYY:DENEKVV:EQLSN:DMVKS:GXGXR, GIPEPXX:VSQKM:EPLT-AA¹⁷-LYY:DENKNVV:EQLSN:NMVKS:SXAXR, SIPKAXX:VSQEL:EPLT-AA¹⁷-LYY:DEYDKVV:EQLSN:EMVKS:GXGXR, HVTKPTX:VSQKL:EPLT-AA¹⁷-LYY:DDSSNVI:EQLSN:NMVKS:SXGXH, YVPKPXX:VSQKL:EPLT-AA¹⁷-LYY:DDSSNVI:EQLSN:NMVKS:SXGXH, TVPKPXX:VSQQL:EPLT-AA¹⁷-LYY:DDSSNVI:EQLSN:NMVKS:AXGXH, AVPKAXX:VSQKL:EPLT-AA¹⁷-LYY:DSSNNVI:EQLSN:NMVKS:AXGXH, KVGKAXX:VSQKL:EPLT-AA¹⁷-LYY:DDMGVPT:EQLSN:EGMSVKS:XGXR, KASKAXX:VSQKL:EPLT-AA¹⁷-LYY:DKGVVTY:EQLSN:GMVKS:EXGXR, GSAGPXX:VSQKM:EPLT-AA¹⁷-LYY:NDKQQII:EQLSN:GMVKS:RXGXS, AAPASXX:VSQRL:EPLT-AA¹⁷-LYY:DAANNVV:EQLSN:DMVKS:AXGXR, STPPTXX:VSQRL:EPLT-AA¹⁷-LYY:DSANNVV:EQLSN:DMVKS:SXGXR, HVPKPXX:VSQKL:EPLT-AA¹⁷-LYY:DDSSNVI:EQLSN:NMVKS:SXGXH, RVPSTXX:VSQKT:EPLT-AA¹⁷-LYY:DNGRVLL:EQLSN:MIVKS:XGXL, ASAAPXX:VSQAL:EPLT-AA¹⁷-LYY:VGRKPKV:EQLSN:MIVKS:XKXS, ASASPXX:VSQDL:EPLT-AA¹⁷-LYY:VGRTPKV:EQLSN:MVVKS:XKXS, KIPKAXX:VPTEL:EPLT-AA¹⁷-LYY:DENEKVV:EQLSN:DMVVE:GXGXR, GIPEPXX:VPEKM:EPLT-AA¹⁷-LYY:DENKNVV:EQLSN:NMTVE:SXAXR, SIPKAXX:VPTEL:EPLT-AA¹⁷-LYY:DEYDKVV:EQLSN:EMVVE:GXGXR, HVTKPTX:APTKL:EPLT-AA¹⁷-LYY:DDSSNVI:EQLSN:NMVVR:SXGXH, YVPKPXX:APTKL:EPLT-AA¹⁷-LYY:DDSSNVI:EQLSN:NMVVR:SXGXH, TVPKPXX:APTQL:EPLT-AA¹⁷-LYY:DDSSNVI:EQLSN:NMVVR:AXGXH, AVPKAXX:APTKL:EPLT-AA¹⁷-LYY:DSSNNVI:EQLSN:NMVVK:AXGXH, KVGKAXX:VPTKL:EPLT-AA¹⁷-LYY:DDMGVPT:EQLSN:EGMSVAE:XGXR, KASKAXX:VPTKL:EPLT-AA¹⁷-LYY:DKGVVTY:EQLSN:GMAVS:EXGXR, GSAGPXX:TPTKM:EPLT-AA¹⁷-LYY:NDKQQII:EQLSN:GMVVD:RXGXS, AAPASXX:VPARL:EPLT-AA¹⁷-LYY:DAANNVV:EQLSN:DMVVE:AXGXR, STPPTXX:VPTRL:EPLT-AA¹⁷-LYY:DSANNVV:EQLSN:DMVVE:SXGXR, HVPKPXX:APTKL:EPLT-AA¹⁷-LYY:DDSSNVI:EQLSN:NMVVR:SXGXH, RVPSTXX:APVKT:EPLT-AA¹⁷-LYY:DNGRVLL:EQLSN:MIVEE:XGXL, ASAAPXX:VPQAL:EPLT-AA¹⁷-LYY:VGRKPKV:EQLSN:MIVRS:XKXS, NDEGLEX:VPTEE:EPLT-AA¹⁷-LYY:RIKPHQGQH:EQLSN:FLQHN:KXEXR, NDEGLEX:VPTGQ:EPLT-AA¹⁷-LYY:RIKPHQGQH:EQLSN:LEEHS:QXEXR, SSVKXQP:SRVHH:EPLT-AA¹⁷-LYY:EYVRKKPKL:EQLSN:RLEEH:LEXAXA, RNVQXRP:TQVQL:EPLT-AA¹⁷-LYY:EIVRKKPIF:EQLSN:TLEDH:LAXKXE, KIPKAXX:VPQEL:EPLT-AA¹⁷-LYY:DENEKVV:EQLSN:DMVKS:GXGXR, GIPEPXX:VPQKM:EPLT-AA¹⁷-LYY:DENKNVV:EQLSN:NMVKS:SXAXR, SIPKAXX:VPQEL:EPLT-AA¹⁷-LYY:DEYDKVV:EQLSN:EMVKS:GXGXR, HVTKPTX:VPQKL:EPLT-AA¹⁷-LYY:DDSSNVI:EQLSN:NMVKS:SXGXH, YVPKPXX:VPQKL:EPLT-AA¹⁷-LYY:DDSSNVI:EQLSN:NMVKS:SXGXH, TVPKPXX:VPQQL:EPLT-AA¹⁷-LYY:DDSSNVI:EQLSN:NMVKS:AXGXH, AVPKAXX:VPQKL:EPLT-AA¹⁷-LYY:DSSNNVI:EQLSN:NMVKS:AXGXH, KVGKAXX:VPQKL:EPLT-AA¹⁷-LYY:DDMGVPT:EQLSN:EGMSVKS:XGXR, KASKAXX:VPQKL:EPLT-AA¹⁷-LYY:DKGVVTY:EQLSN:GMVKS:EXGXR, GSAGPXX:VPQKM:EPLT-AA¹⁷-LYY:NDKQQII:EQLSN:GMVKS:RXGXS, AAPASXX:VPQRL:EPLT-AA¹⁷-LYY:DAANNVV:EQLSN:DMVKS:AXGXR, STPPTXX:VPQRL:EPLT-AA¹⁷-LYY:DSANNVV:EQLSN:DMVKS:SXGXR, HVPKPXX:VPQKL:EPLT-AA¹⁷-LYY:DDSSNVI:EQLSN:NMVKS:SXGXH, RVPSTXX:VPQKT:EPLT-AA¹⁷-LYY:DNGRVLL:EQLSN:MIVKS:XGXL, ASAAPXX:VPQAL:EPLT-AA¹⁷-LYY:VGRKPKV:EQLSN:MIVKS:XKXS, ASASPXX:VPQDL:EPLT-AA¹⁷-LYY:IGKTPKI:EQLSN:MIVKS:XKXS, NDEGLEX:VPTGQ:SNIT-AA¹⁷-QIM:RIKPHQGQH:IGEMS:LEQHN:QXEXR, KIPKAXX:VPTEL:SNIT-AA¹⁷-QIM:DENEKVV:IGEMS:DMVVE:GXGXR, GIPEPXX:VPEKM:SNIT-AA¹⁷-QIM:DENKNVV:IGEMS:NMTVE:SXAXR, SIPKAXX:VPTEL:SNIT-AA¹⁷-QIM:DEYDKVV:IGEMS:EMVVE:GXGXR, HVTKPTX:APTKL:SNIT-AA¹⁷-QIM:DDSSNVI:IGEMS:NMVVR:SXGXH, YVPKPXX:APTKL:SNIT-AA¹⁷-QIM:DDSSNVI:IGEMS:NMVVR:SXGXH, TVPKPXX:APTQL:SNIT-AA¹⁷-QIM:DDSSNVI:IGEMS:NMVVR:AXGXH, AVPKAXX:APTKL:SNIT-AA¹⁷-QIM:DSSNNVI:IGEMS:NMVVK:AXGXH, KVGKAXX:VPTKL:SNIT-AA¹⁷-QIM:DDMGVPT:IGEMS:EGMSVAE:XGXR, KASKAXX:VPTKL:SNIT-AA¹⁷-QIM:DKGVVTY:IGEMS:GMAVS:EXGXR, GSAGPXX:TPTKM:SNIT-AA¹⁷-QIM:NDKQQII:IGEMS:GMVVD:RXGXS, AAPASXX:VPARL:SNIT-AA¹⁷-QIM:DAANNVV:IGEMS:DMVVE:AXGXR, STPPTXX:VPTRL:SNIT-AA¹⁷-QIM:DSANNVV:IGEMS:DMVVE:SXGXR, HVPKPXX:APTKL:SNIT-AA¹⁷-QIM:DDSSNVI:IGEMS:NMVVR:SXGXH, RVPSTXX:APVKT:SNIT-AA¹⁷-QIM:DNGRVLL:IGEMS:MIVEE:XGXL, ASAAPXX:VPQAL:SNIT-AA¹⁷-QIM:VGRKPKV:IGEMS:MIVRS:XKXS, ASASPXX:VSQDL:SNIT-AA¹⁷-QIM:IGKTPKI:IGEMS:MIVKS:XKXS, ASASPXX:VPQDL:SNIT-AA¹⁷-QIM:VGRTPKV:IGEMS:MVVKS:XKXS, NDEGLEX:VPTGQ:SNIT-AA¹⁷-QIM:RIKPHQGQH:IGEMS:LEEHS:QXEXR, SSVKXQP:SRVHH:SNIT-AA¹⁷-QIM:EYVRKKPKL:IGEMS:RLEEH:LEXAXA, RNVQXRP:TQVQL:SNIT-AA¹⁷-QIM:EIVRKKPIF:IGEMS:TLEDH:LAXKXE, NDEGLEX:VPTEE:SNIT-AA¹⁷-QIM: RIKPHQGQH:LGEMS:FLEHS:KXEXR, KIPKAXX:VPTEL:SNIT-AA¹⁷-QIM:DENEKVV:LGEMS:DMVVE:GXGXR, GIPEPXX:VPEKM:SNIT-AA¹⁷-QIM:DENKNVV:LGEMS:NMTVE:SXAXR, SIPKAXX:VPTEL:SNIT-AA¹⁷-QIM:DEYDKVV:LGEMS:EMVVE:GXGXR, HVTKPTX:APTKL:SNIT-AA¹⁷-QIM:DDSSNVI:LGEMS:NMVVR:SXGXH, YVPKPXX:APTKL:SNIT-AA¹⁷-QIM:DDSSNVI:LGEMS:NMVVR:SXGXH, TVPKPXX:APTQL:SNIT-AA¹⁷-QIM:DDSSNVI:LGEMS:NMVVR:AXGXH, AVPKAXX:APTKL:SNIT-AA¹⁷-QIM:DSSNNVI:LGEMS:NMVVK:AXGXH, KVGKAXX:VPTKL:SNIT-AA¹⁷-QIM:DDMGVPTIGEMS:EGMSVAE:XGXR, KASKAXX:VPTKL:SNIT-AA¹⁷-QIM:DKGVVTY:LGEMS:GMAVS:EXGXR, GSAGPXX:TPTKM:SNIT-AA¹⁷-QIM:NDKQQII:LGEMS:GMVVD:RXGXS, AAPASXX:VPARL:SNIT-AA¹⁷-QIM:DAANNVVIGEMS:DMVVE:AXGXR, STPPTXX:VPTRL:SNIT-AA¹⁷-QIM:DSANNVVIGEMS:DMVVE:SXGXR, HVPKPXX:APTKL:SNIT-AA¹⁷-QIM:DDSSNVI:LGEMS:NMVVR:SXGXH, RVPSTXX:APVKT:SNIT-AA¹⁷-QIM:DNGRVLLIGEMS:MIVEE:XGXL, ASAAPXX:VPQAL:SNIT-AA¹⁷-QIM:VGRKPKV:LGEMS:MIVRS:XKXS, ASASPXX:VSQDL:SNIT-AA¹⁷-QIM:IGKTPKI:LGEMS:MIVKS:XKXS, ASASPXX:VPQDL:SNIT-AA¹⁷-QIM:VGRTPKV:LGEMS:MVVKS:XKXS, NDEGLEX:VPTEE:SNIT-AA¹⁷-QIM:RIKPHQGQH:LGEMS:FLQHN:KXEXR, SSVKXQP:SRVHH:SNIT-AA¹⁷-QIM:EYVRKKPKL:LGEMS:RLEEH:LEXAXA, RNVQXRP:TQVQL:SNIT-AA¹⁷-QIM:EIVRKKPIF:LGEMS:TLEDH:LAXKXE, RNVQXRP:SRVQL:RSVK-AA¹⁷-AKV:EIVRKKPIF:KEVQV:TLEEH:LAXKXE, KIPKAXX:VPTEL:RSVK-AA¹⁷-AKV:DENEKVV:KEVQV:DMVVE:GXGXR, GIPEPXX:VPEKM:RSVK-AA¹⁷-AKV:DENKNVV:KEVQV:NMTVE:SXAXR, SIPKAXX:VPTEL:RSVK-AA¹⁷-AKV:DEYDKVV:KEVQV:EMVVE:GXGXR, HVTKPTX:APTKL:RSVK-AA¹⁷-AKV:DDSSNVI:KEVQV:NMVVR:SXGXH, YVPKPXX:APTKL:RSVK-AA¹⁷-AKV:DDSSNVI:KEVQV:NMVVR:SXGXH, TVPKPXX:APTQL:RSVK-AA¹⁷-AKV:DDSSNVI:KEVQV:NMVVR:AXGXH, AVPKAXX:APTKL:RSVK-AA¹⁷-AKV:DSSNNVI:KEVQV:NMVVK:AXGXH, KVGKAXX:VPTKL:RSVK-AA¹⁷-AKV:DDMGVPT:KEVQV:EGMSVAE:XGXR, KASKAXX:VPTKL:RSVK-AA¹⁷-AKV:DKGVVTY:KEVQV:GMAVS:EXGXR, GSAGPXX:TPTKM:RSVK-AA¹⁷-AKV:NDKQQII:KEVQV:GMVVD:RXGXS, AAPASXX:VPARL:RSVK-AA¹⁷-AKV:DAANNVV:KEVQV:DMVVE:AXGXR, STPPTXX:VPTRL:RSVK-AA¹⁷-AKV:DSANNVV:KEVQV:DMVVE:SXGXR, HVPKPXX:APTKL:RSVK-AA¹⁷-AKV:DDSSNVI:KEVQV:NMVVR:SXGXH, RVPSTXX:APVKT:RSVK-AA¹⁷-AKV:DNGRVLL:KEVQV:MIVEE:XGXL, ASAAPXX:VPQAL:RSVK-AA¹⁷-AKV:VGRKPKV:KEVQV:MIVRS:XKXS, ASASPXX:VSQDL:RSVK-AA¹⁷-AKV:IGKTPKI:KEVQV:MIVKS:XKXS, ASASPXX:VPQDL:RSVK-AA¹⁷-AKV:VGRTPKV:KEVQV:MVVKS:XKXS, NDEGLEX:VPTEE:RSVK-AA¹⁷-AKV:RIKPHQGQH:KEVQV:FLQHN:KXEXR, NDEGLEX:VPTGQ:RSVK-AA¹⁷-AKV:RIKPHQGQH:KEVQVIEEHS:QXEXR, RNVQXRP:TQVQL:RSVK-AA¹⁷-AKV:EIVRKKPIF:KEVQV:TLEDH:LAXKXE, SSVKXQP:TQVHH:RPVQ-AA¹⁷-RKI:EYVRKKPKL:KKATV:RLEDH:LEXAXA, KIPKAXX:VPTEL:RPVQ-AA¹⁷-RKI:DEN EKVV:KKATV:DMVVE:GXGXR, GIPEPXX:VPEKM:RPVQ-AA¹⁷-RKI:DENKNVV:KKATV:NMTVE:SXAXR, SIPKAXX:VPTEL:RPVQ-AA¹⁷-RKI:DEYDKVV:KKATV:EMVVE:GXGXR, HVTKPTX:APTKL:RPVQ-AA¹⁷-RKI:DDSSNVI:KKATV:NMVVR:SXGXH, YVPKPXX:APTKL:RPVQ-AA¹⁷-RKI:DDSSNVI:KKATV:NMVVR:SXGXH, TVPKPXX:APTQL:RPVQ-AA¹⁷-RKI:DDSSNVI:KKATV:NMVVR:AXGXH, AVPKAXX:APTKL:RPVQ-AA¹⁷-RKI:DSSNNVI:KKATV:NMVVK:AXGXH, KVGKAXX:VPTKL:RPVQ-AA¹⁷-RKI:DDMGVPT:KKATV:EGMSVAE:XGXR, KASKAXX:VPTKL:RPVQ-AA¹⁷-RKI:DKGVVTY:KKATV:GMAVS:EXGXR, GSAGPXX:TPTKM:RPVQ-AA¹⁷-RKI:NDKQQII:KKATV:GMVVD:RXGXS, AAPASXX:VPARL:RPVQ-AA¹⁷-RKI:DAANNVV:KKATV:DMVVE:AXGXR, STPPTXX:VPTRL:RPVQ-AA¹⁷-RKI:DSANNVV:KKATV:DMVVE:SXGXR, HVPKPXX:APTKL:RPVQ-AA¹⁷-RKI:DDSSNVI:KKATV:NMVVR:SXGXH, RVPSTXX:APVKT:RPVQ-AA¹⁷-RKI:DNGRVLL:KKATV:MIVEE:XGXL, ASAAPXX:VPQAL:RPVQ-AA¹⁷-RKI:VGRKPKV:KKATV:MIVRS:XKXS, ASASPXX:VSQDL:RPVQ-AA¹⁷-RKI:IGKTPKI:KKATV:MIVKS:XKXS, ASASPXX:VPQDL:RPVQ-AA¹⁷-RKI:VGRTPKV:KKATV:MVVKS:XKXS, NDEGLEX:VPTEE:RPVQ-AA¹⁷-RKI:RIKPHQGQH:KKATV:FLQHN:KXEXR, NDEGLEX:VPTGQ:RPVQ-AA¹⁷-RKI:RIKPHQGQH:KKATV:LEEHS:QXEXR and SSVKXQP:SRVHH:RPVQ-AA¹⁷-RKI:EYVRKKPKL:KKATV:RLEEH:LEXAXA; and wherein AA¹⁷ is selected from the group consisting of G, A, V, L, I, P, F, M, W, T and S (in particular is selected from the group consisting of M, I, L, V and T).

[0441] In one most particular example, the RMSD value of the three dimensional (3D) atomic coordinates of said GFR-binding compound as defined herein with respect to PEPREF is 2.45 Å (Angstroms) or less, in particular is 2 Å or less, and more particularly is 1.79 Å or less, and wherein PEPREF is the set of 3D atomic coordinates already defined herein (hereinafter may be referred to as “wherein the RMSD is 2.45 Å or less” for the sake of conciseness).

[0442] In one example, said GFR-binding compound is a synthetic molecule as defined herein in the definition section.

[0443] In one particular example, said GFR-binding compound is a synthetic peptide, or a variant or analog thereof, or a peptidomimetic.

[0444] In one most particular example, said GFR-binding compound is a non-cyclic synthetic peptide.

[0445] In one example, a length of said GFR-binding compound, in solution, such as in a physiologically acceptable solvent such as water or PBS, is comprised between about 6 and about 20 nm, preferably between about 6 and about 16 nm, as determined using the standard «3D» procedure described above.

[0446] In one particular example, said GFR-binding compounds may be any one or a plurality of of peptides of SEQ ID NO: 1 to 38180.

[0447] LINKER Suitable for Implementing Non-Cyclic GFR-Compounds' Embodiments

[0448] In one particular example, said LINKER has a Mw comprised between about 28 and about 2,000 Da. In one particular example, said LINKER has a Mw comprised between about 75 and about 2,000 Da. In one particular example, said LINKER has a Mw comprised between about 150 and about 2,000 Da. In one particular example, said LINKER has a Mw comprised between about 150 and about 1,500 Da. In one most particular example, said LINKER has a Mw comprised between about 300 and about 1,000 Da.

[0449] The chemical nature of said LINKER is not meant to be particularly limited and may be any organic molecule capable of covalently connecting two peptide fragments such as PEP(A) and PEP(B) or PEP(C)-PEP12 and PEP2-PEP(D) so long as LINKER provides sufficient spacing between the two elements connected therethrough for these two connected elements to provide or conserve the required recoding activity. LINKER may thus be a peptide, or variant, analog or peptidomimetic thereof, a polysaccharide, a polynucleotide, a saturated or unsaturated hydrocarbon chain, or a mixture thereof.

[0450] For example, in certain embodiments, LINKER is a peptide with 2 to 16 amino acids. In one particular example, LINKER is a peptide with 2 to 10 amino acids. In one particular example, LINKER is a peptide with 2 to 9 amino acids. In one most particular example, LINKER is a peptide with 5 to 9 amino acids.

[0451] Thus, in one particular example, said GFR-binding compound is a peptide, a variant or analog thereof as defined herein, with between 20 and 60 (in particular between 20 and 50, and more particularly, between 20 and 45) amino acids, of general formula (Ia); wherein one end of LINKER interacts covalently with one end of PEP(A); wherein another end of LINKER interacts covalently with one end of PEP(B); wherein PEP(A) comprises PEP1 or PEP12; wherein PEP(B) comprises PEP2; wherein LINKER is a peptide comprising 2 to 16 amino acids (in particular 2 to 10, 2 to 9, or 5 to 9 amino acids); and, optionally, wherein the RMSD is 2.45 Å or less.

[0452] Thus, in one particular example, said GFR-binding compound is a peptide, a variant or analog thereof as defined herein, with between 25 and 60 (in particular between 25 and 50, and more particularly, between 25 and 45) amino acids, of general formula (IIa); wherein LINKER is a peptide comprising 2 to 16 amino acids (in particular 2 to 10, 2 to 9, or 5 to 9 amino acids); wherein PEP12 is a peptide with 8 amino acids of formula PEP1-AA¹⁷-PEP11 as already defined herein; wherein PEP1, PEP2, PEP11, PEP(C) and PEP(D) are as already defined herein; wherein AA¹³ and AA²¹ may be both N-terminal amino acids or both C-terminal amino acids; wherein AA²⁵ and AA²⁰ may be both N-terminal amino acids or both C-terminal amino acids; wherein one end of LINKER interacts covalently with one end of PEP12 via AA²⁰; wherein another end of LINKER interacts covalently with PEP2 via AA²¹; wherein one end of PEP(C) interacts covalently with PEP12 via AA¹³; wherein one end of PEP(D) interacts covalently with PEP2 via AA²⁵; and, optionally, wherein the RMSD is 2.45 Å or less.

[0453] In certain embodiments, said GFR-binding compound is a peptidomimetic as defined herein, comprising (consecutively or non-consecutively) between 25 and 60 (in particular between 25 and 50, and more particularly, between 25 and 45) amino acids, of general formula (IIa); wherein LINKER is not a peptide but may comprise amino acids or peptides in covalent or non-covalent (preferably covalent) association with other groups or residues other than amino acids or peptides.

[0454] In one particular example, LINKER comprises (or is) a peptide of general formula (XXXV):

*AA²⁰¹-AA²⁰²-AA²⁰³-AA²⁰⁴-AA²⁰⁵-AA²⁰⁶-AA²⁰⁷-AA²⁰⁸-AA²⁰⁹**(XXXV)

wherein said peptide of formula (XXXV) may be selected from the group consisting of *AA^{III}-AA^{I}-AA^{I}-AA^{II}-AA^{VII}-AA^{XII}-AA^{XII}-AA^{XIII}-AA^{XIII}**, *AA^{III}-AA^{I}-AA^{VI}-AA^{II}-AA^{VII}-AA^{XII}-AA^{XII}-AA^{XIII}-AA^{XIII}**, *AA^{III}-AA^{I}-AA^{I}-AA^{II}-AA^{II}-AA^{XII}-AA^{XII}-AA^{XIII}-AA^{XIII}**, *AA^{III}-AA_{I}-AA^{II}-AA^{II}-AA^{VII}-AA^{XII}-AA^{XII}-AA^{XIII}-AA^{XIII}**, *AA^{III}-AA^{I}-AA^{II}-AA^{IV}-AA^{IV}-AA^{XII}-AA^{XII}-AA^{XIII}-AAx^{XIII}**, *AA^{II}-AA^{I}-AA^{II}-AA^{II}-AA^{II}-AA^{XII}-AA^{XII}-AA^{XIII}-AA^{XIII}**, *AA^{III}-AA^{III}-AA^{II}-AA^{VII}-AA^{II}-AA^{XII}-AA^{XII} AA^{XIII}-AA^{XIII}**, *AA^{III}-AA^{I}-AA^{I}-AA^{II}-AA^{II}-AA^{XII}-AA^{XII}-AA^{XIII}-AA^{XIII}**, *AA^{V}-AA^{V}-AA^{VII}-AA^{VII}-AA^{XII}-AA^{XII}-AA^{XIII} AA^{XIII}**, *AA^{VIII}-AA^{V}-AA^{VII}-AA^{II}-AA^{XII}-AA^{XII}-AA^{XIII}-AA^{XIII}** and *AA^{V}-AA^{V}-AA^{VII}-AA^{II}-AA^{XII}-AA^{XII}-AA^{XIII}-AA^{XIII}**; wherein AA^{I} is any amino acid as defined herein, AA^{II} is any polar amino acid as defined herein, AA^{III} is any acidic amino acid as defined herein, AA^{IV} is any aliphatic amino acid as defined herein, AA^{V} is any apolar amino acid as defined herein, AA^{VI} is any aromatic amino acid as defined herein, AA^{VII} is any basic amino acid as defined herein, AA^{VIII} is L or I as defined herein, AA^{XII} is an amino acid selected from the group consisting of G, A, V, L, I, P, M, K, R, H, Y and E, wherein AA^{XIII} is absent, AA^{II} or AA^{VII}, preferably absent; and wherein any one of the fragment AA²⁰¹, AA²⁰¹-AA²⁰², AA²⁰¹-AA²⁰²-AA²⁰³, AA²⁰¹-AA²⁰²-AA²⁰³-AA²⁰⁴, AA²⁰¹-AA²⁰²-AA²⁰³-AA²⁰⁴-AA²⁰⁵, AA²⁰¹-AA²⁰²-AA²⁰³-AA²⁰⁴-AA²⁰⁵-AA²⁰⁶, AA²⁰¹-AA²⁰²-AA²⁰³-AA²⁰⁴-AA²⁰⁵-AA²⁰⁶-AA²⁰⁷, AA²⁰³-AA²⁰⁴-AA²⁰⁵-AA²⁰⁶-AA²⁰⁷-AA²⁰⁸-AA²⁰⁹, AA²⁰⁴-AA²⁰⁵-AA²⁰⁶-AA²⁰⁷-AA²⁰⁸-AA²⁰⁹, AA²⁰⁵-AA²⁰⁶-AA²⁰⁷-AA²⁰⁸-AA²⁰⁹, AA²⁰⁶-AA²⁰⁷-AA²⁰⁸-AA²⁰⁹, AA²⁰⁷-AA²⁰⁸-AA²⁰⁹, AA²⁰⁸-AA²⁰⁹ or AA²⁰⁹, may be absent. In the peptides of formula (XXXV), any one of the amino acid labelled “*” or the amino acid labelled “**” is an N-terminal amino acid and the other is a C-terminal amino acid.

[0455] For instance, in the peptide of formula *AA^{III}-AA^{I}-AA^{I}-AA^{II}-AA^{VII}-AA^{XII}-AA^{XII}-AA^{XIII}-AA^{XIII}** (XXXV-1), AA^{III} occupies position AA²⁰¹, *AA^{I} occupies position AA²⁰², AA^{I} occupies position AA²⁰³, AA^{II} occupies position AA²⁰⁴, AA^{VII} occupies position AA²⁰⁵, AA^{XII} occupies position AA²⁰⁶, AA^{XII} occupies position AA²⁰⁷, AA^{XIII} occupies position AA²⁰⁸ and AA^{XIII}** occupies position AA²⁰⁹.

[0456] Likewise, in the peptide of formula *AA^{V}-AA^{V}-AA^{VII}-AA^{II}-AA^{XII}-AA^{XII}-AA^{XIII}-AA^{XIII}** (XXXV-1) AA^{V} occupies position AA²⁰¹, AA^{V} occupies position AA²⁰², AA^{VII} occupies position AA²⁰³, AA^{II} occupies position AA²⁰⁴, AA^{XII} occupies position AA²⁰⁵, AA^{XII} occupies position AA²⁰⁸, AA^{XIII} occupies position AA²⁰⁷, AA^{XIII} occupies position AA²⁰⁸ and position AA²⁰⁹ is vacant, thus AA²⁰⁸ would be the amino acid which interacts, in certain embodiments, with PEP2 via AA²¹.

[0457] In one example, LINKER may thus be any one of the following peptides:

[0458] *AA²⁰¹-AA²⁰²-AA²⁰³-AA²⁰⁴-AA²⁰⁵-AA²⁰⁶-AA²⁰⁷-AA²⁰⁸** (XXXV-1); *AA²⁰¹-AA²⁰²-AA²⁰³-AA²⁰⁴-AA²⁰⁵-AA²⁰⁶-AA²⁰⁷** (XXXV-2); *AA²⁰¹-AA²⁰²-AA²⁰³-AA²⁰⁴-AA²⁰⁵-AA²⁰⁶** (XXXV-3); *AA²⁰¹-AA²⁰²-AA²⁰³-AA²⁰⁴-AA²⁰⁵** (XXXV-4); *AA²⁰¹-AA²⁰²-AA²⁰³-AA²⁰⁴** (XXXV-5); *AA²⁰¹-AA²⁰²-AA²⁰³** (XXXV-6); *AA²⁰¹-AA²⁰²** (XXXV-7); *AA²⁰²-AA²⁰³-AA²⁰⁴-AA²⁰⁵-AA²⁰⁶-AA²⁰⁷-AA²⁰⁸-AA²⁰⁹** (XXXV-8); *AA²⁰³-AA²⁰⁴-AA²⁰⁵-AA²⁰⁶-AA²⁰⁷-AA²⁰⁸-AA²⁰⁹** (XXXV-9); *AA²⁰⁴-AA²⁰⁵-AA²⁰⁶-AA²⁰⁷-AA²⁰⁸-AA²⁰⁹** (XXXV-10); *AA²⁰⁵-AA²⁰⁶-AA²⁰⁷-AA²⁰⁸-AA²⁰⁹** (XXXV-11); *AA²⁰⁶-AA²⁰⁷-AA²⁰⁸-AA²⁰⁹** (XXXV-12); *AA²⁰⁷-AA²⁰⁸-AA²⁰⁹** (XXXV-13); *AA²⁰⁸-AA²⁰⁹** (XXXV-14); wherein, for instance, said peptide of formulae (XXXV-1) may thus be selected from the group consisting of *AA^{III}-AA^{I}-AA^{I}-AA^{II}-AA^{VII}-AA^{XII}-AA^{XII}-AA^{XIII}-AA^{XIII}**, *AA^{III}-AA^{I}-AA^{VI}-AA^{II}-AA^{VII}-AA^{XII}-AA^{XII}-AA^{XIII}-AA^{XIII}**, *AA^{III}-AA^{I}-AA^{I}-AA^{II}-AA^{II}-AA^{XII}-AA^{XII}-AA^{XIII}**, *AA^{III}-AA_{I}-AA^{II}-AA^{II}-AA^{VII}-AA^{XII}-AA^{XII}-AA^{XIII}-**, *AA^{III}-AA^{I}-AA^{II}-AA^{IV}-AA^{IV}-AA^{XII}-AA^{XII}-AA^{XIII}-**, *AA^{II}-AA^{I}-AA^{II}-AA^{II}-AA^{II}-AA^{XII}-AA^{XII}-AA^{XIII}**, *AA^{III}-AA^{III}-AA^{II}-AA^{VII}-AA^{II}-AA^{XII}-AA^{XII}-AA^{XIII}-**, *AA^{III}-AA^{I}-AA^{I}-AA^{II}-AA^{II}-AA^{XII}-AA^{XII}-AA^{XIII}**, *AA^{V}-AA^{V}-AA^{VII}-AA^{VII}-AA^{XII}-AA^{XII}-AA^{XIII}**, *AA^{VIII}-AA^{V}-AA^{VII}-AA^{II}-AA^{XII}-AA^{XII}-AA^{XIII}** and *AA^{V}-AA^{V}-AA^{VII}-AA^{II}-AA^{XII}-AA^{XII}-AA^{XIII}**.

[0459] In one particular example, LINKER comprises a peptide of formula (XXXV), (XXXV-2) or (XXXV-4).

[0460] In one example, LINKER comprises (or is) a poly-(aliphatic amino acid) peptide such as poly-alanine peptide (A)ₙ, or a poly-glycine (G)ₙ, n being an integer comprised between 2 and 16, preferably between 2 to 9, such as A-A-A-A-A-A-A-A-A, A-A-A-A-A-A-A, A-A-A-A-A, G-G-G-G-G-G-G-G-G, G-G-G-G-G-G-G or G-G-G-G-G.

[0461] In one particular example, LINKER comprises (or is) a peptide of general formulae (XXXV) to (XXXV-14), more particularly (XXXV), (XXXV-2) or (XXXV-4), or a poly-(aliphatic amino acid)ₙ peptide as defined herein.

[0462] For example, in certain embodiments, LINKER is a polysaccharide comprising 2 to 16 saccharides. In one particular example, LINKER is a polysaccharide comprising 2 to 10 saccharides. In one particular example, LINKER is a polysaccharide comprising 2 to 9 saccharides. In one most particular example, LINKER is a polysaccharide comprising 5 to 9 saccharides. Suitable monosaccharides include, but are not limited to, glucose (dextrose), fructose (levulose) and galactose. Monosaccharides are the building blocks of disaccharides (such as sucrose) and polysaccharides (such as celluloses, chitosans, ulvanes and starches). Further, each carbon atom that supports a hydroxyl group (except for the first and last) is chiral, giving rise to a number of isomeric forms all with the same chemical formula. A large number of biologically important modified monosaccharides exists e.g. amino sugars such as Galactosamine, Glucosamine, Sialic acid, N-Acetylglucosamine, and sulfosugars such as Sulfoquinovose. All of these monosaccharide and polysaccharide derivatives may be used as LINKER in the present invention.

[0463] Thus, in one particular example, said GFR-binding compound is a hydride peptide/polysaccharide peptidomimetic of between 2,000 and 8,000 Da and of general formula (Ia) defined herein; wherein one end of LINKER interacts covalently with one end of PEP(A); wherein another end of LINKER interacts covalently with one end of PEP(B); wherein PEP(A) comprises PEP1 or PEP12; wherein PEP(B) comprises PEP2; wherein LINKER is a polysaccharide comprising 2 to 16 saccharides (in particular 2 to 10, 2 to 9, or 5 to 9 saccharides); and, optionally, wherein the RMSD is 2.45 Å or less.

[0464] Thus, in one particular example, said GFR-binding compound is a hydride peptide/polysaccharide peptidomimetic of between 2,000 and 8,000 Da and of general formula (IIa); wherein LINKER is a polysaccharide comprising 2 to 16 saccharides (in particular 2 to 10, 2 to 9, or 5 to 9 saccharides); wherein PEP12 is a peptide with 8 amino acids of formula PEP1-AA¹⁷-PEP11 as already defined herein; wherein PEP1, PEP2, PEP11, PEP(C) and PEP(D) are as already defined herein; wherein AA¹³ and AA²¹ may be both N-terminal amino acids or both C-terminal amino acids; wherein AA²⁵ and AA²⁰ may be both N-terminal amino acids or both C-terminal amino acids; wherein one end of LINKER interacts covalently with one end of PEP12 via AA²⁰; wherein another end of LINKER interacts covalently with PEP2 via AA²¹; wherein one end of PEP(C) interacts covalently with PEP12 via AA¹³; wherein one end of PEP(D) interacts covalently with PEP2 via AA²⁵; and, optionally, wherein the RMSD is 2.45 Å or less.

[0465] For example, in certain embodiments, LINKER is a polynucleotide comprising 2 to 16 nucleotides. In one particular example, LINKER is a polynucleotide comprising 2 to 10 nucleotides. In one particular example, LINKER is a polynucleotide comprising 2 to 9 nucleotides. In one most particular example, LINKER is a polynucleotide comprising 5 to 9 nucleotides. Suitable nucleotides include adenine (A), guanine (G), thymine (T), cytosine (C), uracil (U) and derivatives, analogues and/or mimetic thereof.

[0466] Thus, in one particular example, said GFR-binding compound is a hydride peptide/polynucleotide peptidomimetic of between 2,000 and 8,000 Da and of general formula (Ia) defined herein; wherein one end of LINKER interacts covalently with one end of PEP(A); wherein another end of LINKER interacts covalently with one end of PEP(B); wherein PEP(A) comprises PEP1 or PEP12; wherein PEP(B) comprises PEP2; wherein LINKER is a polynucleotide comprising 2 to 16 nucleotides (in particular 2 to 10, 2 to 9, or 5 to 9 nucleotides); and, optionally, wherein the RMSD is 2.45 Å or less.

[0467] Thus, in one particular example, said GFR-binding compound is a hydride peptide/polynucleotide peptidomimetic of between 2,000 and 8,000 Da and of general formula (IIa); wherein LINKER is a polynucleotide comprising 2 to 16 nucleotides (in particular 2 to 10, 2 to 9, or 5 to 9 nucleotides); wherein PEP12 is a peptide with 8 amino acids of formula PEP1-AA¹⁷-PEP11 as already defined herein; wherein PEP1, PEP2, PEP11, PEP(C) and PEP(D) are as already defined herein; wherein AA¹³ and AA²¹ may be both N-terminal amino acids or both C-terminal amino acids; wherein AA²⁵ and AA²⁰ may be both N-terminal amino acids or both C-terminal amino acids; wherein one end of LINKER interacts covalently with one end of PEP12 via AA²⁰; wherein another end of LINKER interacts covalently with PEP2 via AA²¹; wherein one end of PEP(C) interacts covalently with PEP12 via AA¹³; wherein one end of PEP(D) interacts covalently with PEP2 via AA²⁵; and, optionally, wherein the RMSD is 2.45 Å or less.

[0468] For example, in certain embodiments, LINKER is a saturated or unsaturated hydrocarbon chain comprising between 1 and 22, between 1 and 16, between 1 and 12, between 1 and 8 or between 1 and 6 carbon atoms, wherein said hydrocarbon chain is optionally interrupted by one or more non-carbon atom, preferably between 1 and 16, between 1 and 12 or between 1 and 8 non-carbon atoms as appropriate, wherein said non-carbon atom is selected from the group consisting of —O—, —S—, —C(═O), —SO₂—, —N(Ri)(C═O)—, and —N(Ri)-, wherein Ri is selected from the group consisting of a hydrogen atom, a C1-C6 alkyl group and an aryl group, and wherein said hydrocarbon chain is non-substituted or substituted by at least one radical selected from the group consisting of a halogen, a monosaccharide, a poly(1-6)saccharide, a nucleotide, a poly(1-6)nucleotide, a C1-C10 alkyl group and an aryl group.

[0469] Thus, in one particular example, said GFR-binding compound is a hydride peptide/hydrocarbon chain peptidomimetic of between 2,000 and 8,000 Da and of general formula (Ia) defined herein; wherein one end of LINKER interacts covalently with one end of PEP(A); wherein another end of LINKER interacts covalently with one end of PEP(B); wherein PEP(A) comprises PEP1 or PEP12; wherein PEP(B) comprises PEP2; wherein LINKER is a saturated or unsaturated hydrocarbon chain comprising between 1 and 22 as defined herein; and, optionally, wherein the RMSD is 2.45 Å or less.

[0470] Thus, in one particular example, said GFR-binding compound is a hydride peptide/hydrocarbon chain peptidomimetic of between 2,000 and 8,000 Da and of general formula (IIa); wherein LINKER is a saturated or unsaturated hydrocarbon chain comprising between 1 and 22 as defined herein; wherein PEP12 is a peptide with 8 amino acids of formula PEP1-AA¹⁷-PEP11 as already defined herein; wherein PEP1, PEP2, PEP11, PEP(C) and PEP(D) are as already defined herein; wherein AA¹³ and AA²¹ may be both N-terminal amino acids or both C-terminal amino acids; wherein AA²⁵ and AA²⁰ may be both N-terminal amino acids or both C-terminal amino acids; wherein one end of LINKER interacts covalently with one end of PEP12 via AA²⁰; wherein another end of LINKER interacts covalently with PEP2 via AA²¹; wherein one end of PEP(C) interacts covalently with PEP12 via AA¹³; wherein one end of PEP(D) interacts covalently with PEP2 via AA²⁵; and, optionally, wherein the RMSD is 2.45 Å or less.

[0471] In one example, LINKER is a saturated or unsaturated hydrocarbon chain of at most 10 nanometres (nm) in length, preferably at most 8 nm, 6 nm, 4 nm or 2 nm as determined using the standard «2D» procedure described above.

[0472] In one example, such saturated or unsaturated hydrocarbon chains include polyethylene glycol (PEG) or any one of its derivatives.

[0473] More particularly, LINKER is a pentapeptide (five amino acids). More particularly, LINKER is a hexapeptide (six amino acids). More particularly, LINKER is a heptapeptide (seven amino acids). More particularly, LINKER is an octapeptide (eight amino acids). More particularly, LINKER is a nonapeptide (nine amino acids).

[0474] In one particular example, LINKER is a peptide selected from the group consisting of DENEKVV, DENKNVV, DEYDKVV, DDSSNVI, DSSNNVI, DDMGVPT, DKGVVTY, NDKQQII, DAANNVV, DSANNVV, DDSSNVI, DNGRVLL, VGRKPKV, IGKTPKI, VGRTPKV, RIKPHQGQH, EYVRKKPKL, EIVRKKPIF, EYVRKKP, EIVRKKP, polyalanine (A₁₋₉) and polyglycine (G₁₋₉).

[0475] For example, in certain embodiments, the covalent interaction between an end (i.e. one end or the other end) of LINKER or PEP(A) or PEP12 and an N-terminal amino acid, such as AA¹³ or AA²¹, may be created through the chemical reaction between the free amine moiety of the N-terminal amino acid (—NH₂ or —NH₃X, X generally being a halide anion selected from the group consisting of F⁻, Cl⁻ and Br⁻), typically acting as a nucleophile, and an electrophile moiety of LINKER. Such an electrophile moiety includes, but is not limited to, alkyl halides (—CR₂—X), alcohols (—CR₂—OH), acid chlorides (—C(═O)X), esters, (—C(═O)OR), phosphate (—OP(OR)₃), phosphinate (—OP(OR)R₂), phosphonates (—OP(OR)₂R), phosphonite (—P(OR)₂R) or sulfonic esters (—SO₂OR). More particularly, this covalent interaction is an amide bond (in particular a peptide bond) formed through conventional peptide synthesis using conventional coupling reagents as already defined herein.

[0476] For example, in certain embodiments, the covalent interaction between an end (i.e. one end or the other end) of LINKER or PEP(B) or PEP2 and a C-terminal amino acid such as AA²⁵ or AA²⁰, may be created through the chemical reaction between the free carboxylic acid moiety of the C-terminal amino acid (—CO₂H or —CO₂X, X generally being an inorganic cation such as alkaline cations (e.g. Li⁺, Na⁺or K⁺) or an organic cation such as ammonium cations, typically acting as an electrophile, and a nucleophile moiety of LINKER. Such a nucleophile moiety includes, but is not limited to, alcohols (—OH), amines (—NH₂), phosphines (—PR₃), thiols (—SH). More particularly, this covalent interaction is a peptide bond formed through conventional peptide synthesis using conventional coupling reagents as already defined herein.

[0477] II.2. Cyclic GFR-Binding Compounds

[0478] In one example, said cyclic GFR-binding compound has a molecular weight of less than 5,000 Daltons. In one particular example, said cyclic GFR-binding compound has a molecular weight of less than 4,000 Daltons. In one particular example, said cyclic GFR-binding compound has a molecular weight comprised between 1,500 and 5,000 Daltons. In one particular example, said cyclic GFR-binding compound has a molecular weight comprised between 1,500 and 4,000 Daltons.

[0479] In one example, said cyclic GFR-binding compound has a molecular weight of less than 7,000 Daltons. In one example, said cyclic GFR-binding compound has a molecular weight of less than 6,000 Daltons. In one example, said cyclic GFR-binding compound has a molecular weight of less than 5,000 Daltons. In one particular example, said cyclic GFR-binding compound has a molecular weight comprised between 1,500 and 7,000 Daltons. In one particular example, said cyclic GFR-binding compound has a molecular weight comprised between 1,500 and 6,000 Daltons. In one particular example, said cyclic GFR-binding compound has a molecular weight comprised between 2,000 and 7,000 Daltons. In one particular example, said cyclic GFR-binding compound has a molecular weight comprised between 3,000 and 7,000 Daltons. In one particular example, said cyclic GFR-binding compound has a molecular weight comprised between 4,000 and 7,000 Daltons. In one particular example, said cyclic GFR-binding compound has a molecular weight comprised between 2,000 and 6,000 Daltons. In one particular example, said cyclic GFR-binding compound has a molecular weight comprised between 3,000 and 6,000 Daltons. In one particular example, said cyclic GFR-binding compound has a molecular weight comprised between 4,000 and 6,000 Daltons.

[0480] In one particular example, the growth factor receptor involved in the interaction with said cyclic GFR-binding compound is an epidermal growth factor receptor. In one particular example, the growth factor receptor involved in the interaction with said cyclic GFR-binding compound is a fibroblast growth factor receptor. In one particular example, the growth factor receptor involved in the interaction with said cyclic GFR-binding compound is a vascular endothelial growth factor receptor. In one particular example, the growth factor receptor involved in the interaction with said cyclic GFR-binding compound is a nerve growth factor receptor. In one particular example, the growth factor receptor involved in the interaction with said cyclic GFR-binding compound is a hepatocyte growth factor receptor. In one particular example, the growth factor receptor involved in the interaction with said cyclic GFR-binding compound is a somatomedin or insulin-like growth factor receptor. In one particular example, the growth factor receptor involved in the interaction with said cyclic GFR-binding compound is a platelet-derived growth factor receptor. In one particular example, the growth factor receptor involved in the interaction with said cyclic GFR-binding compound is a protein from the transforming growth factor beta (TGF-β) superfamily.

[0481] In one particular example, the growth factor receptor(s) involved in the interaction with said cyclic GFR-binding compound is (are) preferably selected from epidermal growth factor receptors, fibroblast growth factor receptors, vascular endothelial growth factor receptors, nerve growth factor receptors, hepatocyte growth factor receptors, somatomedin or insulin-like growth factor receptors, platelet-derived growth factor receptors, and transforming growth factor beta (TGF-β) superfamily proteins.

[0482] In one particular example, said cyclic GFR-binding compound is a peptide, or a variant or analog thereof, having growth factor receptor-binding capability or capabilities, with (exclusively consisting of, or constituted of) between 15-60 amino acids, in particular between 15-55 amino acids, more particularly between 19-60 amino acids, and even more particularly between 19-55 amino acids, or between 15-35 amino acids, in particular between 15-30 amino acids, more particularly between 19-35 amino acids, and even more particularly between 19-30 amino acids.

[0483] In one particular example, said cyclic GFR-binding compound is a cyclic peptidomimetic as defined herein, having growth factor receptor-binding capability or capabilities, comprising (consecutively or non consecutively) between 15-60 amino acids, in particular between 15-55 amino acids, more particularly between 19-60 amino acids, and even more particularly between 19-55 amino acids, or between 15-60 amino acids, in particular between 15-55 amino acids, more particularly between 19-60 amino acids, and even more particularly between 19-55 amino acids, or between 15-35 amino acids, in particular between 15-30 amino acids, more particularly between 19-35 amino acids, and even more particularly between 19-30 amino acids; wherein said cyclic GFR-binding compound has a molecular weight comprised between 1,500 and 7,000 Daltons.

[0484] In one particular example, said cyclic GFR-binding compound is a cyclic peptidomimetic as defined herein, having growth factor receptor-binding capability or capabilities, comprising (consecutively or non consecutively) between 15-60 amino acids, in particular between 15-55 amino acids, more particularly between 19-60 amino acids, and even more particularly between 19-55 amino acids, or between 15-35 amino acids, in particular between 15-30 amino acids, more particularly between 19-35 amino acids, and even more particularly between 19-30 amino acids; and containing at least one peptide portion or fragment with between 5-20 amino acids (in particular containing two peptide portions or fragments, each of which with between 5-20 amino acids); wherein said cyclic GFR-binding compound has a molecular weight comprised between 1,500 and 7,000 Daltons.

[0485] In one aspect, the present disclosure provides a cyclic GFR-binding compound, wherein said cyclic GFR-binding compound is a cyclic peptide, a variant or analog thereof, or a cyclic peptidomimetic as defined herein, having growth factor receptor-binding capability or capabilities, having a molecular weight of less than 5,000 Da, in particular of between 1,500 and 7,000 Da.

[0486] In one aspect, the present disclosure provides a cyclic GFR-binding compound, wherein said cyclic GFR-binding compound is a cyclic peptide, a variant or analog thereof, or a cyclic peptidomimetic as defined herein, having growth factor receptor-binding capability or capabilities, with between 15-60 (in particular between 15-55, more particularly between 19-60, and even more particularly between 19-55) amino acids, or between 15-35 (in particular between 15-30, more particularly between 19-35, and even more particularly between 19-30) amino acids, comprising a peptide with four amino acids (PEP1) and a peptide with five amino acids (PEP2).

[0487] In one aspect, the present disclosure provides a cyclic GFR-binding compound, wherein said cyclic GFR-binding compound is a cyclic peptide, a variant or analog thereof, or a cyclic peptidomimetic as defined herein, with between 15-60 (in particular between 15-55, more particularly between 19-60, and even more particularly between 19-55) amino acids, or between 15-35 (in particular between 15-30, more particularly between 19-35, and even more particularly between 19-30) amino acids, comprising a peptide with eight amino acids (PEP12) and a peptide with five amino acids (PEP2).

[0488] In one aspect, the present disclosure provides a cyclic GFR-binding compound, wherein said cyclic GFR-binding compound is a cyclic peptide, a variant or analog thereof, or a cyclic peptidomimetic as defined herein, with between 15-60 (in particular between 15-55, more particularly between 19-60, and even more particularly between 19-55) amino acids, or between 15-35 (in particular between 15-30, more particularly between 19-35, and even more particularly between 19-30) amino acids, comprising a peptide with four amino acids (PEP1) and a peptide with five amino acids (PEP2); wherein said cyclic GFR-binding compound further comprises a peptide with three amino acids (PEP3) and a peptide with three amino acids (PEP4).

[0489] In one aspect, the present disclosure provides a cyclic GFR-binding compound, wherein said cyclic GFR-binding compound is a cyclic peptide, a variant or analog thereof, or a cyclic peptidomimetic as defined herein, with between 15-60 (in particular between 15-55, more particularly between 19-60, and even more particularly between 19-55) amino acids, or between 15-35 (in particular between 15-30, more particularly between 19-35, and even more particularly between 19-30) amino acids, comprising a peptide with eight amino acids (PEP12) and a peptide with five amino acids (PEP2); wherein said cyclic GFR-binding compound further comprises a peptide with three amino acids (PEP3) and a peptide with three amino acids (PEP4).

[0490] In one aspect, the present disclosure provides a cyclic GFR-binding compound, wherein said cyclic GFR-binding compound is a cyclic peptide, a variant or analog thereof, or a cyclic peptidomimetic as defined herein, with between 15-60 (in particular between 15-55, more particularly between 19-60, and even more particularly between 19-55) amino acids, or between 15-35 (in particular between 15-30, more particularly between 19-35, and even more particularly between 19-30) amino acids, comprising a peptide with four amino acids (PEP1) and a peptide with five amino acids (PEP2); wherein said cyclic GFR-binding compound further comprises a peptide with five amino acids (PEP5) and a peptide with between five and seven amino acids (PEP6).

[0491] In one aspect, the present disclosure provides a cyclic GFR-binding compound, wherein said cyclic GFR-binding compound is a cyclic peptide, a variant or analog thereof, or a cyclic peptidomimetic as defined herein, with between 15-60 (in particular between 15-55, more particularly between 19-60, and even more particularly between 19-55) amino acids, or between 15-35 (in particular between 15-30, more particularly between 19-35, and even more particularly between 19-30) amino acids, comprising a peptide with eight amino acids (PEP12) and a peptide with five amino acids (PEP2); wherein said cyclic GFR-binding compound further comprises a peptide with five amino acids (PEP5) and a peptide with between five and seven amino acids (PEP6).

[0492] In one aspect, the present disclosure provides a cyclic GFR-binding compound, wherein said cyclic GFR-binding compound is a cyclic peptide, a variant or analog thereof, or a cyclic peptidomimetic as defined herein, with between 15-60 (in particular between 15-55, more particularly between 19-60, and even more particularly between 19-55) amino acids, or between 15-35 (in particular between 15-30, more particularly between 19-35, and even more particularly between 19-30) amino acids, comprising a peptide with four amino acids (PEP1) and a peptide with five amino acids (PEP2); wherein said cyclic GFR-binding compound further comprises a peptide with between six and twelve amino acids (PEP9) and a peptide with between six and eleven amino acids (PEP10).

[0493] In one aspect, the present disclosure provides a cyclic GFR-binding compound, wherein said cyclic GFR-binding compound is a cyclic peptide, a variant or analog thereof, or a cyclic peptidomimetic as defined herein, with between 15-60 (in particular between 15-55, more particularly between 19-60, and even more particularly between 19-55) amino acids, or between 15-35 (in particular between 15-30, more particularly between 19-35, and even more particularly between 19-30) amino acids, comprising a peptide with eight amino acids (PEP12) and a peptide with five amino acids (PEP2); wherein said cyclic GFR-binding compound further comprises a peptide with between six and twelve amino acids (PEP9) and a peptide with between six and eleven amino acids (PEP10).

[0494] In one aspect, the present disclosure provides a cyclic GFR-binding compound, wherein said cyclic GFR-binding compound is a cyclic peptide, a variant or analog thereof, or a cyclic peptidomimetic as defined herein, with between 15-60 (in particular between 15-55, more particularly between 19-60, and even more particularly between 19-55) amino acids, or between 15-35 (in particular between 15-30, more particularly between 19-35, and even more particularly between 19-30) amino acids, comprising a peptide with four amino acids (PEP1) and a peptide with five amino acids (PEP2); wherein said cyclic GFR-binding compound further comprises a peptide with three amino acids (PEP3) and a peptide with between five and seven amino acids (PEP6).

[0495] In one aspect, the present disclosure provides a cyclic GFR-binding compound, wherein said cyclic GFR-binding compound is a cyclic peptide, a variant or analog thereof, or a cyclic peptidomimetic as defined herein, with between 15-60 (in particular between 15-55, more particularly between 19-60, and even more particularly between 19-55) amino acids, or between 15-35 (in particular between 15-30, more particularly between 19-35, and even more particularly between 19-30) amino acids, comprising a peptide with eight amino acids (PEP12) and a peptide with five amino acids (PEP2); wherein said cyclic GFR-binding compound further comprises a peptide with three amino acids (PEP3) and a peptide with between five and seven amino acids (PEP6).

[0496] In one aspect, the present disclosure provides a cyclic GFR-binding compound, wherein said cyclic GFR-binding compound is a cyclic peptide, a variant or analog thereof, or a cyclic peptidomimetic as defined herein, with between 15-60 (in particular between 15-55, more particularly between 19-60, and even more particularly between 19-55) amino acids, or between 15-35 (in particular between 15-30, more particularly between 19-35, and even more particularly between 19-30) amino acids, comprising a peptide with four amino acids (PEP1) and a peptide with five amino acids (PEP2); wherein said cyclic GFR-binding compound further comprises a peptide with three amino acids (PEP3) and a peptide with between six and eleven amino acids (PEP10).

[0497] In one aspect, the present disclosure provides a cyclic GFR-binding compound, wherein said cyclic GFR-binding compound is a cyclic peptide, a variant or analog thereof, or a cyclic peptidomimetic as defined herein, with between 15-60 (in particular between 15-55, more particularly between 19-60, and even more particularly between 19-55) amino acids, or between 15-35 (in particular between 15-30, more particularly between 19-35, and even more particularly between 19-30) amino acids, comprising a peptide with eight amino acids (PEP12) and a peptide with five amino acids (PEP2); wherein said cyclic GFR-binding compound further comprises a peptide with three amino acids (PEP3) and a peptide with between six and eleven amino acids (PEP10).

[0498] In one aspect, the present disclosure provides a cyclic GFR-binding compound, wherein said cyclic GFR-binding compound is a cyclic peptide, a variant or analog thereof, or a cyclic peptidomimetic as defined herein, with between 15-60 (in particular between 15-55, more particularly between 19-60, and even more particularly between 19-55) amino acids, or between 15-35 (in particular between 15-30, more particularly between 19-35, and even more particularly between 19-30) amino acids, comprising a peptide with four amino acids (PEP1) and a peptide with five amino acids (PEP2); wherein said cyclic GFR-binding compound further comprises a peptide with five amino acids (PEP5) and a peptide with three amino acids (PEP4).

[0499] In one aspect, the present disclosure provides a cyclic GFR-binding compound, wherein said cyclic GFR-binding compound is a cyclic peptide, a variant or analog thereof, or a cyclic peptidomimetic as defined herein, with between 15-60 (in particular between 15-55, more particularly between 19-60, and even more particularly between 19-55) amino acids, or between 15-35 (in particular between 15-30, more particularly between 19-35, and even more particularly between 19-30) amino acids, comprising a peptide with four amino acids (PEP12) and a peptide with five amino acids (PEP2); wherein said cyclic GFR-binding compound further comprises a peptide with five amino acids (PEP5) and a peptide with three amino acids (PEP4).

[0500] In one aspect, the present disclosure provides a cyclic GFR-binding compound, wherein said cyclic GFR-binding compound is a cyclic peptide, a variant or analog thereof, or a cyclic peptidomimetic as defined herein, with between 15-60 (in particular between 15-55, more particularly between 19-60, and even more particularly between 19-55) amino acids, or between 15-35 (in particular between 15-30, more particularly between 19-35, and even more particularly between 19-30) amino acids, comprising a peptide with four amino acids (PEP1) and a peptide with five amino acids (PEP2); wherein said cyclic GFR-binding compound further comprises a peptide with between six and twelve amino acids (PEP9) and a peptide with three amino acids (PEP4).

[0501] In one aspect, the present disclosure provides a cyclic GFR-binding compound, wherein said cyclic GFR-binding compound is a cyclic peptide, a variant or analog thereof, or a cyclic peptidomimetic as defined herein, with between 15-60 (in particular between 15-55, more particularly between 19-60, and even more particularly between 19-55) amino acids, or between 15-35 (in particular between 15-30, more particularly between 19-35, and even more particularly between 19-30) amino acids, comprising a peptide with four amino acids (PEP12) and a peptide with five amino acids (PEP2); wherein said cyclic GFR-binding compound further comprises a peptide with between six and twelve amino acids (PEP9) and a peptide with three amino acids (PEP4).

[0502] In one aspect, the present disclosure provides a cyclic GFR-binding compound, wherein said cyclic GFR-binding compound is a cyclic peptide, a variant or analog thereof, or a cyclic peptidomimetic as defined herein, with between 15-60 (in particular between 15-55, more particularly between 19-60, and even more particularly between 19-55) amino acids, or between 15-35 (in particular between 15-30, more particularly between 19-35, and even more particularly between 19-30) amino acids, comprising a peptide with four amino acids (PEP1) and a peptide with five amino acids (PEP2); wherein said cyclic GFR-binding compound further comprises a peptide with five amino acids (PEP5) and a peptide with between six and eleven amino acids (PEP10).

[0503] In one aspect, the present disclosure provides a cyclic GFR-binding compound, wherein said cyclic GFR-binding compound is a cyclic peptide, a variant or analog thereof, or a cyclic peptidomimetic as defined herein, with between 15-60 (in particular between 15-55, more particularly between 19-60, and even more particularly between 19-55) amino acids, or between 15-35 (in particular between 15-30, more particularly between 19-35, and even more particularly between 19-30) amino acids, comprising a peptide with four amino acids (PEP12) and a peptide with five amino acids (PEP2); wherein said cyclic GFR-binding compound further comprises a peptide with five amino acids (PEP5) and a peptide with between six and eleven amino acids (PEP10).

[0504] In one aspect, the present disclosure provides a cyclic GFR-binding compound, wherein said cyclic GFR-binding compound is a cyclic peptide, a variant or analog thereof, or a cyclic peptidomimetic as defined herein, with between 15-60 (in particular between 15-55, more particularly between 19-60, and even more particularly between 19-55) amino acids, or between 15-35 (in particular between 15-30, more particularly between 19-35, and even more particularly between 19-30) amino acids, comprising a peptide with four amino acids (PEP1) and a peptide with five amino acids (PEP2); wherein said cyclic GFR-binding compound further comprises a peptide with between six and twelve amino acids (PEP9) and a peptide with between five and seven amino acids (PEP6).

[0505] In one aspect, the present disclosure provides a cyclic GFR-binding compound, wherein said cyclic GFR-binding compound is a cyclic peptide, a variant or analog thereof, or a cyclic peptidomimetic as defined herein, with between 15-60 (in particular between 15-55, more particularly between 19-60, and even more particularly between 19-55) amino acids, or between 15-35 (in particular between 15-30, more particularly between 19-35, and even more particularly between 19-30) amino acids, comprising a peptide with four amino acids (PEP12) and a peptide with five amino acids (PEP2); wherein said cyclic GFR-binding compound further comprises a peptide with between six and twelve amino acids (PEP9) and a peptide with between five and seven amino acids (PEP6).

[0506] In one aspect, the present disclosure provides a cyclic GFR-binding compound, wherein said cyclic GFR-binding compound is a cyclic peptide, a variant or analog thereof, or a cyclic peptidomimetic as defined herein, with between 15-60 (in particular between 15-55, more particularly between 19-60, and even more particularly between 19-55) amino acids, or between 15-35 (in particular between 15-30, more particularly between 19-35, and even more particularly between 19-30) amino acids, comprising a peptide with four amino acids (PEP1) and a peptide with five amino acids (PEP2); wherein said cyclic GFR-binding compound further comprises a peptide with three amino acids (PEP3), an amino acid or a peptide with between two and seven amino acids (PEP7), and a peptide with three amino acids (PEP4).

[0507] In one aspect, the present disclosure provides a cyclic GFR-binding compound, wherein said cyclic GFR-binding compound is a cyclic peptide, a variant or analog thereof, or a cyclic peptidomimetic as defined herein, with between 15-60 (in particular between 15-55, more particularly between 19-60, and even more particularly between 19-55) amino acids, or between 15-35 (in particular between 15-30, more particularly between 19-35, and even more particularly between 19-30) amino acids, comprising a peptide with four amino acids (PEP12) and a peptide with five amino acids (PEP2); wherein said cyclic GFR-binding compound further comprises a peptide with three amino acids (PEP3), an amino acid or a peptide with between two and seven amino acids (PEP7), and a peptide with three amino acids (PEP4).

[0508] In one aspect, the present disclosure provides a cyclic GFR-binding compound, wherein said cyclic GFR-binding compound is a cyclic peptide, a variant or analog thereof, or a cyclic peptidomimetic as defined herein, with between 15-60 (in particular between 15-55, more particularly between 19-60, and even more particularly between 19-55) amino acids, or between 15-35 (in particular between 15-30, more particularly between 19-35, and even more particularly between 19-30) amino acids, comprising a peptide with four amino acids (PEP1) and a peptide with five amino acids (PEP2); wherein said cyclic GFR-binding compound further comprises a peptide with three amino acids (PEP3), an amino acid or a peptide with between two and seven amino acids (PEP7), and a peptide with between five and seven amino acids (PEP6).

[0509] In one aspect, the present disclosure provides a cyclic GFR-binding compound, wherein said cyclic GFR-binding compound is a cyclic peptide, a variant or analog thereof, or a cyclic peptidomimetic as defined herein, with between 15-60 (in particular between 15-55, more particularly between 19-60, and even more particularly between 19-55) amino acids, or between 15-35 (in particular between 15-30, more particularly between 19-35, and even more particularly between 19-30) amino acids, comprising a peptide with four amino acids (PEP12) and a peptide with five amino acids (PEP2); wherein said cyclic GFR-binding compound further comprises a peptide with three amino acids (PEP3), an amino acid or a peptide with between two and seven amino acids (PEP7), and a peptide with between five and seven amino acids (PEP6).

[0510] In one aspect, the present disclosure provides a cyclic GFR-binding compound, wherein said cyclic GFR-binding compound is a cyclic peptide, a variant or analog thereof, or a cyclic peptidomimetic as defined herein, with between 15-60 (in particular between 15-55, more particularly between 19-60, and even more particularly between 19-55) amino acids, or between 15-35 (in particular between 15-30, more particularly between 19-35, and even more particularly between 19-30) amino acids, comprising a peptide with four amino acids (PEP1) and a peptide with five amino acids (PEP2); wherein said cyclic GFR-binding compound further comprises a peptide with three amino acids (PEP3), an amino acid or a peptide with between two and seven amino acids (PEP7), and a peptide with between six and eleven amino acids (PEP10).

[0511] In one aspect, the present disclosure provides a cyclic GFR-binding compound, wherein said cyclic GFR-binding compound is a cyclic peptide, a variant or analog thereof, or a cyclic peptidomimetic as defined herein, with between 15-60 (in particular between 15-55, more particularly between 19-60, and even more particularly between 19-55) amino acids, or between 15-35 (in particular between 15-30, more particularly between 19-35, and even more particularly between 19-30) amino acids, comprising a peptide with four amino acids (PEP12) and a peptide with five amino acids (PEP2); wherein said cyclic GFR-binding compound further comprises a peptide with three amino acids (PEP3), an amino acid or a peptide with between two and seven amino acids (PEP7), and a peptide with between six and eleven amino acids (PEP10).

[0512] In one aspect, the present disclosure provides a cyclic GFR-binding compound, wherein said cyclic GFR-binding compound is a cyclic peptide, a variant or analog thereof, or a cyclic peptidomimetic as defined herein, with between 15-60 (in particular between 15-55, more particularly between 19-60, and even more particularly between 19-55) amino acids, or between 15-35 (in particular between 15-30, more particularly between 19-35, and even more particularly between 19-30) amino acids, comprising a peptide with four amino acids (PEP1) and a peptide with five amino acids (PEP2); wherein said cyclic GFR-binding compound further comprises a peptide with three amino acids (PEP3), an amino acid or a peptide with between two and seven amino acids (PEP7), a peptide with three amino acids (PEP4), and an amino acid or a peptide with between two and six amino acids (PEP8).

[0513] In one aspect, the present disclosure provides a cyclic GFR-binding compound, wherein said cyclic GFR-binding compound is a cyclic peptide, a variant or analog thereof, or a cyclic peptidomimetic as defined herein, with between 15-60 (in particular between 15-55, more particularly between 19-60, and even more particularly between 19-55) amino acids, or between 15-35 (in particular between 15-30, more particularly between 19-35, and even more particularly between 19-30) amino acids, comprising a peptide with four amino acids (PEP12) and a peptide with five amino acids (PEP2); wherein said cyclic GFR-binding compound further comprises a peptide with three amino acids (PEP3), an amino acid or a peptide with between two and seven amino acids (PEP7), a peptide with three amino acids (PEP4), and an amino acid or a peptide with between two and six amino acids (PEP8).

[0514] In one aspect, the present disclosure provides a cyclic GFR-binding compound, wherein said cyclic GFR-binding compound is a cyclic peptide, a variant or analog thereof, or a cyclic peptidomimetic as defined herein, with between 15-60 (in particular between 15-55, more particularly between 19-60, and even more particularly between 19-55) amino acids, or between 15-35 (in particular between 15-30, more particularly between 19-35, and even more particularly between 19-30) amino acids, comprising a peptide with four amino acids (PEP1) and a peptide with five amino acids (PEP2); wherein said cyclic GFR-binding compound further comprises a peptide with three amino acids (PEP3), an amino acid or a peptide with between two and seven amino acids (PEP7), a peptide with between five and seven amino acids (PEP6), and an amino acid or a peptide with between two and six amino acids (PEP8).

[0515] In one aspect, the present disclosure provides a cyclic GFR-binding compound, wherein said cyclic GFR-binding compound is a cyclic peptide, a variant or analog thereof, or a cyclic peptidomimetic as defined herein, with between 15-60 (in particular between 15-55, more particularly between 19-60, and even more particularly between 19-55) amino acids, or between 15-35 (in particular between 15-30, more particularly between 19-35, and even more particularly between 19-30) amino acids, comprising a peptide with four amino acids (PEP12) and a peptide with five amino acids (PEP2); wherein said cyclic GFR-binding compound further comprises a peptide with three amino acids (PEP3), an amino acid or a peptide with between two and seven amino acids (PEP7), a peptide with between five and seven amino acids (PEP6), and an amino acid or a peptide with between two and six amino acids (PEP8).

[0516] In one aspect, the present disclosure provides a cyclic GFR-binding compound, wherein said cyclic GFR-binding compound is a cyclic peptide, a variant or analog thereof, or a cyclic peptidomimetic as defined herein, with between 15-60 (in particular between 15-55, more particularly between 19-60, and even more particularly between 19-55) amino acids, or between 15-35 (in particular between 15-30, more particularly between 19-35, and even more particularly between 19-30) amino acids, comprising a peptide with four amino acids (PEP1) and a peptide with five amino acids (PEP2); wherein said cyclic GFR-binding compound further comprises a peptide with five amino acids (PEP5), an amino acid or a peptide with between two and seven amino acids (PEP7), and a peptide with three amino acids (PEP4).

[0517] In one aspect, the present disclosure provides a cyclic GFR-binding compound, wherein said cyclic GFR-binding compound is a cyclic peptide, a variant or analog thereof, or a cyclic peptidomimetic as defined herein, with between 15-60 (in particular between 15-55, more particularly between 19-60, and even more particularly between 19-55) amino acids, or between 15-35 (in particular between 15-30, more particularly between 19-35, and even more particularly between 19-30) amino acids, comprising a peptide with four amino acids (PEP12) and a peptide with five amino acids (PEP2); wherein said cyclic GFR-binding compound further comprises a peptide with five amino acids (PEP5), an amino acid or a peptide with between two and seven amino acids (PEP7), and a peptide with three amino acids (PEP4).

[0518] In one aspect, the present disclosure provides a cyclic GFR-binding compound, wherein said cyclic GFR-binding compound is a cyclic peptide, a variant or analog thereof, or a cyclic peptidomimetic as defined herein, with between 15-60 (in particular between 15-55, more particularly between 19-60, and even more particularly between 19-55) amino acids, or between 15-35 (in particular between 15-30, more particularly between 19-35, and even more particularly between 19-30) amino acids, comprising a peptide with four amino acids (PEP1) and a peptide with five amino acids (PEP2); wherein said cyclic GFR-binding compound further comprises a peptide with five amino acids (PEP5), an amino acid or a peptide with between two and seven amino acids (PEP7), and a peptide with between five and seven amino acids (PEP6).

[0519] In one aspect, the present disclosure provides a cyclic GFR-binding compound, wherein said cyclic GFR-binding compound is a cyclic peptide, a variant or analog thereof, or a cyclic peptidomimetic as defined herein, with between 15-60 (in particular between 15-55, more particularly between 19-60, and even more particularly between 19-55) amino acids, or between 15-35 (in particular between 15-30, more particularly between 19-35, and even more particularly between 19-30) amino acids, comprising a peptide with four amino acids (PEP12) and a peptide with five amino acids (PEP2); wherein said cyclic GFR-binding compound further comprises a peptide with five amino acids (PEP5), an amino acid or a peptide with between two and seven amino acids (PEP7), and a peptide with between five and seven amino acids (PEP6).

[0520] In one aspect, the present disclosure provides a cyclic GFR-binding compound, wherein said cyclic GFR-binding compound is a cyclic peptide, a variant or analog thereof, or a cyclic peptidomimetic as defined herein, with between 15-60 (in particular between 15-55, more particularly between 19-60, and even more particularly between 19-55) amino acids, or between 15-35 (in particular between 15-30, more particularly between 19-35, and even more particularly between 19-30) amino acids, comprising a peptide with four amino acids (PEP1) and a peptide with five amino acids (PEP2); wherein said cyclic GFR-binding compound further comprises a peptide with five amino acids (PEP5), an amino acid or a peptide with between two and seven amino acids (PEP7), and a peptide with between six and eleven amino acids (PEP10).

[0521] In one aspect, the present disclosure provides a cyclic GFR-binding compound, wherein said cyclic GFR-binding compound is a cyclic peptide, a variant or analog thereof, or a cyclic peptidomimetic as defined herein, with between 15-60 (in particular between 15-55, more particularly between 19-60, and even more particularly between 19-55) amino acids, or between 15-35 (in particular between 15-30, more particularly between 19-35, and even more particularly between 19-30) amino acids, comprising a peptide with four amino acids (PEP12) and a peptide with five amino acids (PEP2); wherein said cyclic GFR-binding compound further comprises a peptide with five amino acids (PEP5), an amino acid or a peptide with between two and seven amino acids (PEP7), and a peptide with between six and eleven amino acids (PEP10).

[0522] In one aspect, the present disclosure provides a cyclic GFR-binding compound, wherein said cyclic GFR-binding compound is a cyclic peptide, a variant or analog thereof, or a cyclic peptidomimetic as defined herein, with between 15-60 (in particular between 15-55, more particularly between 19-60, and even more particularly between 19-55) amino acids, or between 15-35 (in particular between 15-30, more particularly between 19-35, and even more particularly between 19-30) amino acids, comprising a peptide with four amino acids (PEP1) and a peptide with five amino acids (PEP2); wherein said cyclic GFR-binding compound further comprises a peptide with five amino acids (PEP5), an amino acid or a peptide with between two and seven amino acids (PEP7), a peptide with three amino acids (PEP4), and an amino acid or a peptide with between two and six amino acids (PEP8).

[0523] In one aspect, the present disclosure provides a cyclic GFR-binding compound, wherein said cyclic GFR-binding compound is a cyclic peptide, a variant or analog thereof, or a cyclic peptidomimetic as defined herein, with between 15-60 (in particular between 15-55, more particularly between 19-60, and even more particularly between 19-55) amino acids, or between 15-35 (in particular between 15-30, more particularly between 19-35, and even more particularly between 19-30) amino acids, comprising a peptide with four amino acids (PEP12) and a peptide with five amino acids (PEP2); wherein said cyclic GFR-binding compound further comprises a peptide with five amino acids (PEP5), an amino acid or a peptide with between two and seven amino acids (PEP7), a peptide with three amino acids (PEP4), and an amino acid or a peptide with between two and six amino acids (PEP8).

[0524] In one aspect, the present disclosure provides a cyclic GFR-binding compound, wherein said cyclic GFR-binding compound is a cyclic peptide, a variant or analog thereof, or a cyclic peptidomimetic as defined herein, with between 15-60 (in particular between 15-55, more particularly between 19-60, and even more particularly between 19-55) amino acids, or between 15-35 (in particular between 15-30, more particularly between 19-35, and even more particularly between 19-30) amino acids, comprising a peptide with four amino acids (PEP1) and a peptide with five amino acids (PEP2); wherein said cyclic GFR-binding compound further comprises a peptide with five amino acids (PEP5), an amino acid or a peptide with between two and seven amino acids (PEP7), a peptide with between five and seven amino acids (PEP6), and an amino acid or a peptide with between two and six amino acids (PEP8).

[0525] In one aspect, the present disclosure provides a cyclic GFR-binding compound, wherein said cyclic GFR-binding compound is a cyclic peptide, a variant or analog thereof, or a cyclic peptidomimetic as defined herein, with between 15-60 (in particular between 15-55, more particularly between 19-60, and even more particularly between 19-55) amino acids, or between 15-35 (in particular between 15-30, more particularly between 19-35, and even more particularly between 19-30) amino acids, comprising a peptide with four amino acids (PEP12) and a peptide with five amino acids (PEP2); wherein said cyclic GFR-binding compound further comprises a peptide with five amino acids (PEP5), an amino acid or a peptide with between two and seven amino acids (PEP7), a peptide with between five and seven amino acids (PEP6), and an amino acid or a peptide with between two and six amino acids (PEP8).

[0526] In one aspect, the present disclosure provides a cyclic GFR-binding compound, wherein said cyclic GFR-binding compound is a cyclic peptide, a variant or analog thereof, or a cyclic peptidomimetic as defined herein, with between 15-60 (in particular between 15-55, more particularly between 19-60, and even more particularly between 19-55) amino acids, or between 15-35 (in particular between 15-30, more particularly between 19-35, and even more particularly between 19-30) amino acids, comprising a peptide with four amino acids (PEP1) and a peptide with five amino acids (PEP2); wherein said cyclic GFR-binding compound further comprises a peptide with between six and twelve amino acids (PEP9), a peptide with three amino acids (PEP4), and an amino acid or a peptide with between two and six amino acids (PEP8).

[0527] In one aspect, the present disclosure provides a cyclic GFR-binding compound, wherein said cyclic GFR-binding compound is a cyclic peptide, a variant or analog thereof, or a cyclic peptidomimetic as defined herein, with between 15-60 (in particular between 15-55, more particularly between 19-60, and even more particularly between 19-55) amino acids, or between 15-35 (in particular between 15-30, more particularly between 19-35, and even more particularly between 19-30) amino acids, comprising a peptide with four amino acids (PEP12) and a peptide with five amino acids (PEP2); wherein said cyclic GFR-binding compound further comprises a peptide with between six and twelve amino acids (PEP9), a peptide with three amino acids (PEP4), and an amino acid or a peptide with between two and six amino acids (PEP8).

[0528] In one aspect, the present disclosure provides a cyclic GFR-binding compound, wherein said cyclic GFR-binding compound is a cyclic peptide, a variant or analog thereof, or a cyclic peptidomimetic as defined herein, with between 15-60 (in particular between 15-55, more particularly between 19-60, and even more particularly between 19-55) amino acids, or between 15-35 (in particular between 15-30, more particularly between 19-35, and even more particularly between 19-30) amino acids, comprising a peptide with four amino acids (PEP1) and a peptide with five amino acids (PEP2); wherein said cyclic GFR-binding compound further comprises a peptide with between six and twelve amino acids (PEP9), a peptide with between five and seven amino acids (PEP6), and an amino acid or a peptide with between two and six amino acids (PEP8).

[0529] In one aspect, the present disclosure provides a cyclic GFR-binding compound, wherein said cyclic GFR-binding compound is a cyclic peptide, a variant or analog thereof, or a cyclic peptidomimetic as defined herein, with between 15-60 (in particular between 15-55, more particularly between 19-60, and even more particularly between 19-55) amino acids, or between 15-35 (in particular between 15-30, more particularly between 19-35, and even more particularly between 19-30) amino acids, comprising a peptide with four amino acids (PEP12) and a peptide with five amino acids (PEP2); wherein said cyclic GFR-binding compound further comprises a peptide with between six and twelve amino acids (PEP9), a peptide with between five and seven amino acids (PEP6), and an amino acid or a peptide with between two and six amino acids (PEP8).

[0530] In one aspect, the present disclosure provides a cyclic GFR-binding compound, wherein said cyclic GFR-binding compound is a cyclic peptide, a variant or analog thereof, or a cyclic peptidomimetic as defined herein, with between 15-60 (in particular between 15-55, more particularly between 19-60, and even more particularly between 19-55) amino acids, or between 15-35 (in particular between 15-30, more particularly between 19-35, and even more particularly between 19-30) amino acids, comprising a peptide, a variant or analog thereof, or a peptidomimetic having the following general formula (Ia) (hereinafter may also be referred to as compound (Ia) or peptide (Ia)):

PEP(A)-LINKER-PEP(B) (Ia)

wherein one end of LINKER interacts covalently with one end of PEP(A); wherein another end of LINKER interacts covalently with one end of PEP(B); wherein PEP(A) comprises PEP1; wherein PEP(B) comprises PEP2; wherein LINKER is a linear or branched organic divalent radical, moiety or compound having a molecular weight (Mw) comprised between about 28 and about 2,000 Da, in particular, between about 300 and about 1000 Da, more particularly between about 300 and about 800 Da.

[0531] In one aspect, the present disclosure provides a cyclic GFR-binding compound, wherein said cyclic GFR-binding compound is a cyclic peptide, a variant or analog thereof, or a cyclic peptidomimetic as defined herein, with between 15-60 (in particular between 15-55, more particularly between 19-60, and even more particularly between 19-55) amino acids, or between 15-35 (in particular between 15-30, more particularly between 19-35, and even more particularly between 19-30) amino acids, comprising a peptide, a variant or analog thereof, or a peptidomimetic having the following general formula (Ib) (hereinafter may also be referred to as compound (Ib) or peptide (Ib)):

PEP(A)-LINKER-PEP(B)-LINKER (Ib)

wherein one end of a first LINKER interacts covalently with one end of PEP(A); wherein another end of a first LINKER interacts covalently with one end of PEP(B); wherein one end of a second LINKER interacts covalently with another end of PEP(B); wherein another end of a second LINKER interacts covalently with another end of PEP(A); wherein PEP(A) comprises PEP1; wherein PEP(B) comprises PEP2; wherein LINKER are independently a linear or branched organic divalent radical, moiety or compound having a molecular weight (Mw) comprised between about 28 and about 2,000 Da, in particular, between about 300 and about 1000 Da, more particularly between about 300 and about 800 Da.

[0532] In the present description, the molecular weight of LINKER refer to the calculated molecular weight prior to being connected to/reacted with any of the elements it is configured to connect to or react with e.g. PEP(A), PEP(B) or any other groups defined herein.

[0533] 15-60 (in particular between 15-55, more particularly between 19-60, and even more particularly between 19-55) amino acids, or between 15-35 (in particular between 15-30, In one aspect, the present disclosure provides a cyclic GFR-binding compound comprising compounds (Ia) or (Ib), wherein PEP(A) comprises PEP1; wherein PEP(B) comprises PEP2; wherein PEP(A) further comprises PEP3; wherein PEP(B) further comprises PEP4.

[0534] In one aspect, the present disclosure provides a cyclic GFR-binding compound comprising compounds (Ia) or (Ib), wherein PEP(A) comprises PEP12; wherein PEP(B) comprises PEP2; wherein PEP(A) further comprises PEP3; wherein PEP(B) further comprises PEP4.

[0535] In one aspect, the present disclosure provides a cyclic GFR-binding compound comprising compounds (Ia) or (Ib), wherein PEP(A) comprises PEP1; wherein PEP(B) comprises PEP2; wherein PEP(A) further comprises PEP5; wherein PEP(B) further comprises PEP6.

[0536] In one aspect, the present disclosure provides a cyclic GFR-binding compound comprising compounds (Ia) or (Ib), wherein PEP(A) comprises PEP12; wherein PEP(B) comprises PEP2; wherein PEP(A) further comprises PEP5; wherein PEP(B) further comprises PEP6.

[0537] In one aspect, the present disclosure provides a cyclic GFR-binding compound comprising compounds (Ia) or (Ib), wherein PEP(A) comprises PEP1; wherein PEP(B) comprises PEP2; wherein PEP(A) further comprises PEP9; wherein PEP(B) further comprises PEP10.

[0538] In one aspect, the present disclosure provides a cyclic GFR-binding compound comprising compounds (Ia) or (Ib), wherein PEP(A) comprises PEP12; wherein PEP(B) comprises PEP2; wherein PEP(A) further comprises PEP9; wherein PEP(B) further comprises PEP10.

[0539] In one aspect, the present disclosure provides a cyclic GFR-binding compound comprising compounds (Ia) or (Ib), wherein PEP(A) comprises PEP1; wherein PEP(B) comprises PEP2; wherein PEP(A) further comprises PEP3; wherein PEP(B) further comprises PEP6.

[0540] In one aspect, the present disclosure provides a cyclic GFR-binding compound comprising compounds (Ia) or (Ib), wherein PEP(A) comprises PEP12; wherein PEP(B) comprises PEP2; wherein PEP(A) further comprises PEP3; wherein PEP(B) further comprises PEP6.

[0541] In one aspect, the present disclosure provides a cyclic GFR-binding compound comprising compounds (Ia) or (Ib), wherein PEP(A) comprises PEP1; wherein PEP(B) comprises PEP2; wherein PEP(A) further comprises PEP3; wherein PEP(B) further comprises PEP10.

[0542] In one aspect, the present disclosure provides a cyclic GFR-binding compound comprising compounds (Ia) or (Ib), wherein PEP(A) comprises PEP12; wherein PEP(B) comprises PEP2; wherein PEP(A) further comprises PEP3; wherein PEP(B) further comprises PEP10.

[0543] In one aspect, the present disclosure provides a cyclic GFR-binding compound comprising compounds (Ia) or (Ib), wherein PEP(A) comprises PEP1; wherein PEP(B) comprises PEP2; wherein PEP(A) further comprises PEP5; wherein PEP(B) further comprises PEP4.

[0544] In one aspect, the present disclosure provides a cyclic GFR-binding compound comprising compounds (Ia) or (Ib), wherein PEP(A) comprises PEP12; wherein PEP(B) comprises PEP2; wherein PEP(A) further comprises PEP5; wherein PEP(B) further comprises PEP4.

[0545] In one aspect, the present disclosure provides a cyclic GFR-binding compound comprising compounds (Ia) or (Ib), wherein PEP(A) comprises PEP1; wherein PEP(B) comprises PEP2; wherein PEP(A) further comprises PEP9; wherein PEP(B) further comprises PEP4.

[0546] In one aspect, the present disclosure provides a cyclic GFR-binding compound comprising compounds (Ia) or (Ib), wherein PEP(A) comprises PEP12; wherein PEP(B) comprises PEP2; wherein PEP(A) further comprises PEP9; wherein PEP(B) further comprises PEP4.

[0547] In one aspect, the present disclosure provides a cyclic GFR-binding compound comprising compounds (Ia) or (Ib), wherein PEP(A) comprises PEP1; wherein PEP(B) comprises PEP2; wherein PEP(A) further comprises PEP5; wherein PEP(B) further comprises PEP10.

[0548] In one aspect, the present disclosure provides a cyclic GFR-binding compound comprising compounds (Ia) or (Ib), wherein PEP(A) comprises PEP12; wherein PEP(B) comprises PEP2; wherein PEP(A) further comprises PEP5; wherein PEP(B) further comprises PEP10.

[0549] In one aspect, the present disclosure provides a cyclic GFR-binding compound comprising compounds (Ia) or (Ib), wherein PEP(A) comprises PEP1; wherein PEP(B) comprises PEP2; wherein PEP(A) further comprises PEP9; wherein PEP(B) further comprises PEP6.

[0550] In one aspect, the present disclosure provides a cyclic GFR-binding compound comprising compounds (Ia) or (Ib), wherein PEP(A) comprises PEP12; wherein PEP(B) comprises PEP2; wherein PEP(A) further comprises PEP9; wherein PEP(B) further comprises PEP6.

[0551] In one aspect, the present disclosure provides a cyclic GFR-binding compound comprising compounds (Ia) or (Ib), wherein PEP(A) comprises PEP1; wherein PEP(B) comprises PEP2; wherein PEP(A) further comprises PEP3 and PEP7; wherein PEP(B) further comprises PEP4.

[0552] In one aspect, the present disclosure provides a cyclic GFR-binding compound comprising compounds (Ia) or (Ib), wherein PEP(A) comprises PEP12; wherein PEP(B) comprises PEP2; wherein PEP(A) further comprises PEP3 and PEP7; wherein PEP(B) further comprises PEP4.

[0553] In one aspect, the present disclosure provides a cyclic GFR-binding compound comprising compounds (Ia) or (Ib), wherein PEP(A) comprises PEP1; wherein PEP(B) comprises PEP2; wherein PEP(A) further comprises PEP3 and PEP7; wherein PEP(B) further comprises PEP6.

[0554] In one aspect, the present disclosure provides a cyclic GFR-binding compound comprising compounds (Ia) or (Ib), wherein PEP(A) comprises PEP12; wherein PEP(B) comprises PEP2; wherein PEP(A) further comprises PEP3 and PEP7; wherein PEP(B) further comprises PEP6.

[0555] In one aspect, the present disclosure provides a cyclic GFR-binding compound comprising compounds (Ia) or (Ib), wherein PEP(A) comprises PEP1; wherein PEP(B) comprises PEP2; wherein PEP(A) further comprises PEP3 and PEP7; wherein PEP(B) further comprises PEP10.

[0556] In one aspect, the present disclosure provides a cyclic GFR-binding compound comprising compounds (Ia) or (Ib), wherein PEP(A) comprises PEP12; wherein PEP(B) comprises PEP2; wherein PEP(A) further comprises PEP3 and PEP7; wherein PEP(B) further comprises PEP10.

[0557] In one aspect, the present disclosure provides a cyclic GFR-binding compound comprising compounds (Ia) or (Ib), wherein PEP(A) comprises PEP1; wherein PEP(B) comprises PEP2; wherein PEP(A) further comprises PEP7; wherein PEP(B) further comprises PEP4 and PEP8.

[0558] In one aspect, the present disclosure provides a cyclic GFR-binding compound comprising compounds (Ia) or (Ib), wherein PEP(A) comprises PEP12; wherein PEP(B) comprises PEP2; wherein PEP(A) further comprises PEP7; wherein PEP(B) further comprises PEP4 and PEP8.

[0559] In one aspect, the present disclosure provides a cyclic GFR-binding compound comprising compounds (Ia) or (Ib), wherein PEP(A) comprises PEP1; wherein PEP(B) comprises PEP2; wherein PEP(A) further comprises PEP7; wherein PEP(B) further comprises PEP6 and PEP8.

[0560] In one aspect, the present disclosure provides a cyclic GFR-binding compound comprising compounds (Ia) or (Ib), wherein PEP(A) comprises PEP12; wherein PEP(B) comprises PEP2; wherein PEP(A) further comprises PEP7; wherein PEP(B) further comprises PEP6 and PEP8.

[0561] In one aspect, the present disclosure provides a cyclic GFR-binding compound comprising compounds (Ia) or (Ib), wherein PEP(A) comprises PEP1; wherein PEP(B) comprises PEP2; wherein PEP(A) further comprises PEP5 and PEP7; wherein PEP(B) further comprises PEP4.

[0562] In one aspect, the present disclosure provides a cyclic GFR-binding compound comprising compounds (Ia) or (Ib), wherein PEP(A) comprises PEP12; wherein PEP(B) comprises PEP2; wherein PEP(A) further comprises PEP5 and PEP7; wherein PEP(B) further comprises PEP4.

[0563] In one aspect, the present disclosure provides a cyclic GFR-binding compound comprising compounds (Ia) or (Ib), wherein PEP(A) comprises PEP1; wherein PEP(B) comprises PEP2; wherein PEP(A) further comprises PEP5 and PEP7; wherein PEP(B) further comprises PEP6.

[0564] In one aspect, the present disclosure provides a cyclic GFR-binding compound comprising compounds (Ia) or (Ib), wherein PEP(A) comprises PEP12; wherein PEP(B) comprises PEP2; wherein PEP(A) further comprises PEP5 and PEP7; wherein PEP(B) further comprises PEP6.

[0565] In one aspect, the present disclosure provides a cyclic GFR-binding compound comprising compounds (Ia) or (Ib), wherein PEP(A) comprises PEP1; wherein PEP(B) comprises PEP2; wherein PEP(A) further comprises PEP5 and PEP7; wherein PEP(B) further comprises PEP10.

[0566] In one aspect, the present disclosure provides a cyclic GFR-binding compound comprising compounds (Ia) or (Ib), wherein PEP(A) comprises PEP12; wherein PEP(B) comprises PEP2; wherein PEP(A) further comprises PEP5 and PEP7; wherein PEP(B) further comprises PEP10.

[0567] In one aspect, the present disclosure provides a cyclic GFR-binding compound comprising compounds (Ia) or (Ib), wherein PEP(A) comprises PEP1; wherein PEP(B) comprises PEP2; wherein PEP(A) further comprises PEP5 and PEP7; wherein PEP(B) further comprises PEP4 and PEP8.

[0568] In one aspect, the present disclosure provides a cyclic GFR-binding compound comprising compounds (Ia) or (Ib), wherein PEP(A) comprises PEP12; wherein PEP(B) comprises PEP2; wherein PEP(A) further comprises PEP5 and PEP7; wherein PEP(B) further comprises PEP4 and PEP8.

[0569] In one aspect, the present disclosure provides a cyclic GFR-binding compound comprising compounds (Ia) or (Ib), wherein PEP(A) comprises PEP1; wherein PEP(B) comprises PEP2; wherein PEP(A) further comprises PEP5 and PEP7; wherein PEP(B) further comprises PEP6 and PEP8.

[0570] In one aspect, the present disclosure provides a cyclic GFR-binding compound comprising compounds (Ia) or (Ib), wherein PEP(A) comprises PEP12; wherein PEP(B) comprises PEP2; wherein PEP(A) further comprises PEP5 and PEP7; wherein PEP(B) further comprises PEP6 and PEP8.

[0571] In one aspect, the present disclosure provides a cyclic GFR-binding compound comprising compounds (Ia) or (Ib), wherein PEP(A) comprises PEP1; wherein PEP(B) comprises PEP2; wherein PEP(A) further comprises PEP9; wherein PEP(B) further comprises PEP4 and PEP8.

[0572] In one aspect, the present disclosure provides a cyclic GFR-binding compound comprising compounds (Ia) or (Ib), wherein PEP(A) comprises PEP12; wherein PEP(B) comprises PEP2; wherein PEP(A) further comprises PEP9; wherein PEP(B) further comprises PEP4 and PEP8.

[0573] In one aspect, the present disclosure provides a cyclic GFR-binding compound comprising compounds (Ia) or (Ib), wherein PEP(A) comprises PEP1; wherein PEP(B) comprises PEP2; wherein PEP(A) further comprises PEP9; wherein PEP(B) further comprises PEP6 and PEP8.

[0574] In one aspect, the present disclosure provides a cyclic GFR-binding compound comprising compounds (Ia) or (Ib), wherein PEP(A) comprises PEP12; wherein PEP(B) comprises PEP2; wherein PEP(A) further comprises PEP9; wherein PEP(B) further comprises PEP6 and PEP8.

[0575] In one aspect, the present disclosure provides a cyclic GFR-binding compound, wherein said cyclic GFR-binding compound is a cyclic peptide, a variant or analog thereof, or a cyclic peptidomimetic as defined herein, with between 15-60 (in particular between 15-55, more particularly between 19-60, and even more particularly between 19-55) amino acids, or between 15-35 (in particular between 15-30, more particularly between 19-35, and even more particularly between 19-30) amino acids, comprising a peptide, a variant or analog thereof, or a peptidomimetic having the following general formula (IIa) (hereinafter may also be referred to as compound (IIa) or peptide (IIa)):

PEP(C)-PEP12-LINKER-PEP2-PEP(D) (IIa)

wherein LINKER is a linear or branched organic divalent radical, moiety or compound having a molecular weight (Mw) comprised between about 28 and about 2,000 Da, in particular, between about 300 and about 1000 Da, more particularly between about 300 and about 800 Da; wherein PEP12 is a peptide with 8 amino acids of formula PEP1-AA¹⁷-PEP11 as defined herein; wherein PEP2 is a peptide with five amino acids as already defined herein; wherein one end of PEP(C) interacts covalently with PEP12 via one end of PEP1; wherein one end of PEP(D) interacts covalently with one end of PEP2; wherein one end of LINKER interacts covalently with one end of PEP12 via one end of PEP11; wherein another end of LINKER interacts covalently with another end of PEP2; wherein PEP(C) is a peptide with at least 5 amino acids, in particular a peptide with between 5 and 12 amino acids; wherein PEP(D) is a peptide with at least 5 amino acids, in particular a peptide with between 5 and 11 amino acids.

[0576] In one aspect, the present disclosure provides a cyclic GFR-binding compound, wherein said cyclic GFR-binding compound is a cyclic peptide, a variant or analog thereof, or a cyclic peptidomimetic as defined herein, with between 15-60 (in particular between 15-55, more particularly between 19-60, and even more particularly between 19-55) amino acids, or between 15-35 (in particular between 15-30, more particularly between 19-35, and even more particularly between 19-30) amino acids, comprising a peptide, a variant or analog thereof, or a peptidomimetic having the following general formula (IIb) (hereinafter may also be referred to as compound (IIb) or peptide (IIb)):

PEP(C)-PEP12-LINKER-PEP2-PEP(D)-LINKER (IIb)

wherein LINKER are independently a linear or branched organic divalent radical, moiety or compound having a molecular weight (Mw) comprised between about 28 and about 2,000 Da, in particular, between about 300 and about 1000 Da, more particularly between about 300 and about 800 Da; wherein PEP12 is a peptide with 8 amino acids of formula PEP1-AA¹⁷-PEP11 as defined herein; wherein PEP2 is a peptide with five amino acids as already defined herein; wherein one end of PEP(C) interacts covalently with PEP12 via one end of PEP1; wherein one end of PEP(D) interacts covalently with one end of PEP2; wherein one end of a first LINKER interacts covalently with one end of PEP12 via one end of PEP11; wherein another end of a first LINKER interacts covalently with another end of PEP2; wherein one end of a second LINKER interacts covalently with another end of PEP(D); wherein another end of a second LINKER interacts covalently with another end of PEP(C); wherein PEP(C) is a peptide with at least 5 amino acids, in particular a peptide with between 5 and 12 amino acids; wherein PEP(D) is a peptide with at least 5 amino acids, in particular a peptide with between 5 and 11 amino acids.

[0577] In one aspect, the present disclosure provides a cyclic GFR-binding compound comprising compounds (IIa) or (IIb), wherein PEP(C) comprises PEP3; wherein PEP(D) comprises PEP4.

[0578] In one aspect, the present disclosure provides a cyclic GFR-binding compound comprising compounds (IIa) or (IIb), wherein PEP(C) comprises PEP5; wherein PEP(D) comprises PEP6. In one particular example, PEP(C) is PEP5; and PEP(D) is PEP6.

[0579] In one aspect, the present disclosure provides a cyclic GFR-binding compound comprising compounds (IIa) or (Iib), wherein PEP(C) comprises PEP9; wherein PEP(D) comprises PEP10. In one particular example, PEP(C) is PEP9; and PEP(D) is PEP10.

[0580] In one aspect, the present disclosure provides a cyclic GFR-binding compound comprising compounds (IIa) or (IIb), wherein PEP(C) comprises PEP3; wherein PEP(D) comprises PEP6. In one particular example, PEP(C) comprises PEP3 and PEP(D) is PEP6.

[0581] In one aspect, the present disclosure provides a cyclic GFR-binding compound comprising compounds (IIa) or (IIb), wherein PEP(C) comprises PEP3; wherein PEP(D) comprises PEP10. In one particular example,

[0582] PEP(C) comprises PEP3 and PEP(D) is PEP10.

[0583] In one aspect, the present disclosure provides a cyclic GFR-binding compound comprising compounds (IIa) or (IIb), wherein PEP(C) comprises PEP5; wherein PEP(D) comprises PEP4. In one particular example, PEP(C) is PEP5 and PEP(D) comprises PEP4.

[0584] In one aspect, the present disclosure provides a cyclic GFR-binding compound comprising compounds (IIa) or (IIb), wherein PEP(C) comprises PEP9; wherein PEP(D) comprises PEP4. In one particular example, PEP(C) is PEP9 and PEP(D) comprises PEP4.

[0585] In one aspect, the present disclosure provides a cyclic GFR-binding compound comprising compounds (IIa) or (IIb), wherein PEP(C) comprises PEP5; wherein PEP(D) comprises PEP10. In one particular example, PEP(C) is PEP5 and PEP(D) is PEP10.

[0586] In one aspect, the present disclosure provides a cyclic GFR-binding compound comprising compounds (IIa) or (IIb), wherein PEP(C) comprises PEP9; wherein PEP(D) comprises PEP6. In one particular example, PEP(C) is PEP9 and PEP(D) is PEP6.

[0587] In one aspect, the present disclosure provides a cyclic GFR-binding compound comprising compounds (IIa) or (IIb), wherein PEP(C) comprises PEP3 and PEP7; wherein PEP(D) comprises PEP4.

[0588] In one aspect, the present disclosure provides a cyclic GFR-binding compound comprising compounds (IIa) or (IIb), wherein PEP(C) comprises PEP3 and PEP7; wherein PEP(D) comprises PEP6. In one particular example, PEP(C) comprises PEP3 and PEP7, and PEP(D) is PEP6.

[0589] In one aspect, the present disclosure provides a cyclic GFR-binding compound comprising compounds (IIa) or (IIb), wherein PEP(C) comprises PEP3 and PEP7; wherein PEP(D) comprises PEP10. In one particular example, PEP(C) comprises PEP3 and PEP7, and PEP(D) is PEP10.

[0590] In one aspect, the present disclosure provides a cyclic GFR-binding compound comprising compounds (IIa) or (IIb), wherein PEP(C) comprises PEP7; wherein PEP(D) comprises PEP4 and PEP8.

[0591] In one aspect, the present disclosure provides a cyclic GFR-binding compound comprising compounds (IIa) or (IIb), wherein PEP(C) comprises PEP7; wherein PEP(D) comprises PEP6 and PEP8.

[0592] In one aspect, the present disclosure provides a cyclic GFR-binding compound comprising compounds (IIa) or (Iib), wherein PEP(C) comprises PEP5 and PEP7; wherein PEP(D) comprises PEP4.

[0593] In one aspect, the present disclosure provides a cyclic GFR-binding compound comprising compounds (IIa) or (Iib), wherein PEP(C) comprises PEP5 and PEP7; wherein PEP(D) comprises PEP6.

[0594] In one aspect, the present disclosure provides a cyclic GFR-binding compound comprising compounds (IIa) or (IIb), wherein PEP(C) comprises PEP5 and PEP7; wherein PEP(D) comprises PEP10.

[0595] In one aspect, the present disclosure provides a cyclic GFR-binding compound comprising compounds (IIa) or (IIb), wherein PEP(C) comprises PEP5 and PEP7; wherein PEP(D) comprises PEP4 and PEP8.

[0596] In one aspect, the present disclosure provides a cyclic GFR-binding compound comprising compounds (IIa) or (IIb), wherein PEP(C) comprises PEP5 and PEP7; wherein PEP(D) comprises PEP6 and PEP8.

[0597] In one aspect, the present disclosure provides a cyclic GFR-binding compound comprising compounds (IIa) or (IIb), wherein PEP(C) comprises PEP9; wherein PEP(D) comprises PEP4 and PEP8.

[0598] In one aspect, the present disclosure provides a cyclic GFR-binding compound comprising compounds (IIa) or (IIb), wherein PEP(C) comprises PEP9; wherein PEP(D) comprises PEP6 and PEP8.

[0599] In one aspect, the present disclosure provides a cyclic GFR-binding compound comprising compounds (IIa) or (IIb), wherein PEP(C) is PEP5 or PEP9 and wherein PEP(D) is PEP6 or PEP10.

[0600] In one aspect, the present disclosure provides a cyclic GFR-binding compound, wherein said cyclic GFR-binding compound is a cyclic peptide, a variant or analog thereof, or a cyclic peptidomimetic as defined herein, with between 15-60 (in particular between 15-55, more particularly between 19-60, and even more particularly between 19-55) amino acids, or between 15-35 (in particular between 15-30, more particularly between 19-35, and even more particularly between 19-30) amino acids, comprising a peptide, a variant or analog thereof, or a peptidomimetic having the following general formula (IIIa) (hereinafter may also be referred to as compound (IIIa) or peptide (IIIa)):

PEP7-PEP5-PEP12-LINKER-PEP2-PEP6-PEP8 (IIIa)

wherein LINKER is a linear or branched organic divalent radical, moiety or compound having a molecular weight (Mw) comprised between about 28 and about 2,000 Da, in particular, between about 300 and about 1000 Da, more particularly between about 300 and about 800 Da; wherein PEP12 is a peptide with 8 amino acids of formula PEP1-AA¹⁷-PEP11 as defined herein; wherein PEP2 is a peptide with five amino acids as already defined herein; wherein PEP5 is a peptide with five amino acids as already defined herein; wherein PEP6 is a peptide with between five and seven amino acids as already defined herein; wherein PEP7 an amino acid or a peptide with between two and seven amino acids as already defined herein; wherein PEP8 an amino acid or a peptide with between two and six amino acids as already defined herein; wherein one end of LINKER interacts covalently with one end of PEP12 via AA²⁰; wherein another end of LINKER interacts covalently with one end of PEP2 via AA²¹; wherein one end of PEP5 interacts covalently with another end of PEP12 via AA¹²; wherein another end of PEP5 interacts covalently with one end of PEP7 via AA⁸; wherein one end of PEP6 interacts covalently with another end of PEP2 via AA²⁶; wherein another end of PEP6 interacts covalently with one end of PEP8 via AA³².

[0601] In one aspect, the present disclosure provides a cyclic GFR-binding compound, wherein said cyclic GFR-binding compound is a cyclic peptide, a variant or analog thereof, or a cyclic peptidomimetic as defined herein, with between 15-60 (in particular between 15-55, more particularly between 19-60, and even more particularly between 19-55) amino acids, or between 15-35 (in particular between 15-30, more particularly between 19-35, and even more particularly between 19-30) amino acids, comprising a peptide, a variant or analog thereof, or a peptidomimetic having the following general formula (IIIb) (hereinafter may also be referred to as compound (IIIb) or peptide (IIIb)):

PEP7-PEP5-PEP12-LINKER-PEP2-PEP6-PEP8-LINKER (IIIb)

wherein LINKER are independently a linear or branched organic divalent radical, moiety or compound having a molecular weight (Mw) comprised between about 28 and about 2,000 Da, in particular, between about 300 and about 1000 Da, more particularly between about 300 and about 800 Da; wherein PEP12 is a peptide with 8 amino acids of formula PEP1-AA¹⁷-PEP11 as defined herein; wherein PEP2 is a peptide with five amino acids as already defined herein; wherein PEP5 is a peptide with five amino acids as already defined herein; wherein PEP6 is a peptide with between five and seven amino acids as already defined herein; wherein PEP7 an amino acid or a peptide with between two and seven amino acids as already defined herein; wherein PEP8 an amino acid or a peptide with between two and six amino acids as already defined herein; wherein one end of a first LINKER interacts covalently with one end of PEP12 via AA²⁰; wherein another end of a first LINKER interacts covalently with one end of PEP2 via AA²¹; wherein one end of a second LINKER interacts covalently with another end of PEP8; wherein another end of a second LINKER interacts covalently with another end of PEP7; wherein one end of PEP5 interacts covalently with another end of PEP12 via AA¹²; wherein another end of PEP5 interacts covalently with one end of PEP7 via AA⁸; wherein one end of PEP6 interacts covalently with another end of PEP2 via AA²⁶; wherein another end of PEP6 interacts covalently with one end of PEP8 via AA³².

[0602] In one aspect, the present disclosure provides a cyclic GFR-binding compound, wherein said cyclic GFR-binding compound is a cyclic peptide, a variant or analog thereof, or a cyclic peptidomimetic as defined herein, with between 15-60 (in particular between 15-55, more particularly between 19-60, and even more particularly between 19-55) amino acids, or between 15-35 (in particular between 15-30, more particularly between 19-35, and even more particularly between 19-30) amino acids, comprising a peptide, a variant or analog thereof, or a peptidomimetic having the following general formula (IVa) (hereinafter may also be referred to as compound (IVa) or peptide (IVa)):

AA¹-AA²-AA³-AA⁴-AA⁵-AA⁶-AA⁷-AA⁸-AA⁹-AA¹⁰-AA¹¹-AA¹²-AA¹³-AA¹⁴-AA¹⁵-AA¹⁶-AA¹⁷-AA¹⁸-AA¹⁹-AA²⁰-LINKER-AA²¹-AA²²-AA²³-AA²⁴-AA²⁵-AA²⁶-AA²⁷-AA²⁸-AA²⁹-AA³⁰-AA³¹-AA³²-AA³³-AA³⁴-AA³⁵-AA³⁶-AA³⁷-AA³⁸ (IVa)

wherein LINKER is a linear or branched organic divalent radical, moiety or compound having a molecular weight (Mw) comprised between about 28 and about 2,000 Da, in particular, between about 300 and about 1000 Da, more particularly between about 300 and about 800 Da; wherein AA¹-AA²-AA³-AA⁴-AA⁵-AA⁶-AA⁷ is PEP7 as defined herein; wherein AA¹³-AA¹⁴-AA¹⁵-AA¹⁶-AA¹⁷-AA¹⁸-AA¹⁹-AA²⁰ is PEP12 as defined herein; wherein AA²¹-AA²²-AA²³-AA²⁴-AA²⁵ is PEP2 as already defined herein; wherein AA⁸-AA⁹-AA¹⁰ is PEP3 as defined herein; wherein AA³⁰-AA³¹-AA³² is PEP4 as defined herein; wherein AA³³-AA³⁴-AA³⁵-AA³⁶-AA³⁷-AA³⁸ is PEP8 as defined herein; wherein AA¹¹, AA¹², AA²⁶, AA²⁷, AA²⁸, and AA²⁹ are as defined herein; wherein one end of LINKER interacts covalently with AA²⁰; wherein another end of LINKER interacts covalently with AA²¹; wherein AA¹ and AA²¹ may be both N-terminal amino acids or both C-terminal amino acids; wherein AA³⁸ and AA²⁰ may be both N-terminal amino acids or both C-terminal amino acids.

[0603] In one aspect, the present disclosure provides a cyclic GFR-binding compound, wherein said cyclic GFR-binding compound is a cyclic peptide, a variant or analog thereof, or a cyclic peptidomimetic as defined herein, with between 15-60 (in particular between 15-55, more particularly between 19-60, and even more particularly between 19-55) amino acids, or between 15-35 (in particular between 15-30, more particularly between 19-35, and even more particularly between 19-30) amino acids, comprising a peptide, a variant or analog thereof, or a peptidomimetic having the following general formula (IVb) (hereinafter may also be referred to as compound (IVb) or peptide (IVb)):

AA¹-AA²-AA³-AA⁴-AA⁵-AA⁶-AA⁷-AA⁸-AA⁹-AA¹⁰-AA¹¹-AA¹²-AA¹³-AA¹⁴-AA¹⁵-AA¹⁶-AA¹⁷-AA¹⁸-AA¹⁹-AA²⁰-LINKER-AA²¹-AA²²-AA²³-AA²⁴-AA²⁵-AA²⁶-AA²⁷-AA²⁸-AA²⁹-AA³⁰-AA³¹-AA³²-AA³³-AA³⁴-AA³⁵-AA³⁶-AA³⁷-AA³⁸-LINKER (IVb)

wherein LINKER are independently a linear or branched organic divalent radical, moiety or compound having a molecular weight (Mw) comprised between about 28 and about 2,000 Da, in particular, between about 300 and about 1000 Da, more particularly between about 300 and about 800 Da; wherein AA¹-AA²-AA³-AA⁴-AA⁵-AA⁶-AA⁷ is PEP7 as defined herein; wherein AA¹³-AA¹⁴-AA¹⁵-AA¹⁶-AA¹⁷-AA¹⁸-AA¹⁹-AA²⁰ is PEP12 as defined herein; wherein AA²¹-AA²²-AA²³-AA²⁴-AA²⁵ is PEP2 as already defined herein; wherein AA⁸-AA⁹-AA¹⁰ is PEP3 as defined herein; wherein AA³⁰-AA³¹-AA³² is PEP4 as defined herein; wherein AA³³-AA³⁴-AA³⁵-AA³⁶-AA³⁷-AA³⁸ is PEP8 as defined herein; wherein AA¹¹, AA¹², AA²⁶, AA²⁷, AA²⁸, and AA²⁹ are as defined herein; wherein one end of a first LINKER interacts covalently with AA²⁰; wherein another end of a first LINKER interacts covalently with AA²¹; wherein one end of a second LINKER interacts covalently with AA³⁸; wherein another end of a second LINKER interacts covalently with AA¹; wherein AA¹ may be an N-terminal amino acids or a C-terminal amino acid.

[0604] In one aspect, the present disclosure provides a cyclic GFR-binding compound, wherein said cyclic GFR-binding compound is a cyclic peptide, a variant or analog thereof, or a cyclic peptidomimetic as defined herein, with between 15-60 (in particular between 15-55, more particularly between 19-60, and even more particularly between 19-55) amino acids, or between 15-35 (in particular between 15-30, more particularly between 19-35, and even more particularly between 19-30) amino acids, comprising two LINKERs.

[0605] In one aspect, the present disclosure provides a cyclic GFR-binding compound, wherein said cyclic GFR-binding compound is a cyclic peptide, a variant or analog thereof, or a cyclic peptidomimetic as defined herein, with between 15-60 (in particular between 15-55, more particularly between 19-60, and even more particularly between 19-55) amino acids, or between 15-35 (in particular between 15-30, more particularly between 19-35, and even more particularly between 19-30) amino acids, having any one of the following schematic general formulae (V) to (XXVIII) (hereinafter may also be referred to as compounds (V) to (XXVIII) or peptides (V) to (XXVIII)):

[chemical structure]

[chemical structure]

[chemical structure]

[chemical structure]

wherein LINKER is a linear or branched organic divalent radical, moiety or compound having a molecular weight (Mw) comprised between about 28 and about 2,000 Da, in particular, between about 300 and about 1000 Da, more particularly between about 300 and about 800 Da; wherein PEP12 is a peptide with 8 amino acids of formula PEP1-AA¹⁷-PEP11 as defined herein; wherein PEP2 is a peptide with five amino acids as already defined herein; wherein PEP5 is a peptide with five amino acids as already defined herein; wherein PEP6 is a peptide with between five and seven amino acids as already defined herein; wherein PEP7 an amino acid or a peptide with between two and seven amino acids as already defined herein; wherein PEP8 an amino acid or a peptide with between two and six amino acids as already defined herein; wherein PEP9 is a peptide with between six and twelve amino acids; wherein PEP10 is a peptide with between six and eleven amino acids; wherein curved lines represents covalent bonds between LINKERs and PEP1 to PEP12 “boxes”. Curved lines' lengths may not be representative of the actual relative distance between the LINKERs and PEP1 to PEP12.

[0606] In one aspect, the present disclosure provides a cyclic GFR-binding compound, wherein said cyclic GFR-binding compound is a cyclic peptide, a variant or analog thereof, or a cyclic peptidomimetic as defined herein, with between 15-60 (in particular between 15-55, more particularly between 19-60, and even more particularly between 19-55) amino acids, or between 15-35 (in particular between 15-30, more particularly between 19-35, and even more particularly between 19-30) amino acids, having any one of the following schematic general formulae (XXIX) to (XXXIV) (hereinafter may also be referred to as compounds (XXIX) to (XXXIV) or peptides (XXIX) to (XXXIV)):

[chemical structure]

[chemical structure]

wherein LINKER is a linear or branched organic divalent radical, moiety or compound having a molecular weight (Mw) comprised between about 28 and about 2,000 Da, in particular, between about 300 and about 1000 Da, more particularly between about 300 and about 800 Da; wherein AA¹³-AA¹⁴-AA¹⁵-AA¹⁶-AA¹⁷-AA¹⁸-AA¹⁹-AA²⁰ is PEP12 as defined herein; wherein AA²¹-AA²²-AA²³-AA²⁴-AA²⁵ is PEP2 as already defined herein; wherein AA⁸-AA⁹-AA¹⁰ is PEP3 as defined herein; wherein AA³⁰-AA³¹-AA³² is PEP4 as defined herein; wherein AA¹¹, AA¹², AA²⁶, AA²⁷, AA²⁸, and AA²⁹ are as defined herein; wherein one end of LINKER interacts covalently with AA¹⁶ or AA²⁰; wherein another end of LINKER interacts covalently with AA²¹; and wherein curved lines represents covalent bonds between LINKERs and AAs “boxes”. Curved lines' lengths may not be representative of the actual relative distance between the LINKERs and AAs.

[0607] Each and every definitions of PEP1, PEP2, PEP3, PEP4, PEP5, PEP6, PEP7, PEP8, PEP9, PEP10, PEP11, PEP12, AA¹⁷, “PEP” pairs, quadruplets, hexaplets and heptuplet e.g. PEP1:PEP2, PEP12:PEP2, or PEP7:PEP5:PEP12:LINKER:PEP2:PEP6:PEP8, as already defined herein with respect to non-cyclic GFR-binding compounds also apply, without any specific restrictions unless specified otherwise or contradictory in context, to the cyclic GFR-binding compounds as defined herein.

[0608] In one example, said cyclic GFR-binding compound is a synthetic molecule as defined herein in the definition section.

[0609] In one particular example, said cyclic GFR-binding compound is a synthetic peptide, or a variant or analog thereof, or a cyclic peptidomimetic.

[0610] In one most particular example, said cyclic GFR-binding compound is a synthetic cyclic peptide.

[0611] In one example, a length of said cyclic GFR-binding compound, in solution, such as in a physiologically acceptable solvent such as water or PBS, is comprised between about 6 and about 20 nm, preferably between about 6 and about 16 nm, as determined using the standard «3D» procedure described above.

[0612] In one particular example, said cyclic GFR-binding compounds may be any one of peptides of SEQ ID NO: 38181 to 100328.

[0613] LINKER Suitable for Implementing Cyclic GFR-Compounds' Embodiments

[0614] In one particular example, said LINKER has a Mw comprised between about 28 and about 2,000 Da. In one particular example, said LINKER has a Mw comprised between about 75 and about 2,000 Da. In one particular example, said LINKER has a Mw comprised between about 150 and about 2,000 Da. In one particular example, said LINKER has a Mw comprised between about 150 and about 1,500 Da. In one most particular example, said LINKER has a Mw comprised between about 300 and about 1,000 Da. In one even more particular example, said LINKER has a Mw comprised between about 300 and about 800 Da.

[0615] The chemical nature of said LINKER is not meant to be particularly limited and may be any organic molecule capable of covalently connecting two ends of a peptide or a peptidomimetic such as PEP(A)-LINKER-PEP(B) or PEP(C)-PEP12-LINKER-PEP2-PEP(D) so as to form a cyclic compound, so long as LINKER provides sufficient spacing between the two elements connected therethrough and adequate cycle stability for these two connected elements to provide or conserve the required recoding activity. LINKER may thus be, for example, in certain embodiments, a peptide, or variant, analog or peptidomimetic thereof, a polysaccharide, a polynucleotide, a saturated or unsaturated hydrocarbon chain, or a mixture thereof.

[0616] For example, in certain embodiments, LINKER is a peptide with 2 to 16 amino acids. In one particular example, LINKER is a peptide with 2 to 10 amino acids. In one particular example, LINKER is a peptide with 2 to 9 amino acids. In one most particular example, LINKER is a peptide with 3 to 9 amino acids.

[0617] Thus, in one particular example, said cyclic GFR-binding compound is a peptide, a variant or analog thereof as defined herein, with between 15-60 (in particular between 15-55, more particularly between 19-60, and even more particularly between 19-55) amino acids, or between 15-35 (in particular between 15-30, more particularly between 19-35, and even more particularly between 19-30) amino acids, comprising a peptide, a variant or analog thereof of general formula (I); wherein one end of LINKER interacts covalently with one end of PEP(A); wherein another end of LINKER interacts covalently with one end of PEP(B); wherein PEP(A) comprises PEP1 or PEP12; wherein PEP(B) comprises PEP2; wherein LINKER is a peptide comprising 2 to 16 amino acids (in particular 2 to 10, 2 to 9, or 3 to 9 amino acids).

[0618] Thus, in one particular example, said cyclic GFR-binding compound is a peptide, a variant or analog thereof as defined herein, with between 15-60 (in particular between 15-55, more particularly between 19-60, and even more particularly between 19-55) amino acids, or between 15-35 (in particular between 15-30, more particularly between 19-35, and even more particularly between 19-30) amino acids, comprising a peptide, a variant or analog thereof of general formula (II); wherein LINKER is a peptide comprising 2 to 16 amino acids (in particular 2 to 10, 2 to 9, or 3 to 9 amino acids); wherein PEP12 is a peptide with 8 amino acids of formula PEP1-AA¹⁷-PEP11 as already defined herein; wherein PEP1, PEP2, PEP11, PEP(C) and PEP(D) are as already defined herein; wherein AA¹³ and AA²¹ may be both N-terminal amino acids or both C-terminal amino acids; wherein AA²⁵ and AA²⁰ may be both N-terminal amino acids or both C-terminal amino acids; wherein one end of LINKER interacts covalently with one end of PEP12 via AA²⁰; wherein another end of LINKER interacts covalently with PEP2 via AA²¹; wherein one end of PEP(C) interacts covalently with PEP12 via AA¹³; wherein one end of PEP(D) interacts covalently with PEP2 via AA²⁵.

[0619] Thus, in one particular example, said cyclic GFR-binding compound is a peptide, a variant or analog thereof as defined herein, with between 15-60 (in particular between 15-55, more particularly between 19-60, and even more particularly between 19-55) amino acids, or between 15-35 (in particular between 15-30, more particularly between 19-35, and even more particularly between 19-30) amino acids, having any one of the general formula (V) to (XXXIV); wherein LINKER is a peptide comprising 2 to 16 amino acids (in particular 2 to 10, 2 to 9, or 3 to 9 amino acids).

[0620] In certain embodiments, said cyclic GFR-binding compound is a cyclic peptidomimetic as defined herein, with between 15-60 (in particular between 15-55, more particularly between 19-60, and even more particularly between 19-55) amino acids, or between 15-35 (in particular between 15-30, more particularly between 19-35, and even more particularly between 19-30) amino acids, of general formula (II); wherein LINKER is not a peptide but may comprise amino acids or peptides in covalent or non-covalent (preferably covalent) association with other groups or residues other than amino acids or peptides.

[0621] In one particular example, LINKER comprises (or is) a peptide of general formula (XXXV):

*AA²⁰¹-AA²⁰²-AA²⁰³-AA²⁰⁴-AA²⁰⁵-AA²⁰⁶-AA²⁰⁷-AA²⁰⁸-AA²⁰⁹** (XXXV)

wherein said peptide of formula (XXXV) may be selected from the group consisting of *AA^{III}-AA^{I}-AA^{I}-AA^{II}-AA^{VII}-AA^{XII}-AA^{XII}-AA^{XIII}-AA^{XIII}**, *AA^{III}-AA^{I}-AA^{VI}-AA^{II}-AA^{VII}-AA^{XII}-AA^{XII}-AA^{XIII}-AA^{XIII}**, *AA^{III}-AA^{I}-AA^{I}-AA^{II}-AA^{II}-AA^{XII}-AA^{XII}-AA^{XIII}-AA^{XIII}**, *AA^{III}-AA_{I}-AA^{II}-AA^{II}-AA^{VII}-AA^{XII}-AA^{XII}-AA^{XIII}-AA^{XIII}**, *AA^{III}-AA^{I}-AA^{II}-AA^{IV}-AA^{IV}-AA^{XII}-AA^{XII}-AA^{XIII}-AAx^{XIII}**, *AA^{II}-AA^{I}-AA^{II}-AA^{II}-AA^{II}-AA^{XII}-AA^{XII}-AA^{XIII}-AA^{XIII}**, *AA^{III}-AA^{III}-AA^{II}-AA^{VII}-AA^{II}-AA^{XII}-AA^{XII} AA^{XIII}-AA^{XIII}**, *AA^{III}-AA^{I}-AA^{I}-AA^{II}-AA^{II}-AA^{XII}-AA^{XII}-AA^{XIII}-AA^{XIII}**, *AA^{V}-AA^{V}-AA^{VII}-AA^{VII}-AA^{XII}-AA^{XII}-AA^{XIII} AA^{XIII}**, *AA^{VIII}-AA^{V}-AA^{VII}-AA^{II}-AA^{XII}-AA^{XII}-AA^{XIII}-AA^{XIII}** and *AA^{V}-AA^{V}-AA^{VII}-AA^{II}-AA^{XII}-AA^{XII}-AA^{XIII}-AA^{XIII}**; wherein AA^{I} is any amino acid as defined herein, AA^{II} is any polar amino acid as defined herein, AA^{III} is any acidic amino acid as defined herein, AA^{IV} is any aliphatic amino acid as defined herein, AA^{V} is any apolar amino acid as defined herein, AA^{VI} is any aromatic amino acid as defined herein, AA^{VII} is any basic amino acid as defined herein, AA^{VIII} is L or I as defined herein, AA^{xII} is an amino acid selected from the group consisting of G, A, V, L, I, P, M, K, R, H, Y and E, wherein AA^{XIII} is absent, AA^{II} or AA^{VII}, preferably absent; and wherein any one of the fragment AA²⁰¹, AA²⁰¹-AA²⁰², AA²⁰¹-AA²⁰²-AA²⁰³, AA²⁰¹-AA²⁰²-AA²⁰³-AA²⁰⁴, AA²⁰¹-AA²⁰²-AA²⁰³-AA²⁰⁴-AA²⁰⁵, AA²⁰¹-AA²⁰²-AA²⁰³-AA²⁰⁴-AA²⁰⁵-AA²⁰⁶, AA²⁰¹-AA²⁰²-AA²⁰³-AA²⁰⁴-AA²⁰⁵-AA²⁰⁶-AA²⁰⁷, AA²⁰³-AA²⁰⁴-AA²⁰⁵-AA²⁰⁶-AA²⁰⁷-AA²⁰⁸-AA²⁰⁹, AA²⁰⁴-AA²⁰⁵-AA²⁰⁶-AA²⁰⁷-AA²⁰⁸-AA²⁰⁹, AA²⁰⁵-AA²⁰⁶-AA²⁰⁷-AA²⁰⁸-AA²⁰⁹, AA²⁰⁶-AA²⁰⁷-AA²⁰⁸-AA²⁰⁹, AA²⁰⁷-AA²⁰⁸-AA²⁰⁹, AA²⁰⁸-AA²⁰⁹ or AA²⁰⁹, may be absent. In the peptides of formula (XXXV), any one of the amino acid labelled “*” or the amino acid labelled “**” is an N-terminal amino acid and the other is a C-terminal amino acid.

[0622] For instance, in the peptide of formula *AA^{III}-AA^{I}-AA^{I}-AA^{II}-AA^{VII}-AA^{XII}-AA^{XII}-AA^{XIII}-AA^{XIII}** (XXXV-1), AA^{III} occupies position AA²⁰¹, *AA^{I} occupies position AA²⁰², AA^{I} occupies position AA²⁰³, AA^{II} occupies position AA²⁰⁴, AA^{VII} occupies position AA²⁰⁵, AA^{XII} occupies position AA²⁰⁶, AA^{XII} occupies position AA²⁰⁷, AA^{XIII} occupies position AA²⁰⁸ and AA^{XIII}** occupies position AA²⁰⁹.

[0623] Likewise, in the peptide of formula *AA^{V}-AA^{V}-AA^{VII}-AA^{II}-AA^{XII}-AA^{XII}-AA^{XIII}-AA^{XIII}** (XXXV-1) AA^{V} occupies position AA²⁰¹, AA^{V} occupies position AA²⁰², AA^{VII} occupies position AA²⁰³, AA^{II} occupies position AA²⁰⁴, AA^{XII} occupies position AA²⁰⁵, AA^{XII} occupies position AA²⁰⁸, AA^{XIII} occupies position AA²⁰⁷, AA^{XIII} occupies position AA²⁰⁸ and position AA²⁰⁹ is vacant, thus AA²⁰⁸ would be the amino acid which interacts, in certain embodiments, with PEP2 via AA²¹.

[0624] In one example, LINKER may thus be any one of the following peptides:

[0625] *AA²⁰¹-AA²⁰²-AA²⁰³-AA²⁰⁴-AA²⁰⁵-AA²⁰⁶-AA²⁰⁷-AA²⁰⁸** (XXXV-1); *AA²⁰¹-AA²⁰²-AA²⁰³-AA²⁰⁴-AA²⁰⁵-AA²⁰⁶-AA²⁰⁷** (XXXV-2); *AA²⁰¹-AA²⁰²-AA²⁰³-AA²⁰⁴-AA²⁰⁵-AA²⁰⁶** (XXXV-3); *AA²⁰¹-AA²⁰²-AA²⁰³-AA²⁰⁴-AA²⁰⁵** (XXXV-4); *AA²⁰¹-AA²⁰²-AA²⁰³-AA²⁰⁴** (XXXV-5); *AA²⁰¹-AA²⁰²-AA²⁰³** (XXXV-6); *AA²⁰¹-AA²⁰²** (XXXV-7); *AA²⁰²-AA²⁰³-AA²⁰⁴-AA²⁰⁵-AA²⁰⁶-AA²⁰⁷-AA²⁰⁸-AA²⁰⁹** (XXXV-8); *AA²⁰³-AA²⁰⁴-AA²⁰⁵-AA²⁰⁶-AA²⁰⁷-AA²⁰⁸-AA²⁰⁹** (XXXV-9); *AA²⁰⁴-AA²⁰⁵-AA²⁰⁶-AA²⁰⁷-AA²⁰⁸-AA²⁰⁹** (XXXV-10); *AA²⁰⁵-AA²⁰⁶-AA²⁰⁷-AA²⁰⁸-AA²⁰⁹** (XXXV-11); *AA²⁰⁶-AA²⁰⁷-AA²⁰⁸-AA²⁰⁹** (XXXV-12); *AA²⁰⁷-AA²⁰⁸-AA²⁰⁹** (XXXV-13); *AA²⁰⁸-AA²⁰⁹** (XXXV-14); wherein, for instance, said peptide of formulae (XXXV-1) may thus be selected from the group consisting of *AA^{III}-AA^{I}-AA^{I}-AA^{II}-AA^{VII}-AA^{XII}-AA^{XII}-AA^{XIII}-AA^{XIII}**, *AA^{III}-AA^{I}-AA^{VI}-AA^{II}-AA^{VII}-AA^{XII}-AA^{XII}-AA^{XIII}-AA^{XIII}**, *AA^{III}-AA^{I}-AA^{I}-AA^{II}-AA^{II}-AA^{XII}-AA^{XII}-AA^{XIII}**, *AA^{III}-AA_{I}-AA^{II}-AA^{II}-AA^{VII}-AA^{XII}-AA^{XII}-AA^{XIII}-**, *AA^{III}-AA^{I}-AA^{II}-AA^{IV}-AA^{IV}-AA^{XII}-AA^{XII}-AA^{XIII}-**, *AA^{II}-AA^{I}-AA^{II}-AA^{II}-AA^{II}-AA^{XII}-AA^{XII}-AA^{XIII}**, *AA^{III}-AA^{III}-AA^{II}-AA^{VII}-AA^{II}-AA^{XII}-AA^{XII}-AA^{XIII}-**, *AA^{III}-AA^{I}-AA^{I}-AA^{II}-AA^{II}-AA^{XII}-AA^{XII}--AA^{XIII}**, *AA^{V}-AA^{V}-AA^{VII}-AA^{VII}-AA^{XII}-AA^{XII}-AA^{XIII}**, *AA^{VIII}-AA^{V}-AA^{VII}-AA^{II}-AA^{XII}-AA^{XII}-AA^{XIII}** and *AA^{V}-AA^{V}-AA^{VII}-AA^{II}-AA^{XII}-AA^{XII}-AA^{XIII}**.

[0626] In one particular example, LINKER comprises a peptide of formula (XXXV), (XXXV-2) or (XXXV-4).

[0627] In one example, LINKER comprises (or is) a poly-(aliphatic amino acid) peptide such as poly-alanine peptide (A)ₙ, or a poly-glycine (G)ₙ, n being an integer comprised between 2 and 16, preferably between 2 to 9, such as A-A-A-A-A-A-A-A-A, A-A-A-A-A-A-A, A-A-A-A-A, G-G-G-G-G-G-G-G-G, G-G-G-G-G-G-G or G-G-G-G-G.

[0628] In one particular example, LINKER comprises (or is) a peptide of general formulae (XXXV) to (XXXV-14), more particularly (XXXV), (XXXV-2) or (XXXV-4), or a poly-(aliphatic amino acid)ₙ peptide as defined herein.

[0629] For example, in certain embodiments, LINKER is a polysaccharide comprising 2 to 16 saccharides. In one particular example, LINKER is a polysaccharide comprising 2 to 10 saccharides. In one particular example, LINKER is a polysaccharide comprising 2 to 9 saccharides. In one most particular example, LINKER is a polysaccharide comprising 3 to 9 saccharides. Suitable monosaccharides include, but are not limited to, glucose (dextrose), fructose (levulose) and galactose. Monosaccharides are the building blocks of disaccharides (such as sucrose) and polysaccharides (such as celluloses, chitosans, ulvanes and starches). Further, each carbon atom that supports a hydroxyl group (except for the first and last) is chiral, giving rise to a number of isomeric forms all with the same chemical formula. A large number of biologically important modified monosaccharides exists e.g. amino sugars such as Galactosamine, Glucosamine, Sialic acid, N-Acetylglucosamine, and sulfosugars such as Sulfoquinovose. All of these monosaccharide and polysaccharide derivatives may be used as LINKER in the present invention.

[0630] Thus, in one particular example, said cyclic GFR-binding compound is a hydride peptide/polysaccharide peptidomimetic of between 1,500 and 7,000 or between 1,500 and 5,000 Da and comprising compound (Ia) as defined herein; wherein one end of LINKER interacts covalently with one end of PEP(A); wherein another end of LINKER interacts covalently with one end of PEP(B); wherein PEP(A) comprises PEP1 or PEP12; wherein PEP(B) comprises PEP2; and wherein LINKER is a polysaccharide comprising 2 to 16 saccharides (in particular 2 to 10, 2 to 9, or 3 to 9 saccharides).

[0631] Thus, in one particular example, said cyclic GFR-binding compound is a hydride peptide/polysaccharide peptidomimetic of between 1,500 and 7,000 or between 1,500 and 5,000 Da and comprising compound (Ib) as defined herein; wherein one end of a first LINKER interacts covalently with one end of PEP(A); wherein another end of a first LINKER interacts covalently with one end of PEP(B); wherein one end of a second LINKER interacts covalently with another end of PEP(B); wherein another end of a second LINKER interacts covalently with another end of PEP(A); wherein PEP(A) comprises PEP1; wherein PEP(B) comprises PEP2; and wherein LINKER are independently a polysaccharide comprising 2 to 16 saccharides (in particular 2 to 10, 2 to 9, or 3 to 9 saccharides).

[0632] Thus, in one particular example, said cyclic GFR-binding compound is a hydride peptide/polysaccharide peptidomimetic of between 1,500 and 7,000 or between 1,500 and 5,000 Da and comprising compound (IIa) as defined herein; wherein LINKER is a polysaccharide comprising 2 to 16 saccharides (in particular 2 to 10, 2 to 9, or 3 to 9 saccharides); wherein PEP12 is a peptide with 8 amino acids of formula PEP1-AA¹⁷-PEP11 as already defined herein; wherein PEP1, PEP2, PEP11, PEP(C) and PEP(D) are as already defined herein; wherein AA¹³ and AA²¹ may be both N-terminal amino acids or both C-terminal amino acids; wherein AA²⁵ and AA²⁰ may be both N-terminal amino acids or both C-terminal amino acids; wherein one end of LINKER interacts covalently with one end of PEP12 via AA²⁰; wherein another end of LINKER interacts covalently with PEP2 via AA²¹; wherein one end of PEP(C) interacts covalently with PEP12 via AA¹³; and wherein one end of PEP(D) interacts covalently with PEP2 via AA²⁵.

[0633] Thus, in one particular example, said cyclic GFR-binding compound is a hydride peptide/polysaccharide peptidomimetic of between 1,500 and 7,000 or between 1,500 and 5,000 Da and comprising compound (IIb) as defined herein; wherein PEP12 is a peptide with 8 amino acids of formula PEP1-AA¹⁷-PEP11 as defined herein; wherein PEP2 is a peptide with five amino acids as already defined herein; wherein one end of PEP(C) interacts covalently with PEP12 via one end of PEP1; wherein one end of PEP(D) interacts covalently with one end of PEP2; wherein one end of a first LINKER interacts covalently with one end of PEP12 via one end of PEP11; wherein another end of a first LINKER interacts covalently with another end of PEP2; wherein one end of a second LINKER interacts covalently with another end of PEP(D); wherein another end of a second LINKER interacts covalently with another end of PEP(C); wherein PEP(C) is a peptide with at least 5 amino acids, in particular a peptide with between 5 and 12 amino acids; wherein PEP(D) is a peptide with at least 5 amino acids, in particular a peptide with between 5 and 11 amino acids; and wherein LINKER are independently a polysaccharide comprising 2 to 16 saccharides (in particular 2 to 10, 2 to 9, or 3 to 9 saccharides).

[0634] For example, in certain embodiments, LINKER is a polynucleotide comprising 2 to 16 nucleotides. In one particular example, LINKER is a polynucleotide comprising 2 to 10 nucleotides. In one particular example, LINKER is a polynucleotide comprising 2 to 9 nucleotides. In one most particular example, LINKER is a polynucleotide comprising 3 to 9 nucleotides. Suitable nucleotides include adenine (A), guanine (G), thymine (T), cytosine (C), uracil (U) and derivatives, analogues and/or mimetic thereof.

[0635] Thus, in one particular example, said cyclic GFR-binding compound is a hydride peptide/polynucleotide peptidomimetic of between 1,500 and 7,000 or between 1,500 and 5,000 Da and comprising compound (Ia) as defined herein; wherein one end of LINKER interacts covalently with one end of PEP(A); wherein another end of LINKER interacts covalently with one end of PEP(B); wherein PEP(A) comprises PEP1 or PEP12; wherein PEP(B) comprises PEP2; and wherein LINKER is a polynucleotide comprising 2 to 16 nucleotides (in particular 2 to 10, 2 to 9, or 3 to 9 nucleotides).

[0636] Thus, in one particular example, said cyclic GFR-binding compound is a hydride peptide/polynucleotide peptidomimetic of between 1,500 and 7,000 or between 1,500 and 5,000 Da and comprising compound (IIa) as defined herein; wherein LINKER is a polynucleotide comprising 2 to 16 nucleotides (in particular 2 to 10, 2 to 9, or 3 to 9 nucleotides); wherein PEP12 is a peptide with 8 amino acids of formula PEP1-AA¹⁷-PEP11 as already defined herein; wherein PEP1, PEP2, PEP11, PEP(C) and PEP(D) are as already defined herein; wherein AA¹³ and AA²¹ may be both N-terminal amino acids or both C-terminal amino acids; wherein AA²⁵ and AA²⁰ may be both N-terminal amino acids or both C-terminal amino acids; wherein one end of LINKER interacts covalently with one end of PEP12 via AA²⁰; wherein another end of LINKER interacts covalently with PEP2 via AA²¹; wherein one end of PEP(C) interacts covalently with PEP12 via AA¹³; and wherein one end of PEP(D) interacts covalently with PEP2 via AA²⁵.

[0637] For example, in certain embodiments, LINKER is a saturated or unsaturated hydrocarbon chain comprising between 1 and 22, between 1 and 16, between 1 and 12, between 1 and 8 or between 1 and 6 carbon atoms, wherein said hydrocarbon chain is optionally interrupted by one or more non-carbon atom, preferably between 1 and 16, between 1 and 12 or between 1 and 8 non-carbon atoms as appropriate, wherein said non-carbon atom is selected from the group consisting of —O—, —S—, —C(═O), —SO₂—, —N(Ri)(C═O)—, and —N(Ri)-, wherein Ri is selected from the group consisting of a hydrogen atom, a C1-C6 alkyl group and an aryl group, and wherein said hydrocarbon chain is non-substituted or substituted by at least one radical selected from the group consisting of a halogen, a monosaccharide, a poly(1-6)saccharide, a nucleotide, a poly(1-6)nucleotide, a C1-C10 alkyl group and an aryl group.

[0638] Thus, in one particular example, said cyclic GFR-binding compound is a hydride peptide/hydrocarbon chain peptidomimetic of between 1,500 and 7,000 or between 1,500 and 5,000 Da and comprising compound (Ia) as defined herein; wherein one end of LINKER interacts covalently with one end of PEP(A); wherein another end of LINKER interacts covalently with one end of PEP(B); wherein PEP(A) comprises PEP1 or PEP12; wherein PEP(B) comprises PEP2; and wherein LINKER is a saturated or unsaturated hydrocarbon chain comprising between 1 and 22 as defined herein.

[0639] Thus, in one particular example, said cyclic GFR-binding compound is a hydride peptide/hydrocarbon chain peptidomimetic of between 1,500 and 7,000 or between 1,500 and 5,000 Da and comprising compound (IIa) as defined herein; wherein LINKER is a saturated or unsaturated hydrocarbon chain comprising between 1 and 22 as defined herein; wherein PEP12 is a peptide with 8 amino acids of formula PEP1-AA¹⁷-PEP11 as already defined herein; wherein PEP1, PEP2, PEP11, PEP(C) and PEP(D) are as already defined herein; wherein AA¹³ and AA²¹ may be both N-terminal amino acids or both C-terminal amino acids; wherein AA²⁵ and AA²⁰ may be both N-terminal amino acids or both C-terminal amino acids; wherein one end of LINKER interacts covalently with one end of PEP12 via AA²⁰; wherein another end of LINKER interacts covalently with PEP2 via AA²¹; wherein one end of PEP(C) interacts covalently with PEP12 via AA¹³; and wherein one end of PEP(D) interacts covalently with PEP2 via AA²⁵.

[0640] In one example, LINKER is a saturated or unsaturated hydrocarbon chain of at most 10 nanometres (nm) in length, preferably at most 8 nm, 6 nm, 4 nm or 2 nm as determined using the standard «2D» procedure described above.

[0641] In one example, such saturated or unsaturated hydrocarbon chains include polyethylene glycol (PEG) or any one of its derivatives.

[0642] More particularly, LINKER is a tripeptide (three amino acids). More particularly, LINKER is a tetrapeptide (four amino acids). More particularly, LINKER is a pentapeptide (five amino acids). More particularly, LINKER is a hexapeptide (six amino acids). More particularly, LINKER is a heptapeptide (seven amino acids). More particularly, LINKER is an octapeptide (eight amino acids). More particularly, LINKER is a nonapeptide (nine amino acids).

[0643] In one particular example, LINKER is a peptide selected from the group consisting of DENEKVV, DENKNVV, DEYDKVV, DDSSNVI, DSSNNVI, DDMGVPT, DKGVVTY, NDKQQII, DAANNVV, DSANNVV, DDSSNVI, DNGRVLL, VGRKPKV, IGKTPKI, VGRTPKV, RIKPHQGQH, EYVRKKPKL, EIVRKKPIF, EYVRKKP, EIVRKKP, polyalanine (A₁₋₉) (preferably A₂₋₅) and polyglycine (G₁₋₉) (preferably G₂₋₅).

[0644] For example, in certain embodiments, to synthetise cyclic GFR-binding compounds of the present disclosure, the covalent bonds between e.g. LINKER, PEP(A) to (D) or PEP1 to PEP12, may be created through the chemical reaction between a free amine moiety e.g. of a N-terminal amino acid (—NH₂ or —NH₃X, X generally being a halide anion selected from the group consisting of F⁻, Cl⁻ and Br⁻), typically acting as a nucleophile, and an electrophile moiety of e.g. a C-terminal amino acid. Such an electrophile moiety includes, but is not limited to, alkyl halides (—CR₂—X), alcohols (—CR₂—OH), acid chlorides (—C(═O)X), esters, (—C(═O)OR), phosphate (—OP(OR)₃), phosphinate (—OP(OR)R₂), phosphonates (—OP(OR)₂R), phosphonite (—P(OR)₂R) or sulfonic esters (—SO₂OR). More particularly, this covalent bond is an amide bond (in particular a peptide bond) formed through conventional peptide synthesis using conventional coupling reagents as already defined herein.

[0645] For example, in certain embodiments, to synthetise cyclic GFR-binding compounds of the present disclosure, the covalent bonds between e.g. LINKER, PEP(A) to (D) or PEP1 to PEP12, may be created through the chemical reaction between a free carboxylic acid moiety e.g. of a C-terminal amino acid (—CO₂H or —CO₂X, X generally being an inorganic cation such as alkaline cations (e.g. Li⁺, Na⁺ or K⁺) or an organic cation such as ammonium cations), typically acting as an electrophile, and a nucleophile moiety of e.g. an N-terminal amino acid. Such a nucleophile moiety includes, but is not limited to, alcohols (—OH), amines (—NH₂), phosphines (—PR₃), thiols (—SH). More particularly, this covalent interaction is a peptide bond formed through conventional peptide synthesis using conventional coupling reagents as already defined herein.

[0646] Cyclisation of a cyclic GFR-binding compound of the present disclosure may be carried out as described above using conventional peptide bond formation procedures, click chemistry, formation of disulphide bonds, etc.

[0647] The present disclosure provides pharmaceutical associations, combinations and compositions, methods and uses for converting or recoding any neoplastic cell into a non-neoplastic cell (in particular, a functional and healthy cell) of any type. In some cases, the cell type of the converted or recoded non-neoplastic cell may be selected/chosen by e.g. a person providing the treatment to a subject.

[0648] In one example, said pharmaceutical association, combination or composition induces the conversion of a neoplastic cell into a physiologically functional and/or healthy cell of any cell lineage including, but not limited to, bone cell, chondrocytic cell, neuron cell, fibroblast, vascular cell, ligament cell, tendon cell, epithelial cell, retina photoreceptor cell, muscle cell, glandular cell, myoepithelial cell, subepithelial interstitial cell, smooth muscle cell, blood cell, gastrointestinal cell, adipocyte, Sertoli cells, Leydig cell, Germ cell and renal cell lineages. Such cells include any progenitor or precursor cells or any partially or fully differentiated cells of these lineages. More generally, the present disclosure includes the treatment of any neoplastic cell of any type and cell lineage using the associations, combinations, compositions, methods and uses as defined herein.

[0649] For example, in certain embodiments, a neoplastic cell of a bone tissue (i.e. a neoplastic cell from the bone cell lineage) has been, may be or will be the cause of the development of a neoplastic bone disease (e.g. bone cancer). Inducing the conversion of this neoplastic bone cell into a physiologically functional and/or healthy cell (any physiologically functional and/or healthy cell) of the bone cell lineage may protect a subject/patient carrying this cell from bone cancer. In some cases, it may be preferable and/or satisfying and/or more practical to induce the conversion of a neoplastic bone cell into a functional and/or healthy cell of a different cell lineage i.e. not a cell from a bone lineage, such as, for example, in certain embodiments, a cell from a chondrocytic cell lineage, a fibroblast lineage or a ligament/tendon cell lineage.

[0650] In one example, a neoplastic cell of a soft tissue such as a muscle, vascular, skin or kidney tissue (i.e. a neoplastic cell from the muscle, vascular, skin or kidney cell lineage, respectively) has been, may be or will be the cause of the development of a neoplastic muscle, vascular, skin or kidney disease (e.g. Rhabdomyosarcoma, Hemangiosarcoma, basal cell carcinoma or Squamous cell carcinoma, respectively). Inducing the conversion of any of these neoplastic cells into a physiologically functional and/or healthy cell (any physiologically functional and/or healthy cell) of the muscle, vascular, skin or kidney cell lineage, respectively, may protect a subject carrying any of these cells from the diseases mentioned above. In some cases, it may be preferable and/or satisfying and/or more practical to induce the conversion of, e.g. a neoplastic muscle, vascular, skin or kidney cell into a functional and/or healthy cell of a different cell lineage i.e. not a cell from a muscle, vascular, skin or kidney lineage, such as, for example, in certain embodiments, a cell from a bone cell lineage so that a medical practitioner such as a surgeon, may be able to surgically remove the newly converted bone cells more conveniently. The surgery may be carried out purely for aesthetic reasons and/or because of a discomfort and/or to avoid the possibility of e.g. infections, complications, etc.

[0651] For example, in certain embodiments, a neoplastic cell of an adipose tissue (i.e. a neoplastic cell from the adipocyte lineage) has been, may be or will be the cause of the development of a neoplastic adipose tissue disease (e.g. adipose tissue cancer or lipoma). Several treatment routes may be envisaged to induce the conversion of this neoplastic adipocyte into a physiologically functional and/or healthy cell and thus protect a subject/patient carrying this cell from a lipoma. In some cases, it may be preferable and/or satisfying and/or more practical to induce the conversion of the neoplastic adipocyte into a functional and/or healthy cell of a bone cell lineage. Once the treatment has been completed i.e. after the conversion of the neoplastic adipocyte into a non-neoplastic bone cell (e.g. an osteocyte) has taken place, surgical removal of the newly converted bone cells may be performed for e.g. aesthetic reasons and/or because of a discomfort and/or to avoid the possibility of e.g. infections, complications, etc. In other cases, it may be preferable and/or satisfying and/or more practical to induce the conversion of the neoplastic adipocyte into a functional and/or healthy cell of a muscle cell lineage. Because the conversion of the neoplastic adipocyte into a non-neoplastic muscle cell (e.g. a myocyte) does not yield hard tissues such as osteocytes, the patient would generally not feel any substantial discomfort and therefore, the surgical removal of the newly converted muscle cells may be avoided, although it may still be performed if the patient were to feel even the slight discomfort. The necessity of performing surgery following the presently defined recoding treatment would generally be left to the appreciation of the patient upon supervision of a medical practitioner.

[0652] The present disclosure thus provides methods to convert or recode a neoplastic cell of a specific tissue/cell type (e.g. bone, cartilage, neuron, prostate, ovary, muscle, skin, vascular, ligament, tendon, eye retina, kidney, head, neck, blood, gastrointestinal, lung and adipose tissues) into a non-neoplastic cell of any tissue/cell type (e.g. bone, cartilage, neuron, prostate, ovary, muscle, skin, vascular, ligament, tendon, eye retina and kidney).

[0653] II.3. Induction into a Cell of a Specific Cell Lineage

[0654] Bone Cell Lineage

[0655] Certain embodiments of the invention are particularly useful for inducing the conversion of a neoplastic cell into a cell (any cell) of a bone cell lineage.

[0656] In certain embodiments useful for inducing the conversion of a neoplastic cell into a cell (any cell) of a bone cell lineage, PEP1 is selected from the group consisting of SAIS, NAIS, SATS and SPIS.

[0657] In certain embodiments useful for inducing the conversion of a neoplastic cell into a cell (any cell) of a bone cell lineage, PEP2 is selected from the group consisting of LKNYQ, LKKYR, LRKHR and LKYHY.

[0658] In certain embodiments useful for inducing the conversion of a neoplastic cell into a cell (any cell) of a bone cell lineage, PEP3 is selected from the group consisting of VPT, APT, VPQ, VSQ and TQV.

[0659] In certain embodiments useful for inducing the conversion of a neoplastic cell into a cell (any cell) of a bone cell lineage, PEP4 is selected from the group consisting of VVE, VVR, VVK, VAE, VRS, VKS and EDH.

[0660] In certain embodiments useful for inducing the conversion of a neoplastic cell into a cell (any cell) of a bone cell lineage, PEP5 is a peptide of general formula PEP3-AA¹¹-AA¹²; wherein PEP3 is selected from the group consisting of VPT, APT, VPQ, VSQ and TQV; wherein AA¹¹ is selected from the group consisting of E, K, Q, R, A, D, G and H, in particular E, K, Q, A and D; wherein AA¹² is selected from the group consisting of L, M, T, E, Q and H, in particular L. In one particular example, PEP5 is selected from the group consisting of VPTEL, APTKL, APTQL, VPTKL, VPQAL, VSQDL, VPQDL and TQVQL.

[0661] In certain embodiments useful for inducing the conversion of a neoplastic cell into a cell (any cell) of a bone cell lineage, PEP6 is a peptide of general formula AA²⁶-AA²⁷-AA²⁸-AA²⁹-PEP4; wherein PEP4 is selected from the group consisting of VVE, VVR, VVK, VAE, VRS, VKS and EDH; wherein AA²⁶ is absent or selected from the group consisting of AA^{III} amino acids, preferably is absent or E; wherein AA²⁷ and AA²⁸ are independently selected from the group consisting of AA^{III} and AA^{V} amino acids, preferably AA²⁷ is selected from the group consisting of D, E, N, G, M and T, preferably AA²⁸ is selected from the group consisting of M, I, V and L; wherein AA²⁹ is absent or selected from the group consisting of AA^{II} amino acids, preferably absent or S. In one particular example, PEP6 is selected from the group consisting of DMVVE, EMVVE, NMVVR, NMVVK, EGMSVAE, MIVRS, MIVKS, MVVKS and TLEDH.

[0662] In certain embodiments useful for inducing the conversion of a neoplastic cell into a cell (any cell) of a bone cell lineage, PEP7 is an amino acid or a peptide with between two and seven amino acids of general formula AA¹-AA²-AA³-AA⁴-AA⁵-AA⁶-AA⁷; wherein AA¹, AA², AA³, AA⁴, and AA⁵ are independently absent or AA^{I} as defined herein; wherein AA⁶ is absent or selected from the group consisting of S, T, C, E, Q, P and R, preferably C, S, T or R; wherein AA⁷ is absent or is selected from the group consisting of S, T, C, E, Q, P and R, preferably is selected from the group consisting of C, S and P; and wherein at least one of AA¹, AA², AA³, AA⁴, AA⁵, AA⁶ or AA⁷ is not absent. In one particular example, PEP7 is selected from the group consisting of KIPKAXX, SIPKAXX, HVTKPTX, YVPKPXX, TVPKPXX, AVPKAXX, KVGKAXX, ASAAPXX, ASASPXX and RNVQXRP.

[0663] In certain embodiments useful for inducing the conversion of a neoplastic cell into a cell (any cell) of a bone cell lineage, PEP8 is an amino acid or a peptide with between two and six amino acids of general formula AA³³-AA³⁴-AA³⁵-AA³⁶-AA³⁷-AA³⁸; wherein AA³³ is absent or is selected from the group consisting of AA^{I} amino acids at the exception of AA^{VI} amino acids; AA³⁴ is absent or is selected from the group consisting of AA^{III} and AA^{IV} amino acids; wherein AA³⁵ is absent or is selected from the group consisting of AA^{III} amino acids, preferably is S or C; wherein AA³⁶ is absent or is selected from the group consisting of AA^{III} and AA^{IV} amino acids; wherein AA³⁷ is absent or is selected from the group consisting of AA^{III} amino acids, preferably is S or C; wherein AA³⁸ is absent or is selected from the group consisting of AN; and wherein at least one of AA³³, AA³⁴, AA³⁵, AA³⁶, AA³⁷ or AA³⁸ is not absent. In one particular example, PEP8 is selected from the group consisting of GXGXR, SXGXH, AXGXH, XGXR, XKXS and LAXKXE.

[0664] In certain embodiments useful for inducing the conversion of a neoplastic cell into a cell (any cell) of a bone cell lineage, PEP9 is a peptide of general formula AA¹-AA²-AA³-AA⁴-AA⁵-AA⁶-AA⁷-PEP5; wherein PEP5 is a peptide of formula PEP3-AA¹¹-AA¹²; wherein PEP3 is selected from the group consisting of VPT, APT, VPQ, VSQ and TQV; wherein AA¹¹ is selected from the group consisting of E, K, Q, R, A, D, G and H, in particular E, K, Q, A and D; wherein AA¹² is selected from the group consisting of L, M, T, E, Q and H, in particular L; wherein AA¹, AA², AA³, AA⁴, and AA⁵ are independently absent or AA^{I} as defined herein; wherein AA⁶ is absent or selected from the group consisting of S, T, C, E, Q, P and R, preferably C, S, T or R; wherein AA⁷ is selected from the group consisting of S, T, C, E, Q, P and R, preferably is selected from the group consisting of C, S and P. In one particular example, PEP9 is selected from the group consisting of KIPKAXXVPTEL, SIPKAXXVPTEL, HVTKPTXAPTKL, YVPKPXXAPTKL, TVPKPXXAPTQL, AVPKAXXAPTKL, KVGKAXXVPTKL, ASAAPXXVPQAL, ASASPXXVSQDL, ASASPXXVPQDL and RNVQXRPTQVQL.

[0665] In certain embodiments useful for inducing the conversion of a neoplastic cell into a cell (any cell) of a bone cell lineage, PEP10 is a peptide of general formula PEP6-AA³³-AA³⁴-AA³⁵-AA³⁶-AA³⁷-AA³⁸; wherein PEP6 is a peptide of formula AA²⁶-AA²⁷-AA²⁸-AA²⁹-PEP4; wherein PEP4 is selected from the group consisting of VVE, VVR, VVK, VAE, VRS, VKS and EDH; wherein AA²⁶ is absent or selected from the group consisting of AA^{III} amino acids, preferably E; wherein AA²⁷ and AA²⁸ are independently selected from the group consisting of AA^{III} and AA^{V} amino acids, preferably AA²⁷ is selected from the group consisting of D, E, N, G, M and T, preferably AA²⁸ is selected from the group consisting of M, I, V and L; wherein AA²⁹ is absent or selected from the group consisting of AA^{II} amino acids, preferably absent or S; wherein AA³³ is absent or is selected from the group consisting of AA^{I} amino acids at the exception of AA^{VI} amino acids; AA³⁴ is absent or is selected from the group consisting of AA^{III} and AA^{IV} amino acids; wherein AA³⁵ is absent or is selected from the group consisting of AA^{II} amino acids, preferably is S or C; wherein AA³⁶ is absent or is selected from the group consisting of AA^{III} and AA^{IV} amino acids; wherein AA³⁷ is absent or is selected from the group consisting of AA^{II} amino acids, preferably is S or C; wherein AA³⁸ is absent or is selected from the group consisting of AA^{I}. In one particular example, PEP10 is selected from the group consisting of DMVVEGXGXR, EMVVEGXGXR, NMVVRSXGXH, NMVVRAXGXH, NMVVKAXGXH, EGMSVAEXGXR, MIVRSXKXS, MIVKSXKXS, MVVKSXKXS and TLEDHLAXKXE.

[0666] In certain embodiments useful for inducing the conversion of a neoplastic cell into a cell (any cell) of a bone cell lineage, PEP12 is a peptide of general formula PEP1-AA¹⁷-PEP11; wherein AA¹⁷ is selected from the group consisting of G, A, V, L, I, P, F, M, W, T and S (in particular is selected from the group consisting of M, I, L, V and T); wherein PEP1 is selected from the group consisting of SAIS, NAIS, SATS and SPIS.

[0667] In certain embodiments useful for inducing the conversion of a neoplastic cell into a cell (any cell) of a bone cell lineage, PEP11 is a peptide with 3 amino acids of general formula AA¹⁸-AA¹⁹-AA²⁰; wherein AA¹⁸ is selected from the group consisting of L, V, Q, A and R, in particular is L; wherein AA¹⁹ is selected from the group consisting of F, W, H and Y (in particular is an aromatic, polar amino acid such as Y); wherein AA²⁰ is selected from the group consisting of L, F, Y, K, I, V and M, in particular is selected from the group consisting of L, F, Y, and K. In one particular example, PEP11 is selected from the group consisting of LYL, LYF, LYY and LYK.

[0668] The definitions of “PEP” pairs, quadruplets, hexaplets and heptuplet e.g. PEP1:PEP2, PEP12:PEP2, or PEP7:PEP5:PEP12:LINKER:PEP2:PEP6:PEP8, most particularly useful for inducing the conversion of a neoplastic cell into a cell (any cell) of a bone cell lineage, are as already defined herein to the extent that PEP1 to PEP12 are particularly useful for these applications as defined in the present bone section. For instances:

[0669] In certain embodiments, useful for inducing the conversion of a neoplastic cell into a cell (any cell) of a bone cell lineage, the pair PEP1:PEP2 is selected from the group consisting of SAIS:LKNYQ, NAIS:LKKYR, SATS:LRKHR and SPIS:LKYHY.

[0670] In certain embodiments, useful for inducing the conversion of a neoplastic cell into a cell (any cell) of a bone cell lineage, the pair PEP12:PEP2 is selected from the group consisting of SAIS-AA¹⁷-LYL:LKNYQ, NAIS-AA¹⁷-LYF:LKKYR, SATS-AA¹⁷-LYY:LRKHR and SPIS-AA¹⁷-LYK:LKYHY; wherein AA¹⁷ is selected from the group consisting of G, A, V, L, I, P, F, M, W, T and S (in particular is selected from the group consisting of M, V and T).

[0671] In certain embodiments useful for inducing the conversion of a neoplastic cell into a cell (any cell) of a bone cell lineage, PEP3 is selected from the group consisting of VPT, APT, VPQ, VSQ and TQV; PEP4 is selected from the group consisting of VVE, VVR, VVK, VAE, VRS, VKS and EDH; and wherein the pair PEP3:PEP4 is selected from the group consisting of VPT:VVE, APT:VVR, APT:VVK, VPT:VAE, VPQ:VRS, VSQ:VKS, VPQ:VKS and TQV:EDH.

[0672] In certain embodiments useful for inducing the conversion of a neoplastic cell into a cell (any cell) of a bone cell lineage, PEP5 is selected from the group consisting of VPTEL, APTKL, APTQL, VPTKL, VPQAL, VSQDL, VPQDL and TQVQL; PEP6 is selected from the group consisting of DMVVE, EMVVE, NMVVR, NMVVK, EGMSVAE, MIVRS, MIVKS, MVVKS and TLEDH; and wherein the pair PEP5:PEP6 is selected from the group consisting of VPTEL:DMVVE, VPTEL:EMVVE, APTKL:NMVVR, APTQL:NMVVR, APTKL:NMVVK, VPTKL:EGMSVAE, VPQAL:MIVRS, VSQDL:MIVKS, VPQDL:MVVKS and TQVQL:TLEDH.

[0673] In certain embodiments useful for inducing the conversion of a neoplastic cell into a cell (any cell) of a bone cell lineage, PEP7 is selected from the group consisting of KIPKAXX, SIPKAXX, HVTKPTX, YVPKPXX, TVPKPXX, AVPKAXX, KVGKAXX, ASAAPXX, ASASPXX and RNVQXRP; wherein PEP8 is selected from the group consisting of GXGXR, SXGXH, AXGXH, XGXR, XKXS and LAXKXE; and wherein the pair PEP7:PEP8 is selected from the group consisting of KIPKAXX:GXGXR, SIPKAXX:GXGXR, HVTKPTX:SXGXH, YVPKPXX:SXGXH, KVGKAXX:XGXR, ASAAPXX:XKXS, ASASPXX:XKXS and RNVQXRP:LAXKXE.

[0674] In certain embodiments useful for inducing the conversion of a neoplastic cell into a cell (any cell) of a bone cell lineage, PEP9 is selected from the group consisting of KIPKAXXVPTEL, SIPKAXXVPTEL, HVTKPTXAPTKL, YVPKPXXAPTKL, TVPKPXXAPTQL, AVPKAXXAPTKL, KVGKAXXVPTKL, ASAAPXXVPQAL, ASASPXXVSQDL, ASASPXXVPQDL and RNVQXRPTQVQL; PEP10 is selected from the group consisting of DMVVEGXGXR, EMVVEGXGXR, NMVVRSXGXH, NMVVRAXGXH, NMVVKAXGXH, EGMSVAEXGXR, MIVRSXKXS, MIVKSXKXS, MVVKSXKXS and TLEDHLAXKXE; and wherein the pair PEP9:PEP10 is selected from the group consisting of KIPKAXXVPTEL:DMVVEGXGXR, SIPKAXXVPTEL:EMVVEGXGXR, HVTKPTXAPTKL:NMVVRSXGXH, YVPKPXXAPTKL:NMVVRSXGXH, KVGKAXXVPTKL:EGMSVAEXGXR, ASAAPXXVPQAL:MIVRSXKXS, ASASPXXVSQDL:MIVKSXKXS, ASASPXXVPQDL:MVVKSXKXS and RNVQXRPTQVQL:TLEDHLAXKXE.

[0675] In certain embodiments useful for inducing the conversion of a neoplastic cell into a cell (any cell) of a bone cell lineage, PEP5 is selected from the group consisting of VPTEL, APTKL, APTQL, VPTKL, VPQAL, VSQDL, VPQDL and TQVQL; PEP6 is selected from the group consisting of DMVVE, EMVVE, NMVVR, NMVVK, EGMSVAE, MIVRS, MIVKS, MVVKS and TLEDH; and wherein the pair PEP5:PEP6 is selected from the group consisting of VPTEL:DMVVE, VPTEL:EMVVE, APTKL:NMVVR, APTQL:NMVVR, APTKL:NMVVK, VPTKL:EGMSVAE, VPQAL:MIVRS, VSQDL:MIVKS, VPQDL:MVVKS and TQVQL:TLEDH; and wherein the pair PEP5:PEP6 is not VPTEL:DMVVE when PEP1 is SAIS and PEP2 is LKNYQ; wherein the pair PEP5:PEP6 is not VPTEL:EMVVE when PEP1 is SAIS and PEP2 is LKNYQ; wherein the pair PEP5:PEP6 is not APTKL:NMVVR when PEP1 is NAIS and PEP2 is LKKYR; wherein the pair PEP5:PEP6 is not APTQL:NMVVR when PEP1 is NAIS and PEP2 is LKKYR; wherein the pair PEP5:PEP6 is not APTKL:NMVVK when PEP1 is SATS and PEP2 is LRKHR; wherein the pair PEP5:PEP6 is not VPTKL:EGMSVAE when PEP1 is SPIS and PEP2 is LKYHY.

[0676] In certain embodiments useful for inducing the conversion of a neoplastic cell into a cell (any cell) of a bone cell lineage, PEP9 is selected from the group consisting of KIPKAXXVPTEL, SIPKAXXVPTEL, HVTKPTXAPTKL, YVPKPXXAPTKL, TVPKPXXAPTQL, AVPKAXXAPTKL, KVGKAXXVPTKL, ASAAPXXVPQAL, ASASPXXVSQDL, ASASPXXVPQDL and RNVQXRPTQVQL; PEP10 is selected from the group consisting of DMVVEGXGXR, EMVVEGXGXR, NMVVRSXGXH, NMVVRAXGXH, NMVVKAXGXH, EGMSVAEXGXR, MIVRSXKXS, MIVKSXKXS, MVVKSXKXS and TLEDHLAXKXE; and wherein the pair PEP9:PEP10 is selected from the group consisting of KIPKAXXVPTEL:DMVVEGXGXR, SIPKAXXVPTEL:EMVVEGXGXR, HVTKPTXAPTKL:NMVVRSXGXH, YVPKPXXAPTKL:NMVVRSXGXH, KVGKAXXVPTKL:EGMSVAEXGXR, ASAAPXXVPQAL:MIVRSXKXS, ASASPXXVSQDL:MIVKSXKXS, ASASPXXVPQDL:MVVKSXKXS and RNVQXRPTQVQL:TLEDHLAXKXE; and wherein PEP9:PEP10 is not KIPKAXXVPTEL:DMVVEGXGXR when PEP1 is SAIS and PEP2 is LKNYQ; wherein PEP9:PEP10 is not SIPKAXXVPTEL:EMVVEGXGXR when PEP1 is SAIS and PEP2 is LKNYQ; wherein PEP9:PEP10 is not HVTKPTXAPTKL:NMVVRSXGXH when PEP1 is NAIS and PEP2 is LKKYR; wherein PEP9:PEP10 is not YVPKPXXAPTKL:NMVVRSXGXH when PEP1 is NAIS and PEP2 is LKKYR; wherein PEP9:PEP10 is not TVPKPXXAPTQL:NMVVRAXGXH when PEP1 is NAIS and PEP2 is LKKYR; wherein PEP9:PEP10 is not AVPKAXXAPTKL:NMVVKAXGXH when PEP1 is SATS and PEP2 is LRKHR; wherein PEP9:PEP10 is not KVGKAXXVPTKL:EGMSVAEXGXR when PEP1 is SPIS and PEP2 is LKYHY.

[0677] In certain embodiments useful for inducing the conversion of a neoplastic cell into a cell (any cell) of a bone cell lineage, PEP1 is selected from the group consisting of SAIS, NAIS, SATS and SPIS; PEP11 is selected from the group consisting of LYL, LFF, LYF, LYY, LYK, LYI, LFI, LYV, VYY, QIM, AKV and RKI; and the pair PEP1:PEP11 is selected from the group consisting of SAIS:LYL, NAIS:LYF, SATS:LYY and SPIS:LYK.

[0678] In one aspect, the present disclosure provides a GFR-binding compound, wherein said GFR-binding compound is a peptide, a variant or analog thereof, or a peptidomimetic as defined herein, with between 20 and 60 (in particular between 20 and 50, and more particularly, between 20 and 45) amino acids, comprising a peptide with four amino acids (PEP1) or a peptide with eight amino acids (PEP12), a peptide with five amino acids (PEP2), and optionally a pair of peptides selected form the group consisting of PEP3:PEP4, PEP3:PEP6, PEP3:PEP10, PEP5:PEP4, PEP9:PEP4, PEP5:PEP6, PEP5:PEP10, PEP9:PEP6 and PEP9:PEP10; wherein said GFR-binding compound does not comprise the pair of peptides VPTEL:DMVVE when PEP1 is SAIS and PEP2 is LKNYQ; wherein said GFR-binding compound does not comprise the pair of peptides VPTEL:EMVVE when PEP1 is SAIS and PEP2 is LKNYQ; wherein said GFR-binding compound does not comprise the pair of peptides APTKL:NMVVR when PEP1 is NAIS and PEP2 is LKKYR; wherein said GFR-binding compound does not comprise the pair of peptides APTQL:NMVVR when PEP1 is NAIS and PEP2 is LKKYR; wherein said GFR-binding compound does not comprise the pair of peptides APTKL:NMVVK when PEP1 is SATS and PEP2 is LRKHR; wherein said GFR-binding compound does not comprise the pair of peptides VPTKL:EGMSVAE when PEP1 is SPIS and PEP2 is LKYHY; and, optionally, wherein the RMSD is 2.45 Å or less.

[0679] In one aspect, the present disclosure provides a GFR-binding compound, wherein said GFR-binding compound is a peptide, a variant or analog thereof, or a peptidomimetic as defined herein, with between 20 and 60 (in particular between 20 and 50, and more particularly, between 20 and 45) amino acids, comprising a peptide with four amino acids (PEP1) or a peptide with eight amino acids (PEP12), a peptide with five amino acids (PEP2), and optionally a pair of peptides selected form the group consisting of PEP3:PEP4, PEP3:PEP6, PEP3:PEP10, PEP5:PEP4, PEP9:PEP4, PEP5:PEP6, PEP5:PEP10, PEP9:PEP6 and PEP9:PEP10; wherein said GFR-binding compound does not comprise the pair of peptides KIPKAXXVPTEL:DMVVEGXGXR when PEP1 is SAIS and PEP2 is LKNYQ; wherein said GFR-binding compound does not comprise the pair of peptides SIPKAXXVPTEL:EMVVEGXGXR when PEP1 is SAIS and PEP2 is LKNYQ; wherein said GFR-binding compound does not comprise the pair of peptides HVTKPTXAPTKL:NMVVRSXGXH when PEP1 is NAIS and PEP2 is LKKYR; wherein said GFR-binding compound does not comprise the pair of peptides YVPKPXXAPTKL:NMVVRSXGXH when PEP1 is NAIS and PEP2 is LKKYR; wherein said GFR-binding compound does not comprise the pair of peptides TVPKPXXAPTQL:NMVVRAXGXH when PEP1 is NAIS and PEP2 is LKKYR; wherein said GFR-binding compound does not comprise the pair of peptides AVPKAXXAPTKL:NMVVKAXGXH when PEP1 is SATS and PEP2 is LRKHR; wherein said GFR-binding compound does not comprise the pair of peptides KVGKAXXVPTKL:EGMSVAEXGXR when PEP1 is SPIS and PEP2 is LKYHY; and, optionally, wherein the RMSD is 2.45 Å or less.

[0680] In certain embodiments useful for inducing the conversion of a neoplastic cell into a cell (any cell) of a bone cell lineage, said GFR-binding compound is a synthetic molecule as defined herein in the definition section.

[0681] In certain embodiments useful for inducing the conversion of a neoplastic cell into a cell (any cell) of a bone cell lineage, said GFR-binding compound is a synthetic peptide, or a variant or analog thereof, or a peptidomimetic.

[0682] Chondrocytic Cell Lineage

[0683] Certain embodiments of the invention are particularly useful for inducing the conversion of a neoplastic cell into a cell (any cell) of a chondrocytic cell lineage.

[0684] In certain embodiments useful for inducing the conversion of a neoplastic cell into a cell (any cell) of a chondrocytic cell lineage, PEP1 is selected from the group consisting of SAIS, NAIS, SPIS, EPLP and EPLT.

[0685] In certain embodiments useful for inducing the conversion of a neoplastic cell into a cell (any cell) of a chondrocytic cell lineage, PEP2 is selected from the group consisting of LKNYQ, LKKYR, YKQYE and EQLSN.

[0686] In certain embodiments useful for inducing the conversion of a neoplastic cell into a cell (any cell) of a chondrocytic cell lineage, PEP3 is selected from the group consisting of VPT, APT, VPQ and VSQ.

[0687] In certain embodiments useful for inducing the conversion of a neoplastic cell into a cell (any cell) of a chondrocytic cell lineage, PEP4 is selected from the group consisting of VVE, VVR, VRS and VKS.

[0688] In certain embodiments useful for inducing the conversion of a neoplastic cell into a cell (any cell) of a chondrocytic cell lineage, PEP5 is a peptide of general formula PEP3-AA¹¹-AA¹²; wherein PEP3 is selected from the group consisting of VPT, APT, VPQ and VSQ; wherein AA¹¹ is selected from the group consisting of E, K, Q, R, A, D, G and H, in particular E, K, Q, R, A and D; wherein AA¹² is selected from the group consisting of L, M, T, E, Q and H, in particular is L. In one particular example, PEP5 is selected from the group consisting of VPTEL, APTKL, APTQL, VPTRL, VPQAL, VSQDL and VPQDL.

[0689] In certain embodiments useful for inducing the conversion of a neoplastic cell into a cell (any cell) of a chondrocytic cell lineage, PEP6 is a peptide of general formula AA²⁶-AA²⁷-AA²⁸-AA²⁹-PEP4; wherein PEP4 is selected from the group consisting of VVE, VVR, VRS and VKS; wherein AA²⁶ is absent or selected from the group consisting of AA^{III} amino acids, preferably is absent; wherein AA²⁷ and AA²⁸ are independently selected from the group consisting of AA^{III} and AA^{V} amino acids, preferably AA²⁷ is selected from the group consisting of D, E, N and M, preferably AA²⁸ is selected from the group consisting of M, I and V; wherein AA²⁹ is absent or selected from the group consisting of AA^{II} amino acids, preferably absent. In one particular example, PEP6 is selected from the group consisting of DMVVE, EMVVE, NMVVR, DMVVE, MIVRS, MIVKS and MVVKS.

[0690] In certain embodiments useful for inducing the conversion of a neoplastic cell into a cell (any cell) of a chondrocytic cell lineage, PEP7 is an amino acid or a peptide with between two and seven amino acids of general formula AA¹-AA²-AA³-AA⁴-AA⁵-AA⁶-AA⁷; wherein AA¹, AA², AA³, AA⁴, and AA⁵ are independently absent or AA^{I} as defined herein; wherein AA⁶ is absent or selected from the group consisting of S, T, C, E, Q, P and R, preferably is S, C or T; wherein AA⁷ is absent or is selected from the group consisting of S, T, C, E, Q, P and R, preferably is S or C; and wherein at least one of AA¹, AA², AA³, AA⁴, AA⁵, AA⁶ or AA⁷ is not absent. In one particular example, PEP7 is selected from the group consisting of KIPKAXX, SIPKAXX, HVTKPTX, YVPKPXX, TVPKPXX, STPPTXX, ASAAPXX and ASASPXX.

[0691] In certain embodiments useful for inducing the conversion of a neoplastic cell into a cell (any cell) of a chondrocytic cell lineage, PEP8 is an amino acid or a peptide with between two and six amino acids of general formula AA³³-AA³⁴-AA³⁵-AA³⁶-AA³⁷-AA³⁸; wherein AA³³ is absent or is selected from the group consisting of AA^{I} amino acids at the exception of AA^{VI} amino acids, preferably absent, G, S or A; AA³⁴ is absent or is selected from the group consisting of AA^{III} and AA^{IV} amino acids, preferably absent; wherein AA³⁵ is absent or is selected from the group consisting of AA^{II} amino acids, preferably is S or C; wherein AA³⁶ is absent or is selected from the group consisting of AA^{III} and AA^{IV} amino acids, preferably is G or K; wherein AA³⁷ is absent or is selected from the group consisting of AA^{II} amino acids, preferably is S or C; wherein AA³⁸ is absent or is selected from the group consisting of AA^{I}; and wherein at least one of AA³³, AA³⁴, AA³⁵, AA³⁶, AA³⁷ or AA³⁸ is not absent. In one particular example, PEP8 is selected from the group consisting of GXGXR, SXGXH, AXGXH, SXGXR and XKXS.

[0692] In certain embodiments useful for inducing the conversion of a neoplastic cell into a cell (any cell) of a chondrocytic cell lineage, PEP9 is a peptide of general formula AA¹-AA²-AA³-AA⁴-AA⁵-AA⁶-AA⁷-PEP5; wherein PEP5 is a peptide of formula PEP3-AA¹¹-AA¹²; wherein PEP3 is selected from the group consisting of VPT, APT, VPQ and VSQ; wherein AA¹¹ is selected from the group consisting of E, K, Q, R, A, D, G and H, in particular E, K, Q, R, A and D; wherein AA¹² is selected from the group consisting of L, M, T, E, Q and H, in particular is L; wherein AA¹, AA², AA³, AA⁴, and AA⁵ are independently absent or AA^{I} as defined herein; wherein AA⁶ is absent or selected from the group consisting of S, T, C, E, Q, P and R, preferably is S, C or T; wherein AA⁷ is selected from the group consisting of S, T, C, E, Q, P and R, preferably is S or C. In one particular example, PEP9 is selected from the group consisting of KIPKAXXVPTEL, SIPKAXXVPTEL, HVTKPTXAPTKL, YVPKPXXAPTKL, TVPKPXXAPTQL, STPPTXXVPTRL, ASAAPXXVPQAL, ASASPXXVSQDL and ASASPXXVPQDL.

[0693] In certain embodiments useful for inducing the conversion of a neoplastic cell into a cell (any cell) of a chondrocytic cell lineage, PEP10 is a peptide of general formula PEP6-AA³³-AA³⁴-AA³⁵-AA³⁶-AA³⁷-AA³⁸; wherein PEP6 is a peptide of formula AA²⁶-AA²⁷-AA²⁸-AA²⁹-PEP4; wherein PEP4 is selected from the group consisting of VVE, VVR, VRS and VKS; wherein AA²⁶ is absent or selected from the group consisting of AA^{III} amino acids, preferably absent; wherein AA²⁷ and AA²⁸ are independently selected from the group consisting of AA^{III} and AA^{V} amino acids, preferably AA²⁷ is selected from the group consisting of D, E, N and M, preferably AA²⁸ is selected from the group consisting of M, I and V; wherein AA²⁹ is absent or selected from the group consisting of AA^{II} amino acids, preferably absent; wherein AA³³ is absent or is selected from the group consisting of AA^{I} amino acids at the exception of AA^{VI} amino acids, preferably absent, G, S or A; AA³⁴ is absent or is selected from the group consisting of AA^{III} and AA^{IV} amino acids, preferably absent; wherein AA³⁵ is absent or is selected from the group consisting of AA^{II} amino acids, preferably is S or C; wherein AA³⁶ is absent or is selected from the group consisting of AA^{III} and AA^{IV} amino acids, preferably is G or K; wherein AA³⁷ is absent or is selected from the group consisting of AA^{II} amino acids, preferably is S or C; wherein AA³⁸ is absent or is selected from the group consisting of AA^{I}. In one particular example, PEP10 is selected from the group consisting of DMVVEGXGXR, EMVVEGXGXR, NMVVRSXGXH, NMVVRAXGXH, DMVVESXGXR, MIVRSXKXS, MIVKSXKXS and MVVKSXKXS.

[0694] In certain embodiments useful for inducing the conversion of a neoplastic cell into a cell (any cell) of a chondrocytic cell lineage, PEP12 is a peptide of general formula PEP1-AA¹⁷-PEP11; wherein AA¹⁷ is selected from the group consisting of G, A, V, L, I, P, F, M, W, T and S (in particular is selected from the group consisting of M, I, L, V and T); wherein PEP1 is selected from the group consisting of SAIS, NAIS, SPIS, EPLP and EPLT.

[0695] In certain embodiments useful for inducing the conversion of a neoplastic cell into a cell (any cell) of a chondrocytic cell lineage, PEP11 is a peptide with 3 amino acids of general formula AA¹⁸-AA¹⁹-AA²⁰; wherein AA¹⁸ is selected from the group consisting of L, V, Q, A and R, in particular is L or V; wherein AA¹⁹ is selected from the group consisting of F, W, H and Y, in particular is Y or F; wherein AA²⁰ is selected from the group consisting of L, F, Y and I. In one particular example, PEP11 is selected from the group consisting of LYL, LYF, LFI, VYY and LYY.

[0696] The definitions of “PEP” pairs, quadruplets, hexaplets and heptuplet e.g. PEP1:PEP2, PEP12:PEP2, or PEP7:PEP5:PEP12:LINKER:PEP2:PEP6:PEP8, most particularly useful for inducing the conversion of a neoplastic cell into a cell (any cell) of a chondrocytic cell lineage, are as already defined herein to the extent that PEP1 to PEP12 are particularly useful for these applications. For instances:

[0697] In certain embodiments useful for inducing the conversion of a neoplastic cell into a cell (any cell) of a chondrocytic cell lineage, the pair PEP1:PEP2 is selected from the group consisting of SAIS:LKNYQ, NAIS:LKKYR, SPIS:YKQYE, EPLP:EQLSN and EPLT:EQLSN.

[0698] In certain embodiments useful for inducing the conversion of a neoplastic cell into a cell (any cell) of a chondrocytic cell lineage, the pair PEP12:PEP2 is selected from the group consisting of SAIS-AA¹⁷-LYL:LKNYQ, NAIS-AA¹⁷-LYFIKKYR, SPIS-AA¹⁷-LRYKQYE, EPLP-AA¹⁷-VYY:EQLSN and EPLT-AA¹⁷-LYY:EQLSN; wherein AA¹⁷ is selected from the group consisting of G, A, V, L, I, P, F, M, W, T and S (in particular is selected from the group consisting of M, I, V and T).

[0699] In certain embodiments useful for inducing the conversion of a neoplastic cell into a cell (any cell) of a chondrocytic cell lineage, PEP3 is selected from the group consisting of VPT, APT, VPQ and VSQ; PEP4 is selected from the group consisting of VVE, VVR, VRS and VKS; and wherein the pair PEP3:PEP4 is selected from the group consisting of VPT:VVE, APT:VVR, VPQ:VRS, VSQ:VKS and VPQ:VKS.

[0700] In certain embodiments useful for inducing the conversion of a neoplastic cell into a cell (any cell) of a chondrocytic cell lineage, PEP5 is selected from the group consisting of VPTEL, APTKL, APTQL, VPTRL, VPQAL, VSQDL and VPQDL; PEP6 is selected from the group consisting of DMVVE, EMVVE, NMVVR, DMVVE, MIVRS, MIVKS and MVVKS; and wherein the pair PEP5:PEP6 is selected from the group consisting of VPTEL:DMVVE, VPTEL:EMVVE, APTKL:NMVVR, APTQL:NMVVR, VPTRL:DMVVE, VPQAL:MIVRS, VSQDL:MIVKS and VPQDL:MVVKS.

[0701] In certain embodiments useful for inducing the conversion of a neoplastic cell into a cell (any cell) of a chondrocytic cell lineage, PEP7 is selected from the group consisting of KIPKAXX, SIPKAXX, HVTKPTX, YVPKPXX, TVPKPXX, STPPTXX, ASAAPXX and ASASPXX; wherein PEP8 is selected from the group consisting of GXGXR, SXGXH, AXGXH, SXGXR and XKXS; and wherein the pair PEP7:PEP8 is selected from the group consisting of KIPKAXX: GXGXR, SIPKAXX:GXGXR, HVTKPTX:SXGXH, YVPKPXX:SXGXH, TVPKPXX:AXGXH, STPPTXX:SXGSR, ASAAPXX:XKXS and ASASPXX:XKXS.

[0702] In certain embodiments useful for inducing the conversion of a neoplastic cell into a cell (any cell) of a chondrocytic cell lineage, PEP9 is selected from the group consisting of KIPKAXXVPTEL, SIPKAXXVPTEL, HVTKPTXAPTKL, YVPKPXXAPTKL, TVPKPXXAPTQL, STPPTXXVPTRL, ASAAPXXVPQAL, ASASPXXVSQDL and ASASPXXVPQDL; PEP10 is selected from the group consisting of DMVVEGXGXR, EMVVEGXGXR, NMVVRSXGXH, NMVVRAXGXH, DMVVESXGXR, MIVRSXKXS, MIVKSXKXS and MVVKSXKXS; and wherein the pair PEP9:PEP10 is selected from the group consisting of KI PKAXXVPTEL:DMVVEGXGXR, SIPKAXXVPTEL: EMVVEGXGXR, HVTKPTXAPTKL:NMVVRSXGXH, YVPKPXXAPTKL:NMVVRSXGXH, TVPKPXXAPTQL:NMVVRAXGXH, STPPTXXVPTRL:DMVVESXGSR, ASAAPXXVPQAL:MIVRSXKXS, ASASPXXVSQDL:MIVKSXKXS and ASASPXXVPQDL:MVVKSXKXS.

[0703] In certain embodiments useful for inducing the conversion of a neoplastic cell into a cell (any cell) of a chondrocytic cell lineage, PEP5 is selected from the group consisting of VPTEL, APTKL, APTQL, VPTRL, VPQAL, VSQDL and VPQDL; PEP6 is selected from the group consisting of DMVVE, EMVVE, NMVVR, DMVVE, MIVRS, MIVKS and MVVKS; and wherein the pair PEP5:PEP6 is selected from the group consisting of VPTEL:DMVVE, VPTEL:EMVVE, APTKL:NMVVR, APTQL:NMVVR, VPTRL:DMVVE, VPQAL:MIVRS, VSQDL:MIVKS and VPQDL:MVVKS; wherein the pair PEP5:PEP6 is not VPTEL:DMVVE when PEP1 is SAIS and PEP2 is LKNYQ; wherein the pair PEP5:PEP6 is not VPTEL:EMVVE when PEP1 is SAIS and PEP2 is LKNYQ; wherein the pair PEP5:PEP6 is not APTKL:NMVVR when PEP1 is NAIS and PEP2 is LKKYR; wherein the pair PEP5:PEP6 is not APTQL:NMVVR when PEP1 is NAIS and PEP2 is LKKYR; wherein the pair PEP5:PEP6 is not VPTRL:DMVVE when PEP1 is SPIS and PEP2 is YKQYE; wherein the pair PEP5:PEP6 is not VPQAL:MIVRS when PEP1 is EPLP and PEP2 is EQLSN; wherein the pair PEP5:PEP6 is not VSQDL:MIVKS when PEP1 is EPLT and PEP2 is EQLSN; wherein the pair PEP5:PEP6 is not VPQDL:MVVKS when PEP1 is EPLT and PEP2 is EQLSN.

[0704] In certain embodiments useful for inducing the conversion of a neoplastic cell into a cell (any cell) of a chondrocytic cell lineage, PEP9 is selected from the group consisting of KIPKAXXVPTEL, SIPKAXXVPTEL, HVTKPTXAPTKL, YVPKPXXAPTKL, TVPKPXXAPTQL, STPPTXXVPTRL, ASAAPXXVPQAL, ASASPXXVSQDL and ASASPXXVPQDL; PEP10 is selected from the group consisting of DMVVEGXGXR, EMVVEGXGXR, NMVVRSXGXH, NMVVRAXGXH, DMVVESXGXR, MIVRSXKXS, MIVKSXKXS and MVVKSXKXS; and wherein the pair PEP9:PEP10 is selected from the group consisting of KI PKAXXVPTEL:DMVVEGXGXR, SIPKAXXVPTEL:EMVVEGXGXR, HVTKPTXAPTKL:NMVVRSXGXH, YVPKPXXAPTKL:NMVVRSXGXH, TVPKPXXAPTQL:NMVVRAXGXH, STPPTXXVPTRL:DMVVESXGSR, ASAAPXXVPQAL:MIVRSXKXS, ASASPXXVSQDL:MIVKSXKXS and ASASPXXVPQDL:MVVKSXKXS; wherein PEP9:PEP10 is not KIPKAXXVPTEL:DMVVEGXGXR when PEP1 is SAIS and PEP2 is LKNYQ; wherein PEP9:PEP10 is not SIPKAXXVPTEL:EMVVEGXGXR when PEP1 is SAIS and PEP2 is LKNYQ; wherein PEP9:PEP10 is not HVTKPTXAPTKL:NMVVRSXGXH when PEP1 is NAIS and PEP2 is LKKYR; wherein PEP9:PEP10 is not YVPKPXXAPTKL:NMVVRSXGXH when PEP1 is NAIS and PEP2 is LKKYR; wherein PEP9:PEP10 is not TVPKPXXAPTQL:NMVVRAXGXH when PEP1 is NAIS and PEP2 is LKKYR; wherein PEP9:PEP10 is not STPPTXXVPTRL:DMVVESXGSR when PEP1 is SPIS; wherein PEP9:PEP10 is not ASAAPXXVPQAL:MIVRSXKXS when PEP1 is EPLP and PEP2 is EQLSN; wherein PEP9:PEP10 is not ASASPXXVSQDL:MIVKSXKXS when PEP1 is EPLT and PEP2 is EQLSN; wherein PEP9:PEP10 is not ASASPXXVPQDL:MVVKSXKXS when PEP1 is EPLT and PEP2 is EQLSN.

[0705] In certain embodiments useful for inducing the conversion of a neoplastic cell into a cell (any cell) of a chondrocytic cell lineage, PEP1 is selected from the group consisting of SAIS, NAIS, SPIS, EPLP and EPLT; PEP11 is selected from the group consisting of LYL, LYF, LFI, VYY and LYY; and the pair PEP1:PEP11 is selected from the group consisting of SAIS:LYL, NAIS:LYF, EPLP:VYY and EPLT:LYY.

[0706] In one aspect, the present disclosure provides a GFR-binding compound, wherein said GFR-binding compound is a peptide, a variant or analog thereof, or a peptidomimetic as defined herein, with between 20 and 60 (in particular between 20 and 50, and more particularly, between 20 and 45) amino acids, comprising a peptide with four amino acids (PEP1) or a peptide with eight amino acids (PEP12), a peptide with five amino acids (PEP2), and optionally a pair of peptides selected form the group consisting of PEP3:PEP4, PEP3:PEP6, PEP3:PEP10, PEP5:PEP4, PEP9:PEP4, PEP5:PEP6, PEP5:PEP10, PEP9:PEP6 and PEP9:PEP10; wherein said GFR-binding compound does not comprise the pair of peptides VPTEL:DMVVE when PEP1 is SAIS and PEP2 is LKNYQ; wherein said GFR-binding compound does not comprise the pair of peptides VPTEL:EMVVE when PEP1 is SAIS and PEP2 is LKNYQ; wherein said GFR-binding compound does not comprise the pair of peptides APTKL:NMVVR when PEP1 is NAIS and PEP2 is LKKYR; wherein said GFR-binding compound does not comprise the pair of peptides APTQL:NMVVR when PEP1 is NAIS and PEP2 is LKKYR; wherein said GFR-binding compound does not comprise the pair of peptides VPTRL:DMVVE when PEP1 is SPIS and PEP2 is YKQYE; wherein said GFR-binding compound does not comprise the pair of peptides VPQAL:MIVRS when PEP1 is EPLP and PEP2 is EQLSN; wherein said GFR-binding compound does not comprise the pair of peptides VSQDL:MIVKS when PEP1 is EPLT and PEP2 is EQLSN; wherein said GFR-binding compound does not comprise the pair of peptides VPQDL:MVVKS when PEP1 is EPLT and PEP2 is EQLSN; and, optionally, wherein the RMSD is 2.45 Å or less.

[0707] In one aspect, the present disclosure provides a GFR-binding compound, wherein said GFR-binding compound is a peptide, a variant or analog thereof, or a peptidomimetic as defined herein, with between 20 and 60 (in particular between 20 and 50, and more particularly, between 20 and 45) amino acids, comprising a peptide with four amino acids (PEP1) or a peptide with eight amino acids (PEP12), a peptide with five amino acids (PEP2), and optionally a pair of peptides selected form the group consisting of PEP3:PEP4, PEP3:PEP6, PEP3:PEP10, PEP5:PEP4, PEP9:PEP4, PEP5:PEP6, PEP5:PEP10, PEP9:PEP6 and PEP9:PEP10; wherein said GFR-binding compound does not comprise the pair of peptides KIPKAXXVPTEL:DMVVEGXGXR when PEP1 is SAIS and PEP2 is LKNYQ; wherein said GFR-binding compound does not comprise the pair of peptides SIPKAXXVPTEL:EMVVEGXGXR when PEP1 is SAIS and PEP2 is LKNYQ; wherein said GFR-binding compound does not comprise the pair of peptides HVTKPTXAPTKL:NMVVRSXGXH when PEP1 is NAIS and PEP2 is LKKYR; wherein said GFR-binding compound does not comprise the pair of peptides YVPKPXXAPTKL:NMVVRSXGXH when PEP1 is NAIS and PEP2 is LKKYR; wherein said GFR-binding compound does not comprise the pair of peptides TVPKPXXAPTQL:NMVVRAXGXH when PEP1 is NAIS and PEP2 is LKKYR; wherein said GFR-binding compound does not comprise the pair of peptides STPPTXXVPTRL:DMVVESXGSR when PEP1 is SPIS; wherein said GFR-binding compound does not comprise the pair of peptides ASAAPXXVPQAL:MIVRSXKXS when PEP1 is EPLP and PEP2 is EQLSN; wherein said GFR-binding compound does not comprise the pair of peptides ASASPXXVSQDL:MIVKSXKXS when PEP1 is EPLT and PEP2 is EQLSN; wherein said GFR-binding compound does not comprise the pair of peptides ASASPXXVPQDL:MVVKSXKXS when PEP1 is EPLT and PEP2 is EQLSN; and, optionally, wherein the RMSD is 2.45 Å or less.

[0708] In certain embodiments useful for inducing the conversion of a neoplastic cell into a cell (any cell) of a chondrocytic cell lineage, said GFR-binding compound is a synthetic molecule as defined herein in the definition section.

[0709] In certain embodiments useful for inducing the conversion of a neoplastic cell into a cell (any cell) of a chondrocytic cell lineage, said GFR-binding compound is a synthetic peptide, or a variant or analog thereof, or a peptidomimetic.

[0710] Vascular Cell Lineage

[0711] Certain embodiments of the invention are particularly useful for inducing the conversion of a neoplastic cell into a cell (any cell) of a vascular cell lineage.

[0712] In other embodiments useful for inducing the conversion of a neoplastic cell into a cell (any cell) of a vascular cell lineage, PEP1 is selected from the group consisting of SNIT, RPVQ and RSVK.

[0713] In other embodiments useful for inducing the conversion of a neoplastic cell into a cell (any cell) of a vascular cell lineage, PEP2 is selected from the group consisting of IGEMS, LGEMS, KEVQV and KKATV.

[0714] In other embodiments useful for inducing the conversion of a neoplastic cell into a cell (any cell) of a vascular cell lineage, PEP3 is selected from the group consisting of VPT, SRV and TQV.

[0715] In other embodiments useful for inducing the conversion of a neoplastic cell into a cell (any cell) of a vascular cell lineage, PEP4 is selected from the group consisting of QHN, EHS, EEH and EDH.

[0716] In other embodiments useful for inducing the conversion of a neoplastic cell into a cell (any cell) of a vascular cell lineage, PEP5 is a peptide of general formula PEP3-AA¹¹-AA¹²; wherein PEP3 is selected from the group consisting of VPT, SRV and TQV; wherein AA¹¹ is selected from the group consisting of E, K, Q, R, A, D, G and H, in particular is E, G, H and Q; wherein AA¹² is selected from the group consisting of L, M, T, E, Q and H, in particular is selected from the group consisting of E, Q, H and L. In one particular example, PEP5 is selected from the group consisting of VPTGQ, VPTEE, SRVHH and TQVQL.

[0717] In other embodiments useful for inducing the conversion of a neoplastic cell into a cell (any cell) of a vascular cell lineage, PEP6 is a peptide of general formula AA²⁶-AA²⁷-AA²⁸-AA²⁹-PEP4; wherein PEP4 is selected from the group consisting of QHN, EHS, EEH and EDH; wherein AA²⁶ is absent or selected from the group consisting of AA^{III} amino acids, preferably is absent; wherein AA²⁷ and AA²⁸ are independently selected from the group consisting of AA^{III} and AA^{V} amino acids, preferably AA²⁷ is selected from the group consisting of F, L, R and T, preferably AA²⁸ is L or E; wherein AA²⁹ is absent or selected from the group consisting of AA^{II} amino acids, preferably is absent. In one particular example, PEP6 is selected from the group consisting of LEEHS, FLQHN, RLEEH and TLEDH.

[0718] In other embodiments useful for inducing the conversion of a neoplastic cell into a cell (any cell) of a vascular cell lineage, PEP7 is an amino acid or a peptide with between two and seven amino acids of general formula AA¹-AA²-AA³-AA⁴-AA⁵-AA⁶-AA⁷; wherein AA¹, AA², AA³, AA⁴, and AA⁵ are independently absent or AA^{I} as defined herein; wherein AA⁶ is absent or selected from the group consisting of S, T, C, E, Q, P and R, preferably is selected from the group consisting of E, Q and R; wherein AA⁷ is absent or is selected from the group consisting of S, T, C, E, Q, P and R, preferably is selected from the group consisting of S, C and P; and wherein at least one of AA¹, AA², AA³, AA⁴, AA⁵, AA⁶ or AA⁷ is not absent. In one particular example, PEP7 is selected from the group consisting of NDEGLEX, SSVKXQP and RNVQXRP.

[0719] In other embodiments useful for inducing the conversion of a neoplastic cell into a cell (any cell) of a vascular cell lineage, PEP8 is an amino acid or a peptide with between two and six amino acids of general formula AA³³-AA³⁴-AA³⁵-AA³⁶-AA³⁷-AA³⁸; wherein AA³³ is absent or is selected from the group consisting of AA^{I} amino acids at the exception of AA^{VI} amino acids, in particular is selected from the group consisting of K, Q and L; AA³⁴ is absent or is selected from the group consisting of AA^{III} and AA^{IV} amino acids, in particular is absent, E or A; wherein AA³⁵ is absent or is selected from the group consisting of AA^{II} amino acids, preferably is S or C; wherein AA³⁶ is absent or is selected from the group consisting of AA^{III} and AA^{IV} amino acids, in particular is selected from the group consisting of E, A and K; wherein AA³⁷ is absent or is selected from the group consisting of AA^{II} amino acids, preferably is S or C; wherein AA³⁸ is absent or is selected from the group consisting of AA^{I}, in particular is selected from the group consisting of R, A and E; and wherein at least one of AA³³, AA³⁴, AA³⁵, AA³⁶, AA³⁷ or AA³⁸ is not absent. In one particular example, PEP8 is selected from the group consisting of KXEXR, QXEXR, LEXAXA and LAXKXE.

[0720] In other embodiments useful for inducing the conversion of a neoplastic cell into a cell (any cell) of a vascular cell lineage, PEP9 is a peptide of general formula AA¹-AA²-AA³-AA⁴-AA⁵-AA⁶-AA⁷-PEP5; wherein PEP5 is a peptide of formula PEP3-AA¹¹-AA¹²; wherein PEP3 is selected from the group consisting of VPT, SRV and TQV; wherein AA¹¹ is selected from the group consisting of E, K, Q, R, A, D, G and H, in particular is E, G, H and Q; wherein AA¹² is selected from the group consisting of L, M, T, E, Q and H, in particular is selected from the group consisting of E, Q, H and L; wherein AA¹, AA², AA³, AA⁴, and AA⁵ are independently absent or AA^{I} as defined herein; wherein AA⁶ is absent or selected from the group consisting of S, T, C, E, Q, P and R, preferably is selected from the group consisting of E, Q and R; wherein AA⁷ is selected from the group consisting of S, T, C, E, Q, P and R, preferably is selected from the group consisting of S, C and P. In one particular example, PEP9 is selected from the group consisting of NDEGLEXVPTEE, NDEGLEXVPTGQ, SSVKXQPSRVHH and RNVQXRPTQVQL.

[0721] In other embodiments useful for inducing the conversion of a neoplastic cell into a cell (any cell) of a vascular cell lineage, PEP10 is a peptide of general formula PEP6-AA³³-AA³⁴-AA³⁵-AA³⁶-AA³⁷-AA³⁸; wherein PEP6 is a peptide of formula AA²⁶-AA²⁷-AA²⁸-AA²⁹-PEP4; wherein PEP4 is selected from the group consisting of QHN, EHS, EEH and EDH; wherein AA²⁶ is absent or selected from the group consisting of AA^{III} amino acids, preferably is absent; wherein AA²⁷ and AA²⁸ are independently selected from the group consisting of AA^{III} and AA^{V} amino acids, preferably AA²⁷ is selected from the group consisting of F, L, R and T, preferably AA²⁸ is L or E; wherein AA²⁹ is absent or selected from the group consisting of AA^{II} amino acids, preferably is absent; wherein AA³³ is absent or is selected from the group consisting of AA^{I} amino acids at the exception of AA^{VI} amino acids, in particular is selected from the group consisting of K, Q and L; AA³⁴ is absent or is selected from the group consisting of AA^{III} and AA^{IV} amino acids, in particular is absent, E or A; wherein AA³⁵ is absent or is selected from the group consisting of AA^{II} amino acids, preferably is S or C; wherein AA³⁶ is absent or is selected from the group consisting of AA^{III} and AA^{IV} amino acids, in particular is selected from the group consisting of E, A and K; wherein AA³⁷ is absent or is selected from the group consisting of AA^{II} amino acids, preferably is S or C; wherein AA³⁸ is absent or is selected from the group consisting of AA^{I}, in particular is selected from the group consisting of R, A and E. In one particular example, PEP10 is selected from the group consisting of FLQHNKXEXR, LEEHSQXEXR, RLEEHLEXAXA and TLEDHLAXKXE.

[0722] In other embodiments useful for inducing the conversion of a neoplastic cell into a cell (any cell) of a vascular cell lineage, PEP12 is a peptide of general formula PEP1-AA¹⁷-PEP11; wherein AA¹⁷ is selected from the group consisting of G, A, V, L, I, P, F, M, W, T and S (in particular is selected from the group consisting of M, I, L, V and T); wherein PEP1 is SPIS or SNIT.

[0723] In other embodiments useful for inducing the conversion of a neoplastic cell into a cell (any cell) of a vascular cell lineage, PEP11 is a peptide with 3 amino acids of general formula AA¹⁸-AA¹⁹-AA²⁰; wherein AA¹⁸ is selected from the group consisting of L, V, Q, A and R, in particular is selected from the group consisting of Q, A and R; wherein AA¹⁹ is selected from the group consisting of F, W, H, Y, I and K, in particular is I or K; wherein AA²⁰ is selected from the group consisting of L, F, Y, K, I, V and M, in particular is selected from the group consisting of M, V and I. In one particular example, PEP11 is selected from the group consisting of QIM, AKV and RKI.

[0724] The definitions of “PEP” pairs, quadruplets, hexaplets and heptuplet e.g. PEP1:PEP2, PEP12:PEP2, or PEP7:PEP5:PEP12:LINKER:PEP2:PEP6:PEP8, most particularly useful for inducing the conversion of a neoplastic cell into a cell (any cell) of a vascular cell lineage, are as already defined herein to the extent that PEP1 to PEP12 are particularly useful for these applications. For instances:

[0725] In other embodiments useful for inducing the conversion of a neoplastic cell into a cell (any cell) of a vascular cell lineage, the pair PEP1:PEP2 is selected from the group consisting of SNIT:IGEMS, SNIT:LGEMS, RSVK:KEVQV and RPVQ:KKATV.

[0726] In other embodiments useful for inducing the conversion of a neoplastic cell into a cell (any cell) of a vascular cell lineage, the pair PEP12:PEP2 is selected from the group consisting of SNIT-AA¹⁷-QIM:IGEMS, SNIT-AA¹⁷-QIM:LGEMS, RSVK-AA¹⁷-AKV:KEVQV and RPVQ-AA¹⁷-RKI:KKATV; wherein AA¹⁷ is selected from the group consisting of G, A, V, L, I, P, F, M, W, T and S (in particular is selected from the group consisting of M, V and T).

[0727] In other embodiments useful for inducing the conversion of a neoplastic cell into a cell (any cell) of a vascular cell lineage, PEP3 is selected from the group consisting of VPT, SRV and TQV; PEP4 is selected from the group consisting of QHN, EHS, EEH and EDH; and wherein the pair PEP3:PEP4 is selected from the group consisting of VPT:QHN, VPT:EHS, SRV:EEH and TQV:EDH.

[0728] In other embodiments useful for inducing the conversion of a neoplastic cell into a cell (any cell) of a vascular cell lineage, PEP5 is selected from the group consisting of VPTGQ, VPTEE, SRVHH and TQVQL; PEP6 is selected from the group consisting of LEEHS, FLQHN, RLEEH and TLEDH; and wherein the pair PEP5:PEP6 is selected from the group consisting of VPTGQ:LEEHS, VPTEE:FLQHN, SRVHH:RLEEH and TQVQL:TLEDH.

[0729] In other embodiments useful for inducing the conversion of a neoplastic cell into a cell (any cell) of a vascular cell lineage, PEP7 is selected from the group consisting of NDEGLEX, SSVKXQP and RNVQXRP; wherein PEP8 is selected from the group consisting of KXEXR, QXEXR, LEXAXA and LAXKXE; and wherein the pair PEP7:PEP8 is selected from the group consisting of NDEGLEX:KXEXR, NDEGLEX:QXEXR, SSVKXQP:LEXAXA and RNVQXRP:LAXKXE.

[0730] In other embodiments useful for inducing the conversion of a neoplastic cell into a cell (any cell) of a vascular cell lineage, PEP9 is selected from the group consisting of NDEGLEXVPTEE, NDEGLEXVPTGQ, SSVKXQPSRVHH and RNVQXRPTQVQL; PEP10 is selected from the group consisting of FLQHNKXEXR, LEEHSQXEXR, RLEEHLEXAXA and TLEDHLAXKXE; and wherein the pair PEP9:PEP10 is selected from the group consisting of NDEGLEXVPTEE:FLQHNKXEXR, NDEGLEXVPTGQ:LEEHSQXEXR, SSVKXQPSRVHH:RLEEHLEXAXA and RNVQXRPTQVQL:TLEDHLAXKXE.

[0731] In other embodiments useful for inducing the conversion of a neoplastic cell into a cell (any cell) of a vascular cell lineage, PEP5 is selected from the group consisting of VPTGQ, VPTEE, SRVHH and TQVQL; PEP6 is selected from the group consisting of LEEHS, FLQHN, RLEEH and TLEDH; and wherein the pair PEP5:PEP6 is selected from the group consisting of VPTGQ:LEEHS, VPTEE:FLQHN, SRVHH:RLEEH and TQVQL:TLEDH; wherein the pair PEP5:PEP6 is not VPTEE:FLQHN when PEP1 is SNIT and PEP2 is IGEMS; wherein the pair PEP5:PEP6 is not VPTGQ:LEEHS when PEP1 is SNIT and PEP2 is LGEMS; wherein the pair PEP5:PEP6 is not SRVHH:RLEEH when PEP1 is RSVK and PEP2 is KEVQV; and wherein the pair PEP5:PEP6 is not TQVQL:TLEDH when PEP1 is RPVQ and PEP2 is KKATV.

[0732] In other embodiments useful for inducing the conversion of a neoplastic cell into a cell (any cell) of a vascular cell lineage, PEP9 is selected from the group consisting of NDEGLEXVPTEE, NDEGLEXVPTGQ, SSVKXQPSRVHH and RNVQXRPTQVQL; PEP10 is selected from the group consisting of FLQHNKXEXR, LEEHSQXEXR, RLEEHLEXAXA and TLEDHLAXKXE; and wherein the pair PEP9:PEP10 is selected from the group consisting of NDEGLEXVPTEE:FLQHNKXEXR, NDEGLEXVPTGQ:LEEHSQXEXR, SSVKXQPSRVHH:RLEEHLEXAXA and RNVQXRPTQVQL:TLEDHLAXKXE; wherein the pair PEP9:PEP10 is not NDEGLEXVPTEE:FLQHNKXEXR when PEP1 is SNIT and PEP2 is IGEMS; wherein the pair PEP9:PEP10 is not NDEGLEXVPTGQ:LEEHSQXEXR when PEP1 is SNIT and PEP2 is LGEMS; wherein the pair PEP9:PEP10 is not SSVKXQPSRVHH:RLEEHLEXAXA when PEP1 is RSVK and PEP2 is KEVQV; and wherein the pair PEP9:PEP10 is not RNVQXRPTQVQL:TLEDHLAXKXE when PEP1 is RPVQ and PEP2 is KKATV.

[0733] In other embodiments useful for inducing the conversion of a neoplastic cell into a cell (any cell) of a vascular cell lineage, PEP1 is selected from the group consisting of SNIT, RPVQ and RSVK; PEP11 is selected from the group consisting of QIM, AKV and RKI; and the pair PEP1:PEP11 is selected from the group consisting of SNIT:QIM, RSVK:KEVQV and RPVQ:KKATV.

[0734] In one aspect, the present disclosure provides a GFR-binding compound, wherein said GFR-binding compound is a peptide, a variant or analog thereof, or a peptidomimetic as defined herein, with between 20 and 60 (in particular between 20 and 50, and more particularly, between 20 and 45) amino acids, comprising a peptide with four amino acids (PEP1) or a peptide with eight amino acids (PEP12), a peptide with five amino acids (PEP2), and optionally a pair of peptides selected form the group consisting of PEP3:PEP4, PEP3:PEP6, PEP3:PEP10, PEP5:PEP4, PEP9:PEP4, PEP5:PEP6, PEP5:PEP10, PEP9:PEP6 and PEP9:PEP10; wherein said GFR-binding compound does not comprise the pair of peptides VPTEE:FLQHN when PEP1 is SNIT and PEP2 is IGEMS; wherein said GFR-binding compound does not comprise the pair of peptides VPTGQ:LEEHS when PEP1 is SNIT and PEP2 is LGEMS; wherein said GFR-binding compound does not comprise the pair of peptides SRVHH:RLEEH when PEP1 is RSVK and PEP2 is KEVQV; and wherein said GFR-binding compound does not comprise the pair of peptides TQVQL:TLEDH when PEP1 is RPVQ and PEP2 is KKATV; and, optionally, wherein the RMSD is 2.45 Å or less.

[0735] In one aspect, the present disclosure provides a GFR-binding compound, wherein said GFR-binding compound is a peptide, a variant or analog thereof, or a peptidomimetic as defined herein, with between 20 and 60 (in particular between 20 and 50, and more particularly, between 20 and 45) amino acids, comprising a peptide with four amino acids (PEP1) or a peptide with eight amino acids (PEP12), a peptide with five amino acids (PEP2), and optionally a pair of peptides selected form the group consisting of PEP3:PEP4, PEP3:PEP6, PEP3:PEP10, PEP5:PEP4, PEP9:PEP4, PEP5:PEP6, PEP5:PEP10, PEP9:PEP6 and PEP9:PEP10; wherein said GFR-binding compound does not comprise the pair of peptides NDEGLEXVPTEE:FLQHNKXEXR when PEP1 is SNIT and PEP2 is IGEMS; wherein said GFR-binding compound does not comprise the pair of peptides NDEGLEXVPTGQ:LEEHSQXEXR when PEP1 is SNIT and PEP2 is LGEMS; wherein said GFR-binding compound does not comprise the pair of peptides SSVKXQPSRVHH:RLEEHLEXAXA when PEP1 is RSVK and PEP2 is KEVQV; and wherein said GFR-binding compound does not comprise the pair of peptides RNVQXRPTQVQL:TLEDHLAXKXE when PEP1 is RPVQ and PEP2 is KKATV; and, optionally, wherein the RMSD is 2.45 Å or less.

[0736] In other embodiments useful for inducing the conversion of a neoplastic cell into a cell (any cell) of a vascular cell lineage, said GFR-binding compound is a synthetic molecule as defined herein in the definition section.

[0737] In other embodiments useful for inducing the conversion of a neoplastic cell into a cell (any cell) of a vascular cell lineage, said GFR-binding compound is a synthetic peptide, or a variant or analog thereof, or a peptidomimetic.

[0738] Neuron Lineage

[0739] Certain embodiments of the invention are particularly useful for inducing the conversion of a neoplastic cell into a cell (any cell) of a neuron lineage.

[0740] In certain embodiments useful for inducing the conversion of a neoplastic cell into a cell (any cell) of a neuron lineage, PEP1 is selected from the group consisting of NAIS, SPIS and EPIS.

[0741] In certain embodiments useful for inducing the conversion of a neoplastic cell into a cell (any cell) of a neuron lineage, PEP2 is selected from the group consisting of LKKYR, LKYHY, YKQYE and KFKYE.

[0742] In certain embodiments useful for inducing the conversion of a neoplastic cell into a cell (any cell) of a neuron lineage, PEP3 is selected from the group consisting of VPT, APT, VPA, VPQ and VSQ.

[0743] In certain embodiments useful for inducing the conversion of a neoplastic cell into a cell (any cell) of a neuron lineage, PEP4 is selected from the group consisting of VVE, VVR, VVK, VAE, AVS, VRS and VKS.

[0744] In certain embodiments useful for inducing the conversion of a neoplastic cell into a cell (any cell) of a neuron lineage, PEP5 is a peptide of general formula PEP3-AA¹¹-AA¹²; wherein PEP3 is selected from the group consisting of VPT, APT, VPA, VPQ and VSQ; wherein AA¹¹ is selected from the group consisting of E, K, Q, R, A, D, G and H, in particular E, K, Q, R, A and D; wherein AA¹² is selected from the group consisting of L, M, T, E, Q and H, in particular L. In one particular example, PEP5 is selected from the group consisting of VPTEL, APTKL, APTQL, VPTKL, VPARL, VPQAL, VSQDL and VPQDL.

[0745] In certain embodiments useful for inducing the conversion of a neoplastic cell into a cell (any cell) of a neuron lineage, PEP6 is a peptide of general formula AA²⁶-AA²⁷-AA²⁸-AA²⁹-PEP4; wherein PEP4 is selected from the group consisting of VVE, VVR, VVK, VAE, AVS, VRS and VKS; wherein AA²⁶ is absent or selected from the group consisting of AA^{III} amino acids, preferably absent or E; wherein AA²⁷ and AA²⁸ are independently selected from the group consisting of AA^{III} and AA^{V} amino acids, preferably AA²⁷ is selected from the group consisting of D, E, N, G and M, preferably AA²⁸ is selected from the group consisting of M, I and V; wherein AA²⁹ is absent or selected from the group consisting of AA^{II} amino acids, preferably absent or S. In one particular example, PEP6 is selected from the group consisting of DMVVE, EMVVE, NMVVR, NMVVK, EGMSVAE, GMAVS, DMVVE, MIVRS, MIVKS and MVVKS.

[0746] In certain embodiments useful for inducing the conversion of a neoplastic cell into a cell (any cell) of a neuron lineage, PEP7 is an amino acid or a peptide with between two and seven amino acids of general formula AA¹-AA²-AA³-AA⁴-AA⁵-AA⁶-AA⁷; wherein AA¹, AA², AA³, AA⁴, and AA⁵ are independently absent or AA^{I} as defined herein; wherein AA⁶ is absent or selected from the group consisting of S, T, C, E, Q, P and R, preferably S or C; wherein AA⁷ is absent or is selected from the group consisting of S, T, C, E, Q, P and R, preferably is S or C; and wherein at least one of AA¹, AA², AA³, AA⁴, AA⁵, AA⁶ or AA⁷ is not absent. In one particular example, PEP7 is selected from the group consisting of KIPKAXX, SIPKAXX, HVTKPTX, YVPKPXX, TVPKPXX, AVPKAXX, KVGKAXX, ASAAPXX, ASASPXX and RNVQXRP.

[0747] In certain embodiments useful for inducing the conversion of a neoplastic cell into a cell (any cell) of a neuron lineage, PEP8 is an amino acid or a peptide with between two and six amino acids of general formula AA³³-AA³⁴-AA³⁵-AA³⁶-AA³⁷-AA³⁸; wherein AA³³ is absent or is selected from the group consisting of AA^{I} amino acids at the exception of AA^{VI} amino acids, in particular is absent or is selected from the group consisting of G, S, A and E; AA³⁴ is absent or is selected from the group consisting of AA^{III} and AA^{IV} amino acids, in particular is absent; wherein AA³⁵ is absent or is selected from the group consisting of AA^{II} amino acids, preferably is S or C; wherein AA³⁶ is absent or is selected from the group consisting of AA^{III} and AA^{IV} amino acids, in particular is G or K; wherein AA³⁷ is absent or is selected from the group consisting of AA^{II} amino acids, preferably is S or C; wherein AA³⁸ is absent or is selected from the group consisting of AA^{I}, in particular is selected from the group consisting of R, H and S; and wherein at least one of AA³³, AA³⁴, AA³⁵, AA³⁶, AA³⁷ or AA³⁸ is not absent. In one particular example, PEP8 is selected from the group consisting of GXGXR, SXGXH, AXGXH, XGXR, XKXS and LAXKXE.

[0748] In certain embodiments useful for inducing the conversion of a neoplastic cell into a cell (any cell) of a neuron lineage, PEP9 is a peptide of general formula AA¹-AA²-AA³-AA⁴-AA⁵-AA⁶-AA⁷-PEP5; wherein PEP5 is a peptide of formula PEP3-AA¹¹-AA¹²; wherein PEP3 is selected from the group consisting of VPT, APT, VPA, VPQ and VSQ; wherein AA¹¹ is selected from the group consisting of E, K, Q, R, A, D, G and H, in particular E, K, Q, R, A and D; wherein AA¹² is selected from the group consisting of L, M, T, E, Q and H, in particular L; wherein AA¹, AA², AA³, AA⁴, and AA⁵ are independently absent or AA^{I} as defined herein; wherein AA⁶ is absent or selected from the group consisting of S, T, C, E, Q, P and R, preferably S or C; wherein AA⁷ is selected from the group consisting of S, T, C, E, Q, P and R, preferably is S or C. In one particular example, PEP9 is selected from the group consisting of KIPKAXXVPTEL, SIPKAXXVPTEL, HVTKPTXAPTKL, YVPKPXXAPTKL, TVPKPXXAPTQL, AVPKAXXAPTKL, KVGKAXXVPTKL, ASAAPXXVPQAL, ASASPXXVSQDL, ASASPXXVPQDL and RNVQXRPTQVQL.

[0749] In certain embodiments useful for inducing the conversion of a neoplastic cell into a cell (any cell) of a neuron lineage, PEP10 is a peptide of general formula PEP6-AA³³-AA³⁴-AA³⁵-AA³⁶-AA³⁷-AA³⁸; wherein PEP6 is a peptide of formula AA²⁶-AA²⁷-AA²⁸-AA²⁹-PEP4; wherein PEP4 is selected from the group consisting of VVE, VVR, VVK, VAE, AVS, VRS and VKS; wherein AA²⁶ is absent or selected from the group consisting of AA^{III} amino acids, preferably absent or E; wherein AA²⁷ and AA²⁸ are independently selected from the group consisting of AA^{III} and AA^{V} amino acids, preferably AA²⁷ is selected from the group consisting of D, E, N, G and M, preferably AA²⁸ is selected from the group consisting of M, I and V; wherein AA²⁹ is absent or selected from the group consisting of AA^{II} amino acids, preferably absent or S; wherein AA³³ is absent or is selected from the group consisting of AA^{I} amino acids at the exception of AA^{VI} amino acids, in particular is absent or is selected from the group consisting of G, S, A and E; AA³⁴ is absent or is selected from the group consisting of AA^{III} and AA^{IV} amino acids, in particular is absent; wherein AA³⁵ is absent or is selected from the group consisting of AA^{II} amino acids, preferably is S or C; wherein AA³⁶ is absent or is selected from the group consisting of AA^{III} and AA^{IV} amino acids, in particular is G or K; wherein AA³⁷ is absent or is selected from the group consisting of AA^{II} amino acids, preferably is S or C; wherein AA³⁸ is absent or is selected from the group consisting of AA^{I}, in particular is selected from the group consisting of R, H and S. In one particular example, PEP10 is selected from the group consisting of DMVVEGXGXR, EMVVEGXGXR, NMVVRSXGXH, NMVVRAXGXH, NMVVKAXGXH, EGMSVAEXGXR, MIVRSXKXS, MIVKSXKXS, MVVKSXKXS and TLEDHLAXKXE.

[0750] In certain embodiments useful for inducing the conversion of a neoplastic cell into a cell (any cell) of a neuron lineage, PEP12 is a peptide of general formula PEP1-AA¹⁷-PEP11; wherein AA¹⁷ is selected from the group consisting of G, A, V, L, I, P, F, M, W, T and S (in particular is selected from the group consisting of M, I, L, V and T); wherein PEP1 is selected from the group consisting of NAIS, SPIS and EPIS.

[0751] In certain embodiments useful for inducing the conversion of a neoplastic cell into a cell (any cell) of a neuron lineage, PEP11 is a peptide with 3 amino acids of general formula AA¹⁸-AA¹⁹-AA²⁰; wherein AA¹⁸ is selected from the group consisting of L, V, Q, A and R, in particular is L; wherein AA¹⁹ is selected from the group consisting of F, W, H and Y (in particular is an aromatic, polar amino acid such as Y); wherein AA²⁰ is selected from the group consisting of L, F, Y, K, I, V and M, in particular is selected from the group consisting of L, F, I, and K. In one particular example, PEP11 is selected from the group consisting of LYL, LYF, LYI and LYK.

[0752] The definitions of “PEP” pairs, quadruplets, hexaplets and heptuplet e.g. PEP1:PEP2, PEP12:PEP2, or PEP7:PEP5:PEP12:LINKER:PEP2:PEP6:PEP8, most particularly useful for inducing the conversion of a neoplastic cell into a cell (any cell) of a neuron lineage, are as already defined herein to the extent that PEP1 to PEP12 are particularly useful for these applications. For instances:

[0753] In certain embodiments useful for inducing the conversion of a neoplastic cell into a cell (any cell) of a neuron lineage, the pair PEP1:PEP2 is selected from the group consisting of NAIS:LKKYR, SPIS:LKYHY, EPIS:KFKYE and SPIS:YKQYE.

[0754] In certain embodiments useful for inducing the conversion of a neoplastic cell into a cell (any cell) of a neuron lineage, the pair PEP12:PEP2 is selected from the group consisting of NAIS-AA¹⁷-LYFIKKYR, SPIS-AA¹⁷-LYKIKYHY, EPIS-AA¹⁷-LYL:KFKYE and SPIS-AA¹⁷-LYI:YKQYE; wherein AA¹⁷ is selected from the group consisting of G, A, V, L, I, P, F, M, W, T and S (in particular is selected from the group consisting of V, I and T).

[0755] In certain embodiments useful for inducing the conversion of a neoplastic cell into a cell (any cell) of a neuron lineage, PEP3 is selected from the group consisting of VPT, APT, VPA, VPQ and VSQ; PEP4 is selected from the group consisting of VVE, VVR, VVK, VAE, AVS, VRS and VKS; and wherein the pair PEP3:PEP4 is selected from the group consisting of VPT:VVE, APT:VVR, APT:VVK, VPT:VAE, VPT:AVS, VPA:VVE, VPQ:VRS, VSQ:VKS and VPQ:VKS.

[0756] In certain embodiments useful for inducing the conversion of a neoplastic cell into a cell (any cell) of a neuron lineage, PEP5 is selected from the group consisting of VPTEL, APTKL, APTQL, VPTKL, VPARL, VPQAL, VSQDL and VPQDL; PEP6 is selected from the group consisting of DMVVE, EMVVE, NMVVR, NMVVK, EGMSVAE, GMAVS, DMVVE, MIVRS, MIVKS and MVVKS; and wherein the pair PEP5:PEP6 is selected from the group consisting of VPTEL:DMVVE, VPTEL:EMVVE, APTKL:NMVVR, APTQL:NMVV, APTKL:NMVVK, VPTKL:EGMSVAE, VPTKL:EGMAVS, VPARL:DMVVE, VPQAL:MIVRS, VSQDL:MIVKS and VPQDL:MVVKS.

[0757] In certain embodiments useful for inducing the conversion of a neoplastic cell into a cell (any cell) of a neuron lineage, PEP7 is selected from the group consisting of KIPKAXX, SIPKAXX, HVTKPTX, YVPKPXX, TVPKPXX, AVPKAXX, KVGKAXX, ASAAPXX, ASASPXX and RNVQXRP; wherein PEP8 is selected from the group consisting of GXGXR, SXGXH, AXGXH, XGXR, XKXS and LAXKXE; and wherein the pair PEP7:PEP8 is selected from the group consisting of KIPKAXX:GXGXR, SIPKAXX:GXGXR, HVTKPTX:SXGXH, YVPKPXX:SXGXH, TVPKPXX:AXGXH, AVPKAXX:AXGXH, KVGKAXX:XGXR, KASKAXX:EXGXR, AAPASXX:AXGXR, ASAAPXX:XKXS, ASASPXX:XKXS and ASASPXX:XKXS.

[0758] In certain embodiments useful for inducing the conversion of a neoplastic cell into a cell (any cell) of a neuron lineage, PEP9 is selected from the group consisting of KIPKAXXVPTEL, SIPKAXXVPTEL, HVTKPTXAPTKL, YVPKPXXAPTKL, TVPKPXXAPTQL, AVPKAXXAPTKL, KVGKAXXVPTKL, ASAAPXXVPQAL, ASASPXXVSQDL, ASASPXXVPQDL and RNVQXRPTQVQL; PEP10 is selected from the group consisting of DMVVEGXGXR, EMVVEGXGXR, NMVVRSXGXH, NMVVRAXGXH, NMVVKAXGXH, EGMSVAEXGXR, MIVRSXKXS, MIVKSXKXS, MVVKSXKXS and TLEDHLAXKXE; and wherein the pair PEP9:PEP10 is selected from the group consisting of KIPKAXXVPTEL:DMVVEGXGXR, SIPKAXXVPTEL:EMVVEGXGXR, HVTKPTXAPTKL:NMVVRSXGXH, YVPKPXXAPTKL:NMVVRSXGXH, TVPKPXXAPTQL:NMVVRAXGXH, AVPKAXXAPTKL:NMVVKAXGXH, KVGKAXXVPTKL:EGMSVAEXGXR, KASKAXXVPTKL:GMAVSEXGXR, AAPASXXVPARL:DMVVEAXGXR, ASAAPXXVPQAL:MIVRSXKXS, ASASPXXVSQDL:MIVKSXKXS and ASASPXXVPQDL:MVVKSXKXS.

[0759] In certain embodiments useful for inducing the conversion of a neoplastic cell into a cell (any cell) of a neuron lineage, PEP5 is selected from the group consisting of VPTEL, APTKL, APTQL, VPTKL, VPARL, VPQAL, VSQDL and VPQDL; PEP6 is selected from the group consisting of DMVVE, EMVVE, NMVVR, NMVVK, EGMSVAE, GMAVS, DMVVE, MIVRS, MIVKS and MVVKS; and wherein the pair PEP5:PEP6 is selected from the group consisting of VPTEL:DMVVE, VPTEL:EMVVE, APTKL:NMVVR, APTQL:NMVV, APTKL:NMVVK, VPTKL:EGMSVAE, VPTKL:EGMAVS, VPARL:DMVVE, VPQAL:MIVRS, VSQDL:MIVKS and VPQDL:MVVKS; wherein the pair PEP5:PEP6 is not APTQL:NMVVR when PEP1 is NAIS and PEP2 is LKKYR; wherein the pair PEP5:PEP6 is not VPTKL:EGMSVAE when PEP1 is SPIS and PEP2 is LKYHY; wherein the pair PEP5:PEP6 is not VPTKL:GMAVS when PEP1 is EPIS and PEP2 is KFKYE; and wherein the pair PEP5:PEP6 is not VPARL:DMVVE when PEP1 is SPIS and PEP2 is YKQYE.

[0760] In certain embodiments useful for inducing the conversion of a neoplastic cell into a cell (any cell) of a neuron lineage, PEP9 is selected from the group consisting of KIPKAXXVPTEL, SIPKAXXVPTEL, HVTKPTXAPTKL, YVPKPXXAPTKL, TVPKPXXAPTQL, AVPKAXXAPTKL, KVGKAXXVPTKL, ASAAPXXVPQAL, ASASPXXVSQDL, ASASPXXVPQDL and RNVQXRPTQVQL; PEP10 is selected from the group consisting of DMVVEGXGXR, EMVVEGXGXR, NMVVRSXGXH, NMVVRAXGXH, NMVVKAXGXH, EGMSVAEXGXR, MIVRSXKXS, MIVKSXKXS, MVVKSXKXS and TLEDHLAXKXE; and wherein the pair PEP9:PEP10 is selected from the group consisting of KIPKAXXVPTEL:DMVVEGXGXR, SIPKAXXVPTEL:EMVVEGXGXR, HVTKPTXAPTKL:NMVVRSXGXH, YVPKPXXAPTKL:NMVVRSXGXH, TVPKPXXAPTQL:NMVVRAXGXH, AVPKAXXAPTKL:NMVVKAXGXH, KVGKAXXVPTKL:EGMSVAEXGXR, KASKAXXVPTKL:GMAVSEXGXR, AAPASXXVPARL:DMVVEAXGXR, ASAAPXXVPQAL:MIVRSXKXS, ASASPXXVSQDL:MIVKSXKXS and ASASPXXVPQDL:MVVKSXKXS; wherein PEP9:PEP10 is not TVPKPXXAPTQL:NMVVRAXGXH when PEP1 is NAIS and PEP2 is LKKYR; wherein PEP9:PEP10 is not KVGKAXXVPTKL:EGMSVAEXGXR when PEP1 is SPIS and PEP2 is LKYHY; wherein PEP9:PEP10 is not KASKAXXVPTKL:GMAVSEXGXR when PEP1 is EPIS and PEP2 is KFKYE; wherein PEP9:PEP10 is not AAPASXXVPARL:DMVVEAXGXR when PEP1 is SPIS.

[0761] In certain embodiments useful for inducing the conversion of a neoplastic cell into a cell (any cell) of a neuron lineage, PEP1 is selected from the group consisting of NAIS, SPIS and EPIS; PEP11 is selected from the group consisting of LYF, LYK, LYL and LYI; and the pair PEP1:PEP11 is selected from the group consisting of NAIS:LYF, SPIS:LYK, EPIS:LYL and SPIS:LYI.

[0762] In one aspect, the present disclosure provides a GFR-binding compound, wherein said GFR-binding compound is a peptide, a variant or analog thereof, or a peptidomimetic as defined herein, with between 20 and 60 (in particular between 20 and 50, and more particularly, between 20 and 45) amino acids, comprising a peptide with four amino acids (PEP1) or a peptide with eight amino acids (PEP12), a peptide with five amino acids (PEP2), and optionally a pair of peptides selected form the group consisting of PEP3:PEP4, PEP3:PEP6, PEP3:PEP10, PEP5:PEP4, PEP9:PEP4, PEP5:PEP6, PEP5:PEP10, PEP9:PEP6 and PEP9:PEP10; wherein said GFR-binding compound does not comprise the pair of peptides APTQL:NMVVR when PEP1 is NAIS and PEP2 is LKKYR; wherein said GFR-binding compound does not comprise the pair of peptides VPTKL:EGMSVAE when PEP1 is SPIS and PEP2 is LKYHY; wherein said GFR-binding compound does not comprise the pair of peptides VPTKL:GMAVS when PEP1 is EPIS and PEP2 is KFKYE; and wherein said GFR-binding compound does not comprise the pair of peptides VPARL:DMVVE when PEP1 is SPIS and PEP2 is YKQYE; and, optionally, wherein the RMSD is 2.45 Å or less.

[0763] In one aspect, the present disclosure provides a GFR-binding compound, wherein said GFR-binding compound is a peptide, a variant or analog thereof, or a peptidomimetic as defined herein, with between 20 and 60 (in particular between 20 and 50, and more particularly, between 20 and 45) amino acids, comprising a peptide with four amino acids (PEP1) or a peptide with eight amino acids (PEP12), a peptide with five amino acids (PEP2), and optionally a pair of peptides selected form the group consisting of PEP3:PEP4, PEP3:PEP6, PEP3:PEP10, PEP5:PEP4, PEP9:PEP4, PEP5:PEP6, PEP5:PEP10, PEP9:PEP6 and PEP9:PEP10; wherein said GFR-binding compound does not comprise the pair of peptides TVPKPXXAPTQL:NMVVRAXGXH when PEP1 is NAIS and PEP2 is LKKYR; wherein said GFR-binding compound does not comprise the pair of peptides KVGKAXXVPTKL:EGMSVAEXGXR when PEP1 is SPIS and PEP2 is LKYHY; wherein said GFR-binding compound does not comprise the pair of peptides KASKAXXVPTKL:GMAVSEXGXR when PEP1 is EPIS and PEP2 is KFKYE; wherein said GFR-binding compound does not comprise the pair of peptides AAPASXXVPARL:DMVVEAXGXR when PEP1 is SPIS; and, optionally, wherein the RMSD is 2.45 Å or less.

[0764] In certain embodiments useful for inducing the conversion of a neoplastic cell into a cell (any cell) of a neuron lineage, said GFR-binding compound is a synthetic molecule as defined herein in the definition section.

[0765] In certain embodiments useful for inducing the conversion of a neoplastic cell into a cell (any cell) of a neuron lineage, said GFR-binding compound is a synthetic peptide, or a variant or analog thereof, or a peptidomimetic.

[0766] Eye Retina Cell Lineage

[0767] Certain embodiments of the invention are particularly useful for inducing the conversion of a neoplastic cell into a cell (any cell) of an eye retina cell lineage.

[0768] In certain embodiments useful for inducing the conversion of a neoplastic cell into a cell (any cell) of an eye retina cell lineage, PEP1 is SPIN.

[0769] In certain embodiments useful for inducing the conversion of a neoplastic cell into a cell (any cell) of an eye retina cell lineage, PEP2 is YGKIP.

[0770] In certain embodiments useful for inducing the conversion of a neoplastic cell into a cell (any cell) of an eye retina cell lineage, PEP3 is selected from the group consisting of VPT, APT, TPT, VPA and APV.

[0771] In certain embodiments useful for inducing the conversion of a neoplastic cell into a cell (any cell) of an eye retina cell lineage, PEP4 is selected from the group consisting of VVE, VVR, VVK, VAE, AVS, VVD and VEE.

[0772] In certain embodiments useful for inducing the conversion of a neoplastic cell into a cell (any cell) of an eye retina cell lineage, PEP5 is a peptide of general formula PEP3-AA¹¹-AA¹²; wherein PEP3 is selected from the group consisting of VPT, APT, TPT, VPA and APV; wherein AA¹¹ is selected from the group consisting of E, K, Q, R, A, D, G and H, in particular is E, K, Q and R; wherein AA¹² is selected from the group consisting of L, M, T, E, Q and H, in particular is L, M or T. In one particular example, PEP5 is selected from the group consisting of VPTEL, APTKL, APTQL, VPTKL, TPTKM, VPARL, VPTRL and APVKT.

[0773] In certain embodiments useful for inducing the conversion of a neoplastic cell into a cell (any cell) of an eye retina cell lineage, PEP6 is a peptide of general formula AA²⁶-AA²⁷-AA²⁸-AA²⁹-PEP4; wherein PEP4 is selected from the group consisting of VVE, VVR, VVK, VAE, AVS, VVD and VEE; wherein AA²⁶ is absent or selected from the group consisting of AA^{III} amino acids, preferably absent or E; wherein AA²⁷ and AA²⁸ are independently selected from the group consisting of AA^{III} and AA^{V} amino acids, preferably AA²⁷ is selected from the group consisting of D, E, N, G and M, preferably AA²⁸ is M or I; wherein AA²⁹ is absent or selected from the group consisting of AA^{II} amino acids, preferably absent or S. In one particular example, PEP6 is selected from the group consisting of DMVVE, EMVVE, NMVVR, NMVVK, EGMSVAE, EGMAVS, GMVVD and DMIVEE.

[0774] In certain embodiments useful for inducing the conversion of a neoplastic cell into a cell (any cell) of an eye retina cell lineage, PEP7 is an amino acid or a peptide with between two and seven amino acids of general formula AA¹-AA²-AA³-AA⁴-AA⁵-AA⁶-AA⁷; wherein AA¹, AA², AA³, AA⁴, and AA⁵ are independently absent or AA^{I} as defined herein; wherein AA⁶ is absent or selected from the group consisting of S, T, C, E, Q, P and R, preferably is S or C; wherein AA⁷ is absent or is selected from the group consisting of S, T, C, E, Q, P and R, preferably is S or C; and wherein at least one of AA¹, AA², AA³, AA⁴, AA⁵, AA⁶ or AA⁷ is not absent. In one particular example, PEP7 is selected from the group consisting of KIPKAXX, SIPKAXX, HVTKPTX, YVPKPXX, TVPKPXX, AVPKAXX, KVGKAXX, KASKAXX, GSAGPXX, AAPAXXS, STPPTXX, HVPKPXX and RVPSTXX.

[0775] In certain embodiments useful for inducing the conversion of a neoplastic cell into a cell (any cell) of an eye retina cell lineage, PEP8 is an amino acid or a peptide with between two and six amino acids of general formula AA³³-AA³⁴-AA³⁵-AA³⁶-AA³⁷-AA³⁸; wherein AA³³ is absent or is selected from the group consisting of AA^{I} amino acids at the exception of AA^{VI} amino acids, in particular is absent or is selected from the group consisting of G, S, A, E and R; AA³⁴ is absent or is selected from the group consisting of AA^{III} and AA^{IV} amino acids, in particular is absent; wherein AA³⁵ is absent or is selected from the group consisting of AA^{II} amino acids, preferably is S or C; wherein AA³⁶ is absent or is selected from the group consisting of AA^{II} and AA^{IV} amino acids; wherein AA³⁷ is absent or is selected from the group consisting of AA^{II} amino acids, preferably is S or C; wherein AA³⁸ is absent or is selected from the group consisting of AA^{I}, in particular is selected from the group consisting of R, H, S and L; and wherein at least one of AA³³, AA³⁴, AA³⁵, AA³⁶, AA³⁷ or AA³⁸ is not absent. In one particular example, PEP8 is selected from the group consisting of GXGXR, SXGXH, AXGXH, XGXR, EXGXR, RXGXS, AXGXR, SXGXR and XGXL.

[0776] In certain embodiments useful for inducing the conversion of a neoplastic cell into a cell (any cell) of an eye retina cell lineage, PEP9 is a peptide of general formula AA¹-AA²-AA³-AA⁴-AA⁵-AA⁶-AA⁷-PEP5; wherein PEP5 is a peptide of formula PEP3-AA¹¹-AA¹²; wherein PEP3 is selected from the group consisting of VPT, APT, TPT, VPA and APV; wherein AA¹¹ is selected from the group consisting of E, K, Q, R, A, D, G and H, in particular is E, K, Q and R; wherein AA¹² is selected from the group consisting of L, M, T, E, Q and H, in particular is L, M or T; wherein AA¹, AA², AA³, AA⁴, and AA⁵ are independently absent or AA^{I} as defined herein; wherein AA⁶ is absent or selected from the group consisting of S, T, C, E, Q, P and R, preferably is S or C; wherein AA⁷ is selected from the group consisting of S, T, C, E, Q, P and R, preferably is S or C. In one particular example, PEP9 is selected from the group consisting of KIPKAXXVPTEL, SIPKAXXVPTEL, HVTKPTXAPTKL, YVPKPXXAPTKL, TVPKPXXAPTQL, AVPKAXXAPTKL, KVGKAXXVPTKL, KASKAXXVPTKL, GSAGPXXTPTKL, AAPASXXVPARL, STPPTXXVPTRL, HVPKPXXAPTKL and RVPSTXXAPVKT.

[0777] In certain embodiments useful for inducing the conversion of a neoplastic cell into a cell (any cell) of an eye retina cell lineage, PEP10 is a peptide of general formula PEP6-AA³³-AA³⁴-AA³⁵-AA³⁶-AA³⁷-AA³⁸; wherein PEP6 is a peptide of formula AA²⁶-AA²⁷-AA²⁸-AA²⁹-PEP4; wherein PEP4 is selected from the group consisting of VVE, VVR, VVK, VAE, AVS, VVD and VEE; wherein AA²⁶ is absent or selected from the group consisting of AA^{III} amino acids, preferably absent or E; wherein AA²⁷ and AA²⁸ are independently selected from the group consisting of AA^{III} and AA^{V} amino acids, preferably AA²⁷ is selected from the group consisting of D, E, N, G and M, preferably AA²⁸ is M or I; wherein AA²⁹ is absent or selected from the group consisting of AA^{II} amino acids, preferably absent or S; wherein AA³³ is absent or is selected from the group consisting of AA^{I} amino acids at the exception of AA^{VI} amino acids, in particular is absent or is selected from the group consisting of G, S, A, E and R; AA³⁴ is absent or is selected from the group consisting of AA^{III} and AA^{IV} amino acids, in particular is absent; wherein AA³⁵ is absent or is selected from the group consisting of AA^{II} amino acids, preferably is S or C; wherein AA³⁶ is absent or is selected from the group consisting of AA^{III} and AAR′ amino acids; wherein AA³⁷ is absent or is selected from the group consisting of AA^{II} amino acids, preferably is S or C; wherein AA³⁸ is absent or is selected from the group consisting of AA^{I}, in particular is selected from the group consisting of R, H, S and L. In one particular example, PEP10 is selected from the group consisting of DMVVEGXGXR, EMVVEGXGXR, NMVVRSXGXH, NMVVRAXGXH, NMVVKAXGXH, EGMSVAEXGXR, GMAVSEXGXR, GMVVDRXGXS, DMVVEAXGXR, DMVVESXGXR, NMVVRSXGXH and MIVEEXGXL.

[0778] In certain embodiments useful for inducing the conversion of a neoplastic cell into a cell (any cell) of an eye retina cell lineage, PEP12 is a peptide of general formula PEP1-AA¹⁷-PEP11; wherein AA¹⁷ is selected from the group consisting of G, A, V, L, I, P, F, M, W, T and S (in particular is selected from the group consisting of M, I, L, V and T); wherein PEP1 is SPIN.

[0779] In certain embodiments useful for inducing the conversion of a neoplastic cell into a cell (any cell) of an eye retina cell lineage, PEP11 is a peptide with 3 amino acids of general formula AA¹⁸-AA¹⁹-AA²⁰; wherein AA¹⁸ is selected from the group consisting of L, V, Q, A and R, in particular is L; wherein AA¹⁹ is selected from the group consisting of F, W, H and Y, in particular is Y or F; wherein AA²⁰ is selected from the group consisting of L, F, Y, K, I, V and M, in particular is selected from the group consisting of L, F, Y, K, I and V. In one particular example, PEP11 is LYF.

[0780] The definitions of “PEP” pairs, quadruplets, hexaplets and heptuplet e.g. PEP1:PEP2, PEP12:PEP2, or PEP7:PEP5:PEP12:LINKER:PEP2:PEP6:PEP8, most particularly useful for inducing the conversion of a neoplastic cell into a cell (any cell) of an eye retina cell lineage, are as already defined herein to the extent that PEP1 to PEP12 are particularly useful for these applications. For instances:

[0781] In certain embodiments useful for inducing the conversion of a neoplastic cell into a cell (any cell) of an eye retina cell lineage, PEP3 is selected from the group consisting of VPT, APT, TPT, VPA and APV; PEP4 is selected from the group consisting of VVE, VVR, VVK, VAE, AVS, VVD and VEE; and wherein the pair PEP3:PEP4 is selected from the group consisting of VPT:VVE, APT:VVR, APT:VVK, VPT:VAE, VPT:AVS, TPT:VVD, VPA:VVE and APV:VEE.

[0782] In certain embodiments useful for inducing the conversion of a neoplastic cell into a cell (any cell) of an eye retina cell lineage, PEP5 is selected from the group consisting of VPTEL, APTKL, APTQL, VPTKL, TPTKM, VPARL, VPTRL and APVKT; PEP6 is selected from the group consisting of DMVVE, EMVVE, NMVVR, NMVVK, EGMSVAE, EGMAVS, GMVVD and DMIVEE; and wherein the pair PEP5:PEP6 is selected from the group consisting of VPTEL:DMVVE, VPTEL:EMVVE, APTKL:NMVVR, APTQL:NMVVR, APTKL:NMVVK, VPTKL:EGMSVAE, VPTKL:EGMAVS, TPTKM:GMVVD, VPARL:DMVVE, VPTRL:DMVVE, APTKL:NMVVR and APVKT:DMIVEE.

[0783] In certain embodiments useful for inducing the conversion of a neoplastic cell into a cell (any cell) of an eye retina cell lineage, PEP7 is selected from the group consisting of KIPKAXX, SIPKAXX, HVTKPTX, YVPKPXX, TVPKPXX, AVPKAXX, KVGKAXX, KASKAXX, GSAGPXX, AAPAXXS, STPPTXX, HVPKPXX and RVPSTXX; wherein PEP8 is selected from the group consisting of GXGXR, SXGXH, AXGXH, XGXR, EXGXR, RXGXS, AXGXR, SXGXR and XGXL; and wherein the pair PEP7:PEP8 is selected from the group consisting of KIPKAXX:GXGXR, SIPKAXX:GXGXR, HVTKPTX:SXGXH, YVPKPXX:SXGSH, TVPKPXX:AXGXH, AVPKAXX:AXGXH, KVGKAXX:XGXR, KASKAXX:EXGXR, GSAGPXX:RXGXS, AAPASXX:AXGXR, STPPTXX:SXGXR, HVPKPXX:SXGXH and RVPSTXX:XGXL.

[0784] In certain embodiments useful for inducing the conversion of a neoplastic cell into a cell (any cell) of an eye retina cell lineage, PEP9 is selected from the group consisting of KIPKAXXVPTEL, SIPKAXXVPTEL, HVTKPTXAPTKL, YVPKPXXAPTKL, TVPKPXXAPTQL, AVPKAXXAPTKL, KVGKAXXVPTKL, KASKAXXVPTKL, GSAGPXXTPTKL, AAPASXXVPARL, STPPTXXVPTRL, HVPKPXXAPTKL and RVPSTXXAPVKT; PEP10 is selected from the group consisting of DMVVEGXGXR, EMVVEGXGXR, NMVVRSXGXH, NMVVRAXGXH, NMVVKAXGXH, EGMSVAEXGXR, GMAVSEXGXR, GMVVDRXGXS, DMVVEAXGXR, DMVVESXGXR, NMVVRSXGXH and MIVEEXGXL; and wherein the pair PEP9:PEP10 is selected from the group consisting of KIPKAXXVPTEL:DMVVEGXGXR, SIPKAXXVPTEL:EMVVEGXGXR, HVTKPTXAPTKL:NMVVRSXGXH, YVPKPXXAPTKL:NMVVRSXGXH, TVPKPXXAPTQL:NMVVRAXGXH, AVPKAXXAPTKL:NMVVKAXGXH, KVGKAXXVPTKL:EGMSVAEXGXR, KASKAXXVPTKL:GMAVSEXGXR, GSAGPXXTPTKM:GMVVDRXGXS, AAPASXXVPARL:DMVVEAXGXR, STPPTXXVPTRL:DMVVESXGXR, HVPKPXXAPTKL:NMVVRSXGXH and RVPSTXXAPVKT:MIVEEXGXL.

[0785] In certain embodiments useful for inducing the conversion of a neoplastic cell into a cell (any cell) of an eye retina cell lineage, PEP5 is selected from the group consisting of VPTEL, APTKL, APTQL, VPTKL, VPARL, VPQAL, VSQDL and VPQDL; PEP6 is selected from the group consisting of DMVVE, EMVVE, NMVVR, NMVVK, EGMSVAE, GMAVS, DMVVE, MIVRS, MIVKS and MVVKS; and wherein the pair PEP5:PEP6 is selected from the group consisting of VPTEL:DMVVE, VPTEL:EMVVE, APTKL:NMVVR, APTQL:NMVVR, APTKL:NMVVK, VPTKL:EGMSVAE, VPTKL:EGMAVS, TPTKM:GMVVD, VPARL:DMVVE, VPTRL:DMVVE, APTKL:NMVVR and APVKT:DMIVEE; and wherein the pair PEP5:PEP6 is not TPTKM:GMVVD when PEP1 is SPIN and PEP2 is YGKIP.

[0786] In certain embodiments useful for inducing the conversion of a neoplastic cell into a cell (any cell) of an eye retina cell lineage, PEP9 is selected from the group consisting of KIPKAXXVPTEL, SIPKAXXVPTEL, HVTKPTXAPTKL, YVPKPXXAPTKL, TVPKPXXAPTQL, AVPKAXXAPTKL, KVGKAXXVPTKL, KASKAXXVPTKL, GSAGPXXTPTKL, AAPASXXVPARL, STPPTXXVPTRL, HVPKPXXAPTKL and RVPSTXXAPVKT; PEP10 is selected from the group consisting of DMVVEGXGXR, EMVVEGXGXR, NMVVRSXGXH, NMVVRAXGXH, NMVVKAXGXH, EGMSVAEXGXR, GMAVSEXGXR, GMVVDRXGXS, DMVVEAXGXR, DMVVESXGXR, NMVVRSXGXH and MIVEEXGXL; and wherein the pair PEP9:PEP10 is selected from the group consisting of KIPKAXXVPTEL:DMVVEGXGXR, SIPKAXXVPTEL:EMVVEGXGXR, HVTKPTXAPTKL:NMVVRSXGXH, YVPKPXXAPTKL:NMVVRSXGXH, TVPKPXXAPTQL:NMVVRAXGXH, AVPKAXXAPTKL:NMVVKAXGXH, KVGKAXXVPTKL:EGMSVAEXGXR, KASKAXXVPTKL:GMAVSEXGXR, GSAGPXXTPTKM:GMVVDRXGXS, AAPASXXVPARL:DMVVEAXGXR, STPPTXXVPTRL:DMVVESXGXR, HVPKPXXAPTKL:NMVVRSXGXH and RVPSTXXAPVKT:MIVEEXGXL; and wherein PEP9:PEP10 is not GSAGPXXTPTKM:GMVVDRXGXS when PEP1 is SPIN and PEP2 is YGKIP.

[0787] In certain embodiments useful for inducing the conversion of a neoplastic cell into a cell (any cell) of an eye retina cell lineage, PEP1 is SPIN and PEP11 is LYF.

[0788] In one aspect, the present disclosure provides a GFR-binding compound, wherein said GFR-binding compound is a peptide, a variant or analog thereof, or a peptidomimetic as defined herein, with between 20 and 60 (in particular between 20 and 50, and more particularly, between 20 and 45) amino acids, comprising a peptide with four amino acids (PEP1) or a peptide with eight amino acids (PEP12), a peptide with five amino acids (PEP2), and optionally a pair of peptides selected form the group consisting of PEP3:PEP4, PEP3:PEP6, PEP3:PEP10, PEP5:PEP4, PEP9:PEP4, PEP5:PEP6, PEP5:PEP10, PEP9:PEP6 and PEP9:PEP10; wherein said GFR-binding compound does not comprise the pair of peptides TPTKM:GMVVD when PEP1 is SPIN and PEP2 is YGKIP; and, optionally, wherein the RMSD is 2.45 Å or less.

[0789] In one aspect, the present disclosure provides a GFR-binding compound, wherein said GFR-binding compound is a peptide, a variant or analog thereof, or a peptidomimetic as defined herein, with between 20 and 60 (in particular between 20 and 50, and more particularly, between 20 and 45) amino acids, comprising a peptide with four amino acids (PEP1) or a peptide with eight amino acids (PEP12), a peptide with five amino acids (PEP2), and optionally a pair of peptides selected form the group consisting of PEP3:PEP4, PEP3:PEP6, PEP3:PEP10, PEP5:PEP4, PEP9:PEP4, PEP5:PEP6, PEP5:PEP10, PEP9:PEP6 and PEP9:PEP10; wherein said GFR-binding compound does not comprise the pair of peptides GSAGPXXTPTKM:GMVVDRXGXS when PEP1 is SPIN and PEP2 is YGKIP; and, optionally, wherein the RMSD is 2.45 Å or less.

[0790] In certain embodiments useful for inducing the conversion of a neoplastic cell into a cell (any cell) of an eye retina cell lineage, said GFR-binding compound is a synthetic molecule as defined herein in the definition section.

[0791] In certain embodiments useful for inducing the conversion of a neoplastic cell into a cell (any cell) of an eye retina cell lineage, said GFR-binding compound is a synthetic peptide, or a variant or analog thereof, or a peptidomimetic.

[0792] Renal Cell Lineage

[0793] Certain embodiments of the invention are particularly useful for inducing the conversion of a neoplastic cell into a cell (any cell) of a renal cell lineage.

[0794] In certain embodiments useful for inducing the conversion of a neoplastic cell into a cell (any cell) of a renal cell lineage, PEP1 is SPIN.

[0795] In certain embodiments useful for inducing the conversion of a neoplastic cell into a cell (any cell) of a renal cell lineage, PEP2 is YGKIP.

[0796] In certain embodiments useful for inducing the conversion of a neoplastic cell into a cell (any cell) of a renal cell lineage, PEP3 is selected from the group consisting of VPT, APT, TPT, VPA and APV.

[0797] In certain embodiments useful for inducing the conversion of a neoplastic cell into a cell (any cell) of a renal cell lineage, PEP4 is selected from the group consisting of VVE, VVR, VVK, VAE, AVS, VVD and VEE.

[0798] In certain embodiments useful for inducing the conversion of a neoplastic cell into a cell (any cell) of a renal cell lineage, PEP5 is a peptide of general formula PEP3-AA¹¹-AA¹²; wherein PEP3 is selected from the group consisting of VPT, APT, TPT, VPA and APV; wherein AA¹¹ is selected from the group consisting of E, K, Q, R, A, D, G and H, in particular is E, K, Q and R; wherein AA¹² is selected from the group consisting of L, M, T, E, Q and H, in particular is L, M or T. In one particular example, PEP5 is selected from the group consisting of VPTEL, APTKL, APTQL, VPTKL, TPTKM, VPARL, VPTRL and APVKT.

[0799] In certain embodiments useful for inducing the conversion of a neoplastic cell into a cell (any cell) of a renal cell lineage, PEP6 is a peptide of general formula AA²⁶-AA²⁷-AA²⁸-AA²⁹-PEP4; wherein PEP4 is selected from the group consisting of VVE, VVR, VVK, VAE, AVS, VVD and VEE; wherein AA²⁶ is absent or selected from the group consisting of AA^{III} amino acids, preferably absent or E; wherein AA²⁷ and AA²⁸ are independently selected from the group consisting of AA^{III} and AA^{V} amino acids, preferably AA²⁷ is selected from the group consisting of D, E, N, G and M, preferably AA²⁸ is M or I; wherein AA²⁹ is absent or selected from the group consisting of AA^{II} amino acids, preferably absent or S. In one particular example, PEP6 is selected from the group consisting of DMVVE, EMVVE, NMVVR, NMVVK, EGMSVAE, EGMAVS, GMVVD and DMIVEE.

[0800] In certain embodiments useful for inducing the conversion of a neoplastic cell into a cell (any cell) of a renal cell lineage, PEP7 is an amino acid or a peptide with between two and seven amino acids of general formula AA¹-AA²-AA³-AA⁴-AA⁵-AA⁶-AA⁷; wherein AA¹, AA², AA³, AA⁴, and AA⁵ are independently absent or AA^{I} as defined herein; wherein AA⁶ is absent or selected from the group consisting of S, T, C, E, Q, P and R, preferably is S or C; wherein AA⁷ is absent or is selected from the group consisting of S, T, C, E, Q, P and R, preferably is S or C; and wherein at least one of AA¹, AA², AA³, AA⁴, AA⁵, AA⁶ or AA⁷ is not absent. In one particular example, PEP7 is selected from the group consisting of KIPKAXX, SIPKAXX, HVTKPTX, YVPKPXX, TVPKPXX, AVPKAXX, KVGKAXX, KASKAXX, GSAGPXX, AAPAXXS, STPPTXX, HVPKPXX and RVPSTXX.

[0801] In certain embodiments useful for inducing the conversion of a neoplastic cell into a cell (any cell) of a renal cell lineage, PEP8 is an amino acid or a peptide with between two and six amino acids of general formula AA³³-AA³⁴-AA³⁵-AA³⁶-AA³⁷-AA³⁸; wherein AA³³ is absent or is selected from the group consisting of AA^{I} amino acids at the exception of AA^{VI} amino acids, in particular is absent or is selected from the group consisting of G, S, A, E and R; AA³⁴ is absent or is selected from the group consisting of AA^{III} and AA^{IV} amino acids, in particular is absent; wherein AA³⁵ is absent or is selected from the group consisting of AA^{II} amino acids, preferably is S or C; wherein AA³⁶ is absent or is selected from the group consisting of AA^{III} and AA^{IV} amino acids; wherein AA³⁷ is absent or is selected from the group consisting of AA^{II} amino acids, preferably is S or C; wherein AA³⁸ is absent or is selected from the group consisting of AA^{I}, in particular is selected from the group consisting of R, H, S and L; and wherein at least one of AA³³, AA³⁴, AA³⁵, AA³⁶, AA³⁷ or AA³⁸ is not absent. In one particular example, PEP8 is selected from the group consisting of GXGXR, SXGXH, AXGXH, XGXR, EXGXR, RXGXS, AXGXR, SXGXR and XGXL.

[0802] In certain embodiments useful for inducing the conversion of a neoplastic cell into a cell (any cell) of a renal cell lineage, PEP9 is a peptide of general formula AA¹-AA²-AA³-AA⁴-AA⁵-AA⁶-AA⁷-PEP5; wherein PEP5 is a peptide of formula PEP3-AA¹¹-AA¹²; wherein PEP3 is selected from the group consisting of VPT, APT, TPT, VPA and APV; wherein AA¹¹ is selected from the group consisting of E, K, Q, R, A, D, G and H, in particular is E, K, Q and R; wherein AA¹² is selected from the group consisting of L, M, T, E, Q and H, in particular is L, M or T; wherein AA¹, AA², AA³, AA⁴, and AA⁵ are independently absent or AA^{I} as defined herein; wherein AA⁶ is absent or selected from the group consisting of S, T, C, E, Q, P and R, preferably is S or C; wherein AA⁷ is selected from the group consisting of S, T, C, E, Q, P and R, preferably is S or C. In one particular example, PEP9 is selected from the group consisting of KIPKAXXVPTEL, SIPKAXXVPTEL, HVTKPTXAPTKL, YVPKPXXAPTKL, TVPKPXXAPTQL, AVPKAXXAPTKL, KVGKAXXVPTKL, KASKAXXVPTKL, GSAGPXXTPTKL, AAPASXXVPARL, STPPTXXVPTRL, HVPKPXXAPTKL and RVPSTXXAPVKT.

[0803] In certain embodiments useful for inducing the conversion of a neoplastic cell into a cell (any cell) of a renal cell lineage, PEP10 is a peptide of general formula PEP6-AA³³-AA³⁴-AA³⁵-AA³⁶-AA³⁷-AA³⁸; wherein PEP6 is a peptide of formula AA²⁶-AA²⁷-AA²⁸-AA²⁹-PEP4; wherein PEP4 is selected from the group consisting of VVE, VVR, VVK, VAE, AVS, VVD and VEE; wherein AA²⁶ is absent or selected from the group consisting of AA^{III} amino acids, preferably absent or E; wherein AA²⁷ and AA²⁸ are independently selected from the group consisting of AA^{III} and AA^{V} amino acids, preferably AA²⁷ is selected from the group consisting of D, E, N, G and M, preferably AA²⁸ is M or I; wherein AA²⁹ is absent or selected from the group consisting of AA^{II} amino acids, preferably absent or S; wherein AA³³ is absent or is selected from the group consisting of AA^{I} amino acids at the exception of AA^{VI} amino acids, in particular is absent or is selected from the group consisting of G, S, A, E and R; AA³⁴ is absent or is selected from the group consisting of AA^{III} and AA^{IV} amino acids, in particular is absent; wherein AA³⁵ is absent or is selected from the group consisting of AA^{II} amino acids, preferably is S or C; wherein AA³⁶ is absent or is selected from the group consisting of AA^{III} and AA^{IV} amino acids; wherein AA³⁷ is absent or is selected from the group consisting of AA^{II} amino acids, preferably is S or C; wherein AA³⁸ is absent or is selected from the group consisting of AA^{I}, in particular is selected from the group consisting of R, H, S and L. In one particular example, PEP10 is selected from the group consisting of DMVVEGXGXR, EMVVEGXGXR, NMVVRSXGXH, NMVVRAXGXH, NMVVKAXGXH, EGMSVAEXGXR, GMAVSEXGXR, GMVVDRXGXS, DMVVEAXGXR, DMVVESXGXR, NMVVRSXGXH and MIVEEXGXL.

[0804] In certain embodiments useful for inducing the conversion of a neoplastic cell into a cell (any cell) of a renal cell lineage, PEP12 is a peptide of general formula PEP1-AA¹⁷-PEP11; wherein AA¹⁷ is selected from the group consisting of G, A, V, L, I, P, F, M, W, T and S (in particular is selected from the group consisting of M, I, L, V and T); wherein PEP1 is SPIN.

[0805] In certain embodiments useful for inducing the conversion of a neoplastic cell into a cell (any cell) of a renal cell lineage, PEP11 is a peptide with 3 amino acids of general formula AA¹⁸-AA¹⁹-AA²⁰; wherein AA¹⁸ is selected from the group consisting of L, V, Q, A and R, in particular is L; wherein AA¹⁹ is selected from the group consisting of F, W, H and Y, in particular is Y or F; wherein AA²⁰ is selected from the group consisting of L, F, Y, K, I, V and M, in particular is selected from the group consisting of L, F, Y, K, I and V. In one particular example, PEP11 is LYF.

[0806] The definitions of “PEP” pairs, quadruplets, hexaplets and heptuplet e.g. PEP1:PEP2, PEP12:PEP2, or PEP7:PEP5:PEP12:LINKER:PEP2:PEP6:PEP8, most particularly useful for inducing the conversion of a neoplastic cell into a cell (any cell) of a renal cell lineage, are as already defined herein to the extent that PEP1 to PEP12 are particularly useful for these applications. For instances:

[0807] In certain embodiments useful for inducing the conversion of a neoplastic cell into a cell (any cell) of a renal cell lineage, PEP3 is selected from the group consisting of VPT, APT, TPT, VPA and APV; PEP4 is selected from the group consisting of VVE, VVR, VVK, VAE, AVS, VVD and VEE; and wherein the pair PEP3:PEP4 is selected from the group consisting of VPT:VVE, APT:VVR, APT:VVK, VPT:VAE, VPT:AVS, TPT:VVD, VPA:VVE and APV:VEE.

[0808] In certain embodiments useful for inducing the conversion of a neoplastic cell into a cell (any cell) of a renal cell lineage, PEP5 is selected from the group consisting of VPTEL, APTKL, APTQL, VPTKL, TPTKM, VPARL, VPTRL and APVKT; PEP6 is selected from the group consisting of DMVVE, EMVVE, NMVVR, NMVVK, EGMSVAE, EGMAVS, GMVVD and DMIVEE; and wherein the pair PEP5:PEP6 is selected from the group consisting of VPTEL:DMVVE, VPTEL:EMVVE, APTKL:NMVVR, APTQL:NMVVR, APTKL:NMVVK, VPTKL:EGMSVAE, VPTKL:EGMAVS, TPTKM:GMVVD, VPARL:DMVVE, VPTRL:DMVVE, APTKL:NMVVR and APVKT:DMIVEE.

[0809] In certain embodiments useful for inducing the conversion of a neoplastic cell into a cell (any cell) of a renal cell lineage, PEP7 is selected from the group consisting of KIPKAXX, SIPKAXX, HVTKPTX, YVPKPXX, TVPKPXX, AVPKAXX, KVGKAXX, KASKAXX, GSAGPXX, AAPAXXS, STPPTXX, HVPKPXX and RVPSTXX; wherein PEP8 is selected from the group consisting of GXGXR, SXGXH, AXGXH, XGXR, EXGXR, RXGXS, AXGXR, SXGXR and XGXL; and wherein the pair PEP7:PEP8 is selected from the group consisting of KIPKAXX:GXGXR, SIPKAXX:GXGXR, HVTKPTX:SXGXH, YVPKPXX:SXGXH, TVPKPXX:AXGXH, AVPKAXX:AXGXH, KVGKAXX:XGXR, KASKAXX:EXGXR, GSAGPXX:RXGXS, AAPASXX:AXGXR, STPPTXX:SXGXR, HVPKPXX:SXGXH and RVPSTXX:XGXL.

[0810] In certain embodiments useful for inducing the conversion of a neoplastic cell into a cell (any cell) of a renal cell lineage, PEP9 is selected from the group consisting of KIPKAXXVPTEL, SIPKAXXVPTEL, HVTKPTXAPTKL, YVPKPXXAPTKL, TVPKPXXAPTQL, AVPKAXXAPTKL, KVGKAXXVPTKL, KASKAXXVPTKL, GSAGPXXTPTKL, AAPASXXVPARL, STPPTXXVPTRL, HVPKPXXAPTKL and RVPSTXXAPVKT; PEP10 is selected from the group consisting of DMVVEGXGXR, EMVVEGXGXR, NMVVRSXGXH, NMVVRAXGXH, NMVVKAXGXH, EGMSVAEXGXR, GMAVSEXGXR, GMVVDRXGXS, DMVVEAXGXR, DMVVESXGXR, NMVVRSXGXH and MIVEEXGXL; and wherein the pair PEP9:PEP10 is selected from the group consisting of KIPKAXXVPTEL:DMVVEGXGXR, SIPKAXXVPTEL:EMVVEGXGXR, HVTKPTXAPTKL:NMVVRSXGXH, YVPKPXXAPTKL:NMVVRSXGXH, TVPKPXXAPTQL:NMVVRAXGXH, AVPKAXXAPTKL:NMVVKAXGXH, KVGKAXXVPTKL:EGMSVAEXGXR, KASKAXXVPTKL:GMAVSEXGXR, GSAGPXXTPTKM:GMVVDRXGXS, AAPASXXVPARL:DMVVEAXGXR, STPPTXXVPTRL:DMVVESXGXR, HVPKPXXAPTKL:NMVVRSXGXH and RVPSTXXAPVKT:MIVEEXGXL.

[0811] In certain embodiments useful for inducing the conversion of a neoplastic cell into a cell (any cell) of a renal cell lineage, PEP5 is selected from the group consisting of VPTEL, APTKL, APTQL, VPTKL, VPARL, VPQAL, VSQDL and VPQDL; PEP6 is selected from the group consisting of DMVVE, EMVVE, NMVVR, NMVVK, EGMSVAE, GMAVS, DMVVE, MIVRS, MIVKS and MVVKS; and wherein the pair PEP5:PEP6 is selected from the group consisting of VPTEL:DMVVE, VPTEL:EMVVE, APTKL:NMVVR, APTQL:NMVVR, APTKL:NMVVK, VPTKL:EGMSVAE, VPTKL:EGMAVS, TPTKM:GMVVD, VPARL:DMVVE, VPTRL:DMVVE, APTKL:NMVVR and APVKT:DMIVEE; and wherein the pair PEP5:PEP6 is not TPTKM:GMVVD when PEP1 is SPIN and PEP2 is YGKIP.

[0812] In certain embodiments useful for inducing the conversion of a neoplastic cell into a cell (any cell) of a renal cell lineage, PEP9 is selected from the group consisting of KIPKAXXVPTEL, SIPKAXXVPTEL, HVTKPTXAPTKL, YVPKPXXAPTKL, TVPKPXXAPTQL, AVPKAXXAPTKL, KVGKAXXVPTKL, KASKAXXVPTKL, GSAGPXXTPTKL, AAPASXXVPARL, STPPTXXVPTRL, HVPKPXXAPTKL and RVPSTXXAPVKT; PEP10 is selected from the group consisting of DMVVEGXGXR, EMVVEGXGXR, NMVVRSXGXH, NMVVRAXGXH, NMVVKAXGXH, EGMSVAEXGXR, GMAVSEXGXR, GMVVDRXGXS, DMVVEAXGXR, DMVVESXGXR, NMVVRSXGXH and MIVEEXGXL; and wherein the pair PEP9:PEP10 is selected from the group consisting of KIPKAXXVPTEL:DMVVEGXGXR, SIPKAXXVPTEL:EMVVEGXGXR, HVTKPTXAPTKL:NMVVRSXGXH, YVPKPXXAPTKL:NMVVRSXGXH, TVPKPXXAPTQL:NMVVRAXGXH, AVPKAXXAPTKL:NMVVKAXGXH, KVGKAXXVPTKL:EGMSVAEXGXR, KASKAXXVPTKL:GMAVSEXGXR, GSAGPXXTPTKM:GMVVDRXGXS, AAPASXXVPARL:DMVVEAXGXR, STPPTXXVPTRL:DMVVESXGXR, HVPKPXXAPTKL:NMVVRSXGXH and RVPSTXXAPVKT:MIVEEXGXL; and wherein PEP9:PEP10 is not GSAGPXXTPTKM:GMVVDRXGXS when PEP1 is SPIN and PEP2 is YGKIP.

[0813] In certain embodiments useful for inducing the conversion of a neoplastic cell into a cell (any cell) of a renal cell lineage, PEP1 is SPIN and PEP11 is LYF.

[0814] In one aspect, the present disclosure provides a GFR-binding compound, wherein said GFR-binding compound is a peptide, a variant or analog thereof, or a peptidomimetic as defined herein, with between 20 and 60 (in particular between 20 and 50, and more particularly, between 20 and 45) amino acids, comprising a peptide with four amino acids (PEP1) or a peptide with eight amino acids (PEP12), a peptide with five amino acids (PEP2), and optionally a pair of peptides selected form the group consisting of PEP3:PEP4, PEP3:PEP6, PEP3:PEP10, PEP5:PEP4, PEP9:PEP4, PEP5:PEP6, PEP5:PEP10, PEP9:PEP6 and PEP9:PEP10; wherein said GFR-binding compound does not comprise the pair of peptides TPTKM:GMVVD when PEP1 is SPIN and PEP2 is YGKIP; and, optionally, wherein the RMSD is 2.45 Å or less.

[0815] In one aspect, the present disclosure provides a GFR-binding compound, wherein said GFR-binding compound is a peptide, a variant or analog thereof, or a peptidomimetic as defined herein, with between 20 and 60 (in particular between 20 and 50, and more particularly, between 20 and 45) amino acids, comprising a peptide with four amino acids (PEP1) or a peptide with eight amino acids (PEP12), a peptide with five amino acids (PEP2), and optionally a pair of peptides selected form the group consisting of PEP3:PEP4, PEP3:PEP6, PEP3:PEP10, PEP5:PEP4, PEP9:PEP4, PEP5:PEP6, PEP5:PEP10, PEP9:PEP6 and PEP9:PEP10; wherein said GFR-binding compound does not comprise the pair of peptides GSAGPXXTPTKM:GMVVDRXGXS when PEP1 is SPIN and PEP2 is YGKIP; and, optionally, wherein the RMSD is 2.45 Å or less.

[0816] In certain embodiments useful for inducing the conversion of a neoplastic cell into a cell (any cell) of a renal cell lineage, said GFR-binding compound is a synthetic molecule as defined herein in the definition section.

[0817] In certain embodiments useful for inducing the conversion of a neoplastic cell into a cell (any cell) of a renal cell lineage, said GFR-binding compound is a synthetic peptide, or a variant or analog thereof, or a peptidomimetic.

[0818] Ligament and Tendon Cell Lineage

[0819] Certain embodiments of the invention are particularly useful for inducing the conversion of a neoplastic cell into a cell (any cell) of the ligament and tendon cell lineage.

[0820] In certain embodiments useful for inducing the conversion of a neoplastic cell into a cell (any cell) of the ligament and tendon cell lineage, PEP1 is selected from the group consisting of NAIS, SPIS, EPLP and EPLT.

[0821] In certain embodiments useful for inducing the conversion of a neoplastic cell into a cell (any cell) of the ligament and tendon cell lineage, PEP2 is selected from the group consisting of LKKYR, YKQYE and EQLSN.

[0822] In certain embodiments useful for inducing the conversion of a neoplastic cell into a cell (any cell) of the ligament and tendon cell lineage, PEP3 is selected from the group consisting of VPT, APT, VPQ and VSQ.

[0823] In certain embodiments useful for inducing the conversion of a neoplastic cell into a cell (any cell) of the ligament and tendon cell lineage, PEP4 is selected from the group consisting of VVE, VVR, VRS, VKS and VVK.

[0824] In certain embodiments useful for inducing the conversion of a neoplastic cell into a cell (any cell) of the ligament and tendon cell lineage, PEP5 is a peptide of general formula PEP3-AA¹¹-AA¹²; wherein PEP3 is selected from the group consisting of VPT, APT, VPQ and VSQ; wherein AA¹¹ is selected from the group consisting of E, K, Q, R, A, D, G and H, in particular is E, K, Q, R, A and D; wherein AA¹² is selected from the group consisting of L, M, T, E, Q and H, in particular is L. In one particular example, PEP5 is selected from the group consisting of VPTEL, APTKL, APTQL, VPTRL, VPQAL, VSQDL and VPQDL.

[0825] In certain embodiments useful for inducing the conversion of a neoplastic cell into a cell (any cell) of the ligament and tendon cell lineage, PEP6 is a peptide of general formula AA²⁶-AA²⁷-AA²⁸-AA²⁹-PEP4; wherein PEP4 is selected from the group consisting of VVE, VVR, VRS, VKS and VVK; wherein AA²⁶ is absent or selected from the group consisting of AA^{III} amino acids, preferably is absent; wherein AA²⁷ and AA²⁸ are independently selected from the group consisting of AA^{III} and AA^{V} amino acids, preferably AA²⁷ is selected from the group consisting of D, E, N and M, preferably AA²⁸ is selected from the group consisting of M, I and V; wherein AA²⁹ is absent or selected from the group consisting of AA^{II} amino acids, preferably is absent. In one particular example, PEP6 is selected from the group consisting of DMVVE, EMVVE, NMVVR, DMVVE, MIVRS, MIVKS and NMVVK.

[0826] In certain embodiments useful for inducing the conversion of a neoplastic cell into a cell (any cell) of the ligament and tendon cell lineage, PEP7 is an amino acid or a peptide with between two and seven amino acids of general formula AA¹-AA²-AA³-AA⁴-AA⁵-AA⁶-AA⁷; wherein AA¹, AA², AA³, AA⁴, and AA⁵ are independently absent or AA^{I} as defined herein; wherein AA⁶ is absent or selected from the group consisting of S, T, C, E, Q, P and R, preferably is selected from the group consisting of T, S and C; wherein AA⁷ is absent or is selected from the group consisting of S, T, C, E, Q, P and R, preferably S or C; and wherein at least one of AA¹, AA², AA³, AA⁴, AA⁵, AA⁶ or AA⁷ is not absent. In one particular example, PEP7 is selected from the group consisting of KIPKAXX, SIPKAXX, HVTKPTX, YVPKPXX, TVPKPXX, STPPTXX, ASAAPXX and ASASPXX.

[0827] In certain embodiments useful for inducing the conversion of a neoplastic cell into a cell (any cell) of the ligament and tendon cell lineage, PEP8 is an amino acid or a peptide with between two and six amino acids of general formula AA³³-AA³⁴-AA³⁵-AA³⁶-AA³⁷-AA³⁸; wherein AA³³ is absent or is selected from the group consisting of AA^{I} amino acids at the exception of AA^{VI} amino acids, in particular is absent or is selected from the group consisting of G, S and A; AA³⁴ is absent or is selected from the group consisting of AA^{III} and AA^{IV} amino acids, in particular is absent; wherein AA³⁵ is absent or is selected from the group consisting of AA^{II} amino acids, preferably is S or C; wherein AA³⁶ is absent or is selected from the group consisting of AA^{III} and AA^{IV} amino acids, in particular is G or K; wherein AA³⁷ is absent or is selected from the group consisting of AA^{II} amino acids, preferably is S or C; wherein AA³⁸ is absent or is selected from the group consisting of AA^{I}, in particular is selected from the group consisting of R, H and S; and wherein at least one of AA³³, AA³⁴, AA³⁵, AA³⁶, AA³⁷ or AA³⁸ is not absent. In one particular example, PEP8 is selected from the group consisting of GXGXR, SXGXH, AXGXH, SXGXR, XKXS and SXKXS.

[0828] In certain embodiments useful for inducing the conversion of a neoplastic cell into a cell (any cell) of the ligament and tendon cell lineage, PEP9 is a peptide of general formula AA¹-AA²-AA³-AA⁴-AA⁵-AA⁶-AA⁷-PEP5; wherein PEP5 is a peptide of formula PEP3-AA¹¹-AA¹²; wherein PEP3 is selected from the group consisting of VPT, APT, VPQ and VSQ; wherein AA¹¹ is selected from the group consisting of E, K, Q, R, A, D, G and H, in particular is E, K, Q, R, A and D; wherein AA¹² is selected from the group consisting of L, M, T, E, Q and H, in particular is L; wherein AA¹, AA², AA³, AA⁴, and AA⁵ are independently absent or AA^{I} as defined herein; wherein AA⁶ is absent or selected from the group consisting of S, T, C, E, Q, P and R, preferably is selected from the group consisting of T, S and C; wherein AA⁷ is selected from the group consisting of S, T, C, E, Q, P and R, preferably S or C. In one particular example, PEP9 is selected from the group consisting of KIPKAXXVPTEL, SIPKAXXVPTEL, HVTKPTXAPTKL, YVPKPXXAPTKL, TVPKPXXAPTQL, STPPTXXVPTRL, ASAAPXXVPQAL, ASASPXXVSQDL and ASASPXXVPQDL.

[0829] In certain embodiments useful for inducing the conversion of a neoplastic cell into a cell (any cell) of the ligament and tendon cell lineage, PEP10 is a peptide of general formula PEP6-AA³³-AA³⁴-AA³⁵-AA³⁶-AA³⁷-AA³⁸; wherein PEP6 is a peptide of formula AA²⁶-AA²⁷-AA²⁸-AA²⁹-PEP4; wherein PEP4 is selected from the group consisting of VVE, VVR, VRS, VKS and VVK; wherein AA²⁶ is absent or selected from the group consisting of AA^{III} amino acids, preferably is absent; wherein AA²⁷ and AA²⁸ are independently selected from the group consisting of AA^{III} and AA^{V} amino acids, preferably AA²⁷ is selected from the group consisting of D, E, N and M, preferably AA²⁸ is selected from the group consisting of M, I and V; wherein AA²⁹ is absent or selected from the group consisting of AA^{II} amino acids, preferably is absent; wherein AA³³ is absent or is selected from the group consisting of AA^{I} amino acids at the exception of AA^{VI} amino acids, in particular is absent or is selected from the group consisting of G, S and A; AA³⁴ is absent or is selected from the group consisting of AA^{III} and AA^{IV} amino acids, in particular is absent; wherein AA³⁵ is absent or is selected from the group consisting of AA^{II} amino acids, preferably is S or C; wherein AA³⁶ is absent or is selected from the group consisting of AA^{III} and AA^{IV} amino acids, in particular is G or K; wherein AA³⁷ is absent or is selected from the group consisting of AA^{II} amino acids, preferably is S or C; wherein AA³⁸ is absent or is selected from the group consisting of AA^{I}, in particular is selected from the group consisting of R, H and S. In one particular example, PEP10 is selected from the group consisting of DMVVEGXGXR, EMVVEGXGXR, NMVVRSXGXH, NMVVRAXGXH, DMVVESXGXR, MIVRSXKXS, MIVKSXKXS and MVVKSXKXS.

[0830] In certain embodiments useful for inducing the conversion of a neoplastic cell into a cell (any cell) of the ligament and tendon cell lineage, PEP12 is a peptide of general formula PEP1-AA¹⁷-PEP11; wherein AA¹⁷ is selected from the group consisting of G, A, V, L, I, P, F, M, W, T and S (in particular is selected from the group consisting of M, I, L, V and T); wherein PEP1 is selected from the group consisting of NAIS, SPIS, EPLP and EPLT.

[0831] In certain embodiments useful for inducing the conversion of a neoplastic cell into a cell (any cell) of the ligament and tendon cell lineage, PEP11 is a peptide with 3 amino acids of general formula AA¹⁸-AA¹⁹-AA²⁰; wherein AA¹⁸ is selected from the group consisting of L, V, Q, A and R, in particular is L or V; wherein AA¹⁹ is selected from the group consisting of F, W, H and Y, in particular is Y or F; wherein AA²⁰ is selected from the group consisting of L, F, Y, K, I, V and M, in particular is selected from the group consisting of F, I and Y. In one particular example, PEP11 is selected from the group consisting of LYF, LFI, VYY and LYY.

[0832] The definitions of “PEP” pairs, quadruplets, hexaplets and heptuplet e.g. PEP1:PEP2, PEP12:PEP2, or PEP7:PEP5:PEP12:LINKER:PEP2:PEP6:PEP8, most particularly useful for inducing the conversion of a neoplastic cell into a cell (any cell) of the ligament and tendon cell lineage, are as already defined herein to the extent that PEP1 to PEP12 are particularly useful for these applications. For instances:

[0833] In certain embodiments useful for inducing the conversion of a neoplastic cell into a cell (any cell) of the ligament and tendon cell lineage, the pair PEP1:PEP2 is selected from the group consisting of NAIS:LKKYR, SPIS:YKQYE, EPLP:EQLSN and EPLT:EQLSN.

[0834] In certain embodiments useful for inducing the conversion of a neoplastic cell into a cell (any cell) of the ligament and tendon cell lineage, the pair PEP12:PEP2 is selected from the group consisting of NAIS-AA¹⁷-LYF:LKKYR, SPIS-AA¹⁷-LRYKQYE, EPLP-AA¹⁷-VYY:EQLSN and EPLT-AA¹⁷-LYY:EQLSN; wherein AA¹⁷ is selected from the group consisting of G, A, V, L, I, P, F, M, W, T and S (in particular is selected from the group consisting of V, I and T).

[0835] In certain embodiments useful for inducing the conversion of a neoplastic cell into a cell (any cell) of the ligament and tendon cell lineage, PEP3 is selected from the group consisting of VPT, APT, VPQ and VSQ; PEP4 is selected from the group consisting of VVE, VVR, VRS, VKS and VVK; and wherein the pair PEP3:PEP4 is selected from the group consisting of VPT:VVE, APT:VVR, VPT:VVE, VPQ:VRS, VSQ:VKS and VPQ:VVK.

[0836] In certain embodiments useful for inducing the conversion of a neoplastic cell into a cell (any cell) of the ligament and tendon cell lineage, PEP5 is selected from the group consisting of VPTEL, APTKL, APTQL, VPTRL, VPQAL, VSQDL and VPQDL; PEP6 is selected from the group consisting of DMVVE, EMVVE, NMVVR, DMVVE, MIVRS, MIVKS and NMVVK; and wherein the pair PEP5:PEP6 is selected from the group consisting of VPTEL:DMVVE, VPTEL:EMVVE, APTKL:NMVVR, APTQL:NMVVR, VPTRL:DMVVE, VPQAL:MIVRS, VSQDL:MIVKS and VPQDL:NMVVK.

[0837] In certain embodiments useful for inducing the conversion of a neoplastic cell into a cell (any cell) of the ligament and tendon cell lineage, PEP7 is selected from the group consisting of KIPKAXX, SIPKAXX, HVTKPTX, YVPKPXX, TVPKPXX, STPPTXX, ASAAPXX and ASASPXX; wherein PEP8 is selected from the group consisting of GXGXR, SXGXH, AXGXH, SXGXR, XKXS and SXKXS; and wherein the pair PEP7:PEP8 is selected from the group consisting of KIPKAXX:GXGXR, SIPKAXX:GXGXR, HVTKPTX:SXGXH, YVPKPXX:SXGXH, TVPKPXX:AXGXH, STPPTXX:SXGXR, ASAAPXX:XKXS and ASASPXX:XKXS.

[0838] In certain embodiments useful for inducing the conversion of a neoplastic cell into a cell (any cell) of the ligament and tendon cell lineage, PEP9 is selected from the group consisting of KIPKAXXVPTEL, SIPKAXXVPTEL, HVTKPTXAPTKL, YVPKPXXAPTKL, TVPKPXXAPTQL, STPPTXXVPTRL, ASAAPXXVPQAL, ASASPXXVSQDL and ASASPXXVPQDL; PEP10 is selected from the group consisting of DMVVEGXGXR, EMVVEGXGXR, NMVVRSXGXH, NMVVRAXGXH, DMVVESXGXR, MIVRSXKXS, MIVKSXKXS and MVVKSXKXS; and wherein the pair PEP9:PEP10 is selected from the group consisting of KI PKAXXVPTEL:DMVVEGXGXR, SIPKAXXVPTEL: EMVVEGXGXR, HVTKPTXAPTKL:NMVVRSXGXH, YVPKPXXAPTKL:NMVVRSXGXH, TVPKPXXAPTQL:NMVVRAXGXH, STPPTXXVPTRL:DMVVESXGXR, ASAAPXXVPQAL:MIVRSXKXS, ASASPXXVSQDL:MIVKSXKXS and ASASPXXVPQDL:MVVKSXKXS.

[0839] In certain embodiments useful for inducing the conversion of a neoplastic cell into a cell (any cell) of the ligament and tendon cell lineage, PEP5 is selected from the group consisting of VPTEL, APTKL, APTQL, VPTRL, VPQAL, VSQDL and VPQDL; PEP6 is selected from the group consisting of DMVVE, EMVVE, NMVVR, DMVVE, MIVRS, MIVKS and NMVVK; and wherein the pair PEP5:PEP6 is selected from the group consisting of VPTEL:DMVVE, VPTEL:EMVVE, APTKL:NMVVR, APTQL:NMVVR, VPTRL:DMVVE, VPQAL:MIVRS, VSQDL:MIVKS and VPQDL:NMVVK; wherein the pair PEP5:PEP6 is not APTQL:NMVVR when PEP1 is NAIS and PEP2 is LKKYR; wherein the pair PEP5:PEP6 is not VPTRL:DMVVE when PEP1 is SPIS and PEP2 is YKQYE; wherein the pair PEP5:PEP6 is not VPQAL:MIVRS when PEP1 is EPLP and PEP2 is EQLSN; wherein the pair PEP5:PEP6 is not VSQDL:MIVKS when PEP1 is EPLT and PEP2 is EQLSN; and wherein the pair PEP5:PEP6 is not VPQDL:NMVVK when PEP1 is EPLT and PEP2 is EQLSN.

[0840] In certain embodiments useful for inducing the conversion of a neoplastic cell into a cell (any cell) of the ligament and tendon cell lineage, PEP9 is selected from the group consisting of KIPKAXXVPTEL, SIPKAXXVPTEL, HVTKPTXAPTKL, YVPKPXXAPTKL, TVPKPXXAPTQL, STPPTXXVPTRL, ASAAPXXVPQAL, ASASPXXVSQDL and ASASPXXVPQDL; PEP10 is selected from the group consisting of DMVVEGXGXR, EMVVEGXGXR, NMVVRSXGXH, NMVVRAXGXH, DMVVESXGXR, MIVRSXKXS, MIVKSXKXS and MVVKSXKXS; and wherein the pair PEP9:PEP10 is selected from the group consisting of KI PKAXXVPTEL:DMVVEGXGXR, SIPKAXXVPTEL:EMVVEGXGXR, HVTKPTXAPTKL:NMVVRSXGXH, YVPKPXXAPTKL:NMVVRSXGXH, TVPKPXXAPTQL:NMVVRAXGXH, STPPTXXVPTRL:DMVVESXGXR, ASAAPXXVPQAL:MIVRSXKXS, ASASPXXVSQDL:MIVKSXKXS and ASASPXXVPQDL:MVVKSXKXS; wherein the pair PEP9:PEP10 is not TVPKPXXAPTQL:NMVVRAXGXH when PEP1 is NAIS and PEP2 is LKKYR; wherein the pair PEP9:PEP10 is not STPPTXXVPTRL:DMVVESXGXR when PEP1 is SPIS and PEP2 is YKQYE; wherein the pair PEP9:PEP10 is not ASAAPXXVPQAL:MIVRSXKXS when PEP1 is EPLP and PEP2 is EQLSN; wherein the pair PEP9:PEP10 is not ASASPXXVSQDL:MIVKSXKXS when PEP1 is EPLT and PEP2 is EQLSN; and wherein the pair PEP9:PEP10 is not ASASPXXVPQDL:MVVKSXKXS when PEP1 is EPLT and PEP2 is EQLSN.

[0841] In certain embodiments useful for inducing the conversion of a neoplastic cell into a cell (any cell) of the ligament and tendon cell lineage, PEP1 is selected from the group consisting of NAIS, SPIS, EPLP and EPLT; PEP11 is selected from the group consisting of LYF, LFI, VYY and LYY; and the pair PEP1:PEP11 is selected from the group consisting of NAIS:LYF, EPLP:VYY and EPLT:LYY.

[0842] In one aspect, the present disclosure provides a GFR-binding compound, wherein said GFR-binding compound is a peptide, a variant or analog thereof, or a peptidomimetic as defined herein, with between 20 and 60 (in particular between 20 and 50, and more particularly, between 20 and 45) amino acids, comprising a peptide with four amino acids (PEP1) or a peptide with eight amino acids (PEP12), a peptide with five amino acids (PEP2), and optionally a pair of peptides selected form the group consisting of PEP3:PEP4, PEP3:PEP6, PEP3:PEP10, PEP5:PEP4, PEP9:PEP4, PEP5:PEP6, PEP5:PEP10, PEP9:PEP6 and PEP9:PEP10; wherein said GFR-binding compound does not comprise the pair of peptides APTQL:NMVVR when PEP1 is NAIS and PEP2 is LKKYR; wherein said GFR-binding compound does not comprise the pair of peptides VPTRL:DMVVE when PEP1 is SPIS and PEP2 is YKQYE; wherein said GFR-binding compound does not comprise the pair of peptides VPQAL:MIVRS when PEP1 is EPLP and PEP2 is EQLSN; wherein said GFR-binding compound does not comprise the pair of peptides VSQDL:MIVKS when PEP1 is EPLT and PEP2 is EQLSN; and wherein said GFR-binding compound does not comprise the pair of peptides VPQDL:NMVVK when PEP1 is EPLT and PEP2 is EQLSN; and, optionally, wherein the RMSD is 2.45 Å or less.

[0843] In one aspect, the present disclosure provides a GFR-binding compound, wherein said GFR-binding compound is a peptide, a variant or analog thereof, or a peptidomimetic as defined herein, with between 20 and 60 (in particular between 20 and 50, and more particularly, between 20 and 45) amino acids, comprising a peptide with four amino acids (PEP1) or a peptide with eight amino acids (PEP12), a peptide with five amino acids (PEP2), and optionally a pair of peptides selected form the group consisting of PEP3:PEP4, PEP3:PEP6, PEP3:PEP10, PEP5:PEP4, PEP9:PEP4, PEP5:PEP6, PEP5:PEP10, PEP9:PEP6 and PEP9:PEP10; wherein said GFR-binding compound does not comprise the pair of peptides TVPKPXXAPTQL:NMVVRAXGXH when PEP1 is NAIS and PEP2 is LKKYR; wherein said GFR-binding compound does not comprise the pair of peptides STPPTXXVPTRL:DMVVESXGXR when PEP1 is SPIS and PEP2 is YKQYE; wherein said GFR-binding compound does not comprise the pair of peptides ASAAPXXVPQAL:MIVRSXKXS when PEP1 is EPLP and PEP2 is EQLSN; wherein said GFR-binding compound does not comprise the pair of peptides ASASPXXVSQDL:MIVKSXKXS when PEP1 is EPLT and PEP2 is EQLSN; and wherein said GFR-binding compound does not comprise the pair of peptides ASASPXXVPQDL:MVVKSXKXS when PEP1 is EPLT and PEP2 is EQLSN; and, optionally, wherein the RMSD is 2.45 Å or less.

[0844] In certain embodiments useful for inducing the conversion of a neoplastic cell into a cell (any cell) of the ligament and tendon cell lineage, said GFR-binding compound is a synthetic molecule as defined herein in the definition section.

[0845] In certain embodiments useful for inducing the conversion of a neoplastic cell into a cell (any cell) of the ligament and tendon cell lineage, said GFR-binding compound is a synthetic peptide, or a variant or analog thereof, or a peptidomimetic.

[0846] In other embodiments also useful for inducing the conversion of a neoplastic cell into a cell (any cell) of the ligament and tendon cell lineage, PEP1 is SPIS.

[0847] In other embodiments also useful for inducing the conversion of a neoplastic cell into a cell (any cell) of the ligament and tendon cell lineage, PEP2 is YKQYE.

[0848] In other embodiments also useful for inducing the conversion of a neoplastic cell into a cell (any cell) of the ligament and tendon cell lineage, PEP3 is selected from the group consisting of VPT, APT, TPT, VPA and APV.

[0849] In other embodiments also useful for inducing the conversion of a neoplastic cell into a cell (any cell) of the ligament and tendon cell lineage, PEP4 is selected from the group consisting of VVE, VVR, VVK, VAE, AVS, VVD and VEE.

[0850] In other embodiments also useful for inducing the conversion of a neoplastic cell into a cell (any cell) of the ligament and tendon cell lineage, PEP5 is a peptide of general formula PEP3-AA¹¹-AA¹²; wherein PEP3 is selected from the group consisting of VPT, APT, TPT, VPA and APV; wherein AA¹¹ is selected from the group consisting of E, K, Q, R, A, D, G and H, in particular is selected from the group consisting of E, K, Q and R; wherein AA¹² is selected from the group consisting of L, M, T, E, Q and H, in particular is selected from the group consisting of L, M and T. In one particular example, PEP5 is selected from the group consisting of VPTEL, APTKL, APTQL, VPTKL, TPTKM, VPARL, VPTRL and APVKT.

[0851] In other embodiments also useful for inducing the conversion of a neoplastic cell into a cell (any cell) of the ligament and tendon cell lineage, PEP6 is a peptide of general formula AA²⁶-AA²⁷-AA²⁸-AA²⁹-PEP4; wherein PEP4 is selected from the group consisting of VVE, VVR, VVK, VAE, AVS, VVD and VEE; wherein AA²⁶ is absent or selected from the group consisting of AA^{III} amino acids, preferably absent or E; wherein AA²⁷ and AA²⁸ are independently selected from the group consisting of AA^{III} and AA^{V} amino acids, preferably AA²⁷ is selected from the group consisting of D, E, N, G and M, preferably AA²⁸ is M or I; wherein AA²⁹ is absent or selected from the group consisting of AA^{II} amino acids, preferably absent or S. In one particular example, PEP6 is selected from the group consisting of DMVVE, EMVVE, NMVVR, NMVVK, EGMSVAE, EGMAVS, GMVVD and DMIVEE.

[0852] In other embodiments also useful for inducing the conversion of a neoplastic cell into a cell (any cell) of the ligament and tendon cell lineage, PEP7 is an amino acid or a peptide with between two and seven amino acids of general formula AA¹-AA²-AA³-AA⁴-AA⁵-AA⁶-AA⁷; wherein AA¹, AA², AA³, AA⁴, and AA⁵ are independently absent or AA^{I} as defined herein; wherein AA⁶ is absent or selected from the group consisting of S, T, C, E, Q, P and R, preferably is S or C; wherein AA⁷ is absent or is selected from the group consisting of S, T, C, E, Q, P and R, preferably is S or C; and wherein at least one of AA¹, AA², AA³, AA⁴, AA⁴, AA⁶ or AA⁷ is not absent. In one particular example, PEP7 is selected from the group consisting of KIPKAXX, SIPKAXX, HVTKPTX, YVPKPXX, TVPKPXX, AVPKAXX, KVGKAXX, KASKAXX, GSAGPXX, AAPAXXS, STPPTXX, HVPKPXX and RVPSTXX.

[0853] In other embodiments also useful for inducing the conversion of a neoplastic cell into a cell (any cell) of the ligament and tendon cell lineage, PEP8 is an amino acid or a peptide with between two and six amino acids of general formula AA³³-AA³⁴-AA³⁵-AA³⁶-AA³⁷-AA³⁸; wherein AA³³ is absent or is selected from the group consisting of AA^{I} amino acids at the exception of AA^{VI} amino acids, in particular is absent or is selected from the group consisting of G, S, A, E and R; AA³⁴ is absent or is selected from the group consisting of AA^{III} and AA^{IV} amino acids, in particular is absent; wherein AA³⁵ is absent or is selected from the group consisting of AA^{II} amino acids, preferably is S or C; wherein AA³⁶ is absent or is selected from the group consisting of AA^{III} and AA^{IV} amino acids; wherein AA³⁷ is absent or is selected from the group consisting of AA^{II} amino acids, preferably is S or C; wherein AA³⁸ is absent or is selected from the group consisting of AA^{I}, in particular is selected from the group consisting of R, H, S and L; and wherein at least one of AA³³, AA³⁴, AA³⁵, AA³⁶, AA³⁷ or AA³⁸ is not absent. In one particular example, PEP8 is selected from the group consisting of GXGXR, SXGXH, AXGXH, XGXR, EXGXR, RXGXS, AXGXR, SXGXR and XGXL.

[0854] In other embodiments also useful for inducing the conversion of a neoplastic cell into a cell (any cell) of the ligament and tendon cell lineage, PEP9 is a peptide of general formula AA¹-AA²-AA³-AA⁴-AA⁵-AA⁶-AA⁷-PEP5; wherein PEP5 is a peptide of formula PEP3-AA¹¹-AA¹²; wherein PEP3 is selected from the group consisting of VPT, APT, TPT, VPA and APV; wherein AA¹¹ is selected from the group consisting of E, K, Q, R, A, D, G and H, in particular is E, K, Q and R; wherein AA¹² is selected from the group consisting of L, M, T, E, Q and H, in particular is L, M or T; wherein AA¹, AA², AA³, AA⁴, and AA⁵ are independently absent or AA^{I} as defined herein; wherein AA⁶ is absent or selected from the group consisting of S, T, C, E, Q, P and R, preferably is S or C; wherein AA⁷ is selected from the group consisting of S, T, C, E, Q, P and R, preferably is S or C. In one particular example, PEP9 is selected from the group consisting of KIPKAXXVPTEL, SIPKAXXVPTEL, HVTKPTXAPTKL, YVPKPXXAPTKL, TVPKPXXAPTQL, AVPKAXXAPTKL, KVGKAXXVPTKL, KASKAXXVPTKL, GSAGPXXTPTKL, AAPASXXVPARL,

[0855] STPPTXXVPTRL, HVPKPXXAPTKL and RVPSTXXAPVKT.

[0856] In other embodiments also useful for inducing the conversion of a neoplastic cell into a cell (any cell) of the ligament and tendon cell lineage, PEP10 is a peptide of general formula PEP6-AA³³-AA³⁴-AA³⁵-AA³⁶-AA³⁷-AA³⁸; wherein PEP6 is a peptide of formula AA²⁶-AA²⁷-AA²⁸-AA²⁹-PEP4; wherein PEP4 is selected from the group consisting of VVE, VVR, VVK, VAE, AVS, VVD and VEE; wherein AA²⁶ is absent or selected from the group consisting of AA^{III} amino acids, preferably absent or E; wherein AA²⁷ and AA²⁸ are independently selected from the group consisting of AA^{III} and AA^{V} amino acids, preferably AA²⁷ is selected from the group consisting of D, E, N, G and M, preferably AA²⁸ is M or I; wherein AA²⁹ is absent or selected from the group consisting of AA^{II} amino acids, preferably absent or S; wherein AA³³ is absent or is selected from the group consisting of AA^{I} amino acids at the exception of AA^{VI} amino acids, in particular is absent or is selected from the group consisting of G, S, A, E and R; AA³⁴ is absent or is selected from the group consisting of AA^{III} and AA^{IV} amino acids, in particular is absent; wherein AA³⁵ is absent or is selected from the group consisting of AA^{II} amino acids, preferably is S or C; wherein AA³⁶ is absent or is selected from the group consisting of AA^{III} and AA^{IV} amino acids; wherein AA³⁷ is absent or is selected from the group consisting of AA^{II} amino acids, preferably is S or C; wherein AA³⁸ is absent or is selected from the group consisting of AA^{I}, in particular is selected from the group consisting of R, H, S and L. In one particular example, PEP10 is selected from the group consisting of DMVVEGXGXR, EMVVEGXGXR, NMVVRSXGXH, NMVVRAXGXH, NMVVKAXGXH, EGMSVAEXGXR, GMAVSEXGXR, GMVVDRXGXS, DMVVEAXGXR, DMVVESXGXR, NMVVRSXGXH and MIVEEXGXL.

[0857] In other embodiments also useful for inducing the conversion of a neoplastic cell into a cell (any cell) of the ligament and tendon cell lineage, PEP12 is a peptide of general formula PEP1-AA¹⁷-PEP11; wherein AA¹⁷ is selected from the group consisting of G, A, V, L, I, P, F, M, W, T and S (in particular is selected from the group consisting of M, I, L, V and T); wherein PEP1 is SPIS.

[0858] In other embodiments also useful for inducing the conversion of a neoplastic cell into a cell (any cell) of the ligament and tendon cell lineage, PEP11 is a peptide with 3 amino acids of general formula AA¹⁸-AA¹⁹-AA²⁰; wherein AA¹⁸ is selected from the group consisting of L, V, Q, A and R, in particular is L; wherein AA¹⁹ is selected from the group consisting of F, W, H and Y, in particular is a polar aromatic amino acid such as Y; wherein AA²⁰ is selected from the group consisting of L, F, Y, K, I, V and M, in particular is I. In one particular example, PEP11 is LYI.

[0859] The definitions of “PEP” pairs, quadruplets, hexaplets and heptuplet e.g. PEP1:PEP2, PEP12:PEP2, or PEP7:PEP5:PEP12:LINKER:PEP2:PEP6:PEP8, also useful for inducing the conversion of a neoplastic cell into a cell (any cell) of the ligament and tendon cell lineage, are as already defined herein to the extent that PEP1 to PEP12 are particularly useful for these applications. For instances:

[0860] In other embodiments also useful for inducing the conversion of a neoplastic cell into a cell (any cell) of the ligament and tendon cell lineage, PEP3 is selected from the group consisting of VPT, APT, TPT, VPA and APV; PEP4 is selected from the group consisting of VVE, VVR, VVK, VAE, AVS, VVD and VEE; and wherein the pair PEP3:PEP4 is selected from the group consisting of VPT:VVE, APT:VVR, APT:VVK, VPT:VAE, VPT:AVS, TPT:VVD, VPA:VVE and APV:VEE.

[0861] In other embodiments also useful for inducing the conversion of a neoplastic cell into a cell (any cell) of the ligament and tendon cell lineage, PEP5 is selected from the group consisting of VPTEL, APTKL, APTQL, VPTKL, TPTKM, VPARL, VPTRL and APVKT; PEP6 is selected from the group consisting of DMVVE, EMVVE, NMVVR, NMVVK, EGMSVAE, EGMAVS, GMVVD and DMIVEE; and wherein the pair PEP5:PEP6 is selected from the group consisting of VPTEL:DMVVE, VPTEL:EMVVE, APTKL:NMVVR, APTQL:NMVVR, APTKL:NMVVK, VPTKL:EGMSVAE, VPTKL:EGMAVS, TPTKM:GMVVD, VPARL:DMVVE, VPTRL:DMVVE, APTKL:NMVVR and APVKT:DMIVEE.

[0862] In other embodiments also useful for inducing the conversion of a neoplastic cell into a cell (any cell) of the ligament and tendon cell lineage, PEP7 is selected from the group consisting of KIPKAXX, SIPKAXX, HVTKPTX, YVPKPXX, TVPKPXX, AVPKAXX, KVGKAXX, KASKAXX, GSAGPXX, AAPAXXS, STPPTXX, HVPKPXX and RVPSTXX; wherein PEP8 is selected from the group consisting of GXGXR, SXGXH, AXGXH, XGXR, EXGXR, RXGXS, AXGXR, SXGXR and XGXL; and wherein the pair PEP7:PEP8 is selected from the group consisting of KIPKAXX:GXGXR, SIPKAXX:GXGXR, HVTKPTX:SXGXH, YVPKPXX:SXGXH, TVPKPXX:AXGXH, AVPKAXX:AXGXH, KVGKAXX:XGXR, KASKAXX:EXGXR, GSAGPXX:RXGXS, AAPASXX:AXGXR, STPPTXX:SXGXR, HVPKPXX:SXGXH and RVPSTXX:XGXL.

[0863] In other embodiments also useful for inducing the conversion of a neoplastic cell into a cell (any cell) of the ligament and tendon cell lineage, PEP9 is selected from the group consisting of KIPKAXXVPTEL, SIPKAXXVPTEL, HVTKPTXAPTKL, YVPKPXXAPTKL, TVPKPXXAPTQL, AVPKAXXAPTKL, KVGKAXXVPTKL, KASKAXXVPTKL, GSAGPXXTPTKL, AAPASXXVPARL, STPPTXXVPTRL, HVPKPXXAPTKL and RVPSTXXAPVKT; PEP10 is selected from the group consisting of DMVVEGXGXR, EMVVEGXGXR, NMVVRSXGXH, NMVVRAXGXH, NMVVKAXGXH, EGMSVAEXGXR, GMAVSEXGXR, GMVVDRXGXS, DMVVEAXGXR, DMVVESXGXR, NMVVRSXGXH and MIVEEXGXL; and wherein the pair PEP9:PEP10 is selected from the group consisting of KIPKAXXVPTEL:DMVVEGXGXR, SIPKAXXVPTEL:EMVVEGXGXR, HVTKPTXAPTKL:NMVVRSXGXH, YVPKPXXAPTKL:NMVVRSXGXH, TVPKPXXAPTQL:NMVVRAXGXH, AVPKAXXAPTKL:NMVVKAXGXH, KVGKAXXVPTKL:EGMSVAEXGXR, KASKAXXVPTKL:GMAVSEXGXR, GSAGPXXTPTKM:GMVVDRXGXS, AAPASXXVPARL:DMVVEAXGXR, STPPTXXVPTRL:DMVVESXGXR, HVPKPXXAPTKL:NMVVRSXGXH and RVPSTXXAPVKT:MIVEEXGXL.

[0864] In other embodiments also useful for inducing the conversion of a neoplastic cell into a cell (any cell) of the ligament and tendon cell lineage, PEP5 is selected from the group consisting of VPTEL, APTKL, APTQL, VPTKL, VPARL, VPQAL, VSQDL and VPQDL; PEP6 is selected from the group consisting of DMVVE, EMVVE, NMVVR, NMVVK, EGMSVAE, GMAVS, DMVVE, MIVRS, MIVKS and MVVKS; and wherein the pair PEP5:PEP6 is selected from the group consisting of VPTEL:DMVVE, VPTEL:EMVVE, APTKL:NMVVR, APTQL:NMVVR, APTKL:NMVVK, VPTKL:EGMSVAE, VPTKL:EGMAVS, TPTKM:GMVVD, VPARL:DMVVE, VPTRL:DMVVE, APTKL:NMVVR and APVKT:DMIVEE; and wherein the pair PEP5:PEP6 is not VPARL:DMVVE when PEP1 is SPIS and PEP2 is YKQYE.

[0865] In other embodiments also useful for inducing the conversion of a neoplastic cell into a cell (any cell) of the ligament and tendon cell lineage, PEP9 is selected from the group consisting of KIPKAXXVPTEL, SIPKAXXVPTEL, HVTKPTXAPTKL, YVPKPXXAPTKL, TVPKPXXAPTQL, AVPKAXXAPTKL, KVGKAXXVPTKL, KASKAXXVPTKL, GSAGPXXTPTKL, AAPASXXVPARL, STPPTXXVPTRL, HVPKPXXAPTKL and RVPSTXXAPVKT; PEP10 is selected from the group consisting of DMVVEGXGXR, EMVVEGXGXR, NMVVRSXGXH, NMVVRAXGXH, NMVVKAXGXH, EGMSVAEXGXR, GMAVSEXGXR, GMVVDRXGXS, DMVVEAXGXR, DMVVESXGXR, NMVVRSXGXH and MIVEEXGXL; and wherein the pair PEP9:PEP10 is selected from the group consisting of KIPKAXXVPTEL:DMVVEGXGXR, SIPKAXXVPTEL:EMVVEGXGXR, HVTKPTXAPTKL:NMVVRSXGXH, YVPKPXXAPTKL:NMVVRSXGXH, TVPKPXXAPTQL:NMVVRAXGXH, AVPKAXXAPTKL:NMVVKAXGXH, KVGKAXXVPTKL:EGMSVAEXGXR, KASKAXXVPTKL:GMAVSEXGXR, GSAGPXXTPTKM:GMVVDRXGXS, AAPASXXVPARL:DMVVEAXGXR, STPPTXXVPTRL:DMVVESXGXR, HVPKPXXAPTKL:NMVVRSXGXH and RVPSTXXAPVKT:MIVEEXGXL; and wherein PEP9:PEP10 is not AAPASXXVPARL:DMVVEAXGXR when PEP1 is SPIS and PEP2 is YKQYE.

[0866] In other embodiments also useful for inducing the conversion of a neoplastic cell into a cell (any cell) of the ligament and tendon cell lineage, PEP1 is SPIS and PEP11 is LYI.

[0867] In one aspect, the present disclosure provides a GFR-binding compound, wherein said GFR-binding compound is a peptide, a variant or analog thereof, or a peptidomimetic as defined herein, with between 20 and 60 (in particular between 20 and 50, and more particularly, between 20 and 45) amino acids, comprising a peptide with four amino acids (PEP1) or a peptide with eight amino acids (PEP12), a peptide with five amino acids (PEP2), and optionally a pair of peptides selected form the group consisting of PEP3:PEP4, PEP3:PEP6, PEP3:PEP10, PEP5:PEP4, PEP9:PEP4, PEP5:PEP6, PEP5:PEP10, PEP9:PEP6 and PEP9:PEP10; wherein said GFR-binding compound does not comprise the pair of peptides VPARL:DMVVE when PEP1 is SPIS and PEP2 is YKQYE; and, optionally, wherein the RMSD is 2.45 Å or less.

[0868] In one aspect, the present disclosure provides a GFR-binding compound, wherein said GFR-binding compound is a peptide, a variant or analog thereof, or a peptidomimetic as defined herein, with between 20 and 60 (in particular between 20 and 50, and more particularly, between 20 and 45) amino acids, comprising a peptide with four amino acids (PEP1) or a peptide with eight amino acids (PEP12), a peptide with five amino acids (PEP2), and optionally a pair of peptides selected form the group consisting of PEP3:PEP4, PEP3:PEP6, PEP3:PEP10, PEP5:PEP4, PEP9:PEP4, PEP5:PEP6, PEP5:PEP10, PEP9:PEP6 and PEP9:PEP10; wherein said GFR-binding compound does not comprise the pair of peptides AAPASXXVPARL:DMVVEAXGXR when PEP1 is SPIS and PEP2 is YKQYE; and, optionally, wherein the RMSD is 2.45 Å or less.

[0869] In other embodiments also useful for inducing the conversion of a neoplastic cell into a cell (any cell) of the ligament and tendon cell lineage, said GFR-binding compound is a synthetic molecule as defined herein in the definition section.

[0870] In other embodiments also useful for inducing the conversion of a neoplastic cell into a cell (any cell) of the ligament and tendon cell lineage, said GFR-binding compound is a synthetic peptide, or a variant or analog thereof, or a peptidomimetic.

[0871] Fibroblast Lineage

[0872] Certain embodiments of the invention are particularly useful for inducing the conversion of a neoplastic cell into a cell (any cell) of a fibroblast lineage.

[0873] In certain embodiments useful for inducing the conversion of a neoplastic cell into a cell (any cell) of a fibroblast lineage, PEP1 is selected from the group consisting of EPLP, EPLT, SNIT, RSVK and RPVQ.

[0874] In certain embodiments useful for inducing the conversion of a neoplastic cell into a cell (any cell) of a fibroblast lineage, PEP2 is selected from the group consisting of EQLSN, IGEMS, KEVQV and KKATV.

[0875] In certain embodiments useful for inducing the conversion of a neoplastic cell into a cell (any cell) of a fibroblast lineage, PEP3 is selected from the group consisting of VPT, APT, VPQ, VSQ, SRV and TQV.

[0876] In certain embodiments useful for inducing the conversion of a neoplastic cell into a cell (any cell) of a fibroblast lineage, PEP4 is selected from the group consisting of VVE, VVR, VRS, VKS, VVK, QHN, EEH and EDH.

[0877] In certain embodiments useful for inducing the conversion of a neoplastic cell into a cell (any cell) of a fibroblast lineage, PEP5 is a peptide of general formula PEP3-AA¹¹-AA¹²; wherein PEP3 is selected from the group consisting of VPT, APT, VPQ, VSQ, SRV and TQV; wherein AA¹¹ is selected from the group consisting of E, K, Q, R, A, D, G and H, in particular is selected from the group consisting of E, K, Q, A, D and H; wherein AA¹² is selected from the group consisting of L, M, T, E, Q and H, in particular is selected from the group consisting of L, E and H. In one particular example, PEP5 is selected from the group consisting of VPTEL, APTKL, APTQL, VPQAL, VSQDL, VPQDL, VPTEE, SRVHH and TQVQL.

[0878] In certain embodiments useful for inducing the conversion of a neoplastic cell into a cell (any cell) of a fibroblast lineage, PEP6 is a peptide of general formula AA²⁶-AA²⁷-AA²⁸-AA²⁹-PEP4; wherein PEP4 is selected from the group consisting of VVE, VVR, VRS, VKS, VVK, QHN, EEH and EDH; wherein AA²⁶ is absent or selected from the group consisting of AA^{III} amino acids, preferably is absent; wherein AA²⁷ and AA²⁸ are independently selected from the group consisting of AA^{III} and AA^{V} amino acids, preferably AA²⁷ is selected from the group consisting of D, N, E, M, F, T and R, preferably AA²⁸ is selected from the group consisting of M, I, V and L; wherein AA²⁹ is absent or selected from the group consisting of AA^{II} amino acids, preferably is absent. In one particular example, PEP6 is selected from the group consisting of DMVVE, EMVVE, NMVVR, MIVRS, MIVKS, NMVVK, FLQHN, RLEEH and TLEDH.

[0879] In certain embodiments useful for inducing the conversion of a neoplastic cell into a cell (any cell) of a fibroblast lineage, PEP7 is an amino acid or a peptide with between two and seven amino acids of general formula AA¹-AA²-AA³-AA⁴-AA⁵-AA⁶-AA⁷; wherein AA¹, AA², AA³, AA⁴, and AA⁵ are independently absent or AA^{I} as defined herein; wherein AA⁶ is absent or selected from the group consisting of S, T, C, E, Q, P and R, preferably is selected from the group consisting of C, S, T, E, R and Q; wherein AA⁷ is absent or is selected from the group consisting of S, T, C, E, Q, P and R, preferably is selected from the group consisting of S, C and P; and wherein at least one of AA¹, AA², AA³, AA⁴, AA⁵, AA⁶ or AA⁷ is not absent. In one particular example, PEP7 is selected from the group consisting of KIPKAXX, SIPKAXX, HVTKPTX, YVPKPXX, TVPKPXX, ASAAPXX, ASASPXX, NDEGLEX, SSVKXQP and RNVQXRP.

[0880] In certain embodiments useful for inducing the conversion of a neoplastic cell into a cell (any cell) of a fibroblast lineage, PEP8 is an amino acid or a peptide with between two and six amino acids of general formula AA³³-AA³⁴-AA³⁵-AA³⁶-AA³⁷-AA³⁸; wherein AA³³ is absent or is selected from the group consisting of AA^{I} amino acids at the exception of AA^{VI} amino acids, in particular is absent or is selected from the group consisting of G, S, A, K and L; AA³⁴ is absent or is selected from the group consisting of AA^{III} and AA^{IV} amino acids, in particular is absent, A or E; wherein AA³⁵ is absent or is selected from the group consisting of AA^{II} amino acids, preferably is S or C; wherein AA³⁶ is absent or is selected from the group consisting of AA^{III} and AA^{IV} amino acids, in particular is selected from the group consisting of G, A, K and E; wherein AA³⁷ is absent or is selected from the group consisting of AA^{II} amino acids, preferably is S or C; wherein AA³⁸ is absent or is selected from the group consisting of AA^{I}, in particular is selected from the group consisting of R, H, S, E and A; and wherein at least one of AA³³, AA³⁴, AA³⁵, AA³⁶, AA³⁷ or AA³⁸ is not absent. In one particular example, PEP8 is selected from the group consisting of GXGXR, SXGXH, AXGXH, XKXS, KXEXR, LEXAXA and LAXKXE.

[0881] In certain embodiments useful for inducing the conversion of a neoplastic cell into a cell (any cell) of a fibroblast lineage, PEP9 is a peptide of general formula AA¹-AA²-AA³-AA⁴-AA⁵-AA⁶-AA⁷-PEP5; wherein PEP5 is a peptide of formula PEP3-AA¹¹-AA¹²; wherein PEP3 is selected from the group consisting of VPT, APT, VPQ, VSQ, SRV and TQV; wherein AA¹¹ is selected from the group consisting of E, K, Q, R, A, D, G and H, in particular is selected from the group consisting of E, K, Q, A, D and H; wherein AA¹² is selected from the group consisting of L, M, T, E, Q and H, in particular is selected from the group consisting of L, E and H; wherein AA¹, AA², AA³, AA⁴, and AA⁵ are independently absent or AA^{I} as defined herein; wherein AA⁶ is absent or selected from the group consisting of S, T, C, E, Q, P and R, preferably is selected from the group consisting of C, S, T, E, R and Q; wherein AA⁷ is selected from the group consisting of S, T, C, E, Q, P and R, preferably is selected from the group consisting of S, C and P. In one particular example, PEP9 is selected from the group consisting of KIPKAXXVPTEL, SIPKAXXVPTEL, HVTKPTXAPTKL, YVPKPXXAPTKL, TVPKPXXAPTQL, ASAAPXXVPQAL, ASASPXXVSQDL, ASASPXXVPQDL, NDEGLEXVPTEE, SSVKXQPSRVHH and RNVQXRPTQVQL.

[0882] In certain embodiments useful for inducing the conversion of a neoplastic cell into a cell (any cell) of a fibroblast lineage, PEP10 is a peptide of general formula PEP6-AA³³-AA³⁴-AA³⁵-AA³⁶-AA³⁷-AA³⁸; wherein PEP6 is a peptide of formula AA²⁶-AA²⁷-AA²⁸-AA²⁹-PEP4; wherein PEP4 is selected from the group consisting of VVE, VVR, VRS, VKS, VVK, QHN, EEH and EDH; wherein AA²⁶ is absent or selected from the group consisting of AA^{III} amino acids, preferably is absent; wherein AA²⁷ and AA²⁸ are independently selected from the group consisting of AA^{III} and AA^{V} amino acids, preferably AA²⁷ is selected from the group consisting of D, N, E, M, F, T and R, preferably AA²⁸ is selected from the group consisting of M, I, V and L; wherein AA²⁹ is absent or selected from the group consisting of AA^{II} amino acids, preferably is absent; wherein AA³³ is absent or is selected from the group consisting of AA^{I} amino acids at the exception of AA^{VI} amino acids, in particular is absent or is selected from the group consisting of G, S, A, K and L; AA³⁴ is absent or is selected from the group consisting of AA^{III} and AA^{IV} amino acids, in particular is absent, A or E; wherein AA³⁵ is absent or is selected from the group consisting of AA^{II} amino acids, preferably is S or C; wherein AA³⁶ is absent or is selected from the group consisting of AA^{III} and AA^{IV} amino acids, in particular is selected from the group consisting of G, A, K and E; wherein AA³⁷ is absent or is selected from the group consisting of AA^{II} amino acids, preferably is S or C; wherein AA³⁸ is absent or is selected from the group consisting of AA^{I}, in particular is selected from the group consisting of R, H, S, E and A. In one particular example, PEP10 is selected from the group consisting of DMVVEGXGXR, EMVVEGXGXR, NMVVRSXGXH, NMVVRAXGXH, MIVRSXKXS, MIVKSXKXS, MVVKSXKXS, FLQHNKXEXR, RLEEHLEXAXA and TLEDHLAXKXE.

[0883] In certain embodiments useful for inducing the conversion of a neoplastic cell into a cell (any cell) of a fibroblast lineage, PEP12 is a peptide of general formula PEP1-AA¹⁷-PEP11; wherein AA¹⁷ is selected from the group consisting of G, A, V, L, I, P, F, M, W, T and S (in particular is selected from the group consisting of M, I, L, V and T); wherein PEP1 is selected from the group consisting of EPLP, EPLT, SNIT, RSVK and RPVQ.

[0884] In certain embodiments useful for inducing the conversion of a neoplastic cell into a cell (any cell) of a fibroblast lineage, PEP11 is a peptide with 3 amino acids of general formula AA¹⁸-AA¹⁹-AA²⁰; wherein AA¹⁸ is selected from the group consisting of L, V, Q, A and R; wherein AA¹⁹ is selected from the group consisting of F, W, H, Y, I and K, in particular is selected from the group consisting of Y, I and K; wherein AA²⁰ is selected from the group consisting of L, F, Y, K, I, V and M, in particular is selected from the group consisting of Y, M, V and I. In one particular example, PEP11 is selected from the group consisting of VYY, LYY, QIM, AKV and RKI.

[0885] The definitions of “PEP” pairs, quadruplets, hexaplets and heptuplet e.g. PEP1:PEP2, PEP12:PEP2, or PEP7:PEP5:PEP12:LINKER:PEP2:PEP6:PEP8, useful for inducing the conversion of a neoplastic cell into a cell (any cell) of a fibroblast lineage, are as already defined herein to the extent that PEP1 to PEP12 are particularly useful for these applications. For instances:

[0886] In certain embodiments useful for inducing the conversion of a neoplastic cell into a cell (any cell) of a fibroblast lineage, the pair PEP1:PEP2 is selected from the group consisting of EPLP:EQLSN, EPLT:EQLSN and SNIT:IGEMS.

[0887] In certain embodiments useful for inducing the conversion of a neoplastic cell into a cell (any cell) of a fibroblast lineage, the pair PEP12:PEP2 is selected from the group consisting of EPLP-AA¹⁷-VYY:EQLSN, EPLT-AA¹⁷-LYY:EQLSN and SNIT-AA¹⁷-QIM:IGEMS; wherein AA¹⁷ is selected from the group consisting of G, A, V, L, I, P, F, M, W, T and S (in particular is selected from the group consisting of M, I, V and T).

[0888] In certain embodiments useful for inducing the conversion of a neoplastic cell into a cell (any cell) of a fibroblast lineage, PEP3 is selected from the group consisting of VPT, APT, VPQ, VSQ, SRV and TQV; PEP4 is selected from the group consisting of VVE, VVR, VRS, VKS, VVK, QHN, EEH and EDH; and wherein the pair PEP3:PEP4 is selected from the group consisting of VPT:VVE, APT:VVR, VPQ:VRS, VSQ:VKS, VPQ:VVK, VPT:QHN, SRV:EEH and TQV:EDH.

[0889] In certain embodiments useful for inducing the conversion of a neoplastic cell into a cell (any cell) of a fibroblast lineage, PEP5 is selected from the group consisting of VPTEL, APTKL, APTQL, VPQAL, VSQDL, VPQDL, VPTEE, SRVHH and TQVQL; PEP6 is selected from the group consisting of DMVVE, EMVVE, NMVVR, MIVRS, MIVKS, NMVVK, FLQHN, RLEEH and TLEDH; and wherein the pair PEP5:PEP6 is selected from the group consisting of VPTEL:DMVVE, VPTEL:EMVVE, APTKL:NMVVR, APTQL:NMVVR, VPQAL:MIVRS, VSQDL:MIVKS, VPQDL:NMVVK, VPTEE:FLQHN, SRVHH:RLEEH and TQVQL:TLEDH.

[0890] In certain embodiments useful for inducing the conversion of a neoplastic cell into a cell (any cell) of a fibroblast lineage, PEP7 is selected from the group consisting of KIPKAXX, SIPKAXX, HVTKPTX, YVPKPXX, TVPKPXX, ASAAPXX, ASASPXX, NDEGLEX, SSVKXQP and RNVQXRP; wherein PEP8 is selected from the group consisting of GXGXR, SXGXH, AXGXH, XKXS, KXEXR, LEXAXA and LAXKXE; and wherein the pair PEP7:PEP8 is selected from the group consisting of KIPKAXX:GXGXR, SIPKAXX:GXGXR, HVTKPTX:SXGXH, YVPKPXX:SXGXH, TVPKPXX:AXGXH, ASAAPXX:XKXS, ASASPXX:XKXS, NDEGLEX:KXEXR, SSVKXQP:LEXAXA and RNVQXRP:LAXKXE.

[0891] In certain embodiments useful for inducing the conversion of a neoplastic cell into a cell (any cell) of a fibroblast lineage, PEP9 is selected from the group consisting of KIPKAXXVPTEL, SIPKAXXVPTEL, HVTKPTXAPTKL, YVPKPXXAPTKL, TVPKPXXAPTQL, ASAAPXXVPQAL, ASASPXXVSQDL, ASASPXXVPQDL, NDEGLEXVPTEE, SSVKXQPSRVHH and RNVQXRPTQVQL; PEP10 is selected from the group consisting of DMVVEGXGXR, EMVVEGXGXR, NMVVRSXGXH, NMVVRAXGXH, MIVRSXKXS, MIVKSXKXS, MVVKSXKXS, FLQHNKXEXR, RLEEHLEXAXA and TLEDHLAXKXE; and wherein the pair PEP9:PEP10 is selected from the group consisting of KIPKAXXVPTEL:DMVVEGXGXR, SIPKAXXVPTEL:EMVVEGXGXR, HVTKPTXAPTKL:NMVVRSXGXH, YVPKPXXAPTKL:NMVVRSXGXH, TVPKPXXAPTQL:NMVVRAXGXH, ASAAPXXVPQAL:MIVRSXKXS, ASASPXXVSQDL:MIVKSXKXS, ASASPXXVPQDL:MVVKSXKXS, NDEGLEXVPTEE:FLQHNKXEXR, SSVKXQPSRVHH:RLEEHLEXAXA and RNVQXRPTQVQL:TLEDHLAXKXE.

[0892] In certain embodiments useful for inducing the conversion of a neoplastic cell into a cell (any cell) of a fibroblast lineage, PEP5 is selected from the group consisting of VPTEL, APTKL, APTQL, VPQAL, VSQDL, VPQDL, VPTEE, SRVHH and TQVQL; PEP6 is selected from the group consisting of DMVVE, EMVVE, NMVVR, MIVRS, MIVKS, NMVVK, FLQHN, RLEEH and TLEDH; and wherein the pair PEP5:PEP6 is selected from the group consisting of VPTEL:DMVVE, VPTEL:EMVVE, APTKL:NMVVR, APTQL:NMVVR, VPQAL:MIVRS, VSQDL:MIVKS, VPQDL:NMVVK, VPTEE:FLQHN, SRVHH:RLEEH and TQVQL:TLEDH; wherein the pair PEP5:PEP6 is not VPQAL:MIVRS when PEP1 is EPLP and PEP2 is EQLSN; wherein the pair PEP5:PEP6 is not VSQDL:MIVKS when PEP1 is EPLT and PEP2 is EQLSN; wherein the pair PEP5:PEP6 is not VPQDL:MVVVK when PEP1 is EPLT and PEP2 is EQLSN; wherein the pair PEP5:PEP6 is not VPTEE:FLQHN when PEP1 is SNIT and PEP2 is IGEMS; wherein the pair PEP5:PEP6 is not SRVHH:RLEEH when PEP1 is RSVK and PEP2 is KEVQV; and wherein the pair PEP5:PEP6 is not TQVQL:TLEDH when PEP1 is RPVQ and PEP2 is KKATV.

[0893] In certain embodiments useful for inducing the conversion of a neoplastic cell into a cell (any cell) of a fibroblast lineage, PEP9 is selected from the group consisting of KIPKAXXVPTEL, SIPKAXXVPTEL, HVTKPTXAPTKL, YVPKPXXAPTKL, TVPKPXXAPTQL, ASAAPXXVPQAL, ASASPXXVSQDL, ASASPXXVPQDL, NDEGLEXVPTEE, SSVKXQPSRVHH and RNVQXRPTQVQL; PEP10 is selected from the group consisting of DMVVEGXGXR, EMVVEGXGXR, NMVVRSXGXH, NMVVRAXGXH, MIVRSXKXS, MIVKSXKXS, MVVKSXKXS, FLQHNKXEXR, RLEEHLEXAXA and TLEDHLAXKXE; and wherein the pair PEP9:PEP10 is selected from the group consisting of KIPKAXXVPTEL:DMVVEGXGXR, SIPKAXXVPTEL:EMVVEGXGXR, HVTKPTXAPTKL:NMVVRSXGXH, YVPKPXXAPTKL:NMVVRSXGXH, TVPKPXXAPTQL:NMVVRAXGXH, ASAAPXXVPQAL:MIVRSXKXS, ASASPXXVSQDL:MIVKSXKXS, ASASPXXVPQDL:MVVKSXKXS, NDEGLEXVPTEE:FLQHNKXEXR, SSVKXQPSRVHH:RLEEHLEXAXA and RNVQXRPTQVQL:TLEDHLAXKXE; wherein the pair PEP9:PEP10 is not ASAAPXXVPQAL:MIVRSXKXS when PEP1 is EPLP and PEP2 is EQLSN; wherein the pair PEP9:PEP10 is not ASASPXXVSQDL:MIVKSXKXS when PEP1 is EPLT and PEP2 is EQLSN; wherein the pair PEP9:PEP10 is not ASASPXXVPQDL:MVVKSXKXS when PEP1 is EPLT and PEP2 is EQLSN; wherein the pair PEP9:PEP10 is not NDEGLEXVPTEE:FLQHNKXEXR when PEP1 is SNIT and PEP2 is IGEMS; wherein the pair PEP9:PEP10 is not SSVKXQPSRVHH:RLEEHLEXAXA when PEP1 is RSVK and PEP2 is KEVQV; and wherein the pair PEP9:PEP10 is not RNVQXRPTQVQL:TLEDHLAXKXE when PEP1 is RPVQ and PEP2 is KKATV.

[0894] In certain embodiments useful for inducing the conversion of a neoplastic cell into a cell (any cell) of a fibroblast lineage, PEP1 is selected from the group consisting of EPLP, EPLT, SNIT, RSVK and RPVQ; PEP11 is selected from the group consisting of VYY, LYY, QIM, AKV and RKI; and the pair PEP1:PEP11 is selected from the group consisting of EPLP:VYY, EPLT:LYY, SNIT:QIM, RSVK:KEVQV and RPVQ:KKATV.

[0895] In one aspect, the present disclosure provides a GFR-binding compound, wherein said GFR-binding compound is a peptide, a variant or analog thereof, or a peptidomimetic as defined herein, with between 20 and 60 (in particular between 20 and 50, and more particularly, between 20 and 45) amino acids, comprising a peptide with four amino acids (PEP1) or a peptide with eight amino acids (PEP12), a peptide with five amino acids (PEP2), and optionally a pair of peptides selected form the group consisting of PEP3:PEP4, PEP3:PEP6, PEP3:PEP10, PEP5:PEP4, PEP9:PEP4, PEP5:PEP6, PEP5:PEP10, PEP9:PEP6 and PEP9:PEP10; wherein said GFR-binding compound does not comprise the pair of peptides VPQAL:MIVRS when PEP1 is EPLP and PEP2 is EQLSN; wherein said GFR-binding compound does not comprise the pair of peptides VSQDL:MIVKS when PEP1 is EPLT and PEP2 is EQLSN; wherein said GFR-binding compound does not comprise the pair of peptides VPQDL:MVVVK when PEP1 is EPLT and PEP2 is EQLSN; wherein said GFR-binding compound does not comprise the pair of peptides VPTEE:FLQHN when PEP1 is SNIT and PEP2 is IGEMS; wherein said GFR-binding compound does not comprise the pair of peptides SRVHH:RLEEH when PEP1 is RSVK and PEP2 is KEVQV; and wherein said GFR-binding compound does not comprise the pair of peptides TQVQL:TLEDH when PEP1 is RPVQ and PEP2 is KKATV; and, optionally, wherein the RMSD is 2.45 Å or less.

[0896] In one aspect, the present disclosure provides a GFR-binding compound, wherein said GFR-binding compound is a peptide, a variant or analog thereof, or a peptidomimetic as defined herein, with between 20 and 60 (in particular between 20 and 50, and more particularly, between 20 and 45) amino acids, comprising a peptide with four amino acids (PEP1) or a peptide with eight amino acids (PEP12), a peptide with five amino acids (PEP2), and optionally a pair of peptides selected form the group consisting of PEP3:PEP4, PEP3:PEP6, PEP3:PEP10, PEP5:PEP4, PEP9:PEP4, PEP5:PEP6, PEP5:PEP10, PEP9:PEP6 and PEP9:PEP10; wherein said GFR-binding compound does not comprise the pair of peptides ASAAPXXVPQAL:MIVRSXKXS when PEP1 is EPLP and PEP2 is EQLSN; wherein said GFR-binding compound does not comprise the pair of peptides ASASPXXVSQDL:MIVKSXKXS when PEP1 is EPLT and PEP2 is EQLSN; wherein said GFR-binding compound does not comprise the pair of peptides ASASPXXVPQDL:MVVKSXKXS when PEP1 is EPLT and PEP2 is EQLSN; wherein said GFR-binding compound does not comprise the pair of peptides NDEGLEXVPTEE:FLQHNKXEXR when PEP1 is SNIT and PEP2 is IGEMS; wherein said GFR-binding compound does not comprise the pair of peptides SSVKXQPSRVHH:RLEEHLEXAXA when PEP1 is RSVK and PEP2 is KEVQV; and wherein said GFR-binding compound does not comprise the pair of peptides RNVQXRPTQVQL:TLEDHLAXKXE when PEP1 is RPVQ and PEP2 is KKATV; and, optionally, wherein the RMSD is 2.45 Å or less.

[0897] In certain embodiments useful for inducing the conversion of a neoplastic cell into a cell (any cell) of a fibroblast lineage, said GFR-binding compound is a synthetic molecule as defined herein in the definition section.

[0898] In certain embodiments useful for inducing the conversion of a neoplastic cell into a cell (any cell) of a fibroblast lineage, said GFR-binding compound is a synthetic peptide, or a variant or analog thereof, or a peptidomimetic.

[0899] Reproduction System Lineage

[0900] Certain embodiments of the invention are particularly useful for inducing the conversion of a neoplastic cell into a cell (any cell) of the reproduction system lineage.

[0901] In certain embodiments useful for inducing the conversion of a neoplastic cell into a cell (any cell) of the reproduction system lineage, PEP1 is NAIS.

[0902] In certain embodiments useful for inducing the conversion of a neoplastic cell into a cell (any cell) of the reproduction system lineage, PEP2 is LKKYR.

[0903] In certain embodiments useful for inducing the conversion of a neoplastic cell into a cell (any cell) of the reproduction system lineage, PEP3 is selected from the group consisting of VPT, APT, TPT, VPA and APV.

[0904] In certain embodiments useful for inducing the conversion of a neoplastic cell into a cell (any cell) of the reproduction system lineage, PEP4 is selected from the group consisting of VVE, VVR, VVK, VAE, AVS, VVD and VEE.

[0905] In certain embodiments useful for inducing the conversion of a neoplastic cell into a cell (any cell) of the reproduction system lineage, PEP5 is a peptide of general formula PEP3-AA¹¹-AA¹²; wherein PEP3 is selected from the group consisting of VPT, APT, TPT, VPA and APV; wherein AA¹¹ is selected from the group consisting of E, K, Q, R, A, D, G and H, in particular is selected from the group consisting of E, K, Q and R; wherein AA¹² is selected from the group consisting of L, M, T, E, Q and H, in particular is selected from the group consisting of L, M and T. In one particular example, PEP5 is selected from the group consisting of VPTEL, APTKL, APTQL, VPTKL, TPTKM, VPARL, VPTRL and APVKT.

[0906] In certain embodiments useful for inducing the conversion of a neoplastic cell into a cell (any cell) of the reproduction system lineage, PEP6 is a peptide of general formula AA²⁶-AA²⁷-AA²⁸-AA²⁹-PEP4; wherein PEP4 is selected from the group consisting of VVE, VVR, VRS, VKS, VVK, QHN, EEH and EDH; wherein AA²⁶ is absent or selected from the group consisting of AA^{III} amino acids, preferably is absent or E; wherein AA²⁷ and AA²⁸ are independently selected from the group consisting of AA^{III} and AA^{V} amino acids, preferably AA²⁷ is selected from the group consisting of D, N, E, M and G, preferably AA²⁸ is M or I; wherein AA²⁹ is absent or selected from the group consisting of AA^{II} amino acids, preferably is absent or S. In one particular example, PEP6 is selected from the group consisting of DMVVE, EMVVE, NMVVR, NMVVK, EGMSVAE, GMAVS, GMVVD and MIVEE.

[0907] In certain embodiments useful for inducing the conversion of a neoplastic cell into a cell (any cell) of the reproduction system lineage, PEP7 is an amino acid or a peptide with between two and seven amino acids of general formula AA¹-AA²-AA³-AA⁴-AA⁵-AA⁶-AA⁷; wherein AA¹, AA², AA³, AA⁴, and AA⁵ are independently absent or AA^{I} as defined herein; wherein AA⁶ is absent or selected from the group consisting of S, T, C, E, Q, P and R, preferably is selected from the group consisting of C, S and T; wherein AA⁷ is absent or is selected from the group consisting of S, T, C, E, Q, P and R, preferably is selected from the group consisting of S and C; and wherein at least one of AA¹, AA², AA³, AA⁴, AA⁵, AA⁶ or AA⁷ is not absent. In one particular example, PEP7 is selected from the group consisting of KIPKAXX, SIPKAXX, HVTKPTX, YVPKPXX, TVPKPXX, AVPKAXX, KVGKAXX, KASKAXX, GSAGPXX, AAPASXX, STPPTXX, HVPKPXX and RVPSTXX.

[0908] In certain embodiments useful for inducing the conversion of a neoplastic cell into a cell (any cell) of the reproduction system lineage, PEP8 is an amino acid or a peptide with between two and six amino acids of general formula AA³³-AA³⁴-AA³⁵-AA³⁶-AA³⁷-AA³⁸; wherein AA³³ is absent or is selected from the group consisting of AA^{I} amino acids at the exception of AA^{VI} amino acids, in particular is absent or is selected from the group consisting of G, S, A, E and R; AA³⁴ is absent or is selected from the group consisting of AA^{III} and AA^{IV} amino acids, in particular is absent; wherein AA³⁵ is absent or is selected from the group consisting of AA^{II} amino acids, preferably is S or C; wherein AA³⁶ is absent or is selected from the group consisting of AA^{III} and AA^{IV} amino acids, in particular is G; wherein AA³⁷ is absent or is selected from the group consisting of AA^{II} amino acids, preferably is S or C; wherein AA³⁸ is absent or is selected from the group consisting of AA^{I}, in particular is selected from the group consisting of R, H, S and L; and wherein at least one of AA³³, AA³⁴, AA³⁵, AA³⁶, AA³⁷ or AA³⁸ is not absent. In one particular example, PEP8 is selected from the group consisting of GXGXR, SXGXH, AXGXH, XGXR, EXGXR, RXGXS, AXGXR, SXGXR and XGXL.

[0909] In certain embodiments useful for inducing the conversion of a neoplastic cell into a cell (any cell) of the reproduction system lineage, PEP9 is a peptide of general formula AA¹-AA²-AA³-AA⁴-AA⁵-AA⁶-AA⁷-PEP5; wherein PEP5 is a peptide of formula PEP3-AA¹¹-AA¹²; wherein PEP3 is selected from the group consisting of VPT, APT, TPT, VPA and APV; wherein AA¹¹ is selected from the group consisting of E, K, Q, R, A, D, G and H, in particular is selected from the group consisting of E, K, Q and R; wherein AA¹² is selected from the group consisting of L, M, T, E, Q and H, in particular is selected from the group consisting of L, M and T; wherein AA¹, AA², AA³, AA⁴, and AA⁵ are independently absent or AA^{I} as defined herein; wherein AA⁶ is absent or selected from the group consisting of S, T, C, E, Q, P and R, preferably is selected from the group consisting of C, S and T; wherein AA⁷ is selected from the group consisting of S, T, C, E, Q, P and R, preferably is selected from the group consisting of S and C. In one particular example, PEP9 is selected from the group consisting of KIPKAXXVPTEL, SIPKAXXVPTEL, HVTKPTXAPTKL, YVPKPXXAPTKL, TVPKPXXAPTQL, AVPKAXXAPTKL, KVGKAXXVPTKL, KASKAXXVPTKL, GSAGPXXTPTKM, AAPASXXVPARL, STPPTXXVPTRL, HVPKPXXAPTKL and RVPSTXXAPVKT.

[0910] In certain embodiments useful for inducing the conversion of a neoplastic cell into a cell (any cell) of the reproduction system lineage, PEP10 is a peptide of general formula PEP6-AA³³-AA³⁴-AA³⁵-AA³⁶-AA³⁷-AA³⁸; wherein PEP6 is a peptide of formula AA²⁶-AA²⁷-AA²⁸-AA²⁹-PEP4; wherein PEP4 is selected from the group consisting of VVE, VVR, VVK, VAE, AVS, VVD and VEE; wherein AA²⁶ is absent or selected from the group consisting of AA^{III} amino acids, preferably is absent or E; wherein AA²⁷ and AA²⁸ are independently selected from the group consisting of AA^{III} and AA^{V} amino acids, preferably AA²⁷ is selected from the group consisting of D, N, E, M and G, preferably AA²⁸ is M or I; wherein AA²⁹ is absent or selected from the group consisting of AA^{II} amino acids, preferably is absent or is S; wherein AA³³ is absent or is selected from the group consisting of AA^{I} amino acids at the exception of AA^{VI} amino acids, in particular is absent or is selected from the group consisting of G, S, A, E and R; AA³⁴ is absent or is selected from the group consisting of AA^{III} and AA^{IV} amino acids, in particular is absent; wherein AA³⁵ is absent or is selected from the group consisting of AA^{II} amino acids, preferably is S or C; wherein AA³⁶ is absent or is selected from the group consisting of AA^{III} and AA^{IV} amino acids, in particular is G; wherein AA³⁷ is absent or is selected from the group consisting of AA^{II} amino acids, preferably is S or C; wherein AA³⁸ is absent or is selected from the group consisting of AA^{I}, in particular is selected from the group consisting of R, H, S and L. In one particular example, PEP10 is selected from the group consisting of DMVVEGXGXR, EMVVEGXGXR, NMVVRSXGXH, NMVVRSXGXH, NMVVRAXGXH, NMVVKAXGXH, EGMSVAEXGXR, GMAVSEXGXR, GMVVDRXGXS, DMVVEAXGXR, DMVVESXGXR, NMVVRSXGXH and MIVEEXGXL.

[0911] In certain embodiments useful for inducing the conversion of a neoplastic cell into a cell (any cell) of the reproduction system lineage, PEP12 is a peptide of general formula PEP1-AA¹⁷-PEP11; wherein AA¹⁷ is selected from the group consisting of G, A, V, L, I, P, F, M, W, T and S (in particular is selected from the group consisting of M, I, L, V and T); wherein PEP1 is NAIS.

[0912] In certain embodiments useful for inducing the conversion of a neoplastic cell into a cell (any cell) of the reproduction system lineage, PEP11 is a peptide with 3 amino acids of general formula AA¹⁸-AA¹⁹-AA²⁰; wherein AA¹⁸ is selected from the group consisting of L, V, Q, A and R, in particular is L; wherein AA¹⁹ is selected from the group consisting of F, W, H, Y, I and K, in particular is Y; wherein AA²⁹ is selected from the group consisting of L, F, Y, K, I, V and M, in particular is F. In one particular example, PEP11 is LYF.

[0913] The definitions of “PEP” pairs, quadruplets, hexaplets and heptuplet e.g. PEP1:PEP2, PEP12:PEP2, or PEP7:PEP5:PEP12:LINKER:PEP2:PEP6:PEP8, useful for inducing the conversion of a neoplastic cell into a cell (any cell) of the reproduction system lineage, are as already defined herein to the extent that PEP1 to PEP12 are particularly useful for these applications. For instances:

[0914] In certain embodiments useful for inducing the conversion of a neoplastic cell into a cell (any cell) of the reproduction system lineage, PEP3 is selected from the group consisting of VPT, APT, TPT, VPA and APV; PEP4 is selected from the group consisting of VVE, VVR, VVK, VAE, AVS, VVD and VEE; and wherein the pair PEP3:PEP4 is selected from the group consisting of VPT:VVE, APT:VVR, APT:VVK, VPT:VAE, VPT:AVS, TPT:VVD, VPA:VVE and APV:VEE.

[0915] In certain embodiments useful for inducing the conversion of a neoplastic cell into a cell (any cell) of the reproduction system lineage, PEP5 is selected from the group consisting of VPTEL, APTKL, APTQL, VPTKL, TPTKM, VPARL, VPTRL and APVKT; PEP6 is selected from the group consisting of DMVVE, EMVVE, NMVVR, NMVVK, EGMSVAE, GMAVS, GMVVD and MIVEE; and wherein the pair PEP5:PEP6 is selected from the group consisting of VPTEL:DMVVE, VPTEL:EMVVE, APTKL:NMVVR, APTQL:NMVVR, APTKL:NMVVK, VPTKL:EGMSVAE, VPTKL:GMAVS, TPTKM:GMVVD, VPARL:DMVVE, VPTRL:DMVVE and APVKT:MIVEE.

[0916] In certain embodiments useful for inducing the conversion of a neoplastic cell into a cell (any cell) of the reproduction system lineage, PEP7 is selected from the group consisting of KIPKAXX, SIPKAXX, HVTKPTX, YVPKPXX, TVPKPXX, AVPKAXX, KVGKAXX, KASKAXX, GSAGPXX, AAPASXX, STPPTXX, HVPKPXX and RVPSTXX; wherein PEP8 is selected from the group consisting of GXGXR, SXGXH, AXGXH, XGXR, EXGXR, RXGXS, AXGXR, SXGXR and XGXL; and wherein the pair PEP7:PEP8 is selected from the group consisting of KIPKAXX:GXGXR, SIPKAXX:GXGXR, HVTKPTX:SXGXH, YVPKPXX:SXGXH, TVPKPXX:AXGXH, AVPKAXX:AXGXH, KVGKAXX:XGXR, KASKAXX:EXGXR, GSAGPXX:RXGXS, AAPASXX:AXGXR, STPPTXX:SXGXR, HVPKPXX:SXGXH and RVPSTXX:XGXL.

[0917] In certain embodiments useful for inducing the conversion of a neoplastic cell into a cell (any cell) of the reproduction system lineage, PEP9 is selected from the group consisting of KIPKAXXVPTEL, SIPKAXXVPTEL, HVTKPTXAPTKL, YVPKPXXAPTKL, TVPKPXXAPTQL, AVPKAXXAPTKL, KVGKAXXVPTKL, KASKAXXVPTKL, GSAGPXXTPTKM, AAPASXXVPARL, STPPTXXVPTRL, HVPKPXXAPTKL and RVPSTXXAPVKT; PEP10 is selected from the group consisting of DMVVEGXGXR, EMVVEGXGXR, NMVVRSXGXH, NMVVRSXGXH, NMVVRAXGXH, NMVVKAXGXH, EGMSVAEXGXR, GMAVSEXGXR, GMVVDRXGXS, DMVVEAXGXR, DMVVESXGXR, NMVVRSXGXH and MIVEEXGXL; and wherein the pair PEP9:PEP10 is selected from the group consisting of KIPKAXXVPTEL:DMVVEGXGXR, SIPKAXXVPTEL:EMVVEGXGXR, HVTKPTXAPTKL:NMVVRSXGXH, YVPKPXXAPTKL:NMVVRSXGXH, TVPKPXXAPTQL:NMVVRAXGXH, AVPKAXXAPTKL:NMVVKAXGXH, KVGKAXXVPTKL:EGMSVAEXGXR, KASKAXXVPTKL:GMAVSEXGXR, GSAGPXXTPTKM:GMVVDRXGXS, AAPASXXVPARL:DMVVEAXGXR, STPPTXXVPTRL:DMVVESXGXR, HVPKPXXAPTKL:NMVVRSXGXH and RVPSTXXAPVKT:MIVEEXGXL.

[0918] In certain embodiments useful for inducing the conversion of a neoplastic cell into a cell (any cell) of the reproduction system lineage, PEP5 is selected from the group consisting of VPTEL, APTKL, APTQL, VPTKL, TPTKM, VPARL, VPTRL and APVKT; PEP6 is selected from the group consisting of DMVVE, EMVVE, NMVVR, NMVVK, EGMSVAE, GMAVS, GMVVD and MIVEE; and wherein the pair PEP5:PEP6 is selected from the group consisting of VPTEL:DMVVE, VPTEL:EMVVE, APTKL:NMVVR, APTQL:NMVVR, APTKL:NMVVK, VPTKL:EGMSVAE, VPTKL:GMAVS, TPTKM:GMVVD, VPARL:DMVVE, VPTRL:DMVVE and APVKT:MIVEE; and wherein the pair PEP5:PEP6 is not APTKL:NMVVR when PEP1 is NAIS and PEP2 is LKKYR.

[0919] In certain embodiments useful for inducing the conversion of a neoplastic cell into a cell (any cell) of the reproduction system lineage, PEP9 is selected from the group consisting of KIPKAXXVPTEL, SIPKAXXVPTEL, HVTKPTXAPTKL, YVPKPXXAPTKL, TVPKPXXAPTQL, AVPKAXXAPTKL, KVGKAXXVPTKL, KASKAXXVPTKL, GSAGPXXTPTKM, AAPASXXVPARL, STPPTXXVPTRL, HVPKPXXAPTKL and RVPSTXXAPVKT; PEP10 is selected from the group consisting of DMVVEGXGXR, EMVVEGXGXR, NMVVRSXGXH, NMVVRSXGXH, NMVVRAXGXH, NMVVKAXGXH, EGMSVAEXGXR, GMAVSEXGXR, GMVVDRXGXS, DMVVEAXGXR, DMVVESXGXR, NMVVRSXGXH and MIVEEXGXL; and wherein the pair PEP9:PEP10 is selected from the group consisting of KIPKAXXVPTEL:DMVVEGXGXR, SIPKAXXVPTEL:EMVVEGXGXR, HVTKPTXAPTKL:NMVVRSXGXH, YVPKPXXAPTKL:NMVVRSXGXH, TVPKPXXAPTQL:NMVVRAXGXH, AVPKAXXAPTKL:NMVVKAXGXH, KVGKAXXVPTKL:EGMSVAEXGXR, KASKAXXVPTKL:GMAVSEXGXR, GSAGPXXTPTKM:GMVVDRXGXS, AAPASXXVPARL:DMVVEAXGXR, STPPTXXVPTRL:DMVVESXGXR, HVPKPXXAPTKL:NMVVRSXGXH and RVPSTXXAPVKT:MIVEEXGXL; and wherein the pair PEP9:PEP10 is not HVPKPXXAPTKL:NMVVRSXGXH when PEP1 is NAIS and PEP2 is LKKYR.

[0920] In certain embodiments useful for inducing the conversion of a neoplastic cell into a cell (any cell) of the reproduction system lineage, PEP1 is NAIS and PEP11 is LYF.

[0921] In one aspect, the present disclosure provides a GFR-binding compound, wherein said GFR-binding compound is a peptide, a variant or analog thereof, or a peptidomimetic as defined herein, with between 20 and 60 (in particular between 20 and 50, and more particularly, between 20 and 45) amino acids, comprising a peptide with four amino acids (PEP1) or a peptide with eight amino acids (PEP12), a peptide with five amino acids (PEP2), and optionally a pair of peptides selected form the group consisting of PEP3:PEP4, PEP3:PEP6, PEP3:PEP10, PEP5:PEP4, PEP9:PEP4, PEP5:PEP6, PEP5:PEP10, PEP9:PEP6 and PEP9:PEP10; wherein said GFR-binding compound does not comprise the pair of peptides APTKL:NMVVR when PEP1 is NAIS and PEP2 is LKKYR; and, optionally, wherein the RMSD is 2.45 Å or less.

[0922] In one aspect, the present disclosure provides a GFR-binding compound, wherein said GFR-binding compound is a peptide, a variant or analog thereof, or a peptidomimetic as defined herein, with between 20 and 60 (in particular between 20 and 50, and more particularly, between 20 and 45) amino acids, comprising a peptide with four amino acids (PEP1) or a peptide with eight amino acids (PEP12), a peptide with five amino acids (PEP2), and optionally a pair of peptides selected form the group consisting of PEP3:PEP4, PEP3:PEP6, PEP3:PEP10, PEP5:PEP4, PEP9:PEP4, PEP5:PEP6, PEP5:PEP10, PEP9:PEP6 and PEP9:PEP10; wherein said GFR-binding compound does not comprise the pair of peptides HVPKPXXAPTKL:NMVVRSXGXH when PEP1 is NAIS and PEP2 is LKKYR; and, optionally, wherein the RMSD is 2.45 Å or less.

[0923] In certain embodiments useful for inducing the conversion of a neoplastic cell into a cell (any cell) of the reproduction system lineage, said GFR-binding compound is a synthetic molecule as defined herein in the definition section.

[0924] In certain embodiments useful for inducing the conversion of a neoplastic cell into a cell (any cell) of the reproduction system lineage, said GFR-binding compound is a synthetic peptide, or a variant or analog thereof, or a peptidomimetic.

[0925] Lung Cell Lineage

[0926] Certain embodiments of the invention are particularly useful for inducing the conversion of a neoplastic cell into a cell (any cell) of the lung cell lineage.

[0927] In certain embodiments useful for inducing the conversion of a neoplastic cell into a cell (any cell) of the lung cell lineage, PEP1 is selected from the group consisting of NAIS, SATS, SPIS, EPIS and SPIN.

[0928] In certain embodiments useful for inducing the conversion of a neoplastic cell into a cell (any cell) of the lung cell lineage, PEP2 is selected from the group consisting of LKKYR, LRKHR, LKYHY, KFKYE and YGKIP.

[0929] In certain embodiments useful for inducing the conversion of a neoplastic cell into a cell (any cell) of the lung cell lineage, PEP3 is selected from the group consisting of VPT, VPE, APT, TPT, VPA, APV, VPQ and VSQ.

[0930] In certain embodiments useful for inducing the conversion of a neoplastic cell into a cell (any cell) of the lung cell lineage, PEP4 is selected from the group consisting of VVE, TVE, VVR, VVK, VAE, AVS, VVD, VEE, VRS and VKS.

[0931] In certain embodiments useful for inducing the conversion of a neoplastic cell into a cell (any cell) of the lung cell lineage, PEP5 is a peptide of general formula PEP3-AA¹¹-AA¹²; wherein PEP3 is selected from the group consisting of VPT, VPE, APT, TPT, VPA, APV, VPQ and VSQ; wherein AA¹¹ is selected from the group consisting of E, K, Q, R, A, D, G and H, in particular is selected from the group consisting of E, K, Q, R, A and D; wherein AA¹² is selected from the group consisting of L, M, T, E, Q and H, in particular selected from the group consisting of L, M and T. In one particular example, PEP5 is selected from the group consisting of VPTEL, VPEKM, APTKL, APTQL, VPTKL, TPTKM, VPARL, VPTRL, APVKT, VPQAL, VSQDL and VPQDL.

[0932] In certain embodiments useful for inducing the conversion of a neoplastic cell into a cell (any cell) of the lung cell lineage, PEP6 is a peptide of general formula AA²⁶-AA²⁷-AA²⁸-AA²⁹-PEP4; wherein PEP4 is selected from the group consisting of VVE, TVE, VVR, VVK, VAE, AVS, VVD, VEE, VRS and VKS; wherein AA²⁶ is absent or selected from the group consisting of AA^{III} amino acids, preferably is absent or E; wherein AA²⁷ and AA²⁸ are independently selected from the group consisting of AA^{III} and AA^{V} amino acids, preferably AA²⁷ is selected from the group consisting of D, E, N, G and M, preferably AA²⁸ is selected from the group consisting of M, I and V; wherein AA²⁹ is absent or selected from the group consisting of AA^{II} amino acids, preferably absent or S. In one particular example, PEP6 is selected from the group consisting of DMVVE, NMTVE, EMVVE, NMVVR, NMVVK, EGMSVAE, GMAVS, GMVVD, DMVVE, MIVEE, MIVRS, MIVKS and MVVKS.

[0933] In certain embodiments useful for inducing the conversion of a neoplastic cell into a cell (any cell) of the lung cell lineage, PEP7 is an amino acid or a peptide with between two and seven amino acids of general formula AA¹-AA²-AA³-AA⁴-AA⁵-AA⁶-AA⁷; wherein AA¹, AA², AA³, AA⁴, and AA⁵ are independently absent or AA^{I} as defined herein; wherein AA⁶ is absent or selected from the group consisting of S, T, C, E, Q, P and R, preferably is selected from the group consisting of C, S and T; wherein AA⁷ is absent or is selected from the group consisting of S, T, C, E, Q, P and R, preferably is C or S; and wherein at least one of AA¹, AA², AA³, AA⁴, AA⁵, AA⁶ or AA⁷ is not absent. In one particular example, PEP7 is selected from the group consisting of KIPKAXX, GIPEPXX, SIPKAXX, HVTKPTX, YVPKPXX, TVPKPXX, AVPKAXX, KVGKAXX, KASKAXX, GSAGPXX, AAPASXX, STPPTXX, HVPKPXX, RVPSTXX, ASAAPXX and ASASPXX.

[0934] In certain embodiments useful for inducing the conversion of a neoplastic cell into a cell (any cell) of the lung cell lineage, PEP8 is an amino acid or a peptide with between two and six amino acids of general formula AA³³-AA³⁴-AA³⁵-AA³⁶-AA³⁷-AA³⁸; wherein AA³³ is absent or is selected from the group consisting of AA^{I} amino acids at the exception of AA^{VI} amino acids; AA³⁴ is absent or is selected from the group consisting of AA^{III} and AA^{IV} amino acids; wherein AA³⁵ is absent or is selected from the group consisting of AA^{II} amino acids, preferably is S or C; wherein AA³⁶ is absent or is selected from the group consisting of AA^{II} and AA^{IV} amino acids; wherein AA³⁷ is absent or is selected from the group consisting of AA^{II} amino acids, preferably is S or C; wherein AA³⁸ is absent or is selected from the group consisting of AN; and wherein at least one of AA³³, AA³⁴, AA³⁵, AA³⁶, AA³⁷ or AA³⁸ is not absent. In one particular example, PEP8 is selected from the group consisting of GXGXR, SXAXR, SXGXH, AXGXH, XGXR, EXGXR, RXGXS, AXGXR, SXGXR, XGXL and XKXS.

[0935] In certain embodiments useful for inducing the conversion of a neoplastic cell into a cell (any cell) of the lung cell lineage, PEP9 is a peptide of general formula AA¹-AA²-AA³-AA⁴-AA⁵-AA⁶-AA⁷-PEP5; wherein PEP5 is a peptide of formula PEP3-AA¹¹-AA¹²; wherein PEP3 is selected from the group consisting of VPT, VPE, APT, TPT, VPA, APV, VPQ and VSQ; wherein AA¹¹ is selected from the group consisting of E, K, Q, R, A, D, G and H, in particular E, K, Q, R, A and D; wherein AA¹² is selected from the group consisting of L, M, T, E, Q and H, in particular selected from the group consisting of L, M and T; wherein AA¹, AA², AA³, AA⁴, and AA⁵ are independently absent or AA^{I} as defined herein; wherein AA⁶ is absent or selected from the group consisting of S, T, C, E, Q, P and R, preferably is selected from the group consisting of C, S and T; wherein AA⁷ is selected from the group consisting of S, T, C, E, Q, P and R, preferably is C or S. In one particular example, PEP9 is selected from the group consisting of KIPKAXXVPTEL, GIPEPXXVPEKM, SIPKAXXVPTEL, HVTKPTXAPTKL, YVPKPXXAPTKL, TVPKPXXAPTQL, AVPKAXXAPTKL, KVGKAXXVPTKL, KASKAXXVPTKL, GSAGPXXTPTKM, AAPASXXVPARL, STPPTXXVPTRL, HVPKPXXAPTKL, RVPSTXXAPVKT, ASAAPXXVPQAL, ASASPXXVSQDL and ASASPXXVPQDL.

[0936] In certain embodiments useful for inducing the conversion of a neoplastic cell into a cell (any cell) of the lung cell lineage, PEP10 is a peptide of general formula PEP6-AA³³-AA³⁴-AA³⁵-AA³⁶-AA³⁷-AA³⁸; wherein PEP6 is a peptide of formula AA²⁶-AA²⁷-AA²⁸-AA²⁹-PEP4; wherein PEP4 is selected from the group consisting of VVE, TVE, VVR, VVK, VAE, AVS, VVD, VEE, VRS and VKS; wherein AA²⁶ is absent or selected from the group consisting of AA^{III} amino acids, preferably is absent or E; wherein AA²⁷ and AA²⁸ are independently selected from the group consisting of AA^{III} and AA^{V} amino acids, preferably AA²⁷ is selected from the group consisting of D, E, N, G and M, preferably AA²⁸ is selected from the group consisting of M, I and V; wherein AA²⁹ is absent or selected from the group consisting of AA^{II} amino acids, preferably absent or S; wherein AA³³ is absent or is selected from the group consisting of AA^{I} amino acids at the exception of AA^{VI} amino acids; AA³⁴ is absent or is selected from the group consisting of AA^{III} and AA^{IV} amino acids; wherein AA³⁵ is absent or is selected from the group consisting of AA^{III} amino acids, preferably is S or C; wherein AA³⁶ is absent or is selected from the group consisting of AA^{III} and AA^{IV} amino acids; wherein AA³⁷ is absent or is selected from the group consisting of AA^{II} amino acids, preferably is S or C; wherein AA³⁸ is absent or is selected from the group consisting of AA^{I}. In one particular example, PEP10 is selected from the group consisting of DMVVEGXGXR, NMTVESXAXR, EMVVEGXGXR, NMVVRSXGXH, NMVVRSXGXH, NMVVRAXGXH, NMVVKAXGXH, EGMSVAEXGXR, GMAVSEXGXR, GMVVDRXGXS, DMVVEAXGXR, DMVVESXGXR, NMVVRSXGXH, MIVEEXGXL, MIVKSXKXS, MIVKSXKXS and MVVKSXKXS.

[0937] In certain embodiments useful for inducing the conversion of a neoplastic cell into a cell (any cell) of the lung cell lineage, PEP12 is a peptide of general formula PEP1-AA¹⁷-PEP11; wherein AA¹⁷ is selected from the group consisting of G, A, V, L, I, P, F, M, W, T and S (in particular is selected from the group consisting of M, I, L, V and T); wherein PEP1 is selected from the group consisting of NAIS, SATS, SPIS, EPIS and SPIN.

[0938] In certain embodiments useful for inducing the conversion of a neoplastic cell into a cell (any cell) of the lung cell lineage, PEP11 is a peptide with 3 amino acids of general formula AA¹⁸-AA¹⁹-AA²⁰; wherein AA¹⁸ is selected from the group consisting of L, V, Q, A and R, in particular is L; wherein AA¹⁹ is selected from the group consisting of F, W, H and Y (in particular is a polar aromatic amino acid such as Y); wherein AA²⁰ is selected from the group consisting of L, F, Y, K, I, V and M, in particular is selected from the group consisting of L, F, Y, and K. In one particular example, PEP11 is selected from the group consisting of LYF, LYY, LYK and LYL.

[0939] The definitions of “PEP” pairs, quadruplets, hexaplets and heptuplet e.g. PEP1:PEP2, PEP12:PEP2, or PEP7:PEP5:PEP12:LINKER:PEP2:PEP6:PEP8, useful for inducing the conversion of a neoplastic cell into a cell (any cell) of the lung cell lineage, are as already defined herein to the extent that PEP1 to PEP12 are particularly useful for these applications. For instances:

[0940] In certain embodiments useful for inducing the conversion of a neoplastic cell into a cell (any cell) of the lung cell lineage, the pair PEP1:PEP2 is selected from the group consisting of NAIS:LKKYR, SATS:LRKHR, SPIS:LKYHY, EPIS:KFKYE and SPIN:YGKIP.

[0941] In certain embodiments useful for inducing the conversion of a neoplastic cell into a cell (any cell) of the lung cell lineage, the pair PEP12:PEP2 is selected from the group consisting of NAIS-AA¹⁷-LYF:LKKYR, SATS-AA¹⁷-LYY:LRKHR, SPIS-AA¹⁷-LYK:LKYHY, EPIS-AA¹⁷-LYL:KFKYE and SPIN-AA¹⁷-LYF:YGKIP; wherein AA¹⁷ is selected from the group consisting of G, A, V, L, I, P, F, M, W, T and S (in particular is selected from the group consisting of M, I, V and T).

[0942] In certain embodiments useful for inducing the conversion of a neoplastic cell into a cell (any cell) of the lung cell lineage, PEP3 is selected from the group consisting of VPT, VPE, APT, TPT, VPA, APV, VPQ and VSQ; PEP4 is selected from the group consisting of VVE, TVE, VVR, VVK, VAE, AVS, VVD, VEE, VRS and VKS; and wherein the pair PEP3:PEP4 is selected from the group consisting of VPT:VVE, VPE:TVE, APT:VVR, APT:VVK, VPT:VAE, VPT:AVS, TPT:VVD, VPA:VVE, APV:VEE, VPQ:VRS, VSQ:VKS and VPQ:VKS.

[0943] In certain embodiments useful for inducing the conversion of a neoplastic cell into a cell (any cell) of the lung cell lineage, PEP5 is selected from the group consisting of VPTEL, VPEKM, APTKL, APTQL, VPTKL, TPTKM, VPARL, VPTRL, APVKT, VPQAL, VSQDL and VPQDL; PEP6 is selected from the group consisting of DMVVE, NMTVE, EMVVE, NMVVR, NMVVK, EGMSVAE, GMAVS, GMVVD, DMVVE, MIVEE, MIVRS, MIVKS and MVVKS; and wherein the pair PEP5:PEP6 is selected from the group consisting of VPTEL:DMVVE, VPEKM:NMTVE, VPTEL:EMVVE, APTKL:NMVVR, APTQL:NMVVR, APTKL:NMVVK, VPTKL:EGMSVAE, VPTKL:GMAVS, TPTKM:GMVVD, VPARL:DMVVE, VPTRL:DMVVE, APVKT:MIVEE, VPQAL:MIVRS, VSQDL:MIVKS and VPQDL:MVVKS.

[0944] In certain embodiments useful for inducing the conversion of a neoplastic cell into a cell (any cell) of the lung cell lineage, PEP7 is selected from the group consisting of KIPKAXX, GIPEPXX, SIPKAXX, HVTKPTX, YVPKPXX, TVPKPXX, AVPKAXX, KVGKAXX, KASKAXX, GSAGPXX, AAPASXX, STPPTXX, HVPKPXX, RVPSTXX, ASAAPXX and ASASPXX; wherein PEP8 is selected from the group consisting of GXGXR, SXAXR, SXGXH, AXGXH, XGXR, EXGXR, RXGXS, AXGXR, SXGXR, XGXL and XKXS; and wherein the pair PEP7:PEP8 is selected from the group consisting of KIPKAXX:GXGXR, GIPEPXX:SXAXR, SIPKAXX:GXGXR, HVTKPTX:SXGXH, YVPKPXX:SXGXH, TVPKPXX:AXGXH, AVPKAXX:AXGXH, KVGKAXX:XGXR, KASKAXX:EXGXR, GSAGPXX:RXGXS, AAPASXX:AXGXR, STPPTXX:SXGXR, HVPKPXX:SXGXH, RVPSTXX:XGXL, ASAAPXX:XKXS and ASASPXX:XKXS.

[0945] In certain embodiments useful for inducing the conversion of a neoplastic cell into a cell (any cell) of the lung cell lineage, PEP9 is selected from the group consisting of KIPKAXXVPTEL, GIPEPXXVPEKM, SIPKAXXVPTEL, HVTKPTXAPTKL, YVPKPXXAPTKL, TVPKPXXAPTQL, AVPKAXXAPTKL, KVGKAXXVPTKL, KASKAXXVPTKL, GSAGPXXTPTKM, AAPASXXVPARL, STPPTXXVPTRL, HVPKPXXAPTKL, RVPSTXXAPVKT, ASAAPXXVPQAL, ASASPXXVSQDL and ASASPXXVPQDL; PEP10 is selected from the group consisting of DMVVEGXGXR, NMTVESXAXR, EMVVEGXGXR, NMVVRSXGXH, NMVVRSXGXH, NMVVRAXGXH, NMVVKAXGXH, EGMSVAEXGXR, GMAVSEXGXR, GMVVDRXGXS, DMVVEAXGXR, DMVVESXGXR, NMVVRSXGXH, MIVEEXGXL, MIVKSXKXS, MIVKSXKXS and MVVKSXKXS; and wherein the pair PEP9:PEP10 is selected from the group consisting of KIPKAXXVPTEL:DMVVEGXGXR, GIPEPXXVPEKM:NMTVESXAXR, SIPKAXXVPTEL:EMVVEGXGXR, HVTKPTXAPTKL:NMVVRSXGXH, YVPKPXXAPTKL:NMVVRSXGXH, TVPKPXXAPTQL:NMVVRAXGXH, AVPKAXXAPTKL:NMVVKAXGXH, KVGKAXXVPTKL:EGMSVAEXGXR, KASKAXXVPTKL:GMAVSEXGXR, GSAGPXXTPTKM:GMVVDRXGXS, AAPASXXVPARL:DMVVEAXGXR, STPPTXXVPTRL:DMVVESXGXR, HVPKPXXAPTKL:NMVVRSXGXH, RVPSTXXAPVKT:MIVEEXGXL, ASAAPXXVPQAL:MIVRSXKXS, ASASPXXVSQDL:MIVKSXKXS and ASASPXXVPQDL:MVVKSXKXS.

[0946] In certain embodiments useful for inducing the conversion of a neoplastic cell into a cell (any cell) of the lung cell lineage, PEP5 is selected from the group consisting of VPTEL, VPEKM, APTKL, APTQL, VPTKL, TPTKM, VPARL, VPTRL, APVKT, VPQAL, VSQDL and VPQDL; PEP6 is selected from the group consisting of DMVVE, NMTVE, EMVVE, NMVVR, NMVVK, EGMSVAE, GMAVS, GMVVD, DMVVE, MIVEE, MIVRS, MIVKS and MVVKS; and wherein the pair PEP5:PEP6 is selected from the group consisting of VPTEL:DMVVE, VPEKM:NMTVE, VPTEL:EMVVE, APTKL:NMVVR, APTQL:NMVVR, APTKL:NMVVK, VPTKL:EGMSVAE, VPTKL:GMAVS, TPTKM:GMVVD, VPARL:DMVVE, VPTRL:DMVVE, APVKT:MIVEE, VPQAL:MIVRS, VSQDL:MIVKS and VPQDL:MVVKS; wherein the pair PEP5:PEP6 is not APTKL:NMVVR when PEP1 is NAIS and PEP2 is LKKYR; wherein the pair PEP5:PEP6 is not APTQL:NMVVR when PEP1 is NAIS and PEP2 is LKKYR; wherein the pair PEP5:PEP6 is not APTKL:NMVVK when PEP1 is SATS and PEP2 is LRKHR; wherein the pair PEP5:PEP6 is not VPTKL:EGMSVAE when PEP1 is SPIS and PEP2 is LKYHY; wherein the pair PEP5:PEP6 is not VPTKL:GMAVS when PEP1 is EPIS and PEP2 is KFKYE; and wherein the pair PEP5:PEP6 is not TPTKM:GMVVD when PEP1 is SPIN and PEP2 is YGKIP.

[0947] In certain embodiments useful for inducing the conversion of a neoplastic cell into a cell (any cell) of the lung cell lineage, PEP9 is selected from the group consisting of KIPKAXXVPTEL, GIPEPXXVPEKM, SIPKAXXVPTEL, HVTKPTXAPTKL, YVPKPXXAPTKL, TVPKPXXAPTQL, AVPKAXXAPTKL, KVGKAXXVPTKL, KASKAXXVPTKL, GSAGPXXTPTKM, AAPASXXVPARL, STPPTXXVPTRL, HVPKPXXAPTKL, RVPSTXXAPVKT, ASAAPXXVPQAL, ASASPXXVSQDL and ASASPXXVPQDL; PEP10 is selected from the group consisting of DMVVEGXGXR, NMTVESXAXR, EMVVEGXGXR, NMVVRSXGXH, NMVVRSXGXH, NMVVRAXGXH, NMVVKAXGXH, EGMSVAEXGXR, GMAVSEXGXR, GMVVDRXGXS, DMVVEAXGXR, DMVVESXGXR, NMVVRSXGXH, MIVEEXGXL, MIVKSXKXS, MIVKSXKXS and MVVKSXKXS; and wherein the pair PEP9:PEP10 is selected from the group consisting of KIPKAXXVPTEL:DMVVEGXGXR, GIPEPXXVPEKM:NMTVESXAXR, SIPKAXXVPTEL:EMVVEGXGXR, HVTKPTXAPTKL:NMVVRSXGXH, YVPKPXXAPTKL:NMVVRSXGXH, TVPKPXXAPTQL:NMVVRAXGXH, AVPKAXXAPTKL:NMVVKAXGXH, KVGKAXXVPTKL:EGMSVAEXGXR, KASKAXXVPTKL:GMAVSEXGXR, GSAGPXXTPTKM:GMVVDRXGXS, AAPASXXVPARL:DMVVEAXGXR, STPPTXXVPTRL:DMVVESXGXR, HVPKPXXAPTKL:NMVVRSXGXH, RVPSTXXAPVKT:MIVEEXGXL, ASAAPXXVPQAL:MIVRSXKXS, ASASPXXVSQDL:MIVKSXKXS and ASASPXXVPQDL:MVVKSXKXS; wherein the pair PEP9:PEP10 is not YVPKPXXAPTKL:NMVVRSXGXH when PEP1 is NAIS and PEP2 is LKKYR; wherein the pair PEP9:PEP10 is not TVPKPXXAPTQL:NMVVRAXGXH when PEP1 is NAIS and PEP2 is LKKYR; wherein the pair PEP9:PEP10 is not AVPKAXXAPTKL:NMVVKAXGXH when PEP1 is SATS and PEP2 is LRKHR; wherein the pair PEP9:PEP10 is not KVGKAXXVPTKL:EGMSVAEXGXR when PEP1 is SPIS and PEP2 is LKYHY; wherein the pair PEP9:PEP10 is not KASKAXXVPTKL:GMAVSEXGXR when PEP1 is EPIS and PEP2 is KFKYE; and wherein the pair PEP9:PEP10 is not GSAGPXXTPTKM:GMVVDRXGXS when PEP1 is SPIN and PEP2 is YGKIP.

[0948] In certain embodiments useful for inducing the conversion of a neoplastic cell into a cell (any cell) of the lung cell lineage, PEP1 is selected from the group consisting of NAIS, SATS, SPIS, EPIS and SPIN; PEP11 is selected from the group consisting of LYF, LYY, LYK and LYL; and the pair PEP1:PEP11 is selected from the group consisting of NAIS:LYF, SATS:LYY, SPIS:LYK, EPIS:LYL and SPIN:LYF.

[0949] In one aspect, the present disclosure provides a GFR-binding compound, wherein said GFR-binding compound is a peptide, a variant or analog thereof, or a peptidomimetic as defined herein, with between 20 and 60 (in particular between 20 and 50, and more particularly, between 20 and 45) amino acids, comprising a peptide with four amino acids (PEP1) or a peptide with eight amino acids (PEP12), a peptide with five amino acids (PEP2), and optionally a pair of peptides selected form the group consisting of PEP3:PEP4, PEP3:PEP6, PEP3:PEP10, PEP5:PEP4, PEP9:PEP4, PEP5:PEP6, PEP5:PEP10, PEP9:PEP6 and PEP9:PEP10; wherein said GFR-binding compound does not comprise the pair of peptides APTKL:NMVVR when PEP1 is NAIS and PEP2 is LKKYR; wherein said GFR-binding compound does not comprise the pair of peptides APTQL:NMVVR when PEP1 is NAIS and PEP2 is LKKYR; wherein said GFR-binding compound does not comprise the pair of peptides APTKL:NMVVK when PEP1 is SATS and PEP2 is LRKHR; wherein said GFR-binding compound does not comprise the pair of peptides VPTKL:EGMSVAE when PEP1 is SPIS and PEP2 is LKYHY; wherein said GFR-binding compound does not comprise the pair of peptides VPTKL:GMAVS when PEP1 is EPIS and PEP2 is KFKYE; and wherein said GFR-binding compound does not comprise the pair of peptides TPTKM:GMVVD when PEP1 is SPIN and PEP2 is YGKIP; and, optionally, wherein the RMSD is 2.45 Å or less.

[0950] In one aspect, the present disclosure provides a GFR-binding compound, wherein said GFR-binding compound is a peptide, a variant or analog thereof, or a peptidomimetic as defined herein, with between 20 and 60 (in particular between 20 and 50, and more particularly, between 20 and 45) amino acids, comprising a peptide with four amino acids (PEP1) or a peptide with eight amino acids (PEP12), a peptide with five amino acids (PEP2), and optionally a pair of peptides selected form the group consisting of PEP3:PEP4, PEP3:PEP6, PEP3:PEP10, PEP5:PEP4, PEP9:PEP4, PEP5:PEP6, PEP5:PEP10, PEP9:PEP6 and PEP9:PEP10; wherein said GFR-binding compound does not comprise the pair of peptides YVPKPXXAPTKL:NMVVRSXGXH when PEP1 is NAIS and PEP2 is LKKYR; wherein said GFR-binding compound does not comprise the pair of peptides TVPKPXXAPTQL:NMVVRAXGXH when PEP1 is NAIS and PEP2 is LKKYR; wherein said GFR-binding compound does not comprise the pair of peptides AVPKAXXAPTKL:NMVVKAXGXH when PEP1 is SATS and PEP2 is LRKHR; wherein said GFR-binding compound does not comprise the pair of peptides KVGKAXXVPTKL:EGMSVAEXGXR when PEP1 is SPIS and PEP2 is LKYHY; wherein said GFR-binding compound does not comprise the pair of peptides KASKAXXVPTKL:GMAVSEXGXR when PEP1 is EPIS and PEP2 is KFKYE; and wherein said GFR-binding compound does not comprise the pair of peptides GSAGPXXTPTKM:GMVVDRXGXS when PEP1 is SPIN and PEP2 is YGKIP; and, optionally, wherein the RMSD is 2.45 Å or less.

[0951] In certain embodiments useful for inducing the conversion of a neoplastic cell into a cell (any cell) of the lung cell lineage, said GFR-binding compound is a synthetic molecule as defined herein in the definition section.

[0952] In certain embodiments useful for inducing the conversion of a neoplastic cell into a cell (any cell) of the lung cell lineage, said GFR-binding compound is a synthetic peptide, or a variant or analog thereof, or a peptidomimetic.

[0953] Muscle Cell Lineage

[0954] Certain embodiments of the invention are particularly useful for inducing the conversion of a neoplastic cell into a cell (any cell) of the muscle cell lineage.

[0955] In certain embodiments useful for inducing the conversion of a neoplastic cell into a cell (any cell) of the muscle cell lineage, PEP1 is RSVK or RPVQ.

[0956] In certain embodiments useful for inducing the conversion of a neoplastic cell into a cell (any cell) of the muscle cell lineage, PEP2 is KEVQV or KKATV.

[0957] In certain embodiments useful for inducing the conversion of a neoplastic cell into a cell (any cell) of the muscle cell lineage, PEP3 is selected from the group consisting of VPQ, VSQ, VPT, SRV and TQV.

[0958] In certain embodiments useful for inducing the conversion of a neoplastic cell into a cell (any cell) of the muscle cell lineage, PEP4 is selected from the group consisting of VRS, VKS, QHN, EHS, EEH and EDH.

[0959] In certain embodiments useful for inducing the conversion of a neoplastic cell into a cell (any cell) of the muscle cell lineage, PEP5 is a peptide of general formula PEP3-AA¹¹-AA¹²; wherein PEP3 is selected from the group consisting of VPQ, VSQ, VPT, SRV and TQV; wherein AA¹¹ is selected from the group consisting of E, K, Q, R, A, D, G and H, in particular A, D, E, H, Q and G; wherein AA¹² is selected from the group consisting of L, M, T, E, Q and H, in particular L, E, H and Q. In one particular example, PEP5 is selected from the group consisting of VPQAL, VSQDL, VPQDL, VPTEE, VPTGQ, SRVHH and TQVQL.

[0960] In certain embodiments useful for inducing the conversion of a neoplastic cell into a cell (any cell) of the muscle cell lineage, PEP6 is a peptide of general formula AA²⁶-AA²⁷-AA²⁸-AA²⁹-PEP4; wherein PEP4 is selected from the group consisting of VRS, VKS, QHN, EHS, EEH and EDH; wherein AA²⁶ is absent or selected from the group consisting of AA^{III} amino acids, preferably is absent; wherein AA²⁷ and AA²⁸ are independently selected from the group consisting of AA^{III} and AA^{V} amino acids, preferably AA²⁷ is selected from the group consisting of M, F, R, T and L, preferably AA²⁸ is selected from the group consisting of I, V, L and E; wherein AA²⁹ is absent or selected from the group consisting of AA^{II} amino acids, preferably absent. In one particular example, PEP6 is selected from the group consisting of MIVRS, MIVKS, MVVKS, FLQHN, LEEHS, RLEEH and TLEDH.

[0961] In certain embodiments useful for inducing the conversion of a neoplastic cell into a cell (any cell) of the muscle cell lineage, PEP7 is an amino acid or a peptide with between two and seven amino acids of general formula AA¹-AA²-AA³-AA⁴-AA⁵-AA⁶-AA⁷; wherein AA¹, AA², AA³, AA⁴, and AA⁵ are independently absent or AA^{I} as defined herein; wherein AA⁶ is absent or selected from the group consisting of S, T, C, E, Q, P and R, preferably C, S, Q, R or E; wherein AA⁷ is absent or is selected from the group consisting of S, T, C, E, Q, P and R, preferably is S, P or C; and wherein at least one of AA¹, AA², AA³, AA⁴, AA⁵, AA⁶ or AA⁷ is not absent. In one particular example, PEP7 is selected from the group consisting of ASAAPXX, ASASPXX, NDEGLEX, SSVKXQP and RNVQXRP.

[0962] In certain embodiments useful for inducing the conversion of a neoplastic cell into a cell (any cell) of the muscle cell lineage, PEP8 is an amino acid or a peptide with between two and six amino acids of general formula AA³³-AA³⁴-AA³⁵-AA³⁶-AA³⁷-AA³⁸; wherein AA³³ is absent or is selected from the group consisting of AA^{I} amino acids at the exception of AA^{VI} amino acids; AA³⁴ is absent or is selected from the group consisting of AA^{III} and AA^{IV} amino acids; wherein AA³⁵ is absent or is selected from the group consisting of AA^{II} amino acids, preferably is S or C; wherein AA³⁶ is absent or is selected from the group consisting of AA^{III} and AA^{IV} amino acids; wherein AA³⁷ is absent or is selected from the group consisting of AA^{II} amino acids, preferably is S or C; wherein AA³⁸ is absent or is selected from the group consisting of AA^{I}; and wherein at least one of AA³³, AA³⁴, AA³⁵, AA³⁶, AA³⁷ or AA³⁸ is not absent. In one particular example, PEP8 is selected from the group consisting of XKXS, KXEXR, QXEXR, LEXAXA and LAXKXE.

[0963] In certain embodiments useful for inducing the conversion of a neoplastic cell into a cell (any cell) of the muscle cell lineage, PEP9 is a peptide of general formula AA¹-AA²-AA³-AA⁴-AA⁵-AA⁶-AA⁷-PEP5; wherein PEP5 is a peptide of formula PEP3-AA¹¹-AA¹²; wherein PEP3 is selected from the group consisting of VPQ, VSQ, VPT, SRV and TQV; wherein AA¹¹ is selected from the group consisting of E, K, Q, R, A, D, G and H, in particular A, D, E, H, Q and G; wherein AA¹² is selected from the group consisting of L, M, T, E, Q and H, in particular L, E, H and Q; wherein AA¹, AA², AA³, AA⁴, and AA⁵ are independently absent or AA^{I} as defined herein; wherein AA⁶ is absent or selected from the group consisting of S, T, C, E, Q, P and R, preferably C, S, Q, R or E; wherein AA⁷ is absent or is selected from the group consisting of S, T, C, E, Q, P and R, preferably is S, P or C. In one particular example, PEP9 is selected from the group consisting of ASAAPXXVPQAL, ASASPXXVSQDL, ASASPXXVPQDL, NDEGLEXVPTEE, NDEGLEXVPTGQ, SSVKXQPSRVHH and RNVQXRPTQVQL.

[0964] In certain embodiments useful for inducing the conversion of a neoplastic cell into a cell (any cell) of the muscle cell lineage, PEP10 is a peptide of general formula PEP6-AA³³-AA³⁴-AA³⁵-AA³⁶-AA³⁷-AA³⁸; wherein PEP6 is a peptide of formula AA²⁶-AA²⁷-AA²⁸-AA²⁹-PEP4; wherein PEP4 is selected from the group consisting of VRS, VKS, QHN, EHS, EEH and EDH; wherein AA²⁶ is absent or selected from the group consisting of AA^{III} amino acids, preferably is absent; wherein AA²⁷ and AA²⁸ are independently selected from the group consisting of AA^{III} and AA^{V} amino acids, preferably AA²⁷ is selected from the group consisting of M, F, R, T and L, preferably AA²⁸ is selected from the group consisting of I, V, L and E; wherein AA²⁹ is absent or selected from the group consisting of AA^{II} amino acids, preferably absent; wherein AA³³ is absent or is selected from the group consisting of AA^{I} amino acids at the exception of AA^{VI} amino acids; AA³⁴ is absent or is selected from the group consisting of AA^{III} and AA^{IV} amino acids; wherein AA³⁵ is absent or is selected from the group consisting of AA^{II} amino acids, preferably is S or C; wherein AA³⁶ is absent or is selected from the group consisting of AA^{III} and AA^{IV} amino acids; wherein AA³⁷ is absent or is selected from the group consisting of AA^{II} amino acids, preferably is S or C; wherein AA³⁸ is absent or is selected from the group consisting of AA^{I}. In one particular example, PEP10 is selected from the group consisting of MIVRSXKXS, MIVKSXKXS, MVVKSXKXS, FLQHNKXEXR, LEEHSQXEXR, RLEEHLEXAXA and TLEDHLAXKXE.

[0965] In certain embodiments useful for inducing the conversion of a neoplastic cell into a cell (any cell) of the muscle cell lineage, PEP12 is a peptide of general formula PEP1-AA¹⁷-PEP11; wherein AA¹⁷ is selected from the group consisting of G, A, V, L, I, P, F, M, W, T and S (in particular is I or M); wherein PEP1 is RSVK or RPVQ.

[0966] In certain embodiments useful for inducing the conversion of a neoplastic cell into a cell (any cell) of the muscle cell lineage, PEP11 is a peptide with 3 amino acids of general formula AA¹⁸-AA¹⁹-AA²⁰; wherein AA¹⁸ is selected from the group consisting of L, V, Q, A and R, in particular is A or R; wherein AA¹⁹ is selected from the group consisting of AA^{VII} amino acids (in particular is K); wherein AA²⁰ is selected from the group consisting of L, F, Y, K, I, V and M, in particular is V or I. In one particular example, PEP11 is AKV or RKI.

[0967] The definitions of “PEP” pairs, quadruplets, hexaplets and heptuplet e.g. PEP1:PEP2, PEP12:PEP2, or PEP7:PEP5:PEP12:LINKER:PEP2:PEP6:PEP8, useful for inducing the conversion of a neoplastic cell into a cell (any cell) of the muscle cell lineage, are as already defined herein to the extent that PEP1 to PEP12 are particularly useful for these applications. For instances:

[0968] In certain embodiments useful for inducing the conversion of a neoplastic cell into a cell (any cell) of the muscle cell lineage, the pair PEP1:PEP2 is RSVK:KEVQV or RPVQ:KKATV.

[0969] In certain embodiments, useful for inducing the conversion of a neoplastic cell into a cell (any cell) of the muscle cell lineage, the pair PEP12:PEP2 is RSVK-AA¹⁷-AKV:KEVQV or RPVQ-AA¹⁷-RKI:KKATV; wherein AA¹⁷ is selected from the group consisting of G, A, V, L, I, P, F, M, W, T and S (in particular is I or M).

[0970] In certain embodiments useful for inducing the conversion of a neoplastic cell into a cell (any cell) of the muscle cell lineage, PEP3 is selected from the group consisting of VPQ, VSQ, VPT, SRV and TQV; PEP4 is selected from the group consisting of VRS, VKS, QHN, EHS, EEH and EDH; and wherein the pair PEP3:PEP4 is selected from the group consisting of VPQ:VRS, VSQ:VKS, VPQ:VKS, VPT:QHN, VPT:EHS, SRV:EEH and TQV:EDH.

[0971] In certain embodiments useful for inducing the conversion of a neoplastic cell into a cell (any cell) of the muscle cell lineage, PEP5 is selected from the group consisting of VPQAL, VSQDL, VPQDL, VPTEE, VPTGQ, SRVHH and TQVQL; PEP6 is selected from the group consisting of MIVRS, MIVKS, MVVKS, FLQHN, LEEHS, RLEEH and TLEDH; and wherein the pair PEP5:PEP6 is selected from the group consisting of VPQAL:MIVRS, VSQDL:MIVKS, VPQDL:MVVKS, VPTEE:FLQHN, VPTGQ:LEEHS and SRVHH:RLEEH and TQVQL:TLEDH.

[0972] In certain embodiments useful for inducing the conversion of a neoplastic cell into a cell (any cell) of the muscle cell lineage, PEP7 is selected from the group consisting of ASAAPXX, ASASPXX, NDEGLEX, SSVKXQP and RNVQXRP; wherein PEP8 is selected from the group consisting of XKXS, KXEXR, QXEXR, LEXAXA and LAXKXE; and wherein the pair PEP7:PEP8 is selected from the group consisting of ASAAPXX:XKXS, ASASPXX:XKXS, NDEGLEX:KXEXR, NDEGLEX:QXEXR, SSVKXQP:LEXAXA and RNVQXRP:LAXKXE.

[0973] In certain embodiments useful for inducing the conversion of a neoplastic cell into a cell (any cell) of the muscle cell lineage, PEP9 is selected from the group consisting of ASAAPXXVPQAL, ASASPXXVSQDL, ASASPXXVPQDL, NDEGLEXVPTEE, NDEGLEXVPTGQ, SSVKXQPSRVHH and RNVQXRPTQVQL; PEP10 is selected from the group consisting of MIVRSXKXS, MIVKSXKXS, MVVKSXKXS, FLQHNKXEXR, LEEHSQXEXR, RLEEHLEXAXA and TLEDHLAXKXE; and wherein the pair PEP9:PEP10 is selected from the group consisting of ASAAPXXVPQAL:MIVRSXKXS, ASASPXXVSQDL:MIVKSXKXS, ASASPXXVPQDL:MVVKSXKXS, NDEGLEXVPTEE:FLQHNKXEXR, NDEGLEXVPTGQ:LEEHSQXEXR, SSVKXQPSRVHH:RLEEHLEXAXA and RNVQXRPTQVQL:TLEDHLAXKXE.

[0974] In certain embodiments useful for inducing the conversion of a neoplastic cell into a cell (any cell) of the muscle cell lineage, PEP1 is RSVK or RPVQ; PEP11 is is AKV or RKI; and the pair PEP1:PEP11 is RSVK:AKV or RPVQ:RKI.

[0975] In certain embodiments useful for inducing the conversion of a neoplastic cell into a cell (any cell) of the muscle cell lineage, said GFR-binding compound is a synthetic molecule as defined herein in the definition section.

[0976] In certain embodiments useful for inducing the conversion of a neoplastic cell into a cell (any cell) of the muscle cell lineage, said GFR-binding compound is a synthetic peptide, or a variant or analog thereof, or a peptidomimetic.

[0977] Blood Cell Lineage

[0978] Certain embodiments of the invention are particularly useful for inducing the conversion of a neoplastic cell into a cell (any cell) of the blood cell lineage.

[0979] In certain embodiments useful for inducing the conversion of a neoplastic cell into a cell (any cell) of the blood cell lineage, PEP1 is SNIT.

[0980] In certain embodiments useful for inducing the conversion of a neoplastic cell into a cell (any cell) of the blood cell lineage, PEP2 is IGEMS or LGEMS.

[0981] In certain embodiments useful for inducing the conversion of a neoplastic cell into a cell (any cell) of the blood cell lineage, PEP3 is selected from the group consisting of TPT, VPA, VPT, APT, APV, VPQ, VSQ, SRV and TQV.

[0982] In certain embodiments useful for inducing the conversion of a neoplastic cell into a cell (any cell) of the blood cell lineage, PEP4 is selected from the group consisting of VVD, VVE, VVR, VEE, VRS, VKS, QHN, EHS, EEH and EDH.

[0983] In certain embodiments useful for inducing the conversion of a neoplastic cell into a cell (any cell) of the blood cell lineage, PEP5 is a peptide of general formula PEP3-AA¹¹-AA¹²; wherein PEP3 is selected from the group consisting of TPT, VPA, VPT, APT, APV, VPQ, VSQ, SRV and TQV; wherein AA¹¹ is selected from the group consisting of E, K, Q, R, A, D, G and H; wherein AA¹² is selected from the group consisting of L, M, T, E, Q and H. In one particular example, PEP5 is selected from the group consisting of TPTKM, VPARL, VPTRL, APTKL, APVKT, VPQAL, VSQDL, VPQDL, VPTEE, VPTGQ, SRVHH and TQVQL.

[0984] In certain embodiments useful for inducing the conversion of a neoplastic cell into a cell (any cell) of the blood cell lineage, PEP6 is a peptide of general formula AA²⁶-AA²⁷-AA²⁸-AA²⁹-PEP4; wherein PEP4 is selected from the group consisting of VVD, VVE, VVR, VEE, VRS, VKS, QHN, EHS, EEH and EDH; wherein AA²⁶ is absent or selected from the group consisting of AA^{III} amino acids, preferably is absent; wherein AA²⁷ and AA²⁸ are independently selected from the group consisting of AA^{III} and AA^{V} amino acids, preferably AA²⁷ is selected from the group consisting of G, D, N, M, R, F, L and T, preferably AA²⁸ is selected from the group consisting of M, I, V, E and L; wherein AA²⁹ is absent or selected from the group consisting of AA^{II} amino acids, preferably is absent. In one particular example, PEP6 is selected from the group consisting of GMVVD, DMVVE, NMVVR, MIVEE, MIVRS, MIVKS, MVVKS, FLQHN, LEEHS, RLEEH and TLEDH.

[0985] In certain embodiments useful for inducing the conversion of a neoplastic cell into a cell (any cell) of the blood cell lineage, PEP7 is an amino acid or a peptide with between two and seven amino acids of general formula AA¹-AA²-AA³-AA⁴-AA⁵-AA⁶-AA⁷; wherein AA¹, AA², AA³, AA⁴, and AA⁵ are independently absent or AA^{I} as defined herein; wherein AA⁶ is absent or selected from the group consisting of S, T, C, E, Q, P and R, preferably is selected from the group consisting of S, C, E, Q and R; wherein AA⁷ is absent or is selected from the group consisting of S, T, C, E, Q, P and R, preferably is selected from the group consisting of C, S and P; and wherein at least one of AA¹, AA², AA³, AA⁴, AA⁵, AA⁶ or AA⁷ is not absent. In one particular example, PEP7 is selected from the group consisting of GSAGPXX, AAPASXX, STPPTXX, HVPKPXX, RVPSTXX, ASAAPXX, ASASPXX, NDEGLEX, SSVKXQP and RNVQXRP.

[0986] In certain embodiments useful for inducing the conversion of a neoplastic cell into a cell (any cell) of the blood cell lineage, PEP8 is an amino acid or a peptide with between two and six amino acids of general formula AA³³-AA³⁴-AA³⁵-AA³⁶-AA³⁷-AA³⁸; wherein AA³³ is absent or is selected from the group consisting of AA^{I} amino acids at the exception of AA^{VI} amino acids; AA³⁴ is absent or is selected from the group consisting of AA^{III} and AA^{IV} amino acids; wherein AA³⁵ is absent or is selected from the group consisting of AA^{II} amino acids, preferably is S or C; wherein AA³⁶ is absent or is selected from the group consisting of AA^{III} and AA^{IV} amino acids; wherein AA³⁷ is absent or is selected from the group consisting of AA^{II} amino acids, preferably is S or C; wherein AA³⁸ is absent or is selected from the group consisting of AA^{I}; and wherein at least one of AA³³, AA³⁴, AA³⁵, AA³⁶, AA³⁷ or AA³⁸ is not absent. In one particular example, PEP8 is selected from the group consisting of RXGXS, AXGXR, SXGXR, SXGXH, XGXL, XKXS, KXEXR, QXEXR, LEXAXA and LAXKXE.

[0987] In certain embodiments useful for inducing the conversion of a neoplastic cell into a cell (any cell) of the blood cell lineage, PEP9 is a peptide of general formula AA¹-AA²-AA³-AA⁴-AA⁵-AA⁶-AA⁷-PEP5; wherein PEP5 is a peptide of formula PEP3-AA¹¹-AA¹²; wherein PEP3 is selected from the group consisting of TPT, VPA, VPT, APT, APV, VPQ, VSQ, SRV and TQV; wherein AA¹¹ is selected from the group consisting of E, K, Q, R, A, D, G and H; wherein AA¹² is selected from the group consisting of L, M, T, E, Q and H; wherein AA¹, AA², AA³, AA⁴, and AA⁵ are independently absent or AA^{I} as defined herein; wherein AA⁶ is absent or selected from the group consisting of S, T, C, E, Q, P and R, preferably is selected from the group consisting of S, C, E, Q and R; wherein AA⁷ is absent or is selected from the group consisting of S, T, C, E, Q, P and R, preferably is selected from the group consisting of C, S and P. In one particular example, PEP9 is selected from the group consisting of GSAGPXXTPTKM, AAPASXXVPARL, STPPTXXVPTRL, HVPKPXXAPTKL, RVPSTXXAPVKT, ASAAPXXVPQAL, ASASPXXVSQDL, ASASPXXVPQDL, NDEGLEXVPTEE, NDEGLEXVPTGQ, SSVKXQPSRVHH and RNVQXRPTQVQL.

[0988] In certain embodiments useful for inducing the conversion of a neoplastic cell into a cell (any cell) of the blood cell lineage, PEP10 is a peptide of general formula PEP6-AA³³-AA³⁴-AA³⁵-AA³⁶-AA³⁷-AA³⁸; wherein PEP6 is a peptide of formula AA²⁶-AA²⁷-AA²⁸-AA²⁹-PEP4; wherein PEP4 is selected from the group consisting of VVD, VVE, VVR, VEE, VRS, VKS, QHN, EHS, EEH and EDH; wherein AA²⁶ is absent or selected from the group consisting of AA^{III} amino acids, preferably is absent; wherein AA²⁷ and AA²⁸ are independently selected from the group consisting of AA^{III} and AA^{V} amino acids, preferably AA²⁷ is selected from the group consisting of G, D, N, M, R, F, L and T, preferably AA²⁸ is selected from the group consisting of M, I, V, E and L; wherein AA²⁹ is absent or selected from the group consisting of AA^{II} amino acids, preferably is absent; wherein AA³³ is absent or is selected from the group consisting of AA^{I} amino acids at the exception of AA^{VI} amino acids; AA³⁴ is absent or is selected from the group consisting of AA^{III} and AA^{IV} amino acids; wherein AA³⁵ is absent or is selected from the group consisting of AA^{II} amino acids, preferably is S or C; wherein AA³⁶ is absent or is selected from the group consisting of AA^{III} and AA^{IV} amino acids; wherein AA³⁷ is absent or is selected from the group consisting of AA^{II} amino acids, preferably is S or C; wherein AA³⁸ is absent or is selected from the group consisting of AA^{I}. In one particular example, PEP10 is selected from the group consisting of GMVVDRXGXS, DMVVEAXGXR, DMVVESXGXR, NMVVRSXGXH, MIVEEXGXL, MIVRSXKXS, MIVKSXKXS, MVVKSXKXS, FLQHNKXEXR, LEEHSQXEXR, RLEEHLEXAXA and TLEDHLAXKXE.

[0989] In certain embodiments useful for inducing the conversion of a neoplastic cell into a cell (any cell) of the blood cell lineage, PEP12 is a peptide of general formula PEP1-AA¹⁷-PEP11; wherein AA¹⁷ is selected from the group consisting of G, A, V, L, I, P, F, M, W, T and S (in particular is selected from the group consisting of M, I, V and T); wherein PEP1 is SNIT.

[0990] In certain embodiments useful for inducing the conversion of a neoplastic cell into a cell (any cell) of the blood cell lineage, PEP11 is a peptide with 3 amino acids of general formula AA¹⁸-AA¹⁹-AA²⁰; wherein AA¹⁸ is selected from the group consisting of L, V, Q, A and R, in particular is Q; wherein AA¹⁹ is selected from the group consisting of F, W, H, I and Y (in particular is I); wherein AA²⁰ is selected from the group consisting of L, F, Y, K, I, V and M, in particular is M. In one particular example, PEP11 is QIM.

[0991] In certain embodiments useful for inducing the conversion of a neoplastic cell into a cell (any cell) of the blood cell lineage, the pair PEP1:PEP2 is SNIT:IGEMS or SNIT:LGEMS.

[0992] In certain embodiments useful for inducing the conversion of a neoplastic cell into a cell (any cell) of the blood cell lineage, the pair PEP12:PEP2 is SNIT-AA¹⁷-QIM:IGEMS or SNIT-AA¹⁷-QIM:LGEMS; wherein AA¹⁷ is selected from the group consisting of G, A, V, L, I, P, F, M, W, T and S (in particular is selected from the group consisting of M, I, V and T).

[0993] The definitions of “PEP” pairs, quadruplets, hexaplets and heptuplet e.g. PEP1:PEP2, PEP12:PEP2, or PEP7:PEP5:PEP12:LINKER:PEP2:PEP6:PEP8, useful for inducing the conversion of a neoplastic cell into a cell (any cell) of the blood cell lineage, are as already defined herein to the extent that PEP1 to PEP12 are particularly useful for these applications. For instances:

[0994] In certain embodiments useful for inducing the conversion of a neoplastic cell into a cell (any cell) of the blood cell lineage, PEP3 is selected from the group consisting of TPT, VPA, VPT, APT, APV, VPQ, VSQ, SRV and TQV; PEP4 is selected from the group consisting of VVD, VVE, VVR, VEE, VRS, VKS, QHN, EHS, EEH and EDH; and wherein the pair PEP3:PEP4 is selected from the consisting of TPT:VVD, VPA:VVE, VPT:VVE, APT:VVR, APV:VEE, VPQ:VRS, VSQ:VKS, VPQ:VKS, VPT:QHN, VPT:EHS, SRV:EEH and TQV:EDH.

[0995] In certain embodiments useful for inducing the conversion of a neoplastic cell into a cell (any cell) of the blood cell lineage, PEP5 is selected from the group consisting of TPTKM, VPARL, VPTRL, APTKL, APVKT, VPQAL, VSQDL, VPQDL, VPTEE, VPTGQ, SRVHH and TQVQL; PEP6 is selected from the group consisting of GMVVD, DMVVE, NMVVR, MIVEE, MIVRS, MIVKS, MVVKS, FLQHN, LEEHS, RLEEH and TLEDH; and wherein the pair PEP5:PEP6 is selected from the group consisting of TPTKM:GMVVD, VPARL:DMVVE, VPTRL:DMVVE, APTKL:NMVVR, APVKT:MIVEE, VPQAL:MIVRS, VSQDL:MIVKS, VPQDL:MVVKS, VPTEE:FLQHN, VPTGQ:LEEHS, SRVHH:RLEEH and TQVQL:TLEDH.

[0996] In certain embodiments useful for inducing the conversion of a neoplastic cell into a cell (any cell) of the blood cell lineage, PEP7 is selected from the group consisting of GSAGPXX, AAPASXX, STPPTXX, HVPKPXX, RVPSTXX, ASAAPXX, ASASPXX, NDEGLEX, SSVKXQP and RNVQXRP; wherein PEP8 is selected from the group consisting of RXGXS, AXGXR, SXGXR, SXGXH, XGXL, XKXS, KXEXR, QXEXR, LEXAXA and LAXKXE; and wherein the pair PEP7:PEP8 is selected from the group consisting of GSAGPXX:RXGXS, AAPASXX:AXGXR, STPPTXX:SXGXR, HVPKPXX:SXGXH, RVPSTXX:XGXL, ASAAPXX:XKXS, ASASPXX:XKXS, NDEGLEX:KXEXR, NDEGLEX:QXEXR, SSVKXQP:LEXAXA and RNVQXRP:LAXKXE.

[0997] In certain embodiments useful for inducing the conversion of a neoplastic cell into a cell (any cell) of the blood cell lineage, PEP9 is selected from the group consisting of GSAGPXXTPTKM, AAPASXXVPARL, STPPTXXVPTRL, HVPKPXXAPTKL, RVPSTXXAPVKT, ASAAPXXVPQAL, ASASPXXVSQDL, ASASPXXVPQDL, NDEGLEXVPTEE, NDEGLEXVPTGQ, SSVKXQPSRVHH and RNVQXRPTQVQL; PEP10 is selected from the group consisting of GMVVDRXGXS, DMVVEAXGXR, DMVVESXGXR, NMVVRSXGXH, MIVEEXGXL, MIVRSXKXS, MIVKSXKXS, MVVKSXKXS, FLQHNKXEXR, LEEHSQXEXR, RLEEHLEXAXA and TLEDHLAXKXE; and wherein the pair PEP9:PEP10 is selected from the group consisting of GSAGPXXTPTKM:GMVVDRXGXS, AAPASXXVPARL:DMVVEAXGXR, STPPTXXVPTRL:DMVVESXGXR, HVPKPXXAPTKL:NMVVRSXGXH, RVPSTXXAPVKT:MIVEEXGXL, ASAAPXXVPQAL:MIVRSXKXS, ASASPXXVSQDL:MIVKSXKXS, ASASPXXVPQDL:MVVKSXKXS, NDEGLEXVPTEE:FLQHNKXEXR, NDEGLEXVPTGQ:LEEHSQXEXR, SSVKXQPSRVHH:RLEEHLEXAXA and RNVQXRPTQVQL:TLEDHLAXKXE.

[0998] In certain embodiments useful for inducing the conversion of a neoplastic cell into a cell (any cell) of the blood cell lineage, PEP1 is SNIT and PEP11 is QIM.

[0999] In one aspect, the present disclosure provides a GFR-binding compound, wherein said GFR-binding compound is a peptide, a variant or analog thereof, or a peptidomimetic as defined herein, with between 20 and 60 (in particular between 20 and 50, and more particularly, between 20 and 45) amino acids, comprising a peptide with four amino acids (PEP1) or a peptide with eight amino acids (PEP12), a peptide with five amino acids (PEP2); optionally a pair of peptides selected form the group consisting of PEP3:PEP4, PEP3:PEP6, PEP3:PEP10, PEP5:PEP4, PEP9:PEP4, PEP5:PEP6, PEP5:PEP10, PEP9:PEP6 and PEP9:PEP10; and, optionally, wherein the RMSD is 2.45 Å or less.

[1000] In certain embodiments useful for inducing the conversion of a neoplastic cell into a cell (any cell) of the blood cell lineage, said GFR-binding compound is a synthetic molecule as defined herein in the definition section.

[1001] In certain embodiments useful for inducing the conversion of a neoplastic cell into a cell (any cell) of the blood cell lineage, said GFR-binding compound is a synthetic peptide, or a variant or analog thereof, or a peptidomimetic.

[1002] Adipocyte Cell Lineage

[1003] Certain embodiments of the invention are particularly useful for inducing the conversion of a neoplastic cell into a cell (any cell) of the adipocyte lineage.

[1004] In certain embodiments useful for inducing the conversion of a neoplastic cell into a cell (any cell) of the adipocyte lineage, PEP1 is SAIS or NAIS.

[1005] In certain embodiments useful for inducing the conversion of a neoplastic cell into a cell (any cell) of the adipocyte lineage, PEP2 is LKNYQ or LKKYR.

[1006] In certain embodiments useful for inducing the conversion of a neoplastic cell into a cell (any cell) of the adipocyte lineage, PEP3 is selected from the group consisting of VPT, VPE, APT, TPT, VPA, APV, VPQ and VSQ.

[1007] In certain embodiments useful for inducing the conversion of a neoplastic cell into a cell (any cell) of the adipocyte lineage, PEP4 is selected from the group consisting of VVE, TVE, VVR, VVK, VAE, AVS, VVD, VEE, VRS and VKS.

[1008] In certain embodiments useful for inducing the conversion of a neoplastic cell into a cell (any cell) of the adipocyte lineage, PEP5 is a peptide of general formula PEP3-AA¹¹-AA¹²; wherein PEP3 is selected from the group consisting of VPT, VPE, APT, TPT, VPA, APV, VPQ and VSQ; wherein AA¹¹ is selected from the group consisting of E, K, Q, R, A, D, G and H, in particular is selected from the group consisting of E, K, Q, R, A and D; wherein AA¹² is selected from the group consisting of L, M, T, E, Q and H, in particular selected from the group consisting of L, M and T. In one particular example, PEP5 is selected from the group consisting of VPTEL, VPEKM, APTKL, APTQL, VPTKL, TPTKM, VPARL, VPTRL, APVKT, VPQAL, VSQDL and VPQDL.

[1009] In certain embodiments useful for inducing the conversion of a neoplastic cell into a cell (any cell) of the adipocyte lineage, PEP6 is a peptide of general formula AA²⁶-AA²⁷-AA²⁸-AA²⁹-PEP4; wherein PEP4 is selected from the group consisting of VVE, TVE, VVR, VVK, VAE, AVS, VVD, VEE, VRS and VKS; wherein AA²⁶ is absent or selected from the group consisting of AA^{III} amino acids, preferably is absent or E; wherein AA²⁷ and AA²⁸ are independently selected from the group consisting of AA^{III} and AA^{V} amino acids, preferably AA²⁷ is selected from the group consisting of D, E, N, G and M, preferably AA²⁸ is selected from the group consisting of M, I and V; wherein AA²⁹ is absent or selected from the group consisting of AA^{II} amino acids, preferably absent or S. In one particular example, PEP6 is selected from the group consisting of DMVVE, NMTVE, EMVVE, NMVVR, NMVVK, EGMSVAE, GMAVS, GMVVD, DMVVE, MIVEE, MIVRS, MIVKS and MVVKS.

[1010] In certain embodiments useful for inducing the conversion of a neoplastic cell into a cell (any cell) of the adipocyte lineage, PEP7 is an amino acid or a peptide with between two and seven amino acids of general formula AA¹-AA²-AA³-AA⁴-AA⁵-AA⁶-AA⁷; wherein AA¹, AA², AA³, AA⁴, and AA⁵ are independently absent or AA^{I} as defined herein; wherein AA⁶ is absent or selected from the group consisting of S, T, C, E, Q, P and R, preferably is selected from the group consisting of C, S and T; wherein AA⁷ is absent or is selected from the group consisting of S, T, C, E, Q, P and R, preferably is C or S; and wherein at least one of AA¹, AA², AA³, AA⁴, AA⁵, AA⁶ or AA⁷ is not absent. In one particular example, PEP7 is selected from the group consisting of KIPKAXX, GIPEPXX, SIPKAXX, HVTKPTX, YVPKPXX, TVPKPXX, AVPKAXX, KVGKAXX, KASKAXX, GSAGPXX, AAPASXX, STPPTXX, HVPKPXX, RVPSTXX, ASAAPXX and ASASPXX.

[1011] In certain embodiments useful for inducing the conversion of a neoplastic cell into a cell (any cell) of the adipocyte lineage, PEP8 is an amino acid or a peptide with between two and six amino acids of general formula AA³³-AA³⁴-AA³⁵-AA³⁶-AA³⁷-AA³⁸; wherein AA³³ is absent or is selected from the group consisting of AA^{I} amino acids at the exception of AA^{VI} amino acids; AA³⁴ is absent or is selected from the group consisting of AA^{III} and AA^{IV} amino acids; wherein AA³⁵ is absent or is selected from the group consisting of AA^{II} amino acids, preferably is S or C; wherein AA³⁶ is absent or is selected from the group consisting of AA^{III} and AA^{IV} amino acids; wherein AA³⁷ is absent or is selected from the group consisting of AA^{II} amino acids, preferably is S or C; wherein AA³⁸ is absent or is selected from the group consisting of AA^{I}; and wherein at least one of AA³³, AA³⁴, AA³⁵, AA³⁶, AA³⁷ or AA³⁸ is not absent. In one particular example, PEP8 is selected from the group consisting of GXGXR, SXAXR, SXGXH, AXGXH, XGXR, EXGXR, RXGXS, AXGXR, SXGXR, XGXL and XKXS.

[1012] In certain embodiments useful for inducing the conversion of a neoplastic cell into a cell (any cell) of the adipocyte lineage, PEP9 is a peptide of general formula AA¹-AA²-AA³-AA⁴-AA⁵-AA⁶-AA⁷-PEP5; wherein PEP5 is a peptide of formula PEP3-AA¹¹-AA¹²; wherein PEP3 is selected from the group consisting of VPT, VPE, APT, TPT, VPA, APV, VPQ and VSQ; wherein AA¹¹ is selected from the group consisting of E, K, Q, R, A, D, G and H, in particular E, K, Q, R, A and D; wherein AA¹² is selected from the group consisting of L, M, T, E, Q and H, in particular selected from the group consisting of L, M and T; wherein AA¹, AA², AA³, AA⁴, and AA⁵ are independently absent or AA^{I} as defined herein; wherein AA⁶ is absent or selected from the group consisting of S, T, C, E, Q, P and R, preferably is selected from the group consisting of C, S and T; wherein AA⁷ is selected from the group consisting of S, T, C, E, Q, P and R, preferably is C or S. In one particular example, PEP9 is selected from the group consisting of KIPKAXXVPTEL, GIPEPXXVPEKM, SIPKAXXVPTEL, HVTKPTXAPTKL, YVPKPXXAPTKL, TVPKPXXAPTQL, AVPKAXXAPTKL, KVGKAXXVPTKL, KASKAXXVPTKL, GSAGPXXTPTKM, AAPASXXVPARL, STPPTXXVPTRL, HVPKPXXAPTKL, RVPSTXXAPVKT, ASAAPXXVPQAL, ASASPXXVSQDL and ASASPXXVPQDL.

[1013] In certain embodiments useful for inducing the conversion of a neoplastic cell into a cell (any cell) of the adipocyte lineage, PEP10 is a peptide of general formula PEP6-AA³³-AA³⁴-AA³⁵-AA³⁶-AA³⁷-AA³⁸; wherein PEP6 is a peptide of formula AA²⁶-AA²⁷-AA²⁸-AA²⁹-PEP4; wherein PEP4 is selected from the group consisting of VVE, TVE, VVR, VVK, VAE, AVS, VVD, VEE, VRS and VKS; wherein AA²⁶ is absent or selected from the group consisting of AA^{III} amino acids, preferably is absent or E; wherein AA²⁷ and AA²⁸ are independently selected from the group consisting of AA^{III} and AA^{V} amino acids, preferably AA²⁷ is selected from the group consisting of D, E, N, G and M, preferably AA²⁸ is selected from the group consisting of M, I and V; wherein AA²⁹ is absent or selected from the group consisting of AA^{II} amino acids, preferably absent or S; wherein AA³³ is absent or is selected from the group consisting of AA^{I} amino acids at the exception of AA^{VI} amino acids; AA³⁴ is absent or is selected from the group consisting of AA^{III} and AA^{IV} amino acids; wherein AA³⁵ is absent or is selected from the group consisting of AA^{II} amino acids, preferably is S or C; wherein AA³⁶ is absent or is selected from the group consisting of AA^{III} and AA^{IV} amino acids; wherein AA³⁷ is absent or is selected from the group consisting of AA^{II} amino acids, preferably is S or C; wherein AA³⁸ is absent or is selected from the group consisting of AA′. In one particular example, PEP10 is selected from the group consisting of DMVVEGXGXR, NMTVESXAXR, EMVVEGXGXR, NMVVRSXGXH, NMVVRSXGXH, NMVVRAXGXH, NMVVKAXGXH, EGMSVAEXGXR, GMAVSEXGXR, GMVVDRXGXS, DMVVEAXGXR, DMVVESXGXR, NMVVRSXGXH, MIVEEXGXL, MIVKSXKXS, MIVKSXKXS and MVVKSXKXS.

[1014] In certain embodiments useful for inducing the conversion of a neoplastic cell into a cell (any cell) of the adipocyte lineage, PEP12 is a peptide of general formula PEP1-AA¹⁷-PEP11; wherein AA¹⁷ is selected from the group consisting of G, A, V, L, I, P, F, M, W, T and S (in particular is selected from the group consisting of M, V and T); wherein PEP1 is SAIS or NAIS.

[1015] In certain embodiments useful for inducing the conversion of a neoplastic cell into a cell (any cell) of the adipocyte lineage, PEP11 is a peptide with 3 amino acids of general formula AA¹⁸-AA¹⁹-AA²⁰; wherein AA¹⁸ is selected from the group consisting of L, V, Q, A and R, in particular is L; wherein AA¹⁹ is selected from the group consisting of F, W, H and Y (in particular is a polar aromatic amino acid such as Y); wherein AA²⁰ is selected from the group consisting of L, F, Y, K, I, V and M, in particular is L or F. In one particular example, PEP11 is LYL or LYF.

[1016] The definitions of “PEP” pairs, quadruplets, hexaplets and heptuplet e.g. PEP1:PEP2, PEP12:PEP2, or PEP7:PEP5:PEP12:LINKER:PEP2:PEP6:PEP8, useful for inducing the conversion of a neoplastic cell into a cell (any cell) of the adipocyte lineage, are as already defined herein to the extent that PEP1 to PEP12 are particularly useful for these applications. For instances:

[1017] In certain embodiments useful for inducing the conversion of a neoplastic cell into a cell (any cell) of the adipocyte lineage, the pair PEP1:PEP2 is SAIS:LKNYQ or NAIS:LKKYR.

[1018] In certain embodiments useful for inducing the conversion of a neoplastic cell into a cell (any cell) of the adipocyte lineage, the pair PEP12:PEP2 is SAIS-AA¹⁷-LYL:LKNYQ or NAIS-AA¹⁷-LYF:LKKYR; wherein AA¹⁷ is selected from the group consisting of G, A, V, L, I, P, F, M, W, T and S (in particular is selected from the group consisting of M, V and T).

[1019] In certain embodiments useful for inducing the conversion of a neoplastic cell into a cell (any cell) of the adipocyte lineage, PEP3 is selected from the group consisting of VPT, VPE, APT, TPT, VPA, APV, VPQ and VSQ; PEP4 is selected from the group consisting of VVE, TVE, VVR, VVK, VAE, AVS, VVD, VEE, VRS and VKS; and wherein the pair PEP3:PEP4 is selected from the group consisting of VPT:VVE, VPE:TVE, APT:VVR, APT:VVK, VPT:VAE, VPT:AVS, TPT:VVD, VPA:VVE, APV:VEE, VPQ:VRS, VSQ:VKS and VPQ:VKS.

[1020] In certain embodiments useful for inducing the conversion of a neoplastic cell into a cell (any cell) of the adipocyte lineage, PEP5 is selected from the group consisting of VPTEL, VPEKM, APTKL, APTQL, VPTKL, TPTKM, VPARL, VPTRL, APVKT, VPQAL, VSQDL and VPQDL; PEP6 is selected from the group consisting of DMVVE, NMTVE, EMVVE, NMVVR, NMVVK, EGMSVAE, GMAVS, GMVVD, DMVVE, MIVEE, MIVRS, MIVKS and MVVKS; and wherein the pair PEP5:PEP6 is selected from the group consisting of VPTEL:DMVVE, VPEKM:NMTVE, VPTEL:EMVVE, APTKL:NMVVR, APTQL:NMVVR, APTKL:NMVVK, VPTKL:EGMSVAE, VPTKL:GMAVS, TPTKM:GMVVD, VPARL:DMVVE, VPTRL:DMVVE, APVKT:MIVEE, VPQAL:MIVRS, VSQDL:MIVKS and VPQDL:MVVKS.

[1021] In certain embodiments useful for inducing the conversion of a neoplastic cell into a cell (any cell) of the adipocyte lineage, PEP7 is selected from the group consisting of KIPKAXX, GIPEPXX, SIPKAXX, HVTKPTX, YVPKPXX, TVPKPXX, AVPKAXX, KVGKAXX, KASKAXX, GSAGPXX, AAPASXX, STPPTXX, HVPKPXX, RVPSTXX, ASAAPXX and ASASPXX; wherein PEP8 is selected from the group consisting of GXGXR, SXAXR, SXGXH, AXGXH, XGXR, EXGXR, RXGXS, AXGXR, SXGXR, XGXL and XKXS; and wherein the pair PEP7:PEP8 is selected from the group consisting of KIPKAXX:GXGXR, GIPEPXX:SXAXR, SIPKAXX:GXGXR, HVTKPTX:SXGXH, YVPKPXX:SXGXH, TVPKPXX:AXGXH, AVPKAXX:AXGXH, KVGKAXX:XGXR, KASKAXX:EXGXR, GSAGPXX:RXGXS, AAPASXX:AXGXR, STPPTXX:SXGXR, HVPKPXX:SXGXH, RVPSTXX:XGXL, ASAAPXX:XKXS and ASASPXX:XKXS.

[1022] In certain embodiments useful for inducing the conversion of a neoplastic cell into a cell (any cell) of the adipocyte lineage, PEP9 is selected from the group consisting of KIPKAXXVPTEL, GIPEPXXVPEKM, SIPKAXXVPTEL, HVTKPTXAPTKL, YVPKPXXAPTKL, TVPKPXXAPTQL, AVPKAXXAPTKL, KVGKAXXVPTKL, KASKAXXVPTKL, GSAGPXXTPTKM, AAPASXXVPARL, STPPTXXVPTRL, HVPKPXXAPTKL, RVPSTXXAPVKT, ASAAPXXVPQAL, ASASPXXVSQDL and ASASPXXVPQDL; PEP10 is selected from the group consisting of DMVVEGXGXR, NMTVESXAXR, EMVVEGXGXR, NMVVRSXGXH, NMVVRSXGXH, NMVVRAXGXH, NMVVKAXGXH, EGMSVAEXGXR, GMAVSEXGXR, GMVVDRXGXS, DMVVEAXGXR, DMVVESXGXR, NMVVRSXGXH, MIVEEXGXL, MIVKSXKXS, MIVKSXKXS and MVVKSXKXS; and wherein the pair PEP9:PEP10 is selected from the group consisting of KIPKAXXVPTEL:DMVVEGXGXR, GIPEPXXVPEKM:NMTVESXAXR, SIPKAXXVPTEL:EMVVEGXGXR, HVTKPTXAPTKL:NMVVRSXGXH, YVPKPXXAPTKL:NMVVRSXGXH, TVPKPXXAPTQL:NMVVRAXGXH, AVPKAXXAPTKL:NMVVKAXGXH, KVGKAXXVPTKL:EGMSVAEXGXR, KASKAXXVPTKL:GMAVSEXGXR, GSAGPXXTPTKM:GMVVDRXGXS, AAPASXXVPARL:DMVVEAXGXR, STPPTXXVPTRL:DMVVESXGXR, HVPKPXXAPTKL:NMVVRSXGXH, RVPSTXXAPVKT:MIVEEXGXL, ASAAPXXVPQAL:MIVRSXKXS, ASASPXXVSQDL:MIVKSXKXS and ASASPXXVPQDL:MVVKSXKXS.

[1023] In certain embodiments useful for inducing the conversion of a neoplastic cell into a cell (any cell) of the adipocyte lineage, PEP5 is selected from the group consisting of VPTEL, VPEKM, APTKL, APTQL, VPTKL, TPTKM, VPARL, VPTRL, APVKT, VPQAL, VSQDL and VPQDL; PEP6 is selected from the group consisting of DMVVE, NMTVE, EMVVE, NMVVR, NMVVK, EGMSVAE, GMAVS, GMVVD, DMVVE, MIVEE, MIVRS, MIVKS and MVVKS; and wherein the pair PEP5:PEP6 is selected from the group consisting of VPTEL:DMVVE, VPEKM:NMTVE, VPTEL:EMVVE, APTKL:NMVVR, APTQL:NMVVR, APTKL:NMVVK, VPTKL:EGMSVAE, VPTKL:GMAVS, TPTKM:GMVVD, VPARL:DMVVE, VPTRL:DMVVE, APVKT:MIVEE, VPQAL:MIVRS, VSQDL:MIVKS and VPQDL:MVVKS; wherein the pair PEP5:PEP6 is not VPTEL:DMVVE when PEP1 is SAIS and PEP2 is LKNYQ; wherein the pair PEP5:PEP6 is not VPTEL:EMVVE when PEP1 is SAIS and PEP2 is LKNYQ; wherein the pair PEP5:PEP6 is not APTQL:NMVVR when PEP1 is NAIS and PEP2 is LKKYR; and wherein the pair PEP5:PEP6 is not APTKL:NMVVR when PEP1 is NAIS and PEP2 is LKKYR.

[1024] In certain embodiments useful for inducing the conversion of a neoplastic cell into a cell (any cell) of the adipocyte lineage, PEP9 is selected from the group consisting of KIPKAXXVPTEL, GIPEPXXVPEKM, SIPKAXXVPTEL, HVTKPTXAPTKL, YVPKPXXAPTKL, TVPKPXXAPTQL, AVPKAXXAPTKL, KVGKAXXVPTKL, KASKAXXVPTKL, GSAGPXXTPTKM, AAPASXXVPARL, STPPTXXVPTRL, HVPKPXXAPTKL, RVPSTXXAPVKT, ASAAPXXVPQAL, ASASPXXVSQDL and ASASPXXVPQDL; PEP10 is selected from the group consisting of DMVVEGXGXR, NMTVESXAXR, EMVVEGXGXR, NMVVRSXGXH, NMVVRSXGXH, NMVVRAXGXH, NMVVKAXGXH, EGMSVAEXGXR, GMAVSEXGXR, GMVVDRXGXS, DMVVEAXGXR, DMVVESXGXR, NMVVRSXGXH, MIVEEXGXL, MIVKSXKXS, MIVKSXKXS and MVVKSXKXS; and wherein the pair PEP9:PEP10 is selected from the group consisting of KIPKAXXVPTEL:DMVVEGXGXR, GIPEPXXVPEKM:NMTVESXAXR, SIPKAXXVPTEL:EMVVEGXGXR, HVTKPTXAPTKL:NMVVRSXGXH, YVPKPXXAPTKL:NMVVRSXGXH, TVPKPXXAPTQL:NMVVRAXGXH, AVPKAXXAPTKL:NMVVKAXGXH, KVGKAXXVPTKL:EGMSVAEXGXR, KASKAXXVPTKL:GMAVSEXGXR, GSAGPXXTPTKM:GMVVDRXGXS, AAPASXXVPARL:DMVVEAXGXR, STPPTXXVPTRL:DMVVESXGXR, HVPKPXXAPTKL:NMVVRSXGXH, RVPSTXXAPVKT:MIVEEXGXL, ASAAPXXVPQAL:MIVRSXKXS, ASASPXXVSQDL:MIVKSXKXS and ASASPXXVPQDL:MVVKSXKXS; wherein the pair PEP9:PEP10 is not KIPKAXXVPTEL:DMVVEGXGXR when PEP1 is SAIS and PEP2 is LKNYQ; wherein the pair PEP9:PEP10 is not SIPKAXXVPTEL:EMVVEGXGXR when PEP1 is SAIS and PEP2 is LKNYQ; wherein the pair PEP9:PEP10 is not HVTKPTXAPTKL:NMVVRSXGXH when PEP1 is NAIS and PEP2 is LKKYR; wherein the pair PEP9:PEP10 is not YVPKPXXAPTKL:NMVVRSXGXH when PEP1 is NAIS and PEP2 is LKKYR; wherein the pair PEP9:PEP10 is not TVPKPXXAPTQL:NMVVRAXGXH when PEP1 is NAIS and PEP2 is LKKYR; and wherein the pair PEP9:PEP10 is not HVPKPXXAPTKL:NMVVRSXGXH when PEP1 is NAIS and PEP2 is LKKYR.

[1025] In certain embodiments useful for inducing the conversion of a neoplastic cell into a cell (any cell) of the adipocyte lineage, PEP1 is SAIS or NAIS; PEP11 is LYL or LYF; and the pair PEP1:PEP11 is SAIS:LYL or NAIS:LYF.

[1026] In one aspect, the present disclosure provides a GFR-binding compound, wherein said GFR-binding compound is a peptide, a variant or analog thereof, or a peptidomimetic as defined herein, with between 20 and 60 (in particular between 20 and 50, and more particularly, between 20 and 45) amino acids, comprising a peptide with four amino acids (PEP1) or a peptide with eight amino acids (PEP12), a peptide with five amino acids (PEP2), and optionally a pair of peptides selected form the group consisting of PEP3:PEP4, PEP3:PEP6, PEP3:PEP10, PEP5:PEP4, PEP9:PEP4, PEP5:PEP6, PEP5:PEP10, PEP9:PEP6 and PEP9:PEP10; wherein said GFR-binding compound does not comprise the pair of peptides VPTEL:DMVVE when PEP1 is SAIS and PEP2 is LKNYQ; wherein said GFR-binding compound does not comprise the pair of peptides VPTEL:EMVVE when PEP1 is SAIS and PEP2 is LKNYQ; wherein said GFR-binding compound does not comprise the pair of peptides APTQL:NMVVR when PEP1 is NAIS and PEP2 is LKKYR; wherein said GFR-binding compound does not comprise the pair of peptides APTKL:NMVVR when PEP1 is NAIS and PEP2 is LKKYR; and, optionally, wherein the RMSD is 2.45 Å or less.

[1027] In one aspect, the present disclosure provides a GFR-binding compound, wherein said GFR-binding compound is a peptide, a variant or analog thereof, or a peptidomimetic as defined herein, with between 20 and 60 (in particular between 20 and 50, and more particularly, between 20 and 45) amino acids, comprising a peptide with four amino acids (PEP1) or a peptide with eight amino acids (PEP12), a peptide with five amino acids (PEP2), and optionally a pair of peptides selected form the group consisting of PEP3:PEP4, PEP3:PEP6, PEP3:PEP10, PEP5:PEP4, PEP9:PEP4, PEP5:PEP6, PEP5:PEP10, PEP9:PEP6 and PEP9:PEP10; wherein said GFR-binding compound does not comprise the pair of peptides KIPKAXXVPTEL:DMVVEGXGXR when PEP1 is SAIS and PEP2 is LKNYQ; wherein said GFR-binding compound does not comprise the pair of peptides SIPKAXXVPTEL:EMVVEGXGXR when PEP1 is SAIS and PEP2 is LKNYQ; wherein said GFR-binding compound does not comprise the pair of peptides HVTKPTXAPTKL:NMVVRSXGXH when PEP1 is NAIS and PEP2 is LKKYR; wherein said GFR-binding compound does not comprise the pair of peptides YVPKPXXAPTKL:NMVVRSXGXH when PEP1 is NAIS and PEP2 is LKKYR; wherein said GFR-binding compound does not comprise the pair of peptides TVPKPXXAPTQL:NMVVRAXGXH when PEP1 is NAIS and PEP2 is LKKYR; wherein said GFR-binding compound does not comprise the pair of peptides HVPKPXXAPTKL:NMVVRSXGXH when PEP1 is NAIS and PEP2 is LKKYR; and, optionally, wherein the RMSD is 2.45 Å or less.

[1028] In certain embodiments useful for inducing the conversion of a neoplastic cell into a cell (any cell) of the adipocyte lineage, said GFR-binding compound is a synthetic molecule as defined herein in the definition section.

[1029] In certain embodiments useful for inducing the conversion of a neoplastic cell into a cell (any cell) of the adipocyte lineage, said GFR-binding compound is a synthetic peptide, or a variant or analog thereof, or a peptidomimetic.

[1030] II.4. Interactions

[1031] GFR-binding compounds may form at least one intramolecular non-covalent interaction. Such interactions may be one of electrostatic interactions, π-interactions, van der Waals forces, hydrophobic interactions or any combinations thereof. Such interactions may be formed between 2 or more amino acids' side chains, between 2 or more amino acids' backbones or between amino acids' side chains and backbones. Such interactions may increase the stability of the GFR-binding compounds in vitro and/or in vivo thus reducing or preventing physiological degradation. In one example, GFR-binding compounds may form at least one, preferably more than one, of the following intramolecular non-covalent interactions: AA²⁰///AA²⁰⁶, AA¹⁹///AA²⁰⁷, AA¹⁸///AA²¹, AA¹⁷///AA²², AA¹⁶///AA²³, AA¹⁵///AA²⁴, AA¹⁵///AA²⁵, wherein /// represents a non-covalent interaction.

### III. Bioactive Carriers

[1032] The present invention achieves its intended therapeutic action(s) i.e. the treatment of a neoplastic disease via extracellular, non-mutagenic, recoding or conversion of neoplastic cells, by functional combination (or association) of at least two bioactive substances, namely, at least one GFR-binding compound (e.g. non-cyclic or cyclic) as described herein and a bioactive carrier.

[1033] In one example, said GFR-binding compound and said bioactive carrier are thus operably associated, combined, linked or connected as defined herein and thus form a pharmaceutical association or combination for uses and methods of the present invention.

[1034] In one aspect, the present disclosure provides a bioactive carrier, as part of a pharmaceutical association as defined herein, as an active principle for use in methods and uses described herein.

[1035] Suitable bioactive carriers for implementing embodiments of the invention include any substance (i) which can interact and/or be compatible with a biological system and (ii) participate to the intended biological activity of a treatment as described in the present application.

[1036] As may be used herein, the term “bioactive carrier”, “biocompatible carrier”, “bioactive material”, “biocompatible material”, “bioactive substance”, “bio-substance”, “biocompatible substance”, are used interchangeably.

[1037] A suitable bioactive carrier is compatible with living cells, tissues, organs or systems posing little to no risk of injury, toxicity or rejection by the immune system. Bioactive carriers suitable for implementing embodiments of the present invention include, but are not limited to, (a) a biopolymer such as (a1) collagen, (a2) fibrin; (b) a synthetic polymer such as (b1) ultra-high molecular weight polyethylene (UHMWPE), (b2) polyurethane (PE), (b3) polyurethane (PU), (b4) polytetrafuoroethylene (PTFE), (b5) polyacetal (PA), (b6) polymethylmethacrylate (PMMA), (b7) polyethylene terepthalate (PET), (b8) silicone rubber (SR), (b9) polyetheretherketone (PEEK), (b10) poly(lactic acid) (PLA), (b11) polysulfone (PS), (b12) PLLA, (b13) PLGA or (b14) PLDA; (c) metals and metal oxides such as (c1) gold and gold alloys, (c2) silver and silver alloys, (c3) platinum and platinum alloys, (c4) tantalum, (c5) Ti6Al4V, (c6) 316L stainless steel, (c7) Co—Cr Alloys, (c8) titanium alloys such as such as □-type, β-type, □+□-type Ti alloy, Ti—Nb alloys such as Ti29Nb13Ta4.6Zr or Ti35Nb4Sn); (d) metallic glasses; (e) amorphous alloys such as Zr-based alloys; (f) porous metals such as the ones reported in Ryan et al., 2006, Biomaterials, 27, 2651; Lopez-Heredia et al. 2008, Biomaterials, 29, 2608; Ryan et al., 2008, Biomaterials, 29, 3625; Li et al., 2007, Biomaterials, 28, 2810; or Hollander et al., 2006, Biomaterials, 27, 955; all being incorporated herein in their entirety; (g) gel or solid ceramics such as (g1) alumina, (g2) zirconia, (g3) carbon, (g4) titania, (g5) bioglass, or (g6) hydroxyapatite (HA); (h) composites such as (h1) silica/SR, (h2) CF/UHMWPE, (h3) CF/PTFE, (h4) HA/PE, (h5) CF/epoxy, (h6) CF/PEEK, (h7) CF/C or (h8) Al₂O₃/PTFE; (i) hydrogels such as (i1) polyisocyanopeptide hydrogels such as oligo(ethylene)glycol polyisocyanopeptides as described, for instance, in Van Buul, et al.; Chem. Sci. 4, 2357-2363 (2013), incorporated herein by reference in its entirety, (i2) polysaccharides such as alginates, chitosans, chitins, guar gums, pectins, gellan gums, heparins, carrageenans, hyaluronans, starches, agars, xanthan gums, methylcellulose, carboxymethylcellulose, hydroxypropyl methyl cellulose, (i3) polyglycols such as polyethyleneglycol or polypropyleneglycol, (i4) polyvinylpyrrolidone, (i5) poly(vinylalcohol), (i6) polyacrylic acids, (i7) glycerophosphates, (i8) 2-acrylamido-2-methylpropanesulfonic acid, (i9) polyphosphazenes; (j) other suitable materials such as demineralized bone matrix; and any combinations thereof.

[1038] Suitable sources of bioactive carriers for implementing embodiments of the present invention include, but are not limited to, autographs, allographs, xenographs, plants, solutions, excipients, ceramics, metals, metal alloys, organic and inorganic polymers, bioglasses, carbon-containing structures, or combination thereof.

[1039] Particularly suitable as bioactive carriers for implementing embodiments of the present invention include bioactive carriers comprising at least one naturally occurring hydroxyl group on at least one surface thereof and bioactive carriers which do not naturally comprise at least one hydroxyl group on a surface thereof but which have been modified using conventional surface treatment techniques such that at least one hydroxyl group is present on a surface of the bioactive carrier. In one example, said hydroxyl group is an available hydroxyl group i.e. it is not prevented from interacting and/or reacting with a compound of the present disclosure. Suitable as bioactive carriers naturally containing hydroxyl groups on a surface thereof for implementing embodiments of the invention specifically include metal oxides such as titanium oxides and non-metal oxides such ceramics. Also suitable as bioactive carriers for implementing embodiments of the invention include bioactive carriers comprising at least one naturally occurring carboxylate group (—COOH) or amine group (—NH₂) on at least one of a surface thereof and bioactive carriers which do not naturally comprise at least one carboxylate group (—COOH) or amine group (—NH₂) onto a surface thereof but which have been modified using conventional surface treatment techniques such that at least one carboxylate group (—COOH) or amine group (—NH₂) is present on a surface of the bioactive carrier.

[1040] In one example, said bioactive carrier includes a biomaterial. Suitable biomaterials for implementing certain embodiments of the present disclosure may be derived from nature or synthesized in the laboratory using a variety of chemical approaches utilizing metallic components, polymers, ceramics or composite materials. They are often used and/or adapted for a medical application, and thus comprise whole or part of a living structure or biomedical device. Suitable biomaterials for implementing certain embodiments of the present disclosure are commonly used in joint replacements, bone plates, bone cement, artificial ligaments and tendons, dental implants for tooth fixation, blood vessel prostheses, heart valves, skin repair devices (artificial tissue), cochlear replacements, contact lenses, breast implants, drug delivery mechanisms, sustainable materials, vascular grafts, stents, nerve conduits. Particularly suitable biomaterials for implementing certain embodiments of the present disclosure such as metals and alloys (pages 94-95), ceramics (pages 95-97), polymeric biomaterials (pages 97-98) and biocomposite materials (pages 98-99) are described in Nitesh et al., International Journal of Emerging Technology and Advanced Engineering, ISSN 2250-2459, Volume 2, Issue 4, 2012, which is herein incorporated by reference in its entirety.

[1041] In one particular example, said bioactive carrier is a biomaterial.

[1042] In certain embodiments, particularly suitable bioactive carriers are selected from the group consisting of bioinert biomaterials, bioactive biomaterials and bioresorbable biomaterials.

[1043] The nature of the biomaterial is an important parameter. Particularly good results have been obtained using bioactive carriers composed mostly with the main material component of the tissue where the cells need to be recoded. For example, it was discovered that particularly good results may be obtained when a solid ceramic component (granulated ceramic powder or ceramic scaffolds) or a gel ceramic component is used in combination of a GFR-binding peptide of the present disclosure to recode osteosarcoma cells and thus protect from bone cancers. For example, it was also discovered that particularly good results may be obtained when collagen, in particular collagen types I, II, III and XI, is used in combination of a GFR-binding peptide of the present disclosure to recode chondrosarcomas and thus protect from cartilage cancers. For example, it was also discovered that particularly good results may be obtained when collagen, in particular collagen types I and III, or a biodegradable hydrogel is used in combination with a GFR-binding peptide of the present disclosure to recode disfunctioning muscle, skin, tendon and ligament cells. For example, it was also discovered that particularly good results may be obtained when a collagen or a biodegradable hydrogel is used in combination with a GFR-binding peptide of the present disclosure to recode cells and/or restore functions of vascular, neuron, eye retina, renal, wound healing, hair, fertility and reproduction, lung, and adipose tissues.

[1044] Bioinert biomaterials: As used herein, unless indicated otherwise or contradictory in context, the term “bioinert biomaterials” refers to any material that once placed in the human body has minimal interaction with its surrounding tissue. Examples of these are stainless steel, titanium, alumina, partially stabilised zirconia, and ultra-high molecular weight polyethylene. Generally a fibrous capsule might form around bioinert implants hence its biofunctionality relies on tissue integration through the implant.

[1045] Bioactive biomaterial: As used herein, unless indicated otherwise or contradictory in context, the term “bioactive biomaterial” refers to a material which, upon being placed within the human body, interacts with the surrounding bone and in some cases, even soft tissue. This occurs through a time-dependent kinetic modification of the surface, triggered by their implantation within the living bone. An ion-exchange reaction between the bioactive implant and surrounding body fluids, results in the formation of a biologically active carbonate apatite (CHAp) layer on the implant that is chemically and crystallographically equivalent to the mineral phase in bone. Examples of these materials are synthetic hydroxyapatite [Ca₁₀(PO₄)₆(OH)₂], glass ceramic A-W and Bioglass®.

[1046] Bioresorbable Biomaterials: As used herein, unless indicated otherwise or contradictory in context, the term “bioresorbable biomaterials” refers to a material which, upon placement within the human body, starts to dissolve (resorbed) and slowly replaced by advancing tissue (such as bone). Examples of bioresorbable materials include, but are not limited to, tricalcium phosphate [Ca₃(PO₄)₂], polylactic-polyglycolic acid copolymers, calcium oxide, calcium carbonate and gypsum.

[1047] Therefore, no particular limitation should be ascribed to the substance, material or molecule suitable as being bioactive carriers for implementing embodiments of the present invention insofar as said substance, material or molecule is (a) biocompatible as defined herein and (b) combinable or associable with a GFR-binding compound as defined herein. In one preferred example, said bioactive carrier has a stiffness of at least 5 kPa, more preferably at least 35 kPa and preferably not more than 3 or 5 GPa as measured using conventional Dynamic Mechanical Analysis such as described in details in Gong J P et al., Double-network hydrogels with extremely high mechanical strength, Adv Mater 2003, 15(14), 1155e8, which is incorporated herein by reference.

[1048] In one particular example, a biomaterial as defined herein for use in neuron-related applications has a stiffness comprised between about 0.01 kPa and about 3 kPa, preferably between about 0.01 kPa and about 1 kPa. In one particular example, a biomaterial as defined herein for use in muscle, cartilage and tendon/ligament-related applications has a stiffness comprised between about 3 kPa and about 200 kPa, preferably between about 10 kPa and about 30 kPa. In one particular example, a biomaterial as defined herein for use in bone-related applications has a stiffness comprised between about 30 kPa and about 2 GPa, preferably between about 70 kPa and about 200 kPa. In one particular example, a biomaterial as defined herein for use in hair-related applications has a stiffness comprised between about 0.01 kPa and about 200 kPa, preferably between about 3 kPa and about 70 kPa. In one particular example, a biomaterial as defined herein for use in endothelization-related applications has a stiffness comprised between about 0.01 kPa and about 500 kPa. In one particular example, a biomaterial as defined herein for use in angiogenesis-related applications has a stiffness comprised between about 0.5 kPa and about 100 kPa. In one particular example, a biomaterial as defined herein for use in wound healing and skin-related applications has a stiffness comprised between about 0.01 kPa and about 70 kPa.

[1049] Available hydroxyl groups: As used herein, unless indicated otherwise or contradictory in context, the term “free hydroxyl” or “available hydroxyl” means an hydroxyl group, which may be —OH or a radical (—O.) or an anion (—O⁻) fully or partially ionised, which is able to/free to act as a nucleophile in a reaction with an electrophile such as compound (A) or compound (B) defined below.

[1050] Available hydroxyl-containing surface: As used herein, unless indicated otherwise or contradictory in context, the term “available hydroxyl-containing surface” or “free hydroxyl-containing surface” means a surface containing at least one free or available hydroxyl group as defined herein.

[1051] Ceramics: As used herein, unless indicated otherwise or contradictory in context, the term “ceramic” refers to an inorganic material with a high melting point, above 1000° C. Most typically, materials referred to as “ceramics” are obtained by a process in which raw material solid particles are heated in order to sinter them. Materials referred to as “ceramics” may broadly be split into two groups, these being “oxide ceramics” and “non-oxide ceramics”. “Oxide ceramics” include, but are not limited to, alkaline earth oxides such as MgO and BaO, Al₂O₃ and aluminates, TiO₂ and titanates, ZrO₂ and zirconates, silicates such as clays and clay-derived materials. Since the term “ceramics” may encompass crystalline, partially amorphous and fully amorphous materials, the term “oxide ceramics” may also be interpreted as covering fully amorphous silicate glasses. “Non-oxide ceramics” include, but are not limited to, carbides and nitrides, and also borides and silicides, for example silicon carbide and silicon nitride, and also metal carbides and nitrides. In one particular example, solid ceramics e.g. in granulated powder or as a scaffold, is used as a bioactive carrier in the meaning of the present disclosure in bone-related applications. In one particular example, gel ceramics is used as a bioactive carrier in the meaning of the present disclosure in bone-related applications.

[1052] Metal oxides: As used herein, unless indicated otherwise or contradictory in context, the term “metal oxide” means a chemical compound that contains at least one oxygen atom and one other element in its chemical formula. Metal oxides typically contain an anion of oxygen in the oxidation state of −2. They can be obtained by hydrolysis or air/oxygen oxidation. Examples of such metal oxides are titanium oxides (e.g. TiO, Ti₂O₃, TiO₂), silicon oxide (SiO₂), aluminum oxide (Al₂O₃), iron (II, III) oxides such as Fe₂O₃, and zinc oxide (ZnO).

[1053] Biopolymer: As used herein, unless indicated otherwise or contradictory in context, the term “biopolymer” refers to a polymer produced by living organisms and includes, but is not limited to, polypeptides and proteins (such as collagen and fibrin), polysaccharides (such as cellulose, starch, chitin and chitosan), nucleic acids (such as DNA and RNA), and hydrides thereof.

[1054] Hydrogel: As used herein, unless indicated otherwise or contradictory in context, the term “hydrogel” refers to “Hydrogel” refers to a class of polymeric materials which are swollen in an aqueous medium, but which do not dissolve in water. Hydrogels are highly absorbent (they can contain over 99% water) natural or synthetic polymers. Hydrogels also possess a degree of flexibility very similar to natural tissue, due to their significant water content. U.S. Pat. No. 6,475,516, for example, provides hydrogels being covalently bound to the surface of an in-dwelling medical device such as an implant, which may be functionalized with a GFR-binding compound of the present disclosure using, for instance, a process as described herein. In one particular example, biodegradable hydrogels are used as bioactive carriers in the meaning of the present disclosure.

[1055] Collagen: As used herein, unless indicated otherwise or contradictory in context, the term “collagen” refers to the main structural protein of the various connective tissues in animals which is mostly found in fibrous tissues such as tendons, ligaments and skin, and is also abundant in corneas, cartilage, bones, blood vessels, the gut, and intervertebral discs. Collagen is typically composed of a triple helix and generally contains high hydroxyproline content. The most common motifs in its amino acid sequence glycine-proline-X and glycine-X-hydroxyproline, where X is any amino acid other than glycine, proline or hydroxyproline. 28 types of collagen have been identified and described in the literature, which are all presently contemplated to be suitable for implementing embodiments of the invention. The five most common types are: Collagen I which may be found in skin, tendon, vascular ligature, organs, bone (main component of the organic part of bone); Collagen II which may be found in cartilage (main component of cartilage); Collagen III which may be found in reticulate (main component of reticular fibers); Collagen IV which may be found in the basal lamina, the epithelium-secreted layer of the basement membrane; Collagen V which may be found on cell surfaces, hair and placenta. For example, in certain embodiments, suitable collagens for implementing embodiments of the present invention particularly include collagen type-I and type-IV. In one particular example, collagen, in particular collagen types I, II, III and XI, is used as a bioactive carrier in the meaning of the present disclosure in cartilage-related applications. In one particular example, collagen, in particular collagen types I and III, is used as a bioactive carrier in the meaning of the present disclosure in muscle-related applications, skin-related applications, and T/L-related applications. In one particular example, any type of collagen is used as a bioactive carrier in the meaning of the present disclosure in vascular, neuron, eye retina, renal, wound healing, hair, fertility and reproduction, lung, adipose-related applications.

[1056] In certain embodiments, said association, combination, linkage or connection between said GFR-binding compound and a bioactive carrier may occur via a bioactive carrier-affinity-containing group as defined herein.

### IV. Bioactive Carrier-Affinity-Containing Group

[1057] In certain embodiments, said GFR-binding compound as already defined herein is modified or functionalised with at least one bioactive carrier-affinity-containing group. Said at least one bioactive carrier-affinity-containing group provides said GFR-binding compound with an ability to, covalently or non-covalently, interact with, or be connected to, a bioactive carrier as defined herein (in particular, a biomaterial as defined herein).

[1058] In such embodiments where affinity is required via covalent interaction or binding, said bioactive carrier-affinity-containing group may be a thiol (SH)-containing group or a cysteine-containing group, in particular, a thiol (SH)-containing peptide or a cysteine-containing peptide. In such embodiments where affinity is required via covalent interaction or binding, said bioactive carrier-affinity-containing group may particularly be a cysteine.

[1059] In such embodiments where affinity is required via non-covalent interaction or binding, said bioactive carrier-affinity-containing group may comprise (or be) a peptide group such as any one of the peptide groups disclosed in US patent application No. 2008/0268015 A1, which is hereby incorporated by reference in its entirety. In particular, peptides containing amino acid sequences rich in large aromatic amino acid residues (aromatic amino acid-containing peptides or peptidomimetics) that include one or more of Phe, Trp, Tyr such as sequence no: 1 to 45 described in US 2008/0268015 A1 are suitable as a biomaterial-affinity-containing fragment for implementing embodiments of the present invention. Said fragment may also be a peptide fragment such as any one of the peptide fragments disclosed in U.S. Pat. No. 6,818,620 B2, which is hereby incorporated by reference in its entirety. In particular, peptides of sequence no: 1 to 7 described in U.S. Pat. No. 6,818,620 B2 are suitable as a biomaterial-affinity-containing fragment for implementing embodiments of the present invention. Thus, said biomaterial affinity-containing group may be a peptide with 3 to 25 amino acids comprising one or more of Phe, Trp or Tyr.

[1060] In one particular example, said bioactive carrier-affinity-containing group is a bioactive carrier high-affinity-containing group such as a biomaterial high-affinity-containing group.

[1061] In certain embodiments, said bioactive carrier-affinity-containing group has some affinity (preferably high affinity) with a given bioactive carrier (in particular, a biomaterial) such as collagen, apatite, titanium or any of those listed in e.g. US patent application No. 2008/0268015 A1, which is incorporated herein by reference. For instance, a group having some affinity with a biomaterial is any group capable to non-covalently interact/bind to a biomaterial with an affinity/specificity selected from at least 10%, at least 20%, at least 30%, at least 40%, at least 50%, at least 60%, at least 70%, at least 80%, at least 90%, at least 100%, at least 200%, at least 300%, at least 400%, at least 500%, or a higher percentage, with respect to an affinity where said group binds to an appropriate control such as, for example, a different material or surface, or a protein typically used for such comparisons such as bovine serum albumin. In one example, a biomaterial-affinity-containing group has a binding specificity that is characterized by a relative binding affinity as measured by an EC50 of 10 □M or less, and in certain emdiments, less than 1 □M. In certain embodiments, a relative affinity comprised between 1 pM and 100 □M, between 1 pM and 10 □M, or between 1 pM and 1 □M is particularly suitable. The EC50 is determined using any number of methods known in the art. In this case, the EC50 represents the concentration of fragment producing 50% of the maximal binding observed for that fragment in the assay.

[1062] In one particular example, said bioactive carrier-affinity-containing group is selected from the group consisting of GTPGP, which may preferably non-covalently interact with a bioactive carrier such as an apatite, and WWFWG, which may preferably non-covalently interact with a bioactive carrier such as a collagen.

[1063] In one particular example, said bioactive carrier-affinity-containing group is covalently or non-covalently (in particular, covalently) attached at an end (or extremity) of said GFR-binding compound.

### V. Modified Non-Cyclic GFR-Binding Compound

[1064] Thus, in one aspect, the present disclosure provides a pharmaceutical association or combination comprising a modified GFR-binding compound and a bioactive carrier, wherein said modified GFR-binding compound comprises a GFR-binding compound as defined in the present disclosure and a bioactive carrier-affinity-containing group also as defined herein.

[1065] For example, in certain embodiments, said modified GFR-binding compound comprises a GFR-binding compound as defined in the present disclosure and a bioactive carrier-affinity-containing group; wherein said bioactive carrier-affinity-containing group is selected from the group consisting of a thiol-containing group (in particular, a thiol-containing peptide), a cysteine-containing group (in particular, a cysteine-containing peptide and more particularly, a cysteine), and an aromatic amino acid-containing peptide or peptidomimetic.

[1066] For example, in certain embodiments, said modified GFR-binding compound comprises a GFR-binding compound and a bioactive carrier-affinity-containing group; wherein said GFR-binding compound is a peptide, a variant or analog thereof, or a peptidomimetic as defined herein, with (comprising, or exclusively consisting of, or constituted of) between 20 and 60 (in particular between 20 and 50, and more particularly, between 20 and 45) amino acids, comprising a peptide with four amino acids (PEP1) selected from the group consisting of SAIS, SSLS, NAIS, SATS, SPIS, EPIS, SPIN, KPLS, EPLP, EPLT, SNIT, RSVK and RPVQ; and a peptide with five amino acids (PEP2) selected from the group consisting of LKNYQ, LKVYP, LKKYR, LRKHR, LKYHY, KFKYE, YGKIP, YKQYE, DHHKD, EQLSN, IGEMS, LGEMS, KEVQV and KKATV; wherein said bioactive carrier-affinity-containing group is selected from the group consisting of a thiol-containing group (in particular, a thiol-containing peptide), a cysteine-containing group (in particular, a cysteine-containing peptide and more particularly, a cysteine), and an aromatic amino acid-containing peptide or peptidomimetic.

[1067] For example, in certain embodiments, said modified GFR-binding compound comprises a GFR-binding compound and a bioactive carrier-affinity-containing group; wherein said GFR-binding compound is a peptide, a variant or analog thereof, or a peptidomimetic as defined herein, with (comprising, or exclusively consisting of, or constituted of) between 20 and 60 (in particular between 20 and 50, and more particularly, between 20 and 45) amino acids, comprising a peptide with height amino acids of general formula (PEP12): PEP1-AA¹⁷-PEP11, and a peptide with five amino acids (PEP2) selected from the group consisting of LKNYQ, LKVYP, LKKYR, LRKHR, LKYHY, KFKYE, YGKIP, YKQYE, DHHKD, EQLSN, IGEMS, LGEMS, KEVQV and KKATV; wherein PEP1 is a peptide with four amino acids selected from the group consisting of SAIS, SSLS, NAIS, SATS, SPIS, EPIS, SPIN, KPLS, EPLP, EPLT, SNIT, RSVK and RPVQ; wherein PEP11 is a peptide with 3 amino acids of formula AA¹⁸-AA¹⁹-AA²⁰; wherein AA¹⁷ is selected from the group consisting of G, A, V, L, I, P, F, M, W, T and S (in particular is selected from the group consisting of M, I, L, V and T); wherein AA¹⁸ is selected from the group consisting of L, V, Q, A and R; wherein AA¹⁹ is selected from the group consisting of F, W, H and Y (in particular is an aromatic, polar amino acid such as Y); wherein AA²⁰ is selected from the group consisting of L, F, Y, K, I, V and M; wherein said bioactive carrier-affinity-containing group is selected from the group consisting of a thiol-containing group (in particular, a thiol-containing peptide), a cysteine-containing group (in particular, a cysteine-containing peptide and more particularly, a cysteine), and an aromatic amino acid-containing peptide or peptidomimetic.

[1068] For example, in certain embodiments, said modified GFR-binding compound comprises a GFR-binding compound and a bioactive carrier-affinity-containing group; wherein said GFR-binding compound is a peptide, a variant or analog thereof, or a peptidomimetic as defined herein, with (comprising, or exclusively consisting of, or constituted of) between 20 and 60 (in particular between 20 and 50, and more particularly, between 20 and 45) amino acids, having the following general formula (Ia) (hereinafter may also be referred to as compound (Ia) or peptide (Ia)):

PEP(A)-LINKER-PEP(B) (Ia)

wherein one end of LINKER interacts covalently with one end of PEP(A); wherein another end of LINKER interacts covalently with one end of PEP(B); wherein PEP(A) comprises PEP1 or PEP12; wherein PEP(B) comprises PEP2; wherein LINKER is a linear or branched organic divalent radical, moiety or compound having a molecular weight (Mw) comprised between about 28 and about 2,000 Da, in particular, between about 300 and about 1000 Da; wherein said bioactive carrier-affinity-containing group is covalently or non-covalently attached to PEP(A) or PEP(B); wherein said bioactive carrier-affinity-containing group is selected from the group consisting of a thiol-containing group (in particular, a thiol-containing peptide), a cysteine-containing group (in particular, a cysteine-containing peptide and more particularly, a cysteine), and an aromatic amino acid-containing peptide or peptidomimetic.

[1069] For example, in certain embodiments, said modified GFR-binding compound comprises a GFR-binding compound and a bioactive carrier-affinity-containing group; wherein said GFR-binding compound is a peptide, a variant or analog thereof, or a peptidomimetic as defined herein, with (comprising, or exclusively consisting of, or constituted of) between 20 and 60 (in particular between 20 and 50, and more particularly, between 20 and 45) amino acids, having the following general formula (IIa) (hereinafter may also be referred to as compound (IIa) or peptide (IIa)):

PEP(C)-PEP12-LINKER-PEP2-PEP(D) (IIa)

wherein LINKER is a linear or branched organic divalent radical, moiety or compound having a molecular weight (Mw) comprised between about 28 and about 2,000 Da, in particular, between about 300 and about 1000 Da; wherein PEP12 is a peptide with 8 amino acids of formula PEP1-AA¹⁷-PEP11; wherein AA¹⁷, PEP1, PEP2, PEP12 and PEP11 are as already defined herein; wherein one end of PEP(C) interacts covalently with PEP12 via AA¹³; wherein one end of PEP(D) interacts covalently with PEP2 via AA²⁵; wherein one end of LINKER interacts covalently with one end of PEP12 via AA²⁰; wherein another end of LINKER interacts covalently with PEP2 via AA²¹; wherein AA¹³ and AA²¹ may be both N-terminal amino acids or both C-terminal amino acids; wherein AA²⁵ and AA²⁰ may be both N-terminal amino acids or both C-terminal amino acids; wherein PEP(C) is a peptide with at least 5 amino acids, in particular a peptide with between 5 and 12 amino acids; wherein PEP(D) is a peptide with at least 5 amino acids, in particular a peptide with between 5 and 12 amino acids; wherein said bioactive carrier-affinity-containing group is covalently or non-covalently attached to PEP(C) or PEP(D), in particular is covalently or non-covalently attached to PEP3 through AA⁸, PEP4 through AA³², PEP5 through AA⁸, PEP⁶ through AA³², PEP9 through AA¹, AA², AA³, AA⁴, AA⁵ or AA⁶, or PEP10 through AA³³, AA³⁴, AA³⁵, AA³⁶, AA³⁷ or AA³⁸; wherein said bioactive carrier-affinity-containing group is selected from the group consisting of a thiol-containing group (in particular, a thiol-containing peptide), a cysteine-containing group (in particular, a cysteine-containing peptide and more particularly, a cysteine), and an aromatic amino acid-containing peptide or peptidomimetic.

[1070] For example, in certain embodiments, said modified GFR-binding compound comprises a GFR-binding compound and a bioactive carrier-affinity-containing group; wherein said GFR-binding compound is a peptide, a variant or analog thereof, or a peptidomimetic as defined herein, with between 20 and 60 (in particular between 20 and 50, and more particularly, between 20 and 45) amino acids, having the following general formula (IIIa) (hereinafter may also be referred to as compound (IIIa) or peptide (IIIa)):

PEP7-PEP5-PEP12-LINKER-PEP2-PEP6-PEP8 (IIIa)

wherein LINKER is a linear or branched organic divalent radical, moiety or compound having a molecular weight (Mw) comprised between about 28 and about 2,000 Da, in particular, between about 300 and about 1000 Da; wherein PEP12 is a peptide with 8 amino acids of formula PEP1-AA¹⁷-PEP11 as defined herein; wherein PEP2 is a peptide with five amino acids as already defined herein; wherein PEP5 is a peptide with five amino acids as already defined herein; wherein PEP6 is a peptide with between five and seven amino acids as already defined herein; wherein PEP7 an amino acid or a peptide with between two and seven amino acids as already defined herein; wherein PEP8 an amino acid or a peptide with between two and six amino acids as already defined herein; wherein one end of LINKER interacts covalently with one end of PEP12 via AA²⁰; wherein another end of LINKER interacts covalently with one end of PEP2 via AA²¹; wherein one end of PEP5 interacts covalently with another end of PEP12 via AA¹²; wherein another end of PEP5 interacts covalently with one end of PEP7 via AA⁸; wherein one end of PEP6 interacts covalently with another end of PEP2 via AA²⁶; wherein another end of PEP6 interacts covalently with one end of PEP8 via AA³²; wherein said bioactive carrier-affinity-containing group is selected from the group consisting of a thiol-containing group (in particular, a thiol-containing peptide), a cysteine-containing group (in particular, a cysteine-containing peptide and more particularly, a cysteine), and an aromatic amino acid-containing peptide or peptidomimetic.

[1071] For example, in certain embodiments, said modified GFR-binding compound comprises a GFR-binding compound and a bioactive carrier-affinity-containing group; wherein said GFR-binding compound is a peptide, a variant or analog thereof, or a peptidomimetic as defined herein, with between 20 and 60 (in particular between 20 and 50, and more particularly, between 20 and 45) amino acids, having the following general formula (IVa) (hereinafter may also be referred to as compound (IVa) or peptide (IVa)):

AA¹-AA²-AA³-AA⁴-AA⁵-AA⁶-AA⁷-AA⁸-AA⁹-AA¹⁰-AA¹¹-AA¹²-AA¹³-AA¹⁴-AA¹⁵-AA¹⁶-AA¹⁷-AA¹⁸-AA¹⁹-AA²⁰-LINKER-AA²¹-AA²²-AA²³-AA²⁴-AA²⁵-AA²⁶-AA²⁷-AA²⁸-AA²⁹-AA³⁰-AA³¹-AA³²-AA³³-AA³⁴-AA³⁵-AA³⁶-AA³⁷-AA³⁸ (IVa)

wherein LINKER is a linear or branched organic divalent radical, moiety or compound having a molecular weight (Mw) comprised between about 28 and about 2,000 Da, in particular, between about 300 and about 1000 Da; wherein AA¹-AA²-AA³-AA⁴-AA⁵-AA⁶-AA⁷ is PEP7 as defined herein; wherein AA¹³-AA¹⁴-AA¹⁵-AA¹⁶-AA¹⁷-AA¹⁸-AA¹⁹-AA²⁰ is PEP12 as defined herein; wherein AA²¹-AA²²-AA²³-AA²⁴-AA²⁵ is PEP2 as already defined herein; wherein AA⁸-AA⁹-AA¹⁰ is PEP5 as defined herein; wherein AA³⁰-AA³¹-AA³² is PEP4 as defined herein; wherein AA³³-AA³⁴-AA³⁵-AA³⁶-AA³⁷-AA³⁸ is PEP8 as defined herein; wherein AA¹¹, AA¹², AA²⁶, AA²⁷, AA²⁸, and AA²⁹ are as defined herein; wherein one end of LINKER interacts covalently with AA²⁰; wherein another end of LINKER interacts covalently with AA²¹; wherein AA¹ and AA²¹ may be both N-terminal amino acids or both C-terminal amino acids; wherein AA³⁸ and AA²⁰ may be both N-terminal amino acids or both C-terminal amino acids; wherein said bioactive carrier-affinity-containing group is selected from the group consisting of a thiol-containing group (in particular, a thiol-containing peptide), a cysteine-containing group (in particular, a cysteine-containing peptide and more particularly, a cysteine), and an aromatic amino acid-containing peptide or peptidomimetic.

[1072] In certain embodiments, said modified GFR-binding compound comprises a GFR-binding compound and a bioactive carrier-affinity-containing group; wherein the RMSD value of the three dimensional (3D) atomic coordinates of said GFR-binding compound with respect to PEPREF is 2.45 Å (Angstroms) or less, in particular is 2 Å or less, and more particularly is 1.79 Å or less, and wherein PEPREF is the set of 3D atomic coordinates already defined herein.

### VI. Modified Cyclic GFR-Binding Compound

[1073] Thus, in one aspect, the present disclosure provides a pharmaceutical association or combination comprising a modified cyclic GFR-binding compound and a bioactive carrier, wherein said modified cyclic GFR-binding compound comprises a cyclic GFR-binding compound as defined in the present disclosure and a bioactive carrier-affinity-containing group also as defined herein.

[1074] For example, in certain embodiments, said modified cyclic GFR-binding compound comprises a cyclic GFR-binding compound as defined in the present disclosure and a bioactive carrier-affinity-containing group; wherein said bioactive carrier-affinity-containing group is selected from the group consisting of a thiol-containing group (in particular, a thiol-containing peptide), a cysteine-containing group (in particular, a cysteine-containing peptide and more particularly, a cysteine), and an aromatic amino acid-containing peptide or peptidomimetic.

[1075] For example, in certain embodiments, said modified cyclic GFR-binding compound comprises a cyclic GFR-binding compound and a bioactive carrier-affinity-containing group; wherein said cyclic GFR-binding compound is a cyclic peptide, a variant or analog thereof, or a cyclic peptidomimetic as defined herein, with (comprising, or exclusively consisting of, or constituted of) between 15-60 amino acids, in particular between 15-55 amino acids, more particularly between 19-60 amino acids, and even more particularly between 19-55 amino acids, or between 15-35 amino acids, in particular between 15-30 amino acids, more particularly between 19-35 amino acids, and even more particularly between 19-30 amino acids; comprising a peptide with four amino acids (PEP1) selected from the group consisting of SAIS, SSLS, NAIS, SATS, SPIS, EPIS, SPIN, KPLS, EPLP, EPLT, SNIT, RSVK and RPVQ; and a peptide with five amino acids (PEP2) selected from the group consisting of LKNYQ, LKVYP, LKKYR, LRKHR, LKYHY, KFKYE, YGKIP, YKQYE, DHHKD, EQLSN, IGEMS, LGEMS, KEVQV and KKATV; wherein said bioactive carrier-affinity-containing group is selected from the group consisting of a thiol-containing group (in particular, a thiol-containing peptide), a cysteine-containing group (in particular, a cysteine-containing peptide and more particularly, a cysteine), and an aromatic amino acid-containing peptide or peptidomimetic.

[1076] For example, in certain embodiments, said modified cyclic GFR-binding compound comprises a cyclic GFR-binding compound and a bioactive carrier-affinity-containing group; wherein said cyclic GFR-binding compound is a cyclic peptide, a variant or analog thereof, or a cyclic peptidomimetic as defined herein, with (comprising, or exclusively consisting of, or constituted of) between 15-60 amino acids, in particular between 15-55 amino acids, more particularly between 19-60 amino acids, and even more particularly between 19-55 amino acids, or between 15-35 amino acids, in particular between 15-30 amino acids, more particularly between 19-35 amino acids, and even more particularly between 19-30 amino acids; comprising a peptide with height amino acids of general formula (PEP12): PEP1-AA¹⁷-PEP11, and a peptide with five amino acids (PEP2) selected from the group consisting of LKNYQ, LKVYP, LKKYR, LRKHR, LKYHY, KFKYE, YGKIP, YKQYE, DHHKD, EQLSN, IGEMS, LGEMS, KEVQV and KKATV; wherein PEP1 is a peptide with four amino acids selected from the group consisting of SAIS, SSLS, NAIS, SATS, SPIS, EPIS, SPIN, KPLS, EPLP, EPLT, SNIT, RSVK and RPVQ; wherein PEP11 is a peptide with 3 amino acids of formula AA¹⁸-AA¹⁹-AA²⁰; wherein AA¹⁷ is selected from the group consisting of G, A, V, L, I, P, F, M, W, T and S (in particular is selected from the group consisting of M, I, L, V and T); wherein AA¹⁸ is selected from the group consisting of L, V, Q, A and R; wherein AA¹⁹ is selected from the group consisting of F, W, H and Y (in particular is an aromatic, polar amino acid such as Y); wherein AA²⁰ is selected from the group consisting of L, F, Y, K, I, V and M; wherein said bioactive carrier-affinity-containing group is selected from the group consisting of a thiol-containing group (in particular, a thiol-containing peptide), a cysteine-containing group (in particular, a cysteine-containing peptide and more particularly, a cysteine), and an aromatic amino acid-containing peptide or peptidomimetic.

[1077] For example, in certain embodiments, said modified cyclic GFR-binding compound comprises a cyclic GFR-binding compound and a bioactive carrier-affinity-containing group; wherein said cyclic GFR-binding compound is a cyclic peptide, a variant or analog thereof, or a cyclic peptidomimetic as defined herein, with (comprising, or exclusively consisting of, or constituted of) between 15-60 amino acids, in particular between 15-55 amino acids, more particularly between 19-60 amino acids, and even more particularly between 19-55 amino acids, or between 15-35 amino acids, in particular between 15-30 amino acids, more particularly between 19-35 amino acids, and even more particularly between 19-30 amino acids, comprising a peptide, a variant or analog thereof, or a peptidomimetic having the following general formula (Ia) (hereinafter may also be referred to as compound (Ia) or peptide (Ia)):

PEP(A)-LINKER-PEP(B) (Ia)

wherein one end of LINKER interacts covalently with one end of PEP(A); wherein another end of LINKER interacts covalently with one end of PEP(B); wherein PEP(A) comprises PEP1 or PEP12; wherein PEP(B) comprises PEP2; wherein LINKER is a linear or branched organic divalent radical, moiety or compound having a molecular weight (Mw) comprised between about 28 and about 2,000 Da, in particular, between about 300 and about 1000 Da, more particularly between about 300 and about 800 Da; wherein said bioactive carrier-affinity-containing group is selected from the group consisting of a thiol-containing group (in particular, a thiol-containing peptide), a cysteine-containing group (in particular, a cysteine-containing peptide and more particularly, a cysteine), and an aromatic amino acid-containing peptide or peptidomimetic.

[1078] For example, in certain embodiments, said modified cyclic GFR-binding compound comprises a cyclic GFR-binding compound and a bioactive carrier-affinity-containing group; wherein said cyclic GFR-binding compound is a cyclic peptide, a variant or analog thereof, or a cyclic peptidomimetic as defined herein, with between 15-60 (in particular between 15-55, more particularly between 19-60, and even more particularly between 19-55) amino acids, or between 15-35 (in particular between 15-30, more particularly between 19-35, and even more particularly between 19-30) amino acids, comprising a peptide, a variant or analog thereof, or a peptidomimetic having the following general formula (Ib) (hereinafter may also be referred to as compound (Ib) or peptide (Ib)):

PEP(A)-LINKER-PEP(B)-LINKER (Ib)

wherein one end of a first LINKER interacts covalently with one end of PEP(A); wherein another end of a first LINKER interacts covalently with one end of PEP(B); wherein one end of a second LINKER interacts covalently with another end of PEP(B); wherein another end of a second LINKER interacts covalently with another end of PEP(A); wherein PEP(A) comprises PEP1; wherein PEP(B) comprises PEP2; wherein LINKER are independently a linear or branched organic divalent radical, moiety or compound having a molecular weight (Mw) comprised between about 28 and about 2,000 Da, in particular, between about 300 and about 1000 Da, more particularly between about 300 and about 800 Da; and wherein said bioactive carrier-affinity-containing group is selected from the group consisting of a thiol-containing group (in particular, a thiol-containing peptide), a cysteine-containing group (in particular, a cysteine-containing peptide and more particularly, a cysteine), and an aromatic amino acid-containing peptide or peptidomimetic.

[1079] For example, in certain embodiments, said modified cyclic GFR-binding compound comprises a cyclic GFR-binding compound and a bioactive carrier-affinity-containing group; wherein said cyclic GFR-binding compound is a cyclic peptide, a variant or analog thereof, or a cyclic peptidomimetic as defined herein, with (comprising, or exclusively consisting of, or constituted of) between 15-35 amino acids, in particular between 15-30 amino acids, more particularly between 19-35 amino acids, and even more particularly between 19-30 amino acids, comprising a peptide, a variant or analog thereof, or a peptidomimetic having the following general formula (IIa) (hereinafter may also be referred to as compound (IIa) or peptide (IIa)):

PEP(C)-PEP12-LINKER-PEP2-PEP(D) (IIa)

wherein LINKER is a linear or branched organic divalent radical, moiety or compound having a molecular weight (Mw) comprised between about 28 and about 2,000 Da, in particular, between about 300 and about 1000 Da, more particularly between about 300 and about 800 Da; wherein PEP12 is a peptide with 8 amino acids of formula PEP1-AA¹⁷-PEP11; wherein AA¹⁷, PEP1, PEP2, PEP12 and PEP11 are as already defined herein; wherein one end of PEP(C) interacts covalently with PEP12 via AA¹³; wherein one end of PEP(D) interacts covalently with PEP2 via AA²⁵; wherein one end of LINKER interacts covalently with one end of PEP12 via AA²⁰; wherein another end of LINKER interacts covalently with PEP2 via AA²¹; wherein AA¹³ and AA²¹ may be both N-terminal amino acids or both C-terminal amino acids; wherein AA²⁵ and AA²⁰ may be both N-terminal amino acids or both C-terminal amino acids; wherein PEP(C) is a peptide with at least 5 amino acids, in particular a peptide with between 5 and 12 amino acids; wherein PEP(D) is a peptide with at least 5 amino acids, in particular a peptide with between 5 and 12 amino acids; wherein said bioactive carrier-affinity-containing group is selected from the group consisting of a thiol-containing group (in particular, a thiol-containing peptide), a cysteine-containing group (in particular, a cysteine-containing peptide and more particularly, a cysteine), and an aromatic amino acid-containing peptide or peptidomimetic.

[1080] For example, in certain embodiments, said modified cyclic GFR-binding compound comprises a cyclic GFR-binding compound and a bioactive carrier-affinity-containing group; wherein said cyclic GFR-binding compound is a cyclic peptide, a variant or analog thereof, or a cyclic peptidomimetic as defined herein, with between 15-60 (in particular between 15-55, more particularly between 19-60, and even more particularly between 19-55) amino acids, or between 15-35 (in particular between 15-30, more particularly between 19-35, and even more particularly between 19-30) amino acids, comprising a peptide, a variant or analog thereof, or a peptidomimetic having the following general formula (IIb) (hereinafter may also be referred to as compound (IIb) or peptide (IIb)):

PEP(C)-PEP12-LINKER-PEP2-PEP(D)-LINKER (IIb)

wherein LINKER are independently a linear or branched organic divalent radical, moiety or compound having a molecular weight (Mw) comprised between about 28 and about 2,000 Da, in particular, between about 300 and about 1000 Da, more particularly between about 300 and about 800 Da; wherein PEP12 is a peptide with 8 amino acids of formula PEP1-AA¹⁷-PEP11 as defined herein; wherein PEP2 is a peptide with five amino acids as already defined herein; wherein one end of PEP(C) interacts covalently with PEP12 via one end of PEP1; wherein one end of PEP(D) interacts covalently with one end of PEP2; wherein one end of a first LINKER interacts covalently with one end of PEP12 via one end of PEP11; wherein another end of a first LINKER interacts covalently with another end of PEP2; wherein one end of a second LINKER interacts covalently with another end of PEP(D); wherein another end of a second LINKER interacts covalently with another end of PEP(C); wherein PEP(C) is a peptide with at least 5 amino acids, in particular a peptide with between 5 and 12 amino acids; wherein PEP(D) is a peptide with at least 5 amino acids, in particular a peptide with between 5 and 11 amino acids; and wherein said bioactive carrier-affinity-containing group is selected from the group consisting of a thiol-containing group (in particular, a thiol-containing peptide), a cysteine-containing group (in particular, a cysteine-containing peptide and more particularly, a cysteine), and an aromatic amino acid-containing peptide or peptidomimetic.

[1081] For example, in certain embodiments, said modified cyclic GFR-binding compound comprises a cyclic GFR-binding compound and a bioactive carrier-affinity-containing group; wherein said cyclic GFR-binding compound is a cyclic peptide, a variant or analog thereof, or a cyclic peptidomimetic as defined herein, with between 15-60 amino acids, in particular between 15-55 amino acids, more particularly between 19-60 amino acids, and even more particularly between 19-55 amino acids, or between 15-35 amino acids, in particular between 15-30, more particularly between 19-35, and even more particularly between 19-30 amino acids, comprising a peptide, a variant or analog thereof, or a peptidomimetic having the following general formula (IIIa) (hereinafter may also be referred to as compound (IIIa) or peptide (IIIa)):

PEP7-PEP5-PEP12-LINKER-PEP2-PEP6-PEP8 (IIIa)

wherein LINKER is a linear or branched organic divalent radical, moiety or compound having a molecular weight (Mw) comprised between about 28 and about 2,000 Da, in particular, between about 300 and about 1000 Da, more particularly between about 300 and about 800 Da; wherein PEP12 is a peptide with 8 amino acids of formula PEP1-AA¹⁷-PEP11 as defined herein; wherein PEP2 is a peptide with five amino acids as already defined herein; wherein PEP5 is a peptide with five amino acids as already defined herein; wherein PEP6 is a peptide with between five and seven amino acids as already defined herein; wherein PEP7 an amino acid or a peptide with between two and seven amino acids as already defined herein; wherein PEP8 an amino acid or a peptide with between two and six amino acids as already defined herein; wherein one end of LINKER interacts covalently with one end of PEP12 via AA²⁰; wherein another end of LINKER interacts covalently with one end of PEP2 via AA²¹; wherein one end of PEP5 interacts covalently with another end of PEP12 via AA¹²; wherein another end of PEP5 interacts covalently with one end of PEP7 via AA⁸; wherein one end of PEP6 interacts covalently with another end of PEP2 via AA²⁶; wherein another end of PEP6 interacts covalently with one end of PEP8 via AA³²; wherein said bioactive carrier-affinity-containing group is selected from the group consisting of a thiol-containing group (in particular, a thiol-containing peptide), a cysteine-containing group (in particular, a cysteine-containing peptide and more particularly, a cysteine), and an aromatic amino acid-containing peptide or peptidomimetic.

[1082] For example, in certain embodiments, said modified cyclic GFR-binding compound comprises a cyclic GFR-binding compound and a bioactive carrier-affinity-containing group; wherein said cyclic GFR-binding compound is a cyclic peptide, a variant or analog thereof, or a cyclic peptidomimetic as defined herein, with between 15-60 (in particular between 15-55, more particularly between 19-60, and even more particularly between 19-55) amino acids, or between 15-35 (in particular between 15-30, more particularly between 19-35, and even more particularly between 19-30) amino acids, comprising a peptide, a variant or analog thereof, or a peptidomimetic having the following general formula (IIIb) (hereinafter may also be referred to as compound (IIIb) or peptide (IIIb)):

PEP7-PEP5-PEP12-LINKER-PEP2-PEP6-PEP8-LINKER (IIIb)

wherein LINKER are independently a linear or branched organic divalent radical, moiety or compound having a molecular weight (Mw) comprised between about 28 and about 2,000 Da, in particular, between about 300 and about 1000 Da, more particularly between about 300 and about 800 Da; wherein PEP12 is a peptide with 8 amino acids of formula PEP1-AA¹⁷-PEP11 as defined herein; wherein PEP2 is a peptide with five amino acids as already defined herein; wherein PEP5 is a peptide with five amino acids as already defined herein; wherein PEP6 is a peptide with between five and seven amino acids as already defined herein; wherein PEP7 an amino acid or a peptide with between two and seven amino acids as already defined herein; wherein PEP8 an amino acid or a peptide with between two and six amino acids as already defined herein; wherein one end of a first LINKER interacts covalently with one end of PEP12 via AA²⁰; wherein another end of a first LINKER interacts covalently with one end of PEP2 via AA²¹; wherein one end of a second LINKER interacts covalently with another end of PEP8; wherein another end of a second LINKER interacts covalently with another end of PEP7; wherein one end of PEP5 interacts covalently with another end of PEP12 via AA¹²; wherein another end of PEP5 interacts covalently with one end of PEP7 via AA⁸; wherein one end of PEP6 interacts covalently with another end of PEP2 via AA²⁶; wherein another end of PEP6 interacts covalently with one end of PEP8 via AA³²; and wherein said bioactive carrier-affinity-containing group is selected from the group consisting of a thiol-containing group (in particular, a thiol-containing peptide), a cysteine-containing group (in particular, a cysteine-containing peptide and more particularly, a cysteine), and an aromatic amino acid-containing peptide or peptidomimetic.

[1083] For example, in certain embodiments, said modified cyclic GFR-binding compound comprises a cyclic GFR-binding compound and a bioactive carrier-affinity-containing group; wherein said cyclic GFR-binding compound is a cyclic peptide, a variant or analog thereof, or a cyclic peptidomimetic as defined herein, with between 15-35 (in particular between 15-30, more particularly between 19-35, and even more particularly between 19-30) amino acids, comprising a peptide, a variant or analog thereof, or a peptidomimetic having the following general formula (IVa) (hereinafter may also be referred to as compound (IVa) or peptide (IVa)):

AA¹-AA²-AA³-AA⁴-AA⁵-AA⁶-AA⁷-AA⁸-AA⁹-AA¹⁰-AA¹¹-AA¹²-AA¹³-AA¹⁴-AA¹⁵-AA¹⁶-AA¹⁷-AA¹⁸-AA¹⁹-AA²⁰-LINKER-AA²¹-AA²²-AA²³-AA²⁴-AA²⁵-AA²⁶-AA²⁷-AA²⁸-AA²⁹-AA³⁰-AA³¹-AA³²-AA³³-AA³⁴-AA³⁵-AA³⁶-AA³⁷-AA³⁸ (IVa)

wherein LINKER is a linear or branched organic divalent radical, moiety or compound having a molecular weight (Mw) comprised between about 28 and about 2,000 Da, in particular, between about 300 and about 1000 Da, more particularly between about 300 and about 800 Da; wherein AA¹-AA²-AA³-AA⁴-AA⁵-AA⁶-AA⁷ is PEP7 as defined herein; wherein AA¹³-AA¹⁴-AA¹⁵-AA¹⁶-AA¹⁷-AA¹⁸-AA¹⁹-AA²⁰ is PEP12 as defined herein; wherein AA²¹-AA²²-AA²³-AA²⁴-AA²⁵ is PEP2 as already defined herein; wherein AA⁸-AA⁹-AA¹⁰ is PEP3 as defined herein; wherein AA³⁰-AA³¹-AA³² is PEP4 as defined herein; wherein AA³³-AA³⁴-AA³⁵-AA³⁶-AA³⁷-AA³⁸ is PEP8 as defined herein; wherein AA¹¹, AA¹², AA²⁶, AA²⁷, AA²⁸, and AA²⁹ are as defined herein; wherein one end of LINKER interacts covalently with AA²⁰; wherein another end of LINKER interacts covalently with AA²¹; wherein AA¹ and AA²¹ may be both N-terminal amino acids or both C-terminal amino acids; wherein AA³⁸ and AA²⁰ may be both N-terminal amino acids or both C-terminal amino acids; wherein said bioactive carrier-affinity-containing group is selected from the group consisting of a thiol-containing group (in particular, a thiol-containing peptide), a cysteine-containing group (in particular, a cysteine-containing peptide and more particularly, a cysteine), and an aromatic amino acid-containing peptide or peptidomimetic.

[1084] For example, in certain embodiments, said modified cyclic GFR-binding compound comprises a cyclic GFR-binding compound and a bioactive carrier-affinity-containing group; said cyclic GFR-binding compound is a cyclic peptide, a variant or analog thereof, or a cyclic peptidomimetic as defined herein, with between 15-60 (in particular between 15-55, more particularly between 19-60, and even more particularly between 19-55) amino acids, or between 15-35 (in particular between 15-30, more particularly between 19-35, and even more particularly between 19-30) amino acids, comprising a peptide, a variant or analog thereof, or a peptidomimetic having the following general formula (IVb) (hereinafter may also be referred to as compound (IVb) or peptide (IVb)):

AA¹-AA²-AA³-AA⁴-AA⁵-AA⁶-AA⁷-AA⁸-AA⁹-AA¹⁰-AA¹¹-AA¹²-AA¹³-AA¹⁴-AA¹⁵-AA¹⁶-AA¹⁷-AA¹⁸-AA¹⁹-AA²⁰-LINKER-AA²¹-AA²²-AA²³-AA²⁴-AA²⁵-AA²⁶-AA²⁷-AA²⁸-AA²⁹-AA³⁰-AA³¹-AA³²-AA³³-AA³⁴-AA³⁵-AA³⁶-AA³⁷-AA³⁸-LINKER (IVb)

wherein LINKER are independently a linear or branched organic divalent radical, moiety or compound having a molecular weight (Mw) comprised between about 28 and about 2,000 Da, in particular, between about 300 and about 1000 Da, more particularly between about 300 and about 800 Da; wherein AA¹-AA²-AA³-AA⁴-AA⁵-AA⁶-AA⁷ is PEP7 as defined herein; wherein AA¹³-AA¹⁴-AA¹⁵-AA¹⁶-AA¹⁷-AA¹⁸-AA¹⁹-AA²⁰ is PEP12 as defined herein; wherein AA²¹-AA²²-AA²³-AA²⁴-AA²⁵ is PEP2 as already defined herein; wherein AA⁸-AA⁹-AA¹⁰ is PEP8 as defined herein; wherein AA³⁰-AA³¹-AA³² is PEP4 as defined herein; wherein AA³³-AA³⁴-AA³⁵-AA³⁶-AA³⁷-AA³⁸ is PEP8 as defined herein; wherein AA¹¹, AA¹², AA²⁶, AA²⁷, AA²⁸, and AA²⁹ are as defined herein; wherein one end of a first LINKER interacts covalently with AA²⁰; wherein another end of a first LINKER interacts covalently with AA²¹; wherein one end of a second LINKER interacts covalently with AA³⁸; wherein another end of a second LINKER interacts covalently with AA¹; wherein AA¹ may be an N-terminal amino acids or a C-terminal amino acid; and wherein said bioactive carrier-affinity-containing group is selected from the group consisting of a thiol-containing group (in particular, a thiol-containing peptide), a cysteine-containing group (in particular, a cysteine-containing peptide and more particularly, a cysteine), and an aromatic amino acid-containing peptide or peptidomimetic.

[1085] In one particular example, said bioactive carrier-affinity-containing group is comprised within said cyclic GFR-binding compound e.g. is comprised in at least one LINKER, or is at least one LINKER. For example, in certain embodiments, said modified cyclic GFR-binding compound may have any one of the following general schematic formulae:

[chemical structure]

wherein curved lines represents covalent bonds between LINKERs, PEP1 to PEP12 and AAs “boxes”. Curved lines' lengths may not be representative of the actual relative distance between the LINKERs, PEP1 to PEP12 and AAs.

### VII. Pharmaceutical Associations or Combinations

[1086] In one aspect, the present disclosure provides a pharmaceutical association or combination, which may be used for converting or recoding, in-vitro, ex-vivo or in-vivo, a neoplastic cell into a non-neoplastic cell, comprising at least one (modified) GFR-binding compound and a bioactive carrier, both as defined in the present disclosure. In one example, said (modified) GFR-binding compound and bioactive carrier are both active principles/ingredients. In one example, said GFR-binding compound and bioactive carrier are functionally associated/combined as defined herein. In certain embodiments, said pharmaceutical association or combination is a modified, functionalised, coated or grafted biomaterial as defined herein.

[1087] The present pharmaceutical associations or combinations may thus also be used for protecting a subject carrying a neoplastic cell from a neoplastic disease.

[1088] In one aspect, the present disclosure provides a pharmaceutical association or combination for the uses disclosed herein, substantially free from any cell adhesion promoter. As used herein, the term “substantially free”, as applied to a given component such as a cell adhesion promoter, means that the amount of such a component is less than 20%, 15%, 10%, 5%, 1%, 0.5%, 0.1% or less in mole with respect to the mole content of (modified) GFR-binding compound unless otherwise indicated, self-evident or contradictory in context.

[1089] In one aspect, the present disclosure provides a pharmaceutical association as defined herein further comprising (another) anti-cancer agent thus forming a pharmaceutical composition of the invention. In one example, said pharmaceutical composition further comprises at least one pharmaceutically acceptable excipient. In one example, said further anti-cancer agent is functionally associated with said GFR-binding compound and/or said bioactive carrier. Suitable further anti-cancer agents include but are not limited to, agents that inhibit the synthesis of DNA molecule building blocks, agents that directly damage DNA in the cell nucleus, agents that affect the synthesis or breakdown of mitotic spindles, and agents that inhibit kinase proteins by interacting with the kinase active site. Preferred examples of agents that inhibit the synthesis of DNA molecule building blocks include, but are not limited to, methotrexate (Abitrexate®), fluorouracil (Adrucil®), gemcitabine (Gemzar®), arabinosylcytosine (araC), hydroxyurea (Hydrea®), and mercaptopurine (Purinethol®). Preferred examples of agents that directly damage DNA in the cell nucleus include, but are not limited to, carboplatin (Paraplatin® and paraplatin-AQ®), cisplatin (Platinol®) and antibiotics such as daunorubicin (Cerubidine®), doxorubicin (Adriamycin®), and etoposide (VePesid®). Preferred examples of agents that affect the synthesis or breakdown of mitotic spindles include, but are not limited to, miotic disrupters such as Vinblastine (Velban®), Vincristine (Oncovin®) and Pacitaxel (Taxol®). Preferred examples of agents that inhibit kinase proteins include, but are not limited to, Afatinib®, Axitinib®, Bosulif®, Bosutinib®, Cabozantinib®, Caprelsa®, Cometriq®, Crizotinib®, Dasatinib®, Erlotinib®, Gilotrif®, Gleevec®, Ibrutinib®, Iclusig®, Imatinib®, Imbruvica®, Inlyta®, Lapatinib®, Nexavar®, Nilotinib®, Pazopanib®, Ponatinib®, Regorafenib®, Sorafenib®, Sprycel®, Stivarga®, Sunitinib®, Sutent®, Tarceva®, Tasigna®, Tivopath®, Tivozanib®, Tykerb®, Vandetanib®, Votrient®, Xalkori®, Zaltrap®, and ziv-Aflibercept®.

[1090] In one example, the L-asparaginase enzyme may also be used as a further agent in combination with the pharmaceutical association or composition as defined herein. L-asparaginase enzyme has been reported e.g. in L-Asparaginase: A Promising Enzyme for Treatment of Acute Lymphoblastic Leukiemia, People's Journal of Scientific Research, Vol. 5(1), January 2012, which is incorporated herein by reference in its entirety, to act by depriving cancer cells (such as leukemia cells) of asparagine thus inducing their death.

[1091] Other anti-cancer agents may also be used such as nitrogen mustards, ethylenimes, alkylsulfonates, triazenes, piperazines, nitrosureas and antibiotics such as anthracyclines, dactinomycin, bleomycin, adriamycin, or mithramycin.

[1092] In one aspect, the present disclosure provides a pharmaceutical association as defined herein further comprising an adhesion protein inhibitor thus forming a pharmaceutical composition of the invention. In one example, said pharmaceutical composition further comprises at least one pharmaceutically acceptable excipient. In one example, said adhesion protein inhibitor is functionally associated with said GFR-binding compound and/or said bioactive carrier. Suitable adhesion protein inhibitors include, but are not limited to, siRNA, mRNA or microRNAs which inhibits or down-regulates the gene or protein expression of at least one integrin, syndecan, selectin or dystroglycan, anti-integrin antibodies, anti-syndecan antibodies, anti-selectin antibodies, anti-dystroglycan antibodies, foldamers, or dendrimers.

[1093] In one example, said pharmaceutical association or combination comprises one (modified) GFR-binding compound. In one example, said pharmaceutical association or combination comprises two or more distinct (modified) GFR-binding compounds. In one example, said pharmaceutical association or combination comprises three or more distinct (modified) GFR-binding compounds. In one example, said pharmaceutical association or combination comprises four or more distinct (modified) GFR-binding compounds.

[1094] In one aspect, the present disclosure provides a process or method for manufacturing a neoplastic disease medicament, said process comprising associating or combining at least one bioactive carrier with at least one (modified) GFR-binding compound both as defined herein. Said step of associating or combining a bioactive carrier with a (modified) GFR-binding compound may be carried out using a method as already described above.

[1095] In one aspect, the present disclosure provides a process or method for manufacturing a neoplastic disease medicament precursor, said process comprising providing at least one (modified) GFR-binding compound and/or at least one bioactive carrier both as defined herein, wherein providing said bioactive carrier and/or said (modified) GFR-binding compound manufactures said neoplastic disease medicament.

[1096] In certain aspects, said pharmaceutical association or composition substantially down-regulates, reduces, inhibits or suppresses the gene and/or protein expression of at least one of cyclin-D1, cyclin-D2 or cyclin-D3. Because cyclins D1, D2 and D3 regulate the activity of Cyclin-dependent kinases (CDKs) 4 and 6 by forming cyclin-CDK protein complexes including Cyclin D1-CDK4 complex, Cyclin D1-CDK6 complex, Cyclin D2-CDK4 complex, Cyclin D2-CDK6 complex, Cyclin D3-CDK4 complex and Cyclin D3-CDK6 complex, said pharmaceutical association or composition was also observed to substantially reduce, inhibit, suppress or destabilise the formation of any one of such complexes.

[1097] There are many ways to test, measure and represent the inhibitory effect of a given substance on the gene or protein expression of cyclins D, but for the purpose of the present disclosure, and for the avoidance of any doubts, the inhibition values of a given pharmaceutical association or composition as defined herein is a measure of the gene expression of cyclins D as provided by RT-PCR. It is to be understood that the values of the gene expression of cyclins D disclosed herein correspond to the total gene expression of all cyclins D present in the tested cell i.e. D1, D2 and D3 as known at the date of the present disclosure.

[1098] As already stated above, pharmaceutical associations or compositions suitable for implementing embodiments of the present invention reduce the gene expression of cyclins D by at least 20% during at least one part of the G1 phase of the cell cycle as compared to the wild-type expression. The absolute and relative duration of each cell cycle phase (in other words, the cell cycle duration profile) usually varies (some phases such as the Gap phases may “shrink”) amongst healthy cells of different types (e.g. bone cells, skin cells, etc. . . . ) and between healthy cells and neoplastic cells of the same type (e.g. healthy bone cells and neoplastic bone cells). Typical average cell cycle duration is commonly accepted to be about 24 hours. Typically accepted phase durations for a healthy cell are 11 to 14 hours for the G1 phase, 5 to 12 hours for the S phase, 3 to 12 hours for the G2 phase and about 1 hour for the M phase. In neoplastic cells, such as in cancer cells, it is commonly admitted that, although the duration of the S and M phases may generally be conserved, the length of the G1 and G2 phases is generally shortened in order to increase cell division. Cell cycle phase's duration may thus vary significantly from one cell type to another. Consequently, conventionally and for the purpose of facilitating the comparative representation of the inhibition of the gene expression of cyclins D for different cell types, the gene expression is represented as a function of the cell cycle progression (starting from G1 and finishing with M) and not as a direct function of time.

[1099] Active or bioactive principles or ingredients: In the present description and unless otherwise indicated or contradictory in context, the term “(bio)active principle” or “(bio)active ingredient” generally refers to a molecule, compound or substance which is responsible for providing the desired biological effect. Without said active ingredient, the formulation or composition containing it, would not provide the desired biological effect. For example, in certain embodiments, formulation excipients are not considered as active ingredients in the pharmaceutical composition as defined herein.

[1100] In one example, said (modified) GFR-binding compound and bioactive carrier are both active principles/ingredients.

[1101] In one aspect, the present disclosure also provides a GFR-binding compound modified to be associated with a bioactive carrier (i.e. a modified GFR-binding compound) to form a pharmaceutical association all as defined herein, for use in the prevention or treatment of a neoplastic disease.

[1102] Neoplastic disease medicament: In the present description and unless otherwise indicated or contradictory in context, the term “neoplastic disease medicament” means a substance, compound, pharmaceutical association, combination, composition or formulation which is suitable for treating or preventing a neoplastic disease in a subject.

[1103] Subject carrying a neoplastic cell: In the present description and unless otherwise indicated or contradictory in context, the term “subject carrying a neoplastic cell” means that at least one cell constitutive of the subject is a neoplastic cell as defined herein.

[1104] In the present description and unless otherwise indicated or contradictory in context, the terms “functionally associated”, “functionally combined”, “functionalized”, “immobilized”, “deposited”, “coated”, or “grafted” all refer to the action of associating or functionalising at least one part of a bioactive carrier with a (modified) GFR-binding compound so that the desired biological, therapeutic and/or cosmetic effect e.g. inducing tissue formation, is obtained. The association or combination may be covalent and form, between said (modified) GFR-binding compound and said bioactive carrier, a covalent interaction as already defined herein, or, the association or combination may be non-covalent and form, between said (modified) GFR-binding compound and said bioactive carrier, a non-covalent interaction as already defined herein.

[1105] For example, in certain embodiments, a (modified) GFR-binding compound interacts covalently (makes at least one functional covalent interaction) with said bioactive carrier.

[1106] In one aspect, the present disclosure thus provides a pharmaceutical association or combination comprising a (modified) GFR-binding compound and a bioactive carrier for use in converting or recoding a neoplastic cell into a non-neoplastic cell, wherein said GFR-binding compound (before any modifications) and said bioactive carrier are both as defined herein.

[1107] In one particular example, said pharmaceutical association or combination comprises at least one GFR-binding compound selected from the group consisting of peptides of SEQ ID NO: 1 to 38180.

[1108] The present disclosure provides a pharmaceutical association or combination comprising a (modified) GFR-binding compound, wherein all of PEP1, PEP2, PEP3, PEP4, PEP5, PEP6, PEP9, PEP10, PEP11, PEP12, AA¹⁷, pairs, quadruplets, hexaplets and heptuplets thereof, disclaimers and provisos, are as already defined herein.

[1109] Suitable covalent association or functionalization techniques for implementing embodiments of the present invention include, but are not limited to, reductive amination coupling or photo-grafting such as described in H. Freichel et al., Macromol. Rapid Commun. 2011, 32, 616-621 and V. Pourcelle et al., Biomacromol. 2009, 10, 966-974, the content of which is hereby incorporated by reference in its entirety.

[1110] In one aspect, the present disclosure provides a production method or process useful for producing a pharmaceutical association or combination according to the present disclosure wherein said bioactive carrier is a biomaterial such as a ceramic or a titanium, comprising, or exclusively consisting of, the contacting of a compound of formula (C-I) and a bioactive carrier as defined herein under suitable covalent-bond formation conditions thereby forming at least one covalent bond between said compound (C-I) and said bioactive carrier thus forming a pharmaceutical association or combination according to the present disclosure:

[chemical structure]

wherein X is Si; wherein Y is a divalent organic linker; wherein A is a (modified) GFR-binding compound according to the present disclosure, wherein R¹ and R² are both independently an organic spacing-compound other than a leaving group as defined herein, and wherein R³ is a leaving group as defined herein;

[1111] In one particular example, a process or method which may be used to functionally associate or combine a (modified) GFR-binding compound with a bioactive carrier such as a ceramic or a titanium is shown in Scheme 1:

[chemical structure]

[1112] Such syntheses involve the formation of a covalent interaction (or association) between a (modified) GFR-binding compound (represented as (A)-SH in Scheme 1) and a bioactive carrier as defined herein.

[1113] In one particular example, a process or method which may be used to functionally associate or combine a (modified) GFR-binding compound with a bioactive carrier is a method for covalent functionalization or depositing of a (modified) GFR-binding compound onto a polyetheretherketone polymer (PEEK) surface wherein (i) the polymer is treated with ethylene diamine (NH₂═NH₂) to create NH₂ functions on a PEEK surface from ketone (═O) functions and (ii) the hereby modified PEEK-NH₂ polymer is immersed in a solution of a chosen hetero-bifunctional cross-linker such as 3-succinimidyl-3-maleimidopropionate thereby reacting the maleimide group with a (modified) GFR-binding compound through e.g. a thiol group thereof.

[1114] In one particular example, a process or method which may be used to functionally associate or combine a (modified) GFR-binding compound with a bioactive carrier is a method for covalent functionalization or depositing of a (modified) GFR-binding compound onto a polylactic acid (PLLA) polymer wherein (i) the polymer is immersed in a solution containing, for instance, (dimethylaminopropyl)-3-ethylcarbodiimide hydrochloride+N-hydroxysuccinimide in (2-(N-morpholino)-ethanesulfonic acid and then (ii) rinsed using e.g. MilliQ water.

[1115] Leaving groups: As used herein, unless indicated otherwise or contradictory in context, the term “leaving group” means a molecular fragment which possesses the ability to depart with a pair of electrons in a heterolytic bond cleavage. Leaving groups are anions or neutral molecules and possess the ability to stabilize the additional electron density that results from bond heterolysis. Common anionic leaving groups are halogen atoms such as chlorine (Cl), bromine (Br), and iodine (I), which leaves as a chloride ion (Cl⁻), a bromide ion (Br) and an iodide ion (I⁻), respectively. Other leaving groups include sulfonate esters, such as tosylate (TsO⁻). Conventional neutral molecule leaving groups are water and ammonia. Suitable as leaving groups for implementing embodiments of the invention preferably include the group consisting of a halogen, a substituted or unsubstituted alkoxy group (—OR), a substituted or unsubstituted aryloxy or heteroaryloxy group (—OAr), a substituted or unsubstituted alkylcarbonyloxy group (—O₂CR), a substituted or unsubstituted arylcarbonyloxy or heteroarylcarbonyloxy group (—O₂CAr), a substituted or unsubstituted alkylsulfonyloxy group (—O₃SR), a substituted or unsubstituted arylsulfonyloxy or heteroarylsulfonyloxy group (—O₃SAr). Substituents of leaving groups include halogens, alkyl (preferably C1 to C5-alkyl) groups and alkoxy (preferably C1 to C5-alkoxy) groups.

[1116] Y Group

[1117] In the present disclosure, the Y group is not aimed at being particularly limited and any moiety comprising at least one atom and having the ability to covalently or non-covalently, preferably covalently, link or interact with the X and A groups as defined herein thereby providing a stable connection between an active substance A and the X group as defined herein, is, unless contradictory or non-adapted in context, suitable for implementing embodiments of the present disclosure and is comprised within the scope of the invention. Thus, in the present description and unless otherwise indicated, the term “linker”, when used in relation to a Y group, means any organic moiety comprising at least one atom and having the ability to interact covalently or non-covalently with an active substance A and covalently interact with an X group as defined herein.

[1118] In one example, Y groups include divalent organic radicals selected from the group consisting of a saturated or unsaturated, preferably saturated, hydrocarbon chain comprising between 1 and 30 carbon atoms, wherein said hydrocarbon chain is optionally interrupted by one or more non-carbon atom, preferably between 1 and 16, between 1 and 12 or between 1 and 8 non-carbon atoms as appropriate, wherein said non-carbon atom is selected, for instance, from the group consisting of —O—, —S—, —C(═O), —SO₂—, —N(Ri)(C═O)—, —N(Ri)-, and the following radical:

[chemical structure]

wherein Ri is selected from the group consisting of a hydrogen atom, a C1-C6 alkyl group and a aryl group, and wherein said hydrocarbon chain is non-substituted or substituted, by at least one radical selected from the group consisting of a halogen, a hydroxyl group, a C1-C20 alkyl group and a aryl group.

[1119] Suitable as Y groups for implementing embodiments of the invention include saturated or unsaturated hydrocarbon chains comprising between 1 and 20 carbon atoms, saturated or unsaturated hydrocarbon chains comprising between 1 and 10 carbon atoms, saturated or unsaturated hydrocarbon chains comprising between 1 and 5 carbon atoms, saturated or unsaturated hydrocarbon chains comprising 1, 2 or 3 carbon atoms, all of which being specifically and individually preferred.

[1120] Also suitable as Y groups for implementing embodiments of the invention include saturated or unsaturated hydrocarbon chains comprising between 1 and 20 carbon atoms, saturated or unsaturated hydrocarbon chains comprising between 1 and 10 carbon atoms, saturated or unsaturated hydrocarbon chains comprising between 1 and 5 carbon atoms, saturated or unsaturated hydrocarbon chains comprising 1, 2 or 3 carbon atoms, and in which said hydrocarbon chain is optionally interrupted by one or more, preferably between 1 and 16, between 1 and 12 or between 1 and 8, non-carbon atom, selected from the group consisting of an oxygen atom, a nitrogen atom, a carbonyl group and/or the following radical:

[chemical structure]

all of which being specifically preferred and individually contemplated.

[1121] Also suitable as Y groups for implementing embodiments of the invention is:

[chemical structure]

wherein n is comprised between 1 and 29, in particular between 1 and 5; and wherein m is comprised between 1 and 29, in particular between 1 and 5.

[1122] Suitable covalent-bond formation conditions: As used herein, unless indicated otherwise or contradictory in context, the term “suitable covalent-bond formation conditions” means reaction conditions such as pressure, temperature, reagent quantities, solvent's type and quantity, or stirring, under which starting materials may contact and provide at least one further material resulting from the formation of at least one covalent bond between said starting materials. Suitable as covalent-bond formation conditions for implementing embodiments of the present invention preferably include substantially atmospheric conditions.

[1123] Organic spacing-compound: In the present description and unless otherwise indicated, the term “organic spacing compound” means an organic chemical radical (preferably monofunctional radical) having the ability to create a steric effect/hindrance and/or electronic effect/hindrance in a direct vicinity of a (modified) GFR-binding compound of the present disclosure. Suitable organic spacing compounds include, but are not limited to, monovalent organic radicals independently selected from the group consisting of a saturated or unsaturated hydrocarbon chain of at most 20 nanometres (nm) in length, preferably at most 10 nm, 5 nm, 1 nm, 0.5 nm, 0.1 nm, 0.05 nm or 0.01 nm, wherein said hydrocarbon chain is optionally interrupted by one or more, preferably between 1 and 16, between 1 and 12 or between 1 and 8 non-carbon atoms as appropriate, wherein said non-carbon atom is selected from the group consisting of —O—, —S—, —C(═O), —SO₂—, —N(R)(C═O)—, and —N(R)—, wherein Rⁱ is selected from the group consisting of a hydrogen atom, a C1-C6 alkyl group and an aryl group, and wherein said hydrocarbon chain is non-substituted or substituted by at least one radical selected from the group consisting of a halogen, a hydroxyl group, a C1-C20 alkyl group and an aryl group. In particular, organic spacing compounds include saturated or unsaturated hydrocarbon chains comprising between 1 and 80 carbon atoms, saturated or unsaturated hydrocarbon chains comprising between 1 and 60 carbon atoms, saturated or unsaturated hydrocarbon chains comprising between 1 and 40 carbon atoms, saturated or unsaturated hydrocarbon chains comprising between 1 and 20 carbon atoms, saturated or unsaturated hydrocarbon chains comprising between 1 and 10 carbon atoms, saturated hydrocarbon chains comprising 1, 2, 3, 4, 5 or 6 carbon atoms, all of which being specifically and individually preferred. In one example, the saturated hydrocarbon chain may be methyl, ethyl, propyl, butyl or pentyl. In one example, said unsaturated hydrocarbon chain may be ethylene, propene, 1- or 2-butene, 1-, 2- or 3-pentene, acetylene, propyne, 1- or 2-butyne, 1-, 2- or 3-pentyne.

[1124] Saturated hydrocarbon chain: In the present description and unless otherwise indicated, the terms “saturated hydrocarbon chain” means a chain of carbon atoms linked together by single bonds and has hydrogen atoms filling all of the other bonding orbitals of the carbon atoms.

[1125] Unsaturated hydrocarbon chain: In the present description and unless otherwise indicated, the terms “unsaturated hydrocarbon chain” means a chain of carbon that contains carbon-carbon double bonds or triple bonds, such as those found in alkenes or alkynes, respectively.

[1126] Atmospheric conditions: As used herein, unless indicated otherwise or contradictory in context, the term “atmospheric conditions” or “ambient conditions”, which are interchangeably used, refers to conditions which may be found naturally at an experimentation location. For example, in certain embodiments, typical atmospheric conditions in a chemistry/biology laboratory are a temperature of between about 15° C. and about 35° C. and a pressure of about 1 atm.

[1127] Solution: As used herein, unless indicated otherwise or contradictory in context, the term “solution” means a homogeneous mixture composed of only one phase, which is stable, which does not allow beam of light to scatter, in which the particles of solute cannot be seen by naked eye and from which a solute cannot be separated by filtration.

[1128] Suspension: As used herein, unless indicated otherwise or contradictory in context, the term “suspension” means a heterogeneous mixture containing solid particles that are sufficiently large for sedimentation. Typically, said solid particles are larger than one micrometer. In general, the internal phase (solid) is dispersed throughout the external phase (fluid) through mechanical agitation, with the use of certain excipients or suspending agents.

[1129] Suitable non-covalent association or functionalization techniques for implementing embodiments of the present invention include, but are not limited to, association(s) between a bioactive carrier-affinity containing group as already defined herein and at least part of a bioactive carrier. Such association(s) involves the formation of at least one non-covalent interaction (or attachment) between a (modified) GFR-binding compound and a bioactive carrier as defined herein.

[1130] In one example, said pharmaceutical association or combination is functionally associated with at least two, at least three, at least four, at least five, at least six, at least seven, at least eight, at least nine or at least ten (modified) GFR-binding compounds, each possessing a different and distinct chemical structure.

[1131] In one example, said pharmaceutical association or combination does not comprise a layer of polysiloxane.

[1132] In an example, a bioactive carrier of the present invention (further) comprises at least one compound selected from the group consisting of anti-cancer agents as already defined herein, and an anti-inflammatory agent such as Celecoxib, Diclofenac, Diflunisal, Etodolac, Ibuprofen, Indomethacin, Ketoprofen, Ketorolac, Nabumetone, Naproxen, Oxaprozin, Piroxicam, Salsalate, Sulindac or Tolmetin.

[1133] For example, in certain embodiments, said further compounds interact covalently or non-covalently as already defined herein with said bioactive carrier.

[1134] For example, in certain embodiments, a pharmaceutical association or combination as defined herein comprises at least one (modified) GFR-binding compound, and at least one bioactive carrier, wherein said bioactive carrier:
[1135] has a porosity (or average pore diameter) comprised between 1 nm and 1000 μm, as measured by scanning electronic microscopy for pore sizes within the supra-nanometre range and by atomic force microscopy for pore sizes within the nanometre range, and/or
[1136] comprises a stiffness of at least 5 kPa, preferably at least 35 kPa, as measured by Dynamic Mechanical Analysis, and/or
[1137] is selected from the group consisting of biopolymers (collagen, fibrin, . . . etc), synthetic polymers (PEEK, PET, . . . etc), solid materials (Titanium, Metals . . . etc) and ceramics (Hydroxyapatite, Beta-tricalcium Phosphate, Biphasic Calcium Phosphate . . . etc), and/or
[1138] comprises a density or concentration of associated compound (I) comprised between 0.05×10⁻¹² mol/mm² and 50×10⁻¹² mol/mm², as measured by conventional fluorescence microscopy or calculated theoretically on the basis of the peptide size, and/or
[1139] does not comprise a layer of polysiloxane.

[1140] Porosity: As used herein, unless indicated otherwise or contradictory in context, the term “porosity” refers to the measure of the void spaces in a substance or material, and is a fraction of the volume of voids over the total volume, between 0 and 1, or as a percentage between 0 and 100%. There are many ways to test and measure the porosity of a substance or material, but for the purpose of the present disclosure, and for the avoidance of any doubts, porosity values are provided in manometers (nm) as obtained using atomic force microscopy for small pore diameters (up to 100 nm) and scanning electron microscopy for larger pore sizes.

[1141] Stiffness: As used herein, unless indicated otherwise or contradictory in context, the term “stiffness” refers to the rigidity of a substance or material i.e. the extent to which it resists deformation in response to an applied force. There are many ways to test and measure the stiffness of a substance or material, but for the purpose of the present disclosure, and for the avoidance of any doubts, stiffness values are provided in Pascal (Pa) as obtained using Dynamic Mechanical Analysis (DMA). Particularly preferred stiffness values are comprised between 1 kPa and 100 kPa and not more than 5 GPa depending on the tissue where the cells are recoded.

[1142] As already stated, the nature of the biomaterial is an important parameter. Particularly good results have been obtained using bioactive carriers composed mostly with the main material component of the tissue where the cells need to be recoded. This generally allows for a better integration of the bioactive carrier, a better resorption from the surrounding cells already present and therefore a better regeneration or repair of the targeted tissue to be achieved.

[1143] In one particular example, the concentration or density (as defined herein) of (modified) GFR-binding compounds in a pharmaceutical association, combination or composition as defined herein is comprised between 0.05 and 50 pmol/mm², in particular comprised between 0.1 and 30 pmol/mm², comprised between 0.1 and 10 pmol/mm², comprised between 0.1 and 5 pmol/mm², or comprised between 0.1 and 2 pmol/mm², each range being preferred and specifically contemplated to be combined with any other numerical or non-numerical ranges as described herein. Most particularly, the density is comprised between 0.2 and 2 pmol/mm².

### VIII. Pharmaceutical Compositions

[1144] In one aspect, the present disclosure provides a composition such as a pharmaceutical, prophylactic, surgical, diagnostic, or imaging composition (hereinafter shorten as pharmaceutical or medical composition) for the uses and methods already disclosed herein comprising at least one pharmaceutical association or combination as defined herein and further comprising at least one pharmaceutically acceptable excipient carriers and/or vehicles.

[1145] Formulations of the pharmaceutical compositions described herein may be prepared by any method known or hereafter developed in the art of pharmacology. Generally, such methods of preparation include the step of bringing the active ingredient(s) into association with an excipient and/or one or more other accessory ingredients, and then, if necessary and/or desirable, shaping and/or packaging the product into a desired single- or multi-dose unit.

[1146] For example, in certain embodiments, a pharmaceutical composition as defined herein may contain between 0.01% and 100% by weight (over the total weight of the pharmaceutical composition) of a (modified) GFR-binding compound or a pharmaceutical association or combination, both as defined herein, as a pharmaceutically effective amount. The pharmaceutical composition particularly comprises between 0.01% and 95%, between 0.01% and 90%, between 0.01% and 85%, between 0.01% and 80%, between 0.01% and 75%, between 0.01% and 70%, between 0.01% and 65%, between 0.01% and 60%, between 0.01% and 55%, between 0.01% and 50%, between 0.01% and 45%, between 0.01% and 40%, between 0.01% and 35%, between 0.01% and 30%, between 0.01% and 25%, between 0.01% and 20%, between 0.01% and 15%, between 0.01% and 10%, between 0.01% and 5%, between 0.1% and 100%, between 0.1% and 95%, between 0.1% and 90%, between 0.1% and 85%, between 0.1% and 80%, between 0.1% and 75%, between 0.1% and 70%, between 0.1% and 65%, between 0.1% and 60%, between 0.1% and 55%, between 0.1% and 50%, between 0.1% and 45%, between 0.1% and 40%, between 0.1% and 35%, between 0.1% and 30%, between 0.1% and 25%, between 0.1% and 20%, between 0.1% and 15%, between 0.1% and 10%, and between 0.1% and 5% by weight (over the total weight of the pharmaceutical composition) of any one of a (modified) GFR-binding compound or a pharmaceutical association or combination as defined herein.

[1147] Generally, the (modified) GFR-binding compounds or pharmaceutical association or combinations as defined herein may thus be administered as such or as part of a formulation in association with one or more pharmaceutically acceptable excipients, carriers and/or vehicles so as to form what is generally referred to as a pharmaceutical composition or pharmaceutical formulation.

[1148] Pharmaceutical effective amount: As used herein, unless indicated otherwise or contradictory in context, the term “pharmaceutical effective amount” or “therapeutically effective amount” refers to an amount of an agent to be delivered (e.g., nucleic acid, protein, peptide, drug, therapeutic agent, diagnostic agent, prophylactic agent, etc.) that is sufficient, when administered to a subject suffering from or susceptible to an infection, disease, disorder, condition and/or pathology, to produce/provide a therapeutically effective outcome. Thus, a “pharmaceutical effective amount” depends upon the context in which it is being applied. A pharmaceutical effective amount of a composition is provided based, at least in part, on the target tissue, target cell type, means of administration, physical characteristics of the pharmaceutical association or composition (e.g., size, 3D shape, etc.), and other determinants. For example, in certain embodiments, in the context of administering an agent that treats cancer, a pharmaceutical effective amount of an agent is, for example, in certain embodiments, an amount sufficient to achieve treatment, as defined herein, of cancer, as compared to the response obtained without administration of the agent. For example, in certain embodiments, a therapeutically effective amount as used herein is any of the herein disclosed weight or molar amounts, ratios or ranges of the (modified) GFR-binding compound, the bioactive carrier or the association/combination thereof.

[1149] Therapeutically effective outcome: As used herein, unless indicated otherwise or contradictory in context, the term “therapeutically effective outcome” refers to an outcome that is sufficient in a subject suffering from or susceptible to an infection, disease, disorder, condition and/or pathology, to treat, improve symptoms of, diagnose, prevent, and/or delay the onset of the infection, disease, disorder, condition and/or pathology.

[1150] Therapeutic Agent: As used herein, unless indicated otherwise or contradictory in context, the term “therapeutic agent” refers to any agent that, when administered to a subject/patient/individual, has a therapeutic, diagnostic, and/or prophylactic effect and/or elicits a desired biological and/or pharmacological effect.

[1151] Pharmaceutically acceptable: As used herein, unless indicated otherwise or contradictory in context, the term “pharmaceutically acceptable” refers to those compounds, materials, compositions, and/or dosage forms which are, within the ambit of sound medical judgment, suitable for use in contact with the tissues of human beings and animals without excessive toxicity, irritation, allergic response, or other problem or complication, commensurate with a reasonable benefit/risk ratio.

[1152] Pharmaceutically acceptable excipients: As used herein, unless indicated otherwise or contradictory in context, the term “pharmaceutically acceptable excipient” refers to any ingredient other than the compounds described herein (i.e. GFR-binding compounds, bioactive carriers as defined herein or any further active principles) and satisfying to the herein defined definition of pharmaceutically acceptable for a patient. Excipients may include, for example: inert diluents, dispersing and/or granulating agents, surface active agents and/or emulsifiers, disintegrating agents, binding agents, preservatives, buffering agents, lubricating agents, oils, printing inks, sweeteners, and/or waters of hydration. The choice of excipient(s) will largely depend on factors such as the particular mode of administration, the effect of the excipient(s) on solubility and stability, and the nature of the dosage form. In one embodiment, the pharmaceutically acceptable excipient is not a naturally occurring excipient.

[1153] Diluents: As used herein, unless indicated otherwise or contradictory in context, diluents include, but are not limited to, calcium carbonate, sodium carbonate, calcium phosphate, dicalcium phosphate, calcium sulfate, calcium hydrogen phosphate, sodium phosphate lactose, sucrose, cellulose, microcrystalline cellulose, kaolin, mannitol, sorbitol, inositol, sodium chloride, dry starch, powdered sugar and/or any combinations thereof.

[1154] Buffering agents: As used herein, unless indicated otherwise or contradictory in context, buffering agents include, but are not limited to, citrate buffer solutions, acetate buffer solutions, phosphate buffer solutions, ammonium chloride, potassium acetate, potassium chloride, monobasic potassium phosphate, calcium carbonate, calcium chloride, calcium citrate, calcium gluconate, calcium lactate, propanoic acid, calcium levulinate, pentanoic acid, phosphoric acid, calcium hydroxide phosphate, sodium acetate, sodium bicarbonate, sodium chloride, sodium citrate, sodium lactate, magnesium hydroxide, aluminum hydroxide, alginic acid, pyrogen-free water, isotonic saline, Ringer's solution, ethyl alcohol and any combinations thereof.

[1155] Granulating and/or dispersing agents: As used herein, unless indicated otherwise or contradictory in context, granulating and/or dispersing agents include, but are not limited to, potato starch, corn starch, tapioca starch, sodium starch glycolate, clays, alginic acid, guar gum, citrus pulp, agar, bentonite, cellulose and wood products, natural sponge, cation-exchange resins, calcium carbonate, silicates, sodium carbonate, cross-linked poly(vinyl-pyrrolidone), sodium carboxymethyl starch, carboxymethyl cellulose, cross-linked sodium carboxymethyl cellulose, methylcellulose, pregelatinized starch, microcrystalline starch, water insoluble starch, calcium carboxymethyl cellulose, magnesium aluminum silicate, sodium lauryl sulfate, quaternary ammonium compounds and/or any combinations thereof.

[1156] Surface active agents and/or emulsifiers: As used herein, unless indicated otherwise or contradictory in context, surface active agents and/or emulsifiers include, but are not limited to, colloidal clays (such as aluminum silicates and magnesium aluminum silicates), natural emulsifiers (such as acacia, agar, sodium alginate, cholesterol, xanthan, pectin, gelatin, egg yolk, casein, cholesterol, wax, and lecithin), long chain amino acid derivatives, high molecular weight alcohols (such as stearyl, cetyl and oleyl alcohols, triacetin monostearate, ethylene glycol distearate and glyceryl monostearate), carbomers (such as carboxy polymethylene, polyacrylic acid, acrylic acid polymer, and carboxyvinyl polymer), diethylene glycol monolaurate, triethanolamine oleate, sodium oleate, potassium oleate, ethyl oleate, oleic acid, ethyl laurate, sodium lauryl sulfate, cetrimonium bromide, cetylpyridinium chloride, benzalkonium chloride, docusate sodium, carrageenan, cellulosic derivatives (such as carboxymethylcellulose sodium, hydroxymethyl cellulose, hydroxypropyl methylcellulose and methylcellulose), sorbitan fatty acid esters (such as polyoxyethylene sorbitan monolaurate, polyoxyethylene sorbitan, polyoxyethylene sorbitan monooleate, sorbitan monopalmitate and glyceryl monooleate), polyoxyethylene esters, sucrose fatty acid esters, polyethylene glycol fatty acid esters, polyoxyethylene ethers, poly(vinyl-pyrrolidone), and any combinations thereof.

[1157] Binding agents: As used herein, unless indicated otherwise or contradictory in context, binding agents include, but are not limited to, natural and synthetic gums (such as acacia, sodium alginate, carboxymethylcellulose, methylcellulose, ethylcellulose, hydroxyethylcellulose, hydroxypropyl cellulose, hydroxypropyl methylcellulose, microcrystalline cellulose, cellulose acetate and poly(vinyl-pyrrolidone), gelatin, starch, sugars (such as sucrose, dextrose, glucose, dextrin, lactose, and mannitol), alignates, magnesium aluminum silicates, polyethylene glycol, polyethylene oxide, inorganic calcium salts, water, alcohol, silicic acid, waxes, and any combinations thereof.

[1158] Preservatives: As used herein, unless indicated otherwise or contradictory in context, preservatives include, but are not limited to, antioxidants, chelating agents, antifungal preservatives, antimicrobial preservatives, acidic preservatives, and alcohol preservatives.

[1159] Antioxidants: As used herein, unless indicated otherwise or contradictory in context, antioxidants include, but are not limited to, alpha tocopherol, ascorbic acid, acorbyl palmitate, butylated hydroxyanisole, propionic acid, potassium metabisulfite, propyl gallate, sodium metabisulfite, sodium ascorbate, and sodium sulfite.

[1160] Chelating agents: As used herein, unless indicated otherwise or contradictory in context, chelating agents include ethylenediaminetetraacetic acid (EDTA), fumaric acid, malic acid, phosphoric acid, citric acid monohyd rate and tartaric acid.

[1161] Antimicrobial preservatives: As used herein, unless indicated otherwise or contradictory in context, antimicrobial preservatives include, but are not limited to, benzalkonium chloride, benzethonium chloride, chlorhexidine, chlorobutanol, chlorocresol, chloroxylenol, benzyl alcohol, bronopol, cetylpyridinium chloride, cresol, ethyl alcohol, glycerin, hexetidine, imidurea, phenoxyethanol, phenylmercuric nitrate, phenylethyl alcohol, phenol, and propylene glycol.

[1162] Antifungal preservatives: As used herein, unless indicated otherwise or contradictory in context, antifungal preservatives include, but are not limited to, benzoic acid, hydroxybenzoic acid, butyl paraben, methyl paraben, ethyl paraben, propyl paraben, potassium benzoate, sodium propionate, potassium sorbate, and/or sorbic acid.

[1163] Alcohol preservatives: As used herein, unless indicated otherwise or contradictory in context, alcohol preservatives include, but are not limited to, phenol, phenolic compounds, bisphenol, ethanol, polyethylene glycol, chlorobutanol and hydroxybenzoate.

[1164] Acidic preservatives: As used herein, unless indicated otherwise or contradictory in context, acidic preservatives include, but are not limited to, vitamin A, vitamin C, vitamin E, beta-carotene, acetic acid, citric acid, dehydroacetic acid, and sorbic acid.

[1165] Lubricating agents: As used herein, unless indicated otherwise or contradictory in context, lubricating agents include, but are not limited to, magnesium stearate, calcium stearate, stearic acid, sodium benzoate, sodium acetate, sodium chloride, silica, talc, malt, glyceryl behanate, hydrogenated vegetable oils, polyethylene glycol, magnesium lauryl sulphate and any combinations thereof.

[1166] Sweeteners: As used herein, unless indicated otherwise or contradictory in context, sweeteners include, but are not limited to, any natural or synthetic sugar substitutes. Natural sugar substitutes include, but are not limited to, brazzein, curculin, erythritol, glycyrrhizin, glycerol, hydrogenated starch hydrolysates, inulin, isomalt, lactitol, mogroside mix, mabinlin, maltitol, malto-oligosaccharide, mannitol, miraculin, monatin, monellin, osladin, pentadin, sorbitol, stevia, tagatose, thaumatin, and xylitol. Synthetic sugar substitutes include, but are not limited to, acesulfame potassium, advantame, alitame, aspartame, salt of aspartame-acesulfame, sodium cyclamate, dulcin, glucin, neohesperidin dihydrochalcone, neotame, P-4000, saccharin, Sucralose.

[1167] Exemplary excipients include, but are not limited to: butylated hydroxytoluene (BHT), calcium carbonate, calcium phosphate (dibasic), calcium stearate, croscarmellose, crosslinked polyvinyl pyrrolidone, citric acid, crospovidone, cysteine, ethylcellulose, gelatin, hydroxypropyl cellulose, hydroxypropyl methylcellulose, lactose, magnesium stearate, maltitol, mannitol, methionine, methylcellulose, methyl paraben, microcrystalline cellulose, polyethylene glycol, polyvinyl pyrrolidone, povidone, pregelatinized starch, propyl paraben, retinyl palmitate, shellac, silicon dioxide, sodium carboxymethyl cellulose, sodium citrate, sodium starch glycolate, sorbitol, starch, stearic acid, sucrose, talc, titanium dioxide, vitamin A, vitamin E, vitamin C, and xylitol. Suitable excipients for use in the present invention also include, but are not limited to, water, phosphate buffered saline (PBS), Ringer's solution, dextrose solution, serum-containing solutions, Hank's solution, other aqueous physiologically balanced solutions, oils, esters and glycols. Aqueous excipients can contain suitable auxiliary substances required to approximate the physiological conditions of the recipient, for example, in certain embodiments, by enhancing chemical stability and isotonicity.

[1168] Pharmaceutically/medically acceptable carriers: As used herein, unless indicated otherwise or contradictory in context, the term “pharmaceutically acceptable carriers”, “medically acceptable carrier” or “carriers” refers to pharmaceutically acceptable excipients and/or delivery vehicles suitable for delivering a pharmaceutical or therapeutic composition useful in a therapeutic method and uses of the present invention to a suitable in-vivo or ex-vivo site. Preferred pharmaceutically acceptable carriers are capable of maintaining a composition containing an active combination or association of a (modified) GFR-binding compound and a bioactive carrier as defined herein, in a form that, upon arrival of the combination to a target cell, site or tissue, the active combination is capable of performing one or more biological functions thereof the protein at the cell or tissue site. One type of pharmaceutically acceptable carrier includes a controlled release formulation that is capable of slowly releasing a composition or combination into an animal. In one example, a controlled release formulation comprises an active combination or association as defined herein in a controlled release vehicle. Suitable controlled release vehicles include, but are not limited to, microparticles, biocompatible polymers, other polymeric matrices, capsules, microcapsules, osmotic pumps, bolus preparations, diffusion devices, liposomes, lipospheres, and transdermal delivery systems. Such suitable controlled release vehicle may be combined with at least one targeting moiety. In one embodiment, the pharmaceutically acceptable carrier is not a naturally occurring carrier.

[1169] Targeting Moieties: In one example, the pharmaceutical association or combination disclosed herein includes at least one binding partner which functions to target the cell to a specific tissue space or to interact with a specific moiety, either in-vivo, ex-vivo or in-vitro. Suitable binding partners include antibodies and functional fragments thereof, scaffold proteins, or peptides.

[1170] In one example, said excipients, carriers or vehicles are compatible with the (modified) GFR-binding compounds or pharmaceutical association or combinations defined herein so that they do not disrupt, tamper, modify, de-organise, de-combine or de-associate said the (modified) GFR-binding compounds or pharmaceutical association or combinations. In contrast, said excipients, carriers or vehicles preserves, maintains or reinforces the stability of the (modified) GFR-binding compounds or pharmaceutical association or combinations so as to preserve their biological activity.

[1171] In one example, the present pharmaceutical compositions also include pharmaceutically acceptable salts and/or solvates and/or prodrugs and/or isotopically-labelled derivatives of the substances and compounds described herein such as the (modified) GFR-binding compounds or any other active principles.

[1172] Pharmaceutically acceptable salts: As used herein, unless indicated otherwise or contradictory in context, the term “pharmaceutically acceptable salts” refers to derivatives of the disclosed substances and compounds wherein the parent substance or compound is modified by converting an existing acid or base moiety to its salt form (e.g., by reacting the free base group with a suitable organic acid). The degree of ionization in the salt may vary from completely ionized to almost non-ionized. Examples of pharmaceutically acceptable salts include, but are not limited to, mineral or organic acid salts of basic residues such as amines; alkali or organic salts of acidic residues such as carboxylic acids; and the like. Representative acid addition salts include acetate, adipate, alginate, ascorbate, aspartate, benzenesulfonate, benzoate, bisulfate, borate, butyrate, camphorate, camphorsulfonate, citrate, cyclopentanepropionate, digluconate, dodecylsulfate, ethanesulfonate, fumarate, glucoheptonate, glycerophosphate, hemisulfate, heptonate, hexanoate, hydrobromide, hydrochloride, hydroiodide, 2-hydroxy-ethanesulfonate, lactobionate, lactate, laurate, lauryl sulfate, malate, maleate, malonate, methanesulfonate, 2-naphthalenesulfonate, nicotinate, nitrate, oleate, oxalate, palmitate, pamoate, pectinate, persulfate, 3-phenylpropionate, phosphate, picrate, pivalate, propionate, stearate, succinate, sulfate, tartrate, thiocyanate, toluenesulfonate, undecanoate, valerate salts, and the like. Representative alkali or alkaline earth metal salts include sodium, lithium, potassium, calcium, magnesium, and the like, as well as nontoxic ammonium, quaternary ammonium, and amine cations, including, but not limited to ammonium, tetramethylammonium, tetraethylammonium, methylamine, dimethylamine, trimethylamine, triethylamine, ethylamine, and the like. The pharmaceutically acceptable salts of the present disclosure include the conventional non-toxic salts of the parent compound formed, for example, in certain embodiments, from non-toxic inorganic or organic acids. The pharmaceutically acceptable salts of the present disclosure can be synthesized from the parent compound which contains a basic or acidic moiety by conventional chemical methods. Generally, such salts can be prepared by reacting the free acid or base forms of these compounds with a stoichiometric amount of the appropriate base or acid in water or in an organic solvent, or in a mixture of the two; generally, non-aqueous media like ether, ethyl acetate, ethanol, isopropanol, or acetonitrile are preferred. Lists of suitable salts are generally found in Remington's Pharmaceutical Sciences, 17th ed., Mack Publishing Company, Easton, Pa., 1985, p. 1418 and in Pharmaceutical Salts: Properties, Selection, and Use, P. H. Stahl and C. G. Wermuth (eds.), Wiley-VCH, 2008, each of which being incorporated herein by reference in its entirety. In one embodiment, the pharmaceutically acceptable salt is not a naturally occurring salt.

[1173] Pharmaceutically acceptable solvate: As used herein, unless indicated otherwise or contradictory in context, the term “pharmaceutically acceptable solvate,” refers to a compound, substance, association or combination wherein molecules of a suitable solvent are incorporated in the crystal lattice. A suitable solvent is physiologically tolerable at the dosage administered. For example, in certain embodiments, solvates may be prepared by crystallization, recrystallization, or precipitation from a solution that includes organic solvents, water, or a mixture thereof. Examples of suitable solvents are ethanol, water (For example, in certain embodiments, mono-, di-, and tri-hydrates), N-methylpyrrolidinone (NMP), dimethyl sulfoxide (DMSO), dimethylformamide (DMF), [Nu],[Nu]′-dimethylacetamide (DMAC), 1,3-dimethyl-2-imidazolidinone (DMEU), 1,3-dimethyl-3,4,5,6-tetrahydro-2-(1H)-pyrimidinone (DMPU), acetonitrile (ACN), propylene glycol, ethyl acetate, benzyl alcohol, 2-pyrrolidone, benzyl benzoate, and the like. When water is the solvent, the solvate is referred to as a “hydrate”. In one embodiment, the pharmaceutically acceptable solvate is not a naturally occurring solvate.

[1174] Pharmaceutically acceptable isotopically-labelled compounds: In one example, the present invention also includes all pharmaceutically acceptable isotopically-labelled derivatives, which are identical to the compounds, substances, combinations or associations described herein but wherein one or more atoms are replaced by atoms having an atomic mass or mass number different from the atomic mass or mass number usually found in nature. Examples of isotopes that may be incorporated into GFR-binding compound(s) as defined herein include isotopes of hydrogen, carbon, chlorine, fluorine, iodine, nitrogen, oxygen, and sulfur, such as ²H, ³H, ¹¹C, ¹³C, ¹⁴C, ³⁶Cl, ¹⁸F, ¹²³I, ¹³N, ¹⁵N, ¹⁷O, ¹⁸O, and ³⁵S, respectively. It should be understood that compounds, substances, combinations, associations, prodrugs, and pharmaceutical acceptable salts thereof described herein which contain the aforementioned isotopes and/or other isotopes of other atoms are within the scope of the invention. Certain isotopically labeled of the compounds, substances, combinations, associations, prodrugs, and salts thereof such as, for example, in certain embodiments, those incorporating a radioactive isotope such as ³H and ¹⁴C, are useful in drug and/or substrate tissue distribution studies. Tritium, i.e. ³H, and carbon-14, i.e. ¹⁴C, are particularly preferred due to their ease of preparation and detection. Further, substitution with heavier isotopes such as deuterium, i.e. ²H, can afford certain therapeutic advantages resulting from greater metabolic stability, for example, in certain embodiments, increased in vivo half-life or reduced dosage requirements, and hence may be preferred in some circumstances. Isotopically labeled compounds, substances, combinations, associations, prodrugs, and salts thereof can generally be prepared by carrying out the procedures disclosed in the Schemes and/or in the Examples by substituting a readily available non-isotopically labeled reagent for an isotopically labeled reagent.

[1175] Prodrugs: As used herein, unless indicated otherwise or contradictory in context, the term “prodrug” refers to a compound, substance, combination or association that is transformed in vivo to yield a compound, substance, combination or association as defined herein or a pharmaceutically acceptable salt or solvate thereof. The transformation may occur by various mechanisms, such as via hydrolysis in blood. A prodrug of a compound, substance, combination or association defined herein may be formed in a conventional manner with one or more functional groups in the compound, such as an amino, hydroxyl or carboxyl group. For example, in certain embodiments, if a compound defined herein contains a carboxylic acid functional group, a prodrug can comprise: (1) an ester formed by the replacement of a hydrogen of the acid group with a group such as (C1-C6)alkyl or (C6-C10) aryl; (2) an activated ester formed by the replacement of the hydrogen of the acid group with groups such as —(CR²)COOR′, where CR² is a spacer and R can be groups such as H or methyl and R′ can be groups such as (C1-C6)alkyl or (C6-C10) aryl; and/or (3) a carbonate formed by the replacement of the hydrogen of the acid with groups such as CHROCOOR′ where R can be groups such as H or methyl and R′ can be groups such as (C1-C6)alkyl or (C6-C10)aryl. Similarly, if a compound defined herein contains an alcohol functional group, a prodrug can be formed via the replacement of the hydrogen of the alcohol with groups such as (C1-C6)alkanoyloxymethyl or (C1-C6)alkanoyloxyaryl or by forming an ester via condensation with, for example, in certain embodiments, an amino acid. Where a compound defined herein contains a primary or secondary amino group, a prodrug may comprise, for example, in certain embodiments, an amide formed by the replacement of one or both of the hydrogen atoms of the amino group with (C1-C10)alkanoyl or (C6-C10)aroyl. Other prodrugs of amines are well known to those skilled in the art. Alternatively, certain compounds defined herein may themselves act as prodrugs of other compounds defined herein. Discussions regarding prodrugs and their use can be found in, for example, in certain embodiments, “Prodrugs as Novel Delivery Systems,” T. Higuchi and W. Stella, Vol. 14 of the ACS Symposium Series, and Bioreversible Carriers in Drug Design, Pergamon Press, 1987 (ed. E B Roche, American Pharmaceutical Association). Examples of other prodrug types may be found in the aforementioned reference which is hereby incorporated by reference.

### IX. Administration Routes and Procedures

[1176] Compounds, substances, pharmaceutical associations or combinations to be delivered and/or pharmaceutical, dermatological, prophylactic, diagnostic, or imaging compositions or formulations thereof in accordance with the present disclosure may be administered by any route of administration effective for preventing, treating, diagnosing, or imaging a disease, disorder, and/or condition and/or treating or alleviating at least one symptoms thereof.

[1177] Suitable administration protocols include any in-vitro, in-vivo or ex-vivo administration protocol. The preferred types and routes of administration will be apparent to those of skill in the art, depending on the type of condition or disease to be prevented or treated; whether the composition is nucleic acid based, protein based, cell based or combinations or mixtures thereof; and/or the target cell/tissue.

[1178] Cells, tissues or organs can be contacted ex vivo or in vitro with a pharmaceutical association or combination for uses and methods of the invention by any suitable method, including mixing or the use of a delivery vehicle. Effective in vitro or ex vivo culture conditions include, but are not limited to, effective media, bioreactor, temperature, pH and oxygen conditions that permit cell culture. An effective medium refers to any medium in which a given host cell or tissue is typically cultured. Such medium typically comprises an aqueous medium having assimilable carbon, nitrogen and phosphate sources, and appropriate salts, minerals, metals and other nutrients, such as vitamins. Cells can be cultured in conventional fermentation bioreactors, shake flasks, test tubes, microtiter dishes, and petri plates. Culturing can be carried out at a temperature, pH and oxygen content appropriate for a cell or tissue. Such culturing conditions are within the expertise of one of ordinary skill in the art.

[1179] In one aspect, the present disclosure thus also provides a method for converting a neoplastic cell into a non-neoplastic cell, in-vitro or ex-vivo as defined herein, said method comprising the administration to a neoplastic cell of an effective amount of a pharmaceutical association, combination or composition as defined herein.

[1180] Ex-vivo administration: As used herein, unless indicated otherwise or contradictory in context, the term “ex-vivo administration” refers to performing the regulatory step outside of the subject/patient, such as administering a pharmaceutical association, combination or composition as defined herein to a population of cells (e.g., neoplastic cells) removed from a subject/patient for e.g. diagnostic, analysis and/or academic purposes.

[1181] In-vivo administration: In one example, pharmaceutical, prophylactic, diagnostic, or imaging associations, combinations or compositions are administered by one or more of a variety of routes, including oral, intravenous, intramuscular, intra-arterial, intramedullary, rectal, intravaginal, intrathecal, subcutaneous, intraventricular, transdermal, intradermal, intraperitoneal, topical (e.g. by ointments, creams, powders, lotions, gels, and/or drops), buccal, enteral, mucosal, nasal, vitreal, intratumoral, sublingual, by intra-tracheal instillation, bronchial instillation, and/or inhalation, as an oral spray, nasal spray, and/or aerosol, and/or through a portal vein catheter. In one example, pharmaceutical, prophylactic, diagnostic, or imaging associations, combinations or compositions are administered by systemic intravenous injection. In one example, pharmaceutical, prophylactic, diagnostic, or imaging associations, combinations or compositions may be administered in a way which allows them to cross the blood-brain barrier, vascular barrier, or other epithelial barrier. In one most particular example, pharmaceutical, prophylactic, diagnostic, or imaging associations, combinations or compositions may be administered locally by intratumoral administration.

[1182] Delivery: As used herein, unless indicated otherwise or contradictory in context, the term “delivery” refers to the act or manner of delivering a compound, substance, association, combination, composition, entity, moiety, cargo or payload.

[1183] Delivery Agent: As used herein, unless indicated otherwise or contradictory in context, the term “delivery agent” refers to any substance which facilitates, at least in part, the in vivo delivery of a pharmaceutical association, combination or composition defined herein to targeted cells.

[1184] Forms suitable for oral administration: A pharmaceutical association, combination or composition for uses and methods of the invention, for example, in certain embodiments, includes forms suitable for oral administration as a tablet, capsule, pill, powder, sustained release formulations, solution, suspension, or for parenteral injection as a sterile solution, suspension or emulsion. Pharmaceutical compositions suitable for the delivery of pharmaceutical associations or combinations defined herein and methods for their preparation will be readily apparent to those skilled in the art. Such compositions and methods for their preparation may be found, for example, in certain embodiments, in ‘Remington's Pharmaceutical Sciences’, 19th Edition (Mack Publishing Company, 1995), which is hereby incorporated by reference in its entirety. Oral administration may involve swallowing, so that the compounds or associations enters the gastrointestinal tract, or buccal or sublingual administration may be employed by which the compound enters the blood stream directly from the mouth. Formulations suitable for oral administration include solid formulations, such as tablets, capsules containing particulates, liquids, or powders; lozenges (including liquid-filled), chews; multi- and nano-particulates; gels, solid solution, liposome, films (including muco-adhesive), ovules, sprays and liquid formulations. Liquid formulations include suspensions, solutions, syrups and elixirs. Such formulations may be employed as fillers in soft or hard capsules and typically comprise a carrier, for example, in certain embodiments, water, ethanol, polyethylene glycol, propylene glycol, methylcellulose, or a suitable oil, and one or more emulsifying agents and/or suspending agents. Liquid formulations may also be prepared by the reconstitution of a solid, for example, in certain embodiments, from a sachet. The pharmaceutical associations defined herein may also be used in fast-dissolving, fast-disintegrating dosage forms such as those described in the art.

[1185] Forms suitable for parenteral administration: In one example, the pharmaceutical association, combination or composition for uses and methods of the invention may be administered by parenteral injection. Exemplary parenteral administration forms include sterile solutions, suspensions or emulsions of the pharmaceutical association defined herein in sterile aqueous media, for example, in certain embodiments, aqueous propylene glycol or dextrose. In another embodiment, the parenteral administration form is a solution. Such parenteral dosage forms can be suitably buffered, if desired. Preferred sterile solutions include sodium chloride, 0.9%, UPS solution. Injectable formulations can be sterilized, for example, in certain embodiments, by filtration through a bacterial-retaining filter, and/or by incorporating sterilizing agents in the form of sterile solid compositions which can be dissolved or dispersed in sterile water or other sterile injectable medium prior to use.

[1186] Forms suitable for rectal and vaginal administration: Compositions for rectal or vaginal administration are typically suppositories which can be prepared by mixing compositions with suitable non-irritating excipients such as cocoa butter, polyethylene glycol or a suppository wax which are solid at ambient temperature but liquid at body temperature and therefore melt in the rectum or vaginal cavity and release the active ingredient.

[1187] Forms suitable for topical and/or transdermal administration: Dosage forms for topical and/or transdermal administration of a composition may include ointments, pastes, creams, lotions, gels, powders, solutions, sprays, inhalants and/or patches. Generally, an active ingredient is admixed under sterile conditions with a pharmaceutically acceptable excipient and/or any needed preservatives and/or buffers as may be required.

[1188] Forms suitable for pulmonary administration: Dosage forms for pulmonary administration via the buccal cavity may comprise dry particles which comprise the active ingredient (e.g. the pharmaceutical association defined herein) and which have a diameter in the range from about 0.5 nm to about 7 nm. Such compositions are conveniently in the form of dry powders for administration using a device comprising a dry powder reservoir to which a stream of propellant may be directed to disperse the powder and/or using a self-propelling solvent/powder dispensing container such as a device comprising the active ingredient dissolved and/or suspended in a low-boiling propellant in a sealed container. Pharmaceutical compositions formulated for pulmonary delivery may provide an active ingredient in the form of droplets of a solution and/or suspension. Such formulations may be prepared, packaged, and/or sold as aqueous and/or dilute alcoholic solutions and/or suspensions, optionally sterile, comprising active ingredient, and may conveniently be administered using any nebulization and/or atomization device. Such formulations may further comprise one or more additional ingredients including, but not limited to, a flavoring agent such as saccharin sodium, a volatile oil, a buffering agent, a surface active agent, and/or a preservative such as methylhydroxybenzoate.

[1189] Forms suitable for nasal administration: Formulations described herein as being useful for pulmonary delivery are also useful for intranasal delivery of a pharmaceutical composition. Formulations suitable for nasal administration may, for example, in certain embodiments, comprise from about as little as 0.1% (w/w) and as much as 100% (w/w) of active ingredient (e.g. the pharmaceutical association defined herein), and may comprise one or more of the additional ingredients described herein. A pharmaceutical composition may be prepared, packaged, and/or sold in a formulation suitable for buccal administration. Such formulations may, for example, in certain embodiments, be in the form of tablets and/or lozenges made using conventional methods, and may, for example, in certain embodiments, 0.1% to 20% (w/w) active ingredient, the balance comprising an orally dissolvable and/or degradable composition and, optionally, one or more of the additional ingredients described herein. Alternately, formulations suitable for buccal administration may comprise a powder and/or an aerosolized and/or atomized solution and/or suspension comprising active ingredient. Such powdered, aerosolized, and/or aerosolized formulations, when dispersed, may have an average particle and/or droplet size in the range from about 0.1 nm to about 200 nm, and may further comprise one or more of any additional ingredients described herein.

[1190] Forms suitable for ophthalmic administration: Dosage forms for ophthalmic administration include, for example, in certain embodiments, eye drops including, for example, in certain embodiments, a 0.1/1.0% (w/w) solution and/or suspension of the active ingredient (e.g. the pharmaceutical association defined herein) in an aqueous or oily liquid excipient. Such drops may further comprise buffering agents, salts, and/or one or more other of any additional ingredients described herein. Other opthalmically-administrable formulations which are useful include those which comprise the active ingredient in microcrystalline form and/or in a liposomal preparation. Ear drops and/or eye drops are contemplated as being within the scope of this present disclosure.

[1191] Direct injection: One preferred administration method for delivering a pharmaceutical association, combination or composition as defined herein is by local administration, in particular, by direct injection. Direct injection techniques are particularly useful for administering a composition to a cell or tissue that is accessible by surgery, and particularly, on or near the surface of the body. Administration of a composition locally within the area of a target cell refers to injecting the composition centimeters and preferably, millimeters from the target cell or tissue.

[1192] Dosage regimens: The dosage regimen of the pharmaceutical associations or combinations and/or pharmaceutical compositions as defined herein may be adjusted to provide the optimum desired response. For example, in certain embodiments, a single bolus may be administered, several divided doses may be administered over time or the dose may be proportionally reduced or increased as indicated by the exigencies of the therapeutic situation. The appropriate dosing regimen, the amount of each dose administered and/or the intervals between doses will depend upon the pharmaceutical association being used, the type of pharmaceutical composition, the characteristics of the subject in need of treatment and the severity of the condition being treated. Thus, the skilled artisan would appreciate, based upon the disclosure provided herein, that the dose and dosing regimen is adjusted in accordance with methods well-known in the therapeutic arts. That is, the maximum tolerable dose can be readily established, and the effective amount providing a detectable therapeutic benefit to a patient may also be determined, as can the temporal requirements for administering each agent to provide a detectable therapeutic benefit to the patient. Accordingly, while certain dose and administration regimens are exemplified herein, these examples in no way limit the dose and administration regimen that may be provided to a patient in practicing the present invention. In general, pharmaceutical compositions in accordance with the present disclosure may be administered at dosage levels sufficient to deliver from about 0.0001 mg/kg to about 100 mg/kg, from about 0.01 mg/kg to about 50 mg/kg, from about 0.1 mg/kg to about 40 mg/kg, from about 0.5 mg/kg to about 30 mg/kg, from about 0.01 mg/kg to about 10 mg/kg, from about 0.1 mg/kg to about 10 mg/kg, or from about 1 mg/kg to about 25 mg/kg, of subject body weight per day, one or more times a day, to obtain the desired therapeutic, diagnostic, prophylactic, or imaging effect. The desired dosage may be delivered three times a day, two times a day, once a day, every other day, every third day, every week, every two weeks, every three weeks, or every four weeks. In certain embodiments, the desired dosage may be delivered using multiple administrations (e.g., two, three, four, five, six, seven, eight, nine, ten, eleven, twelve, thirteen, fourteen, or more administrations). It is to be further understood that for any particular subject, specific dosage regimens should be adjusted over time according to the individual need and the professional judgment of the person administering or supervising the administration of the compositions, and that dosage ranges set forth herein are exemplary only and are not intended to limit the scope or practice of the present invention. For example, in certain embodiments, doses may be adjusted based on pharmacokinetic or pharmacodynamic parameters, which may include clinical effects such as toxic effects and/or laboratory values. Thus, the present invention encompasses intra-patient dose-escalation as determined by the skilled artisan. Determining appropriate dosages and regiments for administration of the chemotherapeutic agent are well-known in the relevant art and would be understood to be encompassed by the skilled artisan once provided the teachings disclosed herein.

[1193] Effective dose parameters: The dosage regimen of the pharmaceutical associations or combinations and/or pharmaceutical compositions as defined herein may be adjusted to obtain effective dose parameters. Effective dose parameters can be determined using methods standard in the art for a particular disease or condition. In particular, the effectiveness of dose parameters of a therapeutic composition as defined herein when treating cancer can be determined by assessing response rates. Such response rates refer to the percentage of treated patients in a population of patients that respond with either partial or complete remission. Remission can be determined by, for example, in certain embodiments, measuring tumor size or microscopic examination for the presence of cancer cells in a tissue sample.

[1194] A pharmaceutical composition as defined herein may be prepared, packaged, or sold in bulk, as a single unit dose, or as a plurality of single unit doses.

[1195] Unit dose: As used herein, unless indicated otherwise or contradictory in context, the term “unit dose” refers to a discrete amount of the pharmaceutical composition comprising a predetermined amount of the active ingredient. The amount of the active ingredient is generally equal to the dosage of the active ingredient which would be administered to a subject or a convenient fraction of such a dosage such as, for example, in certain embodiments, one-half or one-third of such a dosage.

[1196] Single unit dose: As used herein, unless indicated otherwise or contradictory in context, the term “single unit dose” refers to a dose of any therapeutic association or composition administered in one dose/at one time/single route/single point of contact, i.e., single administration event.

[1197] Split dose: As used herein, unless indicated otherwise or contradictory in context, the term “split dose” refers to the division of single unit dose or total daily dose into two or more doses.

[1198] Total daily dose: As used herein, unless indicated otherwise or contradictory in context, the term “total daily dose” refers to an amount given or prescribed in 24 hr period. It may be administered as a single unit dose.

[1199] The relative amounts of the active ingredient(s), the pharmaceutically acceptable excipients, carriers or vehicles, and any additional ingredients in a pharmaceutical composition defined herein will vary, depending upon the identity, size, and condition of the subject treated and further depending upon the route by which the composition is to be administered. In addition to the active ingredient, a pharmaceutical composition of the invention may further comprise one or more additional pharmaceutically active agents.

[1200] Combination therapy: Compounds, associations, compositions or formulations defined herein may be used in combination with one or more other therapeutic, prophylactic, diagnostic, or imaging agents. As used herein, the term “in combination with” is not intended to imply that the agents must be administered at the same time and/or formulated for delivery together, although these methods of delivery are within the scope of the present disclosure. Compounds, associations, compositions or formulations can be administered concurrently with, prior to, or subsequent to, one or more other desired therapeutics or medical procedures. In some embodiments, they are administered within about 90, 60, 30, 15, 10, 5, or 1 minute of one another. In some embodiments, the administrations of the agents are spaced sufficiently closely together such that a combinatorial (e.g., a synergistic) effect is achieved. In general, each agent will be administered at a dose and/or on a time schedule determined for that agent. In one example, the present disclosure encompasses the delivery of pharmaceutical, prophylactic, diagnostic, or imaging compositions in combination with agents that improve their bioavailability, reduce and/or modify their metabolism, inhibit their excretion, and/or modify their distribution within the body. It will further be appreciated that therapeutically, prophylactically, diagnostically, or imaging active agents used in combination may be administered together in a single composition or administered separately in different compositions. In general, it is expected that agents used in combination with be used at levels that do not exceed the levels at which they are used individually. In one example, the levels used in combination will be lower than those utilized individually. The particular combination of therapies to employ in a combination regimen will take into account compatibility of the desired therapeutics and/or procedures and the desired therapeutic effect to be achieved. It will also be appreciated that the therapies employed may achieve a desired effect for the same disorder (For example, in certain embodiments, a composition useful for treating cancer in accordance with the present disclosure may be administered concurrently with a chemotherapeutic agent), or they may achieve different effects (e.g., control of any adverse effects).

[1201] Although the descriptions of pharmaceutical associations, combinations or compositions provided herein are principally directed to pharmaceutical associations, combinations or compositions which are suitable for administration to mammals, in particular humans, it will be understood by the skilled artisan that such compositions are generally suitable for administration to animals of all sorts, in particular to any member of the Vertebrate class. Modification of pharmaceutical compositions suitable for administration to humans in order to render the compositions suitable for administration to various animals is well understood, and the ordinarily skilled veterinary pharmacologist can design and/or perform such modification with merely ordinary, if any, experimentation. Subjects to which administration of the pharmaceutical compositions is contemplated include, but are not limited to, humans and/or other primates; mammals, including commercially relevant mammals such as cattle, pigs, horses, sheep, cats, dogs, mice, and/or rats; and/or birds, including commercially relevant birds such as chickens, ducks, geese, and/or turkeys.

### X. Dermatological Applications

[1202] When the neoplastic disease to be prevented or treated involves neoplastic cells belonging to the skin cell lineage (mainly to the fibroblast lineage), the pharmaceutical composition defined herein may be a dermatological composition comprising a pharmaceutical association or combination of a GFR-binding compound and a bioactive carrier as all defined herein and at least one dermatologically acceptable excipient.

[1203] For example, in certain embodiments, a dermatological composition for the uses of the invention may contain between 0.01% and 100% by weight (over the total weight of the dermatological composition) of a GFR-binding compound or bioactive carrier, both as defined herein, as a dermatological effective amount. The dermatological composition particularly comprises between 0.01% and 95%, between 0.01% and 90%, between 0.01% and 85%, between 0.01% and 80%, between 0.01% and 75%, between 0.01% and 70%, between 0.01% and 65%, between 0.01% and 60%, between 0.01% and 55%, between 0.01% and 50%, between 0.01% and 45%, between 0.01% and 40%, between 0.01% and 35%, between 0.01% and 30%, between 0.01% and 25%, between 0.01% and 20%, between 0.01% and 15%, between 0.01% and 10%, between 0.01% and 5%, between 0.1% and 100%, between 0.1% and 95%, between 0.1% and 90%, between 0.1% and 85%, between 0.1% and 80%, between 0.1% and 75%, between 0.1% and 70%, between 0.1% and 65%, between 0.1% and 60%, between 0.1% and 55%, between 0.1% and 50%, between 0.1% and 45%, between 0.1% and 40%, between 0.1% and 35%, between 0.1% and 30%, between 0.1% and 25%, between 0.1% and 20%, between 0.1% and 15%, between 0.1% and 10%, and between 0.1% and 5% by weight (over the total weight of the dermatological composition) of any one of a GFR-binding compound or a bioactive carrier or both.

[1204] Dermatologically acceptable: As used herein, unless indicated otherwise or contradictory in context, the term “dermatologically acceptable” means that the compound(s) or pharmaceutical association(s) used are adapted for use in contact with human skin without undue toxicity, incompatibility, instability, allergic response, or their equivalents.

[1205] Dermatological formulations: Suitable formulation for implementing dermatological embodiments of the invention include an aqueous or oil-based solution, a water-based cream or gel or an oily gel, usually in a jar or a tube, particularly a shower gel, shampoo, milk, emulsion, microemulsion or nanoemulsion, particularly oil-in-water or water-in-oil or multiple of silicone-based; a lotion, particularly in a glass or plastic bottle of a spray or aerosol bottle, a blister-pack, liquid soap, a dermatological bar of soap, a pomade, mousse, an anhydrous product, preferably liquid, cream or solid, for example in the form of a stick, particularly in the form of lipstick, a cataplasm or a patch.

[1206] Preferred administration routes include, but are not limited to, topical, intradermal and intra-tumoral as already defined herein.

[1207] Dermatologically acceptable excipients: Suitable dermatologically acceptable excipients for implementing embodiments of the invention include, but are not limited to, preservatives, emollients, emulsifiers, surfactants, moisturizers, thickeners, conditioners, mattifying agents, stabilizers, antioxidants, texturizing agents, shine agents, filmogenic agents, solubilizers, pigments, colorants, perfumes, and solar filters. These excipients are preferably chosen from among the group consisting of amino acids and their derivatives, polyglycerols, esters, polymers and cellulose derivatives, lanoline derivatives, phospholipids, lactoferrins, lactoperoxidases, sucrose-based stabilizers, vitamin E and its derivatives, natural and synthetic waxes, vegetable oils, triglycerides, insaponifiables, phytosterols, plant esters, silicones and their derivatives, protein hydrolysates, jojoba oil and its derivatives, lipo/hydrosoluble esters, betaines, aminoxides, saccharose ester plant extracts, titanium dioxides, glycines, parabens, and even more preferably from among the group consisting of butylene glycol, glycol-15 stearyl ether, cetearyl alcohol, phenoxyethanol, methylparaben, propylparaben, butylparaben, butylenes glycol, natural tocopherols, glycerine, dihydroxycetyl sodium phosphate, isopropyl hydroxycetyl ether, le glycol stearate, triisononanoin, octyl cocoate, polyacrylamide, isoparaffin, laureth-7, carbomer, propylene glycol, glycerol, bisabolol, dimethicone, sodium hydroxide, PEG 30-dipolyhydroxysterate, capric/caprylic triglycerides, cetearyl octanoate, dibutyl adipate, grapeseed oil, jojoba oil, magnesium sulfate, EDTA, cyclomethicone, xanthan gum, citric acid, sodium lauryl sulfate, mineral waxes and oils, isostearyl isostearate, dipelargonate of propylene glycol, isostearate of propylene glycol, PEG 8, beeswax, glyceride of hydrogenated palm kernel oil, lanolin oil, sesame oil, cetyl lactate, lanolin alcohol, titanium dioxide, lactose, saccharose, low-density polyethylene, and isotonic salt solution.

[1208] In one example, the dermatological composition as defined herein may contain at least one other active agents and/or excipients and/or additives of pharmaceutical, especially dermatological, interest such as agents with the following properties:
[1209] wound-healing properties; such as panthenol and derivatives thereof, for example ethyl panthenol, aloe vera, pantothenic acid and derivatives thereof, allantoin, bisabolol, and dipotassium glycyrrhizinate;
[1210] anti-inflammatory properties: such as steroidal and non-steroidal antiinflammatories, in particular Inhibitors of the production of cytokines and chemokines, of cyclooxygenase, of nitric oxide (NO) and nitric oxide synthase (NOS). As an example of anti-inflammatory products, mention may be made of extracts of Ginkgo biloba, trilactone terpenes such as ginkgolides, especially ginkgolide B and bilobalide known for their platelet-activating factor (PAF) antagonist properties.

[1211] The CTFA Cosmetic Ingredient Handbook, Second Edition (1992), which is hereby incorporated by reference in its entirety, describes different cosmetic and pharmaceutical ingredients currently used in the cosmetic and pharmaceutical industry that are particularly adapted to topical use and which may be used in a dermatological composition of the invention. Examples of these types of ingredients include but are not limited to the following compounds: abrasives, absorbent compounds, compounds with aesthetic purposes such as perfumes, pigments, colorants, essential oils, astringents, etc. (for example: clove oil, menthol, camphor, eucalyptus oil, eugenol, menthyl lactate, and hamelis distillate), anti-acne agents, anti-flocculant agents, anti-foaming agents, anti-microbial agents (for example iodopropyl butylcarbamate), les antioxidants, bonding agents, biological additives, tampon agents, swelling agents, chelatants, additives, biocidal agents, denaturants, external analgesics, film-forming materials, polymers, opacifying agents, pH adjusters, reducing agents, depigmenting or lightening agents (for example: hydroquinone, kojic acid, ascorbic acid, magnesium ascorbyl phosphate, ascorbyl glucosamine), conditioning agents (for example: humectants), calming agents for the skin and/or scarring agents (for example: panthenol and its derivatives, for example ethyl panthenol), aloe vera, pantothenic acid and its derivatives, allantoin, bisabolol and dipotassium glycyrrhizinate), thickeners, vitamins, and the derivatives or equivalents of these.

[1212] In one aspect, the present disclosure provides a pharmaceutical association or combination as defined herein or a dermatological composition as defined herein for use in converting a neoplastic skin cell (i.e. any cell belonging to the fibroblast lineage as defined herein) into a non-neoplastic skin cell, in particular into a functional and/or healthy skin cell.

[1213] In one aspect, the present disclosure provides a pharmaceutical association or combination as defined herein or a dermatological composition as defined herein for use in protecting (i.e. preventing and/or treating) a subject or patient from a skin neoplastic disease, disorder or condition, in particular, but not limited to, basal and squamous cell skin cancers, melanoma skin cancer, Merkel cell carcinoma, lymphoma of the skin and Kaposi sarcoma.

[1214] Suitable as amounts of pharmaceutical association for implementing embodiments of the invention in the dermatological field include the group consisting of between about 0.0001 □g/day to about 5000 mg/day, between about 0.0001□□g/day to about 1000 mg/day, between about 0.0001 □g/day to about 10 mg/day, between about 0.0001 □g/day to about 1 mg/day, or between about 0.0001 □g/day to about 100 □g/day, all being preferred for implementing embodiments of the invention.

[1215] Advantageously, the subject who has need thereof is a subject chosen from a population having an average age of more than 30 years old or who has had sunlight over-exposure, has a family history of skin cancer, has or has had certain other skin conditions or previous radiotherapy, has been exposed to certain chemicals and has a weakened immune system.

### XI. Ophthalmic Applications

[1216] Preferable dosage forms for the pharmaceutical association, combination or composition as defined herein for treating ophthalmic neoplastic diseases, disorders or conditions include, for example, in certain embodiments, eye drops and eye ointments. These can be prepared using conventional techniques. For instance, eye drops may be prepared, using isotonic agents such as sodium chloride, buffers such as sodium phosphate, and preservatives such as benzalkonium chloride. A suitable pH is within an ophthalmologically acceptable range. Preferred pH is within pH 4 to 8.

[1217] Particularly preferred administration routes include vitreal, intraocular and intra-tumoral.

[1218] A suitable dose of pharmaceutical association, combination or composition for treating eye disorders is appropriately selected, depending on the symptoms, age of patients, dosage form and the like. For eye drops, suitable concentration may be 0.0001 to 10 w/v %, preferably 0.0001 to 0.01 w/v % for administration into eyes once or several times a day.

### XII. Surgical Treatments

[1219] In one aspect, the pharmaceutical association, combination or composition as defined herein may be used in a surgical method suitable for treating or preventing a neoplastic disease such as a tumour or a cancer.

[1220] In one aspect, the present disclosure provides a surgical method for surgical treatment of a neoplastic disease comprising the provision of a pharmaceutical association, combination or composition as defined herein, and the contacting or administration of said pharmaceutical association, combination or composition with a body part of a patient to be treated.

[1221] For example, in certain embodiments, the surgical treatment of the invention may include the provision of a placement, insertion or depositing device and the contacting of said pharmaceutical association, combination or composition with a body part of a patient using said placement, insertion or depositing device.

[1222] In one example, said placement, insertion or depositing device comprises an injection device such as a syringe, and comprises the positioning of said pharmaceutical association, combination or composition inside said injection device for injection into a subject/patient or into a body part of a subject/patient.

### XIII. Pharmaceutical Applications, Uses and Methods

[1223] The present invention provides for uses and methods of converting or inducing the conversion or the recoding of a neoplastic cell (e.g. a cancer cell) into a non-neoplastic cell (e.g. a non-cancerous cell) through extracellular, non-mutagenic, conversion or recoding of said neoplastic cell. In other words, the present disclosure provides methods for a neoplastic cell to perform self-healing or self-recovery into a more functional, healthy, non-neoplastic cell.

[1224] Conveniently, such a self-healing process is generally achieved within less than 7 days. In particular, such a self-healing process is generally achieved within less than 6 days. In particular, such a self-healing process is generally achieved within less than 5 days. In particular, such a self-healing process is generally achieved within less than 4 days. In particular, such a self-healing process is generally achieved within less than 3 days. In particular, such a self-healing process is generally achieved within less than 2 days. In particular, such a self-healing process is generally achieved within less than 24 hours. In particular, such a self-healing process is generally achieved within less than 18 hours.

[1225] Conveniently, such a self-healing process is achieved with a cell conversion yield greater than about 50%. In particular, such a self-healing process is achieved with a cell conversion yield greater than about 60%. In particular, such a self-healing process is achieved with a cell conversion yield greater than about 70%. In particular, such a self-healing process is achieved with a cell conversion yield greater than about 80%. In particular, such a self-healing process is achieved with a cell conversion yield greater than about 90%. In particular, such a self-healing process is achieved with a cell conversion yield greater than about 95%. In particular, such a self-healing process is achieved with a cell conversion yield is about 100%.

[1226] Cell conversion yield: As used herein, “cell conversion yield” means the percentage of neoplastic cells that are transformed into non-neoplastic cells. It is considered significant when it is higher than 10%. There are many ways to measure a cell conversion yield, but for the purpose of the present disclosure, and for the avoidance of any doubts, the cell conversion yield is herein measured by using a haemocytometer for precise cell counting using, for instance, a haemocytometer from Baxter Scientific and following the standard procedure below:
[1227] (a) Cleaning the chamber and cover slip with alcohol. Drying and fixing the coverslip in position.
[1228] (b) Harvesting the cells. Adding 10 μL of the cells to the haemocytometer.
[1229] (c) Placing the chamber in the inverted microscope under a 10× objective. Using phase contrast to distinguish the cells.
[1230] (d) Counting the cells in the large, central gridded square (1 mm²). The gridded square is circled in the graphic below. Multiplying by 10⁴ to estimate the number of cells per mL.
[1231] (e) Preparing duplicate samples and averaging the count.

[1232] In certain embodiments, the present disclosure provides methods to convert a neoplastic cell into a non-neoplastic cell, wherein said obtained neoplastic cell is homogeneous and/or of substantially the same differentiation state. Conveniently, the converted non-neoplastic cells obtained using a method as defined herein, have a homogeneity of greater than 20%. In particular, the converted non-neoplastic cells obtained using a method as defined herein, have a homogeneity of greater than 50%. In particular, the converted non-neoplastic cells obtained using a method as defined herein, have a homogeneity of greater than 70%. In particular, the converted non-neoplastic cells obtained using a method as defined herein, have a homogeneity of greater than 90%. In particular, the converted non-neoplastic cells obtained using a method as defined herein, have a homogeneity of greater than 99%.

[1233] Homogeneous: As used herein, “homogeneous”, when used in relation to a non-neoplastic cell population obtained using methods as defined herein, means that substantially all of the obtained non-neoplastic cells within the population are in a G0 phase. There are many ways to test and measure the homogeneity of a cell population, but for the purpose of the present disclosure, and for the avoidance of any doubts, the cell homogeneity is herein measured using cell immunofluorescence staining by detecting phosphorylation of the Rb protein, an absence of phosphorylation meaning that substantially all cells are in a G0 phase.

[1234] Conveniently, the converted non-neoplastic cells obtained using a method as defined herein, are more than 20% identical. In particular, the converted non-neoplastic cells obtained using a method as defined herein, are more than 50% identical. In particular, the converted non-neoplastic cells obtained using a method as defined herein, are more than 70% identical. In particular, the converted non-neoplastic cells obtained using a method as defined herein, are more than 90% identical. In particular, the converted non-neoplastic cells obtained using a method as defined herein, are more than 99% identical.

[1235] As used herein, “substantially the same differentiation state” or “substantially identical differentiation state”, when used in relation to non-neoplastic cells obtained using methods as defined herein, means exhibiting the same gene expression pattern. There are many ways to test and measure the differentiation state of a cell and group of cells, but for the purpose of the present disclosure, and for the avoidance of any doubts, the differentiation state of a cell or a group of cell is herein measured using RT-PCR for the quantification of the expression of well-defined marker genes for the particular differentiation state.

[1236] In certain aspects, a pharmaceutical association, combination or composition as defined herein is thus useful in the protection of a subject/patient from (e.g. in the treatment and/or prevention of) a neoplastic disease, condition, disorder or pathology and/or at least one symptom thereof such as tumors and cancers. In one aspect, the present disclosure provides a pharmaceutical association, combination or (therapeutic, dermatologic, ophthalmologic, diagnostic, etc.) composition defined herein for use in the treatment of a neoplastic disease, condition, disorder or pathology and/or at least one symptom thereof, said composition comprising a GFR-binding compound and a bioactive carrier, all as already defined herein. Also provided is a method of treating a neoplastic disease, comprising administering to a subject in need thereof an effective amount of a pharmaceutical association, combination or (therapeutic, dermatologic, ophthalmologic, diagnostic, etc.) composition as defined herein.

[1237] In one aspect, the present disclosure provides a pharmaceutical association, combination or (therapeutic, dermatologic, ophthalmologic, diagnostic, etc.) composition defined herein for use in a method of converting or recoding a neoplastic cell to induce and/or promote and/or improve self-healing and/or self-recovery thereof. Also provided is a method of converting or recoding a neoplastic cell to induce and/or promote and/or improve self-healing and/or self-recovery thereof, comprising administering to a subject in need thereof an effective amount of a pharmaceutical association, combination or (therapeutic, dermatologic, ophthalmologic, diagnostic, etc.) composition as defined herein.

[1238] In one example, the conversion or recoding of the neoplastic cell into a non-neoplastic cell is substantially permanent. As used herein, the term “permanent”, when used in relation to the conversion or recoding of a neoplastic cell into a non-neoplastic cell, means physiologically permanent conversion as the neoplastic cell treated by the method of the invention then becomes a normal, functional, healthy cell just like any other non-neoplastic cell of the subject's body and is thus not prevented to develop a new neoplastic state or any other abnormal state in the future (like any normal cell could/would).

[1239] In one aspect, the present disclosure provides a pharmaceutical association, combination or (therapeutic, dermatologic, ophthalmologic, diagnostic, etc.) composition defined herein for use in a method of restoring the ability of a neoplastic cell to undergo differentiation. Also provided is a method of restoring the ability of a neoplastic cell to undergo differentiation, comprising administering to a subject in need thereof an effective amount of a pharmaceutical association, combination or (therapeutic, dermatologic, ophthalmologic, diagnostic, etc.) composition as defined herein.

[1240] In one aspect, the present disclosure provides a pharmaceutical association, combination or (therapeutic, dermatologic, ophthalmologic, diagnostic, etc.) composition defined herein for use in a method of converting and/or recoding a circulating or non-circulating neoplastic cell such as a metastatic or non-metastatic cancer cell, into a non-neoplastic cell. Also provided is a method of converting and/or recoding a circulating or non-circulating neoplastic cell such as a metastatic or non-metastatic cancer cell, into a non-neoplastic cell, comprising administering to a subject in need thereof an effective amount of a pharmaceutical association, combination or (therapeutic, dermatologic, ophthalmologic, diagnostic, etc.) composition as defined herein.

[1241] In one aspect, the present disclosure provides a pharmaceutical association, combination or (therapeutic, dermatologic, ophthalmologic, diagnostic, etc.) composition defined herein for use in a method of providing and/or producing and/or inducing the formation of a physiologically functional and/or healthy cell of the bone, cartilage, vascular, blood, fibroblast, muscle, neural, epithelial, renal, retinal cell lineage from a neoplastic cell. Also provided is a method of providing and/or producing and/or inducing the formation of a physiologically functional and/or healthy cell of the bone, cartilage, vascular, blood, fibroblast, muscle, neural, epithelial, renal, retinal cell lineage from a neoplastic cell, comprising administering to a subject in need thereof an effective amount of a pharmaceutical association, combination or (therapeutic, dermatologic, ophthalmologic, diagnostic, etc.) composition as defined herein.

[1242] In one aspect, the present disclosure provides a pharmaceutical association, combination or (therapeutic, dermatologic, ophthalmologic, diagnostic, etc.) composition defined herein for use in a method of inducing and/or promoting and/or enhancing neoplastic cell differentiation. Also provided is a method of inducing and/or promoting and/or enhancing neoplastic cell differentiation, comprising administering to a subject in need thereof an effective amount of a pharmaceutical association, combination or (therapeutic, dermatologic, ophthalmologic, diagnostic, etc.) composition as defined herein.

[1243] In one aspect, the present disclosure provides a pharmaceutical association, combination or (therapeutic, dermatologic, ophthalmologic, diagnostic, etc.) composition defined herein for use in a method of non-mutagenically protecting a subject from a neoplastic disease i.e. without modifying or altering the genome of the treated neoplastic cells. Also provided is a method of non-mutagenically protecting a subject from a neoplastic disease i.e. without modifying or altering the genome of the treated neoplastic cells, comprising administering to a subject in need thereof an effective amount of a pharmaceutical association, combination or (therapeutic, dermatologic, ophthalmologic, diagnostic, etc.) composition as defined herein.

[1244] In one aspect, the present disclosure provides a pharmaceutical association, combination or (therapeutic, dermatologic, ophthalmologic, diagnostic, etc.) composition defined herein for use in a method of extracellular treatment of a neoplastic disease, disorder, condition, pathology, or any symptoms thereof. Also provided is a method of extracellular treatment of a neoplastic disease, disorder, condition, pathology, or any symptoms thereof, comprising administering to a subject in need thereof an effective amount of a pharmaceutical association, combination or (therapeutic, dermatologic, ophthalmologic, diagnostic, etc.) composition as defined herein.

[1245] An extracellular treatment as used herein implies a biological action/effect to be provided or to occur outside the cell to be treated (i.e. a neoplastic cell). In other words, the biologically active agent (e.g. the pharmaceutical association, combination or composition as defined herein) delivers/provides its biological/pharmaceutical effect to the outside of the cell (e.g. on the cell's surface) without the need to penetrate through the cell membrane, inside the neoplastic cell to be treated. Once the extracellular action/effect has been administered/delivered to the cell to be treated, said active agent may be, for instance, excreted from the host organism with or without being metabolised, and/or tagged to be destroyed through apoptotic routes, and/or internalised by nearby cells, etc. . . . . Without being bound to any specific theory, it is believed that once the extracellular biological action/effect/message/signal has been delivered by the pharmaceutical association or composition defined herein to a neoplastic cell to be treated, said cell then undergo self-healing into a functional, healthy, non-neoplastic cell.

[1246] Data have shown (FIG. 8) that the administration or action of the pharmaceutical association or composition as defined herein on neoplastic cells to be treated, implicates and down-regulates (in particular, reduces, substantially reduces or suppress) the Ras/MAP kinase, FAK/Src kinase and/or PIP2 signalling pathways. Without wishing to be bound to any specific theory, it is conventionally known that these pathways control the expression of cyclins D, which in turn controls the activity of CDKs 4 and/or 6 so that down-regulating (in particular, reducing, significantly reducing or suppressing) the Ras/MAP kinase, FAK/Src kinase and/or PIP2 pathways would inhibit, reduce, damper or suppress the expression of cyclins D and/or CDK4 and CDK6 and/or the formation of the cyclins D-CDK4/6 complexes.

[1247] As already stated herein, cell cycle comprises four main phases: The S phase for DNA duplication, followed by a G2 phase for preparation of the entry into the M phase, the M or mitotic phase wherein the cell divides and finally the G1 phase for cell growth. During the G1 phase the cell makes decisions on whether to continue the cell cycle and undergo cell growth and further divide, or to exit the cycle in the G0 phase and remains quiescent, die or initiate differentiation. The progression through the cell cycle is governed by phosphorylation signals emitted by different bimolecular complexes composed of CDKs and cyclin proteins, both as defined herein.

[1248] The cyclin D-CDK4/6 complexes are capable of leading a cell through the restriction (R)-point which is generally known for controlling the passage of the cell from the G1 phase to the S phase of the cell cycle. This control gate is generally thought to be located at the end of the cell cycle's G1 phase, just before entry into S phase, and is involved in the decision of whether the cell should divide or proliferate, delay division, or enter the G0 resting state.

[1249] This control gate ensures that a series of surveillance or monitoring mechanisms are completed successfully before proceeding through to the next phase. These monitoring mechanisms are also commonly termed “checkpoints” or “checkpoint controls”. If a checkpoint is not validated by the control gate, the cell should halt further advance through the cell cycle and enter the G0 phase. However, neoplastic cells, such as cancer cells, have developed mechanisms that somehow “disconnect” or “impair” one or more checkpoints from the control gate so that the cell is “tricked to” believe that all checkpoints are validated (or, in other words, “tricked to ignore” the non-validated status of relevant checkpoints) and thus never or rarely enter into the G0 phase.

[1250] Without wishing to be bound to any specific theory, it is thought that the pharmaceutical associations, combination or composition as defined herein can restore or re-establish (the integrity of) one or more impaired cell cycle checkpoints so as to restore the lost ability of a neoplastic cell to detect a malfunction or a defect in the cell cycle regulation, induce the cell cycle arrest and exit the cell cycle in G0.

[1251] One particular checkpoint that the present invention is able to restore is the adhesion checkpoint. In one aspect, the present disclosure provides a pharmaceutical association, combination or (therapeutic, dermatologic, ophthalmologic, diagnostic, etc.) composition defined herein for use in a method of treating a neoplastic cell or a neoplastic disease by restoring the cell adhesion checkpoint of said neoplastic cell.

[1252] The cell adhesion checkpoint is known to be in charge of monitoring the cells attachments to the extracellular matrix (ECM). When a cell does not detect a “correct” attachment it should halt further advance through the cell cycle and enter the G0 phase. The ECM attachment is normally achieved via cell transmembrane proteins, such as the integrins, syndecans and different proteoglycans. The most important among these are the integrins, which assemble as alpha-beta heterodimers. In addition to physically linking the cell to the extracellular matrix, the binding of the extracellular integrin domains to specific components of the ECM activates the integrins and allows binding of different signalling molecules to its intracellular domain. This activates various signalling pathways that mediate signals to the adhesion checkpoint including the Ras/MAP kinase, FAK/Src kinase, and PIP2 pathways. These pathways are involved in the regulation of the expression of cyclins D, which in turn controls the activity of CDK4/6. The cyclins D-CDK4/6 complexes are capable of leading the cell through the R-point gate.

[1253] Data have also shown (FIGS. 8 and 9) that the administration or action of the pharmaceutical association or composition as defined herein on neoplastic cells to be treated down-regulated (in particular, substantially reduced) the expression of FAK genes and proteins and/or MAP kinase and/or reduced (in particular, substantially reduced) the expression or activity of GTPase Ras, Rho (Rho, Rac, Cdc42).

[1254] Focal Adhesion Kinase (FAK) is a cytoplasmic tyrosine kinase that plays a role in integrin-mediated signal transductions and also participates in signalling via other cell surface receptors. FAK is typically located in structures known as focal adhesions. These are multi-protein structures that link the extracellular matrix (ECM) to the cytoplasmic cytoskeleton. FAK is known to be phosphorylated in response to integrin engagement, growth factor stimulation, and the action of mitogenic neuropeptides. This cytosolic kinase has been reported to participate to diverse cellular mechanisms including cell locomotion, mitogen response and cell survival. FAK has four defined regions, or tertiary structure domains. Two of these domains, the N-terminal FERM domain and the Kinase domain, form an auto-inhibitory interaction. This interaction is thought to be the result of hydrophobic interactions between the two domains and prevents the activation of the Kinase domain, thereby preventing the signalling function of FAK. Release of this auto-inhibitory interaction has been shown to occur within focal adhesions but not in the cytoplasm and therefore is thought to require interaction with focal adhesion proteins.

[1255] MAP kinase Mitogen-activated protein kinases or MAP kinases (or MAPK) include a large group of related serine/threonine eukaryotic protein kinases whose regulatory cell functions include proliferation, gene expression, differentiation, mitosis, cell survival, and apoptosis. All have been reported to become activated when they have been phosphorylated at a Tyrosine and a Threonine amino acid. MAP kinases are catalytically inactive in their basic form. In order to become active, (potentially multiple) phosphorylation events is required to occur in their activation loops. MAP kinases typically form multi-step pathways, receiving input signals at several levels above the actual MAP kinase. These pathways can effectively convey stimuli from the cell membrane to the nucleus or to many other subcellular targets.

[1256] GTPases (singular GTPase) are a large family of hydrolase enzymes that can bind and hydrolyze guanosine triphosphate (GTP). The GTP binding and hydrolysis takes place in the highly conserved G domain common to all GTPases. The hydrolysis of the γ phosphate of GTP into guanosine diphosphate (GDP) and Pi, inorganic phosphate, occurs by the SN2 mechanism of nucleophilic substitution via a pentavalent intermediate state and is dependent on the magnesium ion Mg²⁺. Regulatory GTPases, also called the GTPase superfamily, are GTPases used for regulation of other biochemical processes. Most prominent among the regulatory GTPases are the G proteins. Small GTPases have a molecular weight of about 21 kDa and generally serve as molecular switches for a variety of cellular signalling events.

[1257] According to their primary amino acid sequences and biochemical properties, the Ras superfamily is further divided into five subfamilies: Ras, Rho, Rab, Arf and Ran. The Rho subfamily is further divided into RHOA, RAC1, and CDC42.

[1258] Ras/MAP kinase signalling pathway (also known as the Ras-Raf-MEK-ERK pathway) is a chain of proteins in the cell that communicates a signal from a receptor on the surface of the cell to the DNA in the nucleus of the cell. The signal starts when a signalling molecule binds to the receptor on the cell surface and ends when the DNA in the nucleus expresses a protein and produces some change in the cell, such as cell division. The pathway includes many proteins, including MAPK (mitogen-activated protein kinases, originally called ERK, extracellular signal-regulated kinases), which communicate by adding phosphate groups to a neighbouring protein.

[1259] The FAK/Src kinase signalling pathway involves focal adhesion kinase (FAK) and steroid receptor coactivator (Src) which are intracellular (non-receptor) tyrosine kinases that physically and functionally interact to promote a variety of cellular responses. The linked activities of these two kinases are a common intracellular point of convergence in the signalling initiated by the integrin-extracellular matrix (ECM) interaction. Integrins, a family of transmembrane receptors, interact with the ECM and the intracellular actin-cytoskeleton. The integrins cluster upon binding to the ECM to form focal adhesion (FA) contacts. In response to this clustering, FAK associates to the cytoplasmic tail of the integrins and undergoes phosphorylation at its tyrosine 397 residue (Y397). This phosphorylated tyrosine provides a docking site for Src which is then able to phosphorylate additional sites on FAK, leading to a further increase in FAK activity and allowing the recruitment of proteins that contain Src homology 2 (SH2) domains such as Grb2 and PI3K.The mutually activated FAK/Src complex then initiates a cascade of phosphorylation events of new protein-protein interactions to trigger several signalling pathways that eventually leads to different cellular responses.

[1260] Phosphatidylinositol 4,5-bisphosphate or PIP2 is a minor phospholipid component of cell membranes. PIP2 is enriched at the plasma membrane where it is a substrate for a number of important signalling proteins. PIP2 is phosphorylated by the Class I PI 3-kinases. Class I PI 3-kinases are a subgroup of the enzyme family, phosphoinositide 3-kinase that possess a common protein domain structure, substrate specificity, and method of activation. Class I PI 3-kinases are further divided into two subclasses, class IA PI 3-kinases and class IB PI 3-kinases. Class IA PI 3-kinases are activated by receptor tyrosine kinases (RTKs). Class IB PI3-kinases are activated by G-protein-coupled receptors (GPCRs). After their activation these kinases phosphorylate PIP2 to form phosphatidylinositol (3,4,5)-trisphosphate PIP3. Both PIP2 and PIP3 not only act as substrates for enzymes but also serve as docking phospholipids that bind specific domains that promote the recruitment of proteins to the plasma membrane and subsequent activation of signalling cascades. PIP3 functions to activate downstream signalling components, the most notable one being the protein kinase AKT, which activates downstream anabolic signalling pathways required for cell growth and survival.

[1261] Consequently, any associations, combinations or compositions comprising a GFR-binding compound and a bioactive carrier as defined herein, which, when used to convert a neoplastic cell into a non-neoplastic cell and treat/prevent/diagnose a neoplastic disease, down-regulate (in particular, substantially reduce) the expression of FAK genes and proteins and/or MAP kinase and/or reduce (in particular, substantially reduce) the expression or activity of GTPase Ras, Rho (Rho, Rac, Cdc42) in-vitro or in-vivo, shall be considered as being comprised within the scope of the present invention.

[1262] In one aspect, the present disclosure provides a pharmaceutical association, combination or (therapeutic, dermatologic, ophthalmologic, diagnostic, etc.) composition defined herein for use in a method of treating a neoplastic cell or a neoplastic disease by down-regulating (in particular, substantially reducing) the expression of FAK genes and proteins and/or MAP kinase and/or reducing (in particular, substantially reducing) the expression or activity of GTPase Ras, Rho (Rho, Rac, Cdc42) in-vitro or in-vivo. Also provided is a method of treating a neoplastic cell or a neoplastic disease by down-regulating (in particular, substantially reducing) the expression of FAK genes and proteins and/or MAP kinase and/or reducing (in particular, substantially reducing) the expression or activity of GTPase Ras, Rho (Rho, Rac, Cdc42) in-vitro or in-vivo, comprising administering to a subject in need thereof an effective amount of a pharmaceutical association, combination or (therapeutic, dermatologic, ophthalmologic, diagnostic, etc.) composition as defined herein.

[1263] Consequently, in certain embodiments, any associations, combinations or compositions comprising a GFR-binding compound and a bioactive carrier as defined herein, which, when used to convert a neoplastic cell into a non-neoplastic cell and treat/prevent a neoplastic disease, possesses at least one, preferably more than one, of the above defined biological and/or therapeutic parameters or effects (e.g. down-regulation of the Ras/MAP kinase, FAK/Src kinase and/or PIP2 signalling pathways and/or inhibition of gene expression or formation of cyclins D and/or down-regulation of the cyclin D/CDKs complexes), shall be considered as being comprised within the scope of the present invention.

[1264] In one aspect, the present disclosure provides a pharmaceutical association, combination or (therapeutic, dermatologic, ophthalmologic, diagnostic, etc.) composition defined herein for use in a method of converting a neoplastic cell into a non-neoplastic cell or treating/preventing a neoplastic disease by substantially inhibiting, down-regulating or dampening the gene expression or formation of at least one of, in particular a plurality of, the cyclin D proteins. Also provided is a method of converting a neoplastic cell into a non-neoplastic cell or treating/preventing a neoplastic disease by substantially inhibiting, down-regulating or dampening the gene expression or formation of at least one of, in particular a plurality of, the cyclin D proteins, comprising administering to a subject in need thereof an effective amount of a pharmaceutical association, combination or (therapeutic, dermatologic, ophthalmologic, diagnostic, etc.) composition as defined herein.

[1265] In one aspect, the present disclosure provides a pharmaceutical association, combination or (therapeutic, dermatologic, ophthalmologic, diagnostic, etc.) composition defined herein for use in a method of converting a neoplastic cell into a non-neoplastic cell or treating/preventing a neoplastic disease by substantially inhibiting the formation of at least one of, in particular a plurality of, the protein complexes comprising at least one cyclin D and at least one CDK4 or CDK6. Also provided is a method of converting a neoplastic cell into a non-neoplastic cell or treating/preventing a neoplastic disease by substantially inhibiting the formation of at least one of, in particular a plurality of, the protein complexes comprising at least one cyclin D and at least one CDK4 or CDK6, comprising administering to a subject in need thereof an effective amount of a pharmaceutical association, combination or (therapeutic, dermatologic, ophthalmologic, diagnostic, etc.) composition as defined herein.

[1266] In one aspect, the present disclosure provides a pharmaceutical association, combination or (therapeutic, dermatologic, ophthalmologic, diagnostic, etc.) composition as defined herein for use in a method of converting a neoplastic cell into a non-neoplastic cell or treating/preventing a neoplastic disease without inducing the death of said neoplastic cell. Also provided is a method of converting a neoplastic cell into a non-neoplastic cell or treating/preventing a neoplastic disease without inducing the death of said neoplastic cell, comprising administering to a subject in need thereof an effective amount of a pharmaceutical association, combination or (therapeutic, dermatologic, ophthalmologic, diagnostic, etc.) composition as defined herein.

[1267] In one aspect, the present disclosure provides a pharmaceutical association, combination or (therapeutic, dermatologic, ophthalmologic, diagnostic, etc.) composition as defined herein for use as a G0 cell cycle phase inducer.

[1268] In one aspect, the present disclosure provides a pharmaceutical association, combination or (therapeutic, dermatologic, ophthalmologic, diagnostic, etc.) composition for use in a method of converting a neoplastic cell into a non-neoplastic cell or treating/preventing a neoplastic disease by dampening or arresting cell division and/or cell proliferation of said neoplastic cell. Also provided is a method of converting a neoplastic cell into a non-neoplastic cell or treating/preventing a neoplastic disease by dampening or arresting cell division and/or cell proliferation of said neoplastic cell, comprising administering to a subject in need thereof an effective amount of a pharmaceutical association, combination or (therapeutic, dermatologic, ophthalmologic, diagnostic, etc.) composition as defined herein.

[1269] In one aspect, the present disclosure provides a pharmaceutical association, combination or (therapeutic, dermatologic, ophthalmologic, diagnostic, etc.) composition for use in a method of converting a neoplastic cell into a non-neoplastic cell or treating/preventing a neoplastic disease by activating and/or promoting anti-mitogen activity and/or tumor suppressor pathways and/or anti-oncogenic activity in said neoplastic cell. Also provided is a method of converting a neoplastic cell into a non-neoplastic cell or treating/preventing a neoplastic disease by activating and/or promoting anti-mitogen activity and/or tumor suppressor pathways and/or anti-oncogenic activity in said neoplastic cell, comprising administering to a subject in need thereof an effective amount of a pharmaceutical association, combination or (therapeutic, dermatologic, ophthalmologic, diagnostic, etc.) composition as defined herein.

[1270] Data have also shown (FIG. 9) that the administration or action of the pharmaceutical association, combination or composition as defined herein on neoplastic cells to be treated, down-regulated (in particular, substantially reduced) the expression of paxillin and/or up-regulated (in particular, substantially increased) the expression of vinculin.

[1271] Paxillin is a signal transduction adaptor protein. The C-terminal region of paxillin contains four LIM domains that target paxillin to focal adhesions through a direct association with the cytoplasmic tail of beta-integrin. The N-terminal region of paxillin is rich in protein-protein interaction sites. The proteins that bind to paxillin are diverse and include protein tyrosine kinases, such as Src and focal adhesion kinase (FAK), structural proteins, such as vinculin and actopaxin, and regulators of actin organization, such as COOL/PIX and PKL/GIT. Paxillin is tyrosine-phosphorylated by FAK and Src upon integrin engagement or growth factor stimulation, creating binding sites for the adapter protein Crk.

[1272] Vinculin is a focal adhesion protein that is involved in linkage of integrin adhesion molecules to the actin cytoskeleton. Vinculin is a cytoskeletal protein associated with cell-cell and cell-matrix junctions, where it is thought to function as one of several interacting proteins involved in anchoring F-actin to the membrane. Vinculin is a 117-kDa cytoskeletal protein of 1066 amino acids. The protein contains an acidic N-terminal domain and a basic C-terminal domain separated by a proline-rich middle segment. Vinculin consists of a globular head domain that contains binding sites for talin and α-actinin as well as a tyrosine phosphorylation site, while the tail region contains binding sites for F-actin, paxillin, and lipids.

[1273] Consequently, any associations, combinations or compositions comprising a GFR-binding compound and a bioactive carrier as defined herein, which, when used to convert a neoplastic cell into a non-neoplastic cell and treat/prevent/diagnose a neoplastic disease, down-regulate the expression of paxillin and/or (preferably and) up-regulate the expression of vinculin in-vitro or in-vivo, shall be considered as being comprised within the scope of the present invention.

[1274] In one aspect, the present disclosure thus provides a pharmaceutical association, combination or (therapeutic, dermatologic, ophthalmologic, diagnostic, etc.) composition defined herein for use in a method of treating a neoplastic cell or a neoplastic disease by down-regulating the expression of paxillin and/or (preferably and) up-regulating the expression of vinculin in-vitro or in-vivo. Also provided is a method of treating a neoplastic cell or a neoplastic disease by down-regulating the expression of paxillin and/or (preferably and) up-regulating the expression of vinculin in-vitro or in-vivo, comprising administering to a subject in need thereof an effective amount of a pharmaceutical association, combination or (therapeutic, dermatologic, ophthalmologic, diagnostic, etc.) composition as defined herein.

[1275] Data have also shown (FIGS. 3 to 6) that the administration or action of the pharmaceutical association, combination or composition as defined herein on neoplastic cells to be treated, up-regulated (in particular, substantially increased) the expression of at least one differentiation genes and proteins such as ADIPOQ (ACRP30), FABP4 and/or PPARG for adipocytes; ACAN (AGC1), COL10A1, COMP, Sox9, IBSP (Sialoprotein II) and/or COL4 for chondrocytes; CDH5, KDR (VEGFR3) and/or PECAM1 for the general endothelium; DLL4, EFNB2 and/or NRP1 for the arterial endothelium; LYVE1 and/or PROX1 for the lymphatic endothelium; NR2F2 and/or NRP2 for the venous endothelium; KRT1, KRT10 and/or KRT14 for the keratinocyte epithelium; PMEL (SILV), TYR and/or TYRP1 for the melanocyte epithelium; MMP-9, α-SMA and/or Vimentin for the fibrocyte; BGLAP, COL2A1, IBSP, RANK-L, OCN, DMP-1, Sclerostin and/or MEPE for Osteoblasts/Osteocytes; CALCR and/or CTSK for Osteoclasts; ITGB4 and/or KRT19 for cholangiocytes; ALB, G6PC and/or TAT for Hepatocytes; CD79A for early B-cell development; CD3E and/or PTCRA for early T-cell development; CCR5, CXCR4 and/or EMR1 for macrophages; ITGAM for the monocytes; GALC and/or GFAP for glial cells; MAP2, NEFH and/or TUBB3 for mature neurons; CHAT for cholinergic neurons; TH for dopaminergic neurons; GAD1 and/or SLC32A1 for GABA neurons; SLC17A6 and/or SLC17A7 for glutamatergic neurons; ISL1 for motor neurons; MBP for oligodendrocytes; POU4F2 for ganglion cells; RLBP1 for Muller cells; PDE6B and/or RCVRN for photoreceptor cells; NPHS2 for podocytes; AQP1, CYP27B1 and/or MIOX for proximal tubule cells; AQP2 for collecting duct cells; UMOD for distal tubule cells; SFTPB, SFTPC and/or SFTPD for lung cells; MYH6, MYH7 and/or NPPA for cardiomyocytes; CAV3, MYH1, MYOD1, GATA4 and/or MLC1 for skeletal muscle cells; MYH11, SMTN and/or TAGLN for smooth muscle cells; GCG, MAFB and/or POU3F4 for alpha cells; INS, MAFA and/or SLC2A2 for beta cells; SST for delta cells; GHRL (Ghrelin, Obestatin) for epsilon cells; PPY for pancreatic polypeptide producing (PP) cells; and/or CPA1 for exocrine cells.

[1276] Consequently, any associations, combinations or compositions comprising a GFR-binding compound and a bioactive carrier as defined herein, which, when used to convert a neoplastic cell into a non-neoplastic cell and treat/prevent/diagnose a neoplastic disease, up-regulate (in particular, substantially increase) the expression of at least one differentiation genes and proteins such as ADIPOQ (ACRP30), FABP4, PPARG, ACAN (AGC1), COL10A1, COMP, Sox9, IBSP (Sialoprotein II), COL4, CDH5, KDR (VEGFR3), PECAM1, DLL4, EFNB2, NRP1, LYVE1, PROX1, NR2F2, NRP2, KRT1, KRT10, KRT14, PMEL (SILV), TYR, TYRP1, MMP-9, α-SMA, Vimentin, BGLAP, COL2A1, IBSP, RANK-L, OCN, DMP-1, Sclerostin, MEPE, CALCR, CTSK, ITGB4, KRT19, ALB, G6PC, TAT, CD79A, CD3E, PTCRA, CCR5, CXCR4, EMR1, ITGAM, GALC, GFAP, MAP2, NEFH, TUBB3, CHAT, TH, GAD1, SLC32A1, SLC17A6, SLC17A7, ISL1, MBP, POU4F2, RLBP1, PDE6B, RCVRN, NPHS2, AQP1, CYP27B1, MIOX, AQP2, UMOD, SFTPB, SFTPC, SFTPD, MYH6, MYH7, NPPA, CAV3, MYH1, MYOD1, GATA4, MLC1, MYH11, SMTN, TAGLN, GCG, MAFB, POU3F4, INS, MAFA, SLC2A2, SST, GHRL (Ghrelin, Obestatin), PPY and/or CPA1, in-vitro or in-vivo, shall be considered as being comprised within the scope of the present invention.

[1277] In one aspect, the present disclosure thus provides a pharmaceutical association, combination or (therapeutic, dermatologic, ophthalmologic, diagnostic, etc.) composition defined herein for use in a method of treating a neoplastic cell or a neoplastic disease by up-regulating (in particular, substantially increasing) the expression of differentiation genes and proteins such as ADIPOQ (ACRP30), FABP4, PPARG, ACAN (AGC1), COL10A1, COMP, Sox9, IBSP (Sialoprotein II), COL4, CDH5, KDR (VEGFR3), PECAM1, DLL4, EFNB2, NRP1, LYVE1, PROX1, NR2F2, NRP2, KRT1, KRT10, KRT14, PMEL (SILV), TYR, TYRP1, MMP-9, α-SMA, Vimentin, BGLAP, COL2A1, IBSP, RANK-L, OCN, DMP-1, Sclerostin, MEPE, CALCR, CTSK, ITGB4, KRT19, ALB, G6PC, TAT, CD79A, CD3E, PTCRA, CCR5, CXCR4, EMR1, ITGAM, GALC, GFAP, MAP2, NEFH, TUBB3, CHAT, TH, GAD1, SLC32A1, SLC17A6, SLC17A7, ISL1, MBP, POU4F2, RLBP1, PDE6B, RCVRN, NPHS2, AQP1, CYP27B1, MIOX, AQP2, UMOD, SFTPB, SFTPC, SFTPD, MYH6, MYH7, NPPA, CAV3, MYH1, MYOD1, GATA4, MLC1, MYH11, SMTN, TAGLN, GCG, MAFB, POU3F4, INS, MAFA, SLC2A2, SST, GHRL (Ghrelin, Obestatin), PPY and/or CPA1, in-vitro or in-vivo. Also provided is a method of treating a neoplastic cell or a neoplastic disease by up-regulating (in particular, substantially increasing) the expression of differentiation genes and proteins such as ADIPOQ (ACRP30), FABP4, PPARG, ACAN (AGC1), COL10A1, COMP, Sox9, IBSP (Sialoprotein II), COL4, CDH5, KDR (VEGFR3), PECAM1, DLL4, EFNB2, NRP1, LYVE1, PROX1, NR2F2, NRP2, KRT1, KRT10, KRT14, PMEL (SILV), TYR, TYRP1, MMP-9, α-SMA, Vimentin, BGLAP, COL2A1, IBSP, RANK-L, OCN, DMP-1, Sclerostin, MEPE, CALCR, CTSK, ITGB4, KRT19, ALB, G6PC, TAT, CD79A, CD3E, PTCRA, CCR5, CXCR4, EMR1, ITGAM, GALC, GFAP, MAP2, NEFH, TUBB3, CHAT, TH, GAD1, SLC32A1, SLC17A6, SLC17A7, ISL1, MBP, POU4F2, RLBP1, PDE6B, RCVRN, NPHS2, AQP1, CYP27B1, MIOX, AQP2, UMOD, SFTPB, SFTPC, SFTPD, MYH6, MYH7, NPPA, CAV3, MYH1, MYOD1, GATA4, MLC1, MYH11, SMTN, TAGLN, GCG, MAFB, POU3F4, INS, MAFA, SLC2A2, SST, GHRL (Ghrelin, Obestatin), PPY and/or CPA1, in-vitro or in-vivo, comprising administering to a subject in need thereof an effective amount of a pharmaceutical association, combination or (therapeutic, dermatologic, ophthalmologic, diagnostic, etc.) composition as defined herein.

[1278] Data have also shown (FIG. 7) that the administration or action of the pharmaceutical association, combination or composition as defined herein on neoplastic cells to be treated increased the phosphorylation of the protein p53.

[1279] Data have also shown (FIG. 7) that the administration or action of the pharmaceutical association, combination or composition as defined herein on neoplastic cells to be treated down-regulated (in particular, substantially decreased or suppressed) the phosphorylation of the protein pRb.

[1280] Data have also shown (FIG. 8) that the administration or action of the pharmaceutical association, combination or composition as defined herein on neoplastic cells to be treated down-regulated the protein Src.

[1281] Tumor protein p53, also known as p53, cellular tumor antigen p53, phosphoprotein p53, or tumor suppressor p53, is a protein that in humans is encoded by the TP53 gene. The p53 protein is involved in multicellular organisms, where it regulates the cell cycle and, thus, functions as a tumor suppressor, generally preventing neoplastic diseases such as cancers. As such, p53 has been described as “the guardian of the genome” because of its role in conserving stability by preventing genome mutation. TP53 is thus said to be a tumor suppressor gene.

[1282] Src is a non-receptor protein tyrosine kinase that plays a multitude of roles in cell signalling. Src is involved in the control of many functions, including cell adhesion, growth, movement and differentiation. Src is widely expressed in many cell types, and can have different locations within a cell. It appears that the subcellular location of Src can affect its function. Src can associate with cellular membranes, such as the plasma membrane, the perinuclear membrane and the endosomal membrane. At the plasma membrane, Src can transduce signals from a variety of receptors to internal signalling pathways that convey these signals to the nucleus, cytoskeleton and other cellular components. For example, Src can act through growth factor receptors to affect cell growth and proliferation. Within the nucleus, Src is thought to help regulate the cell cycle and cell division by its interactions with other proteins. For example, Src can interact with Sam68 to help regulate gene expression. In bone osteoclasts, Src acts to regulate the respiratory enzyme cytochrome C oxidase (Cox), where Src-induced phosphorylation of Cox is required for maintaining high levels of ATP to meet the cells' high energy requirements. Src can also be found in the cytoplasm, and between cells at adherens junctions, where it takes on different roles.

[1283] pRb (Retinoblastoma protein) is a tumor suppressor protein that is dysfunctional in several major cancers. One function of pRb is to prevent excessive cell growth by inhibiting cell cycle progression until a cell is ready to divide. It is also a recruiter of several chromatin remodeling enzymes such as methylases and acetylases. Rb restricts the cell's ability to replicate DNA by preventing its progression from the G1 (first gap phase) to S (synthesis phase) phase of the cell cycle. Rb binds and inhibits transcription factors of the E2F family, which are composed of dimers of an E2F protein and a dimerization partner (DP) protein. When Rb is bound to E2F, the complex acts as a growth suppressor and prevents progression through the cell cycle. Rb is phosphorylated to pRb by certain Cyclin Dependent Kinases (CDKs). pRb is described as being hyperphosphorylated and when in this state, it is unable to complex E2F and therefore, unable to restrict progression from the G1 phase to the S phase of the cell cycle. During the M-to-G1 transition, pRb is progressively dephosphorylated by PP1, returning to its growth-suppressive hypophosphorylated state Rb.

[1284] Consequently, any associations, combinations or compositions comprising a GFR-binding compound and a bioactive carrier as defined herein, which, when used to convert a neoplastic cell into a non-neoplastic cell and treat/prevent/diagnose a neoplastic disease, down-regulate (in particular, substantially decrease or suppress) the expression of genes and proteins p53 and/or Src, in-vitro or in-vivo, shall be considered as being comprised within the scope of the present invention.

[1285] In one aspect, the present disclosure thus provides a pharmaceutical association, combination or (therapeutic, dermatologic, ophthalmologic, diagnostic, etc.) composition defined herein for use in a method of treating a neoplastic cell or a neoplastic disease by down-regulating (in particular, substantially decreasing or suppressing) the expression of genes and proteins p53 and/or Src. Also provided is a method of treating a neoplastic cell or a neoplastic disease by down-regulating (in particular, substantially decreasing or suppressing) the expression of genes and proteins p53 and/or Src, comprising administering to a subject in need thereof an effective amount of a pharmaceutical association, combination or (therapeutic, dermatologic, ophthalmologic, diagnostic, etc.) composition as defined herein.

[1286] In one aspect, the present disclosure provides a pharmaceutical association, combination or (therapeutic, dermatologic, ophthalmologic, diagnostic, etc.) composition defined herein for use in a method of treating a neoplastic cell or a neoplastic disease by:
[1287] down-regulating (in particular, substantially reducing) the expression of FAK genes and proteins and/or MAP kinase; and/or
[1288] reducing (in particular, substantially reducing) the expression or activity of GTPase Ras, Rho (Rho, Rac, Cdc42); and/or
[1289] down-regulating (in particular, reducing, significantly reducing or suppressing) the Ras/MAP kinase, FAK/Src kinase and/or PIP2 signalling pathways; and/or
[1290] substantially inhibiting the formation of at least one of, in particular a plurality of, the protein complexes comprising at least one cyclin D and at least one CDK4 or CDK6; and/or substantially inhibiting, down-regulating or dampening the gene expression or formation of at least one of, in particular a plurality of, the cyclin D proteins; and/or
[1291] down-regulating the expression of paxillin and/or (preferably and) up-regulating the expression of vinculin; and/or
[1292] up-regulating (in particular, substantially increasing) the expression of at least one of differentiation genes and proteins such as ADIPOQ (ACRP30), FABP4, PPARG, ACAN (AGC1), COL10A1, COMP, Sox9, IBSP (Sialoprotein II), COL4, CDH5, KDR (VEGFR3), PECAM1, DLL4, EFNB2, NRP1, LYVE1, PROX1, NR2F2, NRP2, KRT1, KRT10, KRT14, PMEL (SILV), TYR, TYRP1, MMP-9, α-SMA, Vimentin, BGLAP, COL2A1, IBSP, RANK-L, OCN, DMP-1, Sclerostin, MEPE, CALCR, CTSK, ITGB4, KRT19, ALB, G6PC, TAT, CD79A, CD3E, PTCRA, CCR5, CXCR4, EMR1, ITGAM, GALC, GFAP, MAP2, NEFH, TUBB3, CHAT, TH, GAD1, SLC32A1, SLC17A6, SLC17A7, ISL1, MBP, POU4F2, RLBP1, PDE6B, RCVRN, NPHS2, AQP1, CYP27B1, MIOX, AQP2, UMOD, SFTPB, SFTPC, SFTPD, MYH6, MYH7, NPPA, CAV3, MYH1, MYOD1, GATA4, MLC1, MYH11, SMTN, TAGLN, GCG, MAFB, POU3F4, INS, MAFA, SLC2A2, SST, GHRL (Ghrelin, Obestatin), PPY and/or CPA1; and/or
[1293] increasing the phosphorylation of protein p53; and/or
[1294] down-regulating (in particular, substantially decreasing or suppressing) the phosphorylation of the protein pRb; and/or
[1295] down-regulating (in particular, substantially decreasing or suppressing) the gene and protein expression of Src; and/or
[1296] not inducing the death of said neoplastic cell; and/or
[1297] dampening or arresting cell division or cell proliferation of said neoplastic cell.

[1298] In one example, the pharmaceutical association as defined herein may thus be an animal or mammal (preferably a human) anti-neoplastic disease agent (e.g. anti-cancer agent) which has demonstrated the ability to convert a neoplastic cell into a non-neoplastic cell in vitro, ex-vivo and/or in vivo and/or to protect a subject from a neoplastic disease, disorder, condition, pathology or any symptoms thereof.

[1299] In one aspect, the present disclosure also provides methods of converting a neoplastic cell into a non-neoplastic cell, said method comprising the administration to a cell, in-vitro, ex-vivo or in-vivo, of an effective amount of a pharmaceutical association, combination or composition as defined herein. In one example, said methods induce the differentiation of said neoplastic cell. In one example, said conversion is effected in less than 7 days, in less than 6 days, 5 days, 4 days, 3 days, 2 days, 24 hours or 18 hours, in particular in less than 24 hours. In other examples:
[1300] said neoplastic cell is a non-terminally differentiated cell and said methods comprise the differentiation of said non-terminally differentiated; and/or
[1301] said methods comprise the conversion and/or recoding of a neoplastic cell to induce and/or promote and/or improve self-healing and/or self-recovery thereof; and/or
[1302] said methods comprise restoring the ability of a neoplastic cell to undergo differentiation; and/or said methods comprise converting and/or recoding a circulating or non-circulating neoplastic cell such as a metastatic or non-metastatic cancer cell, into a non-neoplastic cell; and/or
[1303] said methods comprise providing and/or producing and/or inducing the formation of a physiologically functional and/or healthy cell of the bone, chondrocyte, vascular, fibroblast, renal, retinal, neuronal, ligament, tendon, reproduction system, lung, blood, adipocyte cell lineage from a neoplastic cell; and/or
[1304] said methods comprise inducing and/or promoting and/or enhancing neoplastic cell differentiation; and/or
[1305] said methods comprise non-mutagenically protecting a subject from a neoplastic disease i.e. without modifying or altering the genome of the treated neoplastic cells; and/or
[1306] said methods comprise the extracellular treatment of a neoplastic disease, disorder, condition, pathology, or any symptoms thereof; and/or
[1307] said methods comprise down-regulating (in particular, substantially reducing) the expression of FAK genes and proteins and/or MAP kinase and/or reducing (in particular, substantially reducing) the expression or activity of GTPase Ras, Rho (Rho, Rac, Cdc42) in-vitro or in-vivo; and/or
[1308] said methods comprise restoring the cell adhesion checkpoint of said neoplastic cell; and/or
[1309] said methods comprise substantially inhibiting, down-regulating or dampening the gene expression or formation of at least one of, in particular a plurality of, the cyclin D proteins; and/or
[1310] said methods comprise substantially inhibiting the formation of at least one of, in particular a plurality of, the protein complexes comprising at least one cyclin D and at least one CDK4 or CDK6; and/or
[1311] said methods comprise not inducing the death of said neoplastic cell; and/or
[1312] said methods comprise dampening or arresting cell division and/or cell proliferation of said neoplastic cell; and/or
[1313] said methods comprise activating and/or promoting anti-mitogen activity and/or tumor suppressor pathways and/or anti-oncogenic activity in said neoplastic cell; and/or
[1314] said methods comprise down-regulating the gene expression of paxillin and/or (preferably and) up-regulating the gene expression or increasing turn-over of vinculin in-vitro or in-vivo; and/or
[1315] said methods comprise up-regulating (in particular, substantially increasing) the expression of differentiation genes and proteins such as ADIPOQ (ACRP30), FABP4, PPARG, ACAN (AGC1), COL10A1, COMP, Sox9, IBSP (Sialoprotein II), COL4, CDH5, KDR (VEGFR3), PECAM1, DLL4, EFNB2, NRP1, LYVE1, PROX1, NR2F2, NRP2, KRT1, KRT10, KRT14, PMEL (SILV), TYR, TYRP1, MMP-9, α-SMA, Vimentin, BGLAP, COL2A1, IBSP, RANK-L, OCN, DMP-1, Sclerostin, MEPE, CALCR, CTSK, ITGB4, KRT19, ALB, G6PC, TAT, CD79A, CD3E, PTCRA, CCR5, CXCR4, EMR1, ITGAM, GALC, GFAP, MAP2, NEFH, TUBB3, CHAT, TH, GAD1, SLC32A1, SLC17A6, SLC17A7, ISL1, MBP, POU4F2, RLBP1, PDE6B, RCVRN, NPHS2, AQP1, CYP27B1, MIOX, AQP2, UMOD, SFTPB, SFTPC, SFTPD, MYH6, MYH7, NPPA, CAV3, MYH1, MYOD1, GATA4, MLC1, MYH11, SMTN, TAGLN, GCG, MAFB, POU3F4, INS, MAFA, SLC2A2, SST, GHRL (Ghrelin, Obestatin), PPY and/or CPA1, in-vitro or in-vivo; and/or
[1316] said methods comprise down-regulating (in particular, substantially decreasing or suppressing) the gene expression of proteins p53, pRb and/or Src.

[1317] In one example, the pharmaceutical association as defined herein may thus be an animal or mammal (preferably a human) anti-neoplastic disease agent (e.g. anti-cancer agent) which has demonstrated the ability to convert a neoplastic cell into a non-neoplastic cell in vitro, ex-vivo and/or in vivo and/or to protect a subject from a neoplastic disease, disorder, condition, pathology or any symptoms thereof.

[1318] In one example, said administration induces the quiescence of the neoplastic cell. In one example, said administration prevents, reduces or suppresses the cell division and/or cell proliferation of said neoplastic cell. In one example, said administration regulates or promotes anti-mitogen activity and/or tumor suppressor activity and/or anti-oncogenic activity in said neoplastic cell. In one example, said method is cytostatic for the treated cell. In one example, said method is not cytotoxic for the treated cell. In one example, said method is non-mutagenic.

[1319] In one aspect, the present disclosure provides a method of producing a physiologically functional and healthy cell, comprising the administration in-vitro, ex-vivo or in-vivo to a neoplastic cell an effective amount of a pharmaceutical association or composition as defined herein and wherein said physiologically functional and healthy cell is selected from the group consisting of an osteoblast, osteocyte, chondroblast, chondrocyte, neuroblast, neurocyte, Sertoli cells, Leydig cell, Germ cell, Myoblast, Myocyte, keratinocyte, endothelial cells, angioblast, fibroblast, fibrocyte, podocyte.

[1320] In one aspect, the present disclosure provides a method of converting a cell “X” into a cell “Y”, said method comprising the administration to a neoplastic cell of an effective amount of a pharmaceutical association, combination or composition as defined herein, wherein cell X is a neoplastic cell selected from the group consisting of:
[1321] a. a metastatic or non-metastatic neoplastic cell;
[1322] b. a cell comprising at least one alteration, mutation and/or deregulation of at least one tumour suppressor gene or of at least one of their gene-encoded product (such as for example the Rb and/or P53 genes or gene products);
[1323] c. a cell comprising at least one alteration, mutation and/or deregulation of at least one of proto-oncogene or of at least one of their gene-encoded product (such as for example Src-tyrosine kinase- and/or Ras-small GTPase);
[1324] d. a cell having an impaired DNA repair mechanism (such as for example BRCA1 and BRCA2);
[1325] e. a cell comprising at least one alteration, mutation and/or deregulation of at least one mitogen and/or anti-mitogen gene or at least one of their gene-encoded products (such as for example TGF-beta);
[1326] f. a cell having an defective, altered or impaired cell cycle or cell cycle control, wherein said defective cell cycle is due to either at least one alteration, mutation and/or deregulation of at least one cell cycle gene or gene-encoded product (for example Cyclin E1, Cyclin D1, CDK 4/6) at least one alteration, mutation and/or deregulation of at least one cell cycle checkpoint or diminution or reduction of a checkpoint sensibility and/or responsiveness;
[1327] g. a stem cell-like cell comprising a Stro-1 positive marker and having multi-potency;
[1328] h. a cell comprising at least one specific differentiation marker such as ADIPOQ (ACRP30), FABP4, PPARG, ACAN (AGC1), COL10A1, COMP, Sox9, IBSP (Sialoprotein II), COL4, CDH5, KDR (VEGFR3), PECAM1, DLL4, EFNB2, NRP1, LYVE1, PROX1, NR2F2, NRP2, KRT1, KRT10, KRT14, PMEL (SILV), TYR, TYRP1, MMP-9, α-SMA, Vimentin, BGLAP, COL2A1, IBSP, RANK-L, OCN, DMP-1, Sclerostin, MEPE, CALCR, CTSK, ITGB4, KRT19, ALB, G6PC, TAT, CD79A, CD3E, PTCRA, CCR5, CXCR4, EMR1, ITGAM, GALC, GFAP, MAP2, NEFH, TUBB3, CHAT, TH, GAD1, SLC32A1, SLC17A6, SLC17A7, ISL1, MBP, POU4F2, RLBP1, PDE6B, RCVRN, NPHS2, AQP1, CYP27B1, MIOX, AQP2, UMOD, SFTPB, SFTPC, SFTPD, MYH6, MYH7, NPPA, CAV3, MYH1, MYOD1, GATA4, MLC1, MYH11, SMTN, TAGLN, GCG, MAFB, POU3F4, INS, MAFA, SLC2A2, SST, GHRL (Ghrelin, Obestatin), PPY and/or CPA1;
[1329] i. a cell having increased cytoplasmic and nuclear stiffness;
[1330] j. a cell having high cytoskeleton dynamics; and
[1331] k. any combination thereof;
   and wherein cell Y is a non-neoplastic cell selected from the group consisting of:
[1332] a. a cell in a terminal differentiation state;
[1333] b. a cell in a non-terminal differentiation state and more differentiated than the X cell;
[1334] c. a cell having a physiologically normal proliferation;
[1335] d. a physiologically functional cell having healthy or normal genes expression and proteins activity.

[1336] In one aspect, the present disclosure provides methods to activate a growth factor receptor present on the surface of a neoplastic cell, said method comprising administering to said neoplastic cell an effective amount of a pharmaceutical association, combination or composition as defined herein, wherein administering said pharmaceutical association, combination or composition activates the growth factor receptor present on the surface of the neoplastic cell.

[1337] In one aspect, the present disclosure provides methods of delivering a pharmaceutical composition in-vitro, ex-vivo or in-vivo to a neoplastic cell, comprising the contacting of said neoplastic cell with said pharmaceutical composition, and wherein said pharmaceutical composition comprises a GFR-binding compound and a bioactive carrier as defined herein.

[1338] In one aspect, the present disclosure provides methods of administering a pharmaceutical association, combination or composition comprising a GFR-binding compound and a bioactive carrier to a subject comprising the contacting of at least one body part of said subject with said pharmaceutical association, combination or composition.

[1339] Protected from a disease, condition, disorder or pathology refers to the treatment of the underlying cause of the disease, condition, disorder or pathology as well as reducing the symptoms of the disease, condition, disorder or pathology; and/or reducing the occurrence of the disease, condition, disorder or pathology; and/or reducing the severity of the disease, condition, disorder or pathology. Protecting a patient can refer to the ability of a therapeutic composition of the present invention, when administered to a patient, to prevent a disease, condition, disorder or pathology from occurring and/or to cure or to alleviate disease, condition, disorder or pathology symptoms, signs or causes. As such, to protect a patient from a disease, condition, disorder or pathology includes both preventing disease, condition, disorder or pathology occurrence (prophylactic treatment) and treating a patient that has a disease, condition, disorder or pathology or that is experiencing initial symptoms or later stage symptoms of a disease, condition, disorder or pathology (therapeutic treatment).

[1340] Treating: As used herein, unless indicated otherwise or contradictory in context, the term “treating” or “treatment” refers to partially or completely alleviating, ameliorating, improving, relieving, delaying onset of, inhibiting progression of, reducing severity of, and/or reducing incidence of one or more symptoms or features of a particular disease, disorder, pathology and/or condition. For example, in certain embodiments, “treating” or “treatment of” cancer may refer to inhibiting survival, growth, and/or spread of a tumor. Treatment may be administered to a subject who does not exhibit signs of a disease, disorder, and/or condition and/or to a subject who exhibits only early signs of a disease, disorder, pathology and/or condition for the purpose of decreasing the risk of developing pathology associated with the disease, disorder, and/or condition.

[1341] As used herein, “treating a neoplastic cell” is used interchangeably with the expression “converting a neoplastic cell into a non-neoplastic cell”.

[1342] Preventing: As used herein, unless indicated otherwise or contradictory in context, the term “preventing” refers to partially or completely delaying onset of an infection, disease, disorder and/or condition; partially or completely delaying onset of one or more symptoms, features, or clinical manifestations of a particular infection, disease, disorder, and/or condition; partially or completely delaying onset of one or more symptoms, features, or manifestations of a particular infection, disease, disorder, and/or condition; partially or completely delaying progression from an infection, a particular disease, disorder and/or condition; and/or decreasing the risk of developing pathology associated with the infection, the disease, disorder, and/or condition.

[1343] Substantially diminished, reduced or inhibited: As used herein, unless indicated otherwise or contradictory in context, the term “substantially diminished” or “substantially inhibited” as it relates to cellular activity and/or function, protein expression or complexes formation, refers to a diminution or reduction in activity or function, in comparison with the activity and/or function of a normal or healthy cell (e.g. a non-neoplastic cell), of 1%, 2%, 3%, 4%, 5%, 6%, 7%, 8%, 9%, 10%, 11%, 12%, 13%, 14%, 15%, 16%, 17%, 18%, 19%, 20%, 21%, 22%, 23%, 24%, 25%, 26%, 27%, 28%, 29%, 30%, 31%, 32%, 33%, 34%, 35%, 36%, 37%, 38%, 39%, 40%, 41%, 42%, 43%, 44%, 45%, 46%, 47%, 48%, 49%, 50%, 51%, 52%, 53%, 54%, 55%, 56%, 57%, 58%, 59%, 60%, 61%, 62%, 63%, 64%, 65%, 66%, 67%, 68%, 69%, 70%, 71%, 72%, 73%, 74%, 75%, 76%, 77%, 78%, 79%, 80%, 81%, 82%, 83%, 84%, 85%, 86%, 87%, 88%, 89%, 90%, 91%, 92%, 93%, 94%, 95%, 96%, 97%, 98%, or 99%, in particular of 50% to 99%, 55% to 99%, 60% to 99%, 65% to 99%, 70% to 99%, 75% to 99%, 80% to 99%, 85% to 99% or 90% to 99%. The same applies conversely to the term “substantially increased”.

[1344] Disease: As used herein, unless indicated otherwise or contradictory in context, the term “disease” refers to any deviation from the normal health of a patient and includes a state when disease symptoms are present, as well as conditions in which a deviation has occurred, but symptoms are not yet manifested. A defective, ill-functioning, malfunctioning, dysfunctioning, and/or deleterious cell, such as e.g. a neoplastic cell, may be a cause of a disease. The same applies to “condition”, “disorder” and “pathology”.

[1345] Neoplasm: As used herein, unless indicated otherwise or contradictory in context, the term “neoplasm” (sometimes also referred to as tumor or tumour) refers to an abnormal growth of tissue. This abnormal growth usually but not always forms a mass. The World Health Organization classifies neoplasms into four main groups: benign neoplasms, in situ neoplasms, malignant neoplasms, and neoplasms of uncertain or unknown behavior. A malignant neoplasm is a cancer.

[1346] Neoplastic cell: As used herein, unless indicated otherwise or contradictory in context, the term “neoplastic cell” refers to a cell with abnormal proliferation, generally due the presence of a defective cell cycle, as well as cells which may become neoplastic such as cancer stem cell for which a definition is given in “Refining the role for adult stem cells as cancer cells of origin”, White A C, Lowry W E, Trends Cell Biol. 2014 Sep. 18. pii: S0962-8924(14)00145-7, and “review article Stem cells, cancer, and cancer stem cells”, Tannishtha Reya et al., Nature 414, 105-111 (1 Nov. 2001), which are incorporated herein by reference in their entirety.

[1347] Neoplastic disease: As used herein, unless indicated otherwise or contradictory in context, the term “neoplastic disease”, refers to a disease associated with an abnormal growth of tissue, generally due to the presence of a neoplastic cell.

[1348] Circulating: As used herein, unless indicated otherwise or contradictory in context, the term “circulating”, when used in relation to a neoplastic cell, refers to a neoplastic cell that has detached itself from a primary tumor site and migrates to a different location in the body to become a metastatic tumor.

[1349] Cancers: As used herein, unless indicated otherwise or contradictory in context, the term “cancer” refers to a malign form of neoplasm which includes sarcomas, carcinomas, lymphomas, leukemias (or leukaemias), teratomas, mesotheliomas, myelomas and germinomas. Cancers include, but are not limited to, Acute lymphoblastic leukaemia (ALL), Acute myeloid leukaemia, Adrenocortical carcinoma, AIDS-related cancers, AIDS-related lymphoma, Anal cancer, Appendix cancer, Astrocytoma, childhood cerebellar or cerebral, Basal-cell carcinoma, Bile duct cancer, Bladder cancer, Bone tumor, osteosarcoma/malignant fibrous histiocytoma, Brainstem glioma, Brain cancer, Breast cancer, Bronchial adenomas/carcinoids, Burkitt's lymphoma, Carcinoid tumor, Central nervous system lymphoma, Cerebellar astrocytoma, Cerebral astrocytoma/malignant glioma, Cervical cancer, Childhood cancers, Chronic bronchitis, Chronic lymphocytic leukaemia, Chronic myelogenous leukaemia, Chronic myeloproliferative disorders, Chronic obstructive pulmonary disease (COPD), Colon cancer, Cutaneous T-cell lymphoma, Desmoplastic small round cell tumor, Emphysema, Endometrial cancer, Ependymoma, Esophageal cancer, Ewing's sarcoma in the Ewing family of tumors, Extracranial germ cell tumor, Extragonadal germ cell tumor, Extrahepatic bile duct cancer, Eye cancer, Gallbladder cancer, Gastric (stomach) cancer, Gastrointestinal carcinoid tumor, Gastrointestinal stromal tumor (GIST), Germ cell tumor: extracranial, extragonadal, or ovarian, Gestational trophoblastic tumor, Glioma of the brain stem, Glioma, Gastric carcinoid, Hairy cell leukemia, Head and neck cancer, Heart cancer, Hepatocellular (liver) cancer, Hodgkin lymphoma, Hypopharyngeal cancer, Hypothalamic and visual pathway glioma, childhood, Intraocular melanoma, Islet cell carcinoma (endocrine pancreas), Kaposi sarcoma, Kidney cancer (renal cell cancer), Laryngeal cancer, Leukemias, acute lymphoblastic leukemia, acute myeloid leukemia, chronic lymphocytic leukemia, chronic myelogenous leukemia, hairy cell Leukemia, Lip and oral cavity cancer, Liposarcoma, Liver cancer, Lung cancer, AIDS-related lymphoma, Burkitt lymphoma, cutaneous T-Cell lymphoma, Hodgkin lymphoma, Non-Hodgkin lymphoma, primary central nervous system lymphoma, Macroglobulinemia, Male breast cancer, Malignant fibrous histiocytoma of bone/osteosarcoma, Medulloblastoma, intraocular (eye) Melanoma, Merkel cell cancer, Mesothelioma, Metastatic squamous neck cancer with occult primary, Mouth cancer, Multiple endocrine neoplasia syndrome, Multiple myeloma/plasma cell neoplasm, Mycosis fungoides, Myelodysplastic syndromes, Myelodysplastic/myeloproliferative diseases, multiple Myeloma, Myeloproliferative disorders, Nasal cavity and paranasal sinus cancer, Nasopharyngeal carcinoma, Neuroblastoma, Oral cancer, Oropharyngeal cancer, Osteosarcoma/malignant fibrous histiocytoma of bone, Ovarian cancer, Ovarian epithelial cancer, Ovarian germ cell tumor, Ovarian low malignant potential tumor, Pancreatic cancer, Pancreatic cancer, islet cell Paranasal sinus and nasal cavity cancer, Parathyroid cancer, Penile cancer, Pharyngeal cancer, Pheochromocytoma, Pineal astrocytoma, Pineal germinoma, Pineoblastoma and supratentorial primitive neuroectodermal tumors, Pituitary adenoma, Plasma cell neoplasia/Multiple myeloma, Pleuropulmonary blastoma, Primary central nervous system lymphoma, Prostate cancer, Rectal cancer, Renal cell carcinoma (kidney cancer), Renal pelvis and ureter, transitional cell cancer, Retinoblastoma, Rhabdomyosarcoma, Salivary gland cancer, Ewing family of tumors Sarcoma, Kaposi Sarcoma, soft tissue Sarcoma, uterine Sarcoma, Sézary syndrome, Skin cancer (non-melanoma), Skin cancer (melanoma), Merkel cell Skin carcinoma, Small intestine cancer, Soft tissue sarcoma, metastatic squamous neck cancer with occult primary, Stomach cancer, Supratentorial primitive neuroectodermal tumor, cutaneous T-Cell lymphoma, Testicular cancer, Throat cancer, Thymoma and thymic carcinoma, Thyroid cancer, Transitional cell cancer of the renal pelvis and ureter, Trophoblastic tumor, transitional cell cancer, Urethral cancer, Uterine cancer, Uterine sarcoma, Vaginal cancer, Visual pathway and hypothalamic glioma, Vulvar cancer, Waldenström macroglobulinemia, and Wilms tumor (kidney cancer). In certain embodiments, cancers that may be treated using the recoding therapy disclosed herein are selected from the group consisting of sarcomas such as Osteosarcoma, Osteoma, Chondrosarcoma, Chondroma, Leiomyosarcoma, Leiomyoma, Rhabdomyosarcoma, Rhabdomyoma, Mesothelioma, Fibrosarcoma, Fibroma, Malignant Histiocytoma, Hisitocytoma, Angiosarcoma, Hemangiosarcoma, Hemangioma, Hemangiopericytoma, Lymphangiosarcoma, Lymphangioma, Liposarcoma, Lipid Cell Tumor, Lipoma, Myxosarcoma, Chordoma, Cystosarcoma Phylloides, Fibroadenoma, Seminoma, Dysgerminoma, Sertoli-Leydig Cell Tumor, Arrhenoblastoma, Granulose-Theca Cell Tumor, Hilar Cell Tumor, Prostate Cancer, Prostatic Hypertrophy, Wilms Tumor, Melanoma, Nevus, Neurofibrosarcoma, Glioma, Anaplastic Glioma, Glioblastoma, Neuroblastoma, Medulloblastoma, Ganglioneuroma, Malignant meningioma, Meningioma, Malignant Schwannoma, Schwannoma, Neurilemmoma, Neurofibroma and Mesenchymous Tumor; Carcinomas such as Squamous Cell Carcinoma, Merkel Cell Neoplasm, Epidermoid Carcinoma, malignant Skin Adnexal Tumor, Adenocarcinoma, Hepatocellular Carcinoma, Renal Cell Carcinoma, Choriocarcinoma, Hypernephroma, Cholangiocarcinoma, Transitional Cell Carcinoma, Seminoma, Embryonal Cell Carcinoma, Papilloma, Seborrheic Keratosis, Skin Adnexal Tumors, Hepatoma, Adenoma, Hepatic Adenoma, Renal Tubular Adenoma, Bile Duct Adenoma, Transitional Cell Papilloma, Hydatidiform Mole, Parathyroid Carcinoma, Parathyroid Adenoma, Medullary Carcinoma of Thyroid, C Cell Hyperplasia, Malignant Pheochromocytoma, Pheochromocytoma, Islet Cell Carcinoma, Islet Cell Adenoma, Insulinoma, Gastrinoma, Malignant Carcinoid, Carcinoid, Malignant Paraganglioma, Chemodectoma and Paraganglioma; Myelomas; Leukemias such as Myelogenous Leukemia, Lymphatic Leukemia, Policythemia, Aleukemic Leukemia, Preleukemia and Myeloproliferative Disorders; Lymphoma such as Myeloma, Hodgkin Lymphoma, Non-Hodgkin Lymphoma, Plasmacytoma and Plasmacytosis; Adenosquamous Carcinoma, Mesodermal Tumor, Carcinosarcoma and Teratocarcinoma.

[1350] Symptoms of neoplastic diseases: In one example, the present invention treats or alleviates at least one symptom selected from Angina, Bradypnea, Breathing difficulties, Gradual vision change in both eyes, Gradual vision changes in one eye, Head symptoms, Heartburn, Muscle symptoms, Nerve symptoms, Perforated gastric ulcer, Perforated ulcer, Respirations, shallow, Sexual symptoms, Weight loss, Oesophagus symptoms, Weight symptoms, Anaemia, Bad breath, Breath odors, Burning feet, Burning Legs, Cleft lip with or without cleft palate in children, Communication symptoms, Diarrhea, Dyspepsia, Easily fatigued, Enlarged liver, Face symptoms, Foot pain, Gastritis, Gastrooesophageal reflux in pregnancy, Glossitis, Hairy Tongue, Hyperlipidaemia, Hypertriglyceridemia, Impotence, Lack of energy, Lag in breathing, Male infertility, Meniere's disease, Movement symptoms, Musculoskeletal symptoms, Night sweats in children, Non-respiratory causes of shallow respiration, Raised ambulatory 24 hr pH monitoring, Rapid heartbeat, Respiratory lag, Sleep symptoms, Sleeplessness, Speech symptoms, Sweat symptoms, Trauma-related symptoms, Voice symptoms, Vomiting, White tongue, Abdominal symptoms, Abnormal blood test symptoms, Acute reflux-like regurgitation in pregnancy, Acute reflux-like symptoms in pregnancy, Acute reflux-like vomiting in pregnancy, Acute stomach ulcer-like symptoms in pregnancy, Birth symptoms, Blanching in the fingers, Bleeding symptoms, Blood symptoms, Blood vessel damage, Chronic pain in multiple muscles, Digestive symptoms, Elevated blood pressure in pregnancy, Episodic arterial vasospasm, Female infertility, Female reproductive symptoms, Fertility symptoms, Heart enlargement, Hiatus hernia, Hiatus hernia related to chronic digestive disorders, High blood pressure, Hypertension-like symptoms in pregnancy, Impaired myocardial contractility, Increased Systolic pressure, Infection, Infertility, Intermittent claudication, Intermittent claudication of both lower limbs, Intermittent claudication of one lower limb, Intermittent pain of the lower limb, Lower abdominal symptoms, Lower blood pressure in the legs than in the arms, Mouth symptoms, Mycocardial ischemia, Noncompliance, Occlusion of renal arteries, Pain, Peripheral arterial trauma, Poor appetite, Poor wound healing, Pregnancy symptoms, Pulsatile Abdominal swelling, Red blood cell symptoms, Reflux-like symptoms, Respiratory symptoms, Sensory symptoms, Severe chronic pain in multiple bones, Sore throat, Sweating, Throat symptoms, Urinary incontinence, Venous insufficiency, Women's health symptoms, Birth defects, Eating symptoms, 1 litre of sweat per hour, Aberrant behaviour in pregnancy, Abnormal eye movements, Abnormal Liver Function Tests in Pregnancy, Abnormal thinking in pregnancy, Absenteeism, Accentuated fall in systolic pressure, Acidosis, Action tremor, Acute epilepsy-like symptoms, Acute forgetfulness in pregnancy, Acute hemorrhagic pancreatitis, Acute intermittent forgetfulness in pregnancy, Acute onset of daytime sleepiness, Acute onset of daytime sleepiness in adults, Acute onset of daytime sleepiness in the elderly, Acute pancreatitis, Addiction symptoms, Aggression, Alcohol abuse, Alcohol breath odor, Alcohol use, Altered bladder habits in pregnancy, Altered mental state, Altered vital signs, Anxiety disorder in pregnancy, Anxiety in pregnancy, Apprehension in pregnancy, Arrhythmia, Arrhythmias, Atrial fibrillation, Balance symptoms, Behavior problems at school, Behavior problems at work, Behavior problems in adults, Behavior problems in children, Behavior problems in teens, Behavioral symptoms, Behaviour changes in pregnancy, Blackouts, Cerebellar ataxia, Chronic Diarrhea, Chronic orthostatic hypotension, Cleft palate in children, Clumsiness, CNS depression in children, Cognitive impairment, Coma, Confusion, Confusion in children, Coordination problems, De-personalization, Decreased level of consciousness, Deep stupor, Dehydration, Delayed ejaculation, Delirium, Delusions, Dementia, Depressed mental status, Depressive symptoms, Diabetic retinopathy, Diaphoresis of the feet, Diaphoresis of the forehead, Diaphoresis of the palms, Diaphoresis of the soles, Difficulty concentrating in adults, Disoriented state, Diuresis, Dramatic fall in blood pressure, Drowsiness, Drug abuse, Drug withdrawal causing new-onset seizures, Drugs, Drugs causing diarrhea, Drugs causing macrocytosis, Drugs causing persistent hypoglycemia, Drugs causing persistent hypoglycemia in adolescents, Drugs causing persistent hypoglycemia in children, Drugs causing persistent hypoglycemia in infants, Dysphagia due to esophagitis, Emotional symptoms, Energy symptoms, Epilepsy-like symptoms, Episodic Diaphoresis, Episodic Diaphoresis as in case of diabetes mellitus, Euphoria, Excessive diaphoresis, Eye symptoms, Fainting, Fainting episodes similar as in pulmonary hypertension, Falls, Fatigue, Feeling the heartbeat, Flushing, Forgetfulness, Forgetfulness in pregnancy, Frequency of urination in pregnancy, Frequent urination, Frequent urination in pregnancy, Generalised diaphoresis, Generalised diaphoresis with heat loss via evaporation, Hallucinations, Headache, Heart arrhythmia, Heart arrhythmias, Heart flutters, High ALP, High ALT, High AST, Hyperosmolarity, Hypoperfusion state, Hypothermia, Hypothermic attack, Imbalance, Impaired circulation, Inadequate intravascular pressure, Inattention, Inattention symptoms, Increased bilirubin, Increased GGT, Increased prothrombin time, Increased sweating, Intercourse symptoms, Intermittent diaphoresis, Intermittent epilepsy-like symptoms, Intermittent seizures in early childhood, Involuntary tonic movements, Irregular heartbeat, Irritability, Jaundice in pregnancy, Level of consciousness symptoms, Liver tenderness in pregnancy, Low albumin, Low blood platelet level in pregnancy, Low blood pressure, Low blood sugar, Low temperature, Major depression in pregnancy, Male impotence, Memory disturbances, Memory Disturbances in pregnancy, Memory loss in pregnancy, Memory symptoms, Memory symptoms in pregnancy, Mental changes in pregnancy, Mental depression, Mental depression in pregnancy, Mental problems, Mental problems in pregnancy, Mild depression in pregnancy, Mild depression-like symptoms in pregnancy, Mild personality changes, Moderate depression in pregnancy, Mood swings, Muscle pain, Muscle weakness, Myoclonus, Nerve damage, Nervousness, Nervousness in pregnancy, Neuromuscular irritability, Neuromuscular irritability of lower limbs, Neuropathy, Night time urination in pregnancy, Night urination in pregnancy, Nocturia in pregnancy, Numbness in Both Feet, Numbness in one foot, Nystagmus, Ocular myokymia, Orthostatic hypotension, Ototoxic medications, Palpitations, Pancreatitis, Paresthesias, Penile Burning Sensation, Persistent painful erection, Personality change, Personality symptoms, Phobia, Progressive mental deterioration, Prolonged exposure to cold, Psychiatric symptom, Pulse irregularity in pregnancy, Red face, Reduced immune response, Reduced intravascular pressure, Reduced sperm count, Retinopathy, School problems, Seizures, Seizures in infants and early childhood, Self-esteem symptoms, Severe epilepsy-like symptoms, Sexual dysfunction in pregnancy, Short-term memory loss, Signs of circulatory collapse, Signs of circulatory collapse as seen in intestinal hemorrhage, Sleeping problems, Slurred speech, Social problems, Society problems, Sole numbness, Standing symptoms, Stupor, Subfertility, Substance abuse causing school underachievement and academic failure, Substances of abuse causing delirium, Sudden onset of confusion in children, Syncopal episode, Thigh Burning Sensation, Thrombocytopenia, Thrombocytopenia in pregnancy, Tingling in Both Feet, Tingling in both hands, Tingling in one foot, Tingling in one hand, Tonic-clonic seizure, Toxins causing vomiting, Tremor, Unusual body odor in children, Urinary burning, Urinary urgency, Urine retention, Vascular collapse, Vertigo, Violent behaviour, Walking symptoms, Weight loss in pregnancy, Abnormal uterine bleeding, Abortion, Abruptio Placentae in Pregnancy, Abscessed teeth, Acid Reflux in pregnancy, Acquired mental retardation, Acute acid reflux into mouth during pregnancy, Acute attack of asthma, Acute cerebral infarct, Acute seasonal asthma-like symptoms, Aphthous Ulcer, Arm burning sensation, Arm coldness, Arm infection, Arm inflammation, Arm numbness, Arm paresthesia, Arm redness, Arm sensitive, Arm spasm, Arm swelling, Atelectasis, Biceps burning sensation, Biceps cold, Biceps infection, Biceps inflammation, Biceps numb, Biceps redness, Biceps spasm, Biceps swelling, Biceps tingling, Bilateral cleft lip and palate, Bilateral complete cleft lip, Bilateral stroke, Black hairy tongue, Bladder symptoms, Blood clots, Blood lead concentration, Blood pressure symptoms, Blood vessel symptoms, Blue lips, Bone changes, Breath sound symptoms, Breath symptoms, Bronchial cancer, Bronchitis, Brown nails, Cancer-related symptoms, Cardiovascular symptoms, Cervix symptoms, Chronic bronchitis, Chronic cough, Chronic cough in adolescents, Circulation symptoms, Claudication, Cluster headache, Constant leg pain, Coracobrachialis infection, Coracobrachialis redness, Coracobrachialis swelling, Cough, Cramping leg pain, Cramping pain in both legs, Dark spots on teeth, Darkened tongue, Death, Death-related symptoms, Decreased salivary function, Digit burning sensation, Digit cold, Digit infection, Digit inflammation, Digit numb, Digit redness, Digit sensitive, Digit spasm, Digit swelling, Digit tingling, Disc herniation, Disc prolapse, Discolored teeth in children, Dry cough, Dry Gangrene, Dry mucous membrane as in case of Sjogren's syndrome, Dry skin, Electrocardiogram changes, Eructation, Exercise symptoms, Female genital symptoms, Female sexual symptoms, Femur burning sensation, Femur numb, Femur tingling, Fetal symptoms, Fibula burning sensation, Fibula numb, Fibula tingling, Finger burning sensation, Finger pulp burning sensation, Fingernail burning sensation, Fingers burning sensation, Fingers cold, Fingers infection, Fingers inflammation, Fingers numb, Fingers redness, Fingers sensitive, Fingers spasm, Fingers swelling, Fingers tingling, Forearm burning sensation, Forearm cold, Forearm infection, Forearm inflammation, Forearm numb, Forearm redness, Forearm sensitive, Forearm spasm, Forearm swelling, Forearm tingling, Foul mouth odour, Genital symptoms, Growth symptoms, Heart damage, Heart disease, Heart rhythm symptoms, Heart symptoms, Heartburn after eating in pregnancy, Heartburn after exercise in pregnancy, Heartburn in pregnancy, Heartburn pain resistant to treatment in pregnancy, Heartburn that worsens if lying down after eating in pregnancy, Heartburn unrelated to eating in pregnancy, Heartburn with acid reflux in pregnancy, Heartburn without reflux in pregnancy, Herniated disk, Hiccups, High lipoprotein level, Hoarse, Humerus burning sensation, Humerus numb, Humerus tingling, Hypoxia in pregnancy, Increased capillary refill time, Increased secretions in the lung, Indigestion in pregnancy, Infant symptoms, Inflammatory symptoms, Irregular rhythm, Kidney symptoms, Knee joint burning sensation, Knee joint cold, Knee joint numb, Knee joint sensitive, Knee joint tingling, Kneecap burning sensation, Kneecap cold, and any combinations thereof.

[1351] In one aspect, the present disclosure provides methods to activate, promote, support, improve, or increase the activity of a growth factor receptor present in, on the surface of a neoplastic cell such that the neoplastic cell in converted into a non-neoplastic cell and/or a subject carrying said cell is protected from a neoplastic disease, said methods optionally comprising the administration of a pharmaceutical association as defined herein.

[1352] In one aspect, the present disclosure provides methods to activate, promote, support, improve, or increase the tumor suppressor activity of proteins p53 and/or pRb (retinoblastoma protein) in a neoplastic cell such that the neoplastic cell in converted into a non-neoplastic cell and/or a subject carrying said cell is protected from a neoplastic disease, said methods comprising the administration of a pharmaceutical association as defined herein.

[1353] In one aspect, the present disclosure provides methods to convert a neoplastic cell (e.g. a cancer cell) into a non-neoplastic cell (e.g. a non-cancerous cell) and/or to protect a subject carrying this cell from a neoplastic disease, disorder, condition, pathology or at least one symptom thereof, which involves dampening or inhibiting cell division and/or regulating, re-establishing or restoring a cell adhesion checkpoint and/or inducing differentiation of said neoplastic cell.

### XIV. Diagnostic Methods

[1354] In one aspect, the present disclosure provides methods of identifying, diagnosing, and optionally classifying subjects on these bases, which may include clinical diagnosis, biomarker levels, and other methods known in the art.

[1355] In one aspect, the present disclosure provides a pharmaceutical association or composition as defined herein for use in a diagnostic method of a neoplastic disease (e.g. a cancer). In one example, such a diagnostic method comprises the detection of a cancer using a method described in US patent application No. 2002/0159986 A1, which is incorporated herein by reference in its entirety.

[1356] In one aspect, the present disclosure provides a diagnostic method for diagnosing of a neoplastic disease or condition comprising the provision of a pharmaceutical association or composition as defined herein, and the contacting or administration of said pharmaceutical association or composition with a body part of a subject to be diagnosed.

[1357] A method for the diagnosis of cancer in a patient, comprising obtaining a biological sample from a patient and apply fluorescent and/or radiolabeled GFR binding compounds, wherein high localisation of these compounds indicates cancer in the patient.

[1358] In one aspect, the present disclosure provides methods of determining the effectiveness of a pharmaceutical association, combination or composition as defined herein for converting a neoplastic cell into a non-neoplastic cell and/or for treating a neoplastic disease or at least one symptom thereof, comprising the administration of said pharmaceutical association to a cell; the measurement of the expression of specific differentiation and/or cancerous markers as defined herein in the cell; the comparison of the expression of said specific differentiation and/or cancerous markers in the cell to the expression of said specific differentiation and/or cancerous markers in a cell treated with a reference (or control) pharmaceutical association, compound or solvent; and determining the effectiveness of the pharmaceutical association or composition relative to the reference pharmaceutical association or compound.

### XV. Screening Methods

[1359] In one aspect, the present disclosure provides a screening method for selecting a GFR-binding compound having the ability, after being associated or combined with a bioactive carrier as defined herein (thus forming a pharmaceutical association or combination as defined herein), to convert or recode a neoplastic cell into a non-neoplastic cell.

[1360] In one aspect, the present disclosure provides a screening method for selecting a peptide or a peptidomimetic having the ability, after being associated or combined with a bioactive carrier as defined herein (thus forming a pharmaceutical association or combination as defined herein), to convert or recode a neoplastic cell into a non-neoplastic cell.

[1361] In one aspect, the present disclosure provides a screening method for selecting a peptide or peptidomimetic having the ability, after being associated or combined with a bioactive carrier as defined herein (thus forming a pharmaceutical association or combination as defined herein), to convert or recode a neoplastic cell into a non-neoplastic cell, the method comprising the steps of (a) providing a molecular model of the 3D structure coordinates of PEPREF as defined herein and (b) identifying a candidate analog having a RMSD value of 2.45 Å or less, in particular of 2 Å or less, and more particularly of 1.79 Å or less. In one particular example, step (b) is performed using the method of RMSD calculation as already defined herein

[1362] In certain embodiments, the method can be performed using a computer (i.e., in silico). In some embodiments, the method can include providing the three-dimensional models of a plurality of peptides or peptidomimetics (i.e., a library or database of peptides or peptidomimetics) and screening each compound individually. Thus, in one aspect, the method of screening peptides or peptidomimetics generally includes computationally evaluating the potential of a selected peptide(s) or peptidomimetic(s) to structurally match with the computational model of the three-dimensional structure of PEPREF. For example, this method can include the steps of (a) employing a computational approach to perform a fitting operation between the selected peptide(s) or peptidomimetic(s) and the three-dimensional structure of PEPREF; and (b) analysing the results of the fitting operation to quantify the three-dimensional structural similarities between the peptide(s) or peptidomimetic(s) and PEPREF using the RMSD procedure as defined herein.

[1363] In one aspect, the present disclosure provides a method of producing a peptide or peptidomimetic having the ability, after being associated or combined with a bioactive carrier as defined herein (thus forming a pharmaceutical association or combination as defined herein), to convert or recode a neoplastic cell into a non-neoplastic cell, the method comprising the steps of (a) providing a molecular model of the following 3D structure coordinates of PEPREF; b) identifying a candidate analog having a RMSD as defined herein of 2.45 Å or less (in particular 2, more particularly 1.79); and (c) producing the candidate analog identified in step (b). In one particular example, said method further comprising the step of determining whether the compound produced in step (c) has a neoplastic cell recoding activity. In one particular example, steps (a) and (b) are performed by means of an electronic processor. In certain embodiments, step (a) comprises storing a representation of the atomic co-ordinates of PEPREF in a computer memory.

[1364] In one aspect, the present disclosure provides a method of producing a peptide or peptidomimetic having the ability, after being associated or combined with a bioactive carrier as defined herein (thus forming a pharmaceutical association or combination as defined herein), to convert or recode a neoplastic cell into a non-neoplastic cell, the method comprising the steps of: (a) providing in a computer memory atomic X-ray crystallographic co-ordinates of PEPREF; (b) generating with a processor a molecular model having a three-dimensional shape of PEPREF; (c) identifying a candidate analog having a RMSD of 2.45 Å or less (in particular 2, more particularly 1.79); (d) producing the candidate analog identified in step (c); and (e) determining whether the candidate analog produced in step (d), once associated or combined with a bioactive carrier as defined herein (thus forming a pharmaceutical association or combination as defined herein), has the ability to convert or recode a neoplastic cell into a non-neoplastic cell. In one particular example, said method comprises the additional step of producing the peptide or peptidomimetic in a commercially useful quantity.

[1365] In one aspect, the present disclosure provides a computer system comprising: (a) a memory comprising atomic X-ray crystallographic coordinates of PEPREF; and (b) a processor in electrical communication with the memory; wherein the processor generates a molecular model having a three dimensional shape representative of PEPREF. In one particular example, said coordinates are stored on a computer readable diskette.

### XVI. Kits

[1366] The present disclosure provides a variety of kits for conveniently and/or effectively carrying out methods and uses of the present invention. Typically, kits will comprise sufficient amounts and/or numbers of components to allow a user to perform multiple treatments of a subject(s) and/or to perform multiple experiments.

[1367] In one aspect, the present disclosure provides kits for pharmaceutical association production, comprising at least one GFR-binding compound as defined herein, at least one bioactive carrier as defined herein, both provided in an amount effective to produce a pharmaceutical association to convert a neoplastic cell into a non-neoplastic cell and/or treat, prevent or diagnose a neoplastic disease when administered in-vitro, ex-vivo or in-vivo to a neoplastic cell or a subject carrying such a neoplastic cell, and packaging and instructions.

[1368] In one aspect, the present disclosure provides kits for pharmaceutical composition production, comprising a GFR-binding compound as defined herein, a bioactive carrier as defined herein, and a pharmaceutically acceptable excipient, carrier or vehicle, each of them provided in an amount effective to produce a pharmaceutical composition to convert a neoplastic cell into a non-neoplastic cell and/or treat or prevent a neoplastic disease when administered in-vitro, ex-vivo or in-vivo to a neoplastic cell or a subject carrying such a neoplastic cell, and packaging and instructions.

[1369] Suitable as solvents for use in kits of the invention include physiologically acceptable solvents, PBS, filtered and deionised water such as Milli-Q® water, alpha-MEM, DMEM and/or IMDM. All physiologically acceptable solvents suitable for implementing embodiments of the present invention are preferably deoxygenated before use.

[1370] In one example, said kit further comprises an administration device. In one example, said administration device is a dispensing device such as a syringe.

[1371] In one example, said kit comprises a first container containing a (modified) GFR-binding compound as defined herein and a second container containing a bioactive carrier such as a biomaterial.

[1372] In one particular example, said kits of the invention may suitably be provided in the form of a sterile packaging.

[1373] For example, in certain embodiments, said kits of the invention comprises more than 2, between 2 and 25, between 2 and 15, or between 2 and 10 of (modified) GFR-binding compound as defined herein, and more than 2, between 2 and 25, between 2 and 15, or between 2 and 10 (modified) GFR-binding compound as defined herein.

[1374] In one example, each (modified) GFR-binding compound and each bioactive carrier is conditioned in distinct and separated compartments, in lyophilised form, in solution or in suspension in a pharmaceutically dermatologically, prophylactically, diagnostically, imaging or cosmetically acceptable excipient, carrier or vehicle.

[1375] In one aspect, the invention discloses kit-of-parts comprising a bioactive carrier and a (modified) GFR-binding compound both as defined herein for uses and methods as defined herein.

### XVII. Sequence Listing

[1376] Examples of (modified) non-cyclic GFR-binding compounds as defined herein are listed in the appended sequence listing which forms an integral part of the present application.

[1377] Examples of (modified) cyclic GFR-binding compounds as defined herein are listed in the appended sequence listing which forms an integral part of the present application. (Modified) cyclic GFR-binding compounds of the present disclosure may be represented in non-cyclic, linear, form solely for the purpose of ease of representation but nevertheless remains cyclic compounds wherein the first and the last functional group (e.g. an amino acid) of the linearly represented compound are covalently connected to each other thereby forming a cyclic structure.

[1378] Pharmaceutical associations, combinations and compositions as defined in the present disclosure, has been found to lead to multiple and distinct advantages in terms of neoplastic diseases treatment.

[1379] As supported by the examples of the present application, pharmaceutical associations, combinations and compositions as defined in the present disclosure provide for a new area of treatment of neoplastic diseases by extracellularly converting or recoding neoplastic cells into functional and healthy cells. The therapy of the invention containing pharmaceutical associations, combinations or compositions as defined herein display advantages over therapies that do not contain it, such as any one of, and preferably a plurality of:
[1380] Enhanced and/or more practical and/or more efficient and/or more cost-effective and/or more adapted to the end-user needs;
[1381] Converting or recoding a neoplastic cell to induce and/or promote and/or improve self-healing and/or self-recovery thereof, particularly in a shorter period of time;
[1382] Converting a neoplastic cell into a non-neoplastic cell and/or protecting a subject from a neoplastic disease, disorder, condition, pathology, such as cancer, or symptoms thereof using non-mutagenic means;
[1383] Converting a neoplastic cell into a non-neoplastic cell and/or protecting a subject from a neoplastic disease, disorder, condition, pathology, such as cancer, or symptoms thereof using extracellular means;
[1384] Restoring a neoplastic cell ability to undergo differentiation, particularly in a shorter period of time;
[1385] Converting and/or recoding a circulating or non-circulating neoplastic cell such as a metastatic or non-metastatic cancer cell, into a non-neoplastic cell, particularly in a shorter period of time;
[1386] Protecting a subject from a neoplastic disease, disorder, condition or pathology such as cancer, and/or any symptoms thereof, particularly in a shorter period of time;
[1387] Providing and/or producing a physiologically functional and/or healthy osteoblast, osteocyte, chondroblast, chondrocyte, neuroblast, neurocyte, Sertoli cells, Leydig cell, Germ cell, Myoblast, Myocyte, keratinocyte, endothelial cells, angioblast, fibroblast, fibrocyte or podocyte from a neoplastic cell, particularly within a shorter period of time;
[1388] Re-establishing, reactivating or restoring the cell adhesion checkpoint of a neoplastic cell;
[1389] Treating a neoplastic cell without substantially inducing cell death;
[1390] Inducing quiescence of a neoplastic cell;
[1391] Dampening, reducing or suppressing cell division/proliferation of a neoplastic cell;
[1392] Activating and/or promoting and/or up-regulating anti-mitogen activity and/or tumor suppressor pathways and/or anti-oncogenic activity in a neoplastic cell;
[1393] Adapted to the treatment of any neoplastic cell;
[1394] Safer for the patient being treated as providing less or no harmful side-effects;
[1395] Offers the possibility for local treatments of neoplastic diseases;
[1396] Relies mainly or only on the activation of physiological cell mechanisms which increases the general safety of the herein defined therapy.

[1397] For example, in certain embodiments, pharmaceutical association or combinations, or compositions according to the present disclosure in which PEP1 is a peptide selected from the group consisting of SAIS, NAIS, SATS and SPIS, in which PEP2 is a peptide selected from the group consisting of LKNYQ, LKKYR, LRKHR and LKYHY, have been found to lead to unexpectedly fast conversion of a cancerous cell into a healthy and functional cell of the bone lineage.

[1398] For example, in certain embodiments, pharmaceutical association or combinations, or compositions according to the present disclosure in which PEP1 is a peptide selected from the group consisting of SAIS, NAIS, SPIS, EPLP, and EPLT, in which PEP2 is a peptide selected from the group consisting of LKNYQ, LKKYR, YKQYE and EQLSN, have been found to lead to unexpectedly fast conversion of a cancerous cell into a healthy and functional cell of the chondrocytic cell lineage.

[1399] For example, in certain embodiments, pharmaceutical association or combinations, or compositions according to the present disclosure in which PEP1 is a peptide selected from the group consisting of SNIT, RPVQ and RSVK, in which PEP2 is a peptide selected from the group consisting of IGEMS, LGEMS, KEVQV and KKATV, have been found to lead to unexpectedly fast conversion of a cancerous cell into a healthy and functional cell of the vascular lineage.

[1400] For example, in certain embodiments, pharmaceutical association or combinations, or compositions according to the present disclosure in which PEP1 is selected from the group consisting of NAIS, SPIS and EPIS, wherein PEP2 is selected from the group consisting of LKKYR, LKYHY, YKQYE and KFKYE, have been found to lead to unexpectedly fast conversion of a cancerous cell into a healthy and functional cell of the neuron lineage.

[1401] For example, in certain embodiments, pharmaceutical association or combinations, or compositions according to the present disclosure in which PEP1 is SPIN, in which PEP2 is YGKIP, have been found to lead to unexpectedly fast conversion of a cancerous cell into a healthy and functional cell of the eye-retina lineage.

[1402] For example, in certain embodiments, pharmaceutical association or combinations, or compositions according to the present disclosure in which PEP1 is SPIN, and in which PEP2 is YGKIP, have been found to lead to unexpectedly fast conversion of a cancerous cell into a healthy and functional cell of the renal lineage.

[1403] For example, in certain embodiments, pharmaceutical association or combinations, or compositions according to the present disclosure in which PEP1 is a peptide selected from the group consisting of NAIS, SPIS, EPLP and EPLT, in which PEP2 is selected from the group consisting of LKKYR, YKQYE and EQLSN, have been found to lead to unexpectedly fast conversion of a cancerous cell into a healthy and functional cell of the ligament and tendon lineage.

[1404] For example, in certain embodiments, pharmaceutical association or combinations, or compositions according to the present disclosure in which PEP1 is a peptide selected from the group consisting of EPLP, EPLT, RSVK and RPVQ, in which PEP2 is a peptide selected from the group consisting of EQLSN, IGEMS, KEVQV and KKATV, have been found to lead to unexpectedly fast conversion of a cancerous cell into a healthy and functional cell of the fibroblast lineage.

[1405] For example, in certain embodiments, pharmaceutical association or combinations, or compositions according to the present disclosure in which PEP1 is NAIS, in which PEP2 is LKKYR, have been found to lead to unexpectedly fast conversion of a cancerous cell into a healthy and functional cell of the reproduction system lineage.

[1406] For example, in certain embodiments, pharmaceutical association or combinations, or compositions according to the present disclosure in which PEP1 is selected from the group consisting of NAIS, SATS, SPIS, EPIS and SPIN, in which PEP2 is selected from the group consisting of LKKYR, LRKHR, LKYHY, KFKYE and YGKIP, have been found to lead to unexpectedly fast conversion of a cancerous cell into a healthy and functional cell of the lung cell lineage.

[1407] For example, in certain embodiments, pharmaceutical association or combinations, or compositions according to the present disclosure in which PEP1 is selected from the group consisting of RSVK or RPVQ, in which PEP2 is selected from the group consisting of KEVQV or KKATV, have been found to lead to unexpectedly fast and qualitatively and quantitatively important muscle cells induction, producing highly functional differentiated cells.

[1408] For example, in certain embodiments, pharmaceutical association or combinations, or compositions according to the present disclosure in which PEP1 is SNIT, in which PEP2 is IGEMS or LGEMS, have been found to lead to unexpectedly fast conversion of a cancerous cell into a healthy and functional cell of the blood cell lineage.

[1409] For example, in certain embodiments, pharmaceutical association or combinations, or compositions according to the present disclosure in which PEP1 is SAIS or NAIS, in which PEP2 is LKNYQ or LKKYR, have been found to lead to unexpectedly fast conversion of a cancerous cell into a healthy and functional cell of the adipocyte lineage.

[1410] Accordingly, it is possible to achieve the conversion of a neoplastic cell (e.g. a cancer cell) into a non-neoplastic cell (e.g. a functional and/or healthy cell of the bone, chondrocytic, muscle, vascular, neuronal, retinal, renal, ligament, tendon, fibroblast, blood, lung, adipocyte, reproduction system cell lineages) using extracellular, non-mutagenic active principles and is thus useful in the treatment of neoplastic diseases such as cancers.

[1411] The present invention provides a recoding therapy for the treatment of neoplastic diseases, conditions or disorders such as cancer and aims at providing a suitable micro-environment to the neoplastic cell containing suitable biological signals so that the neoplastic cell is able to undergo self-healing and become a functional, healthy, non-neoplastic cell.

[1412] In addition, it has been found that using the recoding therapy of the invention instead of conventional therapies allows for improved treatment selectivity in such a way that reduced or substantially no adverse side-effect is observed. Without wishing to be bound to any specific theory, this may be explained by considering that the present therapy relies on the activation of physiological cell mechanisms without imposing or forcing the treated cell to undergo e.g. apoptosis or cell cycle arrest (which would then most likely unselectively target any cells, healthy and neoplastic) but instead reestablishes the correct cellular microenvironment surrounding this neoplastic cell so that the cell is able to operate self-healing. As a result, a non-neoplastic cell i.e. a cell in which the cell cycle and/or cell adhesion checkpoint(s) need not be repaired, brought in contact with such a microenvironment would be less or not be substantially affected.

[1413] Remarkably, it has also been found that using the pharmaceutical associations or compositions as defined herein allows for the reduction (in most cases, important reduction) of the time of treatment of a neoplastic cell and by extension of a neoplastic disease in comparison with known technologies.

[1414] It is another aspect of the present invention to solve the technical problem of providing a therapy for treating neoplastic diseases being completely or at least partially devoid of one or more, preferably a plurality of the disadvantages of known treatments.

[1415] All combinations of any of the above-mentioned features described in all above part of the present description are specifically contemplated by the Applicant to be within the scope of the present invention unless contradictory in context. Examples of such combinations are detailed throughout the present description.

[1416] Further embodiments and advantages will become apparent to a skilled reader in light of the examples provided below.

### Examples

[1417] Disclosed and described, it is to be understood that this invention is not limited to the particular examples, process steps, and materials disclosed herein as such process steps and materials may vary somewhat. It is also to be understood that the terminology used herein is used for the purpose of describing particular embodiments only and not intended to be limiting since the scope of the present invention will be limited only by the appended claims and equivalents thereof.

[1418] The following Examples are representative of techniques employed by the inventor in carrying out aspects of the present invention. It should be appreciated that while these techniques are exemplary of preferred embodiments for the practice of the invention, those of skill in the art, in light of the present disclosure, will recognize that numerous modifications can be made without departing from the spirit and intended scope of the invention.

[1419] The following starting materials and reagents were used:
[1420] Apatite ceramics (also called apatite or ceramic in the present invention) were synthetized as described in Mater Res. 2004; 7(4): 625-630.
[1421] Titanium was obtained from Goodfellow®.
[1422] Hydrogel (poly(acrylamide-co-acrylic acid) gel) was synthetized as described in Langmuir 2011; 27(22):13635-42.
[1423] PEEK was obtained from Goodfellow®.
[1424] PET (Poly(ethylene terephthtalate) was obtained from Goodfellow®.
[1425] Type-I collagen sponge was obtained from Sigma®.
[1426] Hexane was obtained from Sigma®.
[1427] 3-succinimidyl-3-maleimidopropionate (SMP) was obtained from Sigma®.
[1428] DMF was obtained from Sigma®.
[1429] PBS 1× was obtained from Gibco®.
[1430] 3-(ethoxydimethylsilyl)propylamine was obtained from Sigma®.
[1431] Ammonium persulfate was obtained from Biorad®.
[1432] N,N,N′,N′-tetramethylethylenediamine was obtained from Aldrich®.
[1433] Acrylamid was obtained from Merck®.
[1434] Acrylic acid was obtained from Merck®.
[1435] N,N-methylene-bis-acrylamide was obtained from Merck®.
[1436] NaOH was obtained from Aldrich®.
[1437] N,N,N′,N′-tetramethylethylenediamine was obtained from Aldrich®.
[1438] Dimethylaminopropyl-3-ethylcarbodiimide hydrochloride was obtained from Aldrich®.
[1439] N-hydroxysuccinimide was obtained from Aldrich®.
[1440] 2-(N-morpholino)-ethane sulfonic acid was obtained from Aldrich®.
[1441] MilliQ water: is water characterised in terms of resistivity (typically 18.2 MΩ·cm at 25° C.).
[1442] Low glucose Dulbecco's Modified Eagle Medium (DMEM) was obtained from Invitrogen®
[1443] Minimum Essential Medium Eagle without ascorbic acid (aMEM) was obtained from Invitrogen®.
[1444] All of the cell culture experiments were carried out without any serum in the medium for the first 8 hours of culture.
[1445] Osteosarcoma cells: MG63 cells were obtained from ATCC®. These cells were cultured in DMEM (Eagle's Minimum Essential Medium) medium supplemented with 10% fetal calf serum (FCS) and 1% penicillin/streptomycin. All cells were used at a low passage number (passage 10), were subconfluently cultured and were seeded at 10⁴ cells/cm² for the purpose of the experiments.
[1446] Chondrosarcoma cells: Hs819.T cells were obtained from ATCC®. These cells were cultured in DMEM (Eagle's Minimum Essential Medium) medium supplemented with 10% fetal calf serum (FCS) and 1% penicillin/streptomycin. All cells were used at a low passage number (passage 10), were subconfluently cultured and were seeded at 10⁴ cells/cm² for the purpose of the experiments.
[1447] Rhabdomyosarcoma cells: A-673 cells were obtained from ATCC®. These cells were cultured in DMEM (Eagle's Minimum Essential Medium) medium supplemented with 10% fetal calf serum (FCS) and 1% penicillin/streptomycin. All cells were used at a low passage number (passage 10), were subconfluently cultured and were seeded at 10⁴ cells/cm² for the purpose of the experiments.
[1448] Adenocarcinoma cells: HCC4006 cells were obtained from ATCC®. These cells were cultured in RPMI-1640 medium (obtained from ATCC®) supplemented with 10% fetal calf serum (FCS) and 1% penicillin/streptomycin. All cells were used at a low passage number (passage 10), were subconfluently cultured and were seeded at 10⁴ cells/cm² for the purpose of the experiments.
[1449] CMFDA is a Cell Tracker Green obtained from Invitrogen®.
[1450] DAPI was obtained from Sigma®.
[1451] Fetal bovine serum (FBS) was obtained from Gibco®.
[1452] Penicillin/streptomycin was obtained from Invitrogen®.
[1453] The AlamarBlue® assay was obtained from Molecular Probes®.
[1454] Anti phospho-p53 antibody was obtained from Santa Cruz Biotechnology®,
[1455] Anti pRB antibody was obtained from Santa Cruz Biotechnology®,
[1456] Monoclonal anti-integrin (extracellular domain) αv, α5, α3, α4, β1, β3, β5 and β9 antibodies were obtained from Santa Cruz Biotechnology®,
[1457] Cell cytoskeletal filamentous actin (F-actin) was visualized by Alexa Fluor® 488 phalloidin Sigma® labeling.
[1458] Monoclonal anti-vinculin antibody (clone hVIN-1, produced in mouse) was obtained from Sigma®.
[1459] Primers for Cyclin D1: 5′-CCGTCCATGCGGAAGATC-3′ (Forward) and 5′-GAAGACCTCCTCCTCGCACT-3′ (Reverse) were obtained from Invitrogen®.
[1460] Primers for Cyclin D2: 5′-CATCCAACCGTACATGCGCAG-3′ (Forward) and 5′-CATGGCCAGAGGAAAGACCTC-3′ (Reverse) were obtained from Invitrogen®.
[1461] Primers for Cyclin D3: 5′-TGATTTCCTGGCCTTCATTC-3′ (Forward) and 5′-CGGGTACATGGCAAAGGTAT-3′ (Reverse) were obtained from Invitrogen®.
[1462] Primers for Paxillin: 5′-AATTCCAGTGCCTCCAACAC-3′ (Forward) and 5′-GAGCTCATGACGGTAGGTGA-3′ (Reverse) were obtained from Invitrogen®.
[1463] Primers for Vinculin: 5′-GCCAAGCAGTGCACAGATAA-3′ (Forward) and 5′-TTCCTTTCTGGTGTGTGAAGC-3′ (Reverse) were obtained from Invitrogen®.
[1464] Primers for DMP-1: 5′-AGCATCCTGCTCATGTTCCTTT-3′ (Forward) and 5′-GAGCCAAATGACCCTTCCATT-3′ (Reverse) were obtained from Invitrogen®.
[1465] Primers for Sclerostin: 5′-CTTAGTTTTCTCAGTCTGTGGTTGAAAT-3′ (Forward) and 5′-AGAGTACCCCGAGCCTCC-3′ (Reverse) were obtained from Invitrogen®.
[1466] Primers for RANK-L: 5′-CTCAGCCTTTTGCTCATCTCACT-3′ (Forward) and 5′-CCAAGAGGACAGACTCACTTTATGG-3′ (Reverse) were obtained from Invitrogen®.
[1467] Primers for MLC-1: 5′-AGAAGGGCTCCATGTCTGACA-3′ (Forward) and 5′-AAGATTTCAGGACCCGAGCAG-3′ (Reverse) were obtained from Invitrogen®.
[1468] Primers for GATA-4: 5′-AGGCCTCTTGCAATGCGGA-3′ (Forward) and 5′-CTGGTGGTGGCGTTGCTGG-3′ (Reverse) were obtained from Invitrogen®.
[1469] Primers for ▪-Sarcomeric actin: 5′-GACCACAGCTGAACGTGAGA-3′ (Forward) and 5′-CATAGCACGATGGTCGATTG-3′ (Reverse) were obtained from Invitrogen®.
[1470] Primers for Sox9: 5′-GACTTCCGCGACGTGGAC-3′ (Forward) and 5′-GTTGGGCGGCAGGTACTG-3′ (Reverse) were obtained from Invitrogen®.
[1471] Primers for IBSP: 5′-TGCCTTGAGCCTGCTTCC-3′ (Forward) and 5′-GCAAAATTAAAGCAGTCTTCATTTTG-3′ (Reverse) were obtained from Invitrogen®.
[1472] Primers for Collagen IV: 5′-CCTGGTCTTGAAAGGTGATAAG-3′ (Forward) and 5′-CCCGCTATCCCTTGATCTC-3′ (Reverse) were obtained from Invitrogen®.
[1473] Primers for Vimentin: 5′-TGTCCAAATCGATGTGGATGTTTC-3′ (Forward) and 5′-TTGTACCATTCTTCTGCCTCCTG-3′ (Reverse) were obtained from Invitrogen®.
[1474] Primers for MMP-9: 5′-AATCTCTTCTAGAGACTGGGAAGG AG-3′ (Forward) and 5′-AGCTGATTGACTAAAGTAGCTGGA-3′ (Reverse) were obtained from Invitrogen®.
[1475] Primers for ▪-SMA: 5′-CCGACCGAATGCAGAAGGA-3′ (Forward) and 5′-ACAGAGTATTTGCGCTCCGAA-3′ (Reverse) were obtained from Invitrogen®.
[1476] Primers for GAPDH: 5′-GCAGTACAGCCCCAAAATGG-3′ (Forward) and 5′-ACAAAGTCCGGCCTGTATCCAA-3′ (Reverse) were obtained from Invitrogen®.
[1477] All of the peptides were synthetized using conventional solution and/or solid phase peptide synthesis methods.
[1478] All of the experiments were performed with a concentration of 400 ng/mL of GFR-binding compound(s) as defined herein.
[1479] All cell culture experiments were performed with cultures on plastic coated with type-I collagen in order to mimic the physiological conditions of the human body.

[1480] The following general methods and procedures were used:

[1481] X-Ray Photoelectron Spectroscopy:

[1482] For X-ray photoelectron spectroscopy, AVG Scientific ESCALAB photoelectron spectrometer was used for the surface analysis with a non-monochromatized MgK 1253.6 eV source of 100 W. The area of the analytical X-ray spot on the sample surface was about 200 μm². A 45° insert angle that corresponds to about 5 nm of analyzed depth was used. A flood gun was used for charge compensation. Acquisition of high resolution spectra was performed at constant pass energy of 20 eV.

[1483] Immunostaining:

[1484] The cells were first fixed for 20 min with 4% paraformaldehyde/PBS at 4° C. After fixation, the cells were permeabilized in PBS containing 1% Triton X-100 for 15 min. Protein immunofluorescent visualization was performed by first treating the cells with 1% (v/v) specific monoclonal antibodies for 1 hour at 37° C. Then the samples were incubated with Alexa Fluor® 568 or 647 (F(ab′)2 fragment of IgG(H+L)) during 30 min at room temperature. The cell nuclei were counterstained in 20 ng/mL DAPI for 10 min at room temperature.

[1485] Quantification of Positive Contact Numbers and Areas:

[1486] For this type of quantification the freeware image analysis ImageJ® software was used. The raw image was first converted to an 8-bit file, and then the unsharp mask feature was used (settings 1:0.2) to remove the image background (rolling ball radius 10). After smoothing, the resulting image, which appears similar to the original photomicrograph but with minimal background, was then converted to a binary image by setting a threshold. Threshold values were determined empirically by selecting a setting, which gave the most accurate binary image for a subset of randomly selected photomicrographs. The cell area was determined by manual delineation on raw fluorescent images. Total contact area and mean contact area per cell were calculated by “analyse particules” in ImageJ®. A minimum of 50 cells per condition were analyzed.

[1487] Quantitative Real Time Polymerase Chain Reaction (RT-PCR):

[1488] After 24 hours of culture, total RNA was extracted by using the RNeasy total RNA kit (Qiagen®) according to the manufacturer's instructions. Purified total RNA was used as a template in order to make cDNA by a reverse transcription reaction (Gibco BrI®) with random primers (Invitrogen®). The cDNA was then used as a template for a real-time PCR amplification in the presence of SYBR green reagents (Bio-Rad®) by using a thermocycler (iCycler, Biorad®). Data were analyzed with the iCycler IQ™® software and compared by the ΔΔCt method. Briefly, the mean Ct value of the target gene was normalized to its averaged Ct values of the housekeeping gene (GAPDH) to give a ΔCt value, which was then normalized to a control sample to obtain a ΔΔCt value. The results were obtained from two series of experiments performed in triplicate.

[1489] Western Blot:

[1490] After 24 hours of culture, cells were permeabilized (10% SDS, 25 mM NaCl, 10 nM pepstatin and 10 nM leupeptin in distilled water and loading buffer), boiled for 10 minutes and resolved by reducing PAGE (Invitrogen). Proteins were transferred onto nitrocellulose, blocked, and labeled with HRP-conjugated antibodies (Invitrogen). Integrin αv, α5, α3, α4, β1, β, β5 and β9 were blotted by treating the nitrocellulose with monoclonal anti-integrin (extracellular domain) αv, α5, α3, α4, β1, β3, β5 and β6 antibodies (Santa Cruz Biotechnology). Phosphor-Smad1/5/8 was blotted by treating the nitrocellulose with monoclonal anti-p-Smad1/5/8 (Santa Cruz Biotechnology). For all of the experiments the western blot was performed in triplicate, along with an additional blot for actin and coomassie blue staining to ensure constant protein load among samples.

[1491] Determination of Peptide Densities by High Resolution μ-Imager:

[1492] In contrast to scintillation counting, beta-imager performances in the field of sensitivity, linearity and spatial resolution give a real interest to this system as a new imaging device for solid surface. The detection principle is no longer based on the counting of electron avalanches produced in the gas, but it is based on the analysis of light emitted during the interaction. Beta radioactivity is directly detected by means of a parallel plate avalanche chamber, which is particularly well suited for qualitative and quantitative autoradiography.

[1493] Quantitatively, peptide concentration was evaluated by grafting ¹³¹I peptide alone and by grafting ¹³¹I-peptide in the presence of RGD peptides. For example, polymer samples were placed in a solution of ¹³¹I-peptide diluted in peptide solution (1×10⁻³ M). Radioactivity of this latter solution was adjusted to 6 μCi/mL. The amount C of radiolabeled ¹³¹I-peptide grafted onto the surface (in nmol/mm²) was calculated according to the following formula:

C=A×C₀/A₀

where A is activity of the as-treated samples (in counts per minute/mm²); C₀ the peptide concentration in the incubation solution (in g/L); A₀ the activity of 1 mL of mother solution (in cpm/L). This latter activity was calibrated by using the b-Vision™ Biospace software to determine the relationship between the μCi and cpm/L units. Such a fitting was performed by measuring the activities of given dilute solutions. By measuring the radioactivity of 10 solutions with β-Imager, A0 was determined to be equal to 1.0 10¹⁰ cpm/L.

[1494] To evaluate the stability of the grafted peptides in water, the ¹³¹I-peptides activity (in cpm/mm²) was calibrated for each analysis. Calibration of the entire probed area was first performed by setting the signal corresponding to the beta activity of 14C standard slides to a constant level. The ¹³¹I-peptides radioactive decay was finally taken into account since its half-life (90 days) is not negligible vs. the experiments duration. Moreover, the high resolution μ-imager provides information about the radiolabeled amino acids distributed onto the surface and proves the homogeneity of the grafting.

[1495] Statistical Analysis:

[1496] In terms of real-time PCR assay, all of the data were expressed as mean±standard error, and analyzed statistically by the paired Student's t test method.
[1497] General procedures used for the covalent association between GFR-binding compound(s) and bioactive carrier are as follows:

[1498] Method 1: Surface Preparation and Covalent Association with Hydrogels (Such as PLLA)

[1499] The preparation of poly(acrylamide-co-acrylic acid) gel substrates was shown as an example in order to illustrate the effect of the GFR-binding compound(s) as defined herein. The synthesis of hydrogels is based on acrylamide and acrylic acid by polymerization in the presence of N,N′-methylene-bis-acrylamide as a cross-linker in an aqueous medium. Practically, 0.3 g of acrylamide (AM, Merck) has been dissolved in 5 mL of PBS 1× (Invitrogen). 30 μL of acrylic acid (AA, Merck), then x g (function as the stiffness) of N,N-methylene-bis-acrylamide was added under stirring. Then, a NaOH solution (1M, Aldrich) was added dropwise to reach a pH 8. The formation of hydrogel proceeded via free radical polymerization. The starting solution was degassed during 10 min by bubbling nitrogen in order to remove the oxygen which acts as an inhibitor for the free radical polymerization process. Nitrogen atmosphere was maintained above the solution and 50 μL (corresponding to 1/100 of the total volume) of Ammonium persulfate 10% (Biorad), (free radical initiator) and then 5 μL (corresponding to 1/1000 of total volume) of N,N,N′,N′-tetramethylethylenediamine (catalyst, Aldrich) were added. The polymerizing solution was vortexed gently. Promptly, 0.5 mL of this gel solution was placed before polymerization on a glass slide and another slide was placed on the top of this structure. Reactivity ratios calculated by the Finemann-Ross and Kelen-Tudos methods showed that the copolymers were random with a reactivity ratio of rAM=3.76 and rAA=0.28. The materials obtained here have various stiffnesses ranging from 0.1 to 600 kPa.

[1500] Chemical functionalization with GFR-binding compound(s) as defined herein of poly(acrylamide-co-acrylic acid) gel substrates was performed via the —COOH (carboxyl) functions of their surface. Hydrogels were immersed in a solution of dimethylaminopropyl-3-ethylcarbodiimide hydrochloride (EDC, 0.2 M)+N-hydroxysuccinimide (NHS, 0.1 M) in 2-(N-morpholino)-ethane sulfonic acid (MES buffer, 0.1 M in MilliQ water) overnight at room temperature without stirring and then rinsed in MilliQ water (50 mL during 30 min). The immobilization of the GFR-binding compound(s) as defined herein was achieved in a solution of peptides/PBS 1× (C=10⁻³ M) for 18 hours at room temperature by using an orbital shaker. After grafting, the modified hydrogels were rinsed with PBS 1× for one week.

[1501] Method 2: Covalent Association with Solid Materials (Such as Ceramics or Titanium)

[1502] The material modifications were performed in a controlled Atmosphere (Ar Atmosphere, Glove Box). The strategy for covalent modification of GFR-binding compound(s) as defined herein involved (1) grafting of (3-aminopropyl)-triethoxysilane (concentration of 1×10⁻²M, 4 hours) onto the surface of the biopolymer, (2) substitution of the terminal amine by a hetero-bifunctional cross-linker, a 3-succinimidyl-3-maleimidopropionate (concentration of 1×10⁻³M, 4 hours) in order to (3) reacting of the “outer” maleimide group with the GFR-binding compound(s) as defined herein (concentration of 1×10⁻³M, 18 hours) via a thiol group present in the terminal cysteine. After grafting, the modified materials were rinsed with PBS 1× buffer for 5 days.

### Example 3: Covalent Association with Polymers (Such as PET or PEEK)

[1503] The polymer used in this study is poly(ethylene terephthalate) (PET). The polymers were first treated in order to create —COOH (carboxyl) functions on the PET surfaces from —OH (hydroxyl) functions. Next, the PET-COOH samples were immersed in a solution of dimethylaminopropyl-3-ethylcarbodiimide hydrochloride (EDC, 0.2 M)+N-hydroxysuccinimide (NHS, 0.1 M) in 2-(N-morpholino)-ethanesulfonic acid (MES) buffer (0.1 M in MilliQ water) and the samples were rinsed in MilliQ water (50 mL for 30 min). The same protocol was used for all the polymers containing —OH (hydroxyl) functions on their extreme surface. Finally, the covalent immobilization of the peptides was achieved by using a solution of peptides/1×PBS (C=10⁻³ M) incubated for 18 hours at room temperature. After grafting, the materials were rinsed in MilliQ water (100 ml) for 1 week.

### Example 1: Covalent Association Between GFR-Binding Compounds of the Present Disclosure and Titanium

[1504] The bioactive carrier modifications were performed in a controlled atmosphere (Ar Atmosphere, Glove Box). The strategy for covalent association or immobilization of GFR-binding compounds involved (1) the association or grafting of (3-aminopropyl)-triethoxysilane (concentration of 1×10⁻² M, 4 hours) onto the surface of the bioactive carrier, (2) substitution of the terminal amine by a hetero-bifunctional cross-linker: a 3-succinimidyl-3-maleimidopropionate (concentration of 1×10⁻³M, 4 hours) in order to (3) react the “outer” maleimide group with a GFR-binding compound (concentration of 1×10⁻³ M, 24 hours) via a thiol group present in the terminal cysteine. After covalent association, the covalent pharmaceutical associations were rinsed with Phosphate Buffered Saline (PBS 1×) buffer for 5 days. PBS is a buffer solution commonly used in the biological research. It is a water-based salt solution containing sodium phosphate, sodium chloride and, in some formulations, potassium chloride and potassium phosphate. The osmolarity and ion concentrations of the solutions match those of the human body (isotonic) and are thus physiological and non-toxic to the cells.

[1505] The bioactive carrier surface was characterized by covalently associating fluorescent GFR-binding compounds (herein SEQ ID NO: 1 coupled to fluorescein isothiocyanate (FITC), FIG. 1) and X-ray photoelectron spectroscopy (Table 1). The X-ray photoelectron spectroscopy was performed as described above.

[1506] The results presented in Table 1 were obtained with a titanium alloy material (Ti6Al4V metal alloy pellets) as bioactive carrier covalently associated with GFR-binding compounds of SEQ ID NO: 2 to 6.

TABLE 1

| Name | At. % C1s | At. % N1s |
|---|---|---|
| Titanium | 29.07 | no |
| | | detection |
| Titanium grafted covalently with SEQ ID NO: 2 | 43.65 | 5.87 |
| Titanium grafted covalently with SEQ ID NO: 3 | 42.02 | 5.47 |
| Titanium grafted covalently with SEQ ID NO: 4 | 39.95 | 5.11 |
| Titanium grafted covalently with SEQ ID NO: 5 | 40.58 | 5.2 |
| Titanium grafted covalently with SEQ ID NO: 6 | 44.01 | 4.89 |

100300

### Example 2: Covalent Association Between GFR-Binding Compound(s) of the Present Disclosure and PEEK

[1507] A polyetheretherketone (PEEK) was treated with ethylene diamine (NH₂═NH₂) to create —NH₂ (amine) functions on the PEEK surfaces from ketone (═O) functions. Next, the PEEK-NH₂ samples were immersed in a solution of a hetero-bifunctional cross-linker: a 3-succinimidyl-3-maleimidopropionate (concentration of 1×10⁻³M, 4 hours) in order to react with the “outer” maleimide group with the GFR-binding compound(s) of SEQ ID NO: 7 (concentration of 1×10⁻³M, 24 hours) via a thiol group present in the terminal cysteine thereof. After covalent association, the pharmaceutical association was rinsed with PBS 1× for 5 days.

[1508] The bioactive carrier surface was characterized by covalently associating fluorescent GFR-binding compounds of SEQ ID NO: 7 and by other methods such as X-ray photoelectron spectroscopy (Table 2). The X-ray photoelectron spectroscopy was performed as described above.

[1509] The results presented in Table 2 were obtained by with a PEEK material as a bioactive carrier covalently associated with a GFR-binding compound of SEQ ID NO: 7.

TABLE 2

| Name | At. % C1s | At. % N1s |
|---|---|---|
| PEEK | 86.56 | no detection |
| PEEK grafted covalently with SEQ ID NO: 7 | 71.61 | 4.98 |

### Example 3: Covalent Association Between GFR-Binding Compound(s) of the Present Disclosure and PLLA

[1510] PLLA (Polylactic acid) was immersed in a solution of dimethylaminopropyl)-3-ethylcarbodiimide hydrochloride (EDC, 0.2 M)+N-hydroxysuccinimide (NHS, 0.1 M) in (2-(N-morpholino)-ethanesulfonic acid (MES buffer, 0.1 M in MilliQ water) and then rinsed in MilliQ water (during 30 min). The covalent association was performed in a solution of GFR-binding compounds of SEQ ID NO: 8 (concentration of 1×10⁻³ M, 18 hours, room temperature). After the covalent association, the pharmaceutical association was rinsed with PBS 1× for 5 days.

[1511] The bioactive carrier surface was characterized by covalently associating fluorescent GFR-binding compounds of SEQ ID NO: 8 and by using other methods such as X-ray photoelectron spectroscopy (Table 3). The X-ray photoelectron spectroscopy was performed as described above.

[1512] The results presented in Table 3 were obtained by using PLLA as bioactive carrier covalently associated with a GFR-binding compound of SEQ ID NO: 8.

TABLE 3

| Name | At. % C1s | At. % N1s |
|---|---|---|
| PLLA | 69.02 | no detection |
| PLLA grafted covalently with SEQ ID NO: 8 | 72.31 | 5.07 |

### Example 4: Non-Covalent Association Between GFR-Binding Compound(s) of the Present Disclosure and Bioactive Carrier(s)

[1513] Non-covalent associations of the bioactive carriers were performed under atmospheric conditions (air) at room temperature (about 22° C.). The non-covalent association was carried out using a mixture of GFR-binding compound of SEQ ID NO: 9 (concentration of 1×10⁻³ M) with the apatite ceramics or a mixture of GFR-binding compound of SEQ ID NO: 10 (concentration of 1×10⁻³M) with the type-I collagen sponge. The non-covalent pharmaceutical associations were characterized by covalently associating fluorescent GFR-binding compounds of SEQ ID NO: 9 and 10 (covalently bound to fluorescein isothiocyanate (FITC), FIG. 1). The results shown in FIG. 1 were obtained from experiments performed with apatite ceramics and a type-I collagen sponge and demonstrates that the interaction between the GFR-binding compounds and the apatite ceramics or the type-I collagen is stable as no significant release of GFR-binding compounds was observed after 3, 7 or 10 days (FIGS. 2a and b).

### Example 5: Osteosarcoma Recoding

[1514] Selected GFR-binding compounds (SEQ: ID NO: 11 to 20) were covalently associated with PET using a method described above and contacted with human osteosarcoma cells (obtained from ATCC®). The mixtures tumor cells/pharmaceutical association were then cultured in Dulbecco's Modified Eagle Medium (DMEM, Invitrogen®) supplemented with 10% (v/v) fetal bovine serum (FBS), 1% penicillin/streptomycin and incubated in a humidified atmosphere containing 5% (v/v) CO₂ at 37° C. All of the cell culture experiments were performed without any serum in the medium for the first 8 hours of culture. All cells were used at a low passage number passage 10), were subconfluently cultured and were seeded at 10 000 cells/cm² for the purpose of the experiments.

[1515] The cell phenotype was analyzed after 24 hours of cell culture. The vast majority (>98%) of the human osteosarcoma cells adhere, spread, and differentiate into osteocyte cells as confirmed by analysis of DMP-1 (Dentin matrix acidic phosphoprotein 1), Sclerostin and RANK-L (receptor activator of nuclear factor kappa B ligand) expression (FIG. 3). These results demonstrate that GFR-binding compounds associated with bioactive carrier both as defined herein induce the recoding of human osteosarcoma cells into osteocytes in a short period of time (24 hours).

### Example 6: Rhabdosarcoma Recoding

[1516] Selected GFR-binding compounds (SEQ: ID NO: 21 to 30) were covalently associated with PET using a method described above and contacted with human rhabdosarcoma cells (obtained from ATCC®). The mixtures tumor cells/pharmaceutical association were then cultured in Dulbecco's Modified Eagle Medium (DMEM, Invitrogen®) supplemented with 10% (v/v) fetal bovine serum (FBS), 1% penicillin/streptomycin and incubated in a humidified atmosphere containing 5% (v/v) CO₂ at 37° C. All cell culture experiments were performed without any serum in the medium for the first 8 hours of culture. All cells were used at a low passage number passage 10), were subconfluently cultured and were seeded at 10 000 cells/cm² for the purpose of the experiments.

[1517] It was observed that these tumor cells were converted into muscle cells (myocyte like-cells) in the presence of pharmaceutical associations of the invention by analyzing the expression of the myogenic biomarkers MLC-1 (myocyte light chain 1), GATA-4 and □-Sarcomeric actin. An increased expression of these genes was observed after 24 hours of culture (FIG. 4). For that, a Quantitative Real Time PCR was performed as described in the Methods section.

### Example 7: Mesenchymal Chondrosarcoma Recoding

[1518] Selected GFR-binding compounds (SEQ: ID NO: 31 to 40) were covalently associated with PET using a method described above and contacted with human rhabdosarcoma cells (obtained from ATCC®). The mixtures tumor cells/pharmaceutical association were then cultured in Dulbecco's Modified Eagle Medium (DMEM, Invitrogen®) supplemented with 10% (v/v) fetal bovine serum (FBS), 1% penicillin/streptomycin and incubated in a humidified atmosphere containing 5% (v/v) CO₂ at 37° C. All cell culture experiments were performed without any serum in the medium for the first 8 hours of culture. All cells were used at a low passage number passage 10), were subconfluently cultured and were seeded at 10 000 cells/cm² for the purpose of the experiments.

[1519] It was observed that these tumor cells were converted into cartilage cells (chondrocyte like-cells) in the presence of pharmaceutical associations of the invention by analyzing the expression of the chondrocytic biomarkers Sox9, IBSP (Sialoprotein II) and collagen IV. An increased expression of these genes was observed after 24 hours of culture (FIG. 5). For that a Quantitative Real Time PCR was performed as described in the Methods section.

### Example 8: Adenocarcinoma Recoding

[1520] Selected GFR-binding compounds (SEQ: ID NO: 41 to 50) were covalently associated with PET using a method described above and contacted with human adenocarcinoma cells (obtained from ATCC®). The mixtures tumor cells/pharmaceutical association were then cultured in RPMI-1640 medium supplemented with 10% (v/v) fetal bovine serum (FBS), 1% penicillin/streptomycin and incubated in a humidified atmosphere containing 5% (v/v) CO₂ at 37° C. All cell culture experiments were performed without any serum in the medium for the first 8 hours of culture. All cells were used at a low passage number passage 10), were subconfluently cultured and were seeded at 10 000 cells/cm² for the purpose of the experiments. It was observed that these tumor cells were converted into epithelial cells (fibrocyte like-cells) in the presence of pharmaceutical associations of the invention by analyzing the expression of the fibrocytic biomarkers MMP-9, Vimentin and α-SMA. An increased expression of these genes was observed after 24 hours of culture (FIG. 6). For that a Quantitative Real Time PCR was performed as described in the Methods section.

### Example 9: Recoding of Neoplastic Cells Demonstrated by Significant Reduction of Proliferation Markers

[1521] Neoplastic cells (in this example osteosarcoma cells) were cultured on pharmaceutical associations comprising PET as a bioactive carrier and one of GFR-binding compounds of SEQ ID NO: 11 to 14, 24 to 26 and 51 to 63. A rapid (24 hours) decrease of the tumor markers was observed (FIG. 7). The adhesion checkpoint then activates the tumor suppressor proteins p53 and pRB. It was observed that, in tumor cells cultured on pharmaceutical associations of the invention, the expression of p53 decreases as demonstrated by quantification of protein expression level (immunofluorescence staining and quantification using ImageJ as described in the general methods section) (FIG. 7A) and the pRB is dephosphorylated as demonstrated by a quantification of protein phosphorylation level (immunofluorescence staining and subsequent quantification by using the ImageJ software as described in the general methods section) (FIG. 7B).

### Example 10: Adhesion Checkpoint Activation

[1522] Neoplastic cells (in this example osteosarcoma cells) were cultured on pharmaceutical associations comprising PET as a bioactive carrier and one of GFR-binding compounds of SEQ ID NO: 12, 19, 30 or 39. The main signaling pathways include: Ras/MAP kinase, FAK/Src kinase and PIP2 which are decreased after 24 hours as shown by western blot quantifications (FIG. 8). This demonstrated by the absence of phosphorylation at Thr202 and Tyr204 on ERK (FIG. 8A). Moreover, no phosphorylation at Thr416 but phosphorylation of Tyr527 was observed on Src kinase (FIG. 8B). Finally, a decrease of 3-phosphoinositide-dependent protein kinase 1 (PDK1) protein expression was also was observed (FIG. 8C).

### Example 11: Decrease of Paxillin and Vinculin Gene Expression

[1523] Neoplastic cells (in this example osteosarcoma cells) were cultured on pharmaceutical associations comprising PET as a bioactive carrier and one of GFR-binding compounds of SEQ ID NO: 12, 19, 30 or 39. After 24 hours, the Paxillin and Vinculin gene expression decreased as shown by RT-PCR (FIG. 9).

### Example 12: Cyclin D Profile

[1524] Neoplastic cells (in this example osteosarcoma cells) were cultured on pharmaceutical associations comprising PET as a bioactive carrier and one of GFR-binding compounds of SEQ ID NO: 12, 19, 30 or 39. The Cyclin D (the arithmetic mean of Cyclin D1, Cyclin D2 and Cyclin D3) gene expression decreased after the first 30 min of cell culture as shown by RT-PCR (FIG. 10). These data indicate the entry of the cells into G0 quiescence phase.

### Example 13: GFR-Binding Compound Density Calculation

[1525] The density of the GFR-binding compound(s) on bioactive carriers is measured using radio-labeled molecules according to the procedure described above in the Methods section and was found to lie between 0.3 and 2.8 pmol/mm² depending on the size of the GFR-binding compound (SEQ ID No: 13, 20 or 56) (FIG. 11).

### Example 14: Growth Factor Receptor Activation

[1526] The data summarized in Table 4 below demonstrate that the tumor cell recoding action ((in this example: human osteosarcoma cells, MG63, via quantification of pRB) of pharmaceutical associations according to certain embodiments of the present disclosure involves the activation of growth factor receptors as demonstrated by the activation of the Smad1/5/8 signaling pathway (via quantification of western blots of phospho-smad1/5/8):

TABLE 4

| | | p-Smad1/5/8 | pRB |
|---|---|---|---|
| SEQ ID No | Sequences | (%) | (%) |
| SEQ ID NO: 64 | NDEGLECVPTEERPVQVRKIRIKPHQGQKKATVFLQHNK | 36 | 14 |
| SEQ ID NO: 65 | ASASPSSVPQDLEPLTILYYVGRTPKVEQLSNMV | 38 | 18 |
| SEQ ID NO: 66 | RNVQCRPTQLEPLPIVYYEIVRKKPEQLSNTLEDHLA | 38 | 21 |
| SEQ ID NO: 67 | VPTKLSPISILYIDDMGVPTYKQYEEGMSVAE | 40 | 9 |
| SEQ ID NO: 68 | VPQALSPISILYIDDMGVPTYKQYEEGMSVAE | 39 | 7 |
| SEQ ID NO: 69 | VPTEESNITTQIMRIKPHQGQHIGEMSFLQH | 32 | 23 |
| SEQ ID NO: 70 | VPTELSPISILFIRIKPHQGHLGEMSAAVVE | 30 | 24 |
| SEQ ID NO: 71 | TQVQLEPLTLLYYDENEKVIEQLSNDMVVE | 47 | 19 |
| SEQ ID NO: 72 | VPQALNAISTLYFDDSSNVILKKYRNMAVS | 48 | 11 |
| SEQ ID NO: 73 | VPEKMSSLSILFFDENKNVVLKVYPNMAVS | 44 | 17 |
| SEQ ID NO: 74 | VPARLSPISILYIDAANNVVYKQYEDM | 51 | 10 |
| SEQ ID NO: 75 | VPQALSPINMLYFNEKNQIIYGKIPFLQHNK | 54 | 8 |
| SEQ ID NO: 76 | TPTKMSPINMLYFNEKNNIIYGKIPGMVVD | 55 | 15 |
| SEQ ID NO: 77 | APTQLSAISTLYLEIVRKKPLKNYQFLQHNK | 52 | 14 |
| SEQ ID NO: 78 | APTQLSAISTLYLEIVRKKPLKNYQEMEDH | 58 | 20 |
| SEQ ID NO: 79 | NDEGLECVPTEERPVQVRKIRIKPHQGQKKATVFLQHNK | 27 | 21 |
| SEQ ID NO: 80 | ASASPSSVPQDLEPLTILYYVGRTPKVEQLSNMVEDH | 34 | 17 |
| SEQ ID NO: 81 | RNVQCRPTQLEPLPIVYYEIVRKKPEQLSNTLEDHLA | 41 | 19 |
| SEQ ID NO: 82 | VPTKLSPISILYIDKMGVPTYKQYEEGMSVAE | 35 | 16 |
| SEQ ID NO: 83 | VPARLSPISILYIDEMGVPTYKQYEEGMSVAE | 33 | 9 |
| SEQ ID NO: 84 | VPTEESNITTQIMRIKPHQGQHIGEMSFLQH | 22 | 10 |
| SEQ ID NO: 85 | VPQALSPISILFIRLKPHQGHLGEMSNMVVR | 26 | 24 |
| SEQ ID NO: 86 | APTKLEPLPMVYYEERRNVIEQLSNNMVVR | 34 | 11 |
| SEQ ID NO: 87 | VPTKLSAISTLYLDLAREEPLKNYQEMVVE | 38 | 16 |
| SEQ ID NO: 88 | APTKLEPLTIVYYDDSSNVIEQLSNNMVVR | 32 | 21 |
| SEQ ID NO: 89 | VPQALSPISILFIVGRKPKVYKQYEMIVERS | 41 | 18 |
| SEQ ID NO: 90 | VPTELSPISILFIVGGKPKVYKQYENMVVE | 36 | 17 |
| SEQ ID NO: 91 | SRVHHNAISTLYFDESSNVILKKYRGMSVVE | 56 | 9 |
| SEQ ID NO: 92 | VPEKMSSLSILFFDENKNAALKVYPNMTVE | 52 | 8 |
| SEQ ID NO: 93 | VPARLSPISILYIDAANNVVYKQYEDMVKS | 44 | 8 |
| SEQ ID NO: 94 | TPTKMSPINMLYFNEKNNIIYGKIPGM | 41 | 20 |
| SEQ ID NO: 95 | RNVQCRPTQLEPLPIVYYEIVRKKPEQLSNTLE | 29 | 8 |
| SEQ ID NO: 96 | VPTHHSAISTLYLELAGEKPLKNYQFLQHNK | 47 | 7 |
| SEQ ID NO: 97 | VPTHHSAISMLYLELGGDKPLENYQFLQ | 46 | 9 |
| SEQ ID NO: 98 | VSQDLSAISTLYLKIVRKEPLKNYQEMVEE | 39 | 9 |

### Example 15: RMSD Measurement and Recoding Activity

[1527] RMSD values are always calculated for a GFR-binding peptide sequence exempt from any possible bioactive-carrier-affinity-containing group as defined herein. The bioactive-carrier-affinity-containing group is only added to the GFR-binding peptide when it is biologically tested. The data summarized in Table 5 below demonstrate that pharmaceutical associations according to certain embodiments of the present disclosure containing GFR-binding compounds as disclosed herein having a RMSD value of 2.45 Å or less, induce the particularly efficient recoding (as shown via quantification of pRB) of neoplastic cells (in this example: human osteosarcoma cells, MG63) into healthy cells:

TABLE 5

| SEQ ID No | Sequences | RMSD | pRB (%) |
|---|---|---|---|
| SEQ ID NO: 64 | NDEGLECVPTEERPVQVRKIRIKPHQGQKKATVFLQHNK | 1.23 | 14 |
| SEQ ID NO: 65 | ASASPSSVPQDLEPLTILYYVGRTPKVEQLSNMV | 1.51 | 18 |
| SEQ ID NO: 66 | RNVQCRPTQLEPLPIVYYEIVRKKPEQLSNTLEDHLA | 1.7 | 21 |
| SEQ ID NO: 67 | VPTKLSPISILYIDDMGVPTYKQYEEGMSVAE | 1.62 | 9 |
| SEQ ID NO: 68 | VPQALSPISILYIDDMGVPTYKQYEEGMSVAE | 1.53 | 7 |
| SEQ ID NO: 69 | VPTEESNITTQIMRIKPHQGQHIGEMSFLQH | 1.1 | 23 |
| SEQ ID NO: 70 | VPTELSPISILFIRIKPHQGHLGEMSAAVVE | 0.82 | 24 |
| SEQ ID NO: 71 | TQVQLEPLTLLYYDENEKVIEQLSNDMVVE | 0.79 | 19 |
| SEQ ID NO: 72 | VPQALNAISTLYFDDSSNVILKKYRNMAVS | 0.92 | 11 |
| SEQ ID NO: 73 | VPEKMSSLSILFFDENKNVVLKVYPNMAVS | 0.92 | 17 |
| SEQ ID NO: 74 | VPARLSPISILYIDAANNVVYKQYEDM | 0.81 | 10 |
| SEQ ID NO: 75 | VPQALSPINMLYFNEKNQIIYGKIPFLQHNK | 0.86 | 8 |
| SEQ ID NO: 76 | TPTKMSPINMLYFNEKNNIIYGKIPGMVVD | 0.92 | 15 |
| SEQ ID NO: 77 | APTQLSAISTLYLEIVRKKPLKNYQFLQHNK | 0.79 | 14 |
| SEQ ID NO: 78 | APTQLSAISTLYLEIVRKKPLKNYQEMEDH | 0.92 | 20 |
| SEQ ID NO: 79 | NDEGLECVPTEERPVQVRKIRIKPHQGQKKATVFLQHNK | 1.1 | 21 |
| SEQ ID NO: 80 | ASASPSSVPQDLEPLTILYYVGRTPKVEQLSNMVEDH | 1.62 | 17 |
| SEQ ID NO: 81 | RNVQCRPTQLEPLPIVYYEIVRKKPEQLSNTLEDHLA | 1.1 | 19 |
| SEQ ID NO: 82 | VPTKLSPISILYIDKMGVPTYKQYEEGMSVAE | 1.1 | 16 |
| SEQ ID NO: 83 | VPARLSPISILYIDEMGVPTYKQYEEGMSVAE | 1.2 | 9 |
| SEQ ID NO: 84 | VPTEESNITTQIMRIKPHQGQHIGEMSFLQH | 1.31 | 10 |
| SEQ ID NO: 85 | VPQALSPISILFIRLKPHQGHLGEMSNMVVR | 1.23 | 24 |
| SEQ ID NO: 86 | APTKLEPLPMVYYEERRNVIEQLSNNMVVR | 2.04 | 11 |
| SEQ ID NO: 87 | VPTKLSAISTLYLDLAREEPLKNYQEMVVE | 2.26 | 16 |
| SEQ ID NO: 88 | APTKLEPLTIVYYDDSSNVIEQLSNNMVVR | 0.91 | 21 |
| SEQ ID NO: 89 | VPQALSPISILFIVGRKPKVYKQYEMIVERS | 0.72 | 18 |
| SEQ ID NO: 90 | VPTELSPISILFIVGGKPKVYKQYENMVVE | 0.77 | 17 |
| SEQ ID NO: 91 | SRVHHNAISTLYFDESSNVILKKYRGMSVVE | 0.88 | 9 |
| SEQ ID NO: 92 | VPEKMSSLSILFFDENKNAALKVYPNMTVE | 0.77 | 8 |
| SEQ ID NO: 93 | VPARLSPISILYIDAANNVVYKQYEDMVKS | 0.76 | 8 |
| SEQ ID NO: 94 | TPTKMSPINMLYFNEKNNIIYGKIPGM | 1.97 | 20 |
| SEQ ID NO: 95 | RNVQCRPTQLEPLPIVYYEIVRKKPEQLSNTLE | 2.08 | 8 |
| SEQ ID NO: 96 | VPTHHSAISTLYLELAGEKPLKNYQFLQHNK | 0.91 | 7 |
| SEQ ID NO: 97 | VPTHHSAISMLYLELGGDKPLENYQFLQ | 1.82 | 9 |
| SEQ ID NO: 98 | VSQDLSAISTLYLKIVRKEPLKNYQEMVEE | 0.79 | 9 |

### Example 16: The Presence of Adhesion Components in the Extracellular Microenvironment Inhibits the Cell Conversion

[1528] In order to demonstrate the importance of adhesion proteins inhibition in the recoding process of a neoplastic cell, a PET substrate was covalently functionalized with RGD peptides (the primary integrin recognition site present in many ECM proteins (e.g., fibronectin)) and an exemplary GFR-binding compound according to the present disclosure using methods already described herein.

[1529] This modified substrate was then cultured with human osteosarcoma cells from ATCC® in Dulbecco's Modified Eagle Medium (DMEM, Invitrogen®) supplemented with 10% (v/v) fetal bovine serum (FBS), 1% penicillin/streptomycin and incubated in a humidified atmosphere containing 5% (v/v) CO₂ at 37° C. All cell culture experiments were performed without any serum in the medium for the first 8 hours of culture. All cells were used at a low passage number passage 10), were subconfluently cultured and were seeded at 10 000 cells/cm² for the purpose of the experiments. As shown in FIGS. 12A and 12B, the presence of covalently immobilized components favorising the adhesion inhibited the process of recoding of the osteosarcoma cells into osteocytes as characterized by RT-PCR and cell morphology observation.

[1530] It was also confirmed that the presence of RGD peptides did not modify the density of covently grafted GFR-binding compounds. Indeed, it was observed that the GFR-binding compound density was stable (around 1.36 pmol/mm²) with or without RGD peptides (FIG. 12C).

[1531] It was also shown that the RGD peptides interacted specifically with integrin α3β1. Indeed, inhibition of α3β1, α5β3 and αvβ3 integrins (i.e., the three predominant receptor dimers involved in binding ECM molecules containing RGD motifs for the osteosarcoma cells) by specific antibodies, indicated that cells predominantly engaged α3β1 integrins to interact with the RGD-modified substrate on the basis of the observed decrease of osteosarcoma cells adhesion in response to anti-□α3β1 treatment (FIG. 12D). This was not observed when αvβ3 and α5β3 were blocked (FIG. 12E). For these antibody inhibition studies, cells were preincubated with 5 g/mL anti-α3β1 (clone JBS5), anti-αvβ1 (clone LM609) and anti-α5β3.

### Example 17: Integrin Engagement Inhibits Cell Conversion

[1532] Using the same setup as in Example 16 (tumor cell and PET functionalized with RGD peptides and an exemplary GFR-binding compound), silencing of integrin α3 and integrin β1 expression using shRNA was shown to reduce integrin α3 and integrin β1 mRNA levels by 60-70% and 50-60% respectively and integrin □3 and integrin β1 proteins levels by 60-70% after 24h. It was then shown that both integrins α3 and β1 shRNAs modulated osteosarcoma adhesion and spreading on RGD-modified substrates (FIG. 13 A, B). Without being bound to any specific theory, integrin α3β1 thus appears to be an important factor in the conservation of osteosarcomas tumourous profile and appears to play an important role in the recoding of osteosarcomas into osteocytes. Herein, α3β1 integrin engagement appears to be involved in the inhibition of osteocytic recoding but not in osteosarcoma induction. Indeed, it was observed, within the framework of this experiment, that spheroid-like structures of osteosarcomas became progressively predominant (FIG. 13C). These results seems to demonstrate that integrin engagement has the ability to influence the behavior of human osteosarcoma towards spheroid-like structures or towards osteocytes.

### Example 18: In Vivo Rat Study

### A. Osteosarcoma Model

[1533] The OSRGa rat osteosarcoma orthotopic xenograft model in immunodeficient mice is the model of choice for the present study. This model is indeed characterized by the development of osteosarcoma tumors presenting very high similarities with the human osteosarcoma tumors both with regards to the tumor temporal development as well as its biological characteristics. Just like the human osteosarcoma, the OSRGa model is characterized by tumor proliferation associated with pulmonary metastasis and excessive bone remodeling. Indeed, OSRGa tumor cells, which multiply in contact with bone, produce bone matrix and induce an increase in mature and immature bone (woven bone) formation as well as a malignant osteolysis. In addition, similar to human osteosarcoma, the OSRGa tumors are comprised of tumor osteoblasts presenting marked cytonuclear abnormalities and high number of mitoses. This model is also highly reproducible and induces local orthotopic tumor formation with a very high incidence.

[1534] The OSRGa cell line isolated from osteosarcoma rat tumor is well characterized for both its in vitro phenotype and tumor development ability in vivo. When injected in contact with the mouse tibia periosteum, these cells induce de local development of osteosarcoma tumor associated with pulmonary metastasis providing a highly reproducible model most for preclinical animal studies.

### B. Experimental Protocol

[1535] B.1. Orthotopic Xenograft Procedure

[1536] After 5 days of adaptation period, 3 to 4 weeks old female immunodeficient mice (Rj:NMRI-nude strain) were subjected to rat osteosarcoma OSRGa cells orthotopic xenograft. For establishing the osteosarcoma model, 2.10⁶ OSRGa cells as a 10 μL suspension were injected intramuscularly in contact with the right tibia of the nude mice, after scratching the periosteum. An analgesic administration was performed throughout the injection.

[1537] Osteosarcoma tumor development was observed in 100% of the OSRGa orthotopic xenografts of the present study. The tumor growth was assessed twice per week until a mean tumor volume of around 500 mm³ was reached 23 days after OSRGa cell injection. The mice were then randomly assigned to 8 different groups before compound administration.

[1538] B.2. Compound Administration

[1539] 24 days after OSRGa cell injection, a 10⁻³M 1:1 mixture of GFR-binding peptides (SEQ ID NO: 198 and 197) mixed non-covalently with a ceramic gel was injected inside the tumor. The injected volume of 90 μl was chosen according to the mean tumor volume for an efficient distribution. The control conditions include a “No administration” condition for which no compound injections were performed in the tumor as well as a non grafted ceramic gel implant (Control 1). Hereinafter the various experimental conditions, the results for which are detailed below:

| | | Type of | Reference or |
|---|---|---|---|
| Experimental conditions | Code | product | test product |
| No administration | No | None | Reference |
| | administration | | |
| Ceramic gel | Control 1 | Gel | Reference |
| Ceramic gel mixed with SEQ ID | Product | Gel | Test |
| NO: SEQ ID NO: 198 and 197 | | | |

[1540] Two experimental endpoints were tested in the present study for the 3 experimental conditions: 3 days (1 injection) and 25 days (4 injections) after the first compound administration injection. The experimenters were blinded to group assignment until the completion of the procedure, and again at the time of the results assessment analysis performed with various techniques.

[1541] B.3. Histopathological Analysis

[1542] For all the experimental conditions, the tumors were removed and paraffin embedded after which successive transverse sections were produced. A thorough histopathological analysis has been then performed on these sections in order to assess tissue and cellular structure and therefore tumor progression and tumor cell recoding with the following stainings:
[1543] Hematoxylin-Eosin (HE) staining to qualitatively analyze tissue morphology
[1544] Masson's Trichrome (TM) staining for distinguishing cells from surrounding connective tissue
[1545] Immunohistochemistry assays: E11 antigen, Sclerostin, DMP1, CD44

### C. Results

[1546] Osteosarcoma cell recoding was assessed by analysis of the cell transformation from tumor cell towards an osteocyte cell. The thorough histopathological analysis was carried out and permitted to determine a percentage of osteosarcoma cell recoding for the 3 experimental conditions and for the 2 endpoints of each condition via various parameters.

[1547] Regarding the first endpoint of the study (3 days, 1 injection), the following results have been obtained:

| Experimental conditions | Recoding efficiency (1 injection) |
|---|---|
| No administration | 1.2% |
| Ceramic gel | 1.7% |
| Ceramic gel mixed with SEQ ID NO: | 34% |
| SEQ ID NO: 198 and 197 | |

[1548] Regarding the second endpoint of the study (25 days, 4 injections), the following results have been obtained:

| Experimental conditions | Recoding efficiency (4 injections) |
|---|---|
| No administration | 0.8% |
| Ceramic gel | 2.6% |
| Ceramic gel mixed with SEQ ID NO: | 83% |
| SEQ ID NO: 198 and 197 | |

[1549] Almost no tumor osteosarcoma cell recoding towards osteocyte cells was observed for the two control conditions and for both of the experimental endpoints. Tumor cell progression was therefore not decreased. Tumor osteosarcoma cell recoding was observed for the test condition after 1 injection. It was particularly noted that efficiency of the cell recoding process was highly increased after 4 injections of the test condition.

### D. Conclusions

[1550] It was shown that efficient recoding of osteosarcoma cells in an osteosarcoma animal model presenting all of the characteristics of human osteosarcoma, was possible using representative GFR-binding compounds mixed with a ceramic gel.

[1551] The pharmaceutical associations of the present disclosure have been shown to represent new therapeutic solutions for osteosarcoma with the unique ability to induce tumor cell transformation towards osteocytes, a healthy cell type, thereby blocking tumor progression and regenerating the affected tissue.

1-139. (canceled)

140. A method for treating or preventing a neoplastic disease, disorder, condition, pathology, or any symptoms thereof, comprising administering, to a subject in need thereof, an effective amount of a pharmaceutical association, said association comprising at least one growth factor receptor-binding compound, which activates at least one growth factor receptor of a neoplastic cell, and at least one bioactive carrier forming at least one covalent or non-covalent interaction with said at least one growth factor receptor-binding compound, and wherein said association reduces or suppresses, in the neoplastic cell, the gene expression of at least one cyclin D and/or reduces or suppresses the formation of at least one complex formed between said at least one cyclin D and at least one of cyclin dependent-kinase 4 or 6.

141. The method according to claim 140, comprising a step selected from the group consisting of:
reducing or suppressing the gene expression of cyclin D during phase G1 of the cell cycle of the neoplastic cell;
restoring a function of at least one impaired cell cycle checkpoint;
down-regulating the expression or activity of a GTPase;
converting a neoplastic cell into a non-neoplastic cell;
inducing the differentiation of a neoplastic cell;
inducing the quiescence of a neoplastic cell;
inhibiting cell division of a neoplastic cell;
inhibiting cell proliferation of a neoplastic cell;
promoting anti-mitogen activity in a neoplastic cell;
promoting tumor suppressor activity in a neoplastic cell;
promoting anti-oncogenic activity in a neoplastic cell; and
any combinations thereof.

142. The method according to claim 140, wherein said growth factor receptor-binding compound comprises a peptide with four amino acids PEP1, and a peptide with five amino acids PEP2; wherein PEP1 is selected from the group consisting of SAIS, SSLS, NAIS, SATS, SPIS, EPIS, SPIN, KPLS, EPLP, EPLT, SNIT, RSVK and RPVQ; and wherein PEP2 is selected from the group consisting of LKNYQ, LKVYP, LKKYR, LRKHR, LKYHY, KFKYE, YGKIP, YKQYE, DHHKD, EQLSN, IGEMS, LGEMS, KEVQV and KKATV.

143. The method according to claim 142, wherein said growth factor receptor-binding compound comprises a peptide with eight amino acids PEP12, and a peptide with five amino acids PEP2; wherein PEP12 is a peptide of general formula PEP1-AA¹⁷-PEP11; wherein AA¹⁷ is selected from the group consisting of G, A, V, L, I, P, F, M, W, T and S; wherein PEP11 is a peptide with 3 amino acids of general formula AA¹⁸-AA¹⁹-AA²⁰; wherein AA¹⁸ is selected from the group consisting of L, V, Q, A and R; wherein AA¹⁹ is selected from the group consisting of F, W, H, Y, I and K; wherein AA²⁰ is selected from the group consisting of L, F, Y, K, I, V and M.

144. The method according to claim 143, wherein PEP11 is selected from the group consisting of LYL, LFF, LYF, LYY, LYK, LYI, LFI, LYV, VYY, QIM, AKV and RKI.

145. The method according to claim 144, wherein the pair PEP1:PEP11 is selected from the group consisting of SAIS:LYL, SSLS:LFF, NAIS:LYF, SATS:LYY, SPIS:LYK, SPIS:LYI, SPIS:LFI, EPIS:LYL, SPIN:LYF, KPLS:LYV, EPLP:VYY, EPLT:LYY, SNIT:QIM, RSVK:AKV and RPVQ:RKI.

146. The method according to claim 142, wherein the pair PEP1:PEP2 is selected from the group consisting of SAIS:LKNYQ, SSLS:LKVYP, NAIS:LKKYR, SATS:LRKHR, SPIS:LKYHY, EPIS:KFKYE, SPIN:YGKIP, SPIS:YKQYE, KPLS:DHHKD, EPLP:EQLSN, EPLT:EQLSN, SNIT:IGEMS, SNIT:LGEMS, RSVK:KEVQV and RPVQ:KKATV.

147. The method according to claim 140, wherein said growth factor receptor-binding compound comprises at least one bioactive carrier-affinity-containing group, wherein said at least one bioactive carrier-affinity-containing group provides said growth factor receptor-binding compound with the ability to covalently or non-covalently interact with a bioactive carrier; wherein said bioactive carrier-affinity-containing group is a biomaterial affinity-containing group which is adapted for forming at least one covalent bond or one non-covalent bond with a biomaterial.

148. The method according to claim 140, wherein said growth factor receptor-binding compound is a peptide or a peptidomimetic.

149. The method according to claim 148, wherein said growth factor receptor-binding compound is a non-cyclic peptide with between 20 and 60 amino acids having growth factor receptor-binding capability or a non-cyclic peptidomimetic having growth factor receptor-binding capability, wherein said peptidomimetic has a molecular weight comprised between 2,000 and 8,000 Daltons and comprises between 20 and 50 amino acids.

150. The method according to claim 148, wherein the RMSD value of the structure coordinates of said peptide or peptidomimetic with respect to PEPREF is 2.45 Å (Angstroms) or less, and wherein PEPREF is

| | | | | | | | | |
|---|---|---|---|---|---|---|---|---|
| ATOM | 511 | N | LYS | A | 1 | −14.570 | 46.437 | 27.424 |
| ATOM | 512 | CA | LYS | A | 1 | −13.512 | 45.748 | 28.151 |
| ATOM | 513 | C | LYS | A | 1 | −13.655 | 44.259 | 27.884 |
| ATOM | 514 | O | LYS | A | 1 | −12.769 | 43.463 | 28.197 |
| ATOM | 515 | CB | LYS | A | 1 | −13.605 | 46.029 | 29.652 |
| ATOM | 516 | CG | LYS | A | 1 | −13.640 | 47.509 | 29.991 |
| ATOM | 517 | CD | LYS | A | 1 | −12.615 | 48.297 | 29.183 |
| ATOM | 518 | CE | LYS | A | 1 | −12.625 | 49.768 | 29.575 |
| ATOM | 519 | NZ | LYS | A | 1 | −13.994 | 50.369 | 29.497 |
| ATOM | 520 | N | ILE | A | 2 | −14.792 | 43.890 | 27.309 |
| ATOM | 521 | CA | ILE | A | 2 | −15.051 | 42.499 | 26.967 |
| ATOM | 522 | C | ILE | A | 2 | −14.911 | 42.370 | 25.444 |
| ATOM | 523 | O | ILE | A | 2 | −15.531 | 43.125 | 24.683 |
| ATOM | 524 | CB | ILE | A | 2 | −16.466 | 42.065 | 27.401 |
| ATOM | 525 | CG1 | ILE | A | 2 | −16.630 | 42.238 | 28.915 |
| ATOM | 526 | CG2 | ILE | A | 2 | −16.710 | 40.629 | 26.985 |
| ATOM | 527 | CD1 | ILE | A | 2 | −15.631 | 41.478 | 29.30 |
| ATOM | 528 | N | PRO | A | 3 | −14.085 | 41.411 | 24.989 |
| ATOM | 529 | CA | PRO | A | 3 | −13.789 | 41.109 | 23.588 |
| ATOM | 530 | C | PRO | A | 3 | −14.998 | 40.695 | 22.768 |
| ATOM | 531 | O | PRO | A | 3 | −15.969 | 40.164 | 23.305 |
| ATOM | 532 | CB | PRO | A | 3 | −12.785 | 39.968 | 23.688 |
| ATOM | 533 | CG | PRO | A | 3 | −12.156 | 40.166 | 25.007 |
| ATOM | 534 | CD | PRO | A | 3 | −13.330 | 40.506 | 25.867 |
| ATOM | 535 | N | LYS | A | 4 | −14.937 | 40.937 | 21.463 |
| ATOM | 536 | CA | LYS | A | 4 | −16.023 | 40.529 | 20.590 |
| ATOM | 537 | C | LYS | A | 4 | −15.886 | 39.015 | 20.391 |
| ATOM | 538 | O | LYS | A | 4 | −14.903 | 38.415 | 20.831 |
| ATOM | 539 | CB | LYS | A | 4 | −15.926 | 41.244 | 19.245 |
| ATOM | 540 | CG | LYS | A | 4 | −15.802 | 42.751 | 19.355 |
| ATOM | 541 | CD | LYS | A | 4 | −16.292 | 43.433 | 18.083 |
| ATOM | 542 | CE | LYS | A | 4 | −16.162 | 44.943 | 18.177 |
| ATOM | 543 | NZ | LYS | A | 4 | −16.825 | 45.628 | 17.019 |
| ATOM | 544 | N | ALA | A | 5 | −16.85 | 38.393 | 19.759 |
| ATOM | 545 | CA | ALA | A | 5 | −16.811 | 36.955 | 19.507 |
| ATOM | 546 | C | ALA | A | 5 | −15.772 | 36.771 | 18.416 |
| ATOM | 547 | O | ALA | A | 5 | −15.727 | 37.534 | 17.455 |
| ATOM | 548 | CB | ALA | A | 5 | −18.168 | 36.419 | 19.043 |
| ATOM | 549 | N | CYS | A | 6 | −14.935 | 35.756 | 18.562 |
| ATOM | 550 | CA | CYS | A | 6 | −13.887 | 35.518 | 17.584 |
| ATOM | 551 | C | CYS | A | 6 | −14.347 | 34.765 | 16.338 |
| ATOM | 552 | O | CYS | A | 6 | −15.327 | 34.018 | 16.368 |
| ATOM | 553 | CB | CYS | A | 6 | −12.743 | 34.768 | 18.241 |
| ATOM | 554 | SG | CYS | A | 6 | −11.198 | 34.959 | 17.353 |
| ATOM | 555 | N | CYS | A | 7 | −13.623 | 34.973 | 15.243 |
| ATOM | 556 | CA | CYS | A | 7 | −13.931 | 34.328 | 13.969 |
| ATOM | 557 | C | CYS | A | 7 | −13.091 | 33.071 | 13.798 |
| ATOM | 558 | O | CYS | A | 7 | −11.961 | 33.123 | 13.302 |
| ATOM | 559 | CB | CYS | A | 7 | −13.653 | 35.290 | 12.824 |
| ATOM | 560 | SG | CYS | A | 7 | −13.930 | 34.633 | 11.154 |
| ATOM | 561 | N | VAL | A | 8 | −13.654 | 31.941 | 14.209 |
| ATOM | 562 | CA | VAL | A | 8 | −12.949 | 30.684 | 14.110 |
| ATOM | 563 | C | VAL | A | 8 | −13.653 | 29.733 | 13.157 |
| ATOM | 564 | O | VAL | A | 8 | −14.759 | 30.016 | 12.687 |
| ATOM | 565 | CB | VAL | A | 8 | −12.814 | 30.038 | 15.492 |
| ATOM | 566 | CG1 | VAL | A | 8 | −11.807 | 30.825 | 16.337 |
| ATOM | 567 | CG2 | VAL | A | 8 | −14.161 | 30.006 | 16.170 |
| ATOM | 568 | N | PRO | A | 9 | −13.003 | 28.601 | 12.828 |
| ATOM | 569 | CA | PRO | A | 9 | −13.593 | 27.615 | 11.918 |
| ATOM | 570 | C | PRO | A | 9 | −14.726 | 26.886 | 12.631 |
| ATOM | 571 | O | PRO | A | 9 | −14.581 | 26.476 | 13.780 |
| ATOM | 572 | CB | PRO | A | 9 | −12.423 | 26.676 | 11.601 |
| ATOM | 573 | CG | PRO | A | 9 | −11.204 | 27.487 | 11.925 |
| ATOM | 574 | CD | PRO | A | 9 | −11.620 | 28.226 | 13.163 |
| ATOM | 575 | N | THR | A | 10 | −15.847 | 26.721 | 11.942 |
| ATOM | 576 | CA | THR | A | 10 | −16.999 | 26.060 | 12.527 |
| ATOM | 577 | C | THR | A | 10 | −17.334 | 24.767 | 11.804 |
| ATOM | 578 | O | THR | A | 10 | −18.097 | 23.943 | 12.303 |
| ATOM | 579 | CB | THR | A | 10 | −18.211 | 27.010 | 12.523 |
| ATOM | 580 | OG1 | THR | A | 10 | −18.491 | 27.445 | 11.185 |
| ATOM | 581 | CG2 | THR | A | 10 | −17.902 | 28.230 | 13.375 |
| ATOM | 582 | N | GLU | A | 11 | −16.750 | 24.586 | 10.627 |
| ATOM | 583 | CA | GLU | A | 11 | −16.980 | 23.377 | 9.848 |
| ATOM | 584 | C | GLU | A | 11 | −15.643 | 22.935 | 9.246 |
| ATOM | 585 | O | GLU | A | 11 | −15.029 | 23.666 | 8.464 |
| ATOM | 586 | CB | GLU | A | 11 | −17.981 | 23.624 | 8.715 |
| ATOM | 587 | CG | GLU | A | 11 | −19.421 | 23.807 | 9.163 |
| ATOM | 588 | CD | GLU | A | 11 | −19.686 | 25.166 | 9.770 |
| ATOM | 589 | OE1 | GLU | A | 11 | −19.478 | 26.175 | 9.073 |
| ATOM | 590 | OE2 | GLU | A | 11 | −20.111 | 25.227 | 10.939 |
| ATOM | 591 | N | LEU | A | 12 | −15.183 | 21.749 | 9.622 |
| ATOM | 592 | CA | LEU | A | 12 | −13.923 | 21.254 | 9.104 |
| ATOM | 593 | C | LEU | A | 12 | −14.062 | 19.912 | 8.386 |
| ATOM | 594 | O | LEU | A | 12 | −15.136 | 19.299 | 8.359 |
| ATOM | 595 | CB | LEU | A | 12 | −12.893 | 21.144 | 10.230 |
| ATOM | 596 | CG | LEU | A | 12 | −12.660 | 22.422 | 11.054 |
| ATOM | 597 | CD1 | LEU | A | 12 | −13.475 | 22.350 | 12.337 |
| ATOM | 598 | CD2 | LEU | A | 12 | −11.181 | 22.586 | 11.399 |
| ATOM | 599 | N | SER | A | 13 | −12.971 | 19.476 | 7.771 |
| ATOM | 600 | CA | SER | A | 13 | −12.964 | 18.218 | 7.046 |
| ATOM | 601 | C | SER | A | 13 | −11.568 | 17.628 | 7.164 |
| ATOM | 602 | O | SER | A | 13 | −10.613 | 18.320 | 7.550 |
| ATOM | 603 | CB | SER | A | 13 | −13.346 | 18.435 | 5.578 |
| ATOM | 604 | OG | SER | A | 13 | −12.404 | 19.261 | 4.923 |
| ATOM | 605 | N | ALA | A | 13 | −11.449 | 16.352 | 6.818 |
| ATOM | 606 | CA | ALA | A | 13 | −10.179 | 15.665 | 6.949 |
| ATOM | 607 | C | ALA | A | 13 | −9.421 | 15.471 | 5.652 |
| ATOM | 608 | O | ALA | A | 13 | −9.941 | 15.720 | 4.563 |
| ATOM | 609 | CB | ALA | A | 13 | −10.413 | 14.306 | 7.626 |
| ATOM | 610 | N | ILE | A | 14 | −8.171 | 15.046 | 5.783 |
| ATOM | 611 | CA | ILE | A | 14 | −7.343 | 14.746 | 4.623 |
| ATOM | 612 | C | ILE | A | 14 | −6.475 | 13.559 | 5.004 |
| ATOM | 613 | O | ILE | A | 14 | −6.212 | 13.316 | 6.183 |
| ATOM | 614 | CB | ILE | A | 14 | −6.401 | 15.916 | 4.183 |
| ATOM | 615 | CG1 | ILE | A | 14 | −5.284 | 16.106 | 5.200 |
| ATOM | 616 | CG2 | ILE | A | 14 | −7.188 | 17.211 | 3.982 |
| ATOM | 617 | CD1 | ILE | A | 14 | −4.173 | 16.973 | 4.696 |
| ATOM | 618 | N | SER | A | 15 | −6.045 | 12.806 | 3.999 |
| ATOM | 619 | CA | SER | A | 15 | −5.187 | 11.662 | 4.242 |
| ATOM | 620 | C | SER | A | 15 | −3.740 | 12.089 | 4.217 |
| ATOM | 621 | O | SER | A | 15 | −3.360 | 13.020 | 3.508 |
| ATOM | 622 | CB | SER | A | 15 | −5.416 | 10.584 | 3.185 |
| ATOM | 623 | OG | SER | A | 15 | −6.667 | 9.971 | 3.401 |
| ATOM | 624 | N | MET | A | 16 | −2.933 | 11.409 | 5.012 |
| ATOM | 625 | CA | MET | A | 16 | −1.518 | 11.700 | 5.047 |
| ATOM | 626 | C | MET | A | 16 | −0.778 | 10.414 | 5.244 |
| ATOM | 627 | O | MET | A | 16 | −1.137 | 9.594 | 6.078 |
| ATOM | 628 | CB | MET | A | 16 | −1.170 | 12.694 | 6.164 |
| ATOM | 629 | CG | MET | A | 16 | −1.848 | 14.042 | 5.974 |
| ATOM | 630 | SD | MET | A | 16 | −1.017 | 15.431 | 6.760 |
| ATOM | 631 | CE | MET | A | 16 | −0.799 | 14.823 | 8.475 |
| ATOM | 632 | N | LEU | A | 17 | 0.238 | 10.231 | 4.426 |
| ATOM | 633 | CA | LEU | A | 17 | 1.077 | 9.065 | 4.508 |
| ATOM | 634 | C | LEU | A | 17 | 2.289 | 9.610 | 5.264 |
| ATOM | 635 | O | LEU | A | 17 | 2.939 | 10.565 | 4.818 |
| ATOM | 636 | CB | LEU | A | 17 | 1.461 | 8.608 | 3.100 |
| ATOM | 637 | CG | LEU | A | 17 | 2.324 | 7.355 | 2.955 |
| ATOM | 638 | CD1 | LEU | A | 17 | 1.553 | 6.145 | 3.445 |
| ATOM | 639 | CD2 | LEU | A | 17 | 2.723 | 7.190 | 1.492 |
| ATOM | 640 | N | TYR | A | 18 | 2.581 | 9.029 | 6.418 |
| ATOM | 641 | CA | TYR | A | 18 | 3.706 | 9.501 | 7.196 |
| ATOM | 642 | C | TYR | A | 18 | 4.434 | 8.333 | 7.835 |
| ATOM | 643 | O | TYR | A | 18 | 4.081 | 7.186 | 7.603 |
| ATOM | 644 | CB | TYR | A | 18 | 3.222 | 10.458 | 8.281 |
| ATOM | 645 | CG | TYR | A | 18 | 2.386 | 9.782 | 9.346 |
| ATOM | 646 | CD1 | TYR | A | 18 | 1.029 | 9.527 | 9.147 |
| ATOM | 647 | CD2 | TYR | A | 18 | 2.961 | 9.379 | 10.550 |
| ATOM | 648 | CE1 | TYR | A | 18 | 0.273 | 8.894 | 10.128 |
| ATOM | 649 | CE2 | TYR | A | 18 | 2.218 | 8.745 | 11.526 |
| ATOM | 650 | CZ | TYR | A | 18 | 0.877 | 8.508 | 11.317 |
| ATOM | 651 | OH | TYR | A | 18 | 0.134 | 7.922 | 12.318 |
| ATOM | 652 | N | LEU | A | 19 | 5.439 | 8.651 | 8.650 |
| ATOM | 653 | CA | LEU | A | 19 | 6.255 | 7.661 | 9.347 |
| ATOM | 654 | C | LEU | A | 19 | 6.210 | 7.946 | 10.847 |
| ATOM | 655 | O | LEU | A | 19 | 6.685 | 8.992 | 11.288 |
| ATOM | 656 | CB | LEU | A | 19 | 7.701 | 7.763 | 8.871 |
| ATOM | 657 | CG | LEU | A | 19 | 7.901 | 7.850 | 7.359 |
| ATOM | 658 | CD1 | LEU | A | 19 | 9.300 | 8.379 | 7.039 |
| ATOM | 659 | CD2 | LEU | A | 19 | 7.669 | 6.482 | 6.748 |
| ATOM | 660 | N | ASP | A | 20 | 5.652 | 7.035 | 11.639 |
| ATOM | 661 | CA | ASP | A | 20 | 5.594 | 7.282 | 13.071 |
| ATOM | 662 | C | ASP | A | 20 | 7.001 | 7.289 | 13.662 |
| ATOM | 663 | O | ASP | A | 20 | 7.985 | 7.185 | 12.932 |
| ATOM | 664 | CB | ASP | A | 20 | 4.714 | 6.244 | 13.786 |
| ATOM | 665 | CG | ASP | A | 20 | 5.292 | 4.837 | 13.752 |
| ATOM | 666 | OD1 | ASP | A | 20 | 6.533 | 4.678 | 13.775 |
| ATOM | 667 | OD2 | ASP | A | 20 | 4.491 | 3.882 | 13.732 |
| ATOM | 668 | N | GLU | A | 21 | 7.089 | 7.413 | 14.981 |
| ATOM | 669 | CA | GLU | A | 21 | 8.375 | 7.451 | 15.669 |
| ATOM | 670 | C | GLU | A | 21 | 9.250 | 6.212 | 15.463 |
| ATOM | 671 | O | GLU | A | 21 | 10.459 | 6.246 | 15.738 |
| ATOM | 672 | CB | GLU | A | 21 | 8.164 | 7.699 | 17.171 |
| ATOM | 673 | CG | GLU | A | 21 | 7.220 | 6.731 | 17.868 |
| ATOM | 674 | CD | GLU | A | 21 | 5.828 | 6.726 | 17.257 |
| ATOM | 675 | OE1 | GLU | A | 21 | 5.347 | 7.810 | 16.856 |
| ATOM | 676 | OE2 | GLU | A | 21 | 5.210 | 5.640 | 17.185 |
| ATOM | 677 | N | ASN | A | 22 | 8.646 | 5.133 | 14.966 |
| ATOM | 678 | CA | ASN | A | 22 | 9.377 | 3.889 | 14.727 |
| ATOM | 679 | C | ASN | A | 22 | 9.682 | 3.647 | 13.249 |
| ATOM | 680 | O | ASN | A | 22 | 10.095 | 2.554 | 12.853 |
| ATOM | 681 | CB | ASN | A | 22 | 8.591 | 2.707 | 15.299 |
| ATOM | 682 | CG | ASN | A | 22 | 8.384 | 2.827 | 16.794 |
| ATOM | 683 | OD1 | ASN | A | 22 | 9.349 | 2.930 | 17.560 |
| ATOM | 684 | ND2 | ASN | A | 22 | 7.125 | 2.819 | 17.221 |
| ATOM | 685 | N | GLU | A | 23 | 9.485 | 4.672 | 12.435 |
| ATOM | 686 | CA | GLU | A | 23 | 9.749 | 4.558 | 11.015 |
| ATOM | 687 | C | GLU | A | 23 | 8.790 | 3.603 | 10.299 |
| ATOM | 688 | O | GLU | A | 23 | 9.145 | 2.996 | 9.292 |
| ATOM | 689 | CB | GLU | A | 23 | 11.203 | 4.129 | 10.784 |
| ATOM | 690 | CG | GLU | A | 23 | 12.232 | 5.210 | 11.082 |
| ATOM | 691 | CD | GLU | A | 23 | 12.072 | 6.410 | 10.166 |
| ATOM | 692 | OE1 | GLU | A | 23 | 12.108 | 6.218 | 8.928 |
| ATOM | 693 | OE2 | GLU | A | 23 | 11.907 | 7.541 | 10.677 |
| ATOM | 694 | N | LYS | A | 24 | 7.580 | 3.459 | 10.826 |
| ATOM | 695 | CA | LYS | A | 24 | 6.583 | 2.624 | 10.175 |
| ATOM | 696 | C | LYS | A | 24 | 5.815 | 3.540 | 9.228 |
| ATOM | 697 | O | LYS | A | 24 | 5.553 | 4.692 | 9.552 |
| ATOM | 698 | CB | LYS | A | 24 | 5.602 | 2.039 | 11.182 |
| ATOM | 699 | CG | LYS | A | 24 | 6.163 | 0.963 | 12.058 |
| ATOM | 700 | CD | LYS | A | 24 | 5.068 | 0.387 | 12.947 |
| ATOM | 701 | CE | LYS | A | 24 | 5.648 | −0.511 | 14.031 |
| ATOM | 702 | NZ | LYS | A | 24 | 4.577 | −1.091 | 14.886 |
| ATOM | 703 | N | VAL | A | 25 | 5.455 | 3.037 | 8.057 |
| ATOM | 704 | CA | VAL | A | 25 | 4.713 | 3.849 | 7.116 |
| ATOM | 705 | C | VAL | A | 25 | 3.237 | 3.737 | 7.444 |
| ATOM | 706 | O | VAL | A | 25 | 2.657 | 2.659 | 7.383 |
| ATOM | 707 | CB | VAL | A | 25 | 4.969 | 3.396 | 5.681 |
| ATOM | 708 | CG1 | VAL | A | 25 | 4.250 | 4.317 | 4.708 |
| ATOM | 709 | CG2 | VAL | A | 25 | 6.462 | 3.393 | 5.422 |
| ATOM | 710 | N | VAL | A | 25 | 2.637 | 4.864 | 7.800 |
| ATOM | 711 | CA | VAL | A | 25 | 1.231 | 4.916 | 8.170 |
| ATOM | 712 | C | VAL | A | 25 | 0.418 | 5.778 | 7.213 |
| ATOM | 713 | O | VAL | A | 25 | 0.871 | 6.841 | 6.774 |
| ATOM | 714 | CB | VAL | A | 25 | 1.062 | 5.531 | 9.577 |
| ATOM | 715 | CG1 | VAL | A | 25 | −0.341 | 5.253 | 10.115 |
| ATOM | 716 | CG2 | VAL | A | 25 | 2.128 | 5.006 | 10.506 |
| ATOM | 717 | N | LEU | A | 26 | −0.779 | 5.306 | 6.887 |
| ATOM | 718 | CA | LEU | A | 26 | −1.706 | 6.048 | 6.040 |
| ATOM | 719 | C | LEU | A | 26 | −2.862 | 6.358 | 6.992 |
| ATOM | 720 | O | LEU | A | 26 | −3.679 | 5.497 | 7.297 |
| ATOM | 721 | CB | LEU | A | 26 | −2.201 | 5.189 | 4.876 |
| ATOM | 722 | CG | LEU | A | 26 | −3.204 | 5.898 | 3.952 |
| ATOM | 723 | CD1 | LEU | A | 26 | −2.519 | 7.077 | 3.262 |
| ATOM | 724 | CD2 | LEU | A | 26 | −3.755 | 4.925 | 2.929 |
| ATOM | 725 | N | LYS | A | 27 | −2.910 | 7.584 | 7.489 |
| ATOM | 726 | CA | LYS | A | 27 | −3.952 | 7.965 | 8.430 |
| ATOM | 727 | C | LYS | A | 27 | −4.831 | 9.082 | 7.881 |
| ATOM | 728 | O | LYS | A | 27 | −4.374 | 9.924 | 7.103 |
| ATOM | 729 | CB | LYS | A | 27 | −3.305 | 8.409 | 9.738 |
| ATOM | 730 | CG | LYS | A | 27 | −4.265 | 8.720 | 10.859 |
| ATOM | 731 | CD | LYS | A | 27 | −3.509 | 9.382 | 11.994 |
| ATOM | 732 | CE | LYS | A | 27 | −4.397 | 9.654 | 13.186 |
| ATOM | 733 | NZ | LYS | A | 27 | −4.839 | 8.377 | 13.816 |
| ATOM | 734 | N | ASN | A | 28 | −6.098 | 9.078 | 8.279 |
| ATOM | 735 | CA | ASN | A | 28 | −7.045 | 10.095 | 7.843 |
| ATOM | 736 | C | ASN | A | 28 | −7.147 | 11.103 | 8.979 |
| ATOM | 737 | O | ASN | A | 28 | −7.815 | 10.842 | 9.969 |
| ATOM | 738 | CB | ASN | A | 28 | −8.408 | 9.455 | 7.560 |
| ATOM | 739 | CG | ASN | A | 28 | −9.518 | 10.485 | 7.364 |
| ATOM | 740 | OD1 | ASN | A | 28 | −9.360 | 11.444 | 6.597 |
| ATOM | 741 | ND2 | ASN | A | 28 | −10.653 | 10.288 | 8.050 |
| ATOM | 742 | N | TYR | A | 29 | −6.473 | 12.241 | 8.837 |
| ATOM | 743 | CA | TYR | A | 29 | −6.470 | 13.278 | 9.869 |
| ATOM | 744 | C | TYR | A | 29 | −7.680 | 14.204 | 9.836 |
| ATOM | 745 | O | TYR | A | 29 | −7.928 | 14.870 | 8.835 |
| ATOM | 746 | CB | TYR | A | 29 | −5.197 | 14.130 | 9.768 |
| ATOM | 747 | CG | TYR | A | 29 | −3.913 | 13.420 | 10.155 |
| ATOM | 748 | CD1 | TYR | A | 29 | −3.378 | 12.394 | 9.363 |
| ATOM | 749 | CD2 | TYR | A | 29 | −3.220 | 13.792 | 11.306 |
| ATOM | 750 | CE1 | TYR | A | 29 | −2.181 | 11.765 | 9.713 |
| ATOM | 751 | CE2 | TYR | A | 29 | −2.032 | 13.171 | 11.665 |
| ATOM | 752 | CZ | TYR | A | 29 | −1.516 | 12.167 | 10.869 |
| ATOM | 753 | OH | TYR | A | 29 | −0.319 | 11.603 | 11.231 |
| ATOM | 754 | N | GLN | A | 30 | −8.408 | 14.254 | 10.950 |
| ATOM | 755 | CA | GLN | A | 30 | −9.606 | 15.088 | 11.089 |
| ATOM | 756 | C | GLN | A | 30 | −9.287 | 16.541 | 11.431 |
| ATOM | 757 | O | GLN | A | 30 | −8.213 | 16.847 | 11.925 |
| ATOM | 758 | CB | GLN | A | 30 | −10.500 | 14.541 | 12.202 |
| ATOM | 759 | CG | GLN | A | 30 | −10.807 | 13.074 | 12.104 |
| ATOM | 760 | CD | GLN | A | 30 | −11.744 | 12.749 | 10.969 |
| ATOM | 761 | OE1 | GLN | A | 30 | −11.900 | 11.582 | 10.602 |
| ATOM | 762 | NE2 | GLN | A | 30 | −12.385 | 13.773 | 10.405 |
| ATOM | 763 | N | ASP | A | 31 | −10.238 | 17.430 | 11.173 |
| ATOM | 764 | CA | ASP | A | 31 | −10.085 | 18.851 | 11.495 |
| ATOM | 765 | C | ASP | A | 31 | −8.867 | 19.494 | 10.842 |
| ATOM | 766 | O | ASP | A | 31 | −8.195 | 20.335 | 11.442 |
| ATOM | 767 | CB | ASP | A | 31 | −10.000 | 19.025 | 13.019 |
| ATOM | 768 | CG | ASP | A | 31 | −11.247 | 18.520 | 13.742 |
| ATOM | 769 | OD1 | ASP | A | 31 | −12.349 | 18.587 | 13.155 |
| ATOM | 770 | OD2 | ASP | A | 31 | −11.130 | 18.069 | 14.908 |
| ATOM | 771 | N | MET | A | 32 | −8.582 | 19.113 | 9.606 |
| ATOM | 772 | CA | MET | A | 32 | −7.426 | 19.662 | 8.918 |
| ATOM | 773 | C | MET | A | 32 | −7.780 | 20.808 | 7.987 |
| ATOM | 774 | O | MET | A | 32 | −7.021 | 21.768 | 7.855 |
| ATOM | 775 | CB | MET | A | 32 | −6.741 | 18.559 | 8.125 |
| ATOM | 776 | CG | MET | A | 32 | −6.037 | 17.540 | 8.980 |
| ATOM | 777 | SD | MET | A | 32 | −4.559 | 18.231 | 9.714 |
| ATOM | 778 | CE | MET | A | 32 | −3.406 | 18.041 | 8.318 |
| ATOM | 779 | N | VAL | A | 33 | −8.942 | 20.707 | 7.351 |
| ATOM | 780 | CA | VAL | A | 33 | −9.381 | 21.719 | 6.401 |
| ATOM | 781 | C | VAL | A | 33 | −10.579 | 22.536 | 6.858 |
| ATOM | 782 | O | VAL | A | 33 | −11.586 | 21.988 | 7.292 |
| ATOM | 783 | CB | VAL | A | 33 | −9.701 | 21.056 | 5.027 |
| ATOM | 784 | CG1 | VAL | A | 33 | −10.388 | 22.040 | 4.087 |
| ATOM | 785 | CG2 | VAL | A | 33 | −8.423 | 20.561 | 4.412 |
| ATOM | 786 | N | VAL | A | 34 | −10.465 | 23.855 | 6.739 |
| ATOM | 787 | CA | VAL | A | 34 | −11.553 | 24.745 | 7.113 |
| ATOM | 788 | C | VAL | A | 34 | −12.610 | 24.835 | 6.016 |
| ATOM | 789 | O | VAL | A | 34 | −12.373 | 25.403 | 4.950 |
| ATOM | 790 | CB | VAL | A | 34 | −11.057 | 26.176 | 7.407 |
| ATOM | 791 | CG1 | VAL | A | 34 | −12.240 | 27.097 | 7.601 |
| ATOM | 792 | CG2 | VAL | A | 34 | −10.222 | 26.186 | 8.655 |
| ATOM | 793 | N | GLU | A | 35 | −13.779 | 24.266 | 6.282 |
| ATOM | 794 | CA | GLU | A | 35 | −14.870 | 24.311 | 5.321 |
| ATOM | 795 | C | GLU | A | 35 | −15.702 | 25.565 | 5.572 |
| ATOM | 796 | O | GLU | A | 35 | −16.011 | 26.303 | 4.645 |
| ATOM | 797 | CB | GLU | A | 35 | −15.733 | 23.054 | 5.447 |
| ATOM | 798 | CG | GLU | A | 35 | −14.969 | 21.782 | 5.128 |
| ATOM | 799 | CD | GLU | A | 35 | −14.515 | 21.732 | 3.676 |
| ATOM | 800 | OE1 | GLU | A | 35 | −15.036 | 22.519 | 2.858 |
| ATOM | 801 | OE2 | GLU | A | 35 | −13.643 | 20.902 | 3.344 |
| ATOM | 802 | N | GLY | A | 36 | −16.053 | 25.811 | 6.829 |
| ATOM | 803 | CA | GLY | A | 36 | −16.834 | 26.990 | 7.152 |
| ATOM | 804 | C | GLY | A | 36 | −16.322 | 27.785 | 8.341 |
| ATOM | 805 | O | GLY | A | 36 | −15.671 | 27.249 | 9.237 |
| ATOM | 806 | N | CYS | A | 37 | −16.616 | 29.077 | 8.360 |
| ATOM | 807 | CA | CYS | A | 37 | −16.177 | 29.917 | 9.466 |
| ATOM | 808 | C | CYS | A | 37 | −17.347 | 30.502 | 10.249 |
| ATOM | 809 | O | CYS | A | 37 | −18.467 | 30.628 | 9.741 |
| ATOM | 810 | CB | CYS | A | 37 | −15.301 | 31.058 | 8.967 |
| ATOM | 811 | SG | CYS | A | 37 | −13.785 | 30.558 | 8.098 |
| ATOM | 812 | N | GLY | A | 38 | −17.079 | 30.867 | 11.494 |
| ATOM | 813 | CA | GLY | A | 38 | −18.129 | 31.430 | 12.309 |
| ATOM | 814 | C | GLY | A | 38 | −17.622 | 32.176 | 13.518 |
| ATOM | 815 | O | GLY | A | 38 | −16.425 | 32.235 | 13.791 |
| ATOM | 816 | N | CYS | A | 39 | −18.564 | 32.753 | 14.245 |
| ATOM | 817 | CA | CYS | A | 39 | −18.253 | 33.505 | 15.439 |
| ATOM | 818 | C | CYS | A | 39 | −18.543 | 32.670 | 16.665 |
| ATOM | 819 | O | CYS | A | 39 | −19.620 | 32.084 | 16.794 |
| ATOM | 820 | CB | CYS | A | 39 | −19.068 | 34.779 | 15.442 |
| ATOM | 821 | SG | CYS | A | 39 | −18.539 | 35.799 | 14.053 |

151. The method according to claim 148, wherein said growth factor receptor-binding compound is a cyclic peptide with between 15 and 60 amino acids having a growth factor receptor-binding capability or a cyclic peptidomimetic comprising between 15 and 60 amino acids, having a growth factor receptor-binding capability.

152. The method according to claim 151, wherein said growth factor receptor-binding compound is a cyclic peptide or a cyclic peptidomimetic, having a molecular weight comprised between 1,500 and 7,000 Da.

153. The method according to claim 148, wherein said growth factor receptor-binding compound is selected from the group consisting of any one of peptides of SEQ ID NO: 1 to 100330.

154. The method according to claim 140, comprising at least one medically acceptable excipient, carrier or vehicle.

155. The method according to claim 145, wherein the pair PEP1:PEP2 is selected from the group consisting of SAIS:LKNYQ, SSLS:LKVYP, NAIS:LKKYR, SATS:LRKHR, SPIS:LKYHY, EPIS:KFKYE, SPIN:YGKIP, SPIS:YKQYE, KPLS:DHHKD, EPLP:EQLSN, EPLT:EQLSN, SNIT:IGEMS, SNIT:LGEMS, RSVK:KEVQV and RPVQ:KKATV.

156. The method according to claim 142, wherein said growth factor receptor-binding compound comprises at least one bioactive carrier-affinity-containing group, wherein said at least one bioactive carrier-affinity-containing group provides said growth factor receptor-binding compound with the ability to covalently or non-covalently interact with a bioactive carrier; wherein said bioactive carrier-affinity-containing group is a biomaterial affinity-containing group which is adapted for forming at least one covalent bond or one non-covalent bond with a biomaterial.

157. The method according to claim 142, wherein said growth factor receptor-binding compound is a peptide or a peptidomimetic.

158. The method according to claim 145, wherein said growth factor receptor-binding compound is a peptide or a peptidomimetic.

159. The method according to claim 157, wherein said growth factor receptor-binding compound is a non-cyclic peptide with between 20 and 60 amino acids having growth factor receptor-binding capability or a non-cyclic peptidomimetic having growth factor receptor-binding capability, wherein said peptidomimetic has a molecular weight comprised between 2,000 and 8,000 Daltons and comprises between 20 and 50 amino acids.

160. The method according to claim 158, wherein said growth factor receptor-binding compound is a non-cyclic peptide with between 20 and 60 amino acids having growth factor receptor-binding capability or a non-cyclic peptidomimetic having growth factor receptor-binding capability, wherein said peptidomimetic has a molecular weight comprised between 2,000 and 8,000 Daltons and comprises between 20 and 50 amino acids.

161. The method according to claim 157, wherein the RMSD value of the structure coordinates of said peptide or peptidomimetic with respect to PEPREF is 2.45 Å (Angstroms) or less, and wherein PEPREF is

| | | | | | | | | |
|---|---|---|---|---|---|---|---|---|
| ATOM | 511 | N | LYS | A | 1 | −14.570 | 46.437 | 27.424 |
| ATOM | 512 | CA | LYS | A | 1 | −13.512 | 45.748 | 28.151 |
| ATOM | 513 | C | LYS | A | 1 | −13.655 | 44.259 | 27.884 |
| ATOM | 514 | O | LYS | A | 1 | −12.769 | 43.463 | 28.197 |
| ATOM | 515 | CB | LYS | A | 1 | −13.605 | 46.029 | 29.652 |
| ATOM | 516 | CG | LYS | A | 1 | −13.640 | 47.509 | 29.991 |
| ATOM | 517 | CD | LYS | A | 1 | −12.615 | 48.297 | 29.183 |
| ATOM | 518 | CE | LYS | A | 1 | −12.625 | 49.768 | 29.575 |
| ATOM | 519 | NZ | LYS | A | 1 | −13.994 | 50.369 | 29.497 |
| ATOM | 520 | N | ILE | A | 2 | −14.792 | 43.890 | 27.309 |
| ATOM | 521 | CA | ILE | A | 2 | −15.051 | 42.499 | 26.967 |
| ATOM | 522 | C | ILE | A | 2 | −14.911 | 42.370 | 25.444 |
| ATOM | 523 | O | ILE | A | 2 | −15.531 | 43.125 | 24.683 |
| ATOM | 524 | CB | ILE | A | 2 | −16.466 | 42.065 | 27.401 |
| ATOM | 525 | CG1 | ILE | A | 2 | −16.630 | 42.238 | 28.915 |
| ATOM | 526 | CG2 | ILE | A | 2 | −16.710 | 40.629 | 26.985 |
| ATOM | 527 | CD1 | ILE | A | 2 | −15.631 | 41.478 | 29.30 |
| ATOM | 528 | N | PRO | A | 3 | −14.085 | 41.411 | 24.989 |
| ATOM | 529 | CA | PRO | A | 3 | −13.789 | 41.109 | 23.588 |
| ATOM | 530 | C | PRO | A | 3 | −14.998 | 40.695 | 22.768 |
| ATOM | 531 | O | PRO | A | 3 | −15.969 | 40.164 | 23.305 |
| ATOM | 532 | CB | PRO | A | 3 | −12.785 | 39.968 | 23.688 |
| ATOM | 533 | CG | PRO | A | 3 | −12.156 | 40.166 | 25.007 |
| ATOM | 534 | CD | PRO | A | 3 | −13.330 | 40.506 | 25.867 |
| ATOM | 535 | N | LYS | A | 4 | −14.937 | 40.937 | 21.463 |
| ATOM | 536 | CA | LYS | A | 4 | −16.023 | 40.529 | 20.590 |
| ATOM | 537 | C | LYS | A | 4 | −15.886 | 39.015 | 20.391 |
| ATOM | 538 | O | LYS | A | 4 | −14.903 | 38.415 | 20.831 |
| ATOM | 539 | CB | LYS | A | 4 | −15.926 | 41.244 | 19.245 |
| ATOM | 540 | CG | LYS | A | 4 | −15.802 | 42.751 | 19.355 |
| ATOM | 541 | CD | LYS | A | 4 | −16.292 | 43.433 | 18.083 |
| ATOM | 542 | CE | LYS | A | 4 | −16.162 | 44.943 | 18.177 |
| ATOM | 543 | NZ | LYS | A | 4 | −16.825 | 45.628 | 17.019 |
| ATOM | 544 | N | ALA | A | 5 | −16.85 | 38.393 | 19.759 |
| ATOM | 545 | CA | ALA | A | 5 | −16.811 | 36.955 | 19.507 |
| ATOM | 546 | C | ALA | A | 5 | −15.772 | 36.771 | 18.416 |
| ATOM | 547 | O | ALA | A | 5 | −15.727 | 37.534 | 17.455 |
| ATOM | 548 | CB | ALA | A | 5 | −18.168 | 36.419 | 19.043 |
| ATOM | 549 | N | CYS | A | 6 | −14.935 | 35.756 | 18.562 |
| ATOM | 550 | CA | CYS | A | 6 | −13.887 | 35.518 | 17.584 |
| ATOM | 551 | C | CYS | A | 6 | −14.347 | 34.765 | 16.338 |
| ATOM | 552 | O | CYS | A | 6 | −15.327 | 34.018 | 16.368 |
| ATOM | 553 | CB | CYS | A | 6 | −12.743 | 34.768 | 18.241 |
| ATOM | 554 | SG | CYS | A | 6 | −11.198 | 34.959 | 17.353 |
| ATOM | 555 | N | CYS | A | 7 | −13.623 | 34.973 | 15.243 |
| ATOM | 556 | CA | CYS | A | 7 | −13.931 | 34.328 | 13.969 |
| ATOM | 557 | C | CYS | A | 7 | −13.091 | 33.071 | 13.798 |
| ATOM | 558 | O | CYS | A | 7 | −11.961 | 33.123 | 13.302 |
| ATOM | 559 | CB | CYS | A | 7 | −13.653 | 35.290 | 12.824 |
| ATOM | 560 | SG | CYS | A | 7 | −13.930 | 34.633 | 11.154 |
| ATOM | 561 | N | VAL | A | 8 | −13.654 | 31.941 | 14.209 |
| ATOM | 562 | CA | VAL | A | 8 | −12.949 | 30.684 | 14.110 |
| ATOM | 563 | C | VAL | A | 8 | −13.653 | 29.733 | 13.157 |
| ATOM | 564 | O | VAL | A | 8 | −14.759 | 30.016 | 12.687 |
| ATOM | 565 | CB | VAL | A | 8 | −12.814 | 30.038 | 15.492 |
| ATOM | 566 | CG1 | VAL | A | 8 | −11.807 | 30.825 | 16.337 |
| ATOM | 567 | CG2 | VAL | A | 8 | −14.161 | 30.006 | 16.170 |
| ATOM | 568 | N | PRO | A | 9 | −13.003 | 28.601 | 12.828 |
| ATOM | 569 | CA | PRO | A | 9 | −13.593 | 27.615 | 11.918 |
| ATOM | 570 | C | PRO | A | 9 | −14.726 | 26.886 | 12.631 |
| ATOM | 571 | O | PRO | A | 9 | −14.581 | 26.476 | 13.780 |
| ATOM | 572 | CB | PRO | A | 9 | −12.423 | 26.676 | 11.601 |
| ATOM | 573 | CG | PRO | A | 9 | −11.204 | 27.487 | 11.925 |
| ATOM | 574 | CD | PRO | A | 9 | −11.620 | 28.226 | 13.163 |
| ATOM | 575 | N | THR | A | 10 | −15.847 | 26.721 | 11.942 |
| ATOM | 576 | CA | THR | A | 10 | −16.999 | 26.060 | 12.527 |
| ATOM | 577 | C | THR | A | 10 | −17.334 | 24.767 | 11.804 |
| ATOM | 578 | O | THR | A | 10 | −18.097 | 23.943 | 12.303 |
| ATOM | 579 | CB | THR | A | 10 | −18.211 | 27.010 | 12.523 |
| ATOM | 580 | OG1 | THR | A | 10 | −18.491 | 27.445 | 11.185 |
| ATOM | 581 | CG2 | THR | A | 10 | −17.902 | 28.230 | 13.375 |
| ATOM | 582 | N | GLU | A | 11 | −16.750 | 24.586 | 10.627 |
| ATOM | 583 | CA | GLU | A | 11 | −16.980 | 23.377 | 9.848 |
| ATOM | 584 | C | GLU | A | 11 | −15.643 | 22.935 | 9.246 |
| ATOM | 585 | O | GLU | A | 11 | −15.029 | 23.666 | 8.464 |
| ATOM | 586 | CB | GLU | A | 11 | −17.981 | 23.624 | 8.715 |
| ATOM | 587 | CG | GLU | A | 11 | −19.421 | 23.807 | 9.163 |
| ATOM | 588 | CD | GLU | A | 11 | −19.686 | 25.166 | 9.770 |
| ATOM | 589 | OE1 | GLU | A | 11 | −19.478 | 26.175 | 9.073 |
| ATOM | 590 | OE2 | GLU | A | 11 | −20.111 | 25.227 | 10.939 |
| ATOM | 591 | N | LEU | A | 12 | −15.183 | 21.749 | 9.622 |
| ATOM | 592 | CA | LEU | A | 12 | −13.923 | 21.254 | 9.104 |
| ATOM | 593 | C | LEU | A | 12 | −14.062 | 19.912 | 8.386 |
| ATOM | 594 | O | LEU | A | 12 | −15.136 | 19.299 | 8.359 |
| ATOM | 595 | CB | LEU | A | 12 | −12.893 | 21.144 | 10.230 |
| ATOM | 596 | CG | LEU | A | 12 | −12.660 | 22.422 | 11.054 |
| ATOM | 597 | CD1 | LEU | A | 12 | −13.475 | 22.350 | 12.337 |
| ATOM | 598 | CD2 | LEU | A | 12 | −11.181 | 22.586 | 11.399 |
| ATOM | 599 | N | SER | A | 13 | −12.971 | 19.476 | 7.771 |
| ATOM | 600 | CA | SER | A | 13 | −12.964 | 18.218 | 7.046 |
| ATOM | 601 | C | SER | A | 13 | −11.568 | 17.628 | 7.164 |
| ATOM | 602 | O | SER | A | 13 | −10.613 | 18.320 | 7.550 |
| ATOM | 603 | CB | SER | A | 13 | −13.346 | 18.435 | 5.578 |
| ATOM | 604 | OG | SER | A | 13 | −12.404 | 19.261 | 4.923 |
| ATOM | 605 | N | ALA | A | 13 | −11.449 | 16.352 | 6.818 |
| ATOM | 606 | CA | ALA | A | 13 | −10.179 | 15.665 | 6.949 |
| ATOM | 607 | C | ALA | A | 13 | −9.421 | 15.471 | 5.652 |
| ATOM | 608 | O | ALA | A | 13 | −9.941 | 15.720 | 4.563 |
| ATOM | 609 | CB | ALA | A | 13 | −10.413 | 14.306 | 7.626 |
| ATOM | 610 | N | ILE | A | 14 | −8.171 | 15.046 | 5.783 |
| ATOM | 611 | CA | ILE | A | 14 | −7.343 | 14.746 | 4.623 |
| ATOM | 612 | C | ILE | A | 14 | −6.475 | 13.559 | 5.004 |
| ATOM | 613 | O | ILE | A | 14 | −6.212 | 13.316 | 6.183 |
| ATOM | 614 | CB | ILE | A | 14 | −6.401 | 15.916 | 4.183 |
| ATOM | 615 | CG1 | ILE | A | 14 | −5.284 | 16.106 | 5.200 |
| ATOM | 616 | CG2 | ILE | A | 14 | −7.188 | 17.211 | 3.982 |
| ATOM | 617 | CD1 | ILE | A | 14 | −4.173 | 16.973 | 4.696 |
| ATOM | 618 | N | SER | A | 15 | −6.045 | 12.806 | 3.999 |
| ATOM | 619 | CA | SER | A | 15 | −5.187 | 11.662 | 4.242 |
| ATOM | 620 | C | SER | A | 15 | −3.740 | 12.089 | 4.217 |
| ATOM | 621 | O | SER | A | 15 | −3.360 | 13.020 | 3.508 |
| ATOM | 622 | CB | SER | A | 15 | −5.416 | 10.584 | 3.185 |
| ATOM | 623 | OG | SER | A | 15 | −6.667 | 9.971 | 3.401 |
| ATOM | 624 | N | MET | A | 16 | −2.933 | 11.409 | 5.012 |
| ATOM | 625 | CA | MET | A | 16 | −1.518 | 11.700 | 5.047 |
| ATOM | 626 | C | MET | A | 16 | −0.778 | 10.414 | 5.244 |
| ATOM | 627 | O | MET | A | 16 | −1.137 | 9.594 | 6.078 |
| ATOM | 628 | CB | MET | A | 16 | −1.170 | 12.694 | 6.164 |
| ATOM | 629 | CG | MET | A | 16 | −1.848 | 14.042 | 5.974 |
| ATOM | 630 | SD | MET | A | 16 | −1.017 | 15.431 | 6.760 |
| ATOM | 631 | CE | MET | A | 16 | −0.799 | 14.823 | 8.475 |
| ATOM | 632 | N | LEU | A | 17 | 0.238 | 10.231 | 4.426 |
| ATOM | 633 | CA | LEU | A | 17 | 1.077 | 9.065 | 4.508 |
| ATOM | 634 | C | LEU | A | 17 | 2.289 | 9.610 | 5.264 |
| ATOM | 635 | O | LEU | A | 17 | 2.939 | 10.565 | 4.818 |
| ATOM | 636 | CB | LEU | A | 17 | 1.461 | 8.608 | 3.100 |
| ATOM | 637 | CG | LEU | A | 17 | 2.324 | 7.355 | 2.955 |
| ATOM | 638 | CD1 | LEU | A | 17 | 1.553 | 6.145 | 3.445 |
| ATOM | 639 | CD2 | LEU | A | 17 | 2.723 | 7.190 | 1.492 |
| ATOM | 640 | N | TYR | A | 18 | 2.581 | 9.029 | 6.418 |
| ATOM | 641 | CA | TYR | A | 18 | 3.706 | 9.501 | 7.196 |
| ATOM | 642 | C | TYR | A | 18 | 4.434 | 8.333 | 7.835 |
| ATOM | 643 | O | TYR | A | 18 | 4.081 | 7.186 | 7.603 |
| ATOM | 644 | CB | TYR | A | 18 | 3.222 | 10.458 | 8.281 |
| ATOM | 645 | CG | TYR | A | 18 | 2.386 | 9.782 | 9.346 |
| ATOM | 646 | CD1 | TYR | A | 18 | 1.029 | 9.527 | 9.147 |
| ATOM | 647 | CD2 | TYR | A | 18 | 2.961 | 9.379 | 10.550 |
| ATOM | 648 | CE1 | TYR | A | 18 | 0.273 | 8.894 | 10.128 |
| ATOM | 649 | CE2 | TYR | A | 18 | 2.218 | 8.745 | 11.526 |
| ATOM | 650 | CZ | TYR | A | 18 | 0.877 | 8.508 | 11.317 |
| ATOM | 651 | OH | TYR | A | 18 | 0.134 | 7.922 | 12.318 |
| ATOM | 652 | N | LEU | A | 19 | 5.439 | 8.651 | 8.650 |
| ATOM | 653 | CA | LEU | A | 19 | 6.255 | 7.661 | 9.347 |
| ATOM | 654 | C | LEU | A | 19 | 6.210 | 7.946 | 10.847 |
| ATOM | 655 | O | LEU | A | 19 | 6.685 | 8.992 | 11.288 |
| ATOM | 656 | CB | LEU | A | 19 | 7.701 | 7.763 | 8.871 |
| ATOM | 657 | CG | LEU | A | 19 | 7.901 | 7.850 | 7.359 |
| ATOM | 658 | CD1 | LEU | A | 19 | 9.300 | 8.379 | 7.039 |
| ATOM | 659 | CD2 | LEU | A | 19 | 7.669 | 6.482 | 6.748 |
| ATOM | 660 | N | ASP | A | 20 | 5.652 | 7.035 | 11.639 |
| ATOM | 661 | CA | ASP | A | 20 | 5.594 | 7.282 | 13.071 |
| ATOM | 662 | C | ASP | A | 20 | 7.001 | 7.289 | 13.662 |
| ATOM | 663 | O | ASP | A | 20 | 7.985 | 7.185 | 12.932 |
| ATOM | 664 | CB | ASP | A | 20 | 4.714 | 6.244 | 13.786 |
| ATOM | 665 | CG | ASP | A | 20 | 5.292 | 4.837 | 13.752 |
| ATOM | 666 | OD1 | ASP | A | 20 | 6.533 | 4.678 | 13.775 |
| ATOM | 667 | OD2 | ASP | A | 20 | 4.491 | 3.882 | 13.732 |
| ATOM | 668 | N | GLU | A | 21 | 7.089 | 7.413 | 14.981 |
| ATOM | 669 | CA | GLU | A | 21 | 8.375 | 7.451 | 15.669 |
| ATOM | 670 | C | GLU | A | 21 | 9.250 | 6.212 | 15.463 |
| ATOM | 671 | O | GLU | A | 21 | 10.459 | 6.246 | 15.738 |
| ATOM | 672 | CB | GLU | A | 21 | 8.164 | 7.699 | 17.171 |
| ATOM | 673 | CG | GLU | A | 21 | 7.220 | 6.731 | 17.868 |
| ATOM | 674 | CD | GLU | A | 21 | 5.828 | 6.726 | 17.257 |
| ATOM | 675 | OE1 | GLU | A | 21 | 5.347 | 7.810 | 16.856 |
| ATOM | 676 | OE2 | GLU | A | 21 | 5.210 | 5.640 | 17.185 |
| ATOM | 677 | N | ASN | A | 22 | 8.646 | 5.133 | 14.966 |
| ATOM | 678 | CA | ASN | A | 22 | 9.377 | 3.889 | 14.727 |
| ATOM | 679 | C | ASN | A | 22 | 9.682 | 3.647 | 13.249 |
| ATOM | 680 | O | ASN | A | 22 | 10.095 | 2.554 | 12.853 |
| ATOM | 681 | CB | ASN | A | 22 | 8.591 | 2.707 | 15.299 |
| ATOM | 682 | CG | ASN | A | 22 | 8.384 | 2.827 | 16.794 |
| ATOM | 683 | OD1 | ASN | A | 22 | 9.349 | 2.930 | 17.560 |
| ATOM | 684 | ND2 | ASN | A | 22 | 7.125 | 2.819 | 17.221 |
| ATOM | 685 | N | GLU | A | 23 | 9.485 | 4.672 | 12.435 |
| ATOM | 686 | CA | GLU | A | 23 | 9.749 | 4.558 | 11.015 |
| ATOM | 687 | C | GLU | A | 23 | 8.790 | 3.603 | 10.299 |
| ATOM | 688 | O | GLU | A | 23 | 9.145 | 2.996 | 9.292 |
| ATOM | 689 | CB | GLU | A | 23 | 11.203 | 4.129 | 10.784 |
| ATOM | 690 | CG | GLU | A | 23 | 12.232 | 5.210 | 11.082 |
| ATOM | 691 | CD | GLU | A | 23 | 12.072 | 6.410 | 10.166 |
| ATOM | 692 | OE1 | GLU | A | 23 | 12.108 | 6.218 | 8.928 |
| ATOM | 693 | OE2 | GLU | A | 23 | 11.907 | 7.541 | 10.677 |
| ATOM | 694 | N | LYS | A | 24 | 7.580 | 3.459 | 10.826 |
| ATOM | 695 | CA | LYS | A | 24 | 6.583 | 2.624 | 10.175 |
| ATOM | 696 | C | LYS | A | 24 | 5.815 | 3.540 | 9.228 |
| ATOM | 697 | O | LYS | A | 24 | 5.553 | 4.692 | 9.552 |
| ATOM | 698 | CB | LYS | A | 24 | 5.602 | 2.039 | 11.182 |
| ATOM | 699 | CG | LYS | A | 24 | 6.163 | 0.963 | 12.058 |
| ATOM | 700 | CD | LYS | A | 24 | 5.068 | 0.387 | 12.947 |
| ATOM | 701 | CE | LYS | A | 24 | 5.648 | −0.511 | 14.031 |
| ATOM | 702 | NZ | LYS | A | 24 | 4.577 | −1.091 | 14.886 |
| ATOM | 703 | N | VAL | A | 25 | 5.455 | 3.037 | 8.057 |
| ATOM | 704 | CA | VAL | A | 25 | 4.713 | 3.849 | 7.116 |
| ATOM | 705 | C | VAL | A | 25 | 3.237 | 3.737 | 7.444 |
| ATOM | 706 | O | VAL | A | 25 | 2.657 | 2.659 | 7.383 |
| ATOM | 707 | CB | VAL | A | 25 | 4.969 | 3.396 | 5.681 |
| ATOM | 708 | CG1 | VAL | A | 25 | 4.250 | 4.317 | 4.708 |
| ATOM | 709 | CG2 | VAL | A | 25 | 6.462 | 3.393 | 5.422 |
| ATOM | 710 | N | VAL | A | 25 | 2.637 | 4.864 | 7.800 |
| ATOM | 711 | CA | VAL | A | 25 | 1.231 | 4.916 | 8.170 |
| ATOM | 712 | C | VAL | A | 25 | 0.418 | 5.778 | 7.213 |
| ATOM | 713 | O | VAL | A | 25 | 0.871 | 6.841 | 6.774 |
| ATOM | 714 | CB | VAL | A | 25 | 1.062 | 5.531 | 9.577 |
| ATOM | 715 | CG1 | VAL | A | 25 | −0.341 | 5.253 | 10.115 |
| ATOM | 716 | CG2 | VAL | A | 25 | 2.128 | 5.006 | 10.506 |
| ATOM | 717 | N | LEU | A | 26 | −0.779 | 5.306 | 6.887 |
| ATOM | 718 | CA | LEU | A | 26 | −1.706 | 6.048 | 6.040 |
| ATOM | 719 | C | LEU | A | 26 | −2.862 | 6.358 | 6.992 |
| ATOM | 720 | O | LEU | A | 26 | −3.679 | 5.497 | 7.297 |
| ATOM | 721 | CB | LEU | A | 26 | −2.201 | 5.189 | 4.876 |
| ATOM | 722 | CG | LEU | A | 26 | −3.204 | 5.898 | 3.952 |
| ATOM | 723 | CD1 | LEU | A | 26 | −2.519 | 7.077 | 3.262 |
| ATOM | 724 | CD2 | LEU | A | 26 | −3.755 | 4.925 | 2.929 |
| ATOM | 725 | N | LYS | A | 27 | −2.910 | 7.584 | 7.489 |
| ATOM | 726 | CA | LYS | A | 27 | −3.952 | 7.965 | 8.430 |
| ATOM | 727 | C | LYS | A | 27 | −4.831 | 9.082 | 7.881 |
| ATOM | 728 | O | LYS | A | 27 | −4.374 | 9.924 | 7.103 |
| ATOM | 729 | CB | LYS | A | 27 | −3.305 | 8.409 | 9.738 |
| ATOM | 730 | CG | LYS | A | 27 | −4.265 | 8.720 | 10.859 |
| ATOM | 731 | CD | LYS | A | 27 | −3.509 | 9.382 | 11.994 |
| ATOM | 732 | CE | LYS | A | 27 | −4.397 | 9.654 | 13.186 |
| ATOM | 733 | NZ | LYS | A | 27 | −4.839 | 8.377 | 13.816 |
| ATOM | 734 | N | ASN | A | 28 | −6.098 | 9.078 | 8.279 |
| ATOM | 735 | CA | ASN | A | 28 | −7.045 | 10.095 | 7.843 |
| ATOM | 736 | C | ASN | A | 28 | −7.147 | 11.103 | 8.979 |
| ATOM | 737 | O | ASN | A | 28 | −7.815 | 10.842 | 9.969 |
| ATOM | 738 | CB | ASN | A | 28 | −8.408 | 9.455 | 7.560 |
| ATOM | 739 | CG | ASN | A | 28 | −9.518 | 10.485 | 7.364 |
| ATOM | 740 | OD1 | ASN | A | 28 | −9.360 | 11.444 | 6.597 |
| ATOM | 741 | ND2 | ASN | A | 28 | −10.653 | 10.288 | 8.050 |
| ATOM | 742 | N | TYR | A | 29 | −6.473 | 12.241 | 8.837 |
| ATOM | 743 | CA | TYR | A | 29 | −6.470 | 13.278 | 9.869 |
| ATOM | 744 | C | TYR | A | 29 | −7.680 | 14.204 | 9.836 |
| ATOM | 745 | O | TYR | A | 29 | −7.928 | 14.870 | 8.835 |
| ATOM | 746 | CB | TYR | A | 29 | −5.197 | 14.130 | 9.768 |
| ATOM | 747 | CG | TYR | A | 29 | −3.913 | 13.420 | 10.155 |
| ATOM | 748 | CD1 | TYR | A | 29 | −3.378 | 12.394 | 9.363 |
| ATOM | 749 | CD2 | TYR | A | 29 | −3.220 | 13.792 | 11.306 |
| ATOM | 750 | CE1 | TYR | A | 29 | −2.181 | 11.765 | 9.713 |
| ATOM | 751 | CE2 | TYR | A | 29 | −2.032 | 13.171 | 11.665 |
| ATOM | 752 | CZ | TYR | A | 29 | −1.516 | 12.167 | 10.869 |
| ATOM | 753 | OH | TYR | A | 29 | −0.319 | 11.603 | 11.231 |
| ATOM | 754 | N | GLN | A | 30 | −8.408 | 14.254 | 10.950 |
| ATOM | 755 | CA | GLN | A | 30 | −9.606 | 15.088 | 11.089 |
| ATOM | 756 | C | GLN | A | 30 | −9.287 | 16.541 | 11.431 |
| ATOM | 757 | O | GLN | A | 30 | −8.213 | 16.847 | 11.925 |
| ATOM | 758 | CB | GLN | A | 30 | −10.500 | 14.541 | 12.202 |
| ATOM | 759 | CG | GLN | A | 30 | −10.807 | 13.074 | 12.104 |
| ATOM | 760 | CD | GLN | A | 30 | −11.744 | 12.749 | 10.969 |
| ATOM | 761 | OE1 | GLN | A | 30 | −11.900 | 11.582 | 10.602 |
| ATOM | 762 | NE2 | GLN | A | 30 | −12.385 | 13.773 | 10.405 |
| ATOM | 763 | N | ASP | A | 31 | −10.238 | 17.430 | 11.173 |
| ATOM | 764 | CA | ASP | A | 31 | −10.085 | 18.851 | 11.495 |
| ATOM | 765 | C | ASP | A | 31 | −8.867 | 19.494 | 10.842 |
| ATOM | 766 | O | ASP | A | 31 | −8.195 | 20.335 | 11.442 |
| ATOM | 767 | CB | ASP | A | 31 | −10.000 | 19.025 | 13.019 |
| ATOM | 768 | CG | ASP | A | 31 | −11.247 | 18.520 | 13.742 |
| ATOM | 769 | OD1 | ASP | A | 31 | −12.349 | 18.587 | 13.155 |
| ATOM | 770 | OD2 | ASP | A | 31 | −11.130 | 18.069 | 14.908 |
| ATOM | 771 | N | MET | A | 32 | −8.582 | 19.113 | 9.606 |
| ATOM | 772 | CA | MET | A | 32 | −7.426 | 19.662 | 8.918 |
| ATOM | 773 | C | MET | A | 32 | −7.780 | 20.808 | 7.987 |
| ATOM | 774 | O | MET | A | 32 | −7.021 | 21.768 | 7.855 |
| ATOM | 775 | CB | MET | A | 32 | −6.741 | 18.559 | 8.125 |
| ATOM | 776 | CG | MET | A | 32 | −6.037 | 17.540 | 8.980 |
| ATOM | 777 | SD | MET | A | 32 | −4.559 | 18.231 | 9.714 |
| ATOM | 778 | CE | MET | A | 32 | −3.406 | 18.041 | 8.318 |
| ATOM | 779 | N | VAL | A | 33 | −8.942 | 20.707 | 7.351 |
| ATOM | 780 | CA | VAL | A | 33 | −9.381 | 21.719 | 6.401 |
| ATOM | 781 | C | VAL | A | 33 | −10.579 | 22.536 | 6.858 |
| ATOM | 782 | O | VAL | A | 33 | −11.586 | 21.988 | 7.292 |
| ATOM | 783 | CB | VAL | A | 33 | −9.701 | 21.056 | 5.027 |
| ATOM | 784 | CG1 | VAL | A | 33 | −10.388 | 22.040 | 4.087 |
| ATOM | 785 | CG2 | VAL | A | 33 | −8.423 | 20.561 | 4.412 |
| ATOM | 786 | N | VAL | A | 34 | −10.465 | 23.855 | 6.739 |
| ATOM | 787 | CA | VAL | A | 34 | −11.553 | 24.745 | 7.113 |
| ATOM | 788 | C | VAL | A | 34 | −12.610 | 24.835 | 6.016 |
| ATOM | 789 | O | VAL | A | 34 | −12.373 | 25.403 | 4.950 |
| ATOM | 790 | CB | VAL | A | 34 | −11.057 | 26.176 | 7.407 |
| ATOM | 791 | CG1 | VAL | A | 34 | −12.240 | 27.097 | 7.601 |
| ATOM | 792 | CG2 | VAL | A | 34 | −10.222 | 26.186 | 8.655 |
| ATOM | 793 | N | GLU | A | 35 | −13.779 | 24.266 | 6.282 |
| ATOM | 794 | CA | GLU | A | 35 | −14.870 | 24.311 | 5.321 |
| ATOM | 795 | C | GLU | A | 35 | −15.702 | 25.565 | 5.572 |
| ATOM | 796 | O | GLU | A | 35 | −16.011 | 26.303 | 4.645 |
| ATOM | 797 | CB | GLU | A | 35 | −15.733 | 23.054 | 5.447 |
| ATOM | 798 | CG | GLU | A | 35 | −14.969 | 21.782 | 5.128 |
| ATOM | 799 | CD | GLU | A | 35 | −14.515 | 21.732 | 3.676 |
| ATOM | 800 | OE1 | GLU | A | 35 | −15.036 | 22.519 | 2.858 |
| ATOM | 801 | OE2 | GLU | A | 35 | −13.643 | 20.902 | 3.344 |
| ATOM | 802 | N | GLY | A | 36 | −16.053 | 25.811 | 6.829 |
| ATOM | 803 | CA | GLY | A | 36 | −16.834 | 26.990 | 7.152 |
| ATOM | 804 | C | GLY | A | 36 | −16.322 | 27.785 | 8.341 |
| ATOM | 805 | O | GLY | A | 36 | −15.671 | 27.249 | 9.237 |
| ATOM | 806 | N | CYS | A | 37 | −16.616 | 29.077 | 8.360 |
| ATOM | 807 | CA | CYS | A | 37 | −16.177 | 29.917 | 9.466 |
| ATOM | 808 | C | CYS | A | 37 | −17.347 | 30.502 | 10.249 |
| ATOM | 809 | O | CYS | A | 37 | −18.467 | 30.628 | 9.741 |
| ATOM | 810 | CB | CYS | A | 37 | −15.301 | 31.058 | 8.967 |
| ATOM | 811 | SG | CYS | A | 37 | −13.785 | 30.558 | 8.098 |
| ATOM | 812 | N | GLY | A | 38 | −17.079 | 30.867 | 11.494 |
| ATOM | 813 | CA | GLY | A | 38 | −18.129 | 31.430 | 12.309 |
| ATOM | 814 | C | GLY | A | 38 | −17.622 | 32.176 | 13.518 |
| ATOM | 815 | O | GLY | A | 38 | −16.425 | 32.235 | 13.791 |
| ATOM | 816 | N | CYS | A | 39 | −18.564 | 32.753 | 14.245 |
| ATOM | 817 | CA | CYS | A | 39 | −18.253 | 33.505 | 15.439 |
| ATOM | 818 | C | CYS | A | 39 | −18.543 | 32.670 | 16.665 |
| ATOM | 819 | O | CYS | A | 39 | −19.620 | 32.084 | 16.794 |
| ATOM | 820 | CB | CYS | A | 39 | −19.068 | 34.779 | 15.442 |
| ATOM | 821 | SG | CYS | A | 39 | −18.539 | 35.799 | 14.053 |

162. The method according to claim 158, wherein the RMSD value of the structure coordinates of said peptide or peptidomimetic with respect to PEPREF is 2.45 Å (Angstroms) or less, and wherein PEPREF is

| | | | | | | | | |
|---|---|---|---|---|---|---|---|---|
| ATOM | 511 | N | LYS | A | 1 | −14.570 | 46.437 | 27.424 |
| ATOM | 512 | CA | LYS | A | 1 | −13.512 | 45.748 | 28.151 |
| ATOM | 513 | C | LYS | A | 1 | −13.655 | 44.259 | 27.884 |
| ATOM | 514 | O | LYS | A | 1 | −12.769 | 43.463 | 28.197 |
| ATOM | 515 | CB | LYS | A | 1 | −13.605 | 46.029 | 29.652 |
| ATOM | 516 | CG | LYS | A | 1 | −13.640 | 47.509 | 29.991 |
| ATOM | 517 | CD | LYS | A | 1 | −12.615 | 48.297 | 29.183 |
| ATOM | 518 | CE | LYS | A | 1 | −12.625 | 49.768 | 29.575 |
| ATOM | 519 | NZ | LYS | A | 1 | −13.994 | 50.369 | 29.497 |
| ATOM | 520 | N | ILE | A | 2 | −14.792 | 43.890 | 27.309 |
| ATOM | 521 | CA | ILE | A | 2 | −15.051 | 42.499 | 26.967 |
| ATOM | 522 | C | ILE | A | 2 | −14.911 | 42.370 | 25.444 |
| ATOM | 523 | O | ILE | A | 2 | −15.531 | 43.125 | 24.683 |
| ATOM | 524 | CB | ILE | A | 2 | −16.466 | 42.065 | 27.401 |
| ATOM | 525 | CG1 | ILE | A | 2 | −16.630 | 42.238 | 28.915 |
| ATOM | 526 | CG2 | ILE | A | 2 | −16.710 | 40.629 | 26.985 |
| ATOM | 527 | CD1 | ILE | A | 2 | −15.631 | 41.478 | 29.30 |
| ATOM | 528 | N | PRO | A | 3 | −14.085 | 41.411 | 24.989 |
| ATOM | 529 | CA | PRO | A | 3 | −13.789 | 41.109 | 23.588 |
| ATOM | 530 | C | PRO | A | 3 | −14.998 | 40.695 | 22.768 |
| ATOM | 531 | O | PRO | A | 3 | −15.969 | 40.164 | 23.305 |
| ATOM | 532 | CB | PRO | A | 3 | −12.785 | 39.968 | 23.688 |
| ATOM | 533 | CG | PRO | A | 3 | −12.156 | 40.166 | 25.007 |
| ATOM | 534 | CD | PRO | A | 3 | −13.330 | 40.506 | 25.867 |
| ATOM | 535 | N | LYS | A | 4 | −14.937 | 40.937 | 21.463 |
| ATOM | 536 | CA | LYS | A | 4 | −16.023 | 40.529 | 20.590 |
| ATOM | 537 | C | LYS | A | 4 | −15.886 | 39.015 | 20.391 |
| ATOM | 538 | O | LYS | A | 4 | −14.903 | 38.415 | 20.831 |
| ATOM | 539 | CB | LYS | A | 4 | −15.926 | 41.244 | 19.245 |
| ATOM | 540 | CG | LYS | A | 4 | −15.802 | 42.751 | 19.355 |
| ATOM | 541 | CD | LYS | A | 4 | −16.292 | 43.433 | 18.083 |
| ATOM | 542 | CE | LYS | A | 4 | −16.162 | 44.943 | 18.177 |
| ATOM | 543 | NZ | LYS | A | 4 | −16.825 | 45.628 | 17.019 |
| ATOM | 544 | N | ALA | A | 5 | −16.85 | 38.393 | 19.759 |
| ATOM | 545 | CA | ALA | A | 5 | −16.811 | 36.955 | 19.507 |
| ATOM | 546 | C | ALA | A | 5 | −15.772 | 36.771 | 18.416 |
| ATOM | 547 | O | ALA | A | 5 | −15.727 | 37.534 | 17.455 |
| ATOM | 548 | CB | ALA | A | 5 | −18.168 | 36.419 | 19.043 |
| ATOM | 549 | N | CYS | A | 6 | −14.935 | 35.756 | 18.562 |
| ATOM | 550 | CA | CYS | A | 6 | −13.887 | 35.518 | 17.584 |
| ATOM | 551 | C | CYS | A | 6 | −14.347 | 34.765 | 16.338 |
| ATOM | 552 | O | CYS | A | 6 | −15.327 | 34.018 | 16.368 |
| ATOM | 553 | CB | CYS | A | 6 | −12.743 | 34.768 | 18.241 |
| ATOM | 554 | SG | CYS | A | 6 | −11.198 | 34.959 | 17.353 |
| ATOM | 555 | N | CYS | A | 7 | −13.623 | 34.973 | 15.243 |
| ATOM | 556 | CA | CYS | A | 7 | −13.931 | 34.328 | 13.969 |
| ATOM | 557 | C | CYS | A | 7 | −13.091 | 33.071 | 13.798 |
| ATOM | 558 | O | CYS | A | 7 | −11.961 | 33.123 | 13.302 |
| ATOM | 559 | CB | CYS | A | 7 | −13.653 | 35.290 | 12.824 |
| ATOM | 560 | SG | CYS | A | 7 | −13.930 | 34.633 | 11.154 |
| ATOM | 561 | N | VAL | A | 8 | −13.654 | 31.941 | 14.209 |
| ATOM | 562 | CA | VAL | A | 8 | −12.949 | 30.684 | 14.110 |
| ATOM | 563 | C | VAL | A | 8 | −13.653 | 29.733 | 13.157 |
| ATOM | 564 | O | VAL | A | 8 | −14.759 | 30.016 | 12.687 |
| ATOM | 565 | CB | VAL | A | 8 | −12.814 | 30.038 | 15.492 |
| ATOM | 566 | CG1 | VAL | A | 8 | −11.807 | 30.825 | 16.337 |
| ATOM | 567 | CG2 | VAL | A | 8 | −14.161 | 30.006 | 16.170 |
| ATOM | 568 | N | PRO | A | 9 | −13.003 | 28.601 | 12.828 |
| ATOM | 569 | CA | PRO | A | 9 | −13.593 | 27.615 | 11.918 |
| ATOM | 570 | C | PRO | A | 9 | −14.726 | 26.886 | 12.631 |
| ATOM | 571 | O | PRO | A | 9 | −14.581 | 26.476 | 13.780 |
| ATOM | 572 | CB | PRO | A | 9 | −12.423 | 26.676 | 11.601 |
| ATOM | 573 | CG | PRO | A | 9 | −11.204 | 27.487 | 11.925 |
| ATOM | 574 | CD | PRO | A | 9 | −11.620 | 28.226 | 13.163 |
| ATOM | 575 | N | THR | A | 10 | −15.847 | 26.721 | 11.942 |
| ATOM | 576 | CA | THR | A | 10 | −16.999 | 26.060 | 12.527 |
| ATOM | 577 | C | THR | A | 10 | −17.334 | 24.767 | 11.804 |
| ATOM | 578 | O | THR | A | 10 | −18.097 | 23.943 | 12.303 |
| ATOM | 579 | CB | THR | A | 10 | −18.211 | 27.010 | 12.523 |
| ATOM | 580 | OG1 | THR | A | 10 | −18.491 | 27.445 | 11.185 |
| ATOM | 581 | CG2 | THR | A | 10 | −17.902 | 28.230 | 13.375 |
| ATOM | 582 | N | GLU | A | 11 | −16.750 | 24.586 | 10.627 |
| ATOM | 583 | CA | GLU | A | 11 | −16.980 | 23.377 | 9.848 |
| ATOM | 584 | C | GLU | A | 11 | −15.643 | 22.935 | 9.246 |
| ATOM | 585 | O | GLU | A | 11 | −15.029 | 23.666 | 8.464 |
| ATOM | 586 | CB | GLU | A | 11 | −17.981 | 23.624 | 8.715 |
| ATOM | 587 | CG | GLU | A | 11 | −19.421 | 23.807 | 9.163 |
| ATOM | 588 | CD | GLU | A | 11 | −19.686 | 25.166 | 9.770 |
| ATOM | 589 | OE1 | GLU | A | 11 | −19.478 | 26.175 | 9.073 |
| ATOM | 590 | OE2 | GLU | A | 11 | −20.111 | 25.227 | 10.939 |
| ATOM | 591 | N | LEU | A | 12 | −15.183 | 21.749 | 9.622 |
| ATOM | 592 | CA | LEU | A | 12 | −13.923 | 21.254 | 9.104 |
| ATOM | 593 | C | LEU | A | 12 | −14.062 | 19.912 | 8.386 |
| ATOM | 594 | O | LEU | A | 12 | −15.136 | 19.299 | 8.359 |
| ATOM | 595 | CB | LEU | A | 12 | −12.893 | 21.144 | 10.230 |
| ATOM | 596 | CG | LEU | A | 12 | −12.660 | 22.422 | 11.054 |
| ATOM | 597 | CD1 | LEU | A | 12 | −13.475 | 22.350 | 12.337 |
| ATOM | 598 | CD2 | LEU | A | 12 | −11.181 | 22.586 | 11.399 |
| ATOM | 599 | N | SER | A | 13 | −12.971 | 19.476 | 7.771 |
| ATOM | 600 | CA | SER | A | 13 | −12.964 | 18.218 | 7.046 |
| ATOM | 601 | C | SER | A | 13 | −11.568 | 17.628 | 7.164 |
| ATOM | 602 | O | SER | A | 13 | −10.613 | 18.320 | 7.550 |
| ATOM | 603 | CB | SER | A | 13 | −13.346 | 18.435 | 5.578 |
| ATOM | 604 | OG | SER | A | 13 | −12.404 | 19.261 | 4.923 |
| ATOM | 605 | N | ALA | A | 13 | −11.449 | 16.352 | 6.818 |
| ATOM | 606 | CA | ALA | A | 13 | −10.179 | 15.665 | 6.949 |
| ATOM | 607 | C | ALA | A | 13 | −9.421 | 15.471 | 5.652 |
| ATOM | 608 | O | ALA | A | 13 | −9.941 | 15.720 | 4.563 |
| ATOM | 609 | CB | ALA | A | 13 | −10.413 | 14.306 | 7.626 |
| ATOM | 610 | N | ILE | A | 14 | −8.171 | 15.046 | 5.783 |
| ATOM | 611 | CA | ILE | A | 14 | −7.343 | 14.746 | 4.623 |
| ATOM | 612 | C | ILE | A | 14 | −6.475 | 13.559 | 5.004 |
| ATOM | 613 | O | ILE | A | 14 | −6.212 | 13.316 | 6.183 |
| ATOM | 614 | CB | ILE | A | 14 | −6.401 | 15.916 | 4.183 |
| ATOM | 615 | CG1 | ILE | A | 14 | −5.284 | 16.106 | 5.200 |
| ATOM | 616 | CG2 | ILE | A | 14 | −7.188 | 17.211 | 3.982 |
| ATOM | 617 | CD1 | ILE | A | 14 | −4.173 | 16.973 | 4.696 |
| ATOM | 618 | N | SER | A | 15 | −6.045 | 12.806 | 3.999 |
| ATOM | 619 | CA | SER | A | 15 | −5.187 | 11.662 | 4.242 |
| ATOM | 620 | C | SER | A | 15 | −3.740 | 12.089 | 4.217 |
| ATOM | 621 | O | SER | A | 15 | −3.360 | 13.020 | 3.508 |
| ATOM | 622 | CB | SER | A | 15 | −5.416 | 10.584 | 3.185 |
| ATOM | 623 | OG | SER | A | 15 | −6.667 | 9.971 | 3.401 |
| ATOM | 624 | N | MET | A | 16 | −2.933 | 11.409 | 5.012 |
| ATOM | 625 | CA | MET | A | 16 | −1.518 | 11.700 | 5.047 |
| ATOM | 626 | C | MET | A | 16 | −0.778 | 10.414 | 5.244 |
| ATOM | 627 | O | MET | A | 16 | −1.137 | 9.594 | 6.078 |
| ATOM | 628 | CB | MET | A | 16 | −1.170 | 12.694 | 6.164 |
| ATOM | 629 | CG | MET | A | 16 | −1.848 | 14.042 | 5.974 |
| ATOM | 630 | SD | MET | A | 16 | −1.017 | 15.431 | 6.760 |
| ATOM | 631 | CE | MET | A | 16 | −0.799 | 14.823 | 8.475 |
| ATOM | 632 | N | LEU | A | 17 | 0.238 | 10.231 | 4.426 |
| ATOM | 633 | CA | LEU | A | 17 | 1.077 | 9.065 | 4.508 |
| ATOM | 634 | C | LEU | A | 17 | 2.289 | 9.610 | 5.264 |
| ATOM | 635 | O | LEU | A | 17 | 2.939 | 10.565 | 4.818 |
| ATOM | 636 | CB | LEU | A | 17 | 1.461 | 8.608 | 3.100 |
| ATOM | 637 | CG | LEU | A | 17 | 2.324 | 7.355 | 2.955 |
| ATOM | 638 | CD1 | LEU | A | 17 | 1.553 | 6.145 | 3.445 |
| ATOM | 639 | CD2 | LEU | A | 17 | 2.723 | 7.190 | 1.492 |
| ATOM | 640 | N | TYR | A | 18 | 2.581 | 9.029 | 6.418 |
| ATOM | 641 | CA | TYR | A | 18 | 3.706 | 9.501 | 7.196 |
| ATOM | 642 | C | TYR | A | 18 | 4.434 | 8.333 | 7.835 |
| ATOM | 643 | O | TYR | A | 18 | 4.081 | 7.186 | 7.603 |
| ATOM | 644 | CB | TYR | A | 18 | 3.222 | 10.458 | 8.281 |
| ATOM | 645 | CG | TYR | A | 18 | 2.386 | 9.782 | 9.346 |
| ATOM | 646 | CD1 | TYR | A | 18 | 1.029 | 9.527 | 9.147 |
| ATOM | 647 | CD2 | TYR | A | 18 | 2.961 | 9.379 | 10.550 |
| ATOM | 648 | CE1 | TYR | A | 18 | 0.273 | 8.894 | 10.128 |
| ATOM | 649 | CE2 | TYR | A | 18 | 2.218 | 8.745 | 11.526 |
| ATOM | 650 | CZ | TYR | A | 18 | 0.877 | 8.508 | 11.317 |
| ATOM | 651 | OH | TYR | A | 18 | 0.134 | 7.922 | 12.318 |
| ATOM | 652 | N | LEU | A | 19 | 5.439 | 8.651 | 8.650 |
| ATOM | 653 | CA | LEU | A | 19 | 6.255 | 7.661 | 9.347 |
| ATOM | 654 | C | LEU | A | 19 | 6.210 | 7.946 | 10.847 |
| ATOM | 655 | O | LEU | A | 19 | 6.685 | 8.992 | 11.288 |
| ATOM | 656 | CB | LEU | A | 19 | 7.701 | 7.763 | 8.871 |
| ATOM | 657 | CG | LEU | A | 19 | 7.901 | 7.850 | 7.359 |
| ATOM | 658 | CD1 | LEU | A | 19 | 9.300 | 8.379 | 7.039 |
| ATOM | 659 | CD2 | LEU | A | 19 | 7.669 | 6.482 | 6.748 |
| ATOM | 660 | N | ASP | A | 20 | 5.652 | 7.035 | 11.639 |
| ATOM | 661 | CA | ASP | A | 20 | 5.594 | 7.282 | 13.071 |
| ATOM | 662 | C | ASP | A | 20 | 7.001 | 7.289 | 13.662 |
| ATOM | 663 | O | ASP | A | 20 | 7.985 | 7.185 | 12.932 |
| ATOM | 664 | CB | ASP | A | 20 | 4.714 | 6.244 | 13.786 |
| ATOM | 665 | CG | ASP | A | 20 | 5.292 | 4.837 | 13.752 |
| ATOM | 666 | OD1 | ASP | A | 20 | 6.533 | 4.678 | 13.775 |
| ATOM | 667 | OD2 | ASP | A | 20 | 4.491 | 3.882 | 13.732 |
| ATOM | 668 | N | GLU | A | 21 | 7.089 | 7.413 | 14.981 |
| ATOM | 669 | CA | GLU | A | 21 | 8.375 | 7.451 | 15.669 |
| ATOM | 670 | C | GLU | A | 21 | 9.250 | 6.212 | 15.463 |
| ATOM | 671 | O | GLU | A | 21 | 10.459 | 6.246 | 15.738 |
| ATOM | 672 | CB | GLU | A | 21 | 8.164 | 7.699 | 17.171 |
| ATOM | 673 | CG | GLU | A | 21 | 7.220 | 6.731 | 17.868 |
| ATOM | 674 | CD | GLU | A | 21 | 5.828 | 6.726 | 17.257 |
| ATOM | 675 | OE1 | GLU | A | 21 | 5.347 | 7.810 | 16.856 |
| ATOM | 676 | OE2 | GLU | A | 21 | 5.210 | 5.640 | 17.185 |
| ATOM | 677 | N | ASN | A | 22 | 8.646 | 5.133 | 14.966 |
| ATOM | 678 | CA | ASN | A | 22 | 9.377 | 3.889 | 14.727 |
| ATOM | 679 | C | ASN | A | 22 | 9.682 | 3.647 | 13.249 |
| ATOM | 680 | O | ASN | A | 22 | 10.095 | 2.554 | 12.853 |
| ATOM | 681 | CB | ASN | A | 22 | 8.591 | 2.707 | 15.299 |
| ATOM | 682 | CG | ASN | A | 22 | 8.384 | 2.827 | 16.794 |
| ATOM | 683 | OD1 | ASN | A | 22 | 9.349 | 2.930 | 17.560 |
| ATOM | 684 | ND2 | ASN | A | 22 | 7.125 | 2.819 | 17.221 |
| ATOM | 685 | N | GLU | A | 23 | 9.485 | 4.672 | 12.435 |
| ATOM | 686 | CA | GLU | A | 23 | 9.749 | 4.558 | 11.015 |
| ATOM | 687 | C | GLU | A | 23 | 8.790 | 3.603 | 10.299 |
| ATOM | 688 | O | GLU | A | 23 | 9.145 | 2.996 | 9.292 |
| ATOM | 689 | CB | GLU | A | 23 | 11.203 | 4.129 | 10.784 |
| ATOM | 690 | CG | GLU | A | 23 | 12.232 | 5.210 | 11.082 |
| ATOM | 691 | CD | GLU | A | 23 | 12.072 | 6.410 | 10.166 |
| ATOM | 692 | OE1 | GLU | A | 23 | 12.108 | 6.218 | 8.928 |
| ATOM | 693 | OE2 | GLU | A | 23 | 11.907 | 7.541 | 10.677 |
| ATOM | 694 | N | LYS | A | 24 | 7.580 | 3.459 | 10.826 |
| ATOM | 695 | CA | LYS | A | 24 | 6.583 | 2.624 | 10.175 |
| ATOM | 696 | C | LYS | A | 24 | 5.815 | 3.540 | 9.228 |
| ATOM | 697 | O | LYS | A | 24 | 5.553 | 4.692 | 9.552 |
| ATOM | 698 | CB | LYS | A | 24 | 5.602 | 2.039 | 11.182 |
| ATOM | 699 | CG | LYS | A | 24 | 6.163 | 0.963 | 12.058 |
| ATOM | 700 | CD | LYS | A | 24 | 5.068 | 0.387 | 12.947 |
| ATOM | 701 | CE | LYS | A | 24 | 5.648 | −0.511 | 14.031 |
| ATOM | 702 | NZ | LYS | A | 24 | 4.577 | −1.091 | 14.886 |
| ATOM | 703 | N | VAL | A | 25 | 5.455 | 3.037 | 8.057 |
| ATOM | 704 | CA | VAL | A | 25 | 4.713 | 3.849 | 7.116 |
| ATOM | 705 | C | VAL | A | 25 | 3.237 | 3.737 | 7.444 |
| ATOM | 706 | O | VAL | A | 25 | 2.657 | 2.659 | 7.383 |
| ATOM | 707 | CB | VAL | A | 25 | 4.969 | 3.396 | 5.681 |
| ATOM | 708 | CG1 | VAL | A | 25 | 4.250 | 4.317 | 4.708 |
| ATOM | 709 | CG2 | VAL | A | 25 | 6.462 | 3.393 | 5.422 |
| ATOM | 710 | N | VAL | A | 25 | 2.637 | 4.864 | 7.800 |
| ATOM | 711 | CA | VAL | A | 25 | 1.231 | 4.916 | 8.170 |
| ATOM | 712 | C | VAL | A | 25 | 0.418 | 5.778 | 7.213 |
| ATOM | 713 | O | VAL | A | 25 | 0.871 | 6.841 | 6.774 |
| ATOM | 714 | CB | VAL | A | 25 | 1.062 | 5.531 | 9.577 |
| ATOM | 715 | CG1 | VAL | A | 25 | −0.341 | 5.253 | 10.115 |
| ATOM | 716 | CG2 | VAL | A | 25 | 2.128 | 5.006 | 10.506 |
| ATOM | 717 | N | LEU | A | 26 | −0.779 | 5.306 | 6.887 |
| ATOM | 718 | CA | LEU | A | 26 | −1.706 | 6.048 | 6.040 |
| ATOM | 719 | C | LEU | A | 26 | −2.862 | 6.358 | 6.992 |
| ATOM | 720 | O | LEU | A | 26 | −3.679 | 5.497 | 7.297 |
| ATOM | 721 | CB | LEU | A | 26 | −2.201 | 5.189 | 4.876 |
| ATOM | 722 | CG | LEU | A | 26 | −3.204 | 5.898 | 3.952 |
| ATOM | 723 | CD1 | LEU | A | 26 | −2.519 | 7.077 | 3.262 |
| ATOM | 724 | CD2 | LEU | A | 26 | −3.755 | 4.925 | 2.929 |
| ATOM | 725 | N | LYS | A | 27 | −2.910 | 7.584 | 7.489 |
| ATOM | 726 | CA | LYS | A | 27 | −3.952 | 7.965 | 8.430 |
| ATOM | 727 | C | LYS | A | 27 | −4.831 | 9.082 | 7.881 |
| ATOM | 728 | O | LYS | A | 27 | −4.374 | 9.924 | 7.103 |
| ATOM | 729 | CB | LYS | A | 27 | −3.305 | 8.409 | 9.738 |
| ATOM | 730 | CG | LYS | A | 27 | −4.265 | 8.720 | 10.859 |
| ATOM | 731 | CD | LYS | A | 27 | −3.509 | 9.382 | 11.994 |
| ATOM | 732 | CE | LYS | A | 27 | −4.397 | 9.654 | 13.186 |
| ATOM | 733 | NZ | LYS | A | 27 | −4.839 | 8.377 | 13.816 |
| ATOM | 734 | N | ASN | A | 28 | −6.098 | 9.078 | 8.279 |
| ATOM | 735 | CA | ASN | A | 28 | −7.045 | 10.095 | 7.843 |
| ATOM | 736 | C | ASN | A | 28 | −7.147 | 11.103 | 8.979 |
| ATOM | 737 | O | ASN | A | 28 | −7.815 | 10.842 | 9.969 |
| ATOM | 738 | CB | ASN | A | 28 | −8.408 | 9.455 | 7.560 |
| ATOM | 739 | CG | ASN | A | 28 | −9.518 | 10.485 | 7.364 |
| ATOM | 740 | OD1 | ASN | A | 28 | −9.360 | 11.444 | 6.597 |
| ATOM | 741 | ND2 | ASN | A | 28 | −10.653 | 10.288 | 8.050 |
| ATOM | 742 | N | TYR | A | 29 | −6.473 | 12.241 | 8.837 |
| ATOM | 743 | CA | TYR | A | 29 | −6.470 | 13.278 | 9.869 |
| ATOM | 744 | C | TYR | A | 29 | −7.680 | 14.204 | 9.836 |
| ATOM | 745 | O | TYR | A | 29 | −7.928 | 14.870 | 8.835 |
| ATOM | 746 | CB | TYR | A | 29 | −5.197 | 14.130 | 9.768 |
| ATOM | 747 | CG | TYR | A | 29 | −3.913 | 13.420 | 10.155 |
| ATOM | 748 | CD1 | TYR | A | 29 | −3.378 | 12.394 | 9.363 |
| ATOM | 749 | CD2 | TYR | A | 29 | −3.220 | 13.792 | 11.306 |
| ATOM | 750 | CE1 | TYR | A | 29 | −2.181 | 11.765 | 9.713 |
| ATOM | 751 | CE2 | TYR | A | 29 | −2.032 | 13.171 | 11.665 |
| ATOM | 752 | CZ | TYR | A | 29 | −1.516 | 12.167 | 10.869 |
| ATOM | 753 | OH | TYR | A | 29 | −0.319 | 11.603 | 11.231 |
| ATOM | 754 | N | GLN | A | 30 | −8.408 | 14.254 | 10.950 |
| ATOM | 755 | CA | GLN | A | 30 | −9.606 | 15.088 | 11.089 |
| ATOM | 756 | C | GLN | A | 30 | −9.287 | 16.541 | 11.431 |
| ATOM | 757 | O | GLN | A | 30 | −8.213 | 16.847 | 11.925 |
| ATOM | 758 | CB | GLN | A | 30 | −10.500 | 14.541 | 12.202 |
| ATOM | 759 | CG | GLN | A | 30 | −10.807 | 13.074 | 12.104 |
| ATOM | 760 | CD | GLN | A | 30 | −11.744 | 12.749 | 10.969 |
| ATOM | 761 | OE1 | GLN | A | 30 | −11.900 | 11.582 | 10.602 |
| ATOM | 762 | NE2 | GLN | A | 30 | −12.385 | 13.773 | 10.405 |
| ATOM | 763 | N | ASP | A | 31 | −10.238 | 17.430 | 11.173 |
| ATOM | 764 | CA | ASP | A | 31 | −10.085 | 18.851 | 11.495 |
| ATOM | 765 | C | ASP | A | 31 | −8.867 | 19.494 | 10.842 |
| ATOM | 766 | O | ASP | A | 31 | −8.195 | 20.335 | 11.442 |
| ATOM | 767 | CB | ASP | A | 31 | −10.000 | 19.025 | 13.019 |
| ATOM | 768 | CG | ASP | A | 31 | −11.247 | 18.520 | 13.742 |
| ATOM | 769 | OD1 | ASP | A | 31 | −12.349 | 18.587 | 13.155 |
| ATOM | 770 | OD2 | ASP | A | 31 | −11.130 | 18.069 | 14.908 |
| ATOM | 771 | N | MET | A | 32 | −8.582 | 19.113 | 9.606 |
| ATOM | 772 | CA | MET | A | 32 | −7.426 | 19.662 | 8.918 |
| ATOM | 773 | C | MET | A | 32 | −7.780 | 20.808 | 7.987 |
| ATOM | 774 | O | MET | A | 32 | −7.021 | 21.768 | 7.855 |
| ATOM | 775 | CB | MET | A | 32 | −6.741 | 18.559 | 8.125 |
| ATOM | 776 | CG | MET | A | 32 | −6.037 | 17.540 | 8.980 |
| ATOM | 777 | SD | MET | A | 32 | −4.559 | 18.231 | 9.714 |
| ATOM | 778 | CE | MET | A | 32 | −3.406 | 18.041 | 8.318 |
| ATOM | 779 | N | VAL | A | 33 | −8.942 | 20.707 | 7.351 |
| ATOM | 780 | CA | VAL | A | 33 | −9.381 | 21.719 | 6.401 |
| ATOM | 781 | C | VAL | A | 33 | −10.579 | 22.536 | 6.858 |
| ATOM | 782 | O | VAL | A | 33 | −11.586 | 21.988 | 7.292 |
| ATOM | 783 | CB | VAL | A | 33 | −9.701 | 21.056 | 5.027 |
| ATOM | 784 | CG1 | VAL | A | 33 | −10.388 | 22.040 | 4.087 |
| ATOM | 785 | CG2 | VAL | A | 33 | −8.423 | 20.561 | 4.412 |
| ATOM | 786 | N | VAL | A | 34 | −10.465 | 23.855 | 6.739 |
| ATOM | 787 | CA | VAL | A | 34 | −11.553 | 24.745 | 7.113 |
| ATOM | 788 | C | VAL | A | 34 | −12.610 | 24.835 | 6.016 |
| ATOM | 789 | O | VAL | A | 34 | −12.373 | 25.403 | 4.950 |
| ATOM | 790 | CB | VAL | A | 34 | −11.057 | 26.176 | 7.407 |
| ATOM | 791 | CG1 | VAL | A | 34 | −12.240 | 27.097 | 7.601 |
| ATOM | 792 | CG2 | VAL | A | 34 | −10.222 | 26.186 | 8.655 |
| ATOM | 793 | N | GLU | A | 35 | −13.779 | 24.266 | 6.282 |
| ATOM | 794 | CA | GLU | A | 35 | −14.870 | 24.311 | 5.321 |
| ATOM | 795 | C | GLU | A | 35 | −15.702 | 25.565 | 5.572 |
| ATOM | 796 | O | GLU | A | 35 | −16.011 | 26.303 | 4.645 |
| ATOM | 797 | CB | GLU | A | 35 | −15.733 | 23.054 | 5.447 |
| ATOM | 798 | CG | GLU | A | 35 | −14.969 | 21.782 | 5.128 |
| ATOM | 799 | CD | GLU | A | 35 | −14.515 | 21.732 | 3.676 |
| ATOM | 800 | OE1 | GLU | A | 35 | −15.036 | 22.519 | 2.858 |
| ATOM | 801 | OE2 | GLU | A | 35 | −13.643 | 20.902 | 3.344 |
| ATOM | 802 | N | GLY | A | 36 | −16.053 | 25.811 | 6.829 |
| ATOM | 803 | CA | GLY | A | 36 | −16.834 | 26.990 | 7.152 |
| ATOM | 804 | C | GLY | A | 36 | −16.322 | 27.785 | 8.341 |
| ATOM | 805 | O | GLY | A | 36 | −15.671 | 27.249 | 9.237 |
| ATOM | 806 | N | CYS | A | 37 | −16.616 | 29.077 | 8.360 |
| ATOM | 807 | CA | CYS | A | 37 | −16.177 | 29.917 | 9.466 |
| ATOM | 808 | C | CYS | A | 37 | −17.347 | 30.502 | 10.249 |
| ATOM | 809 | O | CYS | A | 37 | −18.467 | 30.628 | 9.741 |
| ATOM | 810 | CB | CYS | A | 37 | −15.301 | 31.058 | 8.967 |
| ATOM | 811 | SG | CYS | A | 37 | −13.785 | 30.558 | 8.098 |
| ATOM | 812 | N | GLY | A | 38 | −17.079 | 30.867 | 11.494 |
| ATOM | 813 | CA | GLY | A | 38 | −18.129 | 31.430 | 12.309 |
| ATOM | 814 | C | GLY | A | 38 | −17.622 | 32.176 | 13.518 |
| ATOM | 815 | O | GLY | A | 38 | −16.425 | 32.235 | 13.791 |
| ATOM | 816 | N | CYS | A | 39 | −18.564 | 32.753 | 14.245 |
| ATOM | 817 | CA | CYS | A | 39 | −18.253 | 33.505 | 15.439 |
| ATOM | 818 | C | CYS | A | 39 | −18.543 | 32.670 | 16.665 |
| ATOM | 819 | O | CYS | A | 39 | −19.620 | 32.084 | 16.794 |
| ATOM | 820 | CB | CYS | A | 39 | −19.068 | 34.779 | 15.442 |
| ATOM | 821 | SG | CYS | A | 39 | −18.539 | 35.799 | 14.053 |

163. The method according to claim 140, wherein said method does not induce the death of said neoplastic cell.

164. The method according to claim 157, wherein said method does not induce the death of said neoplastic cell.

165. A method of converting a neoplastic cell into a non-neoplastic cell, said method comprising the administration to a cell, in-vitro, ex-vivo or in-vivo, of an effective amount of a pharmaceutical association;
wherein said association comprising at least one growth factor receptor-binding compound, which activates at least one growth factor receptor of a neoplastic cell, and at least one bioactive carrier forming at least one covalent or non-covalent interaction with said at least one growth factor receptor-binding compound; and
wherein said association reduces or suppresses, in the neoplastic cell, the gene expression of at least one cyclin D and/or reduces or suppresses the formation of at least one complex formed between said at least one cyclin D and at least one of cyclin dependent-kinase 4 or 6.

166. A method of inducing the formation of a physiologically functional and healthy cell selected from the group consisting of the bone, cartilage, vascular, blood, fibroblast, muscle, neural, epithelial, renal, and retinal cell lineage from a neoplastic cell, comprising administering to a subject in need thereof an effective amount of a pharmaceutical association;
wherein said association comprising at least one growth factor receptor-binding compound, which activates at least one growth factor receptor of a neoplastic cell, and at least one bioactive carrier forming at least one covalent or non-covalent interaction with said at least one growth factor receptor-binding compound; and
wherein said association reduces or suppresses, in the neoplastic cell, the gene expression of at least one cyclin D and/or reduces or suppresses the formation of at least one complex formed between said at least one cyclin D and at least one of cyclin dependent-kinase 4 or 6.

167. A method of determining the effectiveness of a pharmaceutical association for converting a neoplastic cell into a non-neoplastic cell, or for treating a neoplastic disease or at least one symptom thereof, comprising:
the administration of said pharmaceutical association to a cell;
the measurement of the expression of specific differentiation and/or cancerous markers;
the comparison of the expression of said specific differentiation and/or cancerous markers in the cell to the expression of said specific differentiation and/or cancerous markers in a cell treated with a control; and
determining the effectiveness of the pharmaceutical association relative to the control;
wherein said association comprising at least one growth factor receptor-binding compound, which activates at least one growth factor receptor of a neoplastic cell, and at least one bioactive carrier forming at least one covalent or non-covalent interaction with said at least one growth factor receptor-binding compound; and
wherein said association reduces or suppresses, in the neoplastic cell, the gene expression of at least one cyclin D and/or reduces or suppresses the formation of at least one complex formed between said at least one cyclin D and at least one of cyclin dependent-kinase 4 or 6.

168. A method for treating or preventing a neoplastic disease, disorder, condition, pathology, or any symptoms thereof, comprising administering, to a subject in need thereof, an effective amount of a pharmaceutical association;
wherein said association comprises at least one growth factor receptor-binding compound, which activates at least one growth factor receptor of a neoplastic cell, and at least one bioactive carrier forming at least one covalent or non-covalent interaction with said at least one growth factor receptor-binding compound;
wherein said growth factor receptor-binding compound is a peptide or a peptidomimetic;
wherein said growth factor receptor-binding compound comprises a peptide with four amino acids PEP1, and a peptide with five amino acids PEP2;
wherein PEP1 is selected from the group consisting of SAIS, SSLS, NAIS, SATS, SPIS, EPIS, SPIN, KPLS, EPLP, EPLT, SNIT, RSVK and RPVQ;
wherein PEP2 is selected from the group consisting of LKNYQ, LKVYP, LKKYR, LRKHR, LKYHY, KFKYE, YGKIP, YKQYE, DHHKD, EQLSN, IGEMS, LGEMS, KEVQV and KKATV; and
wherein said association reduces or suppresses, in the neoplastic cell, the gene expression of at least one cyclin D and/or reduces or suppresses the formation of at least one complex formed between said at least one cyclin D and at least one of cyclin dependent-kinase 4 or 6.

The application's sequence listing, which the Patent Office published only in electronic form, follows.

SEQUENCE LISTING (100406 sequences)

SEQ ID NO: 1 - protein, 38 aa, Artificial Sequence
  Non-cyclic GFR-binding peptide
KVPKPSSAPTQLSAISTLYLDEYDKVVLKNYQNMVVRA

SEQ ID NO: 2 - protein, 42 aa, Artificial Sequence
  Non-cyclic GFR-binding peptide
KVGKASSVPTKLSAISTLYLDDMGVPTLKNYQNMVVRASGSH

SEQ ID NO: 3 - protein, 41 aa, Artificial Sequence
  Non-cyclic GFR-binding peptide
ASASPSSVSQDLSAISTLYLIGKTPKILKNYQMIVKSSKSS

SEQ ID NO: 4 - protein, 40 aa, Artificial Sequence
  Non-cyclic GFR-binding peptide
KIPKASSVPTELNAISVLYFDENEKVILKKYRDMVVEGSG

SEQ ID NO: 5 - protein, 41 aa, Artificial Sequence
  Non-cyclic GFR-binding peptide
ASASPSSVSQDLNAISVLYFIGKTPKILKKYRMIVKSSKSS

SEQ ID NO: 6 - protein, 34 aa, Artificial Sequence
  Non-cyclic GFR-binding peptide
AVPKASSAPTKLSATSVLYYDSSNNVVLRKHRNM

SEQ ID NO: 7 - protein, 42 aa, Artificial Sequence
  Non-cyclic GFR-binding peptide
TVPKPSSAPTQLSPISVLYKDDSSNVILKYHYNMVVRASGSH

SEQ ID NO: 8 - protein, 25 aa, Artificial Sequence
  Non-cyclic GFR-binding peptide
APTQLSPISVLYKDDSSNVILKYHY

SEQ ID NO: 9 - protein, 37 aa, Artificial Sequence
  Non-cyclic GFR-binding peptide
RNVQCRPTQVQLSAISTLYLEIVRKKPLKNYQTLEDH

SEQ ID NO: 10 - protein, 28 aa, Artificial Sequence
  Non-cyclic GFR-binding peptide
PSSAPTQLSATSVLYYDDSSNVILRKHR

SEQ ID NO: 11 - protein, 37 aa, Artificial Sequence
  Non-cyclic GFR-binding peptide
KVPKPSSAPTQLSAISMLYLDEYDKVVLKNYQNMVVR

SEQ ID NO: 12 - protein, 39 aa, Artificial Sequence
  Non-cyclic GFR-binding peptide
KVGKASSVPTKLSAISMLYLDDMGVPTLKNYQNMVVRAS

SEQ ID NO: 13 - protein, 37 aa, Artificial Sequence
  Non-cyclic GFR-binding peptide
ASASPSSVSQDLSAISTLYLIGKTPKILKNYQMIVKS

SEQ ID NO: 14 - protein, 36 aa, Artificial Sequence
  Non-cyclic GFR-binding peptide
RNVQCRPTQVQLSAISMLYLEIVRKKPLKNYQTLED

SEQ ID NO: 15 - protein, 31 aa, Artificial Sequence
  Non-cyclic GFR-binding peptide
HSGSSRVVMNRYKKLIVNSSDDFYLVSIANL

SEQ ID NO: 16 - protein, 31 aa, Artificial Sequence
  Non-cyclic GFR-binding peptide
RSGSGEVVMDRYKKLVVKENEDFYLVSIANL

SEQ ID NO: 17 - protein, 31 aa, Artificial Sequence
  Non-cyclic GFR-binding peptide
HSGSARVVMNRHKRLIVNSSDDYYLVSTASL

SEQ ID NO: 18 - protein, 38 aa, Artificial Sequence; identical to SEQ ID NO: 1
  Non-cyclic GFR-binding peptide

SEQ ID NO: 19 - protein, 32 aa, Artificial Sequence
  Non-cyclic GFR-binding peptide
PSSAPTQLSATSMLYYDDSSNVILRKHRQHNK

SEQ ID NO: 20 - protein, 40 aa, Artificial Sequence; identical to SEQ ID NO: 4
  Non-cyclic GFR-binding peptide

SEQ ID NO: 21 - protein, 36 aa, Artificial Sequence
  Non-cyclic GFR-binding peptide
PKPSSAPTQLNAISMLYFGGGGGGGLKKYRNMVVRA

SEQ ID NO: 22 - protein, 37 aa, Artificial Sequence
  Non-cyclic GFR-binding peptide
AAPASSSVPARLSPISILYIDAANNVVYKQYEDMVVE

SEQ ID NO: 23 - protein, 34 aa, Artificial Sequence
  Non-cyclic GFR-binding peptide
AAPASSSVPARLSPISLLYIDAANNVVYKQYEDM

SEQ ID NO: 24 - protein, 38 aa, Artificial Sequence
  Non-cyclic GFR-binding peptide
SIPKASSVPTELSATSVLYYDEYDEKVVLRKHEMVVEG

SEQ ID NO: 25 - protein, 25 aa, Artificial Sequence
  Non-cyclic GFR-binding peptide
APTKLSAISMLYLDSSNNVILKNYQ

SEQ ID NO: 26 - protein, 27 aa, Artificial Sequence
  Non-cyclic GFR-binding peptide
ASSAVSQELSAISMLYLGGGLKNYQDM

SEQ ID NO: 27 - protein, 30 aa, Artificial Sequence
  Non-cyclic GFR-binding peptide
RSGSAEVVMDEYQKYVVNNAADIYLISIPS

SEQ ID NO: 28 - protein, 30 aa, Artificial Sequence
  Non-cyclic GFR-binding peptide
RSGSAEVVMDEYQKYVVNNAADIYLLSIPS

SEQ ID NO: 29 - protein, 26 aa, Artificial Sequence
  Non-cyclic GFR-binding peptide
RSGSAEVVMDEYQKYGGGIYLISIPS

SEQ ID NO: 30 - protein, 25 aa, Artificial Sequence
  Non-cyclic GFR-binding peptide
APTKLSAISMLYYDSSNNVIEQLSN

SEQ ID NO: 31 - protein, 37 aa, Artificial Sequence
  Non-cyclic GFR-binding peptide
KIPKASSVPTELEPLPIVYYVGRKPKVEQLSNMIVRS

SEQ ID NO: 32 - protein, 39 aa, Artificial Sequence
  Non-cyclic GFR-binding peptide
ASAAPSSVPQALEPLPIVYYVGRTPKVEQLSNMIVRSSK

SEQ ID NO: 33 - protein, 33 aa, Artificial Sequence
  Non-cyclic GFR-binding peptide
KASSVPTELSPISMLYKDENEKVVLKYHYDMVV

SEQ ID NO: 34 - protein, 36 aa, Artificial Sequence
  Non-cyclic GFR-binding peptide
ASAAPSSVPQKLNAISMLYFVGRKPKVLKKYRMIVR

SEQ ID NO: 35 - protein, 29 aa, Artificial Sequence
  Non-cyclic GFR-binding peptide
GGKSSRVIMNSLQEVKPKRGVYYVIPLPE

SEQ ID NO: 36 - protein, 29 aa, Artificial Sequence
  Non-cyclic GFR-binding peptide
GGSARVVMNNSLQEIVNSSDDYYVIPLPE

SEQ ID NO: 37 - protein, 31 aa, Artificial Sequence
  Non-cyclic GFR-binding peptide
SSAPTQLSATSVLYYDDSSNVILRKHRMIVK

SEQ ID NO: 38 - protein, 26 aa, Artificial Sequence
  Non-cyclic GFR-binding peptide
KAPTQLSPISVLYKDDSSNVILKYHY

SEQ ID NO: 39 - protein, 33 aa, Artificial Sequence
  Non-cyclic GFR-binding peptide
KASSVPTELSPISTLYKDENEKVVLKYHYDMVV

SEQ ID NO: 40 - protein, 31 aa, Artificial Sequence
  Non-cyclic GFR-binding peptide
KASSVPTELSPISMLYKDENEKVVLKYHYDM

SEQ ID NO: 41 - protein, 30 aa, Artificial Sequence
  Non-cyclic GFR-binding peptide
GTPGPAPTQLSPISVLYKDDSSNVILKYHY

SEQ ID NO: 42 - protein, 32 aa, Artificial Sequence
  Non-cyclic GFR-binding peptide
GTPGPASSAVSQELSAISMLYLGGGLKNYQDM

SEQ ID NO: 43 - protein, 35 aa, Artificial Sequence
  Non-cyclic GFR-binding peptide
KIPKASSVPTELEPLPIVYYVGRKPKVEQLSNMIV

SEQ ID NO: 44 - protein, 27 aa, Artificial Sequence
  Non-cyclic GFR-binding peptide
VPTEERSVKVAKVRIKPHQGQHKEVQV

SEQ ID NO: 45 - protein, 38 aa, Artificial Sequence
  Non-cyclic GFR-binding peptide
TVPKPSSAPTQLSPISILYIDAANNVVYKQYEDMVVRA

SEQ ID NO: 46 - protein, 34 aa, Artificial Sequence
  Non-cyclic GFR-binding peptide
RNVQCRPTQLEPLPMVYYEIVRKKPEQLSNTLED

SEQ ID NO: 47 - protein, 29 aa, Artificial Sequence
  Non-cyclic GFR-binding peptide
APTKLEPLTIVYYDDSSNVIEQLSNNMVV

SEQ ID NO: 48 - protein, 35 aa, Artificial Sequence
  Non-cyclic GFR-binding peptide
KIPKASSVPTELEPLPTVYYVGRKPKVEQLSNMIV

SEQ ID NO: 49 - protein, 34 aa, Artificial Sequence
  Non-cyclic GFR-binding peptide
SAAPSSVPQALEPLPIVYYVGRTPKVEQLSNMIV

SEQ ID NO: 50 - protein, 28 aa, Artificial Sequence
  Non-cyclic GFR-binding peptide
VPTELEPLTTLYYDSANNAVEQLSNDMV

SEQ ID NO: 51 - protein, 30 aa, Artificial Sequence
  Non-cyclic GFR-binding peptide
SRVHHNAISTLYFDESSNVILKKYRGMSVV

SEQ ID NO: 52 - protein, 30 aa, Artificial Sequence
  Non-cyclic GFR-binding peptide
VPEKMSSLSILFFDENKNAALKVYPNMTVE

SEQ ID NO: 53 - protein, 30 aa, Artificial Sequence
  Non-cyclic GFR-binding peptide
VPARLSPISILYIDAANNVVYKQYEDMVKS

SEQ ID NO: 54 - protein, 30 aa, Artificial Sequence
  Non-cyclic GFR-binding peptide
VPTEESPINMLYFNEKNQIIYGKIPMIVVE

SEQ ID NO: 55 - protein, 30 aa, Artificial Sequence
  Non-cyclic GFR-binding peptide
TPTKMSPINMLYFNEKNNIIYGKIPGMVVD

SEQ ID NO: 56 - protein, 30 aa, Artificial Sequence
  Non-cyclic GFR-binding peptide
VPTHHSAISTLYLELAGEKPLKNYQFLQHN

SEQ ID NO: 57 - protein, 30 aa, Artificial Sequence
  Non-cyclic GFR-binding peptide
APTKLSAISTLYLEIVREEPLKNYQEMVVD

SEQ ID NO: 58 - protein, 30 aa, Artificial Sequence
  Non-cyclic GFR-binding peptide
VSQDLSAISTLYLKIVRKEPLKNYQEMVEE

SEQ ID NO: 59 - protein, 30 aa, Artificial Sequence
  Non-cyclic GFR-binding peptide
VPQALNAISTLYFDDSSNVILKKYRNMAVS

SEQ ID NO: 60 - protein, 39 aa, Artificial Sequence
  Non-cyclic GFR-binding peptide
NDEGLECVPTEERPVQVRKIRIKPHQGQKKATVFLQHNK

SEQ ID NO: 61 - protein, 34 aa, Artificial Sequence
  Non-cyclic GFR-binding peptide
ASASPSSVPQDLEPLTILYYVGRTPKVEQLSNMV

SEQ ID NO: 62 - protein, 20 aa, Artificial Sequence
  Non-cyclic GFR-binding peptide
SPISILFIVGRKPKVYKQYE

SEQ ID NO: 63 - protein, 20 aa, Artificial Sequence
  Non-cyclic GFR-binding peptide
NAISTLYFDDSSNVILKKYR

SEQ ID NO: 64 - protein, 39 aa, Artificial Sequence; identical to SEQ ID NO: 60
  Non-cyclic GFR-binding peptide

SEQ ID NO: 65 - protein, 34 aa, Artificial Sequence; identical to SEQ ID NO: 61
  Non-cyclic GFR-binding peptide

SEQ ID NO: 66 - protein, 37 aa, Artificial Sequence
  Non-cyclic GFR-binding peptide
RNVQCRPTQLEPLPIVYYEIVRKKPEQLSNTLEDHLA

SEQ ID NO: 67 - protein, 32 aa, Artificial Sequence
  Non-cyclic GFR-binding peptide
VPTKLSPISILYIDDMGVPTYKQYEEGMSVAE

SEQ ID NO: 68 - protein, 32 aa, Artificial Sequence
  Non-cyclic GFR-binding peptide
VPQALSPISILYIDDMGVPTYKQYEEGMSVAE

SEQ ID NO: 69 - protein, 31 aa, Artificial Sequence
  Non-cyclic GFR-binding peptide
VPTEESNITTQIMRIKPHQGQHIGEMSFLQH

SEQ ID NO: 70 - protein, 31 aa, Artificial Sequence
  Non-cyclic GFR-binding peptide
VPTELSPISILFIRIKPHQGHLGEMSAAVVE

SEQ ID NO: 71 - protein, 30 aa, Artificial Sequence
  Non-cyclic GFR-binding peptide
TQVQLEPLTLLYYDENEKVIEQLSNDMVVE

SEQ ID NO: 72 - protein, 30 aa, Artificial Sequence; identical to SEQ ID NO: 59
  Non-cyclic GFR-binding peptide

SEQ ID NO: 73 - protein, 30 aa, Artificial Sequence
  Non-cyclic GFR-binding peptide
VPEKMSSLSILFFDENKNVVLKVYPNMAVS

SEQ ID NO: 74 - protein, 27 aa, Artificial Sequence
  Non-cyclic GFR-binding peptide
VPARLSPISILYIDAANNVVYKQYEDM

SEQ ID NO: 75 - protein, 31 aa, Artificial Sequence
  Non-cyclic GFR-binding peptide
VPQALSPINMLYFNEKNQIIYGKIPFLQHNK

SEQ ID NO: 76 - protein, 30 aa, Artificial Sequence; identical to SEQ ID NO: 55
  Non-cyclic GFR-binding peptide

SEQ ID NO: 77 - protein, 31 aa, Artificial Sequence
  Non-cyclic GFR-binding peptide
APTQLSAISTLYLEIVRKKPLKNYQFLQHNK

SEQ ID NO: 78 - protein, 30 aa, Artificial Sequence
  Non-cyclic GFR-binding peptide
APTQLSAISTLYLEIVRKKPLKNYQEMEDH

SEQ ID NO: 79 - protein, 39 aa, Artificial Sequence; identical to SEQ ID NO: 60
  Non-cyclic GFR-binding peptide

SEQ ID NO: 80 - protein, 37 aa, Artificial Sequence
  Non-cyclic GFR-binding peptide
ASASPSSVPQDLEPLTILYYVGRTPKVEQLSNMVEDH

SEQ ID NO: 81 - protein, 37 aa, Artificial Sequence; identical to SEQ ID NO: 66
  Non-cyclic GFR-binding peptide

SEQ ID NO: 82 - protein, 32 aa, Artificial Sequence
  Non-cyclic GFR-binding peptide
VPTKLSPISILYIDKMGVPTYKQYEEGMSVAE

SEQ ID NO: 83 - protein, 32 aa, Artificial Sequence
  Non-cyclic GFR-binding peptide
VPARLSPISILYIDEMGVPTYKQYEEGMSVAE

SEQ ID NO: 84 - protein, 31 aa, Artificial Sequence; identical to SEQ ID NO: 69
  Non-cyclic GFR-binding peptide

SEQ ID NO: 85 - protein, 31 aa, Artificial Sequence
  Non-cyclic GFR-binding peptide
VPQALSPISILFIRLKPHQGHLGEMSNMVVR

SEQ ID NO: 86 - protein, 30 aa, Artificial Sequence
  Non-cyclic GFR-binding peptide
APTKLEPLPMVYYEERRNVIEQLSNNMVVR

SEQ ID NO: 87 - protein, 30 aa, Artificial Sequence
  Non-cyclic GFR-binding peptide
VPTKLSAISTLYLDLAREEPLKNYQEMVVE

SEQ ID NO: 88 - protein, 30 aa, Artificial Sequence
  Non-cyclic GFR-binding peptide
APTKLEPLTIVYYDDSSNVIEQLSNNMVVR

SEQ ID NO: 89 - protein, 31 aa, Artificial Sequence
  Non-cyclic GFR-binding peptide
VPQALSPISILFIVGRKPKVYKQYEMIVERS

SEQ ID NO: 90 - protein, 30 aa, Artificial Sequence
  Non-cyclic GFR-binding peptide
VPTELSPISILFIVGGKPKVYKQYENMVVE

SEQ ID NO: 91 - protein, 31 aa, Artificial Sequence
  Non-cyclic GFR-binding peptide
SRVHHNAISTLYFDESSNVILKKYRGMSVVE

SEQ ID NO: 92 - protein, 30 aa, Artificial Sequence; identical to SEQ ID NO: 52
  Non-cyclic GFR-binding peptide

SEQ ID NO: 93 - protein, 30 aa, Artificial Sequence; identical to SEQ ID NO: 53
  Non-cyclic GFR-binding peptide

SEQ ID NO: 94 - protein, 27 aa, Artificial Sequence
  Non-cyclic GFR-binding peptide
TPTKMSPINMLYFNEKNNIIYGKIPGM

SEQ ID NO: 95 - protein, 33 aa, Artificial Sequence
  Non-cyclic GFR-binding peptide
RNVQCRPTQLEPLPIVYYEIVRKKPEQLSNTLE

SEQ ID NO: 96 - protein, 31 aa, Artificial Sequence
  Non-cyclic GFR-binding peptide
VPTHHSAISTLYLELAGEKPLKNYQFLQHNK

SEQ ID NO: 97 - protein, 28 aa, Artificial Sequence
  Non-cyclic GFR-binding peptide
VPTHHSAISMLYLELGGDKPLENYQFLQ

SEQ ID NO: 98 - protein, 30 aa, Artificial Sequence; identical to SEQ ID NO: 58
  Non-cyclic GFR-binding peptide

SEQ ID NO: 99 - protein, 38 aa, Artificial Sequence
  Non-cyclic GFR-binding peptide
ARVVMNQYNKLVVKDYEDLYLTSIASLQTPASSPKPVK

SEQ ID NO: 100 - protein, 42 aa, Artificial Sequence
  Non-cyclic GFR-binding peptide
HSGSARVVMNQYNKLTPVGMDDLYLTSIASLKTPVSSAKGVK

SEQ ID NO: 101 - protein, 41 aa, Artificial Sequence
  Non-cyclic GFR-binding peptide
SSKSSKVIMQYNKLIKPTKGILYLTSIASLDQSVSSPSASA

SEQ ID NO: 102 - protein, 40 aa, Artificial Sequence
  Non-cyclic GFR-binding peptide
GSGEVVMDRYKKLIVKENEDFYLVSIANLETPVSSAKPIK

SEQ ID NO: 103 - protein, 41 aa, Artificial Sequence
  Non-cyclic GFR-binding peptide
SSKSSKVIMRYKKLIKPTKGIFYLVSIANLDQSVSSPSASA

SEQ ID NO: 104 - protein, 34 aa, Artificial Sequence
  Non-cyclic GFR-binding peptide
MNRHKRLVVNNSSDYYLVSTASLKTPASSAKPVA

SEQ ID NO: 105 - protein, 42 aa, Artificial Sequence
  Non-cyclic GFR-binding peptide
HSGSARVVMNYHYKLIVNSSDDKYLVSIPSLQTPASSPKPVT

SEQ ID NO: 106 - protein, 25 aa, Artificial Sequence
  Non-cyclic GFR-binding peptide
YHYKLIVNSSDDKYLVSIPSLQTPA

SEQ ID NO: 107 - protein, 37 aa, Artificial Sequence
  Non-cyclic GFR-binding peptide
HDELTQYNKLPKKRVIELYLTSIASLQVQTPRCQVNR

SEQ ID NO: 108 - protein, 28 aa, Artificial Sequence
  Non-cyclic GFR-binding peptide
RHKRLIVNSSDDYYLVSTASLQTPASSP

SEQ ID NO: 109 - protein, 37 aa, Artificial Sequence
  Non-cyclic GFR-binding peptide
RVVMNQYNKLVVKDYEDLYLMSIASLQTPASSPKPVK

SEQ ID NO: 110 - protein, 39 aa, Artificial Sequence
  Non-cyclic GFR-binding peptide
SARVVMNQYNKLTPVGMDDLYLMSIASLKTPVSSAKGVK

SEQ ID NO: 111 - protein, 37 aa, Artificial Sequence
  Non-cyclic GFR-binding peptide
SKVIMQYNKLIKPTKGILYLTSIASLDQSVSSPSASA

SEQ ID NO: 112 - protein, 36 aa, Artificial Sequence
  Non-cyclic GFR-binding peptide
DELTQYNKLPKKRVIELYLMSIASLQVQTPRCQVNR

SEQ ID NO: 113 - protein, 31 aa, Artificial Sequence
  Non-cyclic GFR-binding peptide
LNAISVLYFDDSSNVILKKYRNMVVRSSGSH

SEQ ID NO: 114 - protein, 31 aa, Artificial Sequence
  Non-cyclic GFR-binding peptide
LNAISVLYFDENEKVVLKKYRDMVVEGSGSR

SEQ ID NO: 115 - protein, 31 aa, Artificial Sequence
  Non-cyclic GFR-binding peptide
LSATSVLYYDDSSNVILRKHRNMVVRASGSH

SEQ ID NO: 116 - protein, 38 aa, Artificial Sequence; identical to SEQ ID NO: 99
  Non-cyclic GFR-binding peptide

SEQ ID NO: 117 - protein, 32 aa, Artificial Sequence
  Non-cyclic GFR-binding peptide
KNHQRHKRLIVNSSDDYYLMSTASLQTPASSP

SEQ ID NO: 118 - protein, 40 aa, Artificial Sequence; identical to SEQ ID NO: 102
  Non-cyclic GFR-binding peptide

SEQ ID NO: 119 - protein, 36 aa, Artificial Sequence
  Non-cyclic GFR-binding peptide
ARVVMNRYKKLGGGGGGGFYLMSIANLQTPASSPKP

SEQ ID NO: 120 - protein, 37 aa, Artificial Sequence
  Non-cyclic GFR-binding peptide
EVVMDEYQKYVVNNAADIYLISIPSLRAPVSSSAPAA

SEQ ID NO: 121 - protein, 34 aa, Artificial Sequence
  Non-cyclic GFR-binding peptide
MDEYQKYVVNNAADIYLLSIPSLRAPVSSSAPAA

SEQ ID NO: 122 - protein, 38 aa, Artificial Sequence
  Non-cyclic GFR-binding peptide
GEVVMEHKRLVVKEDYEDYYLVSTASLETPVSSAKPIS

SEQ ID NO: 123 - protein, 25 aa, Artificial Sequence
  Non-cyclic GFR-binding peptide
QYNKLIVNNSSDLYLMSIASLKTPA

SEQ ID NO: 124 - protein, 27 aa, Artificial Sequence
  Non-cyclic GFR-binding peptide
MDQYNKLGGGLYLMSIASLEQSVASSA

SEQ ID NO: 125 - protein, 30 aa, Artificial Sequence
  Non-cyclic GFR-binding peptide
SPISILYIDAANNVVYKQYEDMVVEASGSR

SEQ ID NO: 126 - protein, 30 aa, Artificial Sequence
  Non-cyclic GFR-binding peptide
SPISLLYIDAANNVVYKQYEDMVVEASGSR

SEQ ID NO: 127 - protein, 26 aa, Artificial Sequence
  Non-cyclic GFR-binding peptide
SPISILYIGGGYKQYEDMVVEASGSR

SEQ ID NO: 128 - protein, 25 aa, Artificial Sequence
  Non-cyclic GFR-binding peptide
NSLQEIVNNSSDYYLMSIASLKTPA

SEQ ID NO: 129 - protein, 37 aa, Artificial Sequence
  Non-cyclic GFR-binding peptide
SRVIMNSLQEVKPKRGVYYVIPLPELETPVSSAKPIK

SEQ ID NO: 130 - protein, 39 aa, Artificial Sequence
  Non-cyclic GFR-binding peptide
KSSRVIMNSLQEVKPTRGVYYVIPLPELAQPVSSPAASA

SEQ ID NO: 131 - protein, 33 aa, Artificial Sequence
  Non-cyclic GFR-binding peptide
VVMDYHYKLVVKENEDKYLMSIPSLETPVSSAK

SEQ ID NO: 132 - protein, 36 aa, Artificial Sequence
  Non-cyclic GFR-binding peptide
RVIMRYKKLVKPKRGVFYLMSIANLKQPVSSPAASA

SEQ ID NO: 133 - protein, 29 aa, Artificial Sequence
  Non-cyclic GFR-binding peptide
EPLPIVYYVGRKPKVEQLSNMIVRSSKGG

SEQ ID NO: 134 - protein, 29 aa, Artificial Sequence
  Non-cyclic GFR-binding peptide
EPLPIVYYDDSSNVIEQLSNNMVVRASGG

SEQ ID NO: 135 - protein, 31 aa, Artificial Sequence
  Non-cyclic GFR-binding peptide
KVIMRHKRLIVNSSDDYYLVSTASLQTPASS

SEQ ID NO: 136 - protein, 26 aa, Artificial Sequence
  Non-cyclic GFR-binding peptide
YHYKLIVNSSDDKYLVSIPSLQTPAK

SEQ ID NO: 137 - protein, 33 aa, Artificial Sequence
  Non-cyclic GFR-binding peptide
VVMDYHYKLVVKENEDKYLTSIPSLETPVSSAK

SEQ ID NO: 138 - protein, 31 aa, Artificial Sequence
  Non-cyclic GFR-binding peptide
MDYHYKLVVKENEDKYLMSIPSLETPVSSAK

SEQ ID NO: 139 - protein, 30 aa, Artificial Sequence
  Non-cyclic GFR-binding peptide
YHYKLIVNSSDDKYLVSIPSLQTPAPGPTG

SEQ ID NO: 140 - protein, 32 aa, Artificial Sequence
  Non-cyclic GFR-binding peptide
MDQYNKLGGGLYLMSIASLEQSVASSAPGPTG

SEQ ID NO: 141 - protein, 35 aa, Artificial Sequence
  Non-cyclic GFR-binding peptide
VIMNSLQEVKPKRGVYYVIPLPELETPVSSAKPIK

SEQ ID NO: 142 - protein, 27 aa, Artificial Sequence
  Non-cyclic GFR-binding peptide
VQVEKHQGQHPKIRVKAVKVSREETPV

SEQ ID NO: 143 - protein, 38 aa, Artificial Sequence
  Non-cyclic GFR-binding peptide
ARVVMDEYQKYVVNNAADIYLISIPSLQTPASSPKPVT

SEQ ID NO: 144 - protein, 34 aa, Artificial Sequence
  Non-cyclic GFR-binding peptide
DELTNSLQEPKKRVIEYYVMPLPELQTPRCQVNR

SEQ ID NO: 145 - protein, 29 aa, Artificial Sequence
  Non-cyclic GFR-binding peptide
VVMNNSLQEIVNSSDDYYVITLPELKTPA

SEQ ID NO: 146 - protein, 35 aa, Artificial Sequence
  Non-cyclic GFR-binding peptide
VIMNSLQEVKPKRGVYYVTPLPELETPVSSAKPIK

SEQ ID NO: 147 - protein, 34 aa, Artificial Sequence
  Non-cyclic GFR-binding peptide
VIMNSLQEVKPTRGVYYVIPLPELAQPVSSPAAS

SEQ ID NO: 148 - protein, 28 aa, Artificial Sequence
  Non-cyclic GFR-binding peptide
VMDNSLQEVANNASDYYLTTLPELETPV

SEQ ID NO: 149 - protein, 30 aa, Artificial Sequence
  Non-cyclic GFR-binding peptide
VVSMGRYKKLIVNSSEDFYLTSIANHHVRS

SEQ ID NO: 150 - protein, 30 aa, Artificial Sequence
  Non-cyclic GFR-binding peptide
EVTMNPYVKLAANKNEDFFLISLSSMKEPV

SEQ ID NO: 151 - protein, 30 aa, Artificial Sequence
  Non-cyclic GFR-binding peptide
SKVMDEYQKYVVNNAADIYLISIPSLRAPV

SEQ ID NO: 152 - protein, 30 aa, Artificial Sequence
  Non-cyclic GFR-binding peptide
EVVIMPIKGYIIQNKENFYLMNIPSEETPV

SEQ ID NO: 153 - protein, 30 aa, Artificial Sequence
  Non-cyclic GFR-binding peptide
DVVMGPIKGYIINNKENFYLMNIPSMKTPT

SEQ ID NO: 154 - protein, 30 aa, Artificial Sequence
  Non-cyclic GFR-binding peptide
NHQLFQYNKLPKEGALELYLTSIASHHTPV

SEQ ID NO: 155 - protein, 30 aa, Artificial Sequence
  Non-cyclic GFR-binding peptide
DVVMEQYNKLPEERVIELYLTSIASLKTPA

SEQ ID NO: 156 - protein, 30 aa, Artificial Sequence
  Non-cyclic GFR-binding peptide
EEVMEQYNKLPEKRVIKLYLTSIASLDQSV

SEQ ID NO: 157 - protein, 30 aa, Artificial Sequence
  Non-cyclic GFR-binding peptide
SVAMNRYKKLIVNSSDDFYLTSIANLAQPV

SEQ ID NO: 158 - protein, 39 aa, Artificial Sequence
  Non-cyclic GFR-binding peptide
KNHQLFVTAKKQGQHPKIRIKRVQVPREETPVCELGEDN

SEQ ID NO: 159 - protein, 34 aa, Artificial Sequence
  Non-cyclic GFR-binding peptide
VMNSLQEVKPTRGVYYLITLPELDQPVSSPSASA

SEQ ID NO: 160 - protein, 20 aa, Artificial Sequence
  Non-cyclic GFR-binding peptide
EYQKYVKPKRGVIFLISIPS

SEQ ID NO: 161 - protein, 20 aa, Artificial Sequence
  Non-cyclic GFR-binding peptide
RYKKLIVNSSDDFYLTSIAN

SEQ ID NO: 162 - protein, 39 aa, Artificial Sequence; identical to SEQ ID NO: 158
  Non-cyclic GFR-binding peptide

SEQ ID NO: 163 - protein, 34 aa, Artificial Sequence; identical to SEQ ID NO: 159
  Non-cyclic GFR-binding peptide

SEQ ID NO: 164 - protein, 37 aa, Artificial Sequence
  Non-cyclic GFR-binding peptide
ALHDELTNSLQEPKKRVIEYYVIPLPELQTPRCQVNR

SEQ ID NO: 165 - protein, 32 aa, Artificial Sequence
  Non-cyclic GFR-binding peptide
EAVSMGEEYQKYTPVGMDDIYLISIPSLKTPV

SEQ ID NO: 166 - protein, 32 aa, Artificial Sequence
  Non-cyclic GFR-binding peptide
EAVSMGEEYQKYTPVGMDDIYLISIPSLAQPV

SEQ ID NO: 167 - protein, 31 aa, Artificial Sequence
  Non-cyclic GFR-binding peptide
HQLFSMEGIHQGQHPKIRMIQTTINSEETPV

SEQ ID NO: 168 - protein, 31 aa, Artificial Sequence
  Non-cyclic GFR-binding peptide
EVVAASMEGLHGQHPKIRIFLISIPSLETPV

SEQ ID NO: 169 - protein, 30 aa, Artificial Sequence
  Non-cyclic GFR-binding peptide
EVVMDNSLQEIVKENEDYYLLTLPELQVQT

SEQ ID NO: 170 - protein, 30 aa, Artificial Sequence; identical to SEQ ID NO: 157
  Non-cyclic GFR-binding peptide

SEQ ID NO: 171 - protein, 30 aa, Artificial Sequence
  Non-cyclic GFR-binding peptide
SVAMNPYVKLVVNKNEDFFLISLSSMKEPV

SEQ ID NO: 172 - protein, 27 aa, Artificial Sequence
  Non-cyclic GFR-binding peptide
MDEYQKYVVNNAADIYLISIPSLRAPV

SEQ ID NO: 173 - protein, 31 aa, Artificial Sequence
  Non-cyclic GFR-binding peptide
KNHQLFPIKGYIIQNKENFYLMNIPSLAQPV

SEQ ID NO: 174 - protein, 30 aa, Artificial Sequence; identical to SEQ ID NO: 153
  Non-cyclic GFR-binding peptide

SEQ ID NO: 175 - protein, 31 aa, Artificial Sequence
  Non-cyclic GFR-binding peptide
KNHQLFQYNKLPKKRVIELYLTSIASLQTPA

SEQ ID NO: 176 - protein, 30 aa, Artificial Sequence
  Non-cyclic GFR-binding peptide
HDEMEQYNKLPKKRVIELYLTSIASLQTPA

SEQ ID NO: 177 - protein, 39 aa, Artificial Sequence; identical to SEQ ID NO: 158
  Non-cyclic GFR-binding peptide

SEQ ID NO: 178 - protein, 37 aa, Artificial Sequence
  Non-cyclic GFR-binding peptide
HDEVMNSLQEVKPTRGVYYLITLPELDQPVSSPSASA

SEQ ID NO: 179 - protein, 37 aa, Artificial Sequence; identical to SEQ ID NO: 164
  Non-cyclic GFR-binding peptide

SEQ ID NO: 180 - protein, 32 aa, Artificial Sequence
  Non-cyclic GFR-binding peptide
EAVSMGEEYQKYTPVGMKDIYLISIPSLKTPV

SEQ ID NO: 181 - protein, 32 aa, Artificial Sequence
  Non-cyclic GFR-binding peptide
EAVSMGEEYQKYTPVGMEDIYLISIPSLRAPV

SEQ ID NO: 182 - protein, 31 aa, Artificial Sequence; identical to SEQ ID NO: 167
  Non-cyclic GFR-binding peptide

SEQ ID NO: 183 - protein, 31 aa, Artificial Sequence
  Non-cyclic GFR-binding peptide
RVVMNSMEGLHGQHPKLRIFLISIPSLAQPV

SEQ ID NO: 184 - protein, 30 aa, Artificial Sequence
  Non-cyclic GFR-binding peptide
RVVMNNSLQEIVNRREEYYVMELPELKTPA

SEQ ID NO: 185 - protein, 30 aa, Artificial Sequence
  Non-cyclic GFR-binding peptide
EVVMEQYNKLPEERALDLYLTSIASLKTPV

SEQ ID NO: 186 - protein, 30 aa, Artificial Sequence
  Non-cyclic GFR-binding peptide
RVVMNNSLQEIVNSSDDYYVITLPELKTPA

SEQ ID NO: 187 - protein, 31 aa, Artificial Sequence
  Non-cyclic GFR-binding peptide
SREVIMEYQKYVKPKRGVIFLISIPSLAQPV

SEQ ID NO: 188 - protein, 30 aa, Artificial Sequence
  Non-cyclic GFR-binding peptide
EVVMNEYQKYVKPKGGVIFLISIPSLETPV

SEQ ID NO: 189 - protein, 31 aa, Artificial Sequence
  Non-cyclic GFR-binding peptide
EVVSMGRYKKLIVNSSEDFYLTSIANHHVRS

SEQ ID NO: 190 - protein, 30 aa, Artificial Sequence; identical to SEQ ID NO: 150
  Non-cyclic GFR-binding peptide

SEQ ID NO: 191 - protein, 30 aa, Artificial Sequence; identical to SEQ ID NO: 151
  Non-cyclic GFR-binding peptide

SEQ ID NO: 192 - protein, 27 aa, Artificial Sequence
  Non-cyclic GFR-binding peptide
MGPIKGYIINNKENFYLMNIPSMKTPT

SEQ ID NO: 193 - protein, 33 aa, Artificial Sequence
  Non-cyclic GFR-binding peptide
ELTNSLQEPKKRVIEYYVIPLPELQTPRCQVNR

SEQ ID NO: 194 - protein, 31 aa, Artificial Sequence
  Non-cyclic GFR-binding peptide
KNHQLFQYNKLPKEGALELYLTSIASHHTPV

SEQ ID NO: 195 - protein, 28 aa, Artificial Sequence
  Non-cyclic GFR-binding peptide
QLFQYNELPKDGGLELYLMSIASHHTPV

SEQ ID NO: 196 - protein, 30 aa, Artificial Sequence; identical to SEQ ID NO: 156
  Non-cyclic GFR-binding peptide

SEQ ID NO: 197 - protein, 31 aa, Artificial Sequence
  Non-cyclic GFR-binding peptide
CVPTKMSAISMLYLDENKNVVLKNYQNMVVE

SEQ ID NO: 198 - protein, 42 aa, Artificial Sequence
  Non-cyclic GFR-binding peptide
GIPEPSSVPTKMSAISTLYLDENKNVVLKNYQNMVVESSASR

SEQ ID NO: 199 - protein, 42 aa, Artificial Sequence
  Non-cyclic GFR-binding peptide
GIPEPSSVPTKMSAISMLYLDENKNVVLKNYQNMVVESSASR

SEQ ID NO: 200 - protein, 42 aa, Artificial Sequence
  Non-cyclic GFR-binding peptide
HVTKPTSVPTKLSAISMLYLDDSSNVILKNYQNMVVESSGSH

SEQ ID NO: 201 - protein, 42 aa, Artificial Sequence
  Non-cyclic GFR-binding peptide
YVPKPSSVPTKLSAISMLYLDDSSNVILKNYQNMVVESSGSH

SEQ ID NO: 202 - protein, 42 aa, Artificial Sequence
  Non-cyclic GFR-binding peptide
TVPKPSSVPTQLSAISMLYLDDSSNVILKNYQNMVVEASGSH

SEQ ID NO: 203 - protein, 42 aa, Artificial Sequence
  Non-cyclic GFR-binding peptide
AVPKASSVPTKLSAISMLYLDSSNNVILKNYQNMVVEASGSH

SEQ ID NO: 204 - protein, 43 aa, Artificial Sequence
  Non-cyclic GFR-binding peptide
KVGKASSVPTKLSAISMLYLDDMGVPTLKNYQEGMSVVESGSR

SEQ ID NO: 205 - protein, 42 aa, Artificial Sequence
  Non-cyclic GFR-binding peptide
KASKASSVPTKLSAISMLYLDKGVVTYLKNYQGMVVEESGSR

SEQ ID NO: 206 - protein, 42 aa, Artificial Sequence
  Non-cyclic GFR-binding peptide
GSAGPSSVPTKMSAISMLYLNDKQQIILKNYQGMVVERSGSS

SEQ ID NO: 207 - protein, 42 aa, Artificial Sequence
  Non-cyclic GFR-binding peptide
AAPASSSVPTRLSAISMLYLDAANNVVLKNYQDMVVEASGSR

SEQ ID NO: 208 - protein, 42 aa, Artificial Sequence
  Non-cyclic GFR-binding peptide
STPPTSSVPTRLSAISMLYLDSANNVVLKNYQDMVVESSGSR

SEQ ID NO: 209 - protein, 42 aa, Artificial Sequence
  Non-cyclic GFR-binding peptide
HVPKPSSVPTKLSAISMLYLDDSSNVILKNYQNMVVESSGSH

SEQ ID NO: 210 - protein, 41 aa, Artificial Sequence
  Non-cyclic GFR-binding peptide
RVPSTSSVPTKTSAISMLYLDNGRVLLLKNYQMIVVESGSL

SEQ ID NO: 211 - protein, 41 aa, Artificial Sequence
  Non-cyclic GFR-binding peptide
ASAAPSSVPTALSAISMLYLVGRKPKVLKNYQMIVVESKSS

SEQ ID NO: 212 - protein, 41 aa, Artificial Sequence
  Non-cyclic GFR-binding peptide
ASASPSSVPTDLSAISMLYLIGKTPKILKNYQMIVVESKSS

SEQ ID NO: 213 - protein, 41 aa, Artificial Sequence
  Non-cyclic GFR-binding peptide
ASASPSSVPTDLSAISMLYLVGRTPKVLKNYQMVVVESKSS

SEQ ID NO: 214 - protein, 42 aa, Artificial Sequence
  Non-cyclic GFR-binding peptide
GIPEPSSVPEKMSAISMLYLDENKNVVLKNYQNMTVESSASR

SEQ ID NO: 215 - protein, 42 aa, Artificial Sequence
  Non-cyclic GFR-binding peptide
HVTKPTSAPTKLSAISMLYLDDSSNVILKNYQNMVVRSSGSH

SEQ ID NO: 216 - protein, 42 aa, Artificial Sequence
  Non-cyclic GFR-binding peptide
YVPKPSSAPTKLSAISMLYLDDSSNVILKNYQNMVVRSSGSH

SEQ ID NO: 217 - protein, 42 aa, Artificial Sequence
  Non-cyclic GFR-binding peptide
TVPKPSSAPTQLSAISMLYLDDSSNVILKNYQNMVVRASGSH

SEQ ID NO: 218 - protein, 42 aa, Artificial Sequence
  Non-cyclic GFR-binding peptide
AVPKASSAPTKLSAISMLYLDSSNNVILKNYQNMVVKASGSH

SEQ ID NO: 219 - protein, 43 aa, Artificial Sequence
  Non-cyclic GFR-binding peptide
KVGKASSVPTKLSAISMLYLDDMGVPTLKNYQEGMSVAESGSR

SEQ ID NO: 220 - protein, 42 aa, Artificial Sequence
  Non-cyclic GFR-binding peptide
KASKASSVPTKLSAISMLYLDKGVVTYLKNYQGMAVSESGSR

SEQ ID NO: 221 - protein, 42 aa, Artificial Sequence
  Non-cyclic GFR-binding peptide
GSAGPSSTPTKMSAISMLYLNDKQQIILKNYQGMVVDRSGSS

SEQ ID NO: 222 - protein, 42 aa, Artificial Sequence
  Non-cyclic GFR-binding peptide
AAPASSSVPARLSAISMLYLDAANNVVLKNYQDMVVEASGSR

SEQ ID NO: 223 - protein, 42 aa, Artificial Sequence
  Non-cyclic GFR-binding peptide
HVPKPSSAPTKLSAISMLYLDDSSNVILKNYQNMVVRSSGSH

SEQ ID NO: 224 - protein, 41 aa, Artificial Sequence
  Non-cyclic GFR-binding peptide
RVPSTSSAPVKTSAISMLYLDNGRVLLLKNYQMIVEESGSL

SEQ ID NO: 225 - protein, 41 aa, Artificial Sequence
  Non-cyclic GFR-binding peptide
ASAAPSSVPQALSAISMLYLVGRKPKVLKNYQMIVRSSKSS

SEQ ID NO: 226 - protein, 41 aa, Artificial Sequence
  Non-cyclic GFR-binding peptide
ASASPSSVSQDLSAISMLYLIGKTPKILKNYQMIVKSSKSS

SEQ ID NO: 227 - protein, 41 aa, Artificial Sequence
  Non-cyclic GFR-binding peptide
ASASPSSVPQDLSAISMLYLVGRTPKVLKNYQMVVKSSKSS

SEQ ID NO: 228 - protein, 44 aa, Artificial Sequence
  Non-cyclic GFR-binding peptide
NDEGLESVPTEESAISMLYLRIKPHQGQHLKNYQFLQHNKSESR

SEQ ID NO: 229 - protein, 44 aa, Artificial Sequence
  Non-cyclic GFR-binding peptide
NDEGLESVPTGQSAISMLYLRIKPHQGQHLKNYQLEEHSQSESR

SEQ ID NO: 230 - protein, 45 aa, Artificial Sequence
  Non-cyclic GFR-binding peptide
SSVKSQPSRVHHSAISMLYLEYVRKKPKLLKNYQRLEEHLESASA

SEQ ID NO: 231 - protein, 45 aa, Artificial Sequence
  Non-cyclic GFR-binding peptide
RNVQSRPTQVQLSAISMLYLEIVRKKPIFLKNYQTLEDHLASKSE

SEQ ID NO: 232 - protein, 42 aa, Artificial Sequence
  Non-cyclic GFR-binding peptide
KIPKASSVPEELSSLSILFFDENEKVVLKVYPDMTVEGSGSR

SEQ ID NO: 233 - protein, 42 aa, Artificial Sequence
  Non-cyclic GFR-binding peptide
SIPKASSVPEELSSLSILFFDEYDKVVLKVYPEMTVEGSGSR

SEQ ID NO: 234 - protein, 42 aa, Artificial Sequence
  Non-cyclic GFR-binding peptide
HVTKPTSVPEKLSSLSILFFDDSSNVILKVYPNMTVESSGSH

SEQ ID NO: 235 - protein, 42 aa, Artificial Sequence
  Non-cyclic GFR-binding peptide
YVPKPSSVPEKLSSLSILFFDDSSNVILKVYPNMTVESSGSH

SEQ ID NO: 236 - protein, 42 aa, Artificial Sequence
  Non-cyclic GFR-binding peptide
TVPKPSSVPEQLSSLSILFFDDSSNVILKVYPNMTVEASGSH

SEQ ID NO: 237 - protein, 42 aa, Artificial Sequence
  Non-cyclic GFR-binding peptide
AVPKASSVPEKLSSLSILFFDSSNNVILKVYPNMTVEASGSH

SEQ ID NO: 238 - protein, 43 aa, Artificial Sequence
  Non-cyclic GFR-binding peptide
KVGKASSVPEKLSSLSILFFDDMGVPTLKVYPEGMSTVESGSR

SEQ ID NO: 239 - protein, 42 aa, Artificial Sequence
  Non-cyclic GFR-binding peptide
KASKASSVPEKLSSLSILFFDKGVVTYLKVYPGMTVEESGSR

SEQ ID NO: 240 - protein, 42 aa, Artificial Sequence
  Non-cyclic GFR-binding peptide
GSAGPSSVPEKMSSLSILFFNDKQQIILKVYPGMTVERSGSS

SEQ ID NO: 241 - protein, 42 aa, Artificial Sequence
  Non-cyclic GFR-binding peptide
AAPASSSVPERLSSLSILFFDAANNVVLKVYPDMTVEASGSR

SEQ ID NO: 242 - protein, 42 aa, Artificial Sequence
  Non-cyclic GFR-binding peptide
STPPTSSVPERLSSLSILFFDSANNVVLKVYPDMTVESSGSR

SEQ ID NO: 243 - protein, 42 aa, Artificial Sequence
  Non-cyclic GFR-binding peptide
HVPKPSSVPEKLSSLSILFFDDSSNVILKVYPNMTVESSGSH

SEQ ID NO: 244 - protein, 41 aa, Artificial Sequence
  Non-cyclic GFR-binding peptide
RVPSTSSVPEKTSSLSILFFDNGRVLLLKVYPMITVESGSL

SEQ ID NO: 245 - protein, 41 aa, Artificial Sequence
  Non-cyclic GFR-binding peptide
ASAAPSSVPEALSSLSILFFVGRKPKVLKVYPMITVESKSS

SEQ ID NO: 246 - protein, 41 aa, Artificial Sequence
  Non-cyclic GFR-binding peptide
ASASPSSVPEDLSSLSILFFIGKTPKILKVYPMITVESKSS

SEQ ID NO: 247 - protein, 41 aa, Artificial Sequence
  Non-cyclic GFR-binding peptide
ASASPSSVPEDLSSLSILFFVGRTPKVLKVYPMVTVESKSS

SEQ ID NO: 248 - protein, 42 aa, Artificial Sequence
  Non-cyclic GFR-binding peptide
KIPKASSVPTELSSLSILFFDENEKVVLKVYPDMVVEGSGSR

SEQ ID NO: 249 - protein, 42 aa, Artificial Sequence
  Non-cyclic GFR-binding peptide
SIPKASSVPTELSSLSILFFDEYDKVVLKVYPEMVVEGSGSR

SEQ ID NO: 250 - protein, 42 aa, Artificial Sequence
  Non-cyclic GFR-binding peptide
HVTKPTSAPTKLSSLSILFFDDSSNVILKVYPNMVVRSSGSH

SEQ ID NO: 251 - protein, 42 aa, Artificial Sequence
  Non-cyclic GFR-binding peptide
YVPKPSSAPTKLSSLSILFFDDSSNVILKVYPNMVVRSSGSH

SEQ ID NO: 252 - protein, 42 aa, Artificial Sequence
  Non-cyclic GFR-binding peptide
TVPKPSSAPTQLSSLSILFFDDSSNVILKVYPNMVVRASGSH

SEQ ID NO: 253 - protein, 42 aa, Artificial Sequence
  Non-cyclic GFR-binding peptide
AVPKASSAPTKLSSLSILFFDSSNNVILKVYPNMVVKASGSH

SEQ ID NO: 254 - protein, 43 aa, Artificial Sequence
  Non-cyclic GFR-binding peptide
KVGKASSVPTKLSSLSILFFDDMGVPTLKVYPEGMSVAESGSR

SEQ ID NO: 255 - protein, 42 aa, Artificial Sequence
  Non-cyclic GFR-binding peptide
KASKASSVPTKLSSLSILFFDKGVVTYLKVYPGMAVSESGSR

SEQ ID NO: 256 - protein, 42 aa, Artificial Sequence
  Non-cyclic GFR-binding peptide
GSAGPSSTPTKMSSLSILFFNDKQQIILKVYPGMVVDRSGSS

SEQ ID NO: 257 - protein, 42 aa, Artificial Sequence
  Non-cyclic GFR-binding peptide
AAPASSSVPARLSSLSILFFDAANNVVLKVYPDMVVEASGSR

SEQ ID NO: 258 - protein, 42 aa, Artificial Sequence
  Non-cyclic GFR-binding peptide
STPPTSSVPTRLSSLSILFFDSANNVVLKVYPDMVVESSGSR

SEQ ID NO: 259 - protein, 42 aa, Artificial Sequence
  Non-cyclic GFR-binding peptide
HVPKPSSAPTKLSSLSILFFDDSSNVILKVYPNMVVRSSGSH

SEQ ID NO: 260 - protein, 41 aa, Artificial Sequence
  Non-cyclic GFR-binding peptide
RVPSTSSAPVKTSSLSILFFDNGRVLLLKVYPMIVEESGSL

SEQ ID NO: 261 - protein, 41 aa, Artificial Sequence
  Non-cyclic GFR-binding peptide
ASAAPSSVPQALSSLSILFFVGRKPKVLKVYPMIVRSSKSS

SEQ ID NO: 262 - protein, 41 aa, Artificial Sequence
  Non-cyclic GFR-binding peptide
ASASPSSVSQDLSSLSILFFIGKTPKILKVYPMIVKSSKSS

SEQ ID NO: 263 - protein, 41 aa, Artificial Sequence
  Non-cyclic GFR-binding peptide
ASASPSSVPQDLSSLSILFFVGRTPKVLKVYPMVVKSSKSS

SEQ ID NO: 264 - protein, 44 aa, Artificial Sequence
  Non-cyclic GFR-binding peptide
NDEGLESVPTEESSLSILFFRIKPHQGQHLKVYPFLQHNKSESR

SEQ ID NO: 265 - protein, 44 aa, Artificial Sequence
  Non-cyclic GFR-binding peptide
NDEGLESVPTGQSSLSILFFRIKPHQGQHLKVYPLEEHSQSESR

SEQ ID NO: 266 - protein, 45 aa, Artificial Sequence
  Non-cyclic GFR-binding peptide
SSVKSQPSRVHHSSLSILFFEYVRKKPKLLKVYPRLEEHLESASA

SEQ ID NO: 267 - protein, 45 aa, Artificial Sequence
  Non-cyclic GFR-binding peptide
RNVQSRPTQVQLSSLSILFFEIVRKKPIFLKVYPTLEDHLASKSE

SEQ ID NO: 268 - protein, 42 aa, Artificial Sequence
  Non-cyclic GFR-binding peptide
KIPKASSAPTELNAISVLYFDENEKVVLKKYRDMVVRGSGSR

SEQ ID NO: 269 - protein, 42 aa, Artificial Sequence
  Non-cyclic GFR-binding peptide
GIPEPSSAPTKMNAISVLYFDENKNVVLKKYRNMVVRSSASR

SEQ ID NO: 270 - protein, 42 aa, Artificial Sequence
  Non-cyclic GFR-binding peptide
SIPKASSAPTELNAISVLYFDEYDKVVLKKYREMVVRGSGSR

SEQ ID NO: 271 - protein, 42 aa, Artificial Sequence
  Non-cyclic GFR-binding peptide
AVPKASSAPTKLNAISVLYFDSSNNVILKKYRNMVVRASGSH

SEQ ID NO: 272 - protein, 43 aa, Artificial Sequence
  Non-cyclic GFR-binding peptide
KVGKASSAPTKLNAISVLYFDDMGVPTLKKYREGMSVVRSGSR

SEQ ID NO: 273 - protein, 42 aa, Artificial Sequence
  Non-cyclic GFR-binding peptide
KASKASSAPTKLNAISVLYFDKGVVTYLKKYRGMVVRESGSR

SEQ ID NO: 274 - protein, 42 aa, Artificial Sequence
  Non-cyclic GFR-binding peptide
GSAGPSSAPTKMNAISVLYFNDKQQIILKKYRGMVVRRSGSS

SEQ ID NO: 275 - protein, 42 aa, Artificial Sequence
  Non-cyclic GFR-binding peptide
AAPASSSAPTRLNAISVLYFDAANNVVLKKYRDMVVRASGSR

SEQ ID NO: 276 - protein, 42 aa, Artificial Sequence
  Non-cyclic GFR-binding peptide
STPPTSSAPTRLNAISVLYFDSANNVVLKKYRDMVVRSSGSR

SEQ ID NO: 277 - protein, 41 aa, Artificial Sequence
  Non-cyclic GFR-binding peptide
RVPSTSSAPTKTNAISVLYFDNGRVLLLKKYRMIVVRSGSL

SEQ ID NO: 278 - protein, 41 aa, Artificial Sequence
  Non-cyclic GFR-binding peptide
ASAAPSSAPTALNAISVLYFVGRKPKVLKKYRMIVVRSKSS

SEQ ID NO: 279 - protein, 41 aa, Artificial Sequence
  Non-cyclic GFR-binding peptide
ASASPSSAPTDLNAISVLYFIGKTPKILKKYRMIVVRSKSS

SEQ ID NO: 280 - protein, 41 aa, Artificial Sequence
  Non-cyclic GFR-binding peptide
ASASPSSAPTDLNAISVLYFVGRTPKVLKKYRMVVVRSKSS

SEQ ID NO: 281 - protein, 42 aa, Artificial Sequence
  Non-cyclic GFR-binding peptide
KIPKASSVPTELNAISVLYFDENEKVVLKKYRDMVVEGSGSR

SEQ ID NO: 282 - protein, 42 aa, Artificial Sequence
  Non-cyclic GFR-binding peptide
GIPEPSSVPEKMNAISVLYFDENKNVVLKKYRNMTVESSASR

SEQ ID NO: 283 - protein, 42 aa, Artificial Sequence
  Non-cyclic GFR-binding peptide
SIPKASSVPTELNAISVLYFDEYDKVVLKKYREMVVEGSGSR

SEQ ID NO: 284 - protein, 42 aa, Artificial Sequence
  Non-cyclic GFR-binding peptide
AVPKASSAPTKLNAISVLYFDSSNNVILKKYRNMVVKASGSH

SEQ ID NO: 285 - protein, 43 aa, Artificial Sequence
  Non-cyclic GFR-binding peptide
KVGKASSVPTKLNAISVLYFDDMGVPTLKKYREGMSVAESGSR

SEQ ID NO: 286 - protein, 42 aa, Artificial Sequence
  Non-cyclic GFR-binding peptide
KASKASSVPTKLNAISVLYFDKGVVTYLKKYRGMAVSESGSR

SEQ ID NO: 287 - protein, 42 aa, Artificial Sequence
  Non-cyclic GFR-binding peptide
GSAGPSSTPTKMNAISVLYFNDKQQIILKKYRGMVVDRSGSS

SEQ ID NO: 288 - protein, 42 aa, Artificial Sequence
  Non-cyclic GFR-binding peptide
AAPASSSVPARLNAISVLYFDAANNVVLKKYRDMVVEASGSR

SEQ ID NO: 289 - protein, 42 aa, Artificial Sequence
  Non-cyclic GFR-binding peptide
STPPTSSVPTRLNAISVLYFDSANNVVLKKYRDMVVESSGSR

SEQ ID NO: 290 - protein, 41 aa, Artificial Sequence
  Non-cyclic GFR-binding peptide
RVPSTSSAPVKTNAISVLYFDNGRVLLLKKYRMIVEESGSL

SEQ ID NO: 291 - protein, 41 aa, Artificial Sequence
  Non-cyclic GFR-binding peptide
ASAAPSSVPQALNAISVLYFVGRKPKVLKKYRMIVRSSKSS

SEQ ID NO: 292 - protein, 41 aa, Artificial Sequence
  Non-cyclic GFR-binding peptide
ASASPSSVPQDLNAISVLYFVGRTPKVLKKYRMVVKSSKSS

SEQ ID NO: 293 - protein, 44 aa, Artificial Sequence
  Non-cyclic GFR-binding peptide
NDEGLESVPTEENAISVLYFRIKPHQGQHLKKYRFLQHNKSESR

SEQ ID NO: 294 - protein, 44 aa, Artificial Sequence
  Non-cyclic GFR-binding peptide
NDEGLESVPTGQNAISVLYFRIKPHQGQHLKKYRLEEHSQSESR

SEQ ID NO: 295 - protein, 45 aa, Artificial Sequence
  Non-cyclic GFR-binding peptide
SSVKSQPSRVHHNAISVLYFEYVRKKPKLLKKYRRLEEHLESASA

SEQ ID NO: 296 - protein, 45 aa, Artificial Sequence
  Non-cyclic GFR-binding peptide
RNVQSRPTQVQLNAISVLYFEIVRKKPIFLKKYRTLEDHLASKSE

SEQ ID NO: 297 - protein, 42 aa, Artificial Sequence
  Non-cyclic GFR-binding peptide
KIPKASSAPTELSATSVLYYDENEKVVLRKHRDMVVKGSGSR

SEQ ID NO: 298 - protein, 42 aa, Artificial Sequence
  Non-cyclic GFR-binding peptide
GIPEPSSAPTKMSATSVLYYDENKNVVLRKHRNMVVKSSASR

SEQ ID NO: 299 - protein, 42 aa, Artificial Sequence
  Non-cyclic GFR-binding peptide
SIPKASSAPTELSATSVLYYDEYDKVVLRKHREMVVKGSGSR

SEQ ID NO: 300 - protein, 42 aa, Artificial Sequence
  Non-cyclic GFR-binding peptide
HVTKPTSAPTKLSATSVLYYDDSSNVILRKHRNMVVKSSGSH

SEQ ID NO: 301 - protein, 42 aa, Artificial Sequence
  Non-cyclic GFR-binding peptide
YVPKPSSAPTKLSATSVLYYDDSSNVILRKHRNMVVKSSGSH

SEQ ID NO: 302 - protein, 42 aa, Artificial Sequence
  Non-cyclic GFR-binding peptide
TVPKPSSAPTQLSATSVLYYDDSSNVILRKHRNMVVKASGSH

SEQ ID NO: 303 - protein, 43 aa, Artificial Sequence
  Non-cyclic GFR-binding peptide
KVGKASSAPTKLSATSVLYYDDMGVPTLRKHREGMSVVKSGSR

SEQ ID NO: 304 - protein, 42 aa, Artificial Sequence
  Non-cyclic GFR-binding peptide
KASKASSAPTKLSATSVLYYDKGVVTYLRKHRGMVVKESGSR

SEQ ID NO: 305 - protein, 42 aa, Artificial Sequence
  Non-cyclic GFR-binding peptide
GSAGPSSAPTKMSATSVLYYNDKQQIILRKHRGMVVKRSGSS

SEQ ID NO: 306 - protein, 42 aa, Artificial Sequence
  Non-cyclic GFR-binding peptide
AAPASSSAPTRLSATSVLYYDAANNVVLRKHRDMVVKASGSR

SEQ ID NO: 307 - protein, 42 aa, Artificial Sequence
  Non-cyclic GFR-binding peptide
STPPTSSAPTRLSATSVLYYDSANNVVLRKHRDMVVKSSGSR

SEQ ID NO: 308 - protein, 42 aa, Artificial Sequence
  Non-cyclic GFR-binding peptide
HVPKPSSAPTKLSATSVLYYDDSSNVILRKHRNMVVKSSGSH

SEQ ID NO: 309 - protein, 41 aa, Artificial Sequence
  Non-cyclic GFR-binding peptide
RVPSTSSAPTKTSATSVLYYDNGRVLLLRKHRMIVVKSGSL

SEQ ID NO: 310 - protein, 41 aa, Artificial Sequence
  Non-cyclic GFR-binding peptide
ASAAPSSAPTALSATSVLYYVGRKPKVLRKHRMIVVKSKSS

SEQ ID NO: 311 - protein, 41 aa, Artificial Sequence
  Non-cyclic GFR-binding peptide
ASASPSSAPTDLSATSVLYYIGKTPKILRKHRMIVVKSKSS

SEQ ID NO: 312 - protein, 41 aa, Artificial Sequence
  Non-cyclic GFR-binding peptide
ASASPSSAPTDLSATSVLYYVGRTPKVLRKHRMVVVKSKSS

SEQ ID NO: 313 - protein, 42 aa, Artificial Sequence
  Non-cyclic GFR-binding peptide
KIPKASSVPTELSATSVLYYDENEKVVLRKHRDMVVEGSGSR

SEQ ID NO: 314 - protein, 42 aa, Artificial Sequence
  Non-cyclic GFR-binding peptide
GIPEPSSVPEKMSATSVLYYDENKNVVLRKHRNMTVESSASR

SEQ ID NO: 315 - protein, 42 aa, Artificial Sequence
  Non-cyclic GFR-binding peptide
SIPKASSVPTELSATSVLYYDEYDKVVLRKHREMVVEGSGSR

SEQ ID NO: 316 - protein, 42 aa, Artificial Sequence
  Non-cyclic GFR-binding peptide
HVTKPTSAPTKLSATSVLYYDDSSNVILRKHRNMVVRSSGSH

SEQ ID NO: 317 - protein, 42 aa, Artificial Sequence
  Non-cyclic GFR-binding peptide
YVPKPSSAPTKLSATSVLYYDDSSNVILRKHRNMVVRSSGSH

SEQ ID NO: 318 - protein, 42 aa, Artificial Sequence
  Non-cyclic GFR-binding peptide
TVPKPSSAPTQLSATSVLYYDDSSNVILRKHRNMVVRASGSH

SEQ ID NO: 319 - protein, 43 aa, Artificial Sequence
  Non-cyclic GFR-binding peptide
KVGKASSVPTKLSATSVLYYDDMGVPTLRKHREGMSVAESGSR

SEQ ID NO: 320 - protein, 42 aa, Artificial Sequence
  Non-cyclic GFR-binding peptide
KASKASSVPTKLSATSVLYYDKGVVTYLRKHRGMAVSESGSR

SEQ ID NO: 321 - protein, 42 aa, Artificial Sequence
  Non-cyclic GFR-binding peptide
GSAGPSSTPTKMSATSVLYYNDKQQIILRKHRGMVVDRSGSS

SEQ ID NO: 322 - protein, 42 aa, Artificial Sequence
  Non-cyclic GFR-binding peptide
AAPASSSVPARLSATSVLYYDAANNVVLRKHRDMVVEASGSR

SEQ ID NO: 323 - protein, 42 aa, Artificial Sequence
  Non-cyclic GFR-binding peptide
STPPTSSVPTRLSATSVLYYDSANNVVLRKHRDMVVESSGSR

SEQ ID NO: 324 - protein, 42 aa, Artificial Sequence
  Non-cyclic GFR-binding peptide
HVPKPSSAPTKLSATSVLYYDDSSNVILRKHRNMVVRSSGSH

SEQ ID NO: 325 - protein, 41 aa, Artificial Sequence
  Non-cyclic GFR-binding peptide
RVPSTSSAPVKTSATSVLYYDNGRVLLLRKHRMIVEESGSL

SEQ ID NO: 326 - protein, 41 aa, Artificial Sequence
  Non-cyclic GFR-binding peptide
ASAAPSSVPQALSATSVLYYVGRKPKVLRKHRMIVRSSKSS

SEQ ID NO: 327 - protein, 41 aa, Artificial Sequence
  Non-cyclic GFR-binding peptide
ASASPSSVSQDLSATSVLYYIGKTPKILRKHRMIVKSSKSS

SEQ ID NO: 328 - protein, 41 aa, Artificial Sequence
  Non-cyclic GFR-binding peptide
ASASPSSVPQDLSATSVLYYVGRTPKVLRKHRMVVKSSKSS

SEQ ID NO: 329 - protein, 44 aa, Artificial Sequence
  Non-cyclic GFR-binding peptide
NDEGLESVPTEESATSVLYYRIKPHQGQHLRKHRFLQHNKSESR

SEQ ID NO: 330 - protein, 44 aa, Artificial Sequence
  Non-cyclic GFR-binding peptide
NDEGLESVPTGQSATSVLYYRIKPHQGQHLRKHRLEEHSQSESR

SEQ ID NO: 331 - protein, 45 aa, Artificial Sequence
  Non-cyclic GFR-binding peptide
SSVKSQPSRVHHSATSVLYYEYVRKKPKLLRKHRRLEEHLESASA

SEQ ID NO: 332 - protein, 45 aa, Artificial Sequence
  Non-cyclic GFR-binding peptide
RNVQSRPTQVQLSATSVLYYEIVRKKPIFLRKHRTLEDHLASKSE

SEQ ID NO: 333 - protein, 42 aa, Artificial Sequence
  Non-cyclic GFR-binding peptide
KIPKASSVPTELSPISVLYKDENEKVVLKYHYDMVAEGSGSR

SEQ ID NO: 334 - protein, 42 aa, Artificial Sequence
  Non-cyclic GFR-binding peptide
GIPEPSSVPTKMSPISVLYKDENKNVVLKYHYNMVAESSASR

SEQ ID NO: 335 - protein, 42 aa, Artificial Sequence
  Non-cyclic GFR-binding peptide
SIPKASSVPTELSPISVLYKDEYDKVVLKYHYEMVAEGSGSR

SEQ ID NO: 336 - protein, 42 aa, Artificial Sequence
  Non-cyclic GFR-binding peptide
HVTKPTSVPTKLSPISVLYKDDSSNVILKYHYNMVAESSGSH

SEQ ID NO: 337 - protein, 42 aa, Artificial Sequence
  Non-cyclic GFR-binding peptide
YVPKPSSVPTKLSPISVLYKDDSSNVILKYHYNMVAESSGSH

SEQ ID NO: 338 - protein, 42 aa, Artificial Sequence
  Non-cyclic GFR-binding peptide
TVPKPSSVPTQLSPISVLYKDDSSNVILKYHYNMVAEASGSH

SEQ ID NO: 339 - protein, 42 aa, Artificial Sequence
  Non-cyclic GFR-binding peptide
AVPKASSVPTKLSPISVLYKDSSNNVILKYHYNMVAEASGSH

SEQ ID NO: 340 - protein, 42 aa, Artificial Sequence
  Non-cyclic GFR-binding peptide
KASKASSVPTKLSPISVLYKDKGVVTYLKYHYGMVAEESGSR

SEQ ID NO: 341 - protein, 42 aa, Artificial Sequence
  Non-cyclic GFR-binding peptide
GSAGPSSVPTKMSPISVLYKNDKQQIILKYHYGMVAERSGSS

SEQ ID NO: 342 - protein, 42 aa, Artificial Sequence
  Non-cyclic GFR-binding peptide
AAPASSSVPTRLSPISVLYKDAANNVVLKYHYDMVAEASGSR

SEQ ID NO: 343 - protein, 42 aa, Artificial Sequence
  Non-cyclic GFR-binding peptide
STPPTSSVPTRLSPISVLYKDSANNVVLKYHYDMVAESSGSR

SEQ ID NO: 344 - protein, 42 aa, Artificial Sequence
  Non-cyclic GFR-binding peptide
HVPKPSSVPTKLSPISVLYKDDSSNVILKYHYNMVAESSGSH

SEQ ID NO: 345 - protein, 41 aa, Artificial Sequence
  Non-cyclic GFR-binding peptide
RVPSTSSVPTKTSPISVLYKDNGRVLLLKYHYMIVAESGSL

SEQ ID NO: 346 - protein, 41 aa, Artificial Sequence
  Non-cyclic GFR-binding peptide
ASAAPSSVPTALSPISVLYKVGRKPKVLKYHYMIVAESKSS

SEQ ID NO: 347 - protein, 41 aa, Artificial Sequence
  Non-cyclic GFR-binding peptide
ASASPSSVPTDLSPISVLYKIGKTPKILKYHYMIVAESKSS

SEQ ID NO: 348 - protein, 41 aa, Artificial Sequence
  Non-cyclic GFR-binding peptide
ASASPSSVPTDLSPISVLYKVGRTPKVLKYHYMVVAESKSS

SEQ ID NO: 349 - protein, 42 aa, Artificial Sequence
  Non-cyclic GFR-binding peptide
KIPKASSVPTELSPISVLYKDENEKVVLKYHYDMVVEGSGSR

SEQ ID NO: 350 - protein, 42 aa, Artificial Sequence
  Non-cyclic GFR-binding peptide
GIPEPSSVPEKMSPISVLYKDENKNVVLKYHYNMTVESSASR

SEQ ID NO: 351 - protein, 42 aa, Artificial Sequence
  Non-cyclic GFR-binding peptide
SIPKASSVPTELSPISVLYKDEYDKVVLKYHYEMVVEGSGSR

SEQ ID NO: 352 - protein, 42 aa, Artificial Sequence
  Non-cyclic GFR-binding peptide
HVTKPTSAPTKLSPISVLYKDDSSNVILKYHYNMVVRSSGSH

SEQ ID NO: 353 - protein, 42 aa, Artificial Sequence
  Non-cyclic GFR-binding peptide
YVPKPSSAPTKLSPISVLYKDDSSNVILKYHYNMVVRSSGSH

SEQ ID NO: 354 - protein, 42 aa, Artificial Sequence
  Non-cyclic GFR-binding peptide
AVPKASSAPTKLSPISVLYKDSSNNVILKYHYNMVVKASGSH

SEQ ID NO: 355 - protein, 42 aa, Artificial Sequence
  Non-cyclic GFR-binding peptide
KASKASSVPTKLSPISVLYKDKGVVTYLKYHYGMAVSESGSR

SEQ ID NO: 356 - protein, 42 aa, Artificial Sequence
  Non-cyclic GFR-binding peptide
GSAGPSSTPTKMSPISVLYKNDKQQIILKYHYGMVVDRSGSS

SEQ ID NO: 357 - protein, 42 aa, Artificial Sequence
  Non-cyclic GFR-binding peptide
AAPASSSVPARLSPISVLYKDAANNVVLKYHYDMVVEASGSR

SEQ ID NO: 358 - protein, 42 aa, Artificial Sequence
  Non-cyclic GFR-binding peptide
STPPTSSVPTRLSPISVLYKDSANNVVLKYHYDMVVESSGSR

SEQ ID NO: 359 - protein, 42 aa, Artificial Sequence
  Non-cyclic GFR-binding peptide
HVPKPSSAPTKLSPISVLYKDDSSNVILKYHYNMVVRSSGSH

SEQ ID NO: 360 - protein, 41 aa, Artificial Sequence
  Non-cyclic GFR-binding peptide
RVPSTSSAPVKTSPISVLYKDNGRVLLLKYHYMIVEESGSL

SEQ ID NO: 361 - protein, 41 aa, Artificial Sequence
  Non-cyclic GFR-binding peptide
ASAAPSSVPQALSPISVLYKVGRKPKVLKYHYMIVRSSKSS

SEQ ID NO: 362 - protein, 41 aa, Artificial Sequence
  Non-cyclic GFR-binding peptide
ASASPSSVSQDLSPISVLYKIGKTPKILKYHYMIVKSSKSS

SEQ ID NO: 363 - protein, 41 aa, Artificial Sequence
  Non-cyclic GFR-binding peptide
ASASPSSVPQDLSPISVLYKVGRTPKVLKYHYMVVKSSKSS

SEQ ID NO: 364 - protein, 44 aa, Artificial Sequence
  Non-cyclic GFR-binding peptide
NDEGLESVPTEESPISVLYKRIKPHQGQHLKYHYFLQHNKSESR

SEQ ID NO: 365 - protein, 44 aa, Artificial Sequence
  Non-cyclic GFR-binding peptide
NDEGLESVPTGQSPISVLYKRIKPHQGQHLKYHYLEEHSQSESR

SEQ ID NO: 366 - protein, 45 aa, Artificial Sequence
  Non-cyclic GFR-binding peptide
SSVKSQPSRVHHSPISVLYKEYVRKKPKLLKYHYRLEEHLESASA

SEQ ID NO: 367 - protein, 45 aa, Artificial Sequence
  Non-cyclic GFR-binding peptide
RNVQSRPTQVQLSPISVLYKEIVRKKPIFLKYHYTLEDHLASKSE

SEQ ID NO: 368 - protein, 42 aa, Artificial Sequence
  Non-cyclic GFR-binding peptide
KIPKASSVPTELEPISILYLDENEKVVKFKYEDMAVSGSGSR

SEQ ID NO: 369 - protein, 42 aa, Artificial Sequence
  Non-cyclic GFR-binding peptide
GIPEPSSVPTKMEPISILYLDENKNVVKFKYENMAVSSSASR

SEQ ID NO: 370 - protein, 42 aa, Artificial Sequence
  Non-cyclic GFR-binding peptide
SIPKASSVPTELEPISILYLDEYDKVVKFKYEEMAVSGSGSR

SEQ ID NO: 371 - protein, 42 aa, Artificial Sequence
  Non-cyclic GFR-binding peptide
HVTKPTSVPTKLEPISILYLDDSSNVIKFKYENMAVSSSGSH

SEQ ID NO: 372 - protein, 42 aa, Artificial Sequence
  Non-cyclic GFR-binding peptide
YVPKPSSVPTKLEPISILYLDDSSNVIKFKYENMAVSSSGSH

SEQ ID NO: 373 - protein, 42 aa, Artificial Sequence
  Non-cyclic GFR-binding peptide
TVPKPSSVPTQLEPISILYLDDSSNVIKFKYENMAVSASGSH

SEQ ID NO: 374 - protein, 42 aa, Artificial Sequence
  Non-cyclic GFR-binding peptide
AVPKASSVPTKLEPISILYLDSSNNVIKFKYENMAVSASGSH

SEQ ID NO: 375 - protein, 43 aa, Artificial Sequence
  Non-cyclic GFR-binding peptide
KVGKASSVPTKLEPISILYLDDMGVPTKFKYEEGMSAVSSGSR

SEQ ID NO: 376 - protein, 42 aa, Artificial Sequence
  Non-cyclic GFR-binding peptide
GSAGPSSVPTKMEPISILYLNDKQQIIKFKYEGMAVSRSGSS

SEQ ID NO: 377 - protein, 42 aa, Artificial Sequence
  Non-cyclic GFR-binding peptide
AAPASSSVPTRLEPISILYLDAANNVVKFKYEDMAVSASGSR

SEQ ID NO: 378 - protein, 42 aa, Artificial Sequence
  Non-cyclic GFR-binding peptide
STPPTSSVPTRLEPISILYLDSANNVVKFKYEDMAVSSSGSR

SEQ ID NO: 379 - protein, 42 aa, Artificial Sequence
  Non-cyclic GFR-binding peptide
HVPKPSSVPTKLEPISILYLDDSSNVIKFKYENMAVSSSGSH

SEQ ID NO: 380 - protein, 41 aa, Artificial Sequence
  Non-cyclic GFR-binding peptide
RVPSTSSVPTKTEPISILYLDNGRVLLKFKYEMIAVSSGSL

SEQ ID NO: 381 - protein, 41 aa, Artificial Sequence
  Non-cyclic GFR-binding peptide
ASAAPSSVPTALEPISILYLVGRKPKVKFKYEMIAVSSKSS

SEQ ID NO: 382 - protein, 41 aa, Artificial Sequence
  Non-cyclic GFR-binding peptide
ASASPSSVPTDLEPISILYLIGKTPKIKFKYEMIAVSSKSS

SEQ ID NO: 383 - protein, 41 aa, Artificial Sequence
  Non-cyclic GFR-binding peptide
ASASPSSVPTDLEPISILYLVGRTPKVKFKYEMVAVSSKSS

SEQ ID NO: 384 - protein, 42 aa, Artificial Sequence
  Non-cyclic GFR-binding peptide
KIPKASSVPTELEPISILYLDENEKVVKFKYEDMVVEGSGSR

SEQ ID NO: 385 - protein, 42 aa, Artificial Sequence
  Non-cyclic GFR-binding peptide
GIPEPSSVPEKMEPISILYLDENKNVVKFKYENMTVESSASR

SEQ ID NO: 386 - protein, 42 aa, Artificial Sequence
  Non-cyclic GFR-binding peptide
SIPKASSVPTELEPISILYLDEYDKVVKFKYEEMVVEGSGSR

SEQ ID NO: 387 - protein, 42 aa, Artificial Sequence
  Non-cyclic GFR-binding peptide
HVTKPTSAPTKLEPISILYLDDSSNVIKFKYENMVVRSSGSH

SEQ ID NO: 388 - protein, 42 aa, Artificial Sequence
  Non-cyclic GFR-binding peptide
YVPKPSSAPTKLEPISILYLDDSSNVIKFKYENMVVRSSGSH

SEQ ID NO: 389 - protein, 42 aa, Artificial Sequence
  Non-cyclic GFR-binding peptide
TVPKPSSAPTQLEPISILYLDDSSNVIKFKYENMVVRASGSH

SEQ ID NO: 390 - protein, 42 aa, Artificial Sequence
  Non-cyclic GFR-binding peptide
AVPKASSAPTKLEPISILYLDSSNNVIKFKYENMVVKASGSH

SEQ ID NO: 391 - protein, 43 aa, Artificial Sequence
  Non-cyclic GFR-binding peptide
KVGKASSVPTKLEPISILYLDDMGVPTKFKYEEGMSVAESGSR

SEQ ID NO: 392 - protein, 42 aa, Artificial Sequence
  Non-cyclic GFR-binding peptide
GSAGPSSTPTKMEPISILYLNDKQQIIKFKYEGMVVDRSGSS

SEQ ID NO: 393 - protein, 42 aa, Artificial Sequence
  Non-cyclic GFR-binding peptide
AAPASSSVPARLEPISILYLDAANNVVKFKYEDMVVEASGSR

SEQ ID NO: 394 - protein, 42 aa, Artificial Sequence
  Non-cyclic GFR-binding peptide
STPPTSSVPTRLEPISILYLDSANNVVKFKYEDMVVESSGSR

SEQ ID NO: 395 - protein, 42 aa, Artificial Sequence
  Non-cyclic GFR-binding peptide
HVPKPSSAPTKLEPISILYLDDSSNVIKFKYENMVVRSSGSH

SEQ ID NO: 396 - protein, 41 aa, Artificial Sequence
  Non-cyclic GFR-binding peptide
RVPSTSSAPVKTEPISILYLDNGRVLLKFKYEMIVEESGSL

SEQ ID NO: 397 - protein, 41 aa, Artificial Sequence
  Non-cyclic GFR-binding peptide
ASAAPSSVPQALEPISILYLVGRKPKVKFKYEMIVRSSKSS

SEQ ID NO: 398 - protein, 41 aa, Artificial Sequence
  Non-cyclic GFR-binding peptide
ASASPSSVSQDLEPISILYLIGKTPKIKFKYEMIVKSSKSS

SEQ ID NO: 399 - protein, 41 aa, Artificial Sequence
  Non-cyclic GFR-binding peptide
ASASPSSVPQDLEPISILYLVGRTPKVKFKYEMVVKSSKSS

SEQ ID NO: 400 - protein, 44 aa, Artificial Sequence
  Non-cyclic GFR-binding peptide
NDEGLESVPTEEEPISILYLRIKPHQGQHKFKYEFLQHNKSESR

SEQ ID NO: 401 - protein, 44 aa, Artificial Sequence
  Non-cyclic GFR-binding peptide
NDEGLESVPTGQEPISILYLRIKPHQGQHKFKYELEEHSQSESR

SEQ ID NO: 402 - protein, 45 aa, Artificial Sequence
  Non-cyclic GFR-binding peptide
SSVKSQPSRVHHEPISILYLEYVRKKPKLKFKYERLEEHLESASA

SEQ ID NO: 403 - protein, 45 aa, Artificial Sequence
  Non-cyclic GFR-binding peptide
RNVQSRPTQVQLEPISILYLEIVRKKPIFKFKYETLEDHLASKSE

SEQ ID NO: 404 - protein, 42 aa, Artificial Sequence
  Non-cyclic GFR-binding peptide
KIPKASSTPTELSPINMLYFDENEKVVYGKIPDMVVDGSGSR

SEQ ID NO: 405 - protein, 42 aa, Artificial Sequence
  Non-cyclic GFR-binding peptide
GIPEPSSTPTKMSPINMLYFDENKNVVYGKIPNMVVDSSASR

SEQ ID NO: 406 - protein, 42 aa, Artificial Sequence
  Non-cyclic GFR-binding peptide
SIPKASSTPTELSPINMLYFDEYDKVVYGKIPEMVVDGSGSR

SEQ ID NO: 407 - protein, 42 aa, Artificial Sequence
  Non-cyclic GFR-binding peptide
HVTKPTSTPTKLSPINMLYFDDSSNVIYGKIPNMVVDSSGSH

SEQ ID NO: 408 - protein, 42 aa, Artificial Sequence
  Non-cyclic GFR-binding peptide
YVPKPSSTPTKLSPINMLYFDDSSNVIYGKIPNMVVDSSGSH

SEQ ID NO: 409 - protein, 42 aa, Artificial Sequence
  Non-cyclic GFR-binding peptide
TVPKPSSTPTQLSPINMLYFDDSSNVIYGKIPNMVVDASGSH

SEQ ID NO: 410 - protein, 42 aa, Artificial Sequence
  Non-cyclic GFR-binding peptide
AVPKASSTPTKLSPINMLYFDSSNNVIYGKIPNMVVDASGSH

SEQ ID NO: 411 - protein, 43 aa, Artificial Sequence
  Non-cyclic GFR-binding peptide
KVGKASSTPTKLSPINMLYFDDMGVPTYGKIPEGMSVVDSGSR

SEQ ID NO: 412 - protein, 42 aa, Artificial Sequence
  Non-cyclic GFR-binding peptide
KASKASSTPTKLSPINMLYFDKGVVTYYGKIPGMVVDESGSR

SEQ ID NO: 413 - protein, 42 aa, Artificial Sequence
  Non-cyclic GFR-binding peptide
AAPASSSTPTRLSPINMLYFDAANNVVYGKIPDMVVDASGSR

SEQ ID NO: 414 - protein, 42 aa, Artificial Sequence
  Non-cyclic GFR-binding peptide
STPPTSSTPTRLSPINMLYFDSANNVVYGKIPDMVVDSSGSR

SEQ ID NO: 415 - protein, 42 aa, Artificial Sequence
  Non-cyclic GFR-binding peptide
HVPKPSSTPTKLSPINMLYFDDSSNVIYGKIPNMVVDSSGSH

SEQ ID NO: 416 - protein, 41 aa, Artificial Sequence
  Non-cyclic GFR-binding peptide
RVPSTSSTPTKTSPINMLYFDNGRVLLYGKIPMIVVDSGSL

SEQ ID NO: 417 - protein, 41 aa, Artificial Sequence
  Non-cyclic GFR-binding peptide
ASAAPSSTPTALSPINMLYFVGRKPKVYGKIPMIVVDSKSS

SEQ ID NO: 418 - protein, 41 aa, Artificial Sequence
  Non-cyclic GFR-binding peptide
ASASPSSTPTDLSPINMLYFIGKTPKIYGKIPMIVVDSKSS

SEQ ID NO: 419 - protein, 41 aa, Artificial Sequence
  Non-cyclic GFR-binding peptide
ASASPSSTPTDLSPINMLYFVGRTPKVYGKIPMVVVDSKSS

SEQ ID NO: 420 - protein, 42 aa, Artificial Sequence
  Non-cyclic GFR-binding peptide
KIPKASSVPTELSPINMLYFDENEKVVYGKIPDMVVEGSGSR

SEQ ID NO: 421 - protein, 42 aa, Artificial Sequence
  Non-cyclic GFR-binding peptide
GIPEPSSVPEKMSPINMLYFDENKNVVYGKIPNMTVESSASR

SEQ ID NO: 422 - protein, 42 aa, Artificial Sequence
  Non-cyclic GFR-binding peptide
SIPKASSVPTELSPINMLYFDEYDKVVYGKIPEMVVEGSGSR

SEQ ID NO: 423 - protein, 42 aa, Artificial Sequence
  Non-cyclic GFR-binding peptide
HVTKPTSAPTKLSPINMLYFDDSSNVIYGKIPNMVVRSSGSH

SEQ ID NO: 424 - protein, 42 aa, Artificial Sequence
  Non-cyclic GFR-binding peptide
YVPKPSSAPTKLSPINMLYFDDSSNVIYGKIPNMVVRSSGSH

SEQ ID NO: 425 - protein, 42 aa, Artificial Sequence
  Non-cyclic GFR-binding peptide
TVPKPSSAPTQLSPINMLYFDDSSNVIYGKIPNMVVRASGSH

SEQ ID NO: 426 - protein, 42 aa, Artificial Sequence
  Non-cyclic GFR-binding peptide
AVPKASSAPTKLSPINMLYFDSSNNVIYGKIPNMVVKASGSH

SEQ ID NO: 427 - protein, 43 aa, Artificial Sequence
  Non-cyclic GFR-binding peptide
KVGKASSVPTKLSPINMLYFDDMGVPTYGKIPEGMSVAESGSR

SEQ ID NO: 428 - protein, 42 aa, Artificial Sequence
  Non-cyclic GFR-binding peptide
KASKASSVPTKLSPINMLYFDKGVVTYYGKIPGMAVSESGSR

SEQ ID NO: 429 - protein, 42 aa, Artificial Sequence
  Non-cyclic GFR-binding peptide
AAPASSSVPARLSPINMLYFDAANNVVYGKIPDMVVEASGSR

SEQ ID NO: 430 - protein, 42 aa, Artificial Sequence
  Non-cyclic GFR-binding peptide
STPPTSSVPTRLSPINMLYFDSANNVVYGKIPDMVVESSGSR

SEQ ID NO: 431 - protein, 42 aa, Artificial Sequence
  Non-cyclic GFR-binding peptide
HVPKPSSAPTKLSPINMLYFDDSSNVIYGKIPNMVVRSSGSH

SEQ ID NO: 432 - protein, 41 aa, Artificial Sequence
  Non-cyclic GFR-binding peptide
RVPSTSSAPVKTSPINMLYFDNGRVLLYGKIPMIVEESGSL

SEQ ID NO: 433 - protein, 41 aa, Artificial Sequence
  Non-cyclic GFR-binding peptide
ASAAPSSVPQALSPINMLYFVGRKPKVYGKIPMIVRSSKSS

SEQ ID NO: 434 - protein, 41 aa, Artificial Sequence
  Non-cyclic GFR-binding peptide
ASASPSSVSQDLSPINMLYFIGKTPKIYGKIPMIVKSSKSS

SEQ ID NO: 435 - protein, 41 aa, Artificial Sequence
  Non-cyclic GFR-binding peptide
ASASPSSVPQDLSPINMLYFVGRTPKVYGKIPMVVKSSKSS

SEQ ID NO: 436 - protein, 44 aa, Artificial Sequence
  Non-cyclic GFR-binding peptide
NDEGLESVPTEESPINMLYFRIKPHQGQHYGKIPFLQHNKSESR

SEQ ID NO: 437 - protein, 44 aa, Artificial Sequence
  Non-cyclic GFR-binding peptide
NDEGLESVPTGQSPINMLYFRIKPHQGQHYGKIPLEEHSQSESR

SEQ ID NO: 438 - protein, 45 aa, Artificial Sequence
  Non-cyclic GFR-binding peptide
SSVKSQPSRVHHSPINMLYFEYVRKKPKLYGKIPRLEEHLESASA

SEQ ID NO: 439 - protein, 45 aa, Artificial Sequence
  Non-cyclic GFR-binding peptide
RNVQSRPTQVQLSPINMLYFEIVRKKPIFYGKIPTLEDHLASKSE

SEQ ID NO: 440 - protein, 42 aa, Artificial Sequence
  Non-cyclic GFR-binding peptide
KIPKASSVPAELSPISILYIDENEKVVYKQYEDMVVEGSGSR

SEQ ID NO: 441 - protein, 42 aa, Artificial Sequence
  Non-cyclic GFR-binding peptide
GIPEPSSVPAKMSPISILYIDENKNVVYKQYENMVVESSASR

SEQ ID NO: 442 - protein, 42 aa, Artificial Sequence
  Non-cyclic GFR-binding peptide
SIPKASSVPAELSPISILYIDEYDKVVYKQYEEMVVEGSGSR

SEQ ID NO: 443 - protein, 42 aa, Artificial Sequence
  Non-cyclic GFR-binding peptide
HVTKPTSVPAKLSPISILYIDDSSNVIYKQYENMVVESSGSH

SEQ ID NO: 444 - protein, 42 aa, Artificial Sequence
  Non-cyclic GFR-binding peptide
YVPKPSSVPAKLSPISILYIDDSSNVIYKQYENMVVESSGSH

SEQ ID NO: 445 - protein, 42 aa, Artificial Sequence
  Non-cyclic GFR-binding peptide
TVPKPSSVPAQLSPISILYIDDSSNVIYKQYENMVVEASGSH

SEQ ID NO: 446 - protein, 42 aa, Artificial Sequence
  Non-cyclic GFR-binding peptide
AVPKASSVPAKLSPISILYIDSSNNVIYKQYENMVVEASGSH

SEQ ID NO: 447 - protein, 43 aa, Artificial Sequence
  Non-cyclic GFR-binding peptide
KVGKASSVPAKLSPISILYIDDMGVPTYKQYEEGMSVVESGSR

SEQ ID NO: 448 - protein, 42 aa, Artificial Sequence
  Non-cyclic GFR-binding peptide
KASKASSVPAKLSPISILYIDKGVVTYYKQYEGMVVEESGSR

SEQ ID NO: 449 - protein, 42 aa, Artificial Sequence
  Non-cyclic GFR-binding peptide
GSAGPSSVPAKMSPISILYINDKQQIIYKQYEGMVVERSGSS

SEQ ID NO: 450 - protein, 42 aa, Artificial Sequence
  Non-cyclic GFR-binding peptide
STPPTSSVPARLSPISILYIDSANNVVYKQYEDMVVESSGSR

SEQ ID NO: 451 - protein, 42 aa, Artificial Sequence
  Non-cyclic GFR-binding peptide
HVPKPSSVPAKLSPISILYIDDSSNVIYKQYENMVVESSGSH

SEQ ID NO: 452 - protein, 41 aa, Artificial Sequence
  Non-cyclic GFR-binding peptide
RVPSTSSVPAKTSPISILYIDNGRVLLYKQYEMIVVESGSL

SEQ ID NO: 453 - protein, 41 aa, Artificial Sequence
  Non-cyclic GFR-binding peptide
ASAAPSSVPAALSPISILYIVGRKPKVYKQYEMIVVESKSS

SEQ ID NO: 454 - protein, 41 aa, Artificial Sequence
  Non-cyclic GFR-binding peptide
ASASPSSVPADLSPISILYIIGKTPKIYKQYEMIVVESKSS

SEQ ID NO: 455 - protein, 41 aa, Artificial Sequence
  Non-cyclic GFR-binding peptide
ASASPSSVPADLSPISILYIVGRTPKVYKQYEMVVVESKSS

SEQ ID NO: 456 - protein, 42 aa, Artificial Sequence
  Non-cyclic GFR-binding peptide
KIPKASSVPTELSPISILYIDENEKVVYKQYEDMVVEGSGSR

SEQ ID NO: 457 - protein, 42 aa, Artificial Sequence
  Non-cyclic GFR-binding peptide
GIPEPSSVPEKMSPISILYIDENKNVVYKQYENMTVESSASR

SEQ ID NO: 458 - protein, 42 aa, Artificial Sequence
  Non-cyclic GFR-binding peptide
SIPKASSVPTELSPISILYIDEYDKVVYKQYEEMVVEGSGSR

SEQ ID NO: 459 - protein, 42 aa, Artificial Sequence
  Non-cyclic GFR-binding peptide
HVTKPTSAPTKLSPISILYIDDSSNVIYKQYENMVVRSSGSH

SEQ ID NO: 460 - protein, 42 aa, Artificial Sequence
  Non-cyclic GFR-binding peptide
YVPKPSSAPTKLSPISILYIDDSSNVIYKQYENMVVRSSGSH

SEQ ID NO: 461 - protein, 42 aa, Artificial Sequence
  Non-cyclic GFR-binding peptide
TVPKPSSAPTQLSPISILYIDDSSNVIYKQYENMVVRASGSH

SEQ ID NO: 462 - protein, 42 aa, Artificial Sequence
  Non-cyclic GFR-binding peptide
AVPKASSAPTKLSPISILYIDSSNNVIYKQYENMVVKASGSH

SEQ ID NO: 463 - protein, 43 aa, Artificial Sequence
  Non-cyclic GFR-binding peptide
KVGKASSVPTKLSPISILYIDDMGVPTYKQYEEGMSVAESGSR

SEQ ID NO: 464 - protein, 42 aa, Artificial Sequence
  Non-cyclic GFR-binding peptide
KASKASSVPTKLSPISILYIDKGVVTYYKQYEGMAVSESGSR

SEQ ID NO: 465 - protein, 42 aa, Artificial Sequence
  Non-cyclic GFR-binding peptide
GSAGPSSTPTKMSPISILYINDKQQIIYKQYEGMVVDRSGSS

SEQ ID NO: 466 - protein, 42 aa, Artificial Sequence
  Non-cyclic GFR-binding peptide
STPPTSSVPTRLSPISILYIDSANNVVYKQYEDMVVESSGSR

SEQ ID NO: 467 - protein, 42 aa, Artificial Sequence
  Non-cyclic GFR-binding peptide
HVPKPSSAPTKLSPISILYIDDSSNVIYKQYENMVVRSSGSH

SEQ ID NO: 468 - protein, 41 aa, Artificial Sequence
  Non-cyclic GFR-binding peptide
RVPSTSSAPVKTSPISILYIDNGRVLLYKQYEMIVEESGSL

SEQ ID NO: 469 - protein, 41 aa, Artificial Sequence
  Non-cyclic GFR-binding peptide
ASAAPSSVPQALSPISILYIVGRKPKVYKQYEMIVRSSKSS

SEQ ID NO: 470 - protein, 41 aa, Artificial Sequence
  Non-cyclic GFR-binding peptide
ASASPSSVSQDLSPISILYIIGKTPKIYKQYEMIVKSSKSS

SEQ ID NO: 471 - protein, 41 aa, Artificial Sequence
  Non-cyclic GFR-binding peptide
ASASPSSVPQDLSPISILYIVGRTPKVYKQYEMVVKSSKSS

SEQ ID NO: 472 - protein, 44 aa, Artificial Sequence
  Non-cyclic GFR-binding peptide
NDEGLESVPTEESPISILYIRIKPHQGQHYKQYEFLQHNKSESR

SEQ ID NO: 473 - protein, 44 aa, Artificial Sequence
  Non-cyclic GFR-binding peptide
NDEGLESVPTGQSPISILYIRIKPHQGQHYKQYELEEHSQSESR

SEQ ID NO: 474 - protein, 45 aa, Artificial Sequence
  Non-cyclic GFR-binding peptide
SSVKSQPSRVHHSPISILYIEYVRKKPKLYKQYERLEEHLESASA

SEQ ID NO: 475 - protein, 45 aa, Artificial Sequence
  Non-cyclic GFR-binding peptide
RNVQSRPTQVQLSPISILYIEIVRKKPIFYKQYETLEDHLASKSE

SEQ ID NO: 476 - protein, 42 aa, Artificial Sequence
  Non-cyclic GFR-binding peptide
KIPKASSVPTELSPISILFIDENEKVVYKQYEDMVVEGSGSR

SEQ ID NO: 477 - protein, 42 aa, Artificial Sequence
  Non-cyclic GFR-binding peptide
GIPEPSSVPTKMSPISILFIDENKNVVYKQYENMVVESSASR

SEQ ID NO: 478 - protein, 42 aa, Artificial Sequence
  Non-cyclic GFR-binding peptide
SIPKASSVPTELSPISILFIDEYDKVVYKQYEEMVVEGSGSR

SEQ ID NO: 479 - protein, 42 aa, Artificial Sequence
  Non-cyclic GFR-binding peptide
HVTKPTSVPTKLSPISILFIDDSSNVIYKQYENMVVESSGSH

SEQ ID NO: 480 - protein, 42 aa, Artificial Sequence
  Non-cyclic GFR-binding peptide
YVPKPSSVPTKLSPISILFIDDSSNVIYKQYENMVVESSGSH

SEQ ID NO: 481 - protein, 42 aa, Artificial Sequence
  Non-cyclic GFR-binding peptide
TVPKPSSVPTQLSPISILFIDDSSNVIYKQYENMVVEASGSH

SEQ ID NO: 482 - protein, 42 aa, Artificial Sequence
  Non-cyclic GFR-binding peptide
AVPKASSVPTKLSPISILFIDSSNNVIYKQYENMVVEASGSH

SEQ ID NO: 483 - protein, 43 aa, Artificial Sequence
  Non-cyclic GFR-binding peptide
KVGKASSVPTKLSPISILFIDDMGVPTYKQYEEGMSVVESGSR

SEQ ID NO: 484 - protein, 42 aa, Artificial Sequence
  Non-cyclic GFR-binding peptide
KASKASSVPTKLSPISILFIDKGVVTYYKQYEGMVVEESGSR

SEQ ID NO: 485 - protein, 42 aa, Artificial Sequence
  Non-cyclic GFR-binding peptide
GSAGPSSVPTKMSPISILFINDKQQIIYKQYEGMVVERSGSS

SEQ ID NO: 486 - protein, 42 aa, Artificial Sequence
  Non-cyclic GFR-binding peptide
AAPASSSVPTRLSPISILFIDAANNVVYKQYEDMVVEASGSR

SEQ ID NO: 487 - protein, 42 aa, Artificial Sequence
  Non-cyclic GFR-binding peptide
HVPKPSSVPTKLSPISILFIDDSSNVIYKQYENMVVESSGSH

SEQ ID NO: 488 - protein, 41 aa, Artificial Sequence
  Non-cyclic GFR-binding peptide
RVPSTSSVPTKTSPISILFIDNGRVLLYKQYEMIVVESGSL

SEQ ID NO: 489 - protein, 41 aa, Artificial Sequence
  Non-cyclic GFR-binding peptide
ASAAPSSVPTALSPISILFIVGRKPKVYKQYEMIVVESKSS

SEQ ID NO: 490 - protein, 41 aa, Artificial Sequence
  Non-cyclic GFR-binding peptide
ASASPSSVPTDLSPISILFIIGKTPKIYKQYEMIVVESKSS

SEQ ID NO: 491 - protein, 41 aa, Artificial Sequence
  Non-cyclic GFR-binding peptide
ASASPSSVPTDLSPISILFIVGRTPKVYKQYEMVVVESKSS

SEQ ID NO: 492 - protein, 42 aa, Artificial Sequence
  Non-cyclic GFR-binding peptide
GIPEPSSVPEKMSPISILFIDENKNVVYKQYENMTVESSASR

SEQ ID NO: 493 - protein, 42 aa, Artificial Sequence
  Non-cyclic GFR-binding peptide
HVTKPTSAPTKLSPISILFIDDSSNVIYKQYENMVVRSSGSH

SEQ ID NO: 494 - protein, 42 aa, Artificial Sequence
  Non-cyclic GFR-binding peptide
YVPKPSSAPTKLSPISILFIDDSSNVIYKQYENMVVRSSGSH

SEQ ID NO: 495 - protein, 42 aa, Artificial Sequence
  Non-cyclic GFR-binding peptide
TVPKPSSAPTQLSPISILFIDDSSNVIYKQYENMVVRASGSH

SEQ ID NO: 496 - protein, 42 aa, Artificial Sequence
  Non-cyclic GFR-binding peptide
AVPKASSAPTKLSPISILFIDSSNNVIYKQYENMVVKASGSH

SEQ ID NO: 497 - protein, 43 aa, Artificial Sequence
  Non-cyclic GFR-binding peptide
KVGKASSVPTKLSPISILFIDDMGVPTYKQYEEGMSVAESGSR

SEQ ID NO: 498 - protein, 42 aa, Artificial Sequence
  Non-cyclic GFR-binding peptide
KASKASSVPTKLSPISILFIDKGVVTYYKQYEGMAVSESGSR

SEQ ID NO: 499 - protein, 42 aa, Artificial Sequence
  Non-cyclic GFR-binding peptide
GSAGPSSTPTKMSPISILFINDKQQIIYKQYEGMVVDRSGSS

SEQ ID NO: 500 - protein, 42 aa, Artificial Sequence
  Non-cyclic GFR-binding peptide
AAPASSSVPARLSPISILFIDAANNVVYKQYEDMVVEASGSR

SEQ ID NO: 501 - protein, 42 aa, Artificial Sequence
  Non-cyclic GFR-binding peptide
HVPKPSSAPTKLSPISILFIDDSSNVIYKQYENMVVRSSGSH

SEQ ID NO: 502 - protein, 41 aa, Artificial Sequence
  Non-cyclic GFR-binding peptide
RVPSTSSAPVKTSPISILFIDNGRVLLYKQYEMIVEESGSL

SEQ ID NO: 503 - protein, 41 aa, Artificial Sequence
  Non-cyclic GFR-binding peptide
ASAAPSSVPQALSPISILFIVGRKPKVYKQYEMIVRSSKSS

SEQ ID NO: 504 - protein, 41 aa, Artificial Sequence
  Non-cyclic GFR-binding peptide
ASASPSSVSQDLSPISILFIIGKTPKIYKQYEMIVKSSKSS

SEQ ID NO: 505 - protein, 41 aa, Artificial Sequence
  Non-cyclic GFR-binding peptide
ASASPSSVPQDLSPISILFIVGRTPKVYKQYEMVVKSSKSS

SEQ ID NO: 506 - protein, 44 aa, Artificial Sequence
  Non-cyclic GFR-binding peptide
NDEGLESVPTEESPISILFIRIKPHQGQHYKQYEFLQHNKSESR

SEQ ID NO: 507 - protein, 44 aa, Artificial Sequence
  Non-cyclic GFR-binding peptide
NDEGLESVPTGQSPISILFIRIKPHQGQHYKQYELEEHSQSESR

SEQ ID NO: 508 - protein, 45 aa, Artificial Sequence
  Non-cyclic GFR-binding peptide
SSVKSQPSRVHHSPISILFIEYVRKKPKLYKQYERLEEHLESASA

SEQ ID NO: 509 - protein, 45 aa, Artificial Sequence
  Non-cyclic GFR-binding peptide
RNVQSRPTQVQLSPISILFIEIVRKKPIFYKQYETLEDHLASKSE

SEQ ID NO: 510 - protein, 42 aa, Artificial Sequence
  Non-cyclic GFR-binding peptide
KIPKASSAPVELKPLSMLYVDENEKVVDHHKDDMVEEGSGSR

SEQ ID NO: 511 - protein, 42 aa, Artificial Sequence
  Non-cyclic GFR-binding peptide
GIPEPSSAPVKMKPLSMLYVDENKNVVDHHKDNMVEESSASR

SEQ ID NO: 512 - protein, 42 aa, Artificial Sequence
  Non-cyclic GFR-binding peptide
SIPKASSAPVELKPLSMLYVDEYDKVVDHHKDEMVEEGSGSR

SEQ ID NO: 513 - protein, 42 aa, Artificial Sequence
  Non-cyclic GFR-binding peptide
HVTKPTSAPVKLKPLSMLYVDDSSNVIDHHKDNMVEESSGSH

SEQ ID NO: 514 - protein, 42 aa, Artificial Sequence
  Non-cyclic GFR-binding peptide
YVPKPSSAPVKLKPLSMLYVDDSSNVIDHHKDNMVEESSGSH

SEQ ID NO: 515 - protein, 42 aa, Artificial Sequence
  Non-cyclic GFR-binding peptide
TVPKPSSAPVQLKPLSMLYVDDSSNVIDHHKDNMVEEASGSH

SEQ ID NO: 516 - protein, 42 aa, Artificial Sequence
  Non-cyclic GFR-binding peptide
AVPKASSAPVKLKPLSMLYVDSSNNVIDHHKDNMVEEASGSH

SEQ ID NO: 517 - protein, 43 aa, Artificial Sequence
  Non-cyclic GFR-binding peptide
KVGKASSAPVKLKPLSMLYVDDMGVPTDHHKDEGMSVEESGSR

SEQ ID NO: 518 - protein, 42 aa, Artificial Sequence
  Non-cyclic GFR-binding peptide
KASKASSAPVKLKPLSMLYVDKGVVTYDHHKDGMVEEESGSR

SEQ ID NO: 519 - protein, 42 aa, Artificial Sequence
  Non-cyclic GFR-binding peptide
GSAGPSSAPVKMKPLSMLYVNDKQQIIDHHKDGMVEERSGSS

SEQ ID NO: 520 - protein, 42 aa, Artificial Sequence
  Non-cyclic GFR-binding peptide
AAPASSSAPVRLKPLSMLYVDAANNVVDHHKDDMVEEASGSR

SEQ ID NO: 521 - protein, 42 aa, Artificial Sequence
  Non-cyclic GFR-binding peptide
STPPTSSAPVRLKPLSMLYVDSANNVVDHHKDDMVEESSGSR

SEQ ID NO: 522 - protein, 42 aa, Artificial Sequence
  Non-cyclic GFR-binding peptide
HVPKPSSAPVKLKPLSMLYVDDSSNVIDHHKDNMVEESSGSH

SEQ ID NO: 523 - protein, 41 aa, Artificial Sequence
  Non-cyclic GFR-binding peptide
ASAAPSSAPVALKPLSMLYVVGRKPKVDHHKDMIVEESKSS

SEQ ID NO: 524 - protein, 41 aa, Artificial Sequence
  Non-cyclic GFR-binding peptide
ASASPSSAPVDLKPLSMLYVIGKTPKIDHHKDMIVEESKSS

SEQ ID NO: 525 - protein, 41 aa, Artificial Sequence
  Non-cyclic GFR-binding peptide
ASASPSSAPVDLKPLSMLYVVGRTPKVDHHKDMVVEESKSS

SEQ ID NO: 526 - protein, 42 aa, Artificial Sequence
  Non-cyclic GFR-binding peptide
KIPKASSVPTELKPLSMLYVDENEKVVDHHKDDMVVEGSGSR

SEQ ID NO: 527 - protein, 42 aa, Artificial Sequence
  Non-cyclic GFR-binding peptide
GIPEPSSVPEKMKPLSMLYVDENKNVVDHHKDNMTVESSASR

SEQ ID NO: 528 - protein, 42 aa, Artificial Sequence
  Non-cyclic GFR-binding peptide
SIPKASSVPTELKPLSMLYVDEYDKVVDHHKDEMVVEGSGSR

SEQ ID NO: 529 - protein, 42 aa, Artificial Sequence
  Non-cyclic GFR-binding peptide
HVTKPTSAPTKLKPLSMLYVDDSSNVIDHHKDNMVVRSSGSH

SEQ ID NO: 530 - protein, 42 aa, Artificial Sequence
  Non-cyclic GFR-binding peptide
YVPKPSSAPTKLKPLSMLYVDDSSNVIDHHKDNMVVRSSGSH

SEQ ID NO: 531 - protein, 42 aa, Artificial Sequence
  Non-cyclic GFR-binding peptide
TVPKPSSAPTQLKPLSMLYVDDSSNVIDHHKDNMVVRASGSH

SEQ ID NO: 532 - protein, 42 aa, Artificial Sequence
  Non-cyclic GFR-binding peptide
AVPKASSAPTKLKPLSMLYVDSSNNVIDHHKDNMVVKASGSH

SEQ ID NO: 533 - protein, 43 aa, Artificial Sequence
  Non-cyclic GFR-binding peptide
KVGKASSVPTKLKPLSMLYVDDMGVPTDHHKDEGMSVAESGSR

SEQ ID NO: 534 - protein, 42 aa, Artificial Sequence
  Non-cyclic GFR-binding peptide
KASKASSVPTKLKPLSMLYVDKGVVTYDHHKDGMAVSESGSR

SEQ ID NO: 535 - protein, 42 aa, Artificial Sequence
  Non-cyclic GFR-binding peptide
GSAGPSSTPTKMKPLSMLYVNDKQQIIDHHKDGMVVDRSGSS

SEQ ID NO: 536 - protein, 42 aa, Artificial Sequence
  Non-cyclic GFR-binding peptide
AAPASSSVPARLKPLSMLYVDAANNVVDHHKDDMVVEASGSR

SEQ ID NO: 537 - protein, 42 aa, Artificial Sequence
  Non-cyclic GFR-binding peptide
STPPTSSVPTRLKPLSMLYVDSANNVVDHHKDDMVVESSGSR

SEQ ID NO: 538 - protein, 42 aa, Artificial Sequence
  Non-cyclic GFR-binding peptide
HVPKPSSAPTKLKPLSMLYVDDSSNVIDHHKDNMVVRSSGSH

SEQ ID NO: 539 - protein, 41 aa, Artificial Sequence
  Non-cyclic GFR-binding peptide
ASAAPSSVPQALKPLSMLYVVGRKPKVDHHKDMIVRSSKSS

SEQ ID NO: 540 - protein, 41 aa, Artificial Sequence
  Non-cyclic GFR-binding peptide
ASASPSSVSQDLKPLSMLYVIGKTPKIDHHKDMIVKSSKSS

SEQ ID NO: 541 - protein, 41 aa, Artificial Sequence
  Non-cyclic GFR-binding peptide
ASASPSSVPQDLKPLSMLYVVGRTPKVDHHKDMVVKSSKSS

SEQ ID NO: 542 - protein, 44 aa, Artificial Sequence
  Non-cyclic GFR-binding peptide
NDEGLESVPTEEKPLSMLYVRIKPHQGQHDHHKDFLQHNKSESR

SEQ ID NO: 543 - protein, 44 aa, Artificial Sequence
  Non-cyclic GFR-binding peptide
NDEGLESVPTGQKPLSMLYVRIKPHQGQHDHHKDLEEHSQSESR

SEQ ID NO: 544 - protein, 45 aa, Artificial Sequence
  Non-cyclic GFR-binding peptide
SSVKSQPSRVHHKPLSMLYVEYVRKKPKLDHHKDRLEEHLESASA

SEQ ID NO: 545 - protein, 45 aa, Artificial Sequence
  Non-cyclic GFR-binding peptide
RNVQSRPTQVQLKPLSMLYVEIVRKKPIFDHHKDTLEDHLASKSE

SEQ ID NO: 546 - protein, 42 aa, Artificial Sequence
  Non-cyclic GFR-binding peptide
KIPKASSVPQELEPLPIVYYDENEKVVEQLSNDMVRSGSGSR

SEQ ID NO: 547 - protein, 42 aa, Artificial Sequence
  Non-cyclic GFR-binding peptide
GIPEPSSVPQKMEPLPIVYYDENKNVVEQLSNNMVRSSSASR

SEQ ID NO: 548 - protein, 42 aa, Artificial Sequence
  Non-cyclic GFR-binding peptide
SIPKASSVPQELEPLPIVYYDEYDKVVEQLSNEMVRSGSGSR

SEQ ID NO: 549 - protein, 42 aa, Artificial Sequence
  Non-cyclic GFR-binding peptide
HVTKPTSVPQKLEPLPIVYYDDSSNVIEQLSNNMVRSSSGSH

SEQ ID NO: 550 - protein, 42 aa, Artificial Sequence
  Non-cyclic GFR-binding peptide
YVPKPSSVPQKLEPLPIVYYDDSSNVIEQLSNNMVRSSSGSH

SEQ ID NO: 551 - protein, 42 aa, Artificial Sequence
  Non-cyclic GFR-binding peptide
TVPKPSSVPQQLEPLPIVYYDDSSNVIEQLSNNMVRSASGSH

SEQ ID NO: 552 - protein, 42 aa, Artificial Sequence
  Non-cyclic GFR-binding peptide
AVPKASSVPQKLEPLPIVYYDSSNNVIEQLSNNMVRSASGSH

SEQ ID NO: 553 - protein, 43 aa, Artificial Sequence
  Non-cyclic GFR-binding peptide
KVGKASSVPQKLEPLPIVYYDDMGVPTEQLSNEGMSVRSSGSR

SEQ ID NO: 554 - protein, 42 aa, Artificial Sequence
  Non-cyclic GFR-binding peptide
KASKASSVPQKLEPLPIVYYDKGVVTYEQLSNGMVRSESGSR

SEQ ID NO: 555 - protein, 42 aa, Artificial Sequence
  Non-cyclic GFR-binding peptide
GSAGPSSVPQKMEPLPIVYYNDKQQIIEQLSNGMVRSRSGSS

SEQ ID NO: 556 - protein, 42 aa, Artificial Sequence
  Non-cyclic GFR-binding peptide
AAPASSSVPQRLEPLPIVYYDAANNVVEQLSNDMVRSASGSR

SEQ ID NO: 557 - protein, 42 aa, Artificial Sequence
  Non-cyclic GFR-binding peptide
STPPTSSVPQRLEPLPIVYYDSANNVVEQLSNDMVRSSSGSR

SEQ ID NO: 558 - protein, 42 aa, Artificial Sequence
  Non-cyclic GFR-binding peptide
HVPKPSSVPQKLEPLPIVYYDDSSNVIEQLSNNMVRSSSGSH

SEQ ID NO: 559 - protein, 41 aa, Artificial Sequence
  Non-cyclic GFR-binding peptide
RVPSTSSVPQKTEPLPIVYYDNGRVLLEQLSNMIVRSSGSL

SEQ ID NO: 560 - protein, 41 aa, Artificial Sequence
  Non-cyclic GFR-binding peptide
ASASPSSVPQDLEPLPIVYYIGKTPKIEQLSNMIVRSSKSS

SEQ ID NO: 561 - protein, 41 aa, Artificial Sequence
  Non-cyclic GFR-binding peptide
ASASPSSVPQDLEPLPIVYYVGRTPKVEQLSNMVVRSSKSS

SEQ ID NO: 562 - protein, 42 aa, Artificial Sequence
  Non-cyclic GFR-binding peptide
KIPKASSVPTELEPLPIVYYDENEKVVEQLSNDMVVEGSGSR

SEQ ID NO: 563 - protein, 42 aa, Artificial Sequence
  Non-cyclic GFR-binding peptide
GIPEPSSVPEKMEPLPIVYYDENKNVVEQLSNNMTVESSASR

SEQ ID NO: 564 - protein, 42 aa, Artificial Sequence
  Non-cyclic GFR-binding peptide
SIPKASSVPTELEPLPIVYYDEYDKVVEQLSNEMVVEGSGSR

SEQ ID NO: 565 - protein, 42 aa, Artificial Sequence
  Non-cyclic GFR-binding peptide
HVTKPTSAPTKLEPLPIVYYDDSSNVIEQLSNNMVVRSSGSH

SEQ ID NO: 566 - protein, 42 aa, Artificial Sequence
  Non-cyclic GFR-binding peptide
YVPKPSSAPTKLEPLPIVYYDDSSNVIEQLSNNMVVRSSGSH

SEQ ID NO: 567 - protein, 42 aa, Artificial Sequence
  Non-cyclic GFR-binding peptide
TVPKPSSAPTQLEPLPIVYYDDSSNVIEQLSNNMVVRASGSH

SEQ ID NO: 568 - protein, 42 aa, Artificial Sequence
  Non-cyclic GFR-binding peptide
AVPKASSAPTKLEPLPIVYYDSSNNVIEQLSNNMVVKASGSH

SEQ ID NO: 569 - protein, 43 aa, Artificial Sequence
  Non-cyclic GFR-binding peptide
KVGKASSVPTKLEPLPIVYYDDMGVPTEQLSNEGMSVAESGSR

SEQ ID NO: 570 - protein, 42 aa, Artificial Sequence
  Non-cyclic GFR-binding peptide
KASKASSVPTKLEPLPIVYYDKGVVTYEQLSNGMAVSESGSR

SEQ ID NO: 571 - protein, 42 aa, Artificial Sequence
  Non-cyclic GFR-binding peptide
GSAGPSSTPTKMEPLPIVYYNDKQQIIEQLSNGMVVDRSGSS

SEQ ID NO: 572 - protein, 42 aa, Artificial Sequence
  Non-cyclic GFR-binding peptide
AAPASSSVPARLEPLPIVYYDAANNVVEQLSNDMVVEASGSR

SEQ ID NO: 573 - protein, 42 aa, Artificial Sequence
  Non-cyclic GFR-binding peptide
STPPTSSVPTRLEPLPIVYYDSANNVVEQLSNDMVVESSGSR

SEQ ID NO: 574 - protein, 42 aa, Artificial Sequence
  Non-cyclic GFR-binding peptide
HVPKPSSAPTKLEPLPIVYYDDSSNVIEQLSNNMVVRSSGSH

SEQ ID NO: 575 - protein, 41 aa, Artificial Sequence
  Non-cyclic GFR-binding peptide
RVPSTSSAPVKTEPLPIVYYDNGRVLLEQLSNMIVEESGSL

SEQ ID NO: 576 - protein, 41 aa, Artificial Sequence
  Non-cyclic GFR-binding peptide
ASASPSSVSQDLEPLPIVYYIGKTPKIEQLSNMIVKSSKSS

SEQ ID NO: 577 - protein, 41 aa, Artificial Sequence
  Non-cyclic GFR-binding peptide
ASASPSSVPQDLEPLPIVYYVGRTPKVEQLSNMVVKSSKSS

SEQ ID NO: 578 - protein, 44 aa, Artificial Sequence
  Non-cyclic GFR-binding peptide
NDEGLESVPTEEEPLPIVYYRIKPHQGQHEQLSNFLQHNKSESR

SEQ ID NO: 579 - protein, 44 aa, Artificial Sequence
  Non-cyclic GFR-binding peptide
NDEGLESVPTGQEPLPIVYYRIKPHQGQHEQLSNLEEHSQSESR

SEQ ID NO: 580 - protein, 45 aa, Artificial Sequence
  Non-cyclic GFR-binding peptide
SSVKSQPSRVHHEPLPIVYYEYVRKKPKLEQLSNRLEEHLESASA

SEQ ID NO: 581 - protein, 45 aa, Artificial Sequence
  Non-cyclic GFR-binding peptide
RNVQSRPTQVQLEPLPIVYYEIVRKKPIFEQLSNTLEDHLASKSE

SEQ ID NO: 582 - protein, 42 aa, Artificial Sequence
  Non-cyclic GFR-binding peptide
KIPKASSVSQELEPLTILYYDENEKVVEQLSNDMVKSGSGSR

SEQ ID NO: 583 - protein, 42 aa, Artificial Sequence
  Non-cyclic GFR-binding peptide
GIPEPSSVSQKMEPLTILYYDENKNVVEQLSNNMVKSSSASR

SEQ ID NO: 584 - protein, 42 aa, Artificial Sequence
  Non-cyclic GFR-binding peptide
SIPKASSVSQELEPLTILYYDEYDKVVEQLSNEMVKSGSGSR

SEQ ID NO: 585 - protein, 42 aa, Artificial Sequence
  Non-cyclic GFR-binding peptide
HVTKPTSVSQKLEPLTILYYDDSSNVIEQLSNNMVKSSSGSH

SEQ ID NO: 586 - protein, 42 aa, Artificial Sequence
  Non-cyclic GFR-binding peptide
YVPKPSSVSQKLEPLTILYYDDSSNVIEQLSNNMVKSSSGSH

SEQ ID NO: 587 - protein, 42 aa, Artificial Sequence
  Non-cyclic GFR-binding peptide
TVPKPSSVSQQLEPLTILYYDDSSNVIEQLSNNMVKSASGSH

SEQ ID NO: 588 - protein, 42 aa, Artificial Sequence
  Non-cyclic GFR-binding peptide
AVPKASSVSQKLEPLTILYYDSSNNVIEQLSNNMVKSASGSH

SEQ ID NO: 589 - protein, 43 aa, Artificial Sequence
  Non-cyclic GFR-binding peptide
KVGKASSVSQKLEPLTILYYDDMGVPTEQLSNEGMSVKSSGSR

SEQ ID NO: 590 - protein, 42 aa, Artificial Sequence
  Non-cyclic GFR-binding peptide
KASKASSVSQKLEPLTILYYDKGVVTYEQLSNGMVKSESGSR

SEQ ID NO: 591 - protein, 42 aa, Artificial Sequence
  Non-cyclic GFR-binding peptide
GSAGPSSVSQKMEPLTILYYNDKQQIIEQLSNGMVKSRSGSS

SEQ ID NO: 592 - protein, 42 aa, Artificial Sequence
  Non-cyclic GFR-binding peptide
AAPASSSVSQRLEPLTILYYDAANNVVEQLSNDMVKSASGSR

SEQ ID NO: 593 - protein, 42 aa, Artificial Sequence
  Non-cyclic GFR-binding peptide
STPPTSSVSQRLEPLTILYYDSANNVVEQLSNDMVKSSSGSR

SEQ ID NO: 594 - protein, 42 aa, Artificial Sequence
  Non-cyclic GFR-binding peptide
HVPKPSSVSQKLEPLTILYYDDSSNVIEQLSNNMVKSSSGSH

SEQ ID NO: 595 - protein, 41 aa, Artificial Sequence
  Non-cyclic GFR-binding peptide
RVPSTSSVSQKTEPLTILYYDNGRVLLEQLSNMIVKSSGSL

SEQ ID NO: 596 - protein, 41 aa, Artificial Sequence
  Non-cyclic GFR-binding peptide
ASAAPSSVSQALEPLTILYYVGRKPKVEQLSNMIVKSSKSS

SEQ ID NO: 597 - protein, 41 aa, Artificial Sequence
  Non-cyclic GFR-binding peptide
ASASPSSVSQDLEPLTILYYVGRTPKVEQLSNMVVKSSKSS

SEQ ID NO: 598 - protein, 42 aa, Artificial Sequence
  Non-cyclic GFR-binding peptide
KIPKASSVPTELEPLTILYYDENEKVVEQLSNDMVVEGSGSR

SEQ ID NO: 599 - protein, 42 aa, Artificial Sequence
  Non-cyclic GFR-binding peptide
GIPEPSSVPEKMEPLTILYYDENKNVVEQLSNNMTVESSASR

SEQ ID NO: 600 - protein, 42 aa, Artificial Sequence
  Non-cyclic GFR-binding peptide
SIPKASSVPTELEPLTILYYDEYDKVVEQLSNEMVVEGSGSR

SEQ ID NO: 601 - protein, 42 aa, Artificial Sequence
  Non-cyclic GFR-binding peptide
HVTKPTSAPTKLEPLTILYYDDSSNVIEQLSNNMVVRSSGSH

SEQ ID NO: 602 - protein, 42 aa, Artificial Sequence
  Non-cyclic GFR-binding peptide
YVPKPSSAPTKLEPLTILYYDDSSNVIEQLSNNMVVRSSGSH

SEQ ID NO: 603 - protein, 42 aa, Artificial Sequence
  Non-cyclic GFR-binding peptide
TVPKPSSAPTQLEPLTILYYDDSSNVIEQLSNNMVVRASGSH

SEQ ID NO: 604 - protein, 42 aa, Artificial Sequence
  Non-cyclic GFR-binding peptide
AVPKASSAPTKLEPLTILYYDSSNNVIEQLSNNMVVKASGSH

SEQ ID NO: 605 - protein, 43 aa, Artificial Sequence
  Non-cyclic GFR-binding peptide
KVGKASSVPTKLEPLTILYYDDMGVPTEQLSNEGMSVAESGSR

SEQ ID NO: 606 - protein, 42 aa, Artificial Sequence
  Non-cyclic GFR-binding peptide
KASKASSVPTKLEPLTILYYDKGVVTYEQLSNGMAVSESGSR

SEQ ID NO: 607 - protein, 42 aa, Artificial Sequence
  Non-cyclic GFR-binding peptide
GSAGPSSTPTKMEPLTILYYNDKQQIIEQLSNGMVVDRSGSS

SEQ ID NO: 608 - protein, 42 aa, Artificial Sequence
  Non-cyclic GFR-binding peptide
AAPASSSVPARLEPLTILYYDAANNVVEQLSNDMVVEASGSR

SEQ ID NO: 609 - protein, 42 aa, Artificial Sequence
  Non-cyclic GFR-binding peptide
STPPTSSVPTRLEPLTILYYDSANNVVEQLSNDMVVESSGSR

SEQ ID NO: 610 - protein, 42 aa, Artificial Sequence
  Non-cyclic GFR-binding peptide
HVPKPSSAPTKLEPLTILYYDDSSNVIEQLSNNMVVRSSGSH

SEQ ID NO: 611 - protein, 41 aa, Artificial Sequence
  Non-cyclic GFR-binding peptide
RVPSTSSAPVKTEPLTILYYDNGRVLLEQLSNMIVEESGSL

SEQ ID NO: 612 - protein, 41 aa, Artificial Sequence
  Non-cyclic GFR-binding peptide
ASAAPSSVPQALEPLTILYYVGRKPKVEQLSNMIVRSSKSS

SEQ ID NO: 613 - protein, 44 aa, Artificial Sequence
  Non-cyclic GFR-binding peptide
NDEGLESVPTEEEPLTILYYRIKPHQGQHEQLSNFLQHNKSESR

SEQ ID NO: 614 - protein, 44 aa, Artificial Sequence
  Non-cyclic GFR-binding peptide
NDEGLESVPTGQEPLTILYYRIKPHQGQHEQLSNLEEHSQSESR

SEQ ID NO: 615 - protein, 45 aa, Artificial Sequence
  Non-cyclic GFR-binding peptide
SSVKSQPSRVHHEPLTILYYEYVRKKPKLEQLSNRLEEHLESASA

SEQ ID NO: 616 - protein, 45 aa, Artificial Sequence
  Non-cyclic GFR-binding peptide
RNVQSRPTQVQLEPLTILYYEIVRKKPIFEQLSNTLEDHLASKSE

SEQ ID NO: 617 - protein, 42 aa, Artificial Sequence
  Non-cyclic GFR-binding peptide
KIPKASSVPQELEPLTILYYDENEKVVEQLSNDMVKSGSGSR

SEQ ID NO: 618 - protein, 42 aa, Artificial Sequence
  Non-cyclic GFR-binding peptide
GIPEPSSVPQKMEPLTILYYDENKNVVEQLSNNMVKSSSASR

SEQ ID NO: 619 - protein, 42 aa, Artificial Sequence
  Non-cyclic GFR-binding peptide
SIPKASSVPQELEPLTILYYDEYDKVVEQLSNEMVKSGSGSR

SEQ ID NO: 620 - protein, 42 aa, Artificial Sequence
  Non-cyclic GFR-binding peptide
HVTKPTSVPQKLEPLTILYYDDSSNVIEQLSNNMVKSSSGSH

SEQ ID NO: 621 - protein, 42 aa, Artificial Sequence
  Non-cyclic GFR-binding peptide
YVPKPSSVPQKLEPLTILYYDDSSNVIEQLSNNMVKSSSGSH

SEQ ID NO: 622 - protein, 42 aa, Artificial Sequence
  Non-cyclic GFR-binding peptide
TVPKPSSVPQQLEPLTILYYDDSSNVIEQLSNNMVKSASGSH

SEQ ID NO: 623 - protein, 42 aa, Artificial Sequence
  Non-cyclic GFR-binding peptide
AVPKASSVPQKLEPLTILYYDSSNNVIEQLSNNMVKSASGSH

SEQ ID NO: 624 - protein, 43 aa, Artificial Sequence
  Non-cyclic GFR-binding peptide
KVGKASSVPQKLEPLTILYYDDMGVPTEQLSNEGMSVKSSGSR

SEQ ID NO: 625 - protein, 42 aa, Artificial Sequence
  Non-cyclic GFR-binding peptide
KASKASSVPQKLEPLTILYYDKGVVTYEQLSNGMVKSESGSR

SEQ ID NO: 626 - protein, 42 aa, Artificial Sequence
  Non-cyclic GFR-binding peptide
GSAGPSSVPQKMEPLTILYYNDKQQIIEQLSNGMVKSRSGSS

SEQ ID NO: 627 - protein, 42 aa, Artificial Sequence
  Non-cyclic GFR-binding peptide
AAPASSSVPQRLEPLTILYYDAANNVVEQLSNDMVKSASGSR

SEQ ID NO: 628 - protein, 42 aa, Artificial Sequence
  Non-cyclic GFR-binding peptide
STPPTSSVPQRLEPLTILYYDSANNVVEQLSNDMVKSSSGSR

SEQ ID NO: 629 - protein, 42 aa, Artificial Sequence
  Non-cyclic GFR-binding peptide
HVPKPSSVPQKLEPLTILYYDDSSNVIEQLSNNMVKSSSGSH

SEQ ID NO: 630 - protein, 41 aa, Artificial Sequence
  Non-cyclic GFR-binding peptide
RVPSTSSVPQKTEPLTILYYDNGRVLLEQLSNMIVKSSGSL

SEQ ID NO: 631 - protein, 41 aa, Artificial Sequence
  Non-cyclic GFR-binding peptide
ASAAPSSVPQALEPLTILYYVGRKPKVEQLSNMIVKSSKSS

SEQ ID NO: 632 - protein, 41 aa, Artificial Sequence
  Non-cyclic GFR-binding peptide
ASASPSSVPQDLEPLTILYYIGKTPKIEQLSNMIVKSSKSS

SEQ ID NO: 633 - protein, 44 aa, Artificial Sequence
  Non-cyclic GFR-binding peptide
NDEGLESVPTGQSNITMQIMRIKPHQGQHIGEMSLEQHNQSESR

SEQ ID NO: 634 - protein, 42 aa, Artificial Sequence
  Non-cyclic GFR-binding peptide
KIPKASSVPTELSNITMQIMDENEKVVIGEMSDMVVEGSGSR

SEQ ID NO: 635 - protein, 42 aa, Artificial Sequence
  Non-cyclic GFR-binding peptide
GIPEPSSVPEKMSNITMQIMDENKNVVIGEMSNMTVESSASR

SEQ ID NO: 636 - protein, 42 aa, Artificial Sequence
  Non-cyclic GFR-binding peptide
SIPKASSVPTELSNITMQIMDEYDKVVIGEMSEMVVEGSGSR

SEQ ID NO: 637 - protein, 42 aa, Artificial Sequence
  Non-cyclic GFR-binding peptide
HVTKPTSAPTKLSNITMQIMDDSSNVIIGEMSNMVVRSSGSH

SEQ ID NO: 638 - protein, 42 aa, Artificial Sequence
  Non-cyclic GFR-binding peptide
YVPKPSSAPTKLSNITMQIMDDSSNVIIGEMSNMVVRSSGSH

SEQ ID NO: 639 - protein, 42 aa, Artificial Sequence
  Non-cyclic GFR-binding peptide
TVPKPSSAPTQLSNITMQIMDDSSNVIIGEMSNMVVRASGSH

SEQ ID NO: 640 - protein, 42 aa, Artificial Sequence
  Non-cyclic GFR-binding peptide
AVPKASSAPTKLSNITMQIMDSSNNVIIGEMSNMVVKASGSH

SEQ ID NO: 641 - protein, 43 aa, Artificial Sequence
  Non-cyclic GFR-binding peptide
KVGKASSVPTKLSNITMQIMDDMGVPTIGEMSEGMSVAESGSR

SEQ ID NO: 642 - protein, 42 aa, Artificial Sequence
  Non-cyclic GFR-binding peptide
KASKASSVPTKLSNITMQIMDKGVVTYIGEMSGMAVSESGSR

SEQ ID NO: 643 - protein, 42 aa, Artificial Sequence
  Non-cyclic GFR-binding peptide
GSAGPSSTPTKMSNITMQIMNDKQQIIIGEMSGMVVDRSGSS

SEQ ID NO: 644 - protein, 42 aa, Artificial Sequence
  Non-cyclic GFR-binding peptide
AAPASSSVPARLSNITMQIMDAANNVVIGEMSDMVVEASGSR

SEQ ID NO: 645 - protein, 42 aa, Artificial Sequence
  Non-cyclic GFR-binding peptide
STPPTSSVPTRLSNITMQIMDSANNVVIGEMSDMVVESSGSR

SEQ ID NO: 646 - protein, 42 aa, Artificial Sequence
  Non-cyclic GFR-binding peptide
HVPKPSSAPTKLSNITMQIMDDSSNVIIGEMSNMVVRSSGSH

SEQ ID NO: 647 - protein, 41 aa, Artificial Sequence
  Non-cyclic GFR-binding peptide
RVPSTSSAPVKTSNITMQIMDNGRVLLIGEMSMIVEESGSL

SEQ ID NO: 648 - protein, 41 aa, Artificial Sequence
  Non-cyclic GFR-binding peptide
ASAAPSSVPQALSNITMQIMVGRKPKVIGEMSMIVRSSKSS

SEQ ID NO: 649 - protein, 41 aa, Artificial Sequence
  Non-cyclic GFR-binding peptide
ASASPSSVSQDLSNITMQIMIGKTPKIIGEMSMIVKSSKSS

SEQ ID NO: 650 - protein, 41 aa, Artificial Sequence
  Non-cyclic GFR-binding peptide
ASASPSSVPQDLSNITMQIMVGRTPKVIGEMSMVVKSSKSS

SEQ ID NO: 651 - protein, 44 aa, Artificial Sequence
  Non-cyclic GFR-binding peptide
NDEGLESVPTGQSNITMQIMRIKPHQGQHIGEMSLEEHSQSESR

SEQ ID NO: 652 - protein, 45 aa, Artificial Sequence
  Non-cyclic GFR-binding peptide
SSVKSQPSRVHHSNITMQIMEYVRKKPKLIGEMSRLEEHLESASA

SEQ ID NO: 653 - protein, 45 aa, Artificial Sequence
  Non-cyclic GFR-binding peptide
RNVQSRPTQVQLSNITMQIMEIVRKKPIFIGEMSTLEDHLASKSE

SEQ ID NO: 654 - protein, 44 aa, Artificial Sequence
  Non-cyclic GFR-binding peptide
NDEGLESVPTEESNITMQIMRIKPHQGQHLGEMSFLEHSKSESR

SEQ ID NO: 655 - protein, 42 aa, Artificial Sequence
  Non-cyclic GFR-binding peptide
KIPKASSVPTELSNITMQIMDENEKVVLGEMSDMVVEGSGSR

SEQ ID NO: 656 - protein, 42 aa, Artificial Sequence
  Non-cyclic GFR-binding peptide
GIPEPSSVPEKMSNITMQIMDENKNVVLGEMSNMTVESSASR

SEQ ID NO: 657 - protein, 42 aa, Artificial Sequence
  Non-cyclic GFR-binding peptide
SIPKASSVPTELSNITMQIMDEYDKVVLGEMSEMVVEGSGSR

SEQ ID NO: 658 - protein, 42 aa, Artificial Sequence
  Non-cyclic GFR-binding peptide
HVTKPTSAPTKLSNITMQIMDDSSNVILGEMSNMVVRSSGSH

SEQ ID NO: 659 - protein, 42 aa, Artificial Sequence
  Non-cyclic GFR-binding peptide
YVPKPSSAPTKLSNITMQIMDDSSNVILGEMSNMVVRSSGSH

SEQ ID NO: 660 - protein, 42 aa, Artificial Sequence
  Non-cyclic GFR-binding peptide
TVPKPSSAPTQLSNITMQIMDDSSNVILGEMSNMVVRASGSH

SEQ ID NO: 661 - protein, 42 aa, Artificial Sequence
  Non-cyclic GFR-binding peptide
AVPKASSAPTKLSNITMQIMDSSNNVILGEMSNMVVKASGSH

SEQ ID NO: 662 - protein, 43 aa, Artificial Sequence
  Non-cyclic GFR-binding peptide
KVGKASSVPTKLSNITMQIMDDMGVPTLGEMSEGMSVAESGSR

SEQ ID NO: 663 - protein, 42 aa, Artificial Sequence
  Non-cyclic GFR-binding peptide
KASKASSVPTKLSNITMQIMDKGVVTYLGEMSGMAVSESGSR

SEQ ID NO: 664 - protein, 42 aa, Artificial Sequence
  Non-cyclic GFR-binding peptide
GSAGPSSTPTKMSNITMQIMNDKQQIILGEMSGMVVDRSGSS

SEQ ID NO: 665 - protein, 42 aa, Artificial Sequence
  Non-cyclic GFR-binding peptide
AAPASSSVPARLSNITMQIMDAANNVVLGEMSDMVVEASGSR

SEQ ID NO: 666 - protein, 42 aa, Artificial Sequence
  Non-cyclic GFR-binding peptide
STPPTSSVPTRLSNITMQIMDSANNVVLGEMSDMVVESSGSR

SEQ ID NO: 667 - protein, 42 aa, Artificial Sequence
  Non-cyclic GFR-binding peptide
HVPKPSSAPTKLSNITMQIMDDSSNVILGEMSNMVVRSSGSH

SEQ ID NO: 668 - protein, 41 aa, Artificial Sequence
  Non-cyclic GFR-binding peptide
RVPSTSSAPVKTSNITMQIMDNGRVLLLGEMSMIVEESGSL

SEQ ID NO: 669 - protein, 41 aa, Artificial Sequence
  Non-cyclic GFR-binding peptide
ASAAPSSVPQALSNITMQIMVGRKPKVLGEMSMIVRSSKSS

SEQ ID NO: 670 - protein, 41 aa, Artificial Sequence
  Non-cyclic GFR-binding peptide
ASASPSSVSQDLSNITMQIMIGKTPKILGEMSMIVKSSKSS

SEQ ID NO: 671 - protein, 41 aa, Artificial Sequence
  Non-cyclic GFR-binding peptide
ASASPSSVPQDLSNITMQIMVGRTPKVLGEMSMVVKSSKSS

SEQ ID NO: 672 - protein, 44 aa, Artificial Sequence
  Non-cyclic GFR-binding peptide
NDEGLESVPTEESNITMQIMRIKPHQGQHLGEMSFLQHNKSESR

SEQ ID NO: 673 - protein, 45 aa, Artificial Sequence
  Non-cyclic GFR-binding peptide
SSVKSQPSRVHHSNITMQIMEYVRKKPKLLGEMSRLEEHLESASA

SEQ ID NO: 674 - protein, 45 aa, Artificial Sequence
  Non-cyclic GFR-binding peptide
RNVQSRPTQVQLSNITMQIMEIVRKKPIFLGEMSTLEDHLASKSE

SEQ ID NO: 675 - protein, 45 aa, Artificial Sequence
  Non-cyclic GFR-binding peptide
RNVQSRPSRVQLRSVKVAKVEIVRKKPIFKEVQVTLEEHLASKSE

SEQ ID NO: 676 - protein, 42 aa, Artificial Sequence
  Non-cyclic GFR-binding peptide
KIPKASSVPTELRSVKVAKVDENEKVVKEVQVDMVVEGSGSR

SEQ ID NO: 677 - protein, 42 aa, Artificial Sequence
  Non-cyclic GFR-binding peptide
GIPEPSSVPEKMRSVKVAKVDENKNVVKEVQVNMTVESSASR

SEQ ID NO: 678 - protein, 42 aa, Artificial Sequence
  Non-cyclic GFR-binding peptide
SIPKASSVPTELRSVKVAKVDEYDKVVKEVQVEMVVEGSGSR

SEQ ID NO: 679 - protein, 42 aa, Artificial Sequence
  Non-cyclic GFR-binding peptide
HVTKPTSAPTKLRSVKVAKVDDSSNVIKEVQVNMVVRSSGSH

SEQ ID NO: 680 - protein, 42 aa, Artificial Sequence
  Non-cyclic GFR-binding peptide
YVPKPSSAPTKLRSVKVAKVDDSSNVIKEVQVNMVVRSSGSH

SEQ ID NO: 681 - protein, 42 aa, Artificial Sequence
  Non-cyclic GFR-binding peptide
TVPKPSSAPTQLRSVKVAKVDDSSNVIKEVQVNMVVRASGSH

SEQ ID NO: 682 - protein, 42 aa, Artificial Sequence
  Non-cyclic GFR-binding peptide
AVPKASSAPTKLRSVKVAKVDSSNNVIKEVQVNMVVKASGSH

SEQ ID NO: 683 - protein, 43 aa, Artificial Sequence
  Non-cyclic GFR-binding peptide
KVGKASSVPTKLRSVKVAKVDDMGVPTKEVQVEGMSVAESGSR

SEQ ID NO: 684 - protein, 42 aa, Artificial Sequence
  Non-cyclic GFR-binding peptide
KASKASSVPTKLRSVKVAKVDKGVVTYKEVQVGMAVSESGSR

SEQ ID NO: 685 - protein, 42 aa, Artificial Sequence
  Non-cyclic GFR-binding peptide
GSAGPSSTPTKMRSVKVAKVNDKQQIIKEVQVGMVVDRSGSS

SEQ ID NO: 686 - protein, 42 aa, Artificial Sequence
  Non-cyclic GFR-binding peptide
AAPASSSVPARLRSVKVAKVDAANNVVKEVQVDMVVEASGSR

SEQ ID NO: 687 - protein, 42 aa, Artificial Sequence
  Non-cyclic GFR-binding peptide
STPPTSSVPTRLRSVKVAKVDSANNVVKEVQVDMVVESSGSR

SEQ ID NO: 688 - protein, 42 aa, Artificial Sequence
  Non-cyclic GFR-binding peptide
HVPKPSSAPTKLRSVKVAKVDDSSNVIKEVQVNMVVRSSGSH

SEQ ID NO: 689 - protein, 41 aa, Artificial Sequence
  Non-cyclic GFR-binding peptide
RVPSTSSAPVKTRSVKVAKVDNGRVLLKEVQVMIVEESGSL

SEQ ID NO: 690 - protein, 41 aa, Artificial Sequence
  Non-cyclic GFR-binding peptide
ASAAPSSVPQALRSVKVAKVVGRKPKVKEVQVMIVRSSKSS

SEQ ID NO: 691 - protein, 41 aa, Artificial Sequence
  Non-cyclic GFR-binding peptide
ASASPSSVSQDLRSVKVAKVIGKTPKIKEVQVMIVKSSKSS

SEQ ID NO: 692 - protein, 41 aa, Artificial Sequence
  Non-cyclic GFR-binding peptide
ASASPSSVPQDLRSVKVAKVVGRTPKVKEVQVMVVKSSKSS

SEQ ID NO: 693 - protein, 44 aa, Artificial Sequence
  Non-cyclic GFR-binding peptide
NDEGLESVPTEERSVKVAKVRIKPHQGQHKEVQVFLQHNKSESR

SEQ ID NO: 694 - protein, 44 aa, Artificial Sequence
  Non-cyclic GFR-binding peptide
NDEGLESVPTGQRSVKVAKVRIKPHQGQHKEVQVLEEHSQSESR

SEQ ID NO: 695 - protein, 45 aa, Artificial Sequence
  Non-cyclic GFR-binding peptide
RNVQSRPTQVQLRSVKVAKVEIVRKKPIFKEVQVTLEDHLASKSE

SEQ ID NO: 696 - protein, 45 aa, Artificial Sequence
  Non-cyclic GFR-binding peptide
SSVKSQPTQVHHRPVQVRKIEYVRKKPKLKKATVRLEDHLESASA

SEQ ID NO: 697 - protein, 42 aa, Artificial Sequence
  Non-cyclic GFR-binding peptide
KIPKASSVPTELRPVQVRKIDENEKVVKKATVDMVVEGSGSR

SEQ ID NO: 698 - protein, 42 aa, Artificial Sequence
  Non-cyclic GFR-binding peptide
GIPEPSSVPEKMRPVQVRKIDENKNVVKKATVNMTVESSASR

SEQ ID NO: 699 - protein, 42 aa, Artificial Sequence
  Non-cyclic GFR-binding peptide
SIPKASSVPTELRPVQVRKIDEYDKVVKKATVEMVVEGSGSR

SEQ ID NO: 700 - protein, 42 aa, Artificial Sequence
  Non-cyclic GFR-binding peptide
HVTKPTSAPTKLRPVQVRKIDDSSNVIKKATVNMVVRSSGSH

SEQ ID NO: 701 - protein, 42 aa, Artificial Sequence
  Non-cyclic GFR-binding peptide
YVPKPSSAPTKLRPVQVRKIDDSSNVIKKATVNMVVRSSGSH

SEQ ID NO: 702 - protein, 42 aa, Artificial Sequence
  Non-cyclic GFR-binding peptide
TVPKPSSAPTQLRPVQVRKIDDSSNVIKKATVNMVVRASGSH

SEQ ID NO: 703 - protein, 42 aa, Artificial Sequence
  Non-cyclic GFR-binding peptide
AVPKASSAPTKLRPVQVRKIDSSNNVIKKATVNMVVKASGSH

SEQ ID NO: 704 - protein, 43 aa, Artificial Sequence
  Non-cyclic GFR-binding peptide
KVGKASSVPTKLRPVQVRKIDDMGVPTKKATVEGMSVAESGSR

SEQ ID NO: 705 - protein, 42 aa, Artificial Sequence
  Non-cyclic GFR-binding peptide
KASKASSVPTKLRPVQVRKIDKGVVTYKKATVGMAVSESGSR

SEQ ID NO: 706 - protein, 42 aa, Artificial Sequence
  Non-cyclic GFR-binding peptide
GSAGPSSTPTKMRPVQVRKINDKQQIIKKATVGMVVDRSGSS

SEQ ID NO: 707 - protein, 42 aa, Artificial Sequence
  Non-cyclic GFR-binding peptide
AAPASSSVPARLRPVQVRKIDAANNVVKKATVDMVVEASGSR

SEQ ID NO: 708 - protein, 42 aa, Artificial Sequence
  Non-cyclic GFR-binding peptide
STPPTSSVPTRLRPVQVRKIDSANNVVKKATVDMVVESSGSR

SEQ ID NO: 709 - protein, 42 aa, Artificial Sequence
  Non-cyclic GFR-binding peptide
HVPKPSSAPTKLRPVQVRKIDDSSNVIKKATVNMVVRSSGSH

SEQ ID NO: 710 - protein, 41 aa, Artificial Sequence
  Non-cyclic GFR-binding peptide
RVPSTSSAPVKTRPVQVRKIDNGRVLLKKATVMIVEESGSL

SEQ ID NO: 711 - protein, 41 aa, Artificial Sequence
  Non-cyclic GFR-binding peptide
ASAAPSSVPQALRPVQVRKIVGRKPKVKKATVMIVRSSKSS

SEQ ID NO: 712 - protein, 41 aa, Artificial Sequence
  Non-cyclic GFR-binding peptide
ASASPSSVSQDLRPVQVRKIIGKTPKIKKATVMIVKSSKSS

SEQ ID NO: 713 - protein, 41 aa, Artificial Sequence
  Non-cyclic GFR-binding peptide
ASASPSSVPQDLRPVQVRKIVGRTPKVKKATVMVVKSSKSS

SEQ ID NO: 714 - protein, 44 aa, Artificial Sequence
  Non-cyclic GFR-binding peptide
NDEGLESVPTEERPVQVRKIRIKPHQGQHKKATVFLQHNKSESR

SEQ ID NO: 715 - protein, 44 aa, Artificial Sequence
  Non-cyclic GFR-binding peptide
NDEGLESVPTGQRPVQVRKIRIKPHQGQHKKATVLEEHSQSESR

SEQ ID NO: 716 - protein, 45 aa, Artificial Sequence
  Non-cyclic GFR-binding peptide
SSVKSQPSRVHHRPVQVRKIEYVRKKPKLKKATVRLEEHLESASA

SEQ ID NO: 717 - protein, 30 aa, Artificial Sequence
  Non-cyclic GFR-binding peptide
VPTKMSAISMLYLDENKNVVLKNYQNMVVE

SEQ ID NO: 718 - protein, 30 aa, Artificial Sequence
  Non-cyclic GFR-binding peptide
VPTKLSAISMLYLDDSSNVILKNYQNMVVE

SEQ ID NO: 719 - protein, 30 aa, Artificial Sequence
  Non-cyclic GFR-binding peptide
VPTQLSAISMLYLDDSSNVILKNYQNMVVE

SEQ ID NO: 720 - protein, 30 aa, Artificial Sequence
  Non-cyclic GFR-binding peptide
VPTKLSAISMLYLDSSNNVILKNYQNMVVE

SEQ ID NO: 721 - protein, 32 aa, Artificial Sequence
  Non-cyclic GFR-binding peptide
VPTKLSAISMLYLDDMGVPTLKNYQEGMSVVE

SEQ ID NO: 722 - protein, 30 aa, Artificial Sequence
  Non-cyclic GFR-binding peptide
VPTKLSAISMLYLDKGVVTYLKNYQGMVVE

SEQ ID NO: 723 - protein, 30 aa, Artificial Sequence
  Non-cyclic GFR-binding peptide
VPTKMSAISMLYLNDKQQIILKNYQGMVVE

SEQ ID NO: 724 - protein, 30 aa, Artificial Sequence
  Non-cyclic GFR-binding peptide
VPTRLSAISMLYLDAANNVVLKNYQDMVVE

SEQ ID NO: 725 - protein, 30 aa, Artificial Sequence
  Non-cyclic GFR-binding peptide
VPTRLSAISMLYLDSANNVVLKNYQDMVVE

SEQ ID NO: 726 - protein, 30 aa, Artificial Sequence
  Non-cyclic GFR-binding peptide
VPTKTSAISMLYLDNGRVLLLKNYQMIVVE

SEQ ID NO: 727 - protein, 30 aa, Artificial Sequence
  Non-cyclic GFR-binding peptide
VPTALSAISMLYLVGRKPKVLKNYQMIVVE

SEQ ID NO: 728 - protein, 30 aa, Artificial Sequence
  Non-cyclic GFR-binding peptide
VPTDLSAISMLYLIGKTPKILKNYQMIVVE

SEQ ID NO: 729 - protein, 30 aa, Artificial Sequence
  Non-cyclic GFR-binding peptide
VPTDLSAISMLYLVGRTPKVLKNYQMVVVE

SEQ ID NO: 730 - protein, 30 aa, Artificial Sequence
  Non-cyclic GFR-binding peptide
VPEKMSAISMLYLDENKNVVLKNYQNMTVE

SEQ ID NO: 731 - protein, 30 aa, Artificial Sequence
  Non-cyclic GFR-binding peptide
APTKLSAISMLYLDDSSNVILKNYQNMVVR

SEQ ID NO: 732 - protein, 30 aa, Artificial Sequence
  Non-cyclic GFR-binding peptide
APTQLSAISMLYLDDSSNVILKNYQNMVVR

SEQ ID NO: 733 - protein, 30 aa, Artificial Sequence
  Non-cyclic GFR-binding peptide
APTKLSAISMLYLDSSNNVILKNYQNMVVK

SEQ ID NO: 734 - protein, 32 aa, Artificial Sequence
  Non-cyclic GFR-binding peptide
VPTKLSAISMLYLDDMGVPTLKNYQEGMSVAE

SEQ ID NO: 735 - protein, 30 aa, Artificial Sequence
  Non-cyclic GFR-binding peptide
VPTKLSAISMLYLDKGVVTYLKNYQGMAVS

SEQ ID NO: 736 - protein, 30 aa, Artificial Sequence
  Non-cyclic GFR-binding peptide
TPTKMSAISMLYLNDKQQIILKNYQGMVVD

SEQ ID NO: 737 - protein, 30 aa, Artificial Sequence
  Non-cyclic GFR-binding peptide
VPARLSAISMLYLDAANNVVLKNYQDMVVE

SEQ ID NO: 738 - protein, 30 aa, Artificial Sequence
  Non-cyclic GFR-binding peptide
APVKTSAISMLYLDNGRVLLLKNYQMIVEE

SEQ ID NO: 739 - protein, 30 aa, Artificial Sequence
  Non-cyclic GFR-binding peptide
VPQALSAISMLYLVGRKPKVLKNYQMIVRS

SEQ ID NO: 740 - protein, 30 aa, Artificial Sequence
  Non-cyclic GFR-binding peptide
VSQDLSAISMLYLIGKTPKILKNYQMIVKS

SEQ ID NO: 741 - protein, 30 aa, Artificial Sequence
  Non-cyclic GFR-binding peptide
VPQDLSAISMLYLVGRTPKVLKNYQMVVKS

SEQ ID NO: 742 - protein, 32 aa, Artificial Sequence
  Non-cyclic GFR-binding peptide
VPTEESAISMLYLRIKPHQGQHLKNYQFLQHN

SEQ ID NO: 743 - protein, 32 aa, Artificial Sequence
  Non-cyclic GFR-binding peptide
VPTGQSAISMLYLRIKPHQGQHLKNYQLEEHS

SEQ ID NO: 744 - protein, 32 aa, Artificial Sequence
  Non-cyclic GFR-binding peptide
SRVHHSAISMLYLEYVRKKPKLLKNYQRLEEH

SEQ ID NO: 745 - protein, 32 aa, Artificial Sequence
  Non-cyclic GFR-binding peptide
TQVQLSAISMLYLEIVRKKPIFLKNYQTLEDH

SEQ ID NO: 746 - protein, 30 aa, Artificial Sequence
  Non-cyclic GFR-binding peptide
VPEELSSLSILFFDENEKVVLKVYPDMTVE

SEQ ID NO: 747 - protein, 30 aa, Artificial Sequence
  Non-cyclic GFR-binding peptide
VPEELSSLSILFFDEYDKVVLKVYPEMTVE

SEQ ID NO: 748 - protein, 30 aa, Artificial Sequence
  Non-cyclic GFR-binding peptide
VPEKLSSLSILFFDDSSNVILKVYPNMTVE

SEQ ID NO: 749 - protein, 30 aa, Artificial Sequence
  Non-cyclic GFR-binding peptide
VPEQLSSLSILFFDDSSNVILKVYPNMTVE

SEQ ID NO: 750 - protein, 30 aa, Artificial Sequence
  Non-cyclic GFR-binding peptide
VPEKLSSLSILFFDSSNNVILKVYPNMTVE

SEQ ID NO: 751 - protein, 32 aa, Artificial Sequence
  Non-cyclic GFR-binding peptide
VPEKLSSLSILFFDDMGVPTLKVYPEGMSTVE

SEQ ID NO: 752 - protein, 30 aa, Artificial Sequence
  Non-cyclic GFR-binding peptide
VPEKLSSLSILFFDKGVVTYLKVYPGMTVE

SEQ ID NO: 753 - protein, 30 aa, Artificial Sequence
  Non-cyclic GFR-binding peptide
VPEKMSSLSILFFNDKQQIILKVYPGMTVE

SEQ ID NO: 754 - protein, 30 aa, Artificial Sequence
  Non-cyclic GFR-binding peptide
VPERLSSLSILFFDAANNVVLKVYPDMTVE

SEQ ID NO: 755 - protein, 30 aa, Artificial Sequence
  Non-cyclic GFR-binding peptide
VPERLSSLSILFFDSANNVVLKVYPDMTVE

SEQ ID NO: 756 - protein, 30 aa, Artificial Sequence
  Non-cyclic GFR-binding peptide
VPEKTSSLSILFFDNGRVLLLKVYPMITVE

SEQ ID NO: 757 - protein, 30 aa, Artificial Sequence
  Non-cyclic GFR-binding peptide
VPEALSSLSILFFVGRKPKVLKVYPMITVE

SEQ ID NO: 758 - protein, 30 aa, Artificial Sequence
  Non-cyclic GFR-binding peptide
VPEDLSSLSILFFIGKTPKILKVYPMITVE

SEQ ID NO: 759 - protein, 30 aa, Artificial Sequence
  Non-cyclic GFR-binding peptide
VPEDLSSLSILFFVGRTPKVLKVYPMVTVE

SEQ ID NO: 760 - protein, 30 aa, Artificial Sequence
  Non-cyclic GFR-binding peptide
VPTELSSLSILFFDENEKVVLKVYPDMVVE

SEQ ID NO: 761 - protein, 30 aa, Artificial Sequence
  Non-cyclic GFR-binding peptide
VPTELSSLSILFFDEYDKVVLKVYPEMVVE

SEQ ID NO: 762 - protein, 30 aa, Artificial Sequence
  Non-cyclic GFR-binding peptide
APTKLSSLSILFFDDSSNVILKVYPNMVVR

SEQ ID NO: 763 - protein, 30 aa, Artificial Sequence
  Non-cyclic GFR-binding peptide
APTQLSSLSILFFDDSSNVILKVYPNMVVR

SEQ ID NO: 764 - protein, 30 aa, Artificial Sequence
  Non-cyclic GFR-binding peptide
APTKLSSLSILFFDSSNNVILKVYPNMVVK

SEQ ID NO: 765 - protein, 32 aa, Artificial Sequence
  Non-cyclic GFR-binding peptide
VPTKLSSLSILFFDDMGVPTLKVYPEGMSVAE

SEQ ID NO: 766 - protein, 30 aa, Artificial Sequence
  Non-cyclic GFR-binding peptide
VPTKLSSLSILFFDKGVVTYLKVYPGMAVS

SEQ ID NO: 767 - protein, 30 aa, Artificial Sequence
  Non-cyclic GFR-binding peptide
TPTKMSSLSILFFNDKQQIILKVYPGMVVD

SEQ ID NO: 768 - protein, 30 aa, Artificial Sequence
  Non-cyclic GFR-binding peptide
VPARLSSLSILFFDAANNVVLKVYPDMVVE

SEQ ID NO: 769 - protein, 30 aa, Artificial Sequence
  Non-cyclic GFR-binding peptide
VPTRLSSLSILFFDSANNVVLKVYPDMVVE

SEQ ID NO: 770 - protein, 30 aa, Artificial Sequence
  Non-cyclic GFR-binding peptide
APVKTSSLSILFFDNGRVLLLKVYPMIVEE

SEQ ID NO: 771 - protein, 30 aa, Artificial Sequence
  Non-cyclic GFR-binding peptide
VPQALSSLSILFFVGRKPKVLKVYPMIVRS

SEQ ID NO: 772 - protein, 30 aa, Artificial Sequence
  Non-cyclic GFR-binding peptide
VSQDLSSLSILFFIGKTPKILKVYPMIVKS

SEQ ID NO: 773 - protein, 30 aa, Artificial Sequence
  Non-cyclic GFR-binding peptide
VPQDLSSLSILFFVGRTPKVLKVYPMVVKS

SEQ ID NO: 774 - protein, 32 aa, Artificial Sequence
  Non-cyclic GFR-binding peptide
VPTEESSLSILFFRIKPHQGQHLKVYPFLQHN

SEQ ID NO: 775 - protein, 32 aa, Artificial Sequence
  Non-cyclic GFR-binding peptide
VPTGQSSLSILFFRIKPHQGQHLKVYPLEEHS

SEQ ID NO: 776 - protein, 32 aa, Artificial Sequence
  Non-cyclic GFR-binding peptide
SRVHHSSLSILFFEYVRKKPKLLKVYPRLEEH

SEQ ID NO: 777 - protein, 32 aa, Artificial Sequence
  Non-cyclic GFR-binding peptide
TQVQLSSLSILFFEIVRKKPIFLKVYPTLEDH

SEQ ID NO: 778 - protein, 30 aa, Artificial Sequence
  Non-cyclic GFR-binding peptide
APTELNAISVLYFDENEKVVLKKYRDMVVR

SEQ ID NO: 779 - protein, 30 aa, Artificial Sequence
  Non-cyclic GFR-binding peptide
APTKMNAISVLYFDENKNVVLKKYRNMVVR

SEQ ID NO: 780 - protein, 30 aa, Artificial Sequence
  Non-cyclic GFR-binding peptide
APTELNAISVLYFDEYDKVVLKKYREMVVR

SEQ ID NO: 781 - protein, 30 aa, Artificial Sequence
  Non-cyclic GFR-binding peptide
APTKLNAISVLYFDSSNNVILKKYRNMVVR

SEQ ID NO: 782 - protein, 32 aa, Artificial Sequence
  Non-cyclic GFR-binding peptide
APTKLNAISVLYFDDMGVPTLKKYREGMSVVR

SEQ ID NO: 783 - protein, 30 aa, Artificial Sequence
  Non-cyclic GFR-binding peptide
APTKLNAISVLYFDKGVVTYLKKYRGMVVR

SEQ ID NO: 784 - protein, 30 aa, Artificial Sequence
  Non-cyclic GFR-binding peptide
APTKMNAISVLYFNDKQQIILKKYRGMVVR

SEQ ID NO: 785 - protein, 30 aa, Artificial Sequence
  Non-cyclic GFR-binding peptide
APTRLNAISVLYFDAANNVVLKKYRDMVVR

SEQ ID NO: 786 - protein, 30 aa, Artificial Sequence
  Non-cyclic GFR-binding peptide
APTRLNAISVLYFDSANNVVLKKYRDMVVR

SEQ ID NO: 787 - protein, 30 aa, Artificial Sequence
  Non-cyclic GFR-binding peptide
APTKTNAISVLYFDNGRVLLLKKYRMIVVR

SEQ ID NO: 788 - protein, 30 aa, Artificial Sequence
  Non-cyclic GFR-binding peptide
APTALNAISVLYFVGRKPKVLKKYRMIVVR

SEQ ID NO: 789 - protein, 30 aa, Artificial Sequence
  Non-cyclic GFR-binding peptide
APTDLNAISVLYFIGKTPKILKKYRMIVVR

SEQ ID NO: 790 - protein, 30 aa, Artificial Sequence
  Non-cyclic GFR-binding peptide
APTDLNAISVLYFVGRTPKVLKKYRMVVVR

SEQ ID NO: 791 - protein, 30 aa, Artificial Sequence
  Non-cyclic GFR-binding peptide
VPTELNAISVLYFDENEKVVLKKYRDMVVE

SEQ ID NO: 792 - protein, 30 aa, Artificial Sequence
  Non-cyclic GFR-binding peptide
VPEKMNAISVLYFDENKNVVLKKYRNMTVE

SEQ ID NO: 793 - protein, 30 aa, Artificial Sequence
  Non-cyclic GFR-binding peptide
VPTELNAISVLYFDEYDKVVLKKYREMVVE

SEQ ID NO: 794 - protein, 30 aa, Artificial Sequence
  Non-cyclic GFR-binding peptide
APTKLNAISVLYFDSSNNVILKKYRNMVVK

SEQ ID NO: 795 - protein, 32 aa, Artificial Sequence
  Non-cyclic GFR-binding peptide
VPTKLNAISVLYFDDMGVPTLKKYREGMSVAE

SEQ ID NO: 796 - protein, 30 aa, Artificial Sequence
  Non-cyclic GFR-binding peptide
VPTKLNAISVLYFDKGVVTYLKKYRGMAVS

SEQ ID NO: 797 - protein, 30 aa, Artificial Sequence
  Non-cyclic GFR-binding peptide
TPTKMNAISVLYFNDKQQIILKKYRGMVVD

SEQ ID NO: 798 - protein, 30 aa, Artificial Sequence
  Non-cyclic GFR-binding peptide
VPARLNAISVLYFDAANNVVLKKYRDMVVE

SEQ ID NO: 799 - protein, 30 aa, Artificial Sequence
  Non-cyclic GFR-binding peptide
VPTRLNAISVLYFDSANNVVLKKYRDMVVE

SEQ ID NO: 800 - protein, 30 aa, Artificial Sequence
  Non-cyclic GFR-binding peptide
APVKTNAISVLYFDNGRVLLLKKYRMIVEE

SEQ ID NO: 801 - protein, 30 aa, Artificial Sequence
  Non-cyclic GFR-binding peptide
VPQALNAISVLYFVGRKPKVLKKYRMIVRS

SEQ ID NO: 802 - protein, 30 aa, Artificial Sequence
  Non-cyclic GFR-binding peptide
VSQDLNAISVLYFIGKTPKILKKYRMIVKS

SEQ ID NO: 803 - protein, 30 aa, Artificial Sequence
  Non-cyclic GFR-binding peptide
VPQDLNAISVLYFVGRTPKVLKKYRMVVKS

SEQ ID NO: 804 - protein, 32 aa, Artificial Sequence
  Non-cyclic GFR-binding peptide
VPTEENAISVLYFRIKPHQGQHLKKYRFLQHN

SEQ ID NO: 805 - protein, 32 aa, Artificial Sequence
  Non-cyclic GFR-binding peptide
VPTGQNAISVLYFRIKPHQGQHLKKYRLEEHS

SEQ ID NO: 806 - protein, 32 aa, Artificial Sequence
  Non-cyclic GFR-binding peptide
SRVHHNAISVLYFEYVRKKPKLLKKYRRLEEH

SEQ ID NO: 807 - protein, 32 aa, Artificial Sequence
  Non-cyclic GFR-binding peptide
TQVQLNAISVLYFEIVRKKPIFLKKYRTLEDH

SEQ ID NO: 808 - protein, 30 aa, Artificial Sequence
  Non-cyclic GFR-binding peptide
APTELSATSVLYYDENEKVVLRKHRDMVVK

SEQ ID NO: 809 - protein, 30 aa, Artificial Sequence
  Non-cyclic GFR-binding peptide
APTKMSATSVLYYDENKNVVLRKHRNMVVK

SEQ ID NO: 810 - protein, 30 aa, Artificial Sequence
  Non-cyclic GFR-binding peptide
APTELSATSVLYYDEYDKVVLRKHREMVVK

SEQ ID NO: 811 - protein, 30 aa, Artificial Sequence
  Non-cyclic GFR-binding peptide
APTKLSATSVLYYDDSSNVILRKHRNMVVK

SEQ ID NO: 812 - protein, 30 aa, Artificial Sequence
  Non-cyclic GFR-binding peptide
APTQLSATSVLYYDDSSNVILRKHRNMVVK

SEQ ID NO: 813 - protein, 32 aa, Artificial Sequence
  Non-cyclic GFR-binding peptide
APTKLSATSVLYYDDMGVPTLRKHREGMSVVK

SEQ ID NO: 814 - protein, 30 aa, Artificial Sequence
  Non-cyclic GFR-binding peptide
APTKLSATSVLYYDKGVVTYLRKHRGMVVK

SEQ ID NO: 815 - protein, 30 aa, Artificial Sequence
  Non-cyclic GFR-binding peptide
APTKMSATSVLYYNDKQQIILRKHRGMVVK

SEQ ID NO: 816 - protein, 30 aa, Artificial Sequence
  Non-cyclic GFR-binding peptide
APTRLSATSVLYYDAANNVVLRKHRDMVVK

SEQ ID NO: 817 - protein, 30 aa, Artificial Sequence
  Non-cyclic GFR-binding peptide
APTRLSATSVLYYDSANNVVLRKHRDMVVK

SEQ ID NO: 818 - protein, 30 aa, Artificial Sequence
  Non-cyclic GFR-binding peptide
APTKTSATSVLYYDNGRVLLLRKHRMIVVK

SEQ ID NO: 819 - protein, 30 aa, Artificial Sequence
  Non-cyclic GFR-binding peptide
APTALSATSVLYYVGRKPKVLRKHRMIVVK

SEQ ID NO: 820 - protein, 30 aa, Artificial Sequence
  Non-cyclic GFR-binding peptide
APTDLSATSVLYYIGKTPKILRKHRMIVVK

SEQ ID NO: 821 - protein, 30 aa, Artificial Sequence
  Non-cyclic GFR-binding peptide
APTDLSATSVLYYVGRTPKVLRKHRMVVVK

SEQ ID NO: 822 - protein, 30 aa, Artificial Sequence
  Non-cyclic GFR-binding peptide
VPTELSATSVLYYDENEKVVLRKHRDMVVE

SEQ ID NO: 823 - protein, 30 aa, Artificial Sequence
  Non-cyclic GFR-binding peptide
VPEKMSATSVLYYDENKNVVLRKHRNMTVE

SEQ ID NO: 824 - protein, 30 aa, Artificial Sequence
  Non-cyclic GFR-binding peptide
VPTELSATSVLYYDEYDKVVLRKHREMVVE

SEQ ID NO: 825 - protein, 30 aa, Artificial Sequence
  Non-cyclic GFR-binding peptide
APTKLSATSVLYYDDSSNVILRKHRNMVVR

SEQ ID NO: 826 - protein, 30 aa, Artificial Sequence
  Non-cyclic GFR-binding peptide
APTQLSATSVLYYDDSSNVILRKHRNMVVR

SEQ ID NO: 827 - protein, 32 aa, Artificial Sequence
  Non-cyclic GFR-binding peptide
VPTKLSATSVLYYDDMGVPTLRKHREGMSVAE

SEQ ID NO: 828 - protein, 30 aa, Artificial Sequence
  Non-cyclic GFR-binding peptide
VPTKLSATSVLYYDKGVVTYLRKHRGMAVS

SEQ ID NO: 829 - protein, 30 aa, Artificial Sequence
  Non-cyclic GFR-binding peptide
TPTKMSATSVLYYNDKQQIILRKHRGMVVD

SEQ ID NO: 830 - protein, 30 aa, Artificial Sequence
  Non-cyclic GFR-binding peptide
VPARLSATSVLYYDAANNVVLRKHRDMVVE

SEQ ID NO: 831 - protein, 30 aa, Artificial Sequence
  Non-cyclic GFR-binding peptide
VPTRLSATSVLYYDSANNVVLRKHRDMVVE

SEQ ID NO: 832 - protein, 30 aa, Artificial Sequence
  Non-cyclic GFR-binding peptide
APVKTSATSVLYYDNGRVLLLRKHRMIVEE

SEQ ID NO: 833 - protein, 30 aa, Artificial Sequence
  Non-cyclic GFR-binding peptide
VPQALSATSVLYYVGRKPKVLRKHRMIVRS

SEQ ID NO: 834 - protein, 30 aa, Artificial Sequence
  Non-cyclic GFR-binding peptide
VSQDLSATSVLYYIGKTPKILRKHRMIVKS

SEQ ID NO: 835 - protein, 30 aa, Artificial Sequence
  Non-cyclic GFR-binding peptide
VPQDLSATSVLYYVGRTPKVLRKHRMVVKS

SEQ ID NO: 836 - protein, 32 aa, Artificial Sequence
  Non-cyclic GFR-binding peptide
VPTEESATSVLYYRIKPHQGQHLRKHRFLQHN

SEQ ID NO: 837 - protein, 32 aa, Artificial Sequence
  Non-cyclic GFR-binding peptide
VPTGQSATSVLYYRIKPHQGQHLRKHRLEEHS

SEQ ID NO: 838 - protein, 32 aa, Artificial Sequence
  Non-cyclic GFR-binding peptide
SRVHHSATSVLYYEYVRKKPKLLRKHRRLEEH

SEQ ID NO: 839 - protein, 32 aa, Artificial Sequence
  Non-cyclic GFR-binding peptide
TQVQLSATSVLYYEIVRKKPIFLRKHRTLEDH

SEQ ID NO: 840 - protein, 30 aa, Artificial Sequence
  Non-cyclic GFR-binding peptide
VPTELSPISVLYKDENEKVVLKYHYDMVAE

SEQ ID NO: 841 - protein, 30 aa, Artificial Sequence
  Non-cyclic GFR-binding peptide
VPTKMSPISVLYKDENKNVVLKYHYNMVAE

SEQ ID NO: 842 - protein, 30 aa, Artificial Sequence
  Non-cyclic GFR-binding peptide
VPTELSPISVLYKDEYDKVVLKYHYEMVAE

SEQ ID NO: 843 - protein, 30 aa, Artificial Sequence
  Non-cyclic GFR-binding peptide
VPTKLSPISVLYKDDSSNVILKYHYNMVAE

SEQ ID NO: 844 - protein, 30 aa, Artificial Sequence
  Non-cyclic GFR-binding peptide
VPTQLSPISVLYKDDSSNVILKYHYNMVAE

SEQ ID NO: 845 - protein, 30 aa, Artificial Sequence
  Non-cyclic GFR-binding peptide
VPTKLSPISVLYKDSSNNVILKYHYNMVAE

SEQ ID NO: 846 - protein, 30 aa, Artificial Sequence
  Non-cyclic GFR-binding peptide
VPTKLSPISVLYKDKGVVTYLKYHYGMVAE

SEQ ID NO: 847 - protein, 30 aa, Artificial Sequence
  Non-cyclic GFR-binding peptide
VPTKMSPISVLYKNDKQQIILKYHYGMVAE

SEQ ID NO: 848 - protein, 30 aa, Artificial Sequence
  Non-cyclic GFR-binding peptide
VPTRLSPISVLYKDAANNVVLKYHYDMVAE

SEQ ID NO: 849 - protein, 30 aa, Artificial Sequence
  Non-cyclic GFR-binding peptide
VPTRLSPISVLYKDSANNVVLKYHYDMVAE

SEQ ID NO: 850 - protein, 30 aa, Artificial Sequence
  Non-cyclic GFR-binding peptide
VPTKTSPISVLYKDNGRVLLLKYHYMIVAE

SEQ ID NO: 851 - protein, 30 aa, Artificial Sequence
  Non-cyclic GFR-binding peptide
VPTALSPISVLYKVGRKPKVLKYHYMIVAE

SEQ ID NO: 852 - protein, 30 aa, Artificial Sequence
  Non-cyclic GFR-binding peptide
VPTDLSPISVLYKIGKTPKILKYHYMIVAE

SEQ ID NO: 853 - protein, 30 aa, Artificial Sequence
  Non-cyclic GFR-binding peptide
VPTDLSPISVLYKVGRTPKVLKYHYMVVAE

SEQ ID NO: 854 - protein, 30 aa, Artificial Sequence
  Non-cyclic GFR-binding peptide
VPTELSPISVLYKDENEKVVLKYHYDMVVE

SEQ ID NO: 855 - protein, 30 aa, Artificial Sequence
  Non-cyclic GFR-binding peptide
VPEKMSPISVLYKDENKNVVLKYHYNMTVE

SEQ ID NO: 856 - protein, 30 aa, Artificial Sequence
  Non-cyclic GFR-binding peptide
VPTELSPISVLYKDEYDKVVLKYHYEMVVE

SEQ ID NO: 857 - protein, 30 aa, Artificial Sequence
  Non-cyclic GFR-binding peptide
APTKLSPISVLYKDDSSNVILKYHYNMVVR

SEQ ID NO: 858 - protein, 30 aa, Artificial Sequence
  Non-cyclic GFR-binding peptide
APTQLSPISVLYKDDSSNVILKYHYNMVVR

SEQ ID NO: 859 - protein, 30 aa, Artificial Sequence
  Non-cyclic GFR-binding peptide
APTKLSPISVLYKDSSNNVILKYHYNMVVK

SEQ ID NO: 860 - protein, 30 aa, Artificial Sequence
  Non-cyclic GFR-binding peptide
VPTKLSPISVLYKDKGVVTYLKYHYGMAVS

SEQ ID NO: 861 - protein, 30 aa, Artificial Sequence
  Non-cyclic GFR-binding peptide
TPTKMSPISVLYKNDKQQIILKYHYGMVVD

SEQ ID NO: 862 - protein, 30 aa, Artificial Sequence
  Non-cyclic GFR-binding peptide
VPARLSPISVLYKDAANNVVLKYHYDMVVE

SEQ ID NO: 863 - protein, 30 aa, Artificial Sequence
  Non-cyclic GFR-binding peptide
VPTRLSPISVLYKDSANNVVLKYHYDMVVE

SEQ ID NO: 864 - protein, 30 aa, Artificial Sequence
  Non-cyclic GFR-binding peptide
APVKTSPISVLYKDNGRVLLLKYHYMIVEE

SEQ ID NO: 865 - protein, 30 aa, Artificial Sequence
  Non-cyclic GFR-binding peptide
VPQALSPISVLYKVGRKPKVLKYHYMIVRS

SEQ ID NO: 866 - protein, 30 aa, Artificial Sequence
  Non-cyclic GFR-binding peptide
VSQDLSPISVLYKIGKTPKILKYHYMIVKS

SEQ ID NO: 867 - protein, 30 aa, Artificial Sequence
  Non-cyclic GFR-binding peptide
VPQDLSPISVLYKVGRTPKVLKYHYMVVKS

SEQ ID NO: 868 - protein, 32 aa, Artificial Sequence
  Non-cyclic GFR-binding peptide
VPTEESPISVLYKRIKPHQGQHLKYHYFLQHN

SEQ ID NO: 869 - protein, 32 aa, Artificial Sequence
  Non-cyclic GFR-binding peptide
VPTGQSPISVLYKRIKPHQGQHLKYHYLEEHS

SEQ ID NO: 870 - protein, 32 aa, Artificial Sequence
  Non-cyclic GFR-binding peptide
SRVHHSPISVLYKEYVRKKPKLLKYHYRLEEH

SEQ ID NO: 871 - protein, 32 aa, Artificial Sequence
  Non-cyclic GFR-binding peptide
TQVQLSPISVLYKEIVRKKPIFLKYHYTLEDH

SEQ ID NO: 872 - protein, 30 aa, Artificial Sequence
  Non-cyclic GFR-binding peptide
VPTELEPISILYLDENEKVVKFKYEDMAVS

SEQ ID NO: 873 - protein, 30 aa, Artificial Sequence
  Non-cyclic GFR-binding peptide
VPTKMEPISILYLDENKNVVKFKYENMAVS

SEQ ID NO: 874 - protein, 30 aa, Artificial Sequence
  Non-cyclic GFR-binding peptide
VPTELEPISILYLDEYDKVVKFKYEEMAVS

SEQ ID NO: 875 - protein, 30 aa, Artificial Sequence
  Non-cyclic GFR-binding peptide
VPTKLEPISILYLDDSSNVIKFKYENMAVS

SEQ ID NO: 876 - protein, 30 aa, Artificial Sequence
  Non-cyclic GFR-binding peptide
VPTQLEPISILYLDDSSNVIKFKYENMAVS

SEQ ID NO: 877 - protein, 30 aa, Artificial Sequence
  Non-cyclic GFR-binding peptide
VPTKLEPISILYLDSSNNVIKFKYENMAVS

SEQ ID NO: 878 - protein, 32 aa, Artificial Sequence
  Non-cyclic GFR-binding peptide
VPTKLEPISILYLDDMGVPTKFKYEEGMSAVS

SEQ ID NO: 879 - protein, 30 aa, Artificial Sequence
  Non-cyclic GFR-binding peptide
VPTKMEPISILYLNDKQQIIKFKYEGMAVS

SEQ ID NO: 880 - protein, 30 aa, Artificial Sequence
  Non-cyclic GFR-binding peptide
VPTRLEPISILYLDAANNVVKFKYEDMAVS

SEQ ID NO: 881 - protein, 30 aa, Artificial Sequence
  Non-cyclic GFR-binding peptide
VPTRLEPISILYLDSANNVVKFKYEDMAVS

SEQ ID NO: 882 - protein, 30 aa, Artificial Sequence
  Non-cyclic GFR-binding peptide
VPTKTEPISILYLDNGRVLLKFKYEMIAVS

SEQ ID NO: 883 - protein, 30 aa, Artificial Sequence
  Non-cyclic GFR-binding peptide
VPTALEPISILYLVGRKPKVKFKYEMIAVS

SEQ ID NO: 884 - protein, 30 aa, Artificial Sequence
  Non-cyclic GFR-binding peptide
VPTDLEPISILYLIGKTPKIKFKYEMIAVS

SEQ ID NO: 885 - protein, 30 aa, Artificial Sequence
  Non-cyclic GFR-binding peptide
VPTDLEPISILYLVGRTPKVKFKYEMVAVS

SEQ ID NO: 886 - protein, 30 aa, Artificial Sequence
  Non-cyclic GFR-binding peptide
VPTELEPISILYLDENEKVVKFKYEDMVVE

SEQ ID NO: 887 - protein, 30 aa, Artificial Sequence
  Non-cyclic GFR-binding peptide
VPEKMEPISILYLDENKNVVKFKYENMTVE

SEQ ID NO: 888 - protein, 30 aa, Artificial Sequence
  Non-cyclic GFR-binding peptide
VPTELEPISILYLDEYDKVVKFKYEEMVVE

SEQ ID NO: 889 - protein, 30 aa, Artificial Sequence
  Non-cyclic GFR-binding peptide
APTKLEPISILYLDDSSNVIKFKYENMVVR

SEQ ID NO: 890 - protein, 30 aa, Artificial Sequence
  Non-cyclic GFR-binding peptide
APTQLEPISILYLDDSSNVIKFKYENMVVR

SEQ ID NO: 891 - protein, 30 aa, Artificial Sequence
  Non-cyclic GFR-binding peptide
APTKLEPISILYLDSSNNVIKFKYENMVVK

SEQ ID NO: 892 - protein, 32 aa, Artificial Sequence
  Non-cyclic GFR-binding peptide
VPTKLEPISILYLDDMGVPTKFKYEEGMSVAE

SEQ ID NO: 893 - protein, 30 aa, Artificial Sequence
  Non-cyclic GFR-binding peptide
TPTKMEPISILYLNDKQQIIKFKYEGMVVD

SEQ ID NO: 894 - protein, 30 aa, Artificial Sequence
  Non-cyclic GFR-binding peptide
VPARLEPISILYLDAANNVVKFKYEDMVVE

SEQ ID NO: 895 - protein, 30 aa, Artificial Sequence
  Non-cyclic GFR-binding peptide
VPTRLEPISILYLDSANNVVKFKYEDMVVE

SEQ ID NO: 896 - protein, 30 aa, Artificial Sequence
  Non-cyclic GFR-binding peptide
APVKTEPISILYLDNGRVLLKFKYEMIVEE

SEQ ID NO: 897 - protein, 30 aa, Artificial Sequence
  Non-cyclic GFR-binding peptide
VPQALEPISILYLVGRKPKVKFKYEMIVRS

SEQ ID NO: 898 - protein, 30 aa, Artificial Sequence
  Non-cyclic GFR-binding peptide
VSQDLEPISILYLIGKTPKIKFKYEMIVKS

SEQ ID NO: 899 - protein, 30 aa, Artificial Sequence
  Non-cyclic GFR-binding peptide
VPQDLEPISILYLVGRTPKVKFKYEMVVKS

SEQ ID NO: 900 - protein, 32 aa, Artificial Sequence
  Non-cyclic GFR-binding peptide
VPTEEEPISILYLRIKPHQGQHKFKYEFLQHN

SEQ ID NO: 901 - protein, 32 aa, Artificial Sequence
  Non-cyclic GFR-binding peptide
VPTGQEPISILYLRIKPHQGQHKFKYELEEHS

SEQ ID NO: 902 - protein, 32 aa, Artificial Sequence
  Non-cyclic GFR-binding peptide
SRVHHEPISILYLEYVRKKPKLKFKYERLEEH

SEQ ID NO: 903 - protein, 32 aa, Artificial Sequence
  Non-cyclic GFR-binding peptide
TQVQLEPISILYLEIVRKKPIFKFKYETLEDH

SEQ ID NO: 904 - protein, 30 aa, Artificial Sequence
  Non-cyclic GFR-binding peptide
TPTELSPINMLYFDENEKVVYGKIPDMVVD

SEQ ID NO: 905 - protein, 30 aa, Artificial Sequence
  Non-cyclic GFR-binding peptide
TPTKMSPINMLYFDENKNVVYGKIPNMVVD

SEQ ID NO: 906 - protein, 30 aa, Artificial Sequence
  Non-cyclic GFR-binding peptide
TPTELSPINMLYFDEYDKVVYGKIPEMVVD

SEQ ID NO: 907 - protein, 30 aa, Artificial Sequence
  Non-cyclic GFR-binding peptide
TPTKLSPINMLYFDDSSNVIYGKIPNMVVD

SEQ ID NO: 908 - protein, 30 aa, Artificial Sequence
  Non-cyclic GFR-binding peptide
TPTQLSPINMLYFDDSSNVIYGKIPNMVVD

SEQ ID NO: 909 - protein, 30 aa, Artificial Sequence
  Non-cyclic GFR-binding peptide
TPTKLSPINMLYFDSSNNVIYGKIPNMVVD

SEQ ID NO: 910 - protein, 32 aa, Artificial Sequence
  Non-cyclic GFR-binding peptide
TPTKLSPINMLYFDDMGVPTYGKIPEGMSVVD

SEQ ID NO: 911 - protein, 30 aa, Artificial Sequence
  Non-cyclic GFR-binding peptide
TPTKLSPINMLYFDKGVVTYYGKIPGMVVD

SEQ ID NO: 912 - protein, 30 aa, Artificial Sequence
  Non-cyclic GFR-binding peptide
TPTRLSPINMLYFDAANNVVYGKIPDMVVD

SEQ ID NO: 913 - protein, 30 aa, Artificial Sequence
  Non-cyclic GFR-binding peptide
TPTRLSPINMLYFDSANNVVYGKIPDMVVD

SEQ ID NO: 914 - protein, 30 aa, Artificial Sequence
  Non-cyclic GFR-binding peptide
TPTKTSPINMLYFDNGRVLLYGKIPMIVVD

SEQ ID NO: 915 - protein, 30 aa, Artificial Sequence
  Non-cyclic GFR-binding peptide
TPTALSPINMLYFVGRKPKVYGKIPMIVVD

SEQ ID NO: 916 - protein, 30 aa, Artificial Sequence
  Non-cyclic GFR-binding peptide
TPTDLSPINMLYFIGKTPKIYGKIPMIVVD

SEQ ID NO: 917 - protein, 30 aa, Artificial Sequence
  Non-cyclic GFR-binding peptide
TPTDLSPINMLYFVGRTPKVYGKIPMVVVD

SEQ ID NO: 918 - protein, 30 aa, Artificial Sequence
  Non-cyclic GFR-binding peptide
VPTELSPINMLYFDENEKVVYGKIPDMVVE

SEQ ID NO: 919 - protein, 30 aa, Artificial Sequence
  Non-cyclic GFR-binding peptide
VPEKMSPINMLYFDENKNVVYGKIPNMTVE

SEQ ID NO: 920 - protein, 30 aa, Artificial Sequence
  Non-cyclic GFR-binding peptide
VPTELSPINMLYFDEYDKVVYGKIPEMVVE

SEQ ID NO: 921 - protein, 30 aa, Artificial Sequence
  Non-cyclic GFR-binding peptide
APTKLSPINMLYFDDSSNVIYGKIPNMVVR

SEQ ID NO: 922 - protein, 30 aa, Artificial Sequence
  Non-cyclic GFR-binding peptide
APTQLSPINMLYFDDSSNVIYGKIPNMVVR

SEQ ID NO: 923 - protein, 30 aa, Artificial Sequence
  Non-cyclic GFR-binding peptide
APTKLSPINMLYFDSSNNVIYGKIPNMVVK

SEQ ID NO: 924 - protein, 32 aa, Artificial Sequence
  Non-cyclic GFR-binding peptide
VPTKLSPINMLYFDDMGVPTYGKIPEGMSVAE

SEQ ID NO: 925 - protein, 30 aa, Artificial Sequence
  Non-cyclic GFR-binding peptide
VPTKLSPINMLYFDKGVVTYYGKIPGMAVS

SEQ ID NO: 926 - protein, 30 aa, Artificial Sequence
  Non-cyclic GFR-binding peptide
VPARLSPINMLYFDAANNVVYGKIPDMVVE

SEQ ID NO: 927 - protein, 30 aa, Artificial Sequence
  Non-cyclic GFR-binding peptide
VPTRLSPINMLYFDSANNVVYGKIPDMVVE

SEQ ID NO: 928 - protein, 30 aa, Artificial Sequence
  Non-cyclic GFR-binding peptide
APVKTSPINMLYFDNGRVLLYGKIPMIVEE

SEQ ID NO: 929 - protein, 30 aa, Artificial Sequence
  Non-cyclic GFR-binding peptide
VPQALSPINMLYFVGRKPKVYGKIPMIVRS

SEQ ID NO: 930 - protein, 30 aa, Artificial Sequence
  Non-cyclic GFR-binding peptide
VSQDLSPINMLYFIGKTPKIYGKIPMIVKS

SEQ ID NO: 931 - protein, 30 aa, Artificial Sequence
  Non-cyclic GFR-binding peptide
VPQDLSPINMLYFVGRTPKVYGKIPMVVKS

SEQ ID NO: 932 - protein, 32 aa, Artificial Sequence
  Non-cyclic GFR-binding peptide
VPTEESPINMLYFRIKPHQGQHYGKIPFLQHN

SEQ ID NO: 933 - protein, 32 aa, Artificial Sequence
  Non-cyclic GFR-binding peptide
VPTGQSPINMLYFRIKPHQGQHYGKIPLEEHS

SEQ ID NO: 934 - protein, 32 aa, Artificial Sequence
  Non-cyclic GFR-binding peptide
SRVHHSPINMLYFEYVRKKPKLYGKIPRLEEH

SEQ ID NO: 935 - protein, 32 aa, Artificial Sequence
  Non-cyclic GFR-binding peptide
TQVQLSPINMLYFEIVRKKPIFYGKIPTLEDH

SEQ ID NO: 936 - protein, 30 aa, Artificial Sequence
  Non-cyclic GFR-binding peptide
VPAELSPISILYIDENEKVVYKQYEDMVVE

SEQ ID NO: 937 - protein, 30 aa, Artificial Sequence
  Non-cyclic GFR-binding peptide
VPAKMSPISILYIDENKNVVYKQYENMVVE

SEQ ID NO: 938 - protein, 30 aa, Artificial Sequence
  Non-cyclic GFR-binding peptide
VPAELSPISILYIDEYDKVVYKQYEEMVVE

SEQ ID NO: 939 - protein, 30 aa, Artificial Sequence
  Non-cyclic GFR-binding peptide
VPAKLSPISILYIDDSSNVIYKQYENMVVE

SEQ ID NO: 940 - protein, 30 aa, Artificial Sequence
  Non-cyclic GFR-binding peptide
VPAQLSPISILYIDDSSNVIYKQYENMVVE

SEQ ID NO: 941 - protein, 30 aa, Artificial Sequence
  Non-cyclic GFR-binding peptide
VPAKLSPISILYIDSSNNVIYKQYENMVVE

SEQ ID NO: 942 - protein, 32 aa, Artificial Sequence
  Non-cyclic GFR-binding peptide
VPAKLSPISILYIDDMGVPTYKQYEEGMSVVE

SEQ ID NO: 943 - protein, 30 aa, Artificial Sequence
  Non-cyclic GFR-binding peptide
VPAKLSPISILYIDKGVVTYYKQYEGMVVE

SEQ ID NO: 944 - protein, 30 aa, Artificial Sequence
  Non-cyclic GFR-binding peptide
VPAKMSPISILYINDKQQIIYKQYEGMVVE

SEQ ID NO: 945 - protein, 30 aa, Artificial Sequence
  Non-cyclic GFR-binding peptide
VPARLSPISILYIDSANNVVYKQYEDMVVE

SEQ ID NO: 946 - protein, 30 aa, Artificial Sequence
  Non-cyclic GFR-binding peptide
VPAKTSPISILYIDNGRVLLYKQYEMIVVE

SEQ ID NO: 947 - protein, 30 aa, Artificial Sequence
  Non-cyclic GFR-binding peptide
VPAALSPISILYIVGRKPKVYKQYEMIVVE

SEQ ID NO: 948 - protein, 30 aa, Artificial Sequence
  Non-cyclic GFR-binding peptide
VPADLSPISILYIIGKTPKIYKQYEMIVVE

SEQ ID NO: 949 - protein, 30 aa, Artificial Sequence
  Non-cyclic GFR-binding peptide
VPADLSPISILYIVGRTPKVYKQYEMVVVE

SEQ ID NO: 950 - protein, 30 aa, Artificial Sequence
  Non-cyclic GFR-binding peptide
VPTELSPISILYIDENEKVVYKQYEDMVVE

SEQ ID NO: 951 - protein, 30 aa, Artificial Sequence
  Non-cyclic GFR-binding peptide
VPEKMSPISILYIDENKNVVYKQYENMTVE

SEQ ID NO: 952 - protein, 30 aa, Artificial Sequence
  Non-cyclic GFR-binding peptide
VPTELSPISILYIDEYDKVVYKQYEEMVVE

SEQ ID NO: 953 - protein, 30 aa, Artificial Sequence
  Non-cyclic GFR-binding peptide
APTKLSPISILYIDDSSNVIYKQYENMVVR

SEQ ID NO: 954 - protein, 30 aa, Artificial Sequence
  Non-cyclic GFR-binding peptide
APTQLSPISILYIDDSSNVIYKQYENMVVR

SEQ ID NO: 955 - protein, 30 aa, Artificial Sequence
  Non-cyclic GFR-binding peptide
APTKLSPISILYIDSSNNVIYKQYENMVVK

SEQ ID NO: 956 - protein, 30 aa, Artificial Sequence
  Non-cyclic GFR-binding peptide
VPTKLSPISILYIDKGVVTYYKQYEGMAVS

SEQ ID NO: 957 - protein, 30 aa, Artificial Sequence
  Non-cyclic GFR-binding peptide
TPTKMSPISILYINDKQQIIYKQYEGMVVD

SEQ ID NO: 958 - protein, 30 aa, Artificial Sequence
  Non-cyclic GFR-binding peptide
VPTRLSPISILYIDSANNVVYKQYEDMVVE

SEQ ID NO: 959 - protein, 30 aa, Artificial Sequence
  Non-cyclic GFR-binding peptide
APVKTSPISILYIDNGRVLLYKQYEMIVEE

SEQ ID NO: 960 - protein, 30 aa, Artificial Sequence
  Non-cyclic GFR-binding peptide
VPQALSPISILYIVGRKPKVYKQYEMIVRS

SEQ ID NO: 961 - protein, 30 aa, Artificial Sequence
  Non-cyclic GFR-binding peptide
VSQDLSPISILYIIGKTPKIYKQYEMIVKS

SEQ ID NO: 962 - protein, 30 aa, Artificial Sequence
  Non-cyclic GFR-binding peptide
VPQDLSPISILYIVGRTPKVYKQYEMVVKS

SEQ ID NO: 963 - protein, 32 aa, Artificial Sequence
  Non-cyclic GFR-binding peptide
VPTEESPISILYIRIKPHQGQHYKQYEFLQHN

SEQ ID NO: 964 - protein, 32 aa, Artificial Sequence
  Non-cyclic GFR-binding peptide
VPTGQSPISILYIRIKPHQGQHYKQYELEEHS

SEQ ID NO: 965 - protein, 32 aa, Artificial Sequence
  Non-cyclic GFR-binding peptide
SRVHHSPISILYIEYVRKKPKLYKQYERLEEH

SEQ ID NO: 966 - protein, 32 aa, Artificial Sequence
  Non-cyclic GFR-binding peptide
TQVQLSPISILYIEIVRKKPIFYKQYETLEDH

SEQ ID NO: 967 - protein, 30 aa, Artificial Sequence
  Non-cyclic GFR-binding peptide
VPTELSPISILFIDENEKVVYKQYEDMVVE

SEQ ID NO: 968 - protein, 30 aa, Artificial Sequence
  Non-cyclic GFR-binding peptide
VPTKMSPISILFIDENKNVVYKQYENMVVE

SEQ ID NO: 969 - protein, 30 aa, Artificial Sequence
  Non-cyclic GFR-binding peptide
VPTELSPISILFIDEYDKVVYKQYEEMVVE

SEQ ID NO: 970 - protein, 30 aa, Artificial Sequence
  Non-cyclic GFR-binding peptide
VPTKLSPISILFIDDSSNVIYKQYENMVVE

SEQ ID NO: 971 - protein, 30 aa, Artificial Sequence
  Non-cyclic GFR-binding peptide
VPTQLSPISILFIDDSSNVIYKQYENMVVE

SEQ ID NO: 972 - protein, 30 aa, Artificial Sequence
  Non-cyclic GFR-binding peptide
VPTKLSPISILFIDSSNNVIYKQYENMVVE

SEQ ID NO: 973 - protein, 32 aa, Artificial Sequence
  Non-cyclic GFR-binding peptide
VPTKLSPISILFIDDMGVPTYKQYEEGMSVVE

SEQ ID NO: 974 - protein, 30 aa, Artificial Sequence
  Non-cyclic GFR-binding peptide
VPTKLSPISILFIDKGVVTYYKQYEGMVVE

SEQ ID NO: 975 - protein, 30 aa, Artificial Sequence
  Non-cyclic GFR-binding peptide
VPTKMSPISILFINDKQQIIYKQYEGMVVE

SEQ ID NO: 976 - protein, 30 aa, Artificial Sequence
  Non-cyclic GFR-binding peptide
VPTRLSPISILFIDAANNVVYKQYEDMVVE

SEQ ID NO: 977 - protein, 30 aa, Artificial Sequence
  Non-cyclic GFR-binding peptide
VPTKTSPISILFIDNGRVLLYKQYEMIVVE

SEQ ID NO: 978 - protein, 30 aa, Artificial Sequence
  Non-cyclic GFR-binding peptide
VPTALSPISILFIVGRKPKVYKQYEMIVVE

SEQ ID NO: 979 - protein, 30 aa, Artificial Sequence
  Non-cyclic GFR-binding peptide
VPTDLSPISILFIIGKTPKIYKQYEMIVVE

SEQ ID NO: 980 - protein, 30 aa, Artificial Sequence
  Non-cyclic GFR-binding peptide
VPTDLSPISILFIVGRTPKVYKQYEMVVVE

SEQ ID NO: 981 - protein, 30 aa, Artificial Sequence
  Non-cyclic GFR-binding peptide
VPEKMSPISILFIDENKNVVYKQYENMTVE

SEQ ID NO: 982 - protein, 30 aa, Artificial Sequence
  Non-cyclic GFR-binding peptide
APTKLSPISILFIDDSSNVIYKQYENMVVR

SEQ ID NO: 983 - protein, 30 aa, Artificial Sequence
  Non-cyclic GFR-binding peptide
APTQLSPISILFIDDSSNVIYKQYENMVVR

SEQ ID NO: 984 - protein, 30 aa, Artificial Sequence
  Non-cyclic GFR-binding peptide
APTKLSPISILFIDSSNNVIYKQYENMVVK

SEQ ID NO: 985 - protein, 32 aa, Artificial Sequence
  Non-cyclic GFR-binding peptide
VPTKLSPISILFIDDMGVPTYKQYEEGMSVAE

SEQ ID NO: 986 - protein, 30 aa, Artificial Sequence
  Non-cyclic GFR-binding peptide
VPTKLSPISILFIDKGVVTYYKQYEGMAVS

SEQ ID NO: 987 - protein, 30 aa, Artificial Sequence
  Non-cyclic GFR-binding peptide
TPTKMSPISILFINDKQQIIYKQYEGMVVD

SEQ ID NO: 988 - protein, 30 aa, Artificial Sequence
  Non-cyclic GFR-binding peptide
VPARLSPISILFIDAANNVVYKQYEDMVVE

SEQ ID NO: 989 - protein, 30 aa, Artificial Sequence
  Non-cyclic GFR-binding peptide
APVKTSPISILFIDNGRVLLYKQYEMIVEE

SEQ ID NO: 990 - protein, 30 aa, Artificial Sequence
  Non-cyclic GFR-binding peptide
VPQALSPISILFIVGRKPKVYKQYEMIVRS

SEQ ID NO: 991 - protein, 30 aa, Artificial Sequence
  Non-cyclic GFR-binding peptide
VSQDLSPISILFIIGKTPKIYKQYEMIVKS

SEQ ID NO: 992 - protein, 30 aa, Artificial Sequence
  Non-cyclic GFR-binding peptide
VPQDLSPISILFIVGRTPKVYKQYEMVVKS

SEQ ID NO: 993 - protein, 32 aa, Artificial Sequence
  Non-cyclic GFR-binding peptide
VPTEESPISILFIRIKPHQGQHYKQYEFLQHN

SEQ ID NO: 994 - protein, 32 aa, Artificial Sequence
  Non-cyclic GFR-binding peptide
VPTGQSPISILFIRIKPHQGQHYKQYELEEHS

SEQ ID NO: 995 - protein, 32 aa, Artificial Sequence
  Non-cyclic GFR-binding peptide
SRVHHSPISILFIEYVRKKPKLYKQYERLEEH

SEQ ID NO: 996 - protein, 32 aa, Artificial Sequence
  Non-cyclic GFR-binding peptide
TQVQLSPISILFIEIVRKKPIFYKQYETLEDH

SEQ ID NO: 997 - protein, 30 aa, Artificial Sequence
  Non-cyclic GFR-binding peptide
APVELKPLSMLYVDENEKVVDHHKDDMVEE

SEQ ID NO: 998 - protein, 30 aa, Artificial Sequence
  Non-cyclic GFR-binding peptide
APVKMKPLSMLYVDENKNVVDHHKDNMVEE

SEQ ID NO: 999 - protein, 30 aa, Artificial Sequence
  Non-cyclic GFR-binding peptide
APVELKPLSMLYVDEYDKVVDHHKDEMVEE

SEQ ID NO: 1000 - protein, 30 aa, Artificial Sequence
  Non-cyclic GFR-binding peptide
APVKLKPLSMLYVDDSSNVIDHHKDNMVEE

SEQ ID NO: 1001 - protein, 30 aa, Artificial Sequence
  Non-cyclic GFR-binding peptide
APVQLKPLSMLYVDDSSNVIDHHKDNMVEE

SEQ ID NO: 1002 - protein, 30 aa, Artificial Sequence
  Non-cyclic GFR-binding peptide
APVKLKPLSMLYVDSSNNVIDHHKDNMVEE

SEQ ID NO: 1003 - protein, 32 aa, Artificial Sequence
  Non-cyclic GFR-binding peptide
APVKLKPLSMLYVDDMGVPTDHHKDEGMSVEE

SEQ ID NO: 1004 - protein, 30 aa, Artificial Sequence
  Non-cyclic GFR-binding peptide
APVKLKPLSMLYVDKGVVTYDHHKDGMVEE

SEQ ID NO: 1005 - protein, 30 aa, Artificial Sequence
  Non-cyclic GFR-binding peptide
APVKMKPLSMLYVNDKQQIIDHHKDGMVEE

SEQ ID NO: 1006 - protein, 30 aa, Artificial Sequence
  Non-cyclic GFR-binding peptide
APVRLKPLSMLYVDAANNVVDHHKDDMVEE

SEQ ID NO: 1007 - protein, 30 aa, Artificial Sequence
  Non-cyclic GFR-binding peptide
APVRLKPLSMLYVDSANNVVDHHKDDMVEE

SEQ ID NO: 1008 - protein, 30 aa, Artificial Sequence
  Non-cyclic GFR-binding peptide
APVALKPLSMLYVVGRKPKVDHHKDMIVEE

SEQ ID NO: 1009 - protein, 30 aa, Artificial Sequence
  Non-cyclic GFR-binding peptide
APVDLKPLSMLYVIGKTPKIDHHKDMIVEE

SEQ ID NO: 1010 - protein, 30 aa, Artificial Sequence
  Non-cyclic GFR-binding peptide
APVDLKPLSMLYVVGRTPKVDHHKDMVVEE

SEQ ID NO: 1011 - protein, 30 aa, Artificial Sequence
  Non-cyclic GFR-binding peptide
VPTELKPLSMLYVDENEKVVDHHKDDMVVE

SEQ ID NO: 1012 - protein, 30 aa, Artificial Sequence
  Non-cyclic GFR-binding peptide
VPEKMKPLSMLYVDENKNVVDHHKDNMTVE

SEQ ID NO: 1013 - protein, 30 aa, Artificial Sequence
  Non-cyclic GFR-binding peptide
VPTELKPLSMLYVDEYDKVVDHHKDEMVVE

SEQ ID NO: 1014 - protein, 30 aa, Artificial Sequence
  Non-cyclic GFR-binding peptide
APTKLKPLSMLYVDDSSNVIDHHKDNMVVR

SEQ ID NO: 1015 - protein, 30 aa, Artificial Sequence
  Non-cyclic GFR-binding peptide
APTQLKPLSMLYVDDSSNVIDHHKDNMVVR

SEQ ID NO: 1016 - protein, 30 aa, Artificial Sequence
  Non-cyclic GFR-binding peptide
APTKLKPLSMLYVDSSNNVIDHHKDNMVVK

SEQ ID NO: 1017 - protein, 32 aa, Artificial Sequence
  Non-cyclic GFR-binding peptide
VPTKLKPLSMLYVDDMGVPTDHHKDEGMSVAE

SEQ ID NO: 1018 - protein, 30 aa, Artificial Sequence
  Non-cyclic GFR-binding peptide
VPTKLKPLSMLYVDKGVVTYDHHKDGMAVS

SEQ ID NO: 1019 - protein, 30 aa, Artificial Sequence
  Non-cyclic GFR-binding peptide
TPTKMKPLSMLYVNDKQQIIDHHKDGMVVD

SEQ ID NO: 1020 - protein, 30 aa, Artificial Sequence
  Non-cyclic GFR-binding peptide
VPARLKPLSMLYVDAANNVVDHHKDDMVVE

SEQ ID NO: 1021 - protein, 30 aa, Artificial Sequence
  Non-cyclic GFR-binding peptide
VPTRLKPLSMLYVDSANNVVDHHKDDMVVE

SEQ ID NO: 1022 - protein, 30 aa, Artificial Sequence
  Non-cyclic GFR-binding peptide
VPQALKPLSMLYVVGRKPKVDHHKDMIVRS

SEQ ID NO: 1023 - protein, 30 aa, Artificial Sequence
  Non-cyclic GFR-binding peptide
VSQDLKPLSMLYVIGKTPKIDHHKDMIVKS

SEQ ID NO: 1024 - protein, 30 aa, Artificial Sequence
  Non-cyclic GFR-binding peptide
VPQDLKPLSMLYVVGRTPKVDHHKDMVVKS

SEQ ID NO: 1025 - protein, 32 aa, Artificial Sequence
  Non-cyclic GFR-binding peptide
VPTEEKPLSMLYVRIKPHQGQHDHHKDFLQHN

SEQ ID NO: 1026 - protein, 32 aa, Artificial Sequence
  Non-cyclic GFR-binding peptide
VPTGQKPLSMLYVRIKPHQGQHDHHKDLEEHS

SEQ ID NO: 1027 - protein, 32 aa, Artificial Sequence
  Non-cyclic GFR-binding peptide
SRVHHKPLSMLYVEYVRKKPKLDHHKDRLEEH

SEQ ID NO: 1028 - protein, 32 aa, Artificial Sequence
  Non-cyclic GFR-binding peptide
TQVQLKPLSMLYVEIVRKKPIFDHHKDTLEDH

SEQ ID NO: 1029 - protein, 30 aa, Artificial Sequence
  Non-cyclic GFR-binding peptide
VPQELEPLPIVYYDENEKVVEQLSNDMVRS

SEQ ID NO: 1030 - protein, 30 aa, Artificial Sequence
  Non-cyclic GFR-binding peptide
VPQKMEPLPIVYYDENKNVVEQLSNNMVRS

SEQ ID NO: 1031 - protein, 30 aa, Artificial Sequence
  Non-cyclic GFR-binding peptide
VPQELEPLPIVYYDEYDKVVEQLSNEMVRS

SEQ ID NO: 1032 - protein, 30 aa, Artificial Sequence
  Non-cyclic GFR-binding peptide
VPQKLEPLPIVYYDDSSNVIEQLSNNMVRS

SEQ ID NO: 1033 - protein, 30 aa, Artificial Sequence
  Non-cyclic GFR-binding peptide
VPQQLEPLPIVYYDDSSNVIEQLSNNMVRS

SEQ ID NO: 1034 - protein, 30 aa, Artificial Sequence
  Non-cyclic GFR-binding peptide
VPQKLEPLPIVYYDSSNNVIEQLSNNMVRS

SEQ ID NO: 1035 - protein, 32 aa, Artificial Sequence
  Non-cyclic GFR-binding peptide
VPQKLEPLPIVYYDDMGVPTEQLSNEGMSVRS

SEQ ID NO: 1036 - protein, 30 aa, Artificial Sequence
  Non-cyclic GFR-binding peptide
VPQKLEPLPIVYYDKGVVTYEQLSNGMVRS

SEQ ID NO: 1037 - protein, 30 aa, Artificial Sequence
  Non-cyclic GFR-binding peptide
VPQKMEPLPIVYYNDKQQIIEQLSNGMVRS

SEQ ID NO: 1038 - protein, 30 aa, Artificial Sequence
  Non-cyclic GFR-binding peptide
VPQRLEPLPIVYYDAANNVVEQLSNDMVRS

SEQ ID NO: 1039 - protein, 30 aa, Artificial Sequence
  Non-cyclic GFR-binding peptide
VPQRLEPLPIVYYDSANNVVEQLSNDMVRS

SEQ ID NO: 1040 - protein, 30 aa, Artificial Sequence
  Non-cyclic GFR-binding peptide
VPQKTEPLPIVYYDNGRVLLEQLSNMIVRS

SEQ ID NO: 1041 - protein, 30 aa, Artificial Sequence
  Non-cyclic GFR-binding peptide
VPQDLEPLPIVYYIGKTPKIEQLSNMIVRS

SEQ ID NO: 1042 - protein, 30 aa, Artificial Sequence
  Non-cyclic GFR-binding peptide
VPQDLEPLPIVYYVGRTPKVEQLSNMVVRS

SEQ ID NO: 1043 - protein, 30 aa, Artificial Sequence
  Non-cyclic GFR-binding peptide
VPTELEPLPIVYYDENEKVVEQLSNDMVVE

SEQ ID NO: 1044 - protein, 30 aa, Artificial Sequence
  Non-cyclic GFR-binding peptide
VPEKMEPLPIVYYDENKNVVEQLSNNMTVE

SEQ ID NO: 1045 - protein, 30 aa, Artificial Sequence
  Non-cyclic GFR-binding peptide
VPTELEPLPIVYYDEYDKVVEQLSNEMVVE

SEQ ID NO: 1046 - protein, 30 aa, Artificial Sequence
  Non-cyclic GFR-binding peptide
APTKLEPLPIVYYDDSSNVIEQLSNNMVVR

SEQ ID NO: 1047 - protein, 30 aa, Artificial Sequence
  Non-cyclic GFR-binding peptide
APTQLEPLPIVYYDDSSNVIEQLSNNMVVR

SEQ ID NO: 1048 - protein, 30 aa, Artificial Sequence
  Non-cyclic GFR-binding peptide
APTKLEPLPIVYYDSSNNVIEQLSNNMVVK

SEQ ID NO: 1049 - protein, 32 aa, Artificial Sequence
  Non-cyclic GFR-binding peptide
VPTKLEPLPIVYYDDMGVPTEQLSNEGMSVAE

SEQ ID NO: 1050 - protein, 30 aa, Artificial Sequence
  Non-cyclic GFR-binding peptide
VPTKLEPLPIVYYDKGVVTYEQLSNGMAVS

SEQ ID NO: 1051 - protein, 30 aa, Artificial Sequence
  Non-cyclic GFR-binding peptide
TPTKMEPLPIVYYNDKQQIIEQLSNGMVVD

SEQ ID NO: 1052 - protein, 30 aa, Artificial Sequence
  Non-cyclic GFR-binding peptide
VPARLEPLPIVYYDAANNVVEQLSNDMVVE

SEQ ID NO: 1053 - protein, 30 aa, Artificial Sequence
  Non-cyclic GFR-binding peptide
VPTRLEPLPIVYYDSANNVVEQLSNDMVVE

SEQ ID NO: 1054 - protein, 30 aa, Artificial Sequence
  Non-cyclic GFR-binding peptide
APVKTEPLPIVYYDNGRVLLEQLSNMIVEE

SEQ ID NO: 1055 - protein, 30 aa, Artificial Sequence
  Non-cyclic GFR-binding peptide
VSQDLEPLPIVYYIGKTPKIEQLSNMIVKS

SEQ ID NO: 1056 - protein, 30 aa, Artificial Sequence
  Non-cyclic GFR-binding peptide
VPQDLEPLPIVYYVGRTPKVEQLSNMVVKS

SEQ ID NO: 1057 - protein, 32 aa, Artificial Sequence
  Non-cyclic GFR-binding peptide
VPTEEEPLPIVYYRIKPHQGQHEQLSNFLQHN

SEQ ID NO: 1058 - protein, 32 aa, Artificial Sequence
  Non-cyclic GFR-binding peptide
VPTGQEPLPIVYYRIKPHQGQHEQLSNLEEHS

SEQ ID NO: 1059 - protein, 32 aa, Artificial Sequence
  Non-cyclic GFR-binding peptide
SRVHHEPLPIVYYEYVRKKPKLEQLSNRLEEH

SEQ ID NO: 1060 - protein, 32 aa, Artificial Sequence
  Non-cyclic GFR-binding peptide
TQVQLEPLPIVYYEIVRKKPIFEQLSNTLEDH

SEQ ID NO: 1061 - protein, 30 aa, Artificial Sequence
  Non-cyclic GFR-binding peptide
VSQELEPLTILYYDENEKVVEQLSNDMVKS

SEQ ID NO: 1062 - protein, 30 aa, Artificial Sequence
  Non-cyclic GFR-binding peptide
VSQKMEPLTILYYDENKNVVEQLSNNMVKS

SEQ ID NO: 1063 - protein, 30 aa, Artificial Sequence
  Non-cyclic GFR-binding peptide
VSQELEPLTILYYDEYDKVVEQLSNEMVKS

SEQ ID NO: 1064 - protein, 30 aa, Artificial Sequence
  Non-cyclic GFR-binding peptide
VSQKLEPLTILYYDDSSNVIEQLSNNMVKS

SEQ ID NO: 1065 - protein, 30 aa, Artificial Sequence
  Non-cyclic GFR-binding peptide
VSQQLEPLTILYYDDSSNVIEQLSNNMVKS

SEQ ID NO: 1066 - protein, 30 aa, Artificial Sequence
  Non-cyclic GFR-binding peptide
VSQKLEPLTILYYDSSNNVIEQLSNNMVKS

SEQ ID NO: 1067 - protein, 32 aa, Artificial Sequence
  Non-cyclic GFR-binding peptide
VSQKLEPLTILYYDDMGVPTEQLSNEGMSVKS

SEQ ID NO: 1068 - protein, 30 aa, Artificial Sequence
  Non-cyclic GFR-binding peptide
VSQKLEPLTILYYDKGVVTYEQLSNGMVKS

SEQ ID NO: 1069 - protein, 30 aa, Artificial Sequence
  Non-cyclic GFR-binding peptide
VSQKMEPLTILYYNDKQQIIEQLSNGMVKS

SEQ ID NO: 1070 - protein, 30 aa, Artificial Sequence
  Non-cyclic GFR-binding peptide
VSQRLEPLTILYYDAANNVVEQLSNDMVKS

SEQ ID NO: 1071 - protein, 30 aa, Artificial Sequence
  Non-cyclic GFR-binding peptide
VSQRLEPLTILYYDSANNVVEQLSNDMVKS

SEQ ID NO: 1072 - protein, 30 aa, Artificial Sequence
  Non-cyclic GFR-binding peptide
VSQKTEPLTILYYDNGRVLLEQLSNMIVKS

SEQ ID NO: 1073 - protein, 30 aa, Artificial Sequence
  Non-cyclic GFR-binding peptide
VSQALEPLTILYYVGRKPKVEQLSNMIVKS

SEQ ID NO: 1074 - protein, 30 aa, Artificial Sequence
  Non-cyclic GFR-binding peptide
VSQDLEPLTILYYVGRTPKVEQLSNMVVKS

SEQ ID NO: 1075 - protein, 30 aa, Artificial Sequence
  Non-cyclic GFR-binding peptide
VPTELEPLTILYYDENEKVVEQLSNDMVVE

SEQ ID NO: 1076 - protein, 30 aa, Artificial Sequence
  Non-cyclic GFR-binding peptide
VPEKMEPLTILYYDENKNVVEQLSNNMTVE

SEQ ID NO: 1077 - protein, 30 aa, Artificial Sequence
  Non-cyclic GFR-binding peptide
VPTELEPLTILYYDEYDKVVEQLSNEMVVE

SEQ ID NO: 1078 - protein, 30 aa, Artificial Sequence
  Non-cyclic GFR-binding peptide
APTKLEPLTILYYDDSSNVIEQLSNNMVVR

SEQ ID NO: 1079 - protein, 30 aa, Artificial Sequence
  Non-cyclic GFR-binding peptide
APTQLEPLTILYYDDSSNVIEQLSNNMVVR

SEQ ID NO: 1080 - protein, 30 aa, Artificial Sequence
  Non-cyclic GFR-binding peptide
APTKLEPLTILYYDSSNNVIEQLSNNMVVK

SEQ ID NO: 1081 - protein, 32 aa, Artificial Sequence
  Non-cyclic GFR-binding peptide
VPTKLEPLTILYYDDMGVPTEQLSNEGMSVAE

SEQ ID NO: 1082 - protein, 30 aa, Artificial Sequence
  Non-cyclic GFR-binding peptide
VPTKLEPLTILYYDKGVVTYEQLSNGMAVS

SEQ ID NO: 1083 - protein, 30 aa, Artificial Sequence
  Non-cyclic GFR-binding peptide
TPTKMEPLTILYYNDKQQIIEQLSNGMVVD

SEQ ID NO: 1084 - protein, 30 aa, Artificial Sequence
  Non-cyclic GFR-binding peptide
VPARLEPLTILYYDAANNVVEQLSNDMVVE

SEQ ID NO: 1085 - protein, 30 aa, Artificial Sequence
  Non-cyclic GFR-binding peptide
VPTRLEPLTILYYDSANNVVEQLSNDMVVE

SEQ ID NO: 1086 - protein, 30 aa, Artificial Sequence
  Non-cyclic GFR-binding peptide
APVKTEPLTILYYDNGRVLLEQLSNMIVEE

SEQ ID NO: 1087 - protein, 30 aa, Artificial Sequence
  Non-cyclic GFR-binding peptide
VPQALEPLTILYYVGRKPKVEQLSNMIVRS

SEQ ID NO: 1088 - protein, 32 aa, Artificial Sequence
  Non-cyclic GFR-binding peptide
VPTEEEPLTILYYRIKPHQGQHEQLSNFLQHN

SEQ ID NO: 1089 - protein, 32 aa, Artificial Sequence
  Non-cyclic GFR-binding peptide
VPTGQEPLTILYYRIKPHQGQHEQLSNLEEHS

SEQ ID NO: 1090 - protein, 32 aa, Artificial Sequence
  Non-cyclic GFR-binding peptide
SRVHHEPLTILYYEYVRKKPKLEQLSNRLEEH

SEQ ID NO: 1091 - protein, 32 aa, Artificial Sequence
  Non-cyclic GFR-binding peptide
TQVQLEPLTILYYEIVRKKPIFEQLSNTLEDH

SEQ ID NO: 1092 - protein, 30 aa, Artificial Sequence
  Non-cyclic GFR-binding peptide
VPQELEPLTILYYDENEKVVEQLSNDMVKS

SEQ ID NO: 1093 - protein, 30 aa, Artificial Sequence
  Non-cyclic GFR-binding peptide
VPQKMEPLTILYYDENKNVVEQLSNNMVKS

SEQ ID NO: 1094 - protein, 30 aa, Artificial Sequence
  Non-cyclic GFR-binding peptide
VPQELEPLTILYYDEYDKVVEQLSNEMVKS

SEQ ID NO: 1095 - protein, 30 aa, Artificial Sequence
  Non-cyclic GFR-binding peptide
VPQKLEPLTILYYDDSSNVIEQLSNNMVKS

SEQ ID NO: 1096 - protein, 30 aa, Artificial Sequence
  Non-cyclic GFR-binding peptide
VPQQLEPLTILYYDDSSNVIEQLSNNMVKS

SEQ ID NO: 1097 - protein, 30 aa, Artificial Sequence
  Non-cyclic GFR-binding peptide
VPQKLEPLTILYYDSSNNVIEQLSNNMVKS

SEQ ID NO: 1098 - protein, 32 aa, Artificial Sequence
  Non-cyclic GFR-binding peptide
VPQKLEPLTILYYDDMGVPTEQLSNEGMSVKS

SEQ ID NO: 1099 - protein, 30 aa, Artificial Sequence
  Non-cyclic GFR-binding peptide
VPQKLEPLTILYYDKGVVTYEQLSNGMVKS

SEQ ID NO: 1100 - protein, 30 aa, Artificial Sequence
  Non-cyclic GFR-binding peptide
VPQKMEPLTILYYNDKQQIIEQLSNGMVKS

SEQ ID NO: 1101 - protein, 30 aa, Artificial Sequence
  Non-cyclic GFR-binding peptide
VPQRLEPLTILYYDAANNVVEQLSNDMVKS

SEQ ID NO: 1102 - protein, 30 aa, Artificial Sequence
  Non-cyclic GFR-binding peptide
VPQRLEPLTILYYDSANNVVEQLSNDMVKS

SEQ ID NO: 1103 - protein, 30 aa, Artificial Sequence
  Non-cyclic GFR-binding peptide
VPQKTEPLTILYYDNGRVLLEQLSNMIVKS

SEQ ID NO: 1104 - protein, 30 aa, Artificial Sequence
  Non-cyclic GFR-binding peptide
VPQALEPLTILYYVGRKPKVEQLSNMIVKS

SEQ ID NO: 1105 - protein, 30 aa, Artificial Sequence
  Non-cyclic GFR-binding peptide
VPQDLEPLTILYYIGKTPKIEQLSNMIVKS

SEQ ID NO: 1106 - protein, 32 aa, Artificial Sequence
  Non-cyclic GFR-binding peptide
VPTGQSNITMQIMRIKPHQGQHIGEMSLEQHN

SEQ ID NO: 1107 - protein, 30 aa, Artificial Sequence
  Non-cyclic GFR-binding peptide
VPTELSNITMQIMDENEKVVIGEMSDMVVE

SEQ ID NO: 1108 - protein, 30 aa, Artificial Sequence
  Non-cyclic GFR-binding peptide
VPEKMSNITMQIMDENKNVVIGEMSNMTVE

SEQ ID NO: 1109 - protein, 30 aa, Artificial Sequence
  Non-cyclic GFR-binding peptide
VPTELSNITMQIMDEYDKVVIGEMSEMVVE

SEQ ID NO: 1110 - protein, 30 aa, Artificial Sequence
  Non-cyclic GFR-binding peptide
APTKLSNITMQIMDDSSNVIIGEMSNMVVR

SEQ ID NO: 1111 - protein, 30 aa, Artificial Sequence
  Non-cyclic GFR-binding peptide
APTQLSNITMQIMDDSSNVIIGEMSNMVVR

SEQ ID NO: 1112 - protein, 30 aa, Artificial Sequence
  Non-cyclic GFR-binding peptide
APTKLSNITMQIMDSSNNVIIGEMSNMVVK

SEQ ID NO: 1113 - protein, 32 aa, Artificial Sequence
  Non-cyclic GFR-binding peptide
VPTKLSNITMQIMDDMGVPTIGEMSEGMSVAE

SEQ ID NO: 1114 - protein, 30 aa, Artificial Sequence
  Non-cyclic GFR-binding peptide
VPTKLSNITMQIMDKGVVTYIGEMSGMAVS

SEQ ID NO: 1115 - protein, 30 aa, Artificial Sequence
  Non-cyclic GFR-binding peptide
TPTKMSNITMQIMNDKQQIIIGEMSGMVVD

SEQ ID NO: 1116 - protein, 30 aa, Artificial Sequence
  Non-cyclic GFR-binding peptide
VPARLSNITMQIMDAANNVVIGEMSDMVVE

SEQ ID NO: 1117 - protein, 30 aa, Artificial Sequence
  Non-cyclic GFR-binding peptide
VPTRLSNITMQIMDSANNVVIGEMSDMVVE

SEQ ID NO: 1118 - protein, 30 aa, Artificial Sequence
  Non-cyclic GFR-binding peptide
APVKTSNITMQIMDNGRVLLIGEMSMIVEE

SEQ ID NO: 1119 - protein, 30 aa, Artificial Sequence
  Non-cyclic GFR-binding peptide
VPQALSNITMQIMVGRKPKVIGEMSMIVRS

SEQ ID NO: 1120 - protein, 30 aa, Artificial Sequence
  Non-cyclic GFR-binding peptide
VSQDLSNITMQIMIGKTPKIIGEMSMIVKS

SEQ ID NO: 1121 - protein, 30 aa, Artificial Sequence
  Non-cyclic GFR-binding peptide
VPQDLSNITMQIMVGRTPKVIGEMSMVVKS

SEQ ID NO: 1122 - protein, 32 aa, Artificial Sequence
  Non-cyclic GFR-binding peptide
VPTGQSNITMQIMRIKPHQGQHIGEMSLEEHS

SEQ ID NO: 1123 - protein, 32 aa, Artificial Sequence
  Non-cyclic GFR-binding peptide
SRVHHSNITMQIMEYVRKKPKLIGEMSRLEEH

SEQ ID NO: 1124 - protein, 32 aa, Artificial Sequence
  Non-cyclic GFR-binding peptide
TQVQLSNITMQIMEIVRKKPIFIGEMSTLEDH

SEQ ID NO: 1125 - protein, 32 aa, Artificial Sequence
  Non-cyclic GFR-binding peptide
VPTEESNITMQIMRIKPHQGQHLGEMSFLEHS

SEQ ID NO: 1126 - protein, 30 aa, Artificial Sequence
  Non-cyclic GFR-binding peptide
VPTELSNITMQIMDENEKVVLGEMSDMVVE

SEQ ID NO: 1127 - protein, 30 aa, Artificial Sequence
  Non-cyclic GFR-binding peptide
VPEKMSNITMQIMDENKNVVLGEMSNMTVE

SEQ ID NO: 1128 - protein, 30 aa, Artificial Sequence
  Non-cyclic GFR-binding peptide
VPTELSNITMQIMDEYDKVVLGEMSEMVVE

SEQ ID NO: 1129 - protein, 30 aa, Artificial Sequence
  Non-cyclic GFR-binding peptide
APTKLSNITMQIMDDSSNVILGEMSNMVVR

SEQ ID NO: 1130 - protein, 30 aa, Artificial Sequence
  Non-cyclic GFR-binding peptide
APTQLSNITMQIMDDSSNVILGEMSNMVVR

SEQ ID NO: 1131 - protein, 30 aa, Artificial Sequence
  Non-cyclic GFR-binding peptide
APTKLSNITMQIMDSSNNVILGEMSNMVVK

SEQ ID NO: 1132 - protein, 32 aa, Artificial Sequence
  Non-cyclic GFR-binding peptide
VPTKLSNITMQIMDDMGVPTLGEMSEGMSVAE

SEQ ID NO: 1133 - protein, 30 aa, Artificial Sequence
  Non-cyclic GFR-binding peptide
VPTKLSNITMQIMDKGVVTYLGEMSGMAVS

SEQ ID NO: 1134 - protein, 30 aa, Artificial Sequence
  Non-cyclic GFR-binding peptide
TPTKMSNITMQIMNDKQQIILGEMSGMVVD

SEQ ID NO: 1135 - protein, 30 aa, Artificial Sequence
  Non-cyclic GFR-binding peptide
VPARLSNITMQIMDAANNVVLGEMSDMVVE

SEQ ID NO: 1136 - protein, 30 aa, Artificial Sequence
  Non-cyclic GFR-binding peptide
VPTRLSNITMQIMDSANNVVLGEMSDMVVE

SEQ ID NO: 1137 - protein, 30 aa, Artificial Sequence
  Non-cyclic GFR-binding peptide
APVKTSNITMQIMDNGRVLLLGEMSMIVEE

SEQ ID NO: 1138 - protein, 30 aa, Artificial Sequence
  Non-cyclic GFR-binding peptide
VPQALSNITMQIMVGRKPKVLGEMSMIVRS

SEQ ID NO: 1139 - protein, 30 aa, Artificial Sequence
  Non-cyclic GFR-binding peptide
VSQDLSNITMQIMIGKTPKILGEMSMIVKS

SEQ ID NO: 1140 - protein, 30 aa, Artificial Sequence
  Non-cyclic GFR-binding peptide
VPQDLSNITMQIMVGRTPKVLGEMSMVVKS

SEQ ID NO: 1141 - protein, 32 aa, Artificial Sequence
  Non-cyclic GFR-binding peptide
VPTEESNITMQIMRIKPHQGQHLGEMSFLQHN

SEQ ID NO: 1142 - protein, 32 aa, Artificial Sequence
  Non-cyclic GFR-binding peptide
SRVHHSNITMQIMEYVRKKPKLLGEMSRLEEH

SEQ ID NO: 1143 - protein, 32 aa, Artificial Sequence
  Non-cyclic GFR-binding peptide
TQVQLSNITMQIMEIVRKKPIFLGEMSTLEDH

SEQ ID NO: 1144 - protein, 32 aa, Artificial Sequence
  Non-cyclic GFR-binding peptide
SRVQLRSVKVAKVEIVRKKPIFKEVQVTLEEH

SEQ ID NO: 1145 - protein, 30 aa, Artificial Sequence
  Non-cyclic GFR-binding peptide
VPTELRSVKVAKVDENEKVVKEVQVDMVVE

SEQ ID NO: 1146 - protein, 30 aa, Artificial Sequence
  Non-cyclic GFR-binding peptide
VPEKMRSVKVAKVDENKNVVKEVQVNMTVE

SEQ ID NO: 1147 - protein, 30 aa, Artificial Sequence
  Non-cyclic GFR-binding peptide
VPTELRSVKVAKVDEYDKVVKEVQVEMVVE

SEQ ID NO: 1148 - protein, 30 aa, Artificial Sequence
  Non-cyclic GFR-binding peptide
APTKLRSVKVAKVDDSSNVIKEVQVNMVVR

SEQ ID NO: 1149 - protein, 30 aa, Artificial Sequence
  Non-cyclic GFR-binding peptide
APTQLRSVKVAKVDDSSNVIKEVQVNMVVR

SEQ ID NO: 1150 - protein, 30 aa, Artificial Sequence
  Non-cyclic GFR-binding peptide
APTKLRSVKVAKVDSSNNVIKEVQVNMVVK

SEQ ID NO: 1151 - protein, 32 aa, Artificial Sequence
  Non-cyclic GFR-binding peptide
VPTKLRSVKVAKVDDMGVPTKEVQVEGMSVAE

SEQ ID NO: 1152 - protein, 30 aa, Artificial Sequence
  Non-cyclic GFR-binding peptide
VPTKLRSVKVAKVDKGVVTYKEVQVGMAVS

SEQ ID NO: 1153 - protein, 30 aa, Artificial Sequence
  Non-cyclic GFR-binding peptide
TPTKMRSVKVAKVNDKQQIIKEVQVGMVVD

SEQ ID NO: 1154 - protein, 30 aa, Artificial Sequence
  Non-cyclic GFR-binding peptide
VPARLRSVKVAKVDAANNVVKEVQVDMVVE

SEQ ID NO: 1155 - protein, 30 aa, Artificial Sequence
  Non-cyclic GFR-binding peptide
VPTRLRSVKVAKVDSANNVVKEVQVDMVVE

SEQ ID NO: 1156 - protein, 30 aa, Artificial Sequence
  Non-cyclic GFR-binding peptide
APVKTRSVKVAKVDNGRVLLKEVQVMIVEE

SEQ ID NO: 1157 - protein, 30 aa, Artificial Sequence
  Non-cyclic GFR-binding peptide
VPQALRSVKVAKVVGRKPKVKEVQVMIVRS

SEQ ID NO: 1158 - protein, 30 aa, Artificial Sequence
  Non-cyclic GFR-binding peptide
VSQDLRSVKVAKVIGKTPKIKEVQVMIVKS

SEQ ID NO: 1159 - protein, 30 aa, Artificial Sequence
  Non-cyclic GFR-binding peptide
VPQDLRSVKVAKVVGRTPKVKEVQVMVVKS

SEQ ID NO: 1160 - protein, 32 aa, Artificial Sequence
  Non-cyclic GFR-binding peptide
VPTEERSVKVAKVRIKPHQGQHKEVQVFLQHN

SEQ ID NO: 1161 - protein, 32 aa, Artificial Sequence
  Non-cyclic GFR-binding peptide
VPTGQRSVKVAKVRIKPHQGQHKEVQVLEEHS

SEQ ID NO: 1162 - protein, 32 aa, Artificial Sequence
  Non-cyclic GFR-binding peptide
TQVQLRSVKVAKVEIVRKKPIFKEVQVTLEDH

SEQ ID NO: 1163 - protein, 32 aa, Artificial Sequence
  Non-cyclic GFR-binding peptide
TQVHHRPVQVRKIEYVRKKPKLKKATVRLEDH

SEQ ID NO: 1164 - protein, 30 aa, Artificial Sequence
  Non-cyclic GFR-binding peptide
VPTELRPVQVRKIDENEKVVKKATVDMVVE

SEQ ID NO: 1165 - protein, 30 aa, Artificial Sequence
  Non-cyclic GFR-binding peptide
VPEKMRPVQVRKIDENKNVVKKATVNMTVE

SEQ ID NO: 1166 - protein, 30 aa, Artificial Sequence
  Non-cyclic GFR-binding peptide
VPTELRPVQVRKIDEYDKVVKKATVEMVVE

SEQ ID NO: 1167 - protein, 30 aa, Artificial Sequence
  Non-cyclic GFR-binding peptide
APTKLRPVQVRKIDDSSNVIKKATVNMVVR

SEQ ID NO: 1168 - protein, 30 aa, Artificial Sequence
  Non-cyclic GFR-binding peptide
APTQLRPVQVRKIDDSSNVIKKATVNMVVR

SEQ ID NO: 1169 - protein, 30 aa, Artificial Sequence
  Non-cyclic GFR-binding peptide
APTKLRPVQVRKIDSSNNVIKKATVNMVVK

SEQ ID NO: 1170 - protein, 32 aa, Artificial Sequence
  Non-cyclic GFR-binding peptide
VPTKLRPVQVRKIDDMGVPTKKATVEGMSVAE

SEQ ID NO: 1171 - protein, 30 aa, Artificial Sequence
  Non-cyclic GFR-binding peptide
VPTKLRPVQVRKIDKGVVTYKKATVGMAVS

SEQ ID NO: 1172 - protein, 30 aa, Artificial Sequence
  Non-cyclic GFR-binding peptide
TPTKMRPVQVRKINDKQQIIKKATVGMVVD

SEQ ID NO: 1173 - protein, 30 aa, Artificial Sequence
  Non-cyclic GFR-binding peptide
VPARLRPVQVRKIDAANNVVKKATVDMVVE

SEQ ID NO: 1174 - protein, 30 aa, Artificial Sequence
  Non-cyclic GFR-binding peptide
VPTRLRPVQVRKIDSANNVVKKATVDMVVE

SEQ ID NO: 1175 - protein, 30 aa, Artificial Sequence
  Non-cyclic GFR-binding peptide
APVKTRPVQVRKIDNGRVLLKKATVMIVEE

SEQ ID NO: 1176 - protein, 30 aa, Artificial Sequence
  Non-cyclic GFR-binding peptide
VPQALRPVQVRKIVGRKPKVKKATVMIVRS

SEQ ID NO: 1177 - protein, 30 aa, Artificial Sequence
  Non-cyclic GFR-binding peptide
VSQDLRPVQVRKIIGKTPKIKKATVMIVKS

SEQ ID NO: 1178 - protein, 30 aa, Artificial Sequence
  Non-cyclic GFR-binding peptide
VPQDLRPVQVRKIVGRTPKVKKATVMVVKS

SEQ ID NO: 1179 - protein, 32 aa, Artificial Sequence
  Non-cyclic GFR-binding peptide
VPTEERPVQVRKIRIKPHQGQHKKATVFLQHN

SEQ ID NO: 1180 - protein, 32 aa, Artificial Sequence
  Non-cyclic GFR-binding peptide
VPTGQRPVQVRKIRIKPHQGQHKKATVLEEHS

SEQ ID NO: 1181 - protein, 32 aa, Artificial Sequence
  Non-cyclic GFR-binding peptide
SRVHHRPVQVRKIEYVRKKPKLKKATVRLEEH

SEQ ID NO: 1182 - protein, 39 aa, Artificial Sequence
  Non-cyclic GFR-binding peptide
ARVVMNQYNKLVVKDYEDLYLTSIASLQTPASSPKPVKC

SEQ ID NO: 1183 - protein, 43 aa, Artificial Sequence
  Non-cyclic GFR-binding peptide
HSGSARVVMNQYNKLTPVGMDDLYLTSIASLKTPVSSAKGVKC

SEQ ID NO: 1184 - protein, 42 aa, Artificial Sequence
  Non-cyclic GFR-binding peptide
SSKSSKVIMQYNKLIKPTKGILYLTSIASLDQSVSSPSASAC

SEQ ID NO: 1185 - protein, 41 aa, Artificial Sequence
  Non-cyclic GFR-binding peptide
GSGEVVMDRYKKLIVKENEDFYLVSIANLETPVSSAKPIKC

SEQ ID NO: 1186 - protein, 42 aa, Artificial Sequence
  Non-cyclic GFR-binding peptide
SSKSSKVIMRYKKLIKPTKGIFYLVSIANLDQSVSSPSASAC

SEQ ID NO: 1187 - protein, 38 aa, Artificial Sequence
  Non-cyclic GFR-binding peptide
KVVMNRHKRLVVNNSSDYYLVSTASLKTPASSAKPVAC

SEQ ID NO: 1188 - protein, 43 aa, Artificial Sequence
  Non-cyclic GFR-binding peptide
HSGSARVVMNYHYKLIVNSSDDKYLVSIPSLQTPASSPKPVTC

SEQ ID NO: 1189 - protein, 31 aa, Artificial Sequence
  Non-cyclic GFR-binding peptide
HDELTYHYKLIVNSSDDKYLVSIPSLQTPAC

SEQ ID NO: 1190 - protein, 38 aa, Artificial Sequence
  Non-cyclic GFR-binding peptide
HDELTQYNKLPKKRVIELYLTSIASLQVQTPRCQVNRC

SEQ ID NO: 1191 - protein, 33 aa, Artificial Sequence
  Non-cyclic GFR-binding peptide
KNHQRHKRLIVNSSDDYYLVSTASLQTPASSPC

SEQ ID NO: 1192 - protein, 37 aa, Artificial Sequence
  Non-cyclic GFR-binding peptide
ARVVMNRYKKLGGGGGGGFYLMSIANLQTPASSPKPC

SEQ ID NO: 1193 - protein, 32 aa, Artificial Sequence
  Non-cyclic GFR-binding peptide
MEQYNKLAAAALYLTSIASLETPVSSAKPVKC

SEQ ID NO: 1194 - protein, 39 aa, Artificial Sequence
  Non-cyclic GFR-binding peptide
GEVVMEHKRLVVKEDYEDYYLVSTASLETPVSSAKPISC

SEQ ID NO: 1195 - protein, 26 aa, Artificial Sequence
  Non-cyclic GFR-binding peptide
QYNKLIVNNSSDLYLMSIASLKTPAC

SEQ ID NO: 1196 - protein, 28 aa, Artificial Sequence
  Non-cyclic GFR-binding peptide
MDQYNKLGGGLYLMSIASLEQSVASSAC

SEQ ID NO: 1197 - protein, 40 aa, Artificial Sequence
  Non-cyclic GFR-binding peptide
RSGSGEVVMDYHYKLVVKENEDKYLTSIPSLETPVSSAKC

SEQ ID NO: 1198 - protein, 38 aa, Artificial Sequence
  Non-cyclic GFR-binding peptide
SRVIMRYKKLVKPKRGVFYLMSIANLKQPVSSPAASAC

SEQ ID NO: 1199 - protein, 37 aa, Artificial Sequence
  Non-cyclic GFR-binding peptide
SMGERYKKLVVKENEDLYLTSIANLKTPVSSAKGVKC

SEQ ID NO: 1200 - protein, 37 aa, Artificial Sequence
  Non-cyclic GFR-binding peptide
ARVVIMQYNKLIVNSSDDLYLTSIASLQTPASSPKPC

SEQ ID NO: 1201 - protein, 33 aa, Artificial Sequence
  Non-cyclic GFR-binding peptide
QYNKLIVNSSDDLYLTSIANLKTPVSSAKGVKC

SEQ ID NO: 1202 - protein, 33 aa, Artificial Sequence
  Non-cyclic GFR-binding peptide
MNRYKKLIVKDYDDLYLTSIASLETPVSSGGGC

SEQ ID NO: 1203 - protein, 42 aa, Artificial Sequence
  Non-cyclic GFR-binding peptide
RVVMNQYNKLVVKDYEDLYLTSIASLQTPASSPKPVKGWFWW

SEQ ID NO: 1204 - protein, 42 aa, Artificial Sequence
  Non-cyclic GFR-binding peptide
RVAMNQYNKLVVKDYEDLYLTSIASLQTPASSPKPVKPGPTG

SEQ ID NO: 1205 - protein, 38 aa, Artificial Sequence
  Non-cyclic GFR-binding peptide
SKVIMRHKRLIVNSSDDYYLVSTASLQTPASSPPGPTG

SEQ ID NO: 1206 - protein, 30 aa, Artificial Sequence
  Non-cyclic GFR-binding peptide
RHKRLIVNNSSDLYLMSIASLKTPAPGPTG

SEQ ID NO: 1207 - protein, 30 aa, Artificial Sequence
  Non-cyclic GFR-binding peptide
RYKKLIVNNSSDLYLMSIASLKTPAPGPTG

SEQ ID NO: 1208 - protein, 44 aa, Artificial Sequence
  Non-cyclic GFR-binding peptide
RSGSGEVVMDYHYKLVVKENEDKYLTSIPSLETPVSSAKPGPTG

SEQ ID NO: 1209 - protein, 36 aa, Artificial Sequence
  Non-cyclic GFR-binding peptide
MDYHYKLVVKENEDKYLTSIPSLETPVSSAKPGPTG

SEQ ID NO: 1210 - protein, 38 aa, Artificial Sequence
  Non-cyclic GFR-binding peptide
NHQMDRYKKLGGGGGFYLMSIANLQTPASSPKPPGPTG

SEQ ID NO: 1211 - protein, 44 aa, Artificial Sequence
  Non-cyclic GFR-binding peptide
RSGSGEVVMDYHYKLVVKENEDKYLTSIPSLETPVSSAKGWFWW

SEQ ID NO: 1212 - protein, 35 aa, Artificial Sequence
  Non-cyclic GFR-binding peptide
NHQMDQYNKLGGGLYLMSIASLEQSVASSAGWFWW

SEQ ID NO: 1213 - protein, 42 aa, Artificial Sequence
  Non-cyclic GFR-binding peptide
HDELTQYNKLPKKRVIELYLTSIASLQVQTPRCQVNRPGPTG

SEQ ID NO: 1214 - protein, 36 aa, Artificial Sequence
  Non-cyclic GFR-binding peptide
ELTQYNKLAAALYLTSIASLQVQTPRCQVNRPGPTG

SEQ ID NO: 1215 - protein, 38 aa, Artificial Sequence
  Non-cyclic GFR-binding peptide
SRVIMNSLQEVKPKRGVYYVIPLPELETPVSSAKPIKC

SEQ ID NO: 1216 - protein, 40 aa, Artificial Sequence
  Non-cyclic GFR-binding peptide
KSSRVIMNSLQEVKPTRGVYYVIPLPELAQPVSSPAASAC

SEQ ID NO: 1217 - protein, 28 aa, Artificial Sequence
  Non-cyclic GFR-binding peptide
VQVEKHQGQHPKIRVKAVKVSREETPVC

SEQ ID NO: 1218 - protein, 30 aa, Artificial Sequence
  Non-cyclic GFR-binding peptide
LFSMEGIHQGQHPKIRMIQMTINSEETPVC

SEQ ID NO: 1219 - protein, 42 aa, Artificial Sequence
  Non-cyclic GFR-binding peptide
ALHDELRVTAKKLKPKKRVYEIKRVQVPRLQVQTPRCQVNRC

SEQ ID NO: 1220 - protein, 35 aa, Artificial Sequence
  Non-cyclic GFR-binding peptide
MNPYVKLVVNKNEDFFLISLSSMKEPVSSPEPIGC

SEQ ID NO: 1221 - protein, 35 aa, Artificial Sequence
  Non-cyclic GFR-binding peptide
MNPYVKLVVNKNEDFFLLSLSSTKEPVSSPEPIGC

SEQ ID NO: 1222 - protein, 41 aa, Artificial Sequence
  Non-cyclic GFR-binding peptide
GSAEVVMDEYQKYVVNNAADIYLISIPSLRAPVSSSAPAAC

SEQ ID NO: 1223 - protein, 38 aa, Artificial Sequence
  Non-cyclic GFR-binding peptide
EVVMDEYQKYVVNNAADIYLISIPSLRAPVSSSAPAAC

SEQ ID NO: 1224 - protein, 35 aa, Artificial Sequence
  Non-cyclic GFR-binding peptide
MDEYQKYVVNNAADIYLLSIPSLRAPVSSSAPAAC

SEQ ID NO: 1225 - protein, 27 aa, Artificial Sequence
  Non-cyclic GFR-binding peptide
MDEYQKYVVNNAADIYLLSIPSLRAPC

SEQ ID NO: 1226 - protein, 32 aa, Artificial Sequence
  Non-cyclic GFR-binding peptide
MDEYQKYAAAIYLISIPSLRAPVSSSAPAAAC

SEQ ID NO: 1227 - protein, 26 aa, Artificial Sequence
  Non-cyclic GFR-binding peptide
EYQKYVVNNAADIYLISIPSLRQPVC

SEQ ID NO: 1228 - protein, 39 aa, Artificial Sequence
  Non-cyclic GFR-binding peptide
ARVVMDEYQKYVVNNAADIYLISIPSLQTPASSPKPVTC

SEQ ID NO: 1229 - protein, 30 aa, Artificial Sequence
  Non-cyclic GFR-binding peptide
RVVMDNSLQEVVNNASDYYLITLPELRLQV

SEQ ID NO: 1230 - protein, 30 aa, Artificial Sequence
  Non-cyclic GFR-binding peptide
RVVMNNSLQEIVNSSDDYYVIELPELKTPA

SEQ ID NO: 1231 - protein, 30 aa, Artificial Sequence
  Non-cyclic GFR-binding peptide
HEELREYQKYVKPKRGVIFLISIPSLQTPA

SEQ ID NO: 1232 - protein, 30 aa, Artificial Sequence
  Non-cyclic GFR-binding peptide
EVVMDNSLQEIVKENEDYYLLTLPELAQPV

SEQ ID NO: 1233 - protein, 30 aa, Artificial Sequence
  Non-cyclic GFR-binding peptide
SKVMDNSLQEVANNASDYYLITLPELETPV

SEQ ID NO: 1234 - protein, 42 aa, Artificial Sequence
  Non-cyclic GFR-binding peptide
RSASSEVVMNQYNKLVVNKNEDLYLMSIASMKTPVSSPEPIG

SEQ ID NO: 1235 - protein, 42 aa, Artificial Sequence
  Non-cyclic GFR-binding peptide
HSGSSEVVMNQYNKLIVNSSDDLYLMSIASLKTPVSTPKTVH

SEQ ID NO: 1236 - protein, 42 aa, Artificial Sequence
  Non-cyclic GFR-binding peptide
HSGSSEVVMNQYNKLIVNSSDDLYLMSIASLKTPVSSPKPVY

SEQ ID NO: 1237 - protein, 42 aa, Artificial Sequence
  Non-cyclic GFR-binding peptide
HSGSAEVVMNQYNKLIVNSSDDLYLMSIASLQTPVSSPKPVT

SEQ ID NO: 1238 - protein, 42 aa, Artificial Sequence
  Non-cyclic GFR-binding peptide
HSGSAEVVMNQYNKLIVNNSSDLYLMSIASLKTPVSSAKPVA

SEQ ID NO: 1239 - protein, 43 aa, Artificial Sequence
  Non-cyclic GFR-binding peptide
RSGSEVVSMGEQYNKLTPVGMDDLYLMSIASLKTPVSSAKGVK

SEQ ID NO: 1240 - protein, 42 aa, Artificial Sequence
  Non-cyclic GFR-binding peptide
RSGSEEVVMGQYNKLYTVVGKDLYLMSIASLKTPVSSAKSAK

SEQ ID NO: 1241 - protein, 42 aa, Artificial Sequence
  Non-cyclic GFR-binding peptide
SSGSREVVMGQYNKLIIQQKDNLYLMSIASMKTPVSSPGASG

SEQ ID NO: 1242 - protein, 42 aa, Artificial Sequence
  Non-cyclic GFR-binding peptide
RSGSAEVVMDQYNKLVVNNAADLYLMSIASLRTPVSSSAPAA

SEQ ID NO: 1243 - protein, 42 aa, Artificial Sequence
  Non-cyclic GFR-binding peptide
RSGSSEVVMDQYNKLVVNNASDLYLMSIASLRTPVSSTPPTS

SEQ ID NO: 1244 - protein, 42 aa, Artificial Sequence
  Non-cyclic GFR-binding peptide
HSGSSEVVMNQYNKLIVNSSDDLYLMSIASLKTPVSSPKPVH

SEQ ID NO: 1245 - protein, 41 aa, Artificial Sequence
  Non-cyclic GFR-binding peptide
LSGSEVVIMQYNKLLLVRGNDLYLMSIASTKTPVSSTSPVR

SEQ ID NO: 1246 - protein, 41 aa, Artificial Sequence
  Non-cyclic GFR-binding peptide
SSKSEVVIMQYNKLVKPKRGVLYLMSIASLATPVSSPAASA

SEQ ID NO: 1247 - protein, 41 aa, Artificial Sequence
  Non-cyclic GFR-binding peptide
SSKSEVVIMQYNKLIKPTKGILYLMSIASLDTPVSSPSASA

SEQ ID NO: 1248 - protein, 41 aa, Artificial Sequence
  Non-cyclic GFR-binding peptide
SSKSEVVVMQYNKLVKPTRGVLYLMSIASLDTPVSSPSASA

SEQ ID NO: 1249 - protein, 42 aa, Artificial Sequence
  Non-cyclic GFR-binding peptide
RSASSEVTMNQYNKLVVNKNEDLYLMSIASMKEPVSSPEPIG

SEQ ID NO: 1250 - protein, 42 aa, Artificial Sequence
  Non-cyclic GFR-binding peptide
HSGSSRVVMNQYNKLIVNSSDDLYLMSIASLKTPASTPKTVH

SEQ ID NO: 1251 - protein, 42 aa, Artificial Sequence
  Non-cyclic GFR-binding peptide
HSGSSRVVMNQYNKLIVNSSDDLYLMSIASLKTPASSPKPVY

SEQ ID NO: 1252 - protein, 42 aa, Artificial Sequence
  Non-cyclic GFR-binding peptide
HSGSARVVMNQYNKLIVNSSDDLYLMSIASLQTPASSPKPVT

SEQ ID NO: 1253 - protein, 42 aa, Artificial Sequence
  Non-cyclic GFR-binding peptide
HSGSAKVVMNQYNKLIVNNSSDLYLMSIASLKTPASSAKPVA

SEQ ID NO: 1254 - protein, 43 aa, Artificial Sequence
  Non-cyclic GFR-binding peptide
RSGSEAVSMGEQYNKLTPVGMDDLYLMSIASLKTPVSSAKGVK

SEQ ID NO: 1255 - protein, 42 aa, Artificial Sequence
  Non-cyclic GFR-binding peptide
RSGSESVAMGQYNKLYTVVGKDLYLMSIASLKTPVSSAKSAK

SEQ ID NO: 1256 - protein, 42 aa, Artificial Sequence
  Non-cyclic GFR-binding peptide
SSGSRDVVMGQYNKLIIQQKDNLYLMSIASMKTPTSSPGASG

SEQ ID NO: 1257 - protein, 42 aa, Artificial Sequence
  Non-cyclic GFR-binding peptide
RSGSAEVVMDQYNKLVVNNAADLYLMSIASLRAPVSSSAPAA

SEQ ID NO: 1258 - protein, 42 aa, Artificial Sequence
  Non-cyclic GFR-binding peptide
HSGSSRVVMNQYNKLIVNSSDDLYLMSIASLKTPASSPKPVH

SEQ ID NO: 1259 - protein, 41 aa, Artificial Sequence
  Non-cyclic GFR-binding peptide
LSGSEEVIMQYNKLLLVRGNDLYLMSIASTKVPASSTSPVR

SEQ ID NO: 1260 - protein, 41 aa, Artificial Sequence
  Non-cyclic GFR-binding peptide
SSKSSRVIMQYNKLVKPKRGVLYLMSIASLAQPVSSPAASA

SEQ ID NO: 1261 - protein, 41 aa, Artificial Sequence
  Non-cyclic GFR-binding peptide
SSKSSKVIMQYNKLIKPTKGILYLMSIASLDQSVSSPSASA

SEQ ID NO: 1262 - protein, 41 aa, Artificial Sequence
  Non-cyclic GFR-binding peptide
SSKSSKVVMQYNKLVKPTRGVLYLMSIASLDQPVSSPSASA

SEQ ID NO: 1263 - protein, 44 aa, Artificial Sequence
  Non-cyclic GFR-binding peptide
RSESKNHQLFQYNKLHQGQHPKIRLYLMSIASEETPVSELGEDN

SEQ ID NO: 1264 - protein, 44 aa, Artificial Sequence
  Non-cyclic GFR-binding peptide
RSESQSHEELQYNKLHQGQHPKIRLYLMSIASQGTPVSELGEDN

SEQ ID NO: 1265 - protein, 45 aa, Artificial Sequence
  Non-cyclic GFR-binding peptide
ASASELHEELRQYNKLLKPKKRVYELYLMSIASHHVRSPQSKVSS

SEQ ID NO: 1266 - protein, 45 aa, Artificial Sequence
  Non-cyclic GFR-binding peptide
ESKSALHDELTQYNKLFIPKKRVIELYLMSIASLQVQTPRSQVNR

SEQ ID NO: 1267 - protein, 42 aa, Artificial Sequence
  Non-cyclic GFR-binding peptide
RSGSGEVTMDPYVKLVVKENEDFFLISLSSLEEPVSSAKPIK

SEQ ID NO: 1268 - protein, 42 aa, Artificial Sequence
  Non-cyclic GFR-binding peptide
RSGSGEVTMEPYVKLVVKDYEDFFLISLSSLEEPVSSAKPIS

SEQ ID NO: 1269 - protein, 42 aa, Artificial Sequence
  Non-cyclic GFR-binding peptide
HSGSSEVTMNPYVKLIVNSSDDFFLISLSSLKEPVSTPKTVH

SEQ ID NO: 1270 - protein, 42 aa, Artificial Sequence
  Non-cyclic GFR-binding peptide
HSGSSEVTMNPYVKLIVNSSDDFFLISLSSLKEPVSSPKPVY

SEQ ID NO: 1271 - protein, 42 aa, Artificial Sequence
  Non-cyclic GFR-binding peptide
HSGSAEVTMNPYVKLIVNSSDDFFLISLSSLQEPVSSPKPVT

SEQ ID NO: 1272 - protein, 42 aa, Artificial Sequence
  Non-cyclic GFR-binding peptide
HSGSAEVTMNPYVKLIVNNSSDFFLISLSSLKEPVSSAKPVA

SEQ ID NO: 1273 - protein, 43 aa, Artificial Sequence
  Non-cyclic GFR-binding peptide
RSGSEVTSMGEPYVKLTPVGMDDFFLISLSSLKEPVSSAKGVK

SEQ ID NO: 1274 - protein, 42 aa, Artificial Sequence
  Non-cyclic GFR-binding peptide
RSGSEEVTMGPYVKLYTVVGKDFFLISLSSLKEPVSSAKSAK

SEQ ID NO: 1275 - protein, 42 aa, Artificial Sequence
  Non-cyclic GFR-binding peptide
SSGSREVTMGPYVKLIIQQKDNFFLISLSSMKEPVSSPGASG

SEQ ID NO: 1276 - protein, 42 aa, Artificial Sequence
  Non-cyclic GFR-binding peptide
RSGSAEVTMDPYVKLVVNNAADFFLISLSSLREPVSSSAPAA

SEQ ID NO: 1277 - protein, 42 aa, Artificial Sequence
  Non-cyclic GFR-binding peptide
RSGSSEVTMDPYVKLVVNNASDFFLISLSSLREPVSSTPPTS

SEQ ID NO: 1278 - protein, 42 aa, Artificial Sequence
  Non-cyclic GFR-binding peptide
HSGSSEVTMNPYVKLIVNSSDDFFLISLSSLKEPVSSPKPVH

SEQ ID NO: 1279 - protein, 41 aa, Artificial Sequence
  Non-cyclic GFR-binding peptide
LSGSEVTIMPYVKLLLVRGNDFFLISLSSTKEPVSSTSPVR

SEQ ID NO: 1280 - protein, 41 aa, Artificial Sequence
  Non-cyclic GFR-binding peptide
SSKSEVTIMPYVKLVKPKRGVFFLISLSSLAEPVSSPAASA

SEQ ID NO: 1281 - protein, 41 aa, Artificial Sequence
  Non-cyclic GFR-binding peptide
SSKSEVTIMPYVKLIKPTKGIFFLISLSSLDEPVSSPSASA

SEQ ID NO: 1282 - protein, 41 aa, Artificial Sequence
  Non-cyclic GFR-binding peptide
SSKSEVTVMPYVKLVKPTRGVFFLISLSSLDEPVSSPSASA

SEQ ID NO: 1283 - protein, 42 aa, Artificial Sequence
  Non-cyclic GFR-binding peptide
RSGSGEVVMDPYVKLVVKENEDFFLISLSSLETPVSSAKPIK

SEQ ID NO: 1284 - protein, 42 aa, Artificial Sequence
  Non-cyclic GFR-binding peptide
RSGSGEVVMEPYVKLVVKDYEDFFLISLSSLETPVSSAKPIS

SEQ ID NO: 1285 - protein, 42 aa, Artificial Sequence
  Non-cyclic GFR-binding peptide
HSGSSRVVMNPYVKLIVNSSDDFFLISLSSLKTPASTPKTVH

SEQ ID NO: 1286 - protein, 42 aa, Artificial Sequence
  Non-cyclic GFR-binding peptide
HSGSSRVVMNPYVKLIVNSSDDFFLISLSSLKTPASSPKPVY

SEQ ID NO: 1287 - protein, 42 aa, Artificial Sequence
  Non-cyclic GFR-binding peptide
HSGSARVVMNPYVKLIVNSSDDFFLISLSSLQTPASSPKPVT

SEQ ID NO: 1288 - protein, 42 aa, Artificial Sequence
  Non-cyclic GFR-binding peptide
HSGSAKVVMNPYVKLIVNNSSDFFLISLSSLKTPASSAKPVA

SEQ ID NO: 1289 - protein, 43 aa, Artificial Sequence
  Non-cyclic GFR-binding peptide
RSGSEAVSMGEPYVKLTPVGMDDFFLISLSSLKTPVSSAKGVK

SEQ ID NO: 1290 - protein, 42 aa, Artificial Sequence
  Non-cyclic GFR-binding peptide
RSGSESVAMGPYVKLYTVVGKDFFLISLSSLKTPVSSAKSAK

SEQ ID NO: 1291 - protein, 42 aa, Artificial Sequence
  Non-cyclic GFR-binding peptide
SSGSRDVVMGPYVKLIIQQKDNFFLISLSSMKTPTSSPGASG

SEQ ID NO: 1292 - protein, 42 aa, Artificial Sequence
  Non-cyclic GFR-binding peptide
RSGSAEVVMDPYVKLVVNNAADFFLISLSSLRAPVSSSAPAA

SEQ ID NO: 1293 - protein, 42 aa, Artificial Sequence
  Non-cyclic GFR-binding peptide
RSGSSEVVMDPYVKLVVNNASDFFLISLSSLRTPVSSTPPTS

SEQ ID NO: 1294 - protein, 42 aa, Artificial Sequence
  Non-cyclic GFR-binding peptide
HSGSSRVVMNPYVKLIVNSSDDFFLISLSSLKTPASSPKPVH

SEQ ID NO: 1295 - protein, 41 aa, Artificial Sequence
  Non-cyclic GFR-binding peptide
LSGSEEVIMPYVKLLLVRGNDFFLISLSSTKVPASSTSPVR

SEQ ID NO: 1296 - protein, 41 aa, Artificial Sequence
  Non-cyclic GFR-binding peptide
SSKSSRVIMPYVKLVKPKRGVFFLISLSSLAQPVSSPAASA

SEQ ID NO: 1297 - protein, 41 aa, Artificial Sequence
  Non-cyclic GFR-binding peptide
SSKSSKVIMPYVKLIKPTKGIFFLISLSSLDQSVSSPSASA

SEQ ID NO: 1298 - protein, 41 aa, Artificial Sequence
  Non-cyclic GFR-binding peptide
SSKSSKVVMPYVKLVKPTRGVFFLISLSSLDQPVSSPSASA

SEQ ID NO: 1299 - protein, 44 aa, Artificial Sequence
  Non-cyclic GFR-binding peptide
RSESKNHQLFPYVKLHQGQHPKIRFFLISLSSEETPVSELGEDN

SEQ ID NO: 1300 - protein, 44 aa, Artificial Sequence
  Non-cyclic GFR-binding peptide
RSESQSHEELPYVKLHQGQHPKIRFFLISLSSQGTPVSELGEDN

SEQ ID NO: 1301 - protein, 45 aa, Artificial Sequence
  Non-cyclic GFR-binding peptide
ASASELHEELRPYVKLLKPKKRVYEFFLISLSSHHVRSPQSKVSS

SEQ ID NO: 1302 - protein, 45 aa, Artificial Sequence
  Non-cyclic GFR-binding peptide
ESKSALHDELTPYVKLFIPKKRVIEFFLISLSSLQVQTPRSQVNR

SEQ ID NO: 1303 - protein, 42 aa, Artificial Sequence
  Non-cyclic GFR-binding peptide
RSGSGRVVMDRYKKLVVKENEDFYLVSIANLETPASSAKPIK

SEQ ID NO: 1304 - protein, 42 aa, Artificial Sequence
  Non-cyclic GFR-binding peptide
RSASSRVVMNRYKKLVVNKNEDFYLVSIANMKTPASSPEPIG

SEQ ID NO: 1305 - protein, 42 aa, Artificial Sequence
  Non-cyclic GFR-binding peptide
RSGSGRVVMERYKKLVVKDYEDFYLVSIANLETPASSAKPIS

SEQ ID NO: 1306 - protein, 42 aa, Artificial Sequence
  Non-cyclic GFR-binding peptide
HSGSARVVMNRYKKLIVNNSSDFYLVSIANLKTPASSAKPVA

SEQ ID NO: 1307 - protein, 43 aa, Artificial Sequence
  Non-cyclic GFR-binding peptide
RSGSRVVSMGERYKKLTPVGMDDFYLVSIANLKTPASSAKGVK

SEQ ID NO: 1308 - protein, 42 aa, Artificial Sequence
  Non-cyclic GFR-binding peptide
RSGSERVVMGRYKKLYTVVGKDFYLVSIANLKTPASSAKSAK

SEQ ID NO: 1309 - protein, 42 aa, Artificial Sequence
  Non-cyclic GFR-binding peptide
SSGSRRVVMGRYKKLIIQQKDNFYLVSIANMKTPASSPGASG

SEQ ID NO: 1310 - protein, 42 aa, Artificial Sequence
  Non-cyclic GFR-binding peptide
RSGSARVVMDRYKKLVVNNAADFYLVSIANLRTPASSSAPAA

SEQ ID NO: 1311 - protein, 42 aa, Artificial Sequence
  Non-cyclic GFR-binding peptide
RSGSSRVVMDRYKKLVVNNASDFYLVSIANLRTPASSTPPTS

SEQ ID NO: 1312 - protein, 41 aa, Artificial Sequence
  Non-cyclic GFR-binding peptide
LSGSRVVIMRYKKLLLVRGNDFYLVSIANTKTPASSTSPVR

SEQ ID NO: 1313 - protein, 41 aa, Artificial Sequence
  Non-cyclic GFR-binding peptide
SSKSRVVIMRYKKLVKPKRGVFYLVSIANLATPASSPAASA

SEQ ID NO: 1314 - protein, 41 aa, Artificial Sequence
  Non-cyclic GFR-binding peptide
SSKSRVVIMRYKKLIKPTKGIFYLVSIANLDTPASSPSASA

SEQ ID NO: 1315 - protein, 41 aa, Artificial Sequence
  Non-cyclic GFR-binding peptide
SSKSRVVVMRYKKLVKPTRGVFYLVSIANLDTPASSPSASA

SEQ ID NO: 1316 - protein, 42 aa, Artificial Sequence
  Non-cyclic GFR-binding peptide
RSGSGEVVMDRYKKLVVKENEDFYLVSIANLETPVSSAKPIK

SEQ ID NO: 1317 - protein, 42 aa, Artificial Sequence
  Non-cyclic GFR-binding peptide
RSASSEVTMNRYKKLVVNKNEDFYLVSIANMKEPVSSPEPIG

SEQ ID NO: 1318 - protein, 42 aa, Artificial Sequence
  Non-cyclic GFR-binding peptide
RSGSGEVVMERYKKLVVKDYEDFYLVSIANLETPVSSAKPIS

SEQ ID NO: 1319 - protein, 42 aa, Artificial Sequence
  Non-cyclic GFR-binding peptide
HSGSAKVVMNRYKKLIVNNSSDFYLVSIANLKTPASSAKPVA

SEQ ID NO: 1320 - protein, 43 aa, Artificial Sequence
  Non-cyclic GFR-binding peptide
RSGSEAVSMGERYKKLTPVGMDDFYLVSIANLKTPVSSAKGVK

SEQ ID NO: 1321 - protein, 42 aa, Artificial Sequence
  Non-cyclic GFR-binding peptide
RSGSESVAMGRYKKLYTVVGKDFYLVSIANLKTPVSSAKSAK

SEQ ID NO: 1322 - protein, 42 aa, Artificial Sequence
  Non-cyclic GFR-binding peptide
SSGSRDVVMGRYKKLIIQQKDNFYLVSIANMKTPTSSPGASG

SEQ ID NO: 1323 - protein, 42 aa, Artificial Sequence
  Non-cyclic GFR-binding peptide
RSGSAEVVMDRYKKLVVNNAADFYLVSIANLRAPVSSSAPAA

SEQ ID NO: 1324 - protein, 42 aa, Artificial Sequence
  Non-cyclic GFR-binding peptide
RSGSSEVVMDRYKKLVVNNASDFYLVSIANLRTPVSSTPPTS

SEQ ID NO: 1325 - protein, 41 aa, Artificial Sequence
  Non-cyclic GFR-binding peptide
LSGSEEVIMRYKKLLLVRGNDFYLVSIANTKVPASSTSPVR

SEQ ID NO: 1326 - protein, 41 aa, Artificial Sequence
  Non-cyclic GFR-binding peptide
SSKSSRVIMRYKKLVKPKRGVFYLVSIANLAQPVSSPAASA

SEQ ID NO: 1327 - protein, 41 aa, Artificial Sequence
  Non-cyclic GFR-binding peptide
SSKSSKVVMRYKKLVKPTRGVFYLVSIANLDQPVSSPSASA

SEQ ID NO: 1328 - protein, 44 aa, Artificial Sequence
  Non-cyclic GFR-binding peptide
RSESKNHQLFRYKKLHQGQHPKIRFYLVSIANEETPVSELGEDN

SEQ ID NO: 1329 - protein, 44 aa, Artificial Sequence
  Non-cyclic GFR-binding peptide
RSESQSHEELRYKKLHQGQHPKIRFYLVSIANQGTPVSELGEDN

SEQ ID NO: 1330 - protein, 45 aa, Artificial Sequence
  Non-cyclic GFR-binding peptide
ASASELHEELRRYKKLLKPKKRVYEFYLVSIANHHVRSPQSKVSS

SEQ ID NO: 1331 - protein, 45 aa, Artificial Sequence
  Non-cyclic GFR-binding peptide
ESKSALHDELTRYKKLFIPKKRVIEFYLVSIANLQVQTPRSQVNR

SEQ ID NO: 1332 - protein, 42 aa, Artificial Sequence
  Non-cyclic GFR-binding peptide
RSGSGKVVMDRHKRLVVKENEDYYLVSTASLETPASSAKPIK

SEQ ID NO: 1333 - protein, 42 aa, Artificial Sequence
  Non-cyclic GFR-binding peptide
RSASSKVVMNRHKRLVVNKNEDYYLVSTASMKTPASSPEPIG

SEQ ID NO: 1334 - protein, 42 aa, Artificial Sequence
  Non-cyclic GFR-binding peptide
RSGSGKVVMERHKRLVVKDYEDYYLVSTASLETPASSAKPIS

SEQ ID NO: 1335 - protein, 42 aa, Artificial Sequence
  Non-cyclic GFR-binding peptide
HSGSSKVVMNRHKRLIVNSSDDYYLVSTASLKTPASTPKTVH

SEQ ID NO: 1336 - protein, 42 aa, Artificial Sequence
  Non-cyclic GFR-binding peptide
HSGSSKVVMNRHKRLIVNSSDDYYLVSTASLKTPASSPKPVY

SEQ ID NO: 1337 - protein, 42 aa, Artificial Sequence
  Non-cyclic GFR-binding peptide
HSGSAKVVMNRHKRLIVNSSDDYYLVSTASLQTPASSPKPVT

SEQ ID NO: 1338 - protein, 43 aa, Artificial Sequence
  Non-cyclic GFR-binding peptide
RSGSKVVSMGERHKRLTPVGMDDYYLVSTASLKTPASSAKGVK

SEQ ID NO: 1339 - protein, 42 aa, Artificial Sequence
  Non-cyclic GFR-binding peptide
RSGSEKVVMGRHKRLYTVVGKDYYLVSTASLKTPASSAKSAK

SEQ ID NO: 1340 - protein, 42 aa, Artificial Sequence
  Non-cyclic GFR-binding peptide
SSGSRKVVMGRHKRLIIQQKDNYYLVSTASMKTPASSPGASG

SEQ ID NO: 1341 - protein, 42 aa, Artificial Sequence
  Non-cyclic GFR-binding peptide
RSGSAKVVMDRHKRLVVNNAADYYLVSTASLRTPASSSAPAA

SEQ ID NO: 1342 - protein, 42 aa, Artificial Sequence
  Non-cyclic GFR-binding peptide
RSGSSKVVMDRHKRLVVNNASDYYLVSTASLRTPASSTPPTS

SEQ ID NO: 1343 - protein, 42 aa, Artificial Sequence
  Non-cyclic GFR-binding peptide
HSGSSKVVMNRHKRLIVNSSDDYYLVSTASLKTPASSPKPVH

SEQ ID NO: 1344 - protein, 41 aa, Artificial Sequence
  Non-cyclic GFR-binding peptide
LSGSKVVIMRHKRLLLVRGNDYYLVSTASTKTPASSTSPVR

SEQ ID NO: 1345 - protein, 41 aa, Artificial Sequence
  Non-cyclic GFR-binding peptide
SSKSKVVIMRHKRLVKPKRGVYYLVSTASLATPASSPAASA

SEQ ID NO: 1346 - protein, 41 aa, Artificial Sequence
  Non-cyclic GFR-binding peptide
SSKSKVVIMRHKRLIKPTKGIYYLVSTASLDTPASSPSASA

SEQ ID NO: 1347 - protein, 41 aa, Artificial Sequence
  Non-cyclic GFR-binding peptide
SSKSKVVVMRHKRLVKPTRGVYYLVSTASLDTPASSPSASA

SEQ ID NO: 1348 - protein, 42 aa, Artificial Sequence
  Non-cyclic GFR-binding peptide
RSGSGEVVMDRHKRLVVKENEDYYLVSTASLETPVSSAKPIK

SEQ ID NO: 1349 - protein, 42 aa, Artificial Sequence
  Non-cyclic GFR-binding peptide
RSASSEVTMNRHKRLVVNKNEDYYLVSTASMKEPVSSPEPIG

SEQ ID NO: 1350 - protein, 42 aa, Artificial Sequence
  Non-cyclic GFR-binding peptide
RSGSGEVVMERHKRLVVKDYEDYYLVSTASLETPVSSAKPIS

SEQ ID NO: 1351 - protein, 42 aa, Artificial Sequence
  Non-cyclic GFR-binding peptide
HSGSSRVVMNRHKRLIVNSSDDYYLVSTASLKTPASTPKTVH

SEQ ID NO: 1352 - protein, 42 aa, Artificial Sequence
  Non-cyclic GFR-binding peptide
HSGSSRVVMNRHKRLIVNSSDDYYLVSTASLKTPASSPKPVY

SEQ ID NO: 1353 - protein, 42 aa, Artificial Sequence
  Non-cyclic GFR-binding peptide
HSGSARVVMNRHKRLIVNSSDDYYLVSTASLQTPASSPKPVT

SEQ ID NO: 1354 - protein, 43 aa, Artificial Sequence
  Non-cyclic GFR-binding peptide
RSGSEAVSMGERHKRLTPVGMDDYYLVSTASLKTPVSSAKGVK

SEQ ID NO: 1355 - protein, 42 aa, Artificial Sequence
  Non-cyclic GFR-binding peptide
RSGSESVAMGRHKRLYTVVGKDYYLVSTASLKTPVSSAKSAK

SEQ ID NO: 1356 - protein, 42 aa, Artificial Sequence
  Non-cyclic GFR-binding peptide
SSGSRDVVMGRHKRLIIQQKDNYYLVSTASMKTPTSSPGASG

SEQ ID NO: 1357 - protein, 42 aa, Artificial Sequence
  Non-cyclic GFR-binding peptide
RSGSAEVVMDRHKRLVVNNAADYYLVSTASLRAPVSSSAPAA

SEQ ID NO: 1358 - protein, 42 aa, Artificial Sequence
  Non-cyclic GFR-binding peptide
RSGSSEVVMDRHKRLVVNNASDYYLVSTASLRTPVSSTPPTS

SEQ ID NO: 1359 - protein, 42 aa, Artificial Sequence
  Non-cyclic GFR-binding peptide
HSGSSRVVMNRHKRLIVNSSDDYYLVSTASLKTPASSPKPVH

SEQ ID NO: 1360 - protein, 41 aa, Artificial Sequence
  Non-cyclic GFR-binding peptide
LSGSEEVIMRHKRLLLVRGNDYYLVSTASTKVPASSTSPVR

SEQ ID NO: 1361 - protein, 41 aa, Artificial Sequence
  Non-cyclic GFR-binding peptide
SSKSSRVIMRHKRLVKPKRGVYYLVSTASLAQPVSSPAASA

SEQ ID NO: 1362 - protein, 41 aa, Artificial Sequence
  Non-cyclic GFR-binding peptide
SSKSSKVIMRHKRLIKPTKGIYYLVSTASLDQSVSSPSASA

SEQ ID NO: 1363 - protein, 41 aa, Artificial Sequence
  Non-cyclic GFR-binding peptide
SSKSSKVVMRHKRLVKPTRGVYYLVSTASLDQPVSSPSASA

SEQ ID NO: 1364 - protein, 44 aa, Artificial Sequence
  Non-cyclic GFR-binding peptide
RSESKNHQLFRHKRLHQGQHPKIRYYLVSTASEETPVSELGEDN

SEQ ID NO: 1365 - protein, 44 aa, Artificial Sequence
  Non-cyclic GFR-binding peptide
RSESQSHEELRHKRLHQGQHPKIRYYLVSTASQGTPVSELGEDN

SEQ ID NO: 1366 - protein, 45 aa, Artificial Sequence
  Non-cyclic GFR-binding peptide
ASASELHEELRRHKRLLKPKKRVYEYYLVSTASHHVRSPQSKVSS

SEQ ID NO: 1367 - protein, 45 aa, Artificial Sequence
  Non-cyclic GFR-binding peptide
ESKSALHDELTRHKRLFIPKKRVIEYYLVSTASLQVQTPRSQVNR

SEQ ID NO: 1368 - protein, 42 aa, Artificial Sequence
  Non-cyclic GFR-binding peptide
RSGSGEAVMDYHYKLVVKENEDKYLVSIPSLETPVSSAKPIK

SEQ ID NO: 1369 - protein, 42 aa, Artificial Sequence
  Non-cyclic GFR-binding peptide
RSASSEAVMNYHYKLVVNKNEDKYLVSIPSMKTPVSSPEPIG

SEQ ID NO: 1370 - protein, 42 aa, Artificial Sequence
  Non-cyclic GFR-binding peptide
RSGSGEAVMEYHYKLVVKDYEDKYLVSIPSLETPVSSAKPIS

SEQ ID NO: 1371 - protein, 42 aa, Artificial Sequence
  Non-cyclic GFR-binding peptide
HSGSSEAVMNYHYKLIVNSSDDKYLVSIPSLKTPVSTPKTVH

SEQ ID NO: 1372 - protein, 42 aa, Artificial Sequence
  Non-cyclic GFR-binding peptide
HSGSSEAVMNYHYKLIVNSSDDKYLVSIPSLKTPVSSPKPVY

SEQ ID NO: 1373 - protein, 42 aa, Artificial Sequence
  Non-cyclic GFR-binding peptide
HSGSAEAVMNYHYKLIVNSSDDKYLVSIPSLQTPVSSPKPVT

SEQ ID NO: 1374 - protein, 42 aa, Artificial Sequence
  Non-cyclic GFR-binding peptide
HSGSAEAVMNYHYKLIVNNSSDKYLVSIPSLKTPVSSAKPVA

SEQ ID NO: 1375 - protein, 42 aa, Artificial Sequence
  Non-cyclic GFR-binding peptide
RSGSEEAVMGYHYKLYTVVGKDKYLVSIPSLKTPVSSAKSAK

SEQ ID NO: 1376 - protein, 42 aa, Artificial Sequence
  Non-cyclic GFR-binding peptide
SSGSREAVMGYHYKLIIQQKDNKYLVSIPSMKTPVSSPGASG

SEQ ID NO: 1377 - protein, 42 aa, Artificial Sequence
  Non-cyclic GFR-binding peptide
RSGSAEAVMDYHYKLVVNNAADKYLVSIPSLRTPVSSSAPAA

SEQ ID NO: 1378 - protein, 42 aa, Artificial Sequence
  Non-cyclic GFR-binding peptide
RSGSSEAVMDYHYKLVVNNASDKYLVSIPSLRTPVSSTPPTS

SEQ ID NO: 1379 - protein, 42 aa, Artificial Sequence
  Non-cyclic GFR-binding peptide
HSGSSEAVMNYHYKLIVNSSDDKYLVSIPSLKTPVSSPKPVH

SEQ ID NO: 1380 - protein, 41 aa, Artificial Sequence
  Non-cyclic GFR-binding peptide
LSGSEAVIMYHYKLLLVRGNDKYLVSIPSTKTPVSSTSPVR

SEQ ID NO: 1381 - protein, 41 aa, Artificial Sequence
  Non-cyclic GFR-binding peptide
SSKSEAVIMYHYKLVKPKRGVKYLVSIPSLATPVSSPAASA

SEQ ID NO: 1382 - protein, 41 aa, Artificial Sequence
  Non-cyclic GFR-binding peptide
SSKSEAVIMYHYKLIKPTKGIKYLVSIPSLDTPVSSPSASA

SEQ ID NO: 1383 - protein, 41 aa, Artificial Sequence
  Non-cyclic GFR-binding peptide
SSKSEAVVMYHYKLVKPTRGVKYLVSIPSLDTPVSSPSASA

SEQ ID NO: 1384 - protein, 42 aa, Artificial Sequence
  Non-cyclic GFR-binding peptide
RSGSGEVVMDYHYKLVVKENEDKYLVSIPSLETPVSSAKPIK

SEQ ID NO: 1385 - protein, 42 aa, Artificial Sequence
  Non-cyclic GFR-binding peptide
RSASSEVTMNYHYKLVVNKNEDKYLVSIPSMKEPVSSPEPIG

SEQ ID NO: 1386 - protein, 42 aa, Artificial Sequence
  Non-cyclic GFR-binding peptide
RSGSGEVVMEYHYKLVVKDYEDKYLVSIPSLETPVSSAKPIS

SEQ ID NO: 1387 - protein, 42 aa, Artificial Sequence
  Non-cyclic GFR-binding peptide
HSGSSRVVMNYHYKLIVNSSDDKYLVSIPSLKTPASTPKTVH

SEQ ID NO: 1388 - protein, 42 aa, Artificial Sequence
  Non-cyclic GFR-binding peptide
HSGSSRVVMNYHYKLIVNSSDDKYLVSIPSLKTPASSPKPVY

SEQ ID NO: 1389 - protein, 42 aa, Artificial Sequence
  Non-cyclic GFR-binding peptide
HSGSAKVVMNYHYKLIVNNSSDKYLVSIPSLKTPASSAKPVA

SEQ ID NO: 1390 - protein, 42 aa, Artificial Sequence
  Non-cyclic GFR-binding peptide
RSGSESVAMGYHYKLYTVVGKDKYLVSIPSLKTPVSSAKSAK

SEQ ID NO: 1391 - protein, 42 aa, Artificial Sequence
  Non-cyclic GFR-binding peptide
SSGSRDVVMGYHYKLIIQQKDNKYLVSIPSMKTPTSSPGASG

SEQ ID NO: 1392 - protein, 42 aa, Artificial Sequence
  Non-cyclic GFR-binding peptide
RSGSAEVVMDYHYKLVVNNAADKYLVSIPSLRAPVSSSAPAA

SEQ ID NO: 1393 - protein, 42 aa, Artificial Sequence
  Non-cyclic GFR-binding peptide
RSGSSEVVMDYHYKLVVNNASDKYLVSIPSLRTPVSSTPPTS

SEQ ID NO: 1394 - protein, 42 aa, Artificial Sequence
  Non-cyclic GFR-binding peptide
HSGSSRVVMNYHYKLIVNSSDDKYLVSIPSLKTPASSPKPVH

SEQ ID NO: 1395 - protein, 41 aa, Artificial Sequence
  Non-cyclic GFR-binding peptide
LSGSEEVIMYHYKLLLVRGNDKYLVSIPSTKVPASSTSPVR

SEQ ID NO: 1396 - protein, 41 aa, Artificial Sequence
  Non-cyclic GFR-binding peptide
SSKSSRVIMYHYKLVKPKRGVKYLVSIPSLAQPVSSPAASA

SEQ ID NO: 1397 - protein, 41 aa, Artificial Sequence
  Non-cyclic GFR-binding peptide
SSKSSKVIMYHYKLIKPTKGIKYLVSIPSLDQSVSSPSASA

SEQ ID NO: 1398 - protein, 41 aa, Artificial Sequence
  Non-cyclic GFR-binding peptide
SSKSSKVVMYHYKLVKPTRGVKYLVSIPSLDQPVSSPSASA

SEQ ID NO: 1399 - protein, 44 aa, Artificial Sequence
  Non-cyclic GFR-binding peptide
RSESKNHQLFYHYKLHQGQHPKIRKYLVSIPSEETPVSELGEDN

SEQ ID NO: 1400 - protein, 44 aa, Artificial Sequence
  Non-cyclic GFR-binding peptide
RSESQSHEELYHYKLHQGQHPKIRKYLVSIPSQGTPVSELGEDN

SEQ ID NO: 1401 - protein, 45 aa, Artificial Sequence
  Non-cyclic GFR-binding peptide
ASASELHEELRYHYKLLKPKKRVYEKYLVSIPSHHVRSPQSKVSS

SEQ ID NO: 1402 - protein, 45 aa, Artificial Sequence
  Non-cyclic GFR-binding peptide
ESKSALHDELTYHYKLFIPKKRVIEKYLVSIPSLQVQTPRSQVNR

SEQ ID NO: 1403 - protein, 42 aa, Artificial Sequence
  Non-cyclic GFR-binding peptide
RSGSGSVAMDEYKFKVVKENEDLYLISIPELETPVSSAKPIK

SEQ ID NO: 1404 - protein, 42 aa, Artificial Sequence
  Non-cyclic GFR-binding peptide
RSASSSVAMNEYKFKVVNKNEDLYLISIPEMKTPVSSPEPIG

SEQ ID NO: 1405 - protein, 42 aa, Artificial Sequence
  Non-cyclic GFR-binding peptide
RSGSGSVAMEEYKFKVVKDYEDLYLISIPELETPVSSAKPIS

SEQ ID NO: 1406 - protein, 42 aa, Artificial Sequence
  Non-cyclic GFR-binding peptide
HSGSSSVAMNEYKFKIVNSSDDLYLISIPELKTPVSTPKTVH

SEQ ID NO: 1407 - protein, 42 aa, Artificial Sequence
  Non-cyclic GFR-binding peptide
HSGSSSVAMNEYKFKIVNSSDDLYLISIPELKTPVSSPKPVY

SEQ ID NO: 1408 - protein, 42 aa, Artificial Sequence
  Non-cyclic GFR-binding peptide
HSGSASVAMNEYKFKIVNSSDDLYLISIPELQTPVSSPKPVT

SEQ ID NO: 1409 - protein, 42 aa, Artificial Sequence
  Non-cyclic GFR-binding peptide
HSGSASVAMNEYKFKIVNNSSDLYLISIPELKTPVSSAKPVA

SEQ ID NO: 1410 - protein, 43 aa, Artificial Sequence
  Non-cyclic GFR-binding peptide
RSGSSVASMGEEYKFKTPVGMDDLYLISIPELKTPVSSAKGVK

SEQ ID NO: 1411 - protein, 42 aa, Artificial Sequence
  Non-cyclic GFR-binding peptide
SSGSRSVAMGEYKFKIIQQKDNLYLISIPEMKTPVSSPGASG

SEQ ID NO: 1412 - protein, 42 aa, Artificial Sequence
  Non-cyclic GFR-binding peptide
RSGSASVAMDEYKFKVVNNAADLYLISIPELRTPVSSSAPAA

SEQ ID NO: 1413 - protein, 42 aa, Artificial Sequence
  Non-cyclic GFR-binding peptide
RSGSSSVAMDEYKFKVVNNASDLYLISIPELRTPVSSTPPTS

SEQ ID NO: 1414 - protein, 42 aa, Artificial Sequence
  Non-cyclic GFR-binding peptide
HSGSSSVAMNEYKFKIVNSSDDLYLISIPELKTPVSSPKPVH

SEQ ID NO: 1415 - protein, 41 aa, Artificial Sequence
  Non-cyclic GFR-binding peptide
LSGSSVAIMEYKFKLLVRGNDLYLISIPETKTPVSSTSPVR

SEQ ID NO: 1416 - protein, 41 aa, Artificial Sequence
  Non-cyclic GFR-binding peptide
SSKSSVAIMEYKFKVKPKRGVLYLISIPELATPVSSPAASA

SEQ ID NO: 1417 - protein, 41 aa, Artificial Sequence
  Non-cyclic GFR-binding peptide
SSKSSVAIMEYKFKIKPTKGILYLISIPELDTPVSSPSASA

SEQ ID NO: 1418 - protein, 41 aa, Artificial Sequence
  Non-cyclic GFR-binding peptide
SSKSSVAVMEYKFKVKPTRGVLYLISIPELDTPVSSPSASA

SEQ ID NO: 1419 - protein, 42 aa, Artificial Sequence
  Non-cyclic GFR-binding peptide
RSGSGEVVMDEYKFKVVKENEDLYLISIPELETPVSSAKPIK

SEQ ID NO: 1420 - protein, 42 aa, Artificial Sequence
  Non-cyclic GFR-binding peptide
RSASSEVTMNEYKFKVVNKNEDLYLISIPEMKEPVSSPEPIG

SEQ ID NO: 1421 - protein, 42 aa, Artificial Sequence
  Non-cyclic GFR-binding peptide
RSGSGEVVMEEYKFKVVKDYEDLYLISIPELETPVSSAKPIS

SEQ ID NO: 1422 - protein, 42 aa, Artificial Sequence
  Non-cyclic GFR-binding peptide
HSGSSRVVMNEYKFKIVNSSDDLYLISIPELKTPASTPKTVH

SEQ ID NO: 1423 - protein, 42 aa, Artificial Sequence
  Non-cyclic GFR-binding peptide
HSGSSRVVMNEYKFKIVNSSDDLYLISIPELKTPASSPKPVY

SEQ ID NO: 1424 - protein, 42 aa, Artificial Sequence
  Non-cyclic GFR-binding peptide
HSGSARVVMNEYKFKIVNSSDDLYLISIPELQTPASSPKPVT

SEQ ID NO: 1425 - protein, 42 aa, Artificial Sequence
  Non-cyclic GFR-binding peptide
HSGSAKVVMNEYKFKIVNNSSDLYLISIPELKTPASSAKPVA

SEQ ID NO: 1426 - protein, 43 aa, Artificial Sequence
  Non-cyclic GFR-binding peptide
RSGSEAVSMGEEYKFKTPVGMDDLYLISIPELKTPVSSAKGVK

SEQ ID NO: 1427 - protein, 42 aa, Artificial Sequence
  Non-cyclic GFR-binding peptide
SSGSRDVVMGEYKFKIIQQKDNLYLISIPEMKTPTSSPGASG

SEQ ID NO: 1428 - protein, 42 aa, Artificial Sequence
  Non-cyclic GFR-binding peptide
RSGSAEVVMDEYKFKVVNNAADLYLISIPELRAPVSSSAPAA

SEQ ID NO: 1429 - protein, 42 aa, Artificial Sequence
  Non-cyclic GFR-binding peptide
RSGSSEVVMDEYKFKVVNNASDLYLISIPELRTPVSSTPPTS

SEQ ID NO: 1430 - protein, 42 aa, Artificial Sequence
  Non-cyclic GFR-binding peptide
HSGSSRVVMNEYKFKIVNSSDDLYLISIPELKTPASSPKPVH

SEQ ID NO: 1431 - protein, 41 aa, Artificial Sequence
  Non-cyclic GFR-binding peptide
LSGSEEVIMEYKFKLLVRGNDLYLISIPETKVPASSTSPVR

SEQ ID NO: 1432 - protein, 41 aa, Artificial Sequence
  Non-cyclic GFR-binding peptide
SSKSSRVIMEYKFKVKPKRGVLYLISIPELAQPVSSPAASA

SEQ ID NO: 1433 - protein, 41 aa, Artificial Sequence
  Non-cyclic GFR-binding peptide
SSKSSKVIMEYKFKIKPTKGILYLISIPELDQSVSSPSASA

SEQ ID NO: 1434 - protein, 41 aa, Artificial Sequence
  Non-cyclic GFR-binding peptide
SSKSSKVVMEYKFKVKPTRGVLYLISIPELDQPVSSPSASA

SEQ ID NO: 1435 - protein, 44 aa, Artificial Sequence
  Non-cyclic GFR-binding peptide
RSESKNHQLFEYKFKHQGQHPKIRLYLISIPEEETPVSELGEDN

SEQ ID NO: 1436 - protein, 44 aa, Artificial Sequence
  Non-cyclic GFR-binding peptide
RSESQSHEELEYKFKHQGQHPKIRLYLISIPEQGTPVSELGEDN

SEQ ID NO: 1437 - protein, 45 aa, Artificial Sequence
  Non-cyclic GFR-binding peptide
ASASELHEELREYKFKLKPKKRVYELYLISIPEHHVRSPQSKVSS

SEQ ID NO: 1438 - protein, 45 aa, Artificial Sequence
  Non-cyclic GFR-binding peptide
ESKSALHDELTEYKFKFIPKKRVIELYLISIPELQVQTPRSQVNR

SEQ ID NO: 1439 - protein, 42 aa, Artificial Sequence
  Non-cyclic GFR-binding peptide
RSGSGDVVMDPIKGYVVKENEDFYLMNIPSLETPTSSAKPIK

SEQ ID NO: 1440 - protein, 42 aa, Artificial Sequence
  Non-cyclic GFR-binding peptide
RSASSDVVMNPIKGYVVNKNEDFYLMNIPSMKTPTSSPEPIG

SEQ ID NO: 1441 - protein, 42 aa, Artificial Sequence
  Non-cyclic GFR-binding peptide
RSGSGDVVMEPIKGYVVKDYEDFYLMNIPSLETPTSSAKPIS

SEQ ID NO: 1442 - protein, 42 aa, Artificial Sequence
  Non-cyclic GFR-binding peptide
HSGSSDVVMNPIKGYIVNSSDDFYLMNIPSLKTPTSTPKTVH

SEQ ID NO: 1443 - protein, 42 aa, Artificial Sequence
  Non-cyclic GFR-binding peptide
HSGSSDVVMNPIKGYIVNSSDDFYLMNIPSLKTPTSSPKPVY

SEQ ID NO: 1444 - protein, 42 aa, Artificial Sequence
  Non-cyclic GFR-binding peptide
HSGSADVVMNPIKGYIVNSSDDFYLMNIPSLQTPTSSPKPVT

SEQ ID NO: 1445 - protein, 42 aa, Artificial Sequence
  Non-cyclic GFR-binding peptide
HSGSADVVMNPIKGYIVNNSSDFYLMNIPSLKTPTSSAKPVA

SEQ ID NO: 1446 - protein, 43 aa, Artificial Sequence
  Non-cyclic GFR-binding peptide
RSGSDVVSMGEPIKGYTPVGMDDFYLMNIPSLKTPTSSAKGVK

SEQ ID NO: 1447 - protein, 42 aa, Artificial Sequence
  Non-cyclic GFR-binding peptide
RSGSEDVVMGPIKGYYTVVGKDFYLMNIPSLKTPTSSAKSAK

SEQ ID NO: 1448 - protein, 42 aa, Artificial Sequence
  Non-cyclic GFR-binding peptide
RSGSADVVMDPIKGYVVNNAADFYLMNIPSLRTPTSSSAPAA

SEQ ID NO: 1449 - protein, 42 aa, Artificial Sequence
  Non-cyclic GFR-binding peptide
RSGSSDVVMDPIKGYVVNNASDFYLMNIPSLRTPTSSTPPTS

SEQ ID NO: 1450 - protein, 42 aa, Artificial Sequence
  Non-cyclic GFR-binding peptide
HSGSSDVVMNPIKGYIVNSSDDFYLMNIPSLKTPTSSPKPVH

SEQ ID NO: 1451 - protein, 41 aa, Artificial Sequence
  Non-cyclic GFR-binding peptide
LSGSDVVIMPIKGYLLVRGNDFYLMNIPSTKTPTSSTSPVR

SEQ ID NO: 1452 - protein, 41 aa, Artificial Sequence
  Non-cyclic GFR-binding peptide
SSKSDVVIMPIKGYVKPKRGVFYLMNIPSLATPTSSPAASA

SEQ ID NO: 1453 - protein, 41 aa, Artificial Sequence
  Non-cyclic GFR-binding peptide
SSKSDVVIMPIKGYIKPTKGIFYLMNIPSLDTPTSSPSASA

SEQ ID NO: 1454 - protein, 41 aa, Artificial Sequence
  Non-cyclic GFR-binding peptide
SSKSDVVVMPIKGYVKPTRGVFYLMNIPSLDTPTSSPSASA

SEQ ID NO: 1455 - protein, 42 aa, Artificial Sequence
  Non-cyclic GFR-binding peptide
RSGSGEVVMDPIKGYVVKENEDFYLMNIPSLETPVSSAKPIK

SEQ ID NO: 1456 - protein, 42 aa, Artificial Sequence
  Non-cyclic GFR-binding peptide
RSASSEVTMNPIKGYVVNKNEDFYLMNIPSMKEPVSSPEPIG

SEQ ID NO: 1457 - protein, 42 aa, Artificial Sequence
  Non-cyclic GFR-binding peptide
RSGSGEVVMEPIKGYVVKDYEDFYLMNIPSLETPVSSAKPIS

SEQ ID NO: 1458 - protein, 42 aa, Artificial Sequence
  Non-cyclic GFR-binding peptide
HSGSSRVVMNPIKGYIVNSSDDFYLMNIPSLKTPASTPKTVH

SEQ ID NO: 1459 - protein, 42 aa, Artificial Sequence
  Non-cyclic GFR-binding peptide
HSGSSRVVMNPIKGYIVNSSDDFYLMNIPSLKTPASSPKPVY

SEQ ID NO: 1460 - protein, 42 aa, Artificial Sequence
  Non-cyclic GFR-binding peptide
HSGSARVVMNPIKGYIVNSSDDFYLMNIPSLQTPASSPKPVT

SEQ ID NO: 1461 - protein, 42 aa, Artificial Sequence
  Non-cyclic GFR-binding peptide
HSGSAKVVMNPIKGYIVNNSSDFYLMNIPSLKTPASSAKPVA

SEQ ID NO: 1462 - protein, 43 aa, Artificial Sequence
  Non-cyclic GFR-binding peptide
RSGSEAVSMGEPIKGYTPVGMDDFYLMNIPSLKTPVSSAKGVK

SEQ ID NO: 1463 - protein, 42 aa, Artificial Sequence
  Non-cyclic GFR-binding peptide
RSGSESVAMGPIKGYYTVVGKDFYLMNIPSLKTPVSSAKSAK

SEQ ID NO: 1464 - protein, 42 aa, Artificial Sequence
  Non-cyclic GFR-binding peptide
RSGSAEVVMDPIKGYVVNNAADFYLMNIPSLRAPVSSSAPAA

SEQ ID NO: 1465 - protein, 42 aa, Artificial Sequence
  Non-cyclic GFR-binding peptide
RSGSSEVVMDPIKGYVVNNASDFYLMNIPSLRTPVSSTPPTS

SEQ ID NO: 1466 - protein, 42 aa, Artificial Sequence
  Non-cyclic GFR-binding peptide
HSGSSRVVMNPIKGYIVNSSDDFYLMNIPSLKTPASSPKPVH

SEQ ID NO: 1467 - protein, 41 aa, Artificial Sequence
  Non-cyclic GFR-binding peptide
LSGSEEVIMPIKGYLLVRGNDFYLMNIPSTKVPASSTSPVR

SEQ ID NO: 1468 - protein, 41 aa, Artificial Sequence
  Non-cyclic GFR-binding peptide
SSKSSRVIMPIKGYVKPKRGVFYLMNIPSLAQPVSSPAASA

SEQ ID NO: 1469 - protein, 41 aa, Artificial Sequence
  Non-cyclic GFR-binding peptide
SSKSSKVIMPIKGYIKPTKGIFYLMNIPSLDQSVSSPSASA

SEQ ID NO: 1470 - protein, 41 aa, Artificial Sequence
  Non-cyclic GFR-binding peptide
SSKSSKVVMPIKGYVKPTRGVFYLMNIPSLDQPVSSPSASA

SEQ ID NO: 1471 - protein, 44 aa, Artificial Sequence
  Non-cyclic GFR-binding peptide
RSESKNHQLFPIKGYHQGQHPKIRFYLMNIPSEETPVSELGEDN

SEQ ID NO: 1472 - protein, 44 aa, Artificial Sequence
  Non-cyclic GFR-binding peptide
RSESQSHEELPIKGYHQGQHPKIRFYLMNIPSQGTPVSELGEDN

SEQ ID NO: 1473 - protein, 45 aa, Artificial Sequence
  Non-cyclic GFR-binding peptide
ASASELHEELRPIKGYLKPKKRVYEFYLMNIPSHHVRSPQSKVSS

SEQ ID NO: 1474 - protein, 45 aa, Artificial Sequence
  Non-cyclic GFR-binding peptide
ESKSALHDELTPIKGYFIPKKRVIEFYLMNIPSLQVQTPRSQVNR

SEQ ID NO: 1475 - protein, 42 aa, Artificial Sequence
  Non-cyclic GFR-binding peptide
RSGSGEVVMDEYQKYVVKENEDIYLISIPSLEAPVSSAKPIK

SEQ ID NO: 1476 - protein, 42 aa, Artificial Sequence
  Non-cyclic GFR-binding peptide
RSASSEVVMNEYQKYVVNKNEDIYLISIPSMKAPVSSPEPIG

SEQ ID NO: 1477 - protein, 42 aa, Artificial Sequence
  Non-cyclic GFR-binding peptide
RSGSGEVVMEEYQKYVVKDYEDIYLISIPSLEAPVSSAKPIS

SEQ ID NO: 1478 - protein, 42 aa, Artificial Sequence
  Non-cyclic GFR-binding peptide
HSGSSEVVMNEYQKYIVNSSDDIYLISIPSLKAPVSTPKTVH

SEQ ID NO: 1479 - protein, 42 aa, Artificial Sequence
  Non-cyclic GFR-binding peptide
HSGSSEVVMNEYQKYIVNSSDDIYLISIPSLKAPVSSPKPVY

SEQ ID NO: 1480 - protein, 42 aa, Artificial Sequence
  Non-cyclic GFR-binding peptide
HSGSAEVVMNEYQKYIVNSSDDIYLISIPSLQAPVSSPKPVT

SEQ ID NO: 1481 - protein, 42 aa, Artificial Sequence
  Non-cyclic GFR-binding peptide
HSGSAEVVMNEYQKYIVNNSSDIYLISIPSLKAPVSSAKPVA

SEQ ID NO: 1482 - protein, 43 aa, Artificial Sequence
  Non-cyclic GFR-binding peptide
RSGSEVVSMGEEYQKYTPVGMDDIYLISIPSLKAPVSSAKGVK

SEQ ID NO: 1483 - protein, 42 aa, Artificial Sequence
  Non-cyclic GFR-binding peptide
RSGSEEVVMGEYQKYYTVVGKDIYLISIPSLKAPVSSAKSAK

SEQ ID NO: 1484 - protein, 42 aa, Artificial Sequence
  Non-cyclic GFR-binding peptide
SSGSREVVMGEYQKYIIQQKDNIYLISIPSMKAPVSSPGASG

SEQ ID NO: 1485 - protein, 42 aa, Artificial Sequence
  Non-cyclic GFR-binding peptide
RSGSSEVVMDEYQKYVVNNASDIYLISIPSLRAPVSSTPPTS

SEQ ID NO: 1486 - protein, 42 aa, Artificial Sequence
  Non-cyclic GFR-binding peptide
HSGSSEVVMNEYQKYIVNSSDDIYLISIPSLKAPVSSPKPVH

SEQ ID NO: 1487 - protein, 41 aa, Artificial Sequence
  Non-cyclic GFR-binding peptide
LSGSEVVIMEYQKYLLVRGNDIYLISIPSTKAPVSSTSPVR

SEQ ID NO: 1488 - protein, 41 aa, Artificial Sequence
  Non-cyclic GFR-binding peptide
SSKSEVVIMEYQKYVKPKRGVIYLISIPSLAAPVSSPAASA

SEQ ID NO: 1489 - protein, 41 aa, Artificial Sequence
  Non-cyclic GFR-binding peptide
SSKSEVVIMEYQKYIKPTKGIIYLISIPSLDAPVSSPSASA

SEQ ID NO: 1490 - protein, 41 aa, Artificial Sequence
  Non-cyclic GFR-binding peptide
SSKSEVVVMEYQKYVKPTRGVIYLISIPSLDAPVSSPSASA

SEQ ID NO: 1491 - protein, 42 aa, Artificial Sequence
  Non-cyclic GFR-binding peptide
RSGSGEVVMDEYQKYVVKENEDIYLISIPSLETPVSSAKPIK

SEQ ID NO: 1492 - protein, 42 aa, Artificial Sequence
  Non-cyclic GFR-binding peptide
RSASSEVTMNEYQKYVVNKNEDIYLISIPSMKEPVSSPEPIG

SEQ ID NO: 1493 - protein, 42 aa, Artificial Sequence
  Non-cyclic GFR-binding peptide
RSGSGEVVMEEYQKYVVKDYEDIYLISIPSLETPVSSAKPIS

SEQ ID NO: 1494 - protein, 42 aa, Artificial Sequence
  Non-cyclic GFR-binding peptide
HSGSSRVVMNEYQKYIVNSSDDIYLISIPSLKTPASTPKTVH

SEQ ID NO: 1495 - protein, 42 aa, Artificial Sequence
  Non-cyclic GFR-binding peptide
HSGSSRVVMNEYQKYIVNSSDDIYLISIPSLKTPASSPKPVY

SEQ ID NO: 1496 - protein, 42 aa, Artificial Sequence
  Non-cyclic GFR-binding peptide
HSGSARVVMNEYQKYIVNSSDDIYLISIPSLQTPASSPKPVT

SEQ ID NO: 1497 - protein, 42 aa, Artificial Sequence
  Non-cyclic GFR-binding peptide
HSGSAKVVMNEYQKYIVNNSSDIYLISIPSLKTPASSAKPVA

SEQ ID NO: 1498 - protein, 43 aa, Artificial Sequence
  Non-cyclic GFR-binding peptide
RSGSEAVSMGEEYQKYTPVGMDDIYLISIPSLKTPVSSAKGVK

SEQ ID NO: 1499 - protein, 42 aa, Artificial Sequence
  Non-cyclic GFR-binding peptide
RSGSESVAMGEYQKYYTVVGKDIYLISIPSLKTPVSSAKSAK

SEQ ID NO: 1500 - protein, 42 aa, Artificial Sequence
  Non-cyclic GFR-binding peptide
SSGSRDVVMGEYQKYIIQQKDNIYLISIPSMKTPTSSPGASG

SEQ ID NO: 1501 - protein, 42 aa, Artificial Sequence
  Non-cyclic GFR-binding peptide
RSGSSEVVMDEYQKYVVNNASDIYLISIPSLRTPVSSTPPTS

SEQ ID NO: 1502 - protein, 42 aa, Artificial Sequence
  Non-cyclic GFR-binding peptide
HSGSSRVVMNEYQKYIVNSSDDIYLISIPSLKTPASSPKPVH

SEQ ID NO: 1503 - protein, 41 aa, Artificial Sequence
  Non-cyclic GFR-binding peptide
LSGSEEVIMEYQKYLLVRGNDIYLISIPSTKVPASSTSPVR

SEQ ID NO: 1504 - protein, 41 aa, Artificial Sequence
  Non-cyclic GFR-binding peptide
SSKSSRVIMEYQKYVKPKRGVIYLISIPSLAQPVSSPAASA

SEQ ID NO: 1505 - protein, 41 aa, Artificial Sequence
  Non-cyclic GFR-binding peptide
SSKSSKVIMEYQKYIKPTKGIIYLISIPSLDQSVSSPSASA

SEQ ID NO: 1506 - protein, 41 aa, Artificial Sequence
  Non-cyclic GFR-binding peptide
SSKSSKVVMEYQKYVKPTRGVIYLISIPSLDQPVSSPSASA

SEQ ID NO: 1507 - protein, 44 aa, Artificial Sequence
  Non-cyclic GFR-binding peptide
RSESKNHQLFEYQKYHQGQHPKIRIYLISIPSEETPVSELGEDN

SEQ ID NO: 1508 - protein, 44 aa, Artificial Sequence
  Non-cyclic GFR-binding peptide
RSESQSHEELEYQKYHQGQHPKIRIYLISIPSQGTPVSELGEDN

SEQ ID NO: 1509 - protein, 45 aa, Artificial Sequence
  Non-cyclic GFR-binding peptide
ASASELHEELREYQKYLKPKKRVYEIYLISIPSHHVRSPQSKVSS

SEQ ID NO: 1510 - protein, 45 aa, Artificial Sequence
  Non-cyclic GFR-binding peptide
ESKSALHDELTEYQKYFIPKKRVIEIYLISIPSLQVQTPRSQVNR

SEQ ID NO: 1511 - protein, 42 aa, Artificial Sequence
  Non-cyclic GFR-binding peptide
RSGSGEVVMDEYQKYVVKENEDIFLISIPSLETPVSSAKPIK

SEQ ID NO: 1512 - protein, 42 aa, Artificial Sequence
  Non-cyclic GFR-binding peptide
RSASSEVVMNEYQKYVVNKNEDIFLISIPSMKTPVSSPEPIG

SEQ ID NO: 1513 - protein, 42 aa, Artificial Sequence
  Non-cyclic GFR-binding peptide
RSGSGEVVMEEYQKYVVKDYEDIFLISIPSLETPVSSAKPIS

SEQ ID NO: 1514 - protein, 42 aa, Artificial Sequence
  Non-cyclic GFR-binding peptide
HSGSSEVVMNEYQKYIVNSSDDIFLISIPSLKTPVSTPKTVH

SEQ ID NO: 1515 - protein, 42 aa, Artificial Sequence
  Non-cyclic GFR-binding peptide
HSGSSEVVMNEYQKYIVNSSDDIFLISIPSLKTPVSSPKPVY

SEQ ID NO: 1516 - protein, 42 aa, Artificial Sequence
  Non-cyclic GFR-binding peptide
HSGSAEVVMNEYQKYIVNSSDDIFLISIPSLQTPVSSPKPVT

SEQ ID NO: 1517 - protein, 42 aa, Artificial Sequence
  Non-cyclic GFR-binding peptide
HSGSAEVVMNEYQKYIVNNSSDIFLISIPSLKTPVSSAKPVA

SEQ ID NO: 1518 - protein, 43 aa, Artificial Sequence
  Non-cyclic GFR-binding peptide
RSGSEVVSMGEEYQKYTPVGMDDIFLISIPSLKTPVSSAKGVK

SEQ ID NO: 1519 - protein, 42 aa, Artificial Sequence
  Non-cyclic GFR-binding peptide
RSGSEEVVMGEYQKYYTVVGKDIFLISIPSLKTPVSSAKSAK

SEQ ID NO: 1520 - protein, 42 aa, Artificial Sequence
  Non-cyclic GFR-binding peptide
SSGSREVVMGEYQKYIIQQKDNIFLISIPSMKTPVSSPGASG

SEQ ID NO: 1521 - protein, 42 aa, Artificial Sequence
  Non-cyclic GFR-binding peptide
RSGSAEVVMDEYQKYVVNNAADIFLISIPSLRTPVSSSAPAA

SEQ ID NO: 1522 - protein, 42 aa, Artificial Sequence
  Non-cyclic GFR-binding peptide
HSGSSEVVMNEYQKYIVNSSDDIFLISIPSLKTPVSSPKPVH

SEQ ID NO: 1523 - protein, 41 aa, Artificial Sequence
  Non-cyclic GFR-binding peptide
LSGSEVVIMEYQKYLLVRGNDIFLISIPSTKTPVSSTSPVR

SEQ ID NO: 1524 - protein, 41 aa, Artificial Sequence
  Non-cyclic GFR-binding peptide
SSKSEVVIMEYQKYVKPKRGVIFLISIPSLATPVSSPAASA

SEQ ID NO: 1525 - protein, 41 aa, Artificial Sequence
  Non-cyclic GFR-binding peptide
SSKSEVVIMEYQKYIKPTKGIIFLISIPSLDTPVSSPSASA

SEQ ID NO: 1526 - protein, 41 aa, Artificial Sequence
  Non-cyclic GFR-binding peptide
SSKSEVVVMEYQKYVKPTRGVIFLISIPSLDTPVSSPSASA

SEQ ID NO: 1527 - protein, 42 aa, Artificial Sequence
  Non-cyclic GFR-binding peptide
RSASSEVTMNEYQKYVVNKNEDIFLISIPSMKEPVSSPEPIG

SEQ ID NO: 1528 - protein, 42 aa, Artificial Sequence
  Non-cyclic GFR-binding peptide
HSGSSRVVMNEYQKYIVNSSDDIFLISIPSLKTPASTPKTVH

SEQ ID NO: 1529 - protein, 42 aa, Artificial Sequence
  Non-cyclic GFR-binding peptide
HSGSSRVVMNEYQKYIVNSSDDIFLISIPSLKTPASSPKPVY

SEQ ID NO: 1530 - protein, 42 aa, Artificial Sequence
  Non-cyclic GFR-binding peptide
HSGSARVVMNEYQKYIVNSSDDIFLISIPSLQTPASSPKPVT

SEQ ID NO: 1531 - protein, 42 aa, Artificial Sequence
  Non-cyclic GFR-binding peptide
HSGSAKVVMNEYQKYIVNNSSDIFLISIPSLKTPASSAKPVA

SEQ ID NO: 1532 - protein, 43 aa, Artificial Sequence
  Non-cyclic GFR-binding peptide
RSGSEAVSMGEEYQKYTPVGMDDIFLISIPSLKTPVSSAKGVK

SEQ ID NO: 1533 - protein, 42 aa, Artificial Sequence
  Non-cyclic GFR-binding peptide
RSGSESVAMGEYQKYYTVVGKDIFLISIPSLKTPVSSAKSAK

SEQ ID NO: 1534 - protein, 42 aa, Artificial Sequence
  Non-cyclic GFR-binding peptide
SSGSRDVVMGEYQKYIIQQKDNIFLISIPSMKTPTSSPGASG

SEQ ID NO: 1535 - protein, 42 aa, Artificial Sequence
  Non-cyclic GFR-binding peptide
RSGSAEVVMDEYQKYVVNNAADIFLISIPSLRAPVSSSAPAA

SEQ ID NO: 1536 - protein, 42 aa, Artificial Sequence
  Non-cyclic GFR-binding peptide
HSGSSRVVMNEYQKYIVNSSDDIFLISIPSLKTPASSPKPVH

SEQ ID NO: 1537 - protein, 41 aa, Artificial Sequence
  Non-cyclic GFR-binding peptide
LSGSEEVIMEYQKYLLVRGNDIFLISIPSTKVPASSTSPVR

SEQ ID NO: 1538 - protein, 41 aa, Artificial Sequence
  Non-cyclic GFR-binding peptide
SSKSSRVIMEYQKYVKPKRGVIFLISIPSLAQPVSSPAASA

SEQ ID NO: 1539 - protein, 41 aa, Artificial Sequence
  Non-cyclic GFR-binding peptide
SSKSSKVIMEYQKYIKPTKGIIFLISIPSLDQSVSSPSASA

SEQ ID NO: 1540 - protein, 41 aa, Artificial Sequence
  Non-cyclic GFR-binding peptide
SSKSSKVVMEYQKYVKPTRGVIFLISIPSLDQPVSSPSASA

SEQ ID NO: 1541 - protein, 44 aa, Artificial Sequence
  Non-cyclic GFR-binding peptide
RSESKNHQLFEYQKYHQGQHPKIRIFLISIPSEETPVSELGEDN

SEQ ID NO: 1542 - protein, 44 aa, Artificial Sequence
  Non-cyclic GFR-binding peptide
RSESQSHEELEYQKYHQGQHPKIRIFLISIPSQGTPVSELGEDN

SEQ ID NO: 1543 - protein, 45 aa, Artificial Sequence
  Non-cyclic GFR-binding peptide
ASASELHEELREYQKYLKPKKRVYEIFLISIPSHHVRSPQSKVSS

SEQ ID NO: 1544 - protein, 45 aa, Artificial Sequence
  Non-cyclic GFR-binding peptide
ESKSALHDELTEYQKYFIPKKRVIEIFLISIPSLQVQTPRSQVNR

SEQ ID NO: 1545 - protein, 42 aa, Artificial Sequence
  Non-cyclic GFR-binding peptide
RSGSGEEVMDDKHHDVVKENEDVYLMSLPKLEVPASSAKPIK

SEQ ID NO: 1546 - protein, 42 aa, Artificial Sequence
  Non-cyclic GFR-binding peptide
RSASSEEVMNDKHHDVVNKNEDVYLMSLPKMKVPASSPEPIG

SEQ ID NO: 1547 - protein, 42 aa, Artificial Sequence
  Non-cyclic GFR-binding peptide
RSGSGEEVMEDKHHDVVKDYEDVYLMSLPKLEVPASSAKPIS

SEQ ID NO: 1548 - protein, 42 aa, Artificial Sequence
  Non-cyclic GFR-binding peptide
HSGSSEEVMNDKHHDIVNSSDDVYLMSLPKLKVPASTPKTVH

SEQ ID NO: 1549 - protein, 42 aa, Artificial Sequence
  Non-cyclic GFR-binding peptide
HSGSSEEVMNDKHHDIVNSSDDVYLMSLPKLKVPASSPKPVY

SEQ ID NO: 1550 - protein, 42 aa, Artificial Sequence
  Non-cyclic GFR-binding peptide
HSGSAEEVMNDKHHDIVNSSDDVYLMSLPKLQVPASSPKPVT

SEQ ID NO: 1551 - protein, 42 aa, Artificial Sequence
  Non-cyclic GFR-binding peptide
HSGSAEEVMNDKHHDIVNNSSDVYLMSLPKLKVPASSAKPVA

SEQ ID NO: 1552 - protein, 43 aa, Artificial Sequence
  Non-cyclic GFR-binding peptide
RSGSEEVSMGEDKHHDTPVGMDDVYLMSLPKLKVPASSAKGVK

SEQ ID NO: 1553 - protein, 42 aa, Artificial Sequence
  Non-cyclic GFR-binding peptide
RSGSEEEVMGDKHHDYTVVGKDVYLMSLPKLKVPASSAKSAK

SEQ ID NO: 1554 - protein, 42 aa, Artificial Sequence
  Non-cyclic GFR-binding peptide
SSGSREEVMGDKHHDIIQQKDNVYLMSLPKMKVPASSPGASG

SEQ ID NO: 1555 - protein, 42 aa, Artificial Sequence
  Non-cyclic GFR-binding peptide
RSGSAEEVMDDKHHDVVNNAADVYLMSLPKLRVPASSSAPAA

SEQ ID NO: 1556 - protein, 42 aa, Artificial Sequence
  Non-cyclic GFR-binding peptide
RSGSSEEVMDDKHHDVVNNASDVYLMSLPKLRVPASSTPPTS

SEQ ID NO: 1557 - protein, 42 aa, Artificial Sequence
  Non-cyclic GFR-binding peptide
HSGSSEEVMNDKHHDIVNSSDDVYLMSLPKLKVPASSPKPVH

SEQ ID NO: 1558 - protein, 41 aa, Artificial Sequence
  Non-cyclic GFR-binding peptide
SSKSEEVIMDKHHDVKPKRGVVYLMSLPKLAVPASSPAASA

SEQ ID NO: 1559 - protein, 41 aa, Artificial Sequence
  Non-cyclic GFR-binding peptide
SSKSEEVIMDKHHDIKPTKGIVYLMSLPKLDVPASSPSASA

SEQ ID NO: 1560 - protein, 41 aa, Artificial Sequence
  Non-cyclic GFR-binding peptide
SSKSEEVVMDKHHDVKPTRGVVYLMSLPKLDVPASSPSASA

SEQ ID NO: 1561 - protein, 42 aa, Artificial Sequence
  Non-cyclic GFR-binding peptide
RSGSGEVVMDDKHHDVVKENEDVYLMSLPKLETPVSSAKPIK

SEQ ID NO: 1562 - protein, 42 aa, Artificial Sequence
  Non-cyclic GFR-binding peptide
RSASSEVTMNDKHHDVVNKNEDVYLMSLPKMKEPVSSPEPIG

SEQ ID NO: 1563 - protein, 42 aa, Artificial Sequence
  Non-cyclic GFR-binding peptide
RSGSGEVVMEDKHHDVVKDYEDVYLMSLPKLETPVSSAKPIS

SEQ ID NO: 1564 - protein, 42 aa, Artificial Sequence
  Non-cyclic GFR-binding peptide
HSGSSRVVMNDKHHDIVNSSDDVYLMSLPKLKTPASTPKTVH

SEQ ID NO: 1565 - protein, 42 aa, Artificial Sequence
  Non-cyclic GFR-binding peptide
HSGSSRVVMNDKHHDIVNSSDDVYLMSLPKLKTPASSPKPVY

SEQ ID NO: 1566 - protein, 42 aa, Artificial Sequence
  Non-cyclic GFR-binding peptide
HSGSARVVMNDKHHDIVNSSDDVYLMSLPKLQTPASSPKPVT

SEQ ID NO: 1567 - protein, 42 aa, Artificial Sequence
  Non-cyclic GFR-binding peptide
HSGSAKVVMNDKHHDIVNNSSDVYLMSLPKLKTPASSAKPVA

SEQ ID NO: 1568 - protein, 43 aa, Artificial Sequence
  Non-cyclic GFR-binding peptide
RSGSEAVSMGEDKHHDTPVGMDDVYLMSLPKLKTPVSSAKGVK

SEQ ID NO: 1569 - protein, 42 aa, Artificial Sequence
  Non-cyclic GFR-binding peptide
RSGSESVAMGDKHHDYTVVGKDVYLMSLPKLKTPVSSAKSAK

SEQ ID NO: 1570 - protein, 42 aa, Artificial Sequence
  Non-cyclic GFR-binding peptide
SSGSRDVVMGDKHHDIIQQKDNVYLMSLPKMKTPTSSPGASG

SEQ ID NO: 1571 - protein, 42 aa, Artificial Sequence
  Non-cyclic GFR-binding peptide
RSGSAEVVMDDKHHDVVNNAADVYLMSLPKLRAPVSSSAPAA

SEQ ID NO: 1572 - protein, 42 aa, Artificial Sequence
  Non-cyclic GFR-binding peptide
RSGSSEVVMDDKHHDVVNNASDVYLMSLPKLRTPVSSTPPTS

SEQ ID NO: 1573 - protein, 42 aa, Artificial Sequence
  Non-cyclic GFR-binding peptide
HSGSSRVVMNDKHHDIVNSSDDVYLMSLPKLKTPASSPKPVH

SEQ ID NO: 1574 - protein, 41 aa, Artificial Sequence
  Non-cyclic GFR-binding peptide
SSKSSRVIMDKHHDVKPKRGVVYLMSLPKLAQPVSSPAASA

SEQ ID NO: 1575 - protein, 41 aa, Artificial Sequence
  Non-cyclic GFR-binding peptide
SSKSSKVIMDKHHDIKPTKGIVYLMSLPKLDQSVSSPSASA

SEQ ID NO: 1576 - protein, 41 aa, Artificial Sequence
  Non-cyclic GFR-binding peptide
SSKSSKVVMDKHHDVKPTRGVVYLMSLPKLDQPVSSPSASA

SEQ ID NO: 1577 - protein, 44 aa, Artificial Sequence
  Non-cyclic GFR-binding peptide
RSESKNHQLFDKHHDHQGQHPKIRVYLMSLPKEETPVSELGEDN

SEQ ID NO: 1578 - protein, 44 aa, Artificial Sequence
  Non-cyclic GFR-binding peptide
RSESQSHEELDKHHDHQGQHPKIRVYLMSLPKQGTPVSELGEDN

SEQ ID NO: 1579 - protein, 45 aa, Artificial Sequence
  Non-cyclic GFR-binding peptide
ASASELHEELRDKHHDLKPKKRVYEVYLMSLPKHHVRSPQSKVSS

SEQ ID NO: 1580 - protein, 45 aa, Artificial Sequence
  Non-cyclic GFR-binding peptide
ESKSALHDELTDKHHDFIPKKRVIEVYLMSLPKLQVQTPRSQVNR

SEQ ID NO: 1581 - protein, 42 aa, Artificial Sequence
  Non-cyclic GFR-binding peptide
RSGSGSRVMDNSLQEVVKENEDYYVIPLPELEQPVSSAKPIK

SEQ ID NO: 1582 - protein, 42 aa, Artificial Sequence
  Non-cyclic GFR-binding peptide
RSASSSRVMNNSLQEVVNKNEDYYVIPLPEMKQPVSSPEPIG

SEQ ID NO: 1583 - protein, 42 aa, Artificial Sequence
  Non-cyclic GFR-binding peptide
RSGSGSRVMENSLQEVVKDYEDYYVIPLPELEQPVSSAKPIS

SEQ ID NO: 1584 - protein, 42 aa, Artificial Sequence
  Non-cyclic GFR-binding peptide
HSGSSSRVMNNSLQEIVNSSDDYYVIPLPELKQPVSTPKTVH

SEQ ID NO: 1585 - protein, 42 aa, Artificial Sequence
  Non-cyclic GFR-binding peptide
HSGSSSRVMNNSLQEIVNSSDDYYVIPLPELKQPVSSPKPVY

SEQ ID NO: 1586 - protein, 42 aa, Artificial Sequence
  Non-cyclic GFR-binding peptide
HSGSASRVMNNSLQEIVNSSDDYYVIPLPELQQPVSSPKPVT

SEQ ID NO: 1587 - protein, 42 aa, Artificial Sequence
  Non-cyclic GFR-binding peptide
HSGSASRVMNNSLQEIVNNSSDYYVIPLPELKQPVSSAKPVA

SEQ ID NO: 1588 - protein, 43 aa, Artificial Sequence
  Non-cyclic GFR-binding peptide
RSGSSRVSMGENSLQETPVGMDDYYVIPLPELKQPVSSAKGVK

SEQ ID NO: 1589 - protein, 42 aa, Artificial Sequence
  Non-cyclic GFR-binding peptide
RSGSESRVMGNSLQEYTVVGKDYYVIPLPELKQPVSSAKSAK

SEQ ID NO: 1590 - protein, 42 aa, Artificial Sequence
  Non-cyclic GFR-binding peptide
SSGSRSRVMGNSLQEIIQQKDNYYVIPLPEMKQPVSSPGASG

SEQ ID NO: 1591 - protein, 42 aa, Artificial Sequence
  Non-cyclic GFR-binding peptide
RSGSASRVMDNSLQEVVNNAADYYVIPLPELRQPVSSSAPAA

SEQ ID NO: 1592 - protein, 42 aa, Artificial Sequence
  Non-cyclic GFR-binding peptide
RSGSSSRVMDNSLQEVVNNASDYYVIPLPELRQPVSSTPPTS

SEQ ID NO: 1593 - protein, 42 aa, Artificial Sequence
  Non-cyclic GFR-binding peptide
HSGSSSRVMNNSLQEIVNSSDDYYVIPLPELKQPVSSPKPVH

SEQ ID NO: 1594 - protein, 41 aa, Artificial Sequence
  Non-cyclic GFR-binding peptide
LSGSSRVIMNSLQELLVRGNDYYVIPLPETKQPVSSTSPVR

SEQ ID NO: 1595 - protein, 41 aa, Artificial Sequence
  Non-cyclic GFR-binding peptide
SSKSSRVIMNSLQEIKPTKGIYYVIPLPELDQPVSSPSASA

SEQ ID NO: 1596 - protein, 41 aa, Artificial Sequence
  Non-cyclic GFR-binding peptide
SSKSSRVVMNSLQEVKPTRGVYYVIPLPELDQPVSSPSASA

SEQ ID NO: 1597 - protein, 42 aa, Artificial Sequence
  Non-cyclic GFR-binding peptide
RSGSGEVVMDNSLQEVVKENEDYYVIPLPELETPVSSAKPIK

SEQ ID NO: 1598 - protein, 42 aa, Artificial Sequence
  Non-cyclic GFR-binding peptide
RSASSEVTMNNSLQEVVNKNEDYYVIPLPEMKEPVSSPEPIG

SEQ ID NO: 1599 - protein, 42 aa, Artificial Sequence
  Non-cyclic GFR-binding peptide
RSGSGEVVMENSLQEVVKDYEDYYVIPLPELETPVSSAKPIS

SEQ ID NO: 1600 - protein, 42 aa, Artificial Sequence
  Non-cyclic GFR-binding peptide
HSGSSRVVMNNSLQEIVNSSDDYYVIPLPELKTPASTPKTVH

SEQ ID NO: 1601 - protein, 42 aa, Artificial Sequence
  Non-cyclic GFR-binding peptide
HSGSSRVVMNNSLQEIVNSSDDYYVIPLPELKTPASSPKPVY

SEQ ID NO: 1602 - protein, 42 aa, Artificial Sequence
  Non-cyclic GFR-binding peptide
HSGSARVVMNNSLQEIVNSSDDYYVIPLPELQTPASSPKPVT

SEQ ID NO: 1603 - protein, 42 aa, Artificial Sequence
  Non-cyclic GFR-binding peptide
HSGSAKVVMNNSLQEIVNNSSDYYVIPLPELKTPASSAKPVA

SEQ ID NO: 1604 - protein, 43 aa, Artificial Sequence
  Non-cyclic GFR-binding peptide
RSGSEAVSMGENSLQETPVGMDDYYVIPLPELKTPVSSAKGVK

SEQ ID NO: 1605 - protein, 42 aa, Artificial Sequence
  Non-cyclic GFR-binding peptide
RSGSESVAMGNSLQEYTVVGKDYYVIPLPELKTPVSSAKSAK

SEQ ID NO: 1606 - protein, 42 aa, Artificial Sequence
  Non-cyclic GFR-binding peptide
SSGSRDVVMGNSLQEIIQQKDNYYVIPLPEMKTPTSSPGASG

SEQ ID NO: 1607 - protein, 42 aa, Artificial Sequence
  Non-cyclic GFR-binding peptide
RSGSAEVVMDNSLQEVVNNAADYYVIPLPELRAPVSSSAPAA

SEQ ID NO: 1608 - protein, 42 aa, Artificial Sequence
  Non-cyclic GFR-binding peptide
RSGSSEVVMDNSLQEVVNNASDYYVIPLPELRTPVSSTPPTS

SEQ ID NO: 1609 - protein, 42 aa, Artificial Sequence
  Non-cyclic GFR-binding peptide
HSGSSRVVMNNSLQEIVNSSDDYYVIPLPELKTPASSPKPVH

SEQ ID NO: 1610 - protein, 41 aa, Artificial Sequence
  Non-cyclic GFR-binding peptide
LSGSEEVIMNSLQELLVRGNDYYVIPLPETKVPASSTSPVR

SEQ ID NO: 1611 - protein, 41 aa, Artificial Sequence
  Non-cyclic GFR-binding peptide
SSKSSKVIMNSLQEIKPTKGIYYVIPLPELDQSVSSPSASA

SEQ ID NO: 1612 - protein, 41 aa, Artificial Sequence
  Non-cyclic GFR-binding peptide
SSKSSKVVMNSLQEVKPTRGVYYVIPLPELDQPVSSPSASA

SEQ ID NO: 1613 - protein, 44 aa, Artificial Sequence
  Non-cyclic GFR-binding peptide
RSESKNHQLFNSLQEHQGQHPKIRYYVIPLPEEETPVSELGEDN

SEQ ID NO: 1614 - protein, 44 aa, Artificial Sequence
  Non-cyclic GFR-binding peptide
RSESQSHEELNSLQEHQGQHPKIRYYVIPLPEQGTPVSELGEDN

SEQ ID NO: 1615 - protein, 45 aa, Artificial Sequence
  Non-cyclic GFR-binding peptide
ASASELHEELRNSLQELKPKKRVYEYYVIPLPEHHVRSPQSKVSS

SEQ ID NO: 1616 - protein, 45 aa, Artificial Sequence
  Non-cyclic GFR-binding peptide
ESKSALHDELTNSLQEFIPKKRVIEYYVIPLPELQVQTPRSQVNR

SEQ ID NO: 1617 - protein, 42 aa, Artificial Sequence
  Non-cyclic GFR-binding peptide
RSGSGSKVMDNSLQEVVKENEDYYLITLPELEQSVSSAKPIK

SEQ ID NO: 1618 - protein, 42 aa, Artificial Sequence
  Non-cyclic GFR-binding peptide
RSASSSKVMNNSLQEVVNKNEDYYLITLPEMKQSVSSPEPIG

SEQ ID NO: 1619 - protein, 42 aa, Artificial Sequence
  Non-cyclic GFR-binding peptide
RSGSGSKVMENSLQEVVKDYEDYYLITLPELEQSVSSAKPIS

SEQ ID NO: 1620 - protein, 42 aa, Artificial Sequence
  Non-cyclic GFR-binding peptide
HSGSSSKVMNNSLQEIVNSSDDYYLITLPELKQSVSTPKTVH

SEQ ID NO: 1621 - protein, 42 aa, Artificial Sequence
  Non-cyclic GFR-binding peptide
HSGSSSKVMNNSLQEIVNSSDDYYLITLPELKQSVSSPKPVY

SEQ ID NO: 1622 - protein, 42 aa, Artificial Sequence
  Non-cyclic GFR-binding peptide
HSGSASKVMNNSLQEIVNSSDDYYLITLPELQQSVSSPKPVT

SEQ ID NO: 1623 - protein, 42 aa, Artificial Sequence
  Non-cyclic GFR-binding peptide
HSGSASKVMNNSLQEIVNNSSDYYLITLPELKQSVSSAKPVA

SEQ ID NO: 1624 - protein, 43 aa, Artificial Sequence
  Non-cyclic GFR-binding peptide
RSGSSKVSMGENSLQETPVGMDDYYLITLPELKQSVSSAKGVK

SEQ ID NO: 1625 - protein, 42 aa, Artificial Sequence
  Non-cyclic GFR-binding peptide
RSGSESKVMGNSLQEYTVVGKDYYLITLPELKQSVSSAKSAK

SEQ ID NO: 1626 - protein, 42 aa, Artificial Sequence
  Non-cyclic GFR-binding peptide
SSGSRSKVMGNSLQEIIQQKDNYYLITLPEMKQSVSSPGASG

SEQ ID NO: 1627 - protein, 42 aa, Artificial Sequence
  Non-cyclic GFR-binding peptide
RSGSASKVMDNSLQEVVNNAADYYLITLPELRQSVSSSAPAA

SEQ ID NO: 1628 - protein, 42 aa, Artificial Sequence
  Non-cyclic GFR-binding peptide
RSGSSSKVMDNSLQEVVNNASDYYLITLPELRQSVSSTPPTS

SEQ ID NO: 1629 - protein, 42 aa, Artificial Sequence
  Non-cyclic GFR-binding peptide
HSGSSSKVMNNSLQEIVNSSDDYYLITLPELKQSVSSPKPVH

SEQ ID NO: 1630 - protein, 41 aa, Artificial Sequence
  Non-cyclic GFR-binding peptide
LSGSSKVIMNSLQELLVRGNDYYLITLPETKQSVSSTSPVR

SEQ ID NO: 1631 - protein, 41 aa, Artificial Sequence
  Non-cyclic GFR-binding peptide
SSKSSKVIMNSLQEVKPKRGVYYLITLPELAQSVSSPAASA

SEQ ID NO: 1632 - protein, 41 aa, Artificial Sequence
  Non-cyclic GFR-binding peptide
SSKSSKVVMNSLQEVKPTRGVYYLITLPELDQSVSSPSASA

SEQ ID NO: 1633 - protein, 42 aa, Artificial Sequence
  Non-cyclic GFR-binding peptide
RSGSGEVVMDNSLQEVVKENEDYYLITLPELETPVSSAKPIK

SEQ ID NO: 1634 - protein, 42 aa, Artificial Sequence
  Non-cyclic GFR-binding peptide
RSASSEVTMNNSLQEVVNKNEDYYLITLPEMKEPVSSPEPIG

SEQ ID NO: 1635 - protein, 42 aa, Artificial Sequence
  Non-cyclic GFR-binding peptide
RSGSGEVVMENSLQEVVKDYEDYYLITLPELETPVSSAKPIS

SEQ ID NO: 1636 - protein, 42 aa, Artificial Sequence
  Non-cyclic GFR-binding peptide
HSGSSRVVMNNSLQEIVNSSDDYYLITLPELKTPASTPKTVH

SEQ ID NO: 1637 - protein, 42 aa, Artificial Sequence
  Non-cyclic GFR-binding peptide
HSGSSRVVMNNSLQEIVNSSDDYYLITLPELKTPASSPKPVY

SEQ ID NO: 1638 - protein, 42 aa, Artificial Sequence
  Non-cyclic GFR-binding peptide
HSGSARVVMNNSLQEIVNSSDDYYLITLPELQTPASSPKPVT

SEQ ID NO: 1639 - protein, 42 aa, Artificial Sequence
  Non-cyclic GFR-binding peptide
HSGSAKVVMNNSLQEIVNNSSDYYLITLPELKTPASSAKPVA

SEQ ID NO: 1640 - protein, 43 aa, Artificial Sequence
  Non-cyclic GFR-binding peptide
RSGSEAVSMGENSLQETPVGMDDYYLITLPELKTPVSSAKGVK

SEQ ID NO: 1641 - protein, 42 aa, Artificial Sequence
  Non-cyclic GFR-binding peptide
RSGSESVAMGNSLQEYTVVGKDYYLITLPELKTPVSSAKSAK

SEQ ID NO: 1642 - protein, 42 aa, Artificial Sequence
  Non-cyclic GFR-binding peptide
SSGSRDVVMGNSLQEIIQQKDNYYLITLPEMKTPTSSPGASG

SEQ ID NO: 1643 - protein, 42 aa, Artificial Sequence
  Non-cyclic GFR-binding peptide
RSGSAEVVMDNSLQEVVNNAADYYLITLPELRAPVSSSAPAA

SEQ ID NO: 1644 - protein, 42 aa, Artificial Sequence
  Non-cyclic GFR-binding peptide
RSGSSEVVMDNSLQEVVNNASDYYLITLPELRTPVSSTPPTS

SEQ ID NO: 1645 - protein, 42 aa, Artificial Sequence
  Non-cyclic GFR-binding peptide
HSGSSRVVMNNSLQEIVNSSDDYYLITLPELKTPASSPKPVH

SEQ ID NO: 1646 - protein, 41 aa, Artificial Sequence
  Non-cyclic GFR-binding peptide
LSGSEEVIMNSLQELLVRGNDYYLITLPETKVPASSTSPVR

SEQ ID NO: 1647 - protein, 41 aa, Artificial Sequence
  Non-cyclic GFR-binding peptide
SSKSSRVIMNSLQEVKPKRGVYYLITLPELAQPVSSPAASA

SEQ ID NO: 1648 - protein, 44 aa, Artificial Sequence
  Non-cyclic GFR-binding peptide
RSESKNHQLFNSLQEHQGQHPKIRYYLITLPEEETPVSELGEDN

SEQ ID NO: 1649 - protein, 44 aa, Artificial Sequence
  Non-cyclic GFR-binding peptide
RSESQSHEELNSLQEHQGQHPKIRYYLITLPEQGTPVSELGEDN

SEQ ID NO: 1650 - protein, 45 aa, Artificial Sequence
  Non-cyclic GFR-binding peptide
ASASELHEELRNSLQELKPKKRVYEYYLITLPEHHVRSPQSKVSS

SEQ ID NO: 1651 - protein, 45 aa, Artificial Sequence
  Non-cyclic GFR-binding peptide
ESKSALHDELTNSLQEFIPKKRVIEYYLITLPELQVQTPRSQVNR

SEQ ID NO: 1652 - protein, 42 aa, Artificial Sequence
  Non-cyclic GFR-binding peptide
RSGSGSKVMDNSLQEVVKENEDYYLITLPELEQPVSSAKPIK

SEQ ID NO: 1653 - protein, 42 aa, Artificial Sequence
  Non-cyclic GFR-binding peptide
RSASSSKVMNNSLQEVVNKNEDYYLITLPEMKQPVSSPEPIG

SEQ ID NO: 1654 - protein, 42 aa, Artificial Sequence
  Non-cyclic GFR-binding peptide
RSGSGSKVMENSLQEVVKDYEDYYLITLPELEQPVSSAKPIS

SEQ ID NO: 1655 - protein, 42 aa, Artificial Sequence
  Non-cyclic GFR-binding peptide
HSGSSSKVMNNSLQEIVNSSDDYYLITLPELKQPVSTPKTVH

SEQ ID NO: 1656 - protein, 42 aa, Artificial Sequence
  Non-cyclic GFR-binding peptide
HSGSSSKVMNNSLQEIVNSSDDYYLITLPELKQPVSSPKPVY

SEQ ID NO: 1657 - protein, 42 aa, Artificial Sequence
  Non-cyclic GFR-binding peptide
HSGSASKVMNNSLQEIVNSSDDYYLITLPELQQPVSSPKPVT

SEQ ID NO: 1658 - protein, 42 aa, Artificial Sequence
  Non-cyclic GFR-binding peptide
HSGSASKVMNNSLQEIVNNSSDYYLITLPELKQPVSSAKPVA

SEQ ID NO: 1659 - protein, 43 aa, Artificial Sequence
  Non-cyclic GFR-binding peptide
RSGSSKVSMGENSLQETPVGMDDYYLITLPELKQPVSSAKGVK

SEQ ID NO: 1660 - protein, 42 aa, Artificial Sequence
  Non-cyclic GFR-binding peptide
RSGSESKVMGNSLQEYTVVGKDYYLITLPELKQPVSSAKSAK

SEQ ID NO: 1661 - protein, 42 aa, Artificial Sequence
  Non-cyclic GFR-binding peptide
SSGSRSKVMGNSLQEIIQQKDNYYLITLPEMKQPVSSPGASG

SEQ ID NO: 1662 - protein, 42 aa, Artificial Sequence
  Non-cyclic GFR-binding peptide
RSGSASKVMDNSLQEVVNNAADYYLITLPELRQPVSSSAPAA

SEQ ID NO: 1663 - protein, 42 aa, Artificial Sequence
  Non-cyclic GFR-binding peptide
RSGSSSKVMDNSLQEVVNNASDYYLITLPELRQPVSSTPPTS

SEQ ID NO: 1664 - protein, 42 aa, Artificial Sequence
  Non-cyclic GFR-binding peptide
HSGSSSKVMNNSLQEIVNSSDDYYLITLPELKQPVSSPKPVH

SEQ ID NO: 1665 - protein, 41 aa, Artificial Sequence
  Non-cyclic GFR-binding peptide
LSGSSKVIMNSLQELLVRGNDYYLITLPETKQPVSSTSPVR

SEQ ID NO: 1666 - protein, 41 aa, Artificial Sequence
  Non-cyclic GFR-binding peptide
SSKSSKVIMNSLQEVKPKRGVYYLITLPELAQPVSSPAASA

SEQ ID NO: 1667 - protein, 41 aa, Artificial Sequence
  Non-cyclic GFR-binding peptide
SSKSSKVIMNSLQEIKPTKGIYYLITLPELDQPVSSPSASA

SEQ ID NO: 1668 - protein, 44 aa, Artificial Sequence
  Non-cyclic GFR-binding peptide
RSESQNHQELSMEGIHQGQHPKIRMIQMTINSQGTPVSELGEDN

SEQ ID NO: 1669 - protein, 42 aa, Artificial Sequence
  Non-cyclic GFR-binding peptide
RSGSGEVVMDSMEGIVVKENEDMIQMTINSLETPVSSAKPIK

SEQ ID NO: 1670 - protein, 42 aa, Artificial Sequence
  Non-cyclic GFR-binding peptide
RSASSEVTMNSMEGIVVNKNEDMIQMTINSMKEPVSSPEPIG

SEQ ID NO: 1671 - protein, 42 aa, Artificial Sequence
  Non-cyclic GFR-binding peptide
RSGSGEVVMESMEGIVVKDYEDMIQMTINSLETPVSSAKPIS

SEQ ID NO: 1672 - protein, 42 aa, Artificial Sequence
  Non-cyclic GFR-binding peptide
HSGSSRVVMNSMEGIIVNSSDDMIQMTINSLKTPASTPKTVH

SEQ ID NO: 1673 - protein, 42 aa, Artificial Sequence
  Non-cyclic GFR-binding peptide
HSGSSRVVMNSMEGIIVNSSDDMIQMTINSLKTPASSPKPVY

SEQ ID NO: 1674 - protein, 42 aa, Artificial Sequence
  Non-cyclic GFR-binding peptide
HSGSARVVMNSMEGIIVNSSDDMIQMTINSLQTPASSPKPVT

SEQ ID NO: 1675 - protein, 42 aa, Artificial Sequence
  Non-cyclic GFR-binding peptide
HSGSAKVVMNSMEGIIVNNSSDMIQMTINSLKTPASSAKPVA

SEQ ID NO: 1676 - protein, 43 aa, Artificial Sequence
  Non-cyclic GFR-binding peptide
RSGSEAVSMGESMEGITPVGMDDMIQMTINSLKTPVSSAKGVK

SEQ ID NO: 1677 - protein, 42 aa, Artificial Sequence
  Non-cyclic GFR-binding peptide
RSGSESVAMGSMEGIYTVVGKDMIQMTINSLKTPVSSAKSAK

SEQ ID NO: 1678 - protein, 42 aa, Artificial Sequence
  Non-cyclic GFR-binding peptide
SSGSRDVVMGSMEGIIIQQKDNMIQMTINSMKTPTSSPGASG

SEQ ID NO: 1679 - protein, 42 aa, Artificial Sequence
  Non-cyclic GFR-binding peptide
RSGSAEVVMDSMEGIVVNNAADMIQMTINSLRAPVSSSAPAA

SEQ ID NO: 1680 - protein, 42 aa, Artificial Sequence
  Non-cyclic GFR-binding peptide
RSGSSEVVMDSMEGIVVNNASDMIQMTINSLRTPVSSTPPTS

SEQ ID NO: 1681 - protein, 42 aa, Artificial Sequence
  Non-cyclic GFR-binding peptide
HSGSSRVVMNSMEGIIVNSSDDMIQMTINSLKTPASSPKPVH

SEQ ID NO: 1682 - protein, 41 aa, Artificial Sequence
  Non-cyclic GFR-binding peptide
LSGSEEVIMSMEGILLVRGNDMIQMTINSTKVPASSTSPVR

SEQ ID NO: 1683 - protein, 41 aa, Artificial Sequence
  Non-cyclic GFR-binding peptide
SSKSSRVIMSMEGIVKPKRGVMIQMTINSLAQPVSSPAASA

SEQ ID NO: 1684 - protein, 41 aa, Artificial Sequence
  Non-cyclic GFR-binding peptide
SSKSSKVIMSMEGIIKPTKGIMIQMTINSLDQSVSSPSASA

SEQ ID NO: 1685 - protein, 41 aa, Artificial Sequence
  Non-cyclic GFR-binding peptide
SSKSSKVVMSMEGIVKPTRGVMIQMTINSLDQPVSSPSASA

SEQ ID NO: 1686 - protein, 44 aa, Artificial Sequence
  Non-cyclic GFR-binding peptide
RSESQSHEELSMEGIHQGQHPKIRMIQMTINSQGTPVSELGEDN

SEQ ID NO: 1687 - protein, 45 aa, Artificial Sequence
  Non-cyclic GFR-binding peptide
ASASELHEELRSMEGILKPKKRVYEMIQMTINSHHVRSPQSKVSS

SEQ ID NO: 1688 - protein, 45 aa, Artificial Sequence
  Non-cyclic GFR-binding peptide
ESKSALHDELTSMEGIFIPKKRVIEMIQMTINSLQVQTPRSQVNR

SEQ ID NO: 1689 - protein, 44 aa, Artificial Sequence
  Non-cyclic GFR-binding peptide
RSESKSHELFSMEGLHQGQHPKIRMIQMTINSEETPVSELGEDN

SEQ ID NO: 1690 - protein, 42 aa, Artificial Sequence
  Non-cyclic GFR-binding peptide
RSGSGEVVMDSMEGLVVKENEDMIQMTINSLETPVSSAKPIK

SEQ ID NO: 1691 - protein, 42 aa, Artificial Sequence
  Non-cyclic GFR-binding peptide
RSASSEVTMNSMEGLVVNKNEDMIQMTINSMKEPVSSPEPIG

SEQ ID NO: 1692 - protein, 42 aa, Artificial Sequence
  Non-cyclic GFR-binding peptide
RSGSGEVVMESMEGLVVKDYEDMIQMTINSLETPVSSAKPIS

SEQ ID NO: 1693 - protein, 42 aa, Artificial Sequence
  Non-cyclic GFR-binding peptide
HSGSSRVVMNSMEGLIVNSSDDMIQMTINSLKTPASTPKTVH

SEQ ID NO: 1694 - protein, 42 aa, Artificial Sequence
  Non-cyclic GFR-binding peptide
HSGSSRVVMNSMEGLIVNSSDDMIQMTINSLKTPASSPKPVY

SEQ ID NO: 1695 - protein, 42 aa, Artificial Sequence
  Non-cyclic GFR-binding peptide
HSGSARVVMNSMEGLIVNSSDDMIQMTINSLQTPASSPKPVT

SEQ ID NO: 1696 - protein, 42 aa, Artificial Sequence
  Non-cyclic GFR-binding peptide
HSGSAKVVMNSMEGLIVNNSSDMIQMTINSLKTPASSAKPVA

SEQ ID NO: 1697 - protein, 43 aa, Artificial Sequence
  Non-cyclic GFR-binding peptide
RSGSEAVSMGESMEGLTPVGMDDMIQMTINSLKTPVSSAKGVK

SEQ ID NO: 1698 - protein, 42 aa, Artificial Sequence
  Non-cyclic GFR-binding peptide
RSGSESVAMGSMEGLYTVVGKDMIQMTINSLKTPVSSAKSAK

SEQ ID NO: 1699 - protein, 42 aa, Artificial Sequence
  Non-cyclic GFR-binding peptide
SSGSRDVVMGSMEGLIIQQKDNMIQMTINSMKTPTSSPGASG

SEQ ID NO: 1700 - protein, 42 aa, Artificial Sequence
  Non-cyclic GFR-binding peptide
RSGSAEVVMDSMEGLVVNNAADMIQMTINSLRAPVSSSAPAA

SEQ ID NO: 1701 - protein, 42 aa, Artificial Sequence
  Non-cyclic GFR-binding peptide
RSGSSEVVMDSMEGLVVNNASDMIQMTINSLRTPVSSTPPTS

SEQ ID NO: 1702 - protein, 42 aa, Artificial Sequence
  Non-cyclic GFR-binding peptide
HSGSSRVVMNSMEGLIVNSSDDMIQMTINSLKTPASSPKPVH

SEQ ID NO: 1703 - protein, 41 aa, Artificial Sequence
  Non-cyclic GFR-binding peptide
LSGSEEVIMSMEGLLLVRGNDMIQMTINSTKVPASSTSPVR

SEQ ID NO: 1704 - protein, 41 aa, Artificial Sequence
  Non-cyclic GFR-binding peptide
SSKSSRVIMSMEGLVKPKRGVMIQMTINSLAQPVSSPAASA

SEQ ID NO: 1705 - protein, 41 aa, Artificial Sequence
  Non-cyclic GFR-binding peptide
SSKSSKVIMSMEGLIKPTKGIMIQMTINSLDQSVSSPSASA

SEQ ID NO: 1706 - protein, 41 aa, Artificial Sequence
  Non-cyclic GFR-binding peptide
SSKSSKVVMSMEGLVKPTRGVMIQMTINSLDQPVSSPSASA

SEQ ID NO: 1707 - protein, 44 aa, Artificial Sequence
  Non-cyclic GFR-binding peptide
RSESKNHQLFSMEGLHQGQHPKIRMIQMTINSEETPVSELGEDN

SEQ ID NO: 1708 - protein, 45 aa, Artificial Sequence
  Non-cyclic GFR-binding peptide
ASASELHEELRSMEGLLKPKKRVYEMIQMTINSHHVRSPQSKVSS

SEQ ID NO: 1709 - protein, 45 aa, Artificial Sequence
  Non-cyclic GFR-binding peptide
ESKSALHDELTSMEGLFIPKKRVIEMIQMTINSLQVQTPRSQVNR

SEQ ID NO: 1710 - protein, 45 aa, Artificial Sequence
  Non-cyclic GFR-binding peptide
ESKSALHEELTVQVEKFIPKKRVIEVKAVKVSRLQVRSPRSQVNR

SEQ ID NO: 1711 - protein, 42 aa, Artificial Sequence
  Non-cyclic GFR-binding peptide
RSGSGEVVMDVQVEKVVKENEDVKAVKVSRLETPVSSAKPIK

SEQ ID NO: 1712 - protein, 42 aa, Artificial Sequence
  Non-cyclic GFR-binding peptide
RSASSEVTMNVQVEKVVNKNEDVKAVKVSRMKEPVSSPEPIG

SEQ ID NO: 1713 - protein, 42 aa, Artificial Sequence
  Non-cyclic GFR-binding peptide
RSGSGEVVMEVQVEKVVKDYEDVKAVKVSRLETPVSSAKPIS

SEQ ID NO: 1714 - protein, 42 aa, Artificial Sequence
  Non-cyclic GFR-binding peptide
HSGSSRVVMNVQVEKIVNSSDDVKAVKVSRLKTPASTPKTVH

SEQ ID NO: 1715 - protein, 42 aa, Artificial Sequence
  Non-cyclic GFR-binding peptide
HSGSSRVVMNVQVEKIVNSSDDVKAVKVSRLKTPASSPKPVY

SEQ ID NO: 1716 - protein, 42 aa, Artificial Sequence
  Non-cyclic GFR-binding peptide
HSGSARVVMNVQVEKIVNSSDDVKAVKVSRLQTPASSPKPVT

SEQ ID NO: 1717 - protein, 42 aa, Artificial Sequence
  Non-cyclic GFR-binding peptide
HSGSAKVVMNVQVEKIVNNSSDVKAVKVSRLKTPASSAKPVA

SEQ ID NO: 1718 - protein, 43 aa, Artificial Sequence
  Non-cyclic GFR-binding peptide
RSGSEAVSMGEVQVEKTPVGMDDVKAVKVSRLKTPVSSAKGVK

SEQ ID NO: 1719 - protein, 42 aa, Artificial Sequence
  Non-cyclic GFR-binding peptide
RSGSESVAMGVQVEKYTVVGKDVKAVKVSRLKTPVSSAKSAK

SEQ ID NO: 1720 - protein, 42 aa, Artificial Sequence
  Non-cyclic GFR-binding peptide
SSGSRDVVMGVQVEKIIQQKDNVKAVKVSRMKTPTSSPGASG

SEQ ID NO: 1721 - protein, 42 aa, Artificial Sequence
  Non-cyclic GFR-binding peptide
RSGSAEVVMDVQVEKVVNNAADVKAVKVSRLRAPVSSSAPAA

SEQ ID NO: 1722 - protein, 42 aa, Artificial Sequence
  Non-cyclic GFR-binding peptide
RSGSSEVVMDVQVEKVVNNASDVKAVKVSRLRTPVSSTPPTS

SEQ ID NO: 1723 - protein, 42 aa, Artificial Sequence
  Non-cyclic GFR-binding peptide
HSGSSRVVMNVQVEKIVNSSDDVKAVKVSRLKTPASSPKPVH

SEQ ID NO: 1724 - protein, 41 aa, Artificial Sequence
  Non-cyclic GFR-binding peptide
LSGSEEVIMVQVEKLLVRGNDVKAVKVSRTKVPASSTSPVR

SEQ ID NO: 1725 - protein, 41 aa, Artificial Sequence
  Non-cyclic GFR-binding peptide
SSKSSRVIMVQVEKVKPKRGVVKAVKVSRLAQPVSSPAASA

SEQ ID NO: 1726 - protein, 41 aa, Artificial Sequence
  Non-cyclic GFR-binding peptide
SSKSSKVIMVQVEKIKPTKGIVKAVKVSRLDQSVSSPSASA

SEQ ID NO: 1727 - protein, 41 aa, Artificial Sequence
  Non-cyclic GFR-binding peptide
SSKSSKVVMVQVEKVKPTRGVVKAVKVSRLDQPVSSPSASA

SEQ ID NO: 1728 - protein, 44 aa, Artificial Sequence
  Non-cyclic GFR-binding peptide
RSESKNHQLFVQVEKHQGQHPKIRVKAVKVSREETPVSELGEDN

SEQ ID NO: 1729 - protein, 44 aa, Artificial Sequence
  Non-cyclic GFR-binding peptide
RSESQSHEELVQVEKHQGQHPKIRVKAVKVSRQGTPVSELGEDN

SEQ ID NO: 1730 - protein, 45 aa, Artificial Sequence
  Non-cyclic GFR-binding peptide
ESKSALHDELTVQVEKFIPKKRVIEVKAVKVSRLQVQTPRSQVNR

SEQ ID NO: 1731 - protein, 45 aa, Artificial Sequence
  Non-cyclic GFR-binding peptide
ASASELHDELRVTAKKLKPKKRVYEIKRVQVPRHHVQTPQSKVSS

SEQ ID NO: 1732 - protein, 42 aa, Artificial Sequence
  Non-cyclic GFR-binding peptide
RSGSGEVVMDVTAKKVVKENEDIKRVQVPRLETPVSSAKPIK

SEQ ID NO: 1733 - protein, 42 aa, Artificial Sequence
  Non-cyclic GFR-binding peptide
RSASSEVTMNVTAKKVVNKNEDIKRVQVPRMKEPVSSPEPIG

SEQ ID NO: 1734 - protein, 42 aa, Artificial Sequence
  Non-cyclic GFR-binding peptide
RSGSGEVVMEVTAKKVVKDYEDIKRVQVPRLETPVSSAKPIS

SEQ ID NO: 1735 - protein, 42 aa, Artificial Sequence
  Non-cyclic GFR-binding peptide
HSGSSRVVMNVTAKKIVNSSDDIKRVQVPRLKTPASTPKTVH

SEQ ID NO: 1736 - protein, 42 aa, Artificial Sequence
  Non-cyclic GFR-binding peptide
HSGSSRVVMNVTAKKIVNSSDDIKRVQVPRLKTPASSPKPVY

SEQ ID NO: 1737 - protein, 42 aa, Artificial Sequence
  Non-cyclic GFR-binding peptide
HSGSARVVMNVTAKKIVNSSDDIKRVQVPRLQTPASSPKPVT

SEQ ID NO: 1738 - protein, 42 aa, Artificial Sequence
  Non-cyclic GFR-binding peptide
HSGSAKVVMNVTAKKIVNNSSDIKRVQVPRLKTPASSAKPVA

SEQ ID NO: 1739 - protein, 43 aa, Artificial Sequence
  Non-cyclic GFR-binding peptide
RSGSEAVSMGEVTAKKTPVGMDDIKRVQVPRLKTPVSSAKGVK

SEQ ID NO: 1740 - protein, 42 aa, Artificial Sequence
  Non-cyclic GFR-binding peptide
RSGSESVAMGVTAKKYTVVGKDIKRVQVPRLKTPVSSAKSAK

SEQ ID NO: 1741 - protein, 42 aa, Artificial Sequence
  Non-cyclic GFR-binding peptide
SSGSRDVVMGVTAKKIIQQKDNIKRVQVPRMKTPTSSPGASG

SEQ ID NO: 1742 - protein, 42 aa, Artificial Sequence
  Non-cyclic GFR-binding peptide
RSGSAEVVMDVTAKKVVNNAADIKRVQVPRLRAPVSSSAPAA

SEQ ID NO: 1743 - protein, 42 aa, Artificial Sequence
  Non-cyclic GFR-binding peptide
RSGSSEVVMDVTAKKVVNNASDIKRVQVPRLRTPVSSTPPTS

SEQ ID NO: 1744 - protein, 42 aa, Artificial Sequence
  Non-cyclic GFR-binding peptide
HSGSSRVVMNVTAKKIVNSSDDIKRVQVPRLKTPASSPKPVH

SEQ ID NO: 1745 - protein, 41 aa, Artificial Sequence
  Non-cyclic GFR-binding peptide
LSGSEEVIMVTAKKLLVRGNDIKRVQVPRTKVPASSTSPVR

SEQ ID NO: 1746 - protein, 41 aa, Artificial Sequence
  Non-cyclic GFR-binding peptide
SSKSSRVIMVTAKKVKPKRGVIKRVQVPRLAQPVSSPAASA

SEQ ID NO: 1747 - protein, 41 aa, Artificial Sequence
  Non-cyclic GFR-binding peptide
SSKSSKVIMVTAKKIKPTKGIIKRVQVPRLDQSVSSPSASA

SEQ ID NO: 1748 - protein, 41 aa, Artificial Sequence
  Non-cyclic GFR-binding peptide
SSKSSKVVMVTAKKVKPTRGVIKRVQVPRLDQPVSSPSASA

SEQ ID NO: 1749 - protein, 44 aa, Artificial Sequence
  Non-cyclic GFR-binding peptide
RSESKNHQLFVTAKKHQGQHPKIRIKRVQVPREETPVSELGEDN

SEQ ID NO: 1750 - protein, 44 aa, Artificial Sequence
  Non-cyclic GFR-binding peptide
RSESQSHEELVTAKKHQGQHPKIRIKRVQVPRQGTPVSELGEDN

SEQ ID NO: 1751 - protein, 45 aa, Artificial Sequence
  Non-cyclic GFR-binding peptide
ASASELHEELRVTAKKLKPKKRVYEIKRVQVPRHHVRSPQSKVSS

SEQ ID NO: 1752 - protein, 30 aa, Artificial Sequence
  Non-cyclic GFR-binding peptide
EVVMNQYNKLVVNKNEDLYLMSIASMKTPV

SEQ ID NO: 1753 - protein, 30 aa, Artificial Sequence
  Non-cyclic GFR-binding peptide
EVVMNQYNKLIVNSSDDLYLMSIASLKTPV

SEQ ID NO: 1754 - protein, 30 aa, Artificial Sequence
  Non-cyclic GFR-binding peptide
EVVMNQYNKLIVNSSDDLYLMSIASLQTPV

SEQ ID NO: 1755 - protein, 30 aa, Artificial Sequence
  Non-cyclic GFR-binding peptide
EVVMNQYNKLIVNNSSDLYLMSIASLKTPV

SEQ ID NO: 1756 - protein, 32 aa, Artificial Sequence
  Non-cyclic GFR-binding peptide
EVVSMGEQYNKLTPVGMDDLYLMSIASLKTPV

SEQ ID NO: 1757 - protein, 30 aa, Artificial Sequence
  Non-cyclic GFR-binding peptide
EVVMGQYNKLYTVVGKDLYLMSIASLKTPV

SEQ ID NO: 1758 - protein, 30 aa, Artificial Sequence
  Non-cyclic GFR-binding peptide
EVVMGQYNKLIIQQKDNLYLMSIASMKTPV

SEQ ID NO: 1759 - protein, 30 aa, Artificial Sequence
  Non-cyclic GFR-binding peptide
EVVMDQYNKLVVNNAADLYLMSIASLRTPV

SEQ ID NO: 1760 - protein, 30 aa, Artificial Sequence
  Non-cyclic GFR-binding peptide
EVVMDQYNKLVVNNASDLYLMSIASLRTPV

SEQ ID NO: 1761 - protein, 30 aa, Artificial Sequence
  Non-cyclic GFR-binding peptide
EVVIMQYNKLLLVRGNDLYLMSIASTKTPV

SEQ ID NO: 1762 - protein, 30 aa, Artificial Sequence
  Non-cyclic GFR-binding peptide
EVVIMQYNKLVKPKRGVLYLMSIASLATPV

SEQ ID NO: 1763 - protein, 30 aa, Artificial Sequence
  Non-cyclic GFR-binding peptide
EVVIMQYNKLIKPTKGILYLMSIASLDTPV

SEQ ID NO: 1764 - protein, 30 aa, Artificial Sequence
  Non-cyclic GFR-binding peptide
EVVVMQYNKLVKPTRGVLYLMSIASLDTPV

SEQ ID NO: 1765 - protein, 30 aa, Artificial Sequence
  Non-cyclic GFR-binding peptide
EVTMNQYNKLVVNKNEDLYLMSIASMKEPV

SEQ ID NO: 1766 - protein, 30 aa, Artificial Sequence
  Non-cyclic GFR-binding peptide
RVVMNQYNKLIVNSSDDLYLMSIASLKTPA

SEQ ID NO: 1767 - protein, 30 aa, Artificial Sequence
  Non-cyclic GFR-binding peptide
RVVMNQYNKLIVNSSDDLYLMSIASLQTPA

SEQ ID NO: 1768 - protein, 30 aa, Artificial Sequence
  Non-cyclic GFR-binding peptide
KVVMNQYNKLIVNNSSDLYLMSIASLKTPA

SEQ ID NO: 1769 - protein, 32 aa, Artificial Sequence
  Non-cyclic GFR-binding peptide
EAVSMGEQYNKLTPVGMDDLYLMSIASLKTPV

SEQ ID NO: 1770 - protein, 30 aa, Artificial Sequence
  Non-cyclic GFR-binding peptide
SVAMGQYNKLYTVVGKDLYLMSIASLKTPV

SEQ ID NO: 1771 - protein, 30 aa, Artificial Sequence
  Non-cyclic GFR-binding peptide
DVVMGQYNKLIIQQKDNLYLMSIASMKTPT

SEQ ID NO: 1772 - protein, 30 aa, Artificial Sequence
  Non-cyclic GFR-binding peptide
EVVMDQYNKLVVNNAADLYLMSIASLRAPV

SEQ ID NO: 1773 - protein, 30 aa, Artificial Sequence
  Non-cyclic GFR-binding peptide
EEVIMQYNKLLLVRGNDLYLMSIASTKVPA

SEQ ID NO: 1774 - protein, 30 aa, Artificial Sequence
  Non-cyclic GFR-binding peptide
SRVIMQYNKLVKPKRGVLYLMSIASLAQPV

SEQ ID NO: 1775 - protein, 30 aa, Artificial Sequence
  Non-cyclic GFR-binding peptide
SKVIMQYNKLIKPTKGILYLMSIASLDQSV

SEQ ID NO: 1776 - protein, 30 aa, Artificial Sequence
  Non-cyclic GFR-binding peptide
SKVVMQYNKLVKPTRGVLYLMSIASLDQPV

SEQ ID NO: 1777 - protein, 32 aa, Artificial Sequence
  Non-cyclic GFR-binding peptide
NHQLFQYNKLHQGQHPKIRLYLMSIASEETPV

SEQ ID NO: 1778 - protein, 32 aa, Artificial Sequence
  Non-cyclic GFR-binding peptide
SHEELQYNKLHQGQHPKIRLYLMSIASQGTPV

SEQ ID NO: 1779 - protein, 32 aa, Artificial Sequence
  Non-cyclic GFR-binding peptide
HEELRQYNKLLKPKKRVYELYLMSIASHHVRS

SEQ ID NO: 1780 - protein, 32 aa, Artificial Sequence
  Non-cyclic GFR-binding peptide
HDELTQYNKLFIPKKRVIELYLMSIASLQVQT

SEQ ID NO: 1781 - protein, 30 aa, Artificial Sequence
  Non-cyclic GFR-binding peptide
EVTMDPYVKLVVKENEDFFLISLSSLEEPV

SEQ ID NO: 1782 - protein, 30 aa, Artificial Sequence
  Non-cyclic GFR-binding peptide
EVTMEPYVKLVVKDYEDFFLISLSSLEEPV

SEQ ID NO: 1783 - protein, 30 aa, Artificial Sequence
  Non-cyclic GFR-binding peptide
EVTMNPYVKLIVNSSDDFFLISLSSLKEPV

SEQ ID NO: 1784 - protein, 30 aa, Artificial Sequence
  Non-cyclic GFR-binding peptide
EVTMNPYVKLIVNSSDDFFLISLSSLQEPV

SEQ ID NO: 1785 - protein, 30 aa, Artificial Sequence
  Non-cyclic GFR-binding peptide
EVTMNPYVKLIVNNSSDFFLISLSSLKEPV

SEQ ID NO: 1786 - protein, 32 aa, Artificial Sequence
  Non-cyclic GFR-binding peptide
EVTSMGEPYVKLTPVGMDDFFLISLSSLKEPV

SEQ ID NO: 1787 - protein, 30 aa, Artificial Sequence
  Non-cyclic GFR-binding peptide
EVTMGPYVKLYTVVGKDFFLISLSSLKEPV

SEQ ID NO: 1788 - protein, 30 aa, Artificial Sequence
  Non-cyclic GFR-binding peptide
EVTMGPYVKLIIQQKDNFFLISLSSMKEPV

SEQ ID NO: 1789 - protein, 30 aa, Artificial Sequence
  Non-cyclic GFR-binding peptide
EVTMDPYVKLVVNNAADFFLISLSSLREPV

SEQ ID NO: 1790 - protein, 30 aa, Artificial Sequence
  Non-cyclic GFR-binding peptide
EVTMDPYVKLVVNNASDFFLISLSSLREPV

SEQ ID NO: 1791 - protein, 30 aa, Artificial Sequence
  Non-cyclic GFR-binding peptide
EVTIMPYVKLLLVRGNDFFLISLSSTKEPV

SEQ ID NO: 1792 - protein, 30 aa, Artificial Sequence
  Non-cyclic GFR-binding peptide
EVTIMPYVKLVKPKRGVFFLISLSSLAEPV

SEQ ID NO: 1793 - protein, 30 aa, Artificial Sequence
  Non-cyclic GFR-binding peptide
EVTIMPYVKLIKPTKGIFFLISLSSLDEPV

SEQ ID NO: 1794 - protein, 30 aa, Artificial Sequence
  Non-cyclic GFR-binding peptide
EVTVMPYVKLVKPTRGVFFLISLSSLDEPV

SEQ ID NO: 1795 - protein, 30 aa, Artificial Sequence
  Non-cyclic GFR-binding peptide
EVVMDPYVKLVVKENEDFFLISLSSLETPV

SEQ ID NO: 1796 - protein, 30 aa, Artificial Sequence
  Non-cyclic GFR-binding peptide
EVVMEPYVKLVVKDYEDFFLISLSSLETPV

SEQ ID NO: 1797 - protein, 30 aa, Artificial Sequence
  Non-cyclic GFR-binding peptide
RVVMNPYVKLIVNSSDDFFLISLSSLKTPA

SEQ ID NO: 1798 - protein, 30 aa, Artificial Sequence
  Non-cyclic GFR-binding peptide
RVVMNPYVKLIVNSSDDFFLISLSSLQTPA

SEQ ID NO: 1799 - protein, 30 aa, Artificial Sequence
  Non-cyclic GFR-binding peptide
KVVMNPYVKLIVNNSSDFFLISLSSLKTPA

SEQ ID NO: 1800 - protein, 32 aa, Artificial Sequence
  Non-cyclic GFR-binding peptide
EAVSMGEPYVKLTPVGMDDFFLISLSSLKTPV

SEQ ID NO: 1801 - protein, 30 aa, Artificial Sequence
  Non-cyclic GFR-binding peptide
SVAMGPYVKLYTVVGKDFFLISLSSLKTPV

SEQ ID NO: 1802 - protein, 30 aa, Artificial Sequence
  Non-cyclic GFR-binding peptide
DVVMGPYVKLIIQQKDNFFLISLSSMKTPT

SEQ ID NO: 1803 - protein, 30 aa, Artificial Sequence
  Non-cyclic GFR-binding peptide
EVVMDPYVKLVVNNAADFFLISLSSLRAPV

SEQ ID NO: 1804 - protein, 30 aa, Artificial Sequence
  Non-cyclic GFR-binding peptide
EVVMDPYVKLVVNNASDFFLISLSSLRTPV

SEQ ID NO: 1805 - protein, 30 aa, Artificial Sequence
  Non-cyclic GFR-binding peptide
EEVIMPYVKLLLVRGNDFFLISLSSTKVPA

SEQ ID NO: 1806 - protein, 30 aa, Artificial Sequence
  Non-cyclic GFR-binding peptide
SRVIMPYVKLVKPKRGVFFLISLSSLAQPV

SEQ ID NO: 1807 - protein, 30 aa, Artificial Sequence
  Non-cyclic GFR-binding peptide
SKVIMPYVKLIKPTKGIFFLISLSSLDQSV

SEQ ID NO: 1808 - protein, 30 aa, Artificial Sequence
  Non-cyclic GFR-binding peptide
SKVVMPYVKLVKPTRGVFFLISLSSLDQPV

SEQ ID NO: 1809 - protein, 32 aa, Artificial Sequence
  Non-cyclic GFR-binding peptide
NHQLFPYVKLHQGQHPKIRFFLISLSSEETPV

SEQ ID NO: 1810 - protein, 32 aa, Artificial Sequence
  Non-cyclic GFR-binding peptide
SHEELPYVKLHQGQHPKIRFFLISLSSQGTPV

SEQ ID NO: 1811 - protein, 32 aa, Artificial Sequence
  Non-cyclic GFR-binding peptide
HEELRPYVKLLKPKKRVYEFFLISLSSHHVRS

SEQ ID NO: 1812 - protein, 32 aa, Artificial Sequence
  Non-cyclic GFR-binding peptide
HDELTPYVKLFIPKKRVIEFFLISLSSLQVQT

SEQ ID NO: 1813 - protein, 30 aa, Artificial Sequence
  Non-cyclic GFR-binding peptide
RVVMDRYKKLVVKENEDFYLVSIANLETPA

SEQ ID NO: 1814 - protein, 30 aa, Artificial Sequence
  Non-cyclic GFR-binding peptide
RVVMNRYKKLVVNKNEDFYLVSIANMKTPA

SEQ ID NO: 1815 - protein, 30 aa, Artificial Sequence
  Non-cyclic GFR-binding peptide
RVVMERYKKLVVKDYEDFYLVSIANLETPA

SEQ ID NO: 1816 - protein, 30 aa, Artificial Sequence
  Non-cyclic GFR-binding peptide
RVVMNRYKKLIVNNSSDFYLVSIANLKTPA

SEQ ID NO: 1817 - protein, 32 aa, Artificial Sequence
  Non-cyclic GFR-binding peptide
RVVSMGERYKKLTPVGMDDFYLVSIANLKTPA

SEQ ID NO: 1818 - protein, 30 aa, Artificial Sequence
  Non-cyclic GFR-binding peptide
RVVMGRYKKLYTVVGKDFYLVSIANLKTPA

SEQ ID NO: 1819 - protein, 30 aa, Artificial Sequence
  Non-cyclic GFR-binding peptide
RVVMGRYKKLIIQQKDNFYLVSIANMKTPA

SEQ ID NO: 1820 - protein, 30 aa, Artificial Sequence
  Non-cyclic GFR-binding peptide
RVVMDRYKKLVVNNAADFYLVSIANLRTPA

SEQ ID NO: 1821 - protein, 30 aa, Artificial Sequence
  Non-cyclic GFR-binding peptide
RVVMDRYKKLVVNNASDFYLVSIANLRTPA

SEQ ID NO: 1822 - protein, 30 aa, Artificial Sequence
  Non-cyclic GFR-binding peptide
RVVIMRYKKLLLVRGNDFYLVSIANTKTPA

SEQ ID NO: 1823 - protein, 30 aa, Artificial Sequence
  Non-cyclic GFR-binding peptide
RVVIMRYKKLVKPKRGVFYLVSIANLATPA

SEQ ID NO: 1824 - protein, 30 aa, Artificial Sequence
  Non-cyclic GFR-binding peptide
RVVIMRYKKLIKPTKGIFYLVSIANLDTPA

SEQ ID NO: 1825 - protein, 30 aa, Artificial Sequence
  Non-cyclic GFR-binding peptide
RVVVMRYKKLVKPTRGVFYLVSIANLDTPA

SEQ ID NO: 1826 - protein, 30 aa, Artificial Sequence
  Non-cyclic GFR-binding peptide
EVVMDRYKKLVVKENEDFYLVSIANLETPV

SEQ ID NO: 1827 - protein, 30 aa, Artificial Sequence
  Non-cyclic GFR-binding peptide
EVTMNRYKKLVVNKNEDFYLVSIANMKEPV

SEQ ID NO: 1828 - protein, 30 aa, Artificial Sequence
  Non-cyclic GFR-binding peptide
EVVMERYKKLVVKDYEDFYLVSIANLETPV

SEQ ID NO: 1829 - protein, 30 aa, Artificial Sequence
  Non-cyclic GFR-binding peptide
KVVMNRYKKLIVNNSSDFYLVSIANLKTPA

SEQ ID NO: 1830 - protein, 32 aa, Artificial Sequence
  Non-cyclic GFR-binding peptide
EAVSMGERYKKLTPVGMDDFYLVSIANLKTPV

SEQ ID NO: 1831 - protein, 30 aa, Artificial Sequence
  Non-cyclic GFR-binding peptide
SVAMGRYKKLYTVVGKDFYLVSIANLKTPV

SEQ ID NO: 1832 - protein, 30 aa, Artificial Sequence
  Non-cyclic GFR-binding peptide
DVVMGRYKKLIIQQKDNFYLVSIANMKTPT

SEQ ID NO: 1833 - protein, 30 aa, Artificial Sequence
  Non-cyclic GFR-binding peptide
EVVMDRYKKLVVNNAADFYLVSIANLRAPV

SEQ ID NO: 1834 - protein, 30 aa, Artificial Sequence
  Non-cyclic GFR-binding peptide
EVVMDRYKKLVVNNASDFYLVSIANLRTPV

SEQ ID NO: 1835 - protein, 30 aa, Artificial Sequence
  Non-cyclic GFR-binding peptide
EEVIMRYKKLLLVRGNDFYLVSIANTKVPA

SEQ ID NO: 1836 - protein, 30 aa, Artificial Sequence
  Non-cyclic GFR-binding peptide
SRVIMRYKKLVKPKRGVFYLVSIANLAQPV

SEQ ID NO: 1837 - protein, 30 aa, Artificial Sequence
  Non-cyclic GFR-binding peptide
SKVIMRYKKLIKPTKGIFYLVSIANLDQSV

SEQ ID NO: 1838 - protein, 30 aa, Artificial Sequence
  Non-cyclic GFR-binding peptide
SKVVMRYKKLVKPTRGVFYLVSIANLDQPV

SEQ ID NO: 1839 - protein, 32 aa, Artificial Sequence
  Non-cyclic GFR-binding peptide
NHQLFRYKKLHQGQHPKIRFYLVSIANEETPV

SEQ ID NO: 1840 - protein, 32 aa, Artificial Sequence
  Non-cyclic GFR-binding peptide
SHEELRYKKLHQGQHPKIRFYLVSIANQGTPV

SEQ ID NO: 1841 - protein, 32 aa, Artificial Sequence
  Non-cyclic GFR-binding peptide
HEELRRYKKLLKPKKRVYEFYLVSIANHHVRS

SEQ ID NO: 1842 - protein, 32 aa, Artificial Sequence
  Non-cyclic GFR-binding peptide
HDELTRYKKLFIPKKRVIEFYLVSIANLQVQT

SEQ ID NO: 1843 - protein, 30 aa, Artificial Sequence
  Non-cyclic GFR-binding peptide
KVVMDRHKRLVVKENEDYYLVSTASLETPA

SEQ ID NO: 1844 - protein, 30 aa, Artificial Sequence
  Non-cyclic GFR-binding peptide
KVVMNRHKRLVVNKNEDYYLVSTASMKTPA

SEQ ID NO: 1845 - protein, 30 aa, Artificial Sequence
  Non-cyclic GFR-binding peptide
KVVMERHKRLVVKDYEDYYLVSTASLETPA

SEQ ID NO: 1846 - protein, 30 aa, Artificial Sequence
  Non-cyclic GFR-binding peptide
KVVMNRHKRLIVNSSDDYYLVSTASLKTPA

SEQ ID NO: 1847 - protein, 30 aa, Artificial Sequence
  Non-cyclic GFR-binding peptide
KVVMNRHKRLIVNSSDDYYLVSTASLQTPA

SEQ ID NO: 1848 - protein, 32 aa, Artificial Sequence
  Non-cyclic GFR-binding peptide
KVVSMGERHKRLTPVGMDDYYLVSTASLKTPA

SEQ ID NO: 1849 - protein, 30 aa, Artificial Sequence
  Non-cyclic GFR-binding peptide
KVVMGRHKRLYTVVGKDYYLVSTASLKTPA

SEQ ID NO: 1850 - protein, 30 aa, Artificial Sequence
  Non-cyclic GFR-binding peptide
KVVMGRHKRLIIQQKDNYYLVSTASMKTPA

SEQ ID NO: 1851 - protein, 30 aa, Artificial Sequence
  Non-cyclic GFR-binding peptide
KVVMDRHKRLVVNNAADYYLVSTASLRTPA

SEQ ID NO: 1852 - protein, 30 aa, Artificial Sequence
  Non-cyclic GFR-binding peptide
KVVMDRHKRLVVNNASDYYLVSTASLRTPA

SEQ ID NO: 1853 - protein, 30 aa, Artificial Sequence
  Non-cyclic GFR-binding peptide
KVVIMRHKRLLLVRGNDYYLVSTASTKTPA

SEQ ID NO: 1854 - protein, 30 aa, Artificial Sequence
  Non-cyclic GFR-binding peptide
KVVIMRHKRLVKPKRGVYYLVSTASLATPA

SEQ ID NO: 1855 - protein, 30 aa, Artificial Sequence
  Non-cyclic GFR-binding peptide
KVVIMRHKRLIKPTKGIYYLVSTASLDTPA

SEQ ID NO: 1856 - protein, 30 aa, Artificial Sequence
  Non-cyclic GFR-binding peptide
KVVVMRHKRLVKPTRGVYYLVSTASLDTPA

SEQ ID NO: 1857 - protein, 30 aa, Artificial Sequence
  Non-cyclic GFR-binding peptide
EVVMDRHKRLVVKENEDYYLVSTASLETPV

SEQ ID NO: 1858 - protein, 30 aa, Artificial Sequence
  Non-cyclic GFR-binding peptide
EVTMNRHKRLVVNKNEDYYLVSTASMKEPV

SEQ ID NO: 1859 - protein, 30 aa, Artificial Sequence
  Non-cyclic GFR-binding peptide
EVVMERHKRLVVKDYEDYYLVSTASLETPV

SEQ ID NO: 1860 - protein, 30 aa, Artificial Sequence
  Non-cyclic GFR-binding peptide
RVVMNRHKRLIVNSSDDYYLVSTASLKTPA

SEQ ID NO: 1861 - protein, 30 aa, Artificial Sequence
  Non-cyclic GFR-binding peptide
RVVMNRHKRLIVNSSDDYYLVSTASLQTPA

SEQ ID NO: 1862 - protein, 32 aa, Artificial Sequence
  Non-cyclic GFR-binding peptide
EAVSMGERHKRLTPVGMDDYYLVSTASLKTPV

SEQ ID NO: 1863 - protein, 30 aa, Artificial Sequence
  Non-cyclic GFR-binding peptide
SVAMGRHKRLYTVVGKDYYLVSTASLKTPV

SEQ ID NO: 1864 - protein, 30 aa, Artificial Sequence
  Non-cyclic GFR-binding peptide
DVVMGRHKRLIIQQKDNYYLVSTASMKTPT

SEQ ID NO: 1865 - protein, 30 aa, Artificial Sequence
  Non-cyclic GFR-binding peptide
EVVMDRHKRLVVNNAADYYLVSTASLRAPV

SEQ ID NO: 1866 - protein, 30 aa, Artificial Sequence
  Non-cyclic GFR-binding peptide
EVVMDRHKRLVVNNASDYYLVSTASLRTPV

SEQ ID NO: 1867 - protein, 30 aa, Artificial Sequence
  Non-cyclic GFR-binding peptide
EEVIMRHKRLLLVRGNDYYLVSTASTKVPA

SEQ ID NO: 1868 - protein, 30 aa, Artificial Sequence
  Non-cyclic GFR-binding peptide
SRVIMRHKRLVKPKRGVYYLVSTASLAQPV

SEQ ID NO: 1869 - protein, 30 aa, Artificial Sequence
  Non-cyclic GFR-binding peptide
SKVIMRHKRLIKPTKGIYYLVSTASLDQSV

SEQ ID NO: 1870 - protein, 30 aa, Artificial Sequence
  Non-cyclic GFR-binding peptide
SKVVMRHKRLVKPTRGVYYLVSTASLDQPV

SEQ ID NO: 1871 - protein, 32 aa, Artificial Sequence
  Non-cyclic GFR-binding peptide
NHQLFRHKRLHQGQHPKIRYYLVSTASEETPV

SEQ ID NO: 1872 - protein, 32 aa, Artificial Sequence
  Non-cyclic GFR-binding peptide
SHEELRHKRLHQGQHPKIRYYLVSTASQGTPV

SEQ ID NO: 1873 - protein, 32 aa, Artificial Sequence
  Non-cyclic GFR-binding peptide
HEELRRHKRLLKPKKRVYEYYLVSTASHHVRS

SEQ ID NO: 1874 - protein, 32 aa, Artificial Sequence
  Non-cyclic GFR-binding peptide
HDELTRHKRLFIPKKRVIEYYLVSTASLQVQT

SEQ ID NO: 1875 - protein, 30 aa, Artificial Sequence
  Non-cyclic GFR-binding peptide
EAVMDYHYKLVVKENEDKYLVSIPSLETPV

SEQ ID NO: 1876 - protein, 30 aa, Artificial Sequence
  Non-cyclic GFR-binding peptide
EAVMNYHYKLVVNKNEDKYLVSIPSMKTPV

SEQ ID NO: 1877 - protein, 30 aa, Artificial Sequence
  Non-cyclic GFR-binding peptide
EAVMEYHYKLVVKDYEDKYLVSIPSLETPV

SEQ ID NO: 1878 - protein, 30 aa, Artificial Sequence
  Non-cyclic GFR-binding peptide
EAVMNYHYKLIVNSSDDKYLVSIPSLKTPV

SEQ ID NO: 1879 - protein, 30 aa, Artificial Sequence
  Non-cyclic GFR-binding peptide
EAVMNYHYKLIVNSSDDKYLVSIPSLQTPV

SEQ ID NO: 1880 - protein, 30 aa, Artificial Sequence
  Non-cyclic GFR-binding peptide
EAVMNYHYKLIVNNSSDKYLVSIPSLKTPV

SEQ ID NO: 1881 - protein, 30 aa, Artificial Sequence
  Non-cyclic GFR-binding peptide
EAVMGYHYKLYTVVGKDKYLVSIPSLKTPV

SEQ ID NO: 1882 - protein, 30 aa, Artificial Sequence
  Non-cyclic GFR-binding peptide
EAVMGYHYKLIIQQKDNKYLVSIPSMKTPV

SEQ ID NO: 1883 - protein, 30 aa, Artificial Sequence
  Non-cyclic GFR-binding peptide
EAVMDYHYKLVVNNAADKYLVSIPSLRTPV

SEQ ID NO: 1884 - protein, 30 aa, Artificial Sequence
  Non-cyclic GFR-binding peptide
EAVMDYHYKLVVNNASDKYLVSIPSLRTPV

SEQ ID NO: 1885 - protein, 30 aa, Artificial Sequence
  Non-cyclic GFR-binding peptide
EAVIMYHYKLLLVRGNDKYLVSIPSTKTPV

SEQ ID NO: 1886 - protein, 30 aa, Artificial Sequence
  Non-cyclic GFR-binding peptide
EAVIMYHYKLVKPKRGVKYLVSIPSLATPV

SEQ ID NO: 1887 - protein, 30 aa, Artificial Sequence
  Non-cyclic GFR-binding peptide
EAVIMYHYKLIKPTKGIKYLVSIPSLDTPV

SEQ ID NO: 1888 - protein, 30 aa, Artificial Sequence
  Non-cyclic GFR-binding peptide
EAVVMYHYKLVKPTRGVKYLVSIPSLDTPV

SEQ ID NO: 1889 - protein, 30 aa, Artificial Sequence
  Non-cyclic GFR-binding peptide
EVVMDYHYKLVVKENEDKYLVSIPSLETPV

SEQ ID NO: 1890 - protein, 30 aa, Artificial Sequence
  Non-cyclic GFR-binding peptide
EVTMNYHYKLVVNKNEDKYLVSIPSMKEPV

SEQ ID NO: 1891 - protein, 30 aa, Artificial Sequence
  Non-cyclic GFR-binding peptide
EVVMEYHYKLVVKDYEDKYLVSIPSLETPV

SEQ ID NO: 1892 - protein, 30 aa, Artificial Sequence
  Non-cyclic GFR-binding peptide
RVVMNYHYKLIVNSSDDKYLVSIPSLKTPA

SEQ ID NO: 1893 - protein, 30 aa, Artificial Sequence
  Non-cyclic GFR-binding peptide
RVVMNYHYKLIVNSSDDKYLVSIPSLQTPA

SEQ ID NO: 1894 - protein, 30 aa, Artificial Sequence
  Non-cyclic GFR-binding peptide
KVVMNYHYKLIVNNSSDKYLVSIPSLKTPA

SEQ ID NO: 1895 - protein, 30 aa, Artificial Sequence
  Non-cyclic GFR-binding peptide
SVAMGYHYKLYTVVGKDKYLVSIPSLKTPV

SEQ ID NO: 1896 - protein, 30 aa, Artificial Sequence
  Non-cyclic GFR-binding peptide
DVVMGYHYKLIIQQKDNKYLVSIPSMKTPT

SEQ ID NO: 1897 - protein, 30 aa, Artificial Sequence
  Non-cyclic GFR-binding peptide
EVVMDYHYKLVVNNAADKYLVSIPSLRAPV

SEQ ID NO: 1898 - protein, 30 aa, Artificial Sequence
  Non-cyclic GFR-binding peptide
EVVMDYHYKLVVNNASDKYLVSIPSLRTPV

SEQ ID NO: 1899 - protein, 30 aa, Artificial Sequence
  Non-cyclic GFR-binding peptide
EEVIMYHYKLLLVRGNDKYLVSIPSTKVPA

SEQ ID NO: 1900 - protein, 30 aa, Artificial Sequence
  Non-cyclic GFR-binding peptide
SRVIMYHYKLVKPKRGVKYLVSIPSLAQPV

SEQ ID NO: 1901 - protein, 30 aa, Artificial Sequence
  Non-cyclic GFR-binding peptide
SKVIMYHYKLIKPTKGIKYLVSIPSLDQSV

SEQ ID NO: 1902 - protein, 30 aa, Artificial Sequence
  Non-cyclic GFR-binding peptide
SKVVMYHYKLVKPTRGVKYLVSIPSLDQPV

SEQ ID NO: 1903 - protein, 32 aa, Artificial Sequence
  Non-cyclic GFR-binding peptide
NHQLFYHYKLHQGQHPKIRKYLVSIPSEETPV

SEQ ID NO: 1904 - protein, 32 aa, Artificial Sequence
  Non-cyclic GFR-binding peptide
SHEELYHYKLHQGQHPKIRKYLVSIPSQGTPV

SEQ ID NO: 1905 - protein, 32 aa, Artificial Sequence
  Non-cyclic GFR-binding peptide
HEELRYHYKLLKPKKRVYEKYLVSIPSHHVRS

SEQ ID NO: 1906 - protein, 32 aa, Artificial Sequence
  Non-cyclic GFR-binding peptide
HDELTYHYKLFIPKKRVIEKYLVSIPSLQVQT

SEQ ID NO: 1907 - protein, 30 aa, Artificial Sequence
  Non-cyclic GFR-binding peptide
SVAMDEYKFKVVKENEDLYLISIPELETPV

SEQ ID NO: 1908 - protein, 30 aa, Artificial Sequence
  Non-cyclic GFR-binding peptide
SVAMNEYKFKVVNKNEDLYLISIPEMKTPV

SEQ ID NO: 1909 - protein, 30 aa, Artificial Sequence
  Non-cyclic GFR-binding peptide
SVAMEEYKFKVVKDYEDLYLISIPELETPV

SEQ ID NO: 1910 - protein, 30 aa, Artificial Sequence
  Non-cyclic GFR-binding peptide
SVAMNEYKFKIVNSSDDLYLISIPELKTPV

SEQ ID NO: 1911 - protein, 30 aa, Artificial Sequence
  Non-cyclic GFR-binding peptide
SVAMNEYKFKIVNSSDDLYLISIPELQTPV

SEQ ID NO: 1912 - protein, 30 aa, Artificial Sequence
  Non-cyclic GFR-binding peptide
SVAMNEYKFKIVNNSSDLYLISIPELKTPV

SEQ ID NO: 1913 - protein, 32 aa, Artificial Sequence
  Non-cyclic GFR-binding peptide
SVASMGEEYKFKTPVGMDDLYLISIPELKTPV

SEQ ID NO: 1914 - protein, 30 aa, Artificial Sequence
  Non-cyclic GFR-binding peptide
SVAMGEYKFKIIQQKDNLYLISIPEMKTPV

SEQ ID NO: 1915 - protein, 30 aa, Artificial Sequence
  Non-cyclic GFR-binding peptide
SVAMDEYKFKVVNNAADLYLISIPELRTPV

SEQ ID NO: 1916 - protein, 30 aa, Artificial Sequence
  Non-cyclic GFR-binding peptide
SVAMDEYKFKVVNNASDLYLISIPELRTPV

SEQ ID NO: 1917 - protein, 30 aa, Artificial Sequence
  Non-cyclic GFR-binding peptide
SVAIMEYKFKLLVRGNDLYLISIPETKTPV

SEQ ID NO: 1918 - protein, 30 aa, Artificial Sequence
  Non-cyclic GFR-binding peptide
SVAIMEYKFKVKPKRGVLYLISIPELATPV

SEQ ID NO: 1919 - protein, 30 aa, Artificial Sequence
  Non-cyclic GFR-binding peptide
SVAIMEYKFKIKPTKGILYLISIPELDTPV

SEQ ID NO: 1920 - protein, 30 aa, Artificial Sequence
  Non-cyclic GFR-binding peptide
SVAVMEYKFKVKPTRGVLYLISIPELDTPV

SEQ ID NO: 1921 - protein, 30 aa, Artificial Sequence
  Non-cyclic GFR-binding peptide
EVVMDEYKFKVVKENEDLYLISIPELETPV

SEQ ID NO: 1922 - protein, 30 aa, Artificial Sequence
  Non-cyclic GFR-binding peptide
EVTMNEYKFKVVNKNEDLYLISIPEMKEPV

SEQ ID NO: 1923 - protein, 30 aa, Artificial Sequence
  Non-cyclic GFR-binding peptide
EVVMEEYKFKVVKDYEDLYLISIPELETPV

SEQ ID NO: 1924 - protein, 30 aa, Artificial Sequence
  Non-cyclic GFR-binding peptide
RVVMNEYKFKIVNSSDDLYLISIPELKTPA

SEQ ID NO: 1925 - protein, 30 aa, Artificial Sequence
  Non-cyclic GFR-binding peptide
RVVMNEYKFKIVNSSDDLYLISIPELQTPA

SEQ ID NO: 1926 - protein, 30 aa, Artificial Sequence
  Non-cyclic GFR-binding peptide
KVVMNEYKFKIVNNSSDLYLISIPELKTPA

SEQ ID NO: 1927 - protein, 32 aa, Artificial Sequence
  Non-cyclic GFR-binding peptide
EAVSMGEEYKFKTPVGMDDLYLISIPELKTPV

SEQ ID NO: 1928 - protein, 30 aa, Artificial Sequence
  Non-cyclic GFR-binding peptide
DVVMGEYKFKIIQQKDNLYLISIPEMKTPT

SEQ ID NO: 1929 - protein, 30 aa, Artificial Sequence
  Non-cyclic GFR-binding peptide
EVVMDEYKFKVVNNAADLYLISIPELRAPV

SEQ ID NO: 1930 - protein, 30 aa, Artificial Sequence
  Non-cyclic GFR-binding peptide
EVVMDEYKFKVVNNASDLYLISIPELRTPV

SEQ ID NO: 1931 - protein, 30 aa, Artificial Sequence
  Non-cyclic GFR-binding peptide
EEVIMEYKFKLLVRGNDLYLISIPETKVPA

SEQ ID NO: 1932 - protein, 30 aa, Artificial Sequence
  Non-cyclic GFR-binding peptide
SRVIMEYKFKVKPKRGVLYLISIPELAQPV

SEQ ID NO: 1933 - protein, 30 aa, Artificial Sequence
  Non-cyclic GFR-binding peptide
SKVIMEYKFKIKPTKGILYLISIPELDQSV

SEQ ID NO: 1934 - protein, 30 aa, Artificial Sequence
  Non-cyclic GFR-binding peptide
SKVVMEYKFKVKPTRGVLYLISIPELDQPV

SEQ ID NO: 1935 - protein, 32 aa, Artificial Sequence
  Non-cyclic GFR-binding peptide
NHQLFEYKFKHQGQHPKIRLYLISIPEEETPV

SEQ ID NO: 1936 - protein, 32 aa, Artificial Sequence
  Non-cyclic GFR-binding peptide
SHEELEYKFKHQGQHPKIRLYLISIPEQGTPV

SEQ ID NO: 1937 - protein, 32 aa, Artificial Sequence
  Non-cyclic GFR-binding peptide
HEELREYKFKLKPKKRVYELYLISIPEHHVRS

SEQ ID NO: 1938 - protein, 32 aa, Artificial Sequence
  Non-cyclic GFR-binding peptide
HDELTEYKFKFIPKKRVIELYLISIPELQVQT

SEQ ID NO: 1939 - protein, 30 aa, Artificial Sequence
  Non-cyclic GFR-binding peptide
DVVMDPIKGYVVKENEDFYLMNIPSLETPT

SEQ ID NO: 1940 - protein, 30 aa, Artificial Sequence
  Non-cyclic GFR-binding peptide
DVVMNPIKGYVVNKNEDFYLMNIPSMKTPT

SEQ ID NO: 1941 - protein, 30 aa, Artificial Sequence
  Non-cyclic GFR-binding peptide
DVVMEPIKGYVVKDYEDFYLMNIPSLETPT

SEQ ID NO: 1942 - protein, 30 aa, Artificial Sequence
  Non-cyclic GFR-binding peptide
DVVMNPIKGYIVNSSDDFYLMNIPSLKTPT

SEQ ID NO: 1943 - protein, 30 aa, Artificial Sequence
  Non-cyclic GFR-binding peptide
DVVMNPIKGYIVNSSDDFYLMNIPSLQTPT

SEQ ID NO: 1944 - protein, 30 aa, Artificial Sequence
  Non-cyclic GFR-binding peptide
DVVMNPIKGYIVNNSSDFYLMNIPSLKTPT

SEQ ID NO: 1945 - protein, 32 aa, Artificial Sequence
  Non-cyclic GFR-binding peptide
DVVSMGEPIKGYTPVGMDDFYLMNIPSLKTPT

SEQ ID NO: 1946 - protein, 30 aa, Artificial Sequence
  Non-cyclic GFR-binding peptide
DVVMGPIKGYYTVVGKDFYLMNIPSLKTPT

SEQ ID NO: 1947 - protein, 30 aa, Artificial Sequence
  Non-cyclic GFR-binding peptide
DVVMDPIKGYVVNNAADFYLMNIPSLRTPT

SEQ ID NO: 1948 - protein, 30 aa, Artificial Sequence
  Non-cyclic GFR-binding peptide
DVVMDPIKGYVVNNASDFYLMNIPSLRTPT

SEQ ID NO: 1949 - protein, 30 aa, Artificial Sequence
  Non-cyclic GFR-binding peptide
DVVIMPIKGYLLVRGNDFYLMNIPSTKTPT

SEQ ID NO: 1950 - protein, 30 aa, Artificial Sequence
  Non-cyclic GFR-binding peptide
DVVIMPIKGYVKPKRGVFYLMNIPSLATPT

SEQ ID NO: 1951 - protein, 30 aa, Artificial Sequence
  Non-cyclic GFR-binding peptide
DVVIMPIKGYIKPTKGIFYLMNIPSLDTPT

SEQ ID NO: 1952 - protein, 30 aa, Artificial Sequence
  Non-cyclic GFR-binding peptide
DVVVMPIKGYVKPTRGVFYLMNIPSLDTPT

SEQ ID NO: 1953 - protein, 30 aa, Artificial Sequence
  Non-cyclic GFR-binding peptide
EVVMDPIKGYVVKENEDFYLMNIPSLETPV

SEQ ID NO: 1954 - protein, 30 aa, Artificial Sequence
  Non-cyclic GFR-binding peptide
EVTMNPIKGYVVNKNEDFYLMNIPSMKEPV

SEQ ID NO: 1955 - protein, 30 aa, Artificial Sequence
  Non-cyclic GFR-binding peptide
EVVMEPIKGYVVKDYEDFYLMNIPSLETPV

SEQ ID NO: 1956 - protein, 30 aa, Artificial Sequence
  Non-cyclic GFR-binding peptide
RVVMNPIKGYIVNSSDDFYLMNIPSLKTPA

SEQ ID NO: 1957 - protein, 30 aa, Artificial Sequence
  Non-cyclic GFR-binding peptide
RVVMNPIKGYIVNSSDDFYLMNIPSLQTPA

SEQ ID NO: 1958 - protein, 30 aa, Artificial Sequence
  Non-cyclic GFR-binding peptide
KVVMNPIKGYIVNNSSDFYLMNIPSLKTPA

SEQ ID NO: 1959 - protein, 32 aa, Artificial Sequence
  Non-cyclic GFR-binding peptide
EAVSMGEPIKGYTPVGMDDFYLMNIPSLKTPV

SEQ ID NO: 1960 - protein, 30 aa, Artificial Sequence
  Non-cyclic GFR-binding peptide
SVAMGPIKGYYTVVGKDFYLMNIPSLKTPV

SEQ ID NO: 1961 - protein, 30 aa, Artificial Sequence
  Non-cyclic GFR-binding peptide
EVVMDPIKGYVVNNAADFYLMNIPSLRAPV

SEQ ID NO: 1962 - protein, 30 aa, Artificial Sequence
  Non-cyclic GFR-binding peptide
EVVMDPIKGYVVNNASDFYLMNIPSLRTPV

SEQ ID NO: 1963 - protein, 30 aa, Artificial Sequence
  Non-cyclic GFR-binding peptide
EEVIMPIKGYLLVRGNDFYLMNIPSTKVPA

SEQ ID NO: 1964 - protein, 30 aa, Artificial Sequence
  Non-cyclic GFR-binding peptide
SRVIMPIKGYVKPKRGVFYLMNIPSLAQPV

SEQ ID NO: 1965 - protein, 30 aa, Artificial Sequence
  Non-cyclic GFR-binding peptide
SKVIMPIKGYIKPTKGIFYLMNIPSLDQSV

SEQ ID NO: 1966 - protein, 30 aa, Artificial Sequence
  Non-cyclic GFR-binding peptide
SKVVMPIKGYVKPTRGVFYLMNIPSLDQPV

SEQ ID NO: 1967 - protein, 32 aa, Artificial Sequence
  Non-cyclic GFR-binding peptide
NHQLFPIKGYHQGQHPKIRFYLMNIPSEETPV

SEQ ID NO: 1968 - protein, 32 aa, Artificial Sequence
  Non-cyclic GFR-binding peptide
SHEELPIKGYHQGQHPKIRFYLMNIPSQGTPV

SEQ ID NO: 1969 - protein, 32 aa, Artificial Sequence
  Non-cyclic GFR-binding peptide
HEELRPIKGYLKPKKRVYEFYLMNIPSHHVRS

SEQ ID NO: 1970 - protein, 32 aa, Artificial Sequence
  Non-cyclic GFR-binding peptide
HDELTPIKGYFIPKKRVIEFYLMNIPSLQVQT

SEQ ID NO: 1971 - protein, 30 aa, Artificial Sequence
  Non-cyclic GFR-binding peptide
EVVMDEYQKYVVKENEDIYLISIPSLEAPV

SEQ ID NO: 1972 - protein, 30 aa, Artificial Sequence
  Non-cyclic GFR-binding peptide
EVVMNEYQKYVVNKNEDIYLISIPSMKAPV

SEQ ID NO: 1973 - protein, 30 aa, Artificial Sequence
  Non-cyclic GFR-binding peptide
EVVMEEYQKYVVKDYEDIYLISIPSLEAPV

SEQ ID NO: 1974 - protein, 30 aa, Artificial Sequence
  Non-cyclic GFR-binding peptide
EVVMNEYQKYIVNSSDDIYLISIPSLKAPV

SEQ ID NO: 1975 - protein, 30 aa, Artificial Sequence
  Non-cyclic GFR-binding peptide
EVVMNEYQKYIVNSSDDIYLISIPSLQAPV

SEQ ID NO: 1976 - protein, 30 aa, Artificial Sequence
  Non-cyclic GFR-binding peptide
EVVMNEYQKYIVNNSSDIYLISIPSLKAPV

SEQ ID NO: 1977 - protein, 32 aa, Artificial Sequence
  Non-cyclic GFR-binding peptide
EVVSMGEEYQKYTPVGMDDIYLISIPSLKAPV

SEQ ID NO: 1978 - protein, 30 aa, Artificial Sequence
  Non-cyclic GFR-binding peptide
EVVMGEYQKYYTVVGKDIYLISIPSLKAPV

SEQ ID NO: 1979 - protein, 30 aa, Artificial Sequence
  Non-cyclic GFR-binding peptide
EVVMGEYQKYIIQQKDNIYLISIPSMKAPV

SEQ ID NO: 1980 - protein, 30 aa, Artificial Sequence
  Non-cyclic GFR-binding peptide
EVVMDEYQKYVVNNASDIYLISIPSLRAPV

SEQ ID NO: 1981 - protein, 30 aa, Artificial Sequence
  Non-cyclic GFR-binding peptide
EVVIMEYQKYLLVRGNDIYLISIPSTKAPV

SEQ ID NO: 1982 - protein, 30 aa, Artificial Sequence
  Non-cyclic GFR-binding peptide
EVVIMEYQKYVKPKRGVIYLISIPSLAAPV

SEQ ID NO: 1983 - protein, 30 aa, Artificial Sequence
  Non-cyclic GFR-binding peptide
EVVIMEYQKYIKPTKGIIYLISIPSLDAPV

SEQ ID NO: 1984 - protein, 30 aa, Artificial Sequence
  Non-cyclic GFR-binding peptide
EVVVMEYQKYVKPTRGVIYLISIPSLDAPV

SEQ ID NO: 1985 - protein, 30 aa, Artificial Sequence
  Non-cyclic GFR-binding peptide
EVVMDEYQKYVVKENEDIYLISIPSLETPV

SEQ ID NO: 1986 - protein, 30 aa, Artificial Sequence
  Non-cyclic GFR-binding peptide
EVTMNEYQKYVVNKNEDIYLISIPSMKEPV

SEQ ID NO: 1987 - protein, 30 aa, Artificial Sequence
  Non-cyclic GFR-binding peptide
EVVMEEYQKYVVKDYEDIYLISIPSLETPV

SEQ ID NO: 1988 - protein, 30 aa, Artificial Sequence
  Non-cyclic GFR-binding peptide
RVVMNEYQKYIVNSSDDIYLISIPSLKTPA

SEQ ID NO: 1989 - protein, 30 aa, Artificial Sequence
  Non-cyclic GFR-binding peptide
RVVMNEYQKYIVNSSDDIYLISIPSLQTPA

SEQ ID NO: 1990 - protein, 30 aa, Artificial Sequence
  Non-cyclic GFR-binding peptide
KVVMNEYQKYIVNNSSDIYLISIPSLKTPA

SEQ ID NO: 1991 - protein, 30 aa, Artificial Sequence
  Non-cyclic GFR-binding peptide
SVAMGEYQKYYTVVGKDIYLISIPSLKTPV

SEQ ID NO: 1992 - protein, 30 aa, Artificial Sequence
  Non-cyclic GFR-binding peptide
DVVMGEYQKYIIQQKDNIYLISIPSMKTPT

SEQ ID NO: 1993 - protein, 30 aa, Artificial Sequence
  Non-cyclic GFR-binding peptide
EVVMDEYQKYVVNNASDIYLISIPSLRTPV

SEQ ID NO: 1994 - protein, 30 aa, Artificial Sequence
  Non-cyclic GFR-binding peptide
EEVIMEYQKYLLVRGNDIYLISIPSTKVPA

SEQ ID NO: 1995 - protein, 30 aa, Artificial Sequence
  Non-cyclic GFR-binding peptide
SRVIMEYQKYVKPKRGVIYLISIPSLAQPV

SEQ ID NO: 1996 - protein, 30 aa, Artificial Sequence
  Non-cyclic GFR-binding peptide
SKVIMEYQKYIKPTKGIIYLISIPSLDQSV

SEQ ID NO: 1997 - protein, 30 aa, Artificial Sequence
  Non-cyclic GFR-binding peptide
SKVVMEYQKYVKPTRGVIYLISIPSLDQPV

SEQ ID NO: 1998 - protein, 32 aa, Artificial Sequence
  Non-cyclic GFR-binding peptide
NHQLFEYQKYHQGQHPKIRIYLISIPSEETPV

SEQ ID NO: 1999 - protein, 32 aa, Artificial Sequence
  Non-cyclic GFR-binding peptide
SHEELEYQKYHQGQHPKIRIYLISIPSQGTPV

SEQ ID NO: 2000 - protein, 32 aa, Artificial Sequence
  Non-cyclic GFR-binding peptide
HEELREYQKYLKPKKRVYEIYLISIPSHHVRS

SEQ ID NO: 2001 - protein, 32 aa, Artificial Sequence
  Non-cyclic GFR-binding peptide
HDELTEYQKYFIPKKRVIEIYLISIPSLQVQT

SEQ ID NO: 2002 - protein, 30 aa, Artificial Sequence
  Non-cyclic GFR-binding peptide
EVVMDEYQKYVVKENEDIFLISIPSLETPV

SEQ ID NO: 2003 - protein, 30 aa, Artificial Sequence
  Non-cyclic GFR-binding peptide
EVVMNEYQKYVVNKNEDIFLISIPSMKTPV

SEQ ID NO: 2004 - protein, 30 aa, Artificial Sequence
  Non-cyclic GFR-binding peptide
EVVMEEYQKYVVKDYEDIFLISIPSLETPV

SEQ ID NO: 2005 - protein, 30 aa, Artificial Sequence
  Non-cyclic GFR-binding peptide
EVVMNEYQKYIVNSSDDIFLISIPSLKTPV

SEQ ID NO: 2006 - protein, 30 aa, Artificial Sequence
  Non-cyclic GFR-binding peptide
EVVMNEYQKYIVNSSDDIFLISIPSLQTPV

SEQ ID NO: 2007 - protein, 30 aa, Artificial Sequence
  Non-cyclic GFR-binding peptide
EVVMNEYQKYIVNNSSDIFLISIPSLKTPV

SEQ ID NO: 2008 - protein, 32 aa, Artificial Sequence
  Non-cyclic GFR-binding peptide
EVVSMGEEYQKYTPVGMDDIFLISIPSLKTPV

SEQ ID NO: 2009 - protein, 30 aa, Artificial Sequence
  Non-cyclic GFR-binding peptide
EVVMGEYQKYYTVVGKDIFLISIPSLKTPV

SEQ ID NO: 2010 - protein, 30 aa, Artificial Sequence
  Non-cyclic GFR-binding peptide
EVVMGEYQKYIIQQKDNIFLISIPSMKTPV

SEQ ID NO: 2011 - protein, 30 aa, Artificial Sequence
  Non-cyclic GFR-binding peptide
EVVMDEYQKYVVNNAADIFLISIPSLRTPV

SEQ ID NO: 2012 - protein, 30 aa, Artificial Sequence
  Non-cyclic GFR-binding peptide
EVVIMEYQKYLLVRGNDIFLISIPSTKTPV

SEQ ID NO: 2013 - protein, 30 aa, Artificial Sequence
  Non-cyclic GFR-binding peptide
EVVIMEYQKYVKPKRGVIFLISIPSLATPV

SEQ ID NO: 2014 - protein, 30 aa, Artificial Sequence
  Non-cyclic GFR-binding peptide
EVVIMEYQKYIKPTKGIIFLISIPSLDTPV

SEQ ID NO: 2015 - protein, 30 aa, Artificial Sequence
  Non-cyclic GFR-binding peptide
EVVVMEYQKYVKPTRGVIFLISIPSLDTPV

SEQ ID NO: 2016 - protein, 30 aa, Artificial Sequence
  Non-cyclic GFR-binding peptide
EVTMNEYQKYVVNKNEDIFLISIPSMKEPV

SEQ ID NO: 2017 - protein, 30 aa, Artificial Sequence
  Non-cyclic GFR-binding peptide
RVVMNEYQKYIVNSSDDIFLISIPSLKTPA

SEQ ID NO: 2018 - protein, 30 aa, Artificial Sequence
  Non-cyclic GFR-binding peptide
RVVMNEYQKYIVNSSDDIFLISIPSLQTPA

SEQ ID NO: 2019 - protein, 30 aa, Artificial Sequence
  Non-cyclic GFR-binding peptide
KVVMNEYQKYIVNNSSDIFLISIPSLKTPA

SEQ ID NO: 2020 - protein, 32 aa, Artificial Sequence
  Non-cyclic GFR-binding peptide
EAVSMGEEYQKYTPVGMDDIFLISIPSLKTPV

SEQ ID NO: 2021 - protein, 30 aa, Artificial Sequence
  Non-cyclic GFR-binding peptide
SVAMGEYQKYYTVVGKDIFLISIPSLKTPV

SEQ ID NO: 2022 - protein, 30 aa, Artificial Sequence
  Non-cyclic GFR-binding peptide
DVVMGEYQKYIIQQKDNIFLISIPSMKTPT

SEQ ID NO: 2023 - protein, 30 aa, Artificial Sequence
  Non-cyclic GFR-binding peptide
EVVMDEYQKYVVNNAADIFLISIPSLRAPV

SEQ ID NO: 2024 - protein, 30 aa, Artificial Sequence
  Non-cyclic GFR-binding peptide
EEVIMEYQKYLLVRGNDIFLISIPSTKVPA

SEQ ID NO: 2025 - protein, 30 aa, Artificial Sequence
  Non-cyclic GFR-binding peptide
SRVIMEYQKYVKPKRGVIFLISIPSLAQPV

SEQ ID NO: 2026 - protein, 30 aa, Artificial Sequence
  Non-cyclic GFR-binding peptide
SKVIMEYQKYIKPTKGIIFLISIPSLDQSV

SEQ ID NO: 2027 - protein, 30 aa, Artificial Sequence
  Non-cyclic GFR-binding peptide
SKVVMEYQKYVKPTRGVIFLISIPSLDQPV

SEQ ID NO: 2028 - protein, 32 aa, Artificial Sequence
  Non-cyclic GFR-binding peptide
NHQLFEYQKYHQGQHPKIRIFLISIPSEETPV

SEQ ID NO: 2029 - protein, 32 aa, Artificial Sequence
  Non-cyclic GFR-binding peptide
SHEELEYQKYHQGQHPKIRIFLISIPSQGTPV

SEQ ID NO: 2030 - protein, 32 aa, Artificial Sequence
  Non-cyclic GFR-binding peptide
HEELREYQKYLKPKKRVYEIFLISIPSHHVRS

SEQ ID NO: 2031 - protein, 32 aa, Artificial Sequence
  Non-cyclic GFR-binding peptide
HDELTEYQKYFIPKKRVIEIFLISIPSLQVQT

SEQ ID NO: 2032 - protein, 30 aa, Artificial Sequence
  Non-cyclic GFR-binding peptide
EEVMDDKHHDVVKENEDVYLMSLPKLEVPA

SEQ ID NO: 2033 - protein, 30 aa, Artificial Sequence
  Non-cyclic GFR-binding peptide
EEVMNDKHHDVVNKNEDVYLMSLPKMKVPA

SEQ ID NO: 2034 - protein, 30 aa, Artificial Sequence
  Non-cyclic GFR-binding peptide
EEVMEDKHHDVVKDYEDVYLMSLPKLEVPA

SEQ ID NO: 2035 - protein, 30 aa, Artificial Sequence
  Non-cyclic GFR-binding peptide
EEVMNDKHHDIVNSSDDVYLMSLPKLKVPA

SEQ ID NO: 2036 - protein, 30 aa, Artificial Sequence
  Non-cyclic GFR-binding peptide
EEVMNDKHHDIVNSSDDVYLMSLPKLQVPA

SEQ ID NO: 2037 - protein, 30 aa, Artificial Sequence
  Non-cyclic GFR-binding peptide
EEVMNDKHHDIVNNSSDVYLMSLPKLKVPA

SEQ ID NO: 2038 - protein, 32 aa, Artificial Sequence
  Non-cyclic GFR-binding peptide
EEVSMGEDKHHDTPVGMDDVYLMSLPKLKVPA

SEQ ID NO: 2039 - protein, 30 aa, Artificial Sequence
  Non-cyclic GFR-binding peptide
EEVMGDKHHDYTVVGKDVYLMSLPKLKVPA

SEQ ID NO: 2040 - protein, 30 aa, Artificial Sequence
  Non-cyclic GFR-binding peptide
EEVMGDKHHDIIQQKDNVYLMSLPKMKVPA

SEQ ID NO: 2041 - protein, 30 aa, Artificial Sequence
  Non-cyclic GFR-binding peptide
EEVMDDKHHDVVNNAADVYLMSLPKLRVPA

SEQ ID NO: 2042 - protein, 30 aa, Artificial Sequence
  Non-cyclic GFR-binding peptide
EEVMDDKHHDVVNNASDVYLMSLPKLRVPA

SEQ ID NO: 2043 - protein, 30 aa, Artificial Sequence
  Non-cyclic GFR-binding peptide
EEVIMDKHHDVKPKRGVVYLMSLPKLAVPA

SEQ ID NO: 2044 - protein, 30 aa, Artificial Sequence
  Non-cyclic GFR-binding peptide
EEVIMDKHHDIKPTKGIVYLMSLPKLDVPA

SEQ ID NO: 2045 - protein, 30 aa, Artificial Sequence
  Non-cyclic GFR-binding peptide
EEVVMDKHHDVKPTRGVVYLMSLPKLDVPA

SEQ ID NO: 2046 - protein, 30 aa, Artificial Sequence
  Non-cyclic GFR-binding peptide
EVVMDDKHHDVVKENEDVYLMSLPKLETPV

SEQ ID NO: 2047 - protein, 30 aa, Artificial Sequence
  Non-cyclic GFR-binding peptide
EVTMNDKHHDVVNKNEDVYLMSLPKMKEPV

SEQ ID NO: 2048 - protein, 30 aa, Artificial Sequence
  Non-cyclic GFR-binding peptide
EVVMEDKHHDVVKDYEDVYLMSLPKLETPV

SEQ ID NO: 2049 - protein, 30 aa, Artificial Sequence
  Non-cyclic GFR-binding peptide
RVVMNDKHHDIVNSSDDVYLMSLPKLKTPA

SEQ ID NO: 2050 - protein, 30 aa, Artificial Sequence
  Non-cyclic GFR-binding peptide
RVVMNDKHHDIVNSSDDVYLMSLPKLQTPA

SEQ ID NO: 2051 - protein, 30 aa, Artificial Sequence
  Non-cyclic GFR-binding peptide
KVVMNDKHHDIVNNSSDVYLMSLPKLKTPA

SEQ ID NO: 2052 - protein, 32 aa, Artificial Sequence
  Non-cyclic GFR-binding peptide
EAVSMGEDKHHDTPVGMDDVYLMSLPKLKTPV

SEQ ID NO: 2053 - protein, 30 aa, Artificial Sequence
  Non-cyclic GFR-binding peptide
SVAMGDKHHDYTVVGKDVYLMSLPKLKTPV

SEQ ID NO: 2054 - protein, 30 aa, Artificial Sequence
  Non-cyclic GFR-binding peptide
DVVMGDKHHDIIQQKDNVYLMSLPKMKTPT

SEQ ID NO: 2055 - protein, 30 aa, Artificial Sequence
  Non-cyclic GFR-binding peptide
EVVMDDKHHDVVNNAADVYLMSLPKLRAPV

SEQ ID NO: 2056 - protein, 30 aa, Artificial Sequence
  Non-cyclic GFR-binding peptide
EVVMDDKHHDVVNNASDVYLMSLPKLRTPV

SEQ ID NO: 2057 - protein, 30 aa, Artificial Sequence
  Non-cyclic GFR-binding peptide
SRVIMDKHHDVKPKRGVVYLMSLPKLAQPV

SEQ ID NO: 2058 - protein, 30 aa, Artificial Sequence
  Non-cyclic GFR-binding peptide
SKVIMDKHHDIKPTKGIVYLMSLPKLDQSV

SEQ ID NO: 2059 - protein, 30 aa, Artificial Sequence
  Non-cyclic GFR-binding peptide
SKVVMDKHHDVKPTRGVVYLMSLPKLDQPV

SEQ ID NO: 2060 - protein, 32 aa, Artificial Sequence
  Non-cyclic GFR-binding peptide
NHQLFDKHHDHQGQHPKIRVYLMSLPKEETPV

SEQ ID NO: 2061 - protein, 32 aa, Artificial Sequence
  Non-cyclic GFR-binding peptide
SHEELDKHHDHQGQHPKIRVYLMSLPKQGTPV

SEQ ID NO: 2062 - protein, 32 aa, Artificial Sequence
  Non-cyclic GFR-binding peptide
HEELRDKHHDLKPKKRVYEVYLMSLPKHHVRS

SEQ ID NO: 2063 - protein, 32 aa, Artificial Sequence
  Non-cyclic GFR-binding peptide
HDELTDKHHDFIPKKRVIEVYLMSLPKLQVQT

SEQ ID NO: 2064 - protein, 30 aa, Artificial Sequence
  Non-cyclic GFR-binding peptide
SRVMDNSLQEVVKENEDYYVIPLPELEQPV

SEQ ID NO: 2065 - protein, 30 aa, Artificial Sequence
  Non-cyclic GFR-binding peptide
SRVMNNSLQEVVNKNEDYYVIPLPEMKQPV

SEQ ID NO: 2066 - protein, 30 aa, Artificial Sequence
  Non-cyclic GFR-binding peptide
SRVMENSLQEVVKDYEDYYVIPLPELEQPV

SEQ ID NO: 2067 - protein, 30 aa, Artificial Sequence
  Non-cyclic GFR-binding peptide
SRVMNNSLQEIVNSSDDYYVIPLPELKQPV

SEQ ID NO: 2068 - protein, 30 aa, Artificial Sequence
  Non-cyclic GFR-binding peptide
SRVMNNSLQEIVNSSDDYYVIPLPELQQPV

SEQ ID NO: 2069 - protein, 30 aa, Artificial Sequence
  Non-cyclic GFR-binding peptide
SRVMNNSLQEIVNNSSDYYVIPLPELKQPV

SEQ ID NO: 2070 - protein, 32 aa, Artificial Sequence
  Non-cyclic GFR-binding peptide
SRVSMGENSLQETPVGMDDYYVIPLPELKQPV

SEQ ID NO: 2071 - protein, 30 aa, Artificial Sequence
  Non-cyclic GFR-binding peptide
SRVMGNSLQEYTVVGKDYYVIPLPELKQPV

SEQ ID NO: 2072 - protein, 30 aa, Artificial Sequence
  Non-cyclic GFR-binding peptide
SRVMGNSLQEIIQQKDNYYVIPLPEMKQPV

SEQ ID NO: 2073 - protein, 30 aa, Artificial Sequence
  Non-cyclic GFR-binding peptide
SRVMDNSLQEVVNNAADYYVIPLPELRQPV

SEQ ID NO: 2074 - protein, 30 aa, Artificial Sequence
  Non-cyclic GFR-binding peptide
SRVMDNSLQEVVNNASDYYVIPLPELRQPV

SEQ ID NO: 2075 - protein, 30 aa, Artificial Sequence
  Non-cyclic GFR-binding peptide
SRVIMNSLQELLVRGNDYYVIPLPETKQPV

SEQ ID NO: 2076 - protein, 30 aa, Artificial Sequence
  Non-cyclic GFR-binding peptide
SRVIMNSLQEIKPTKGIYYVIPLPELDQPV

SEQ ID NO: 2077 - protein, 30 aa, Artificial Sequence
  Non-cyclic GFR-binding peptide
SRVVMNSLQEVKPTRGVYYVIPLPELDQPV

SEQ ID NO: 2078 - protein, 30 aa, Artificial Sequence
  Non-cyclic GFR-binding peptide
EVVMDNSLQEVVKENEDYYVIPLPELETPV

SEQ ID NO: 2079 - protein, 30 aa, Artificial Sequence
  Non-cyclic GFR-binding peptide
EVTMNNSLQEVVNKNEDYYVIPLPEMKEPV

SEQ ID NO: 2080 - protein, 30 aa, Artificial Sequence
  Non-cyclic GFR-binding peptide
EVVMENSLQEVVKDYEDYYVIPLPELETPV

SEQ ID NO: 2081 - protein, 30 aa, Artificial Sequence
  Non-cyclic GFR-binding peptide
RVVMNNSLQEIVNSSDDYYVIPLPELKTPA

SEQ ID NO: 2082 - protein, 30 aa, Artificial Sequence
  Non-cyclic GFR-binding peptide
RVVMNNSLQEIVNSSDDYYVIPLPELQTPA

SEQ ID NO: 2083 - protein, 30 aa, Artificial Sequence
  Non-cyclic GFR-binding peptide
KVVMNNSLQEIVNNSSDYYVIPLPELKTPA

SEQ ID NO: 2084 - protein, 32 aa, Artificial Sequence
  Non-cyclic GFR-binding peptide
EAVSMGENSLQETPVGMDDYYVIPLPELKTPV

SEQ ID NO: 2085 - protein, 30 aa, Artificial Sequence
  Non-cyclic GFR-binding peptide
SVAMGNSLQEYTVVGKDYYVIPLPELKTPV

SEQ ID NO: 2086 - protein, 30 aa, Artificial Sequence
  Non-cyclic GFR-binding peptide
DVVMGNSLQEIIQQKDNYYVIPLPEMKTPT

SEQ ID NO: 2087 - protein, 30 aa, Artificial Sequence
  Non-cyclic GFR-binding peptide
EVVMDNSLQEVVNNAADYYVIPLPELRAPV

SEQ ID NO: 2088 - protein, 30 aa, Artificial Sequence
  Non-cyclic GFR-binding peptide
EVVMDNSLQEVVNNASDYYVIPLPELRTPV

SEQ ID NO: 2089 - protein, 30 aa, Artificial Sequence
  Non-cyclic GFR-binding peptide
EEVIMNSLQELLVRGNDYYVIPLPETKVPA

SEQ ID NO: 2090 - protein, 30 aa, Artificial Sequence
  Non-cyclic GFR-binding peptide
SKVIMNSLQEIKPTKGIYYVIPLPELDQSV

SEQ ID NO: 2091 - protein, 30 aa, Artificial Sequence
  Non-cyclic GFR-binding peptide
SKVVMNSLQEVKPTRGVYYVIPLPELDQPV

SEQ ID NO: 2092 - protein, 32 aa, Artificial Sequence
  Non-cyclic GFR-binding peptide
NHQLFNSLQEHQGQHPKIRYYVIPLPEEETPV

SEQ ID NO: 2093 - protein, 32 aa, Artificial Sequence
  Non-cyclic GFR-binding peptide
SHEELNSLQEHQGQHPKIRYYVIPLPEQGTPV

SEQ ID NO: 2094 - protein, 32 aa, Artificial Sequence
  Non-cyclic GFR-binding peptide
HEELRNSLQELKPKKRVYEYYVIPLPEHHVRS

SEQ ID NO: 2095 - protein, 32 aa, Artificial Sequence
  Non-cyclic GFR-binding peptide
HDELTNSLQEFIPKKRVIEYYVIPLPELQVQT

SEQ ID NO: 2096 - protein, 30 aa, Artificial Sequence
  Non-cyclic GFR-binding peptide
SKVMDNSLQEVVKENEDYYLITLPELEQSV

SEQ ID NO: 2097 - protein, 30 aa, Artificial Sequence
  Non-cyclic GFR-binding peptide
SKVMNNSLQEVVNKNEDYYLITLPEMKQSV

SEQ ID NO: 2098 - protein, 30 aa, Artificial Sequence
  Non-cyclic GFR-binding peptide
SKVMENSLQEVVKDYEDYYLITLPELEQSV

SEQ ID NO: 2099 - protein, 30 aa, Artificial Sequence
  Non-cyclic GFR-binding peptide
SKVMNNSLQEIVNSSDDYYLITLPELKQSV

SEQ ID NO: 2100 - protein, 30 aa, Artificial Sequence
  Non-cyclic GFR-binding peptide
SKVMNNSLQEIVNSSDDYYLITLPELQQSV

SEQ ID NO: 2101 - protein, 30 aa, Artificial Sequence
  Non-cyclic GFR-binding peptide
SKVMNNSLQEIVNNSSDYYLITLPELKQSV

SEQ ID NO: 2102 - protein, 32 aa, Artificial Sequence
  Non-cyclic GFR-binding peptide
SKVSMGENSLQETPVGMDDYYLITLPELKQSV

SEQ ID NO: 2103 - protein, 30 aa, Artificial Sequence
  Non-cyclic GFR-binding peptide
SKVMGNSLQEYTVVGKDYYLITLPELKQSV

SEQ ID NO: 2104 - protein, 30 aa, Artificial Sequence
  Non-cyclic GFR-binding peptide
SKVMGNSLQEIIQQKDNYYLITLPEMKQSV

SEQ ID NO: 2105 - protein, 30 aa, Artificial Sequence
  Non-cyclic GFR-binding peptide
SKVMDNSLQEVVNNAADYYLITLPELRQSV

SEQ ID NO: 2106 - protein, 30 aa, Artificial Sequence
  Non-cyclic GFR-binding peptide
SKVMDNSLQEVVNNASDYYLITLPELRQSV

SEQ ID NO: 2107 - protein, 30 aa, Artificial Sequence
  Non-cyclic GFR-binding peptide
SKVIMNSLQELLVRGNDYYLITLPETKQSV

SEQ ID NO: 2108 - protein, 30 aa, Artificial Sequence
  Non-cyclic GFR-binding peptide
SKVIMNSLQEVKPKRGVYYLITLPELAQSV

SEQ ID NO: 2109 - protein, 30 aa, Artificial Sequence
  Non-cyclic GFR-binding peptide
SKVVMNSLQEVKPTRGVYYLITLPELDQSV

SEQ ID NO: 2110 - protein, 30 aa, Artificial Sequence
  Non-cyclic GFR-binding peptide
EVVMDNSLQEVVKENEDYYLITLPELETPV

SEQ ID NO: 2111 - protein, 30 aa, Artificial Sequence
  Non-cyclic GFR-binding peptide
EVTMNNSLQEVVNKNEDYYLITLPEMKEPV

SEQ ID NO: 2112 - protein, 30 aa, Artificial Sequence
  Non-cyclic GFR-binding peptide
EVVMENSLQEVVKDYEDYYLITLPELETPV

SEQ ID NO: 2113 - protein, 30 aa, Artificial Sequence
  Non-cyclic GFR-binding peptide
RVVMNNSLQEIVNSSDDYYLITLPELKTPA

SEQ ID NO: 2114 - protein, 30 aa, Artificial Sequence
  Non-cyclic GFR-binding peptide
RVVMNNSLQEIVNSSDDYYLITLPELQTPA

SEQ ID NO: 2115 - protein, 30 aa, Artificial Sequence
  Non-cyclic GFR-binding peptide
KVVMNNSLQEIVNNSSDYYLITLPELKTPA

SEQ ID NO: 2116 - protein, 32 aa, Artificial Sequence
  Non-cyclic GFR-binding peptide
EAVSMGENSLQETPVGMDDYYLITLPELKTPV

SEQ ID NO: 2117 - protein, 30 aa, Artificial Sequence
  Non-cyclic GFR-binding peptide
SVAMGNSLQEYTVVGKDYYLITLPELKTPV

SEQ ID NO: 2118 - protein, 30 aa, Artificial Sequence
  Non-cyclic GFR-binding peptide
DVVMGNSLQEIIQQKDNYYLITLPEMKTPT

SEQ ID NO: 2119 - protein, 30 aa, Artificial Sequence
  Non-cyclic GFR-binding peptide
EVVMDNSLQEVVNNAADYYLITLPELRAPV

SEQ ID NO: 2120 - protein, 30 aa, Artificial Sequence
  Non-cyclic GFR-binding peptide
EVVMDNSLQEVVNNASDYYLITLPELRTPV

SEQ ID NO: 2121 - protein, 30 aa, Artificial Sequence
  Non-cyclic GFR-binding peptide
EEVIMNSLQELLVRGNDYYLITLPETKVPA

SEQ ID NO: 2122 - protein, 30 aa, Artificial Sequence
  Non-cyclic GFR-binding peptide
SRVIMNSLQEVKPKRGVYYLITLPELAQPV

SEQ ID NO: 2123 - protein, 32 aa, Artificial Sequence
  Non-cyclic GFR-binding peptide
NHQLFNSLQEHQGQHPKIRYYLITLPEEETPV

SEQ ID NO: 2124 - protein, 32 aa, Artificial Sequence
  Non-cyclic GFR-binding peptide
SHEELNSLQEHQGQHPKIRYYLITLPEQGTPV

SEQ ID NO: 2125 - protein, 32 aa, Artificial Sequence
  Non-cyclic GFR-binding peptide
HEELRNSLQELKPKKRVYEYYLITLPEHHVRS

SEQ ID NO: 2126 - protein, 32 aa, Artificial Sequence
  Non-cyclic GFR-binding peptide
HDELTNSLQEFIPKKRVIEYYLITLPELQVQT

SEQ ID NO: 2127 - protein, 30 aa, Artificial Sequence
  Non-cyclic GFR-binding peptide
SKVMDNSLQEVVKENEDYYLITLPELEQPV

SEQ ID NO: 2128 - protein, 30 aa, Artificial Sequence
  Non-cyclic GFR-binding peptide
SKVMNNSLQEVVNKNEDYYLITLPEMKQPV

SEQ ID NO: 2129 - protein, 30 aa, Artificial Sequence
  Non-cyclic GFR-binding peptide
SKVMENSLQEVVKDYEDYYLITLPELEQPV

SEQ ID NO: 2130 - protein, 30 aa, Artificial Sequence
  Non-cyclic GFR-binding peptide
SKVMNNSLQEIVNSSDDYYLITLPELKQPV

SEQ ID NO: 2131 - protein, 30 aa, Artificial Sequence
  Non-cyclic GFR-binding peptide
SKVMNNSLQEIVNSSDDYYLITLPELQQPV

SEQ ID NO: 2132 - protein, 30 aa, Artificial Sequence
  Non-cyclic GFR-binding peptide
SKVMNNSLQEIVNNSSDYYLITLPELKQPV

SEQ ID NO: 2133 - protein, 32 aa, Artificial Sequence
  Non-cyclic GFR-binding peptide
SKVSMGENSLQETPVGMDDYYLITLPELKQPV

SEQ ID NO: 2134 - protein, 30 aa, Artificial Sequence
  Non-cyclic GFR-binding peptide
SKVMGNSLQEYTVVGKDYYLITLPELKQPV

SEQ ID NO: 2135 - protein, 30 aa, Artificial Sequence
  Non-cyclic GFR-binding peptide
SKVMGNSLQEIIQQKDNYYLITLPEMKQPV

SEQ ID NO: 2136 - protein, 30 aa, Artificial Sequence
  Non-cyclic GFR-binding peptide
SKVMDNSLQEVVNNAADYYLITLPELRQPV

SEQ ID NO: 2137 - protein, 30 aa, Artificial Sequence
  Non-cyclic GFR-binding peptide
SKVMDNSLQEVVNNASDYYLITLPELRQPV

SEQ ID NO: 2138 - protein, 30 aa, Artificial Sequence
  Non-cyclic GFR-binding peptide
SKVIMNSLQELLVRGNDYYLITLPETKQPV

SEQ ID NO: 2139 - protein, 30 aa, Artificial Sequence
  Non-cyclic GFR-binding peptide
SKVIMNSLQEVKPKRGVYYLITLPELAQPV

SEQ ID NO: 2140 - protein, 30 aa, Artificial Sequence
  Non-cyclic GFR-binding peptide
SKVIMNSLQEIKPTKGIYYLITLPELDQPV

SEQ ID NO: 2141 - protein, 32 aa, Artificial Sequence
  Non-cyclic GFR-binding peptide
NHQELSMEGIHQGQHPKIRMIQMTINSQGTPV

SEQ ID NO: 2142 - protein, 30 aa, Artificial Sequence
  Non-cyclic GFR-binding peptide
EVVMDSMEGIVVKENEDMIQMTINSLETPV

SEQ ID NO: 2143 - protein, 30 aa, Artificial Sequence
  Non-cyclic GFR-binding peptide
EVTMNSMEGIVVNKNEDMIQMTINSMKEPV

SEQ ID NO: 2144 - protein, 30 aa, Artificial Sequence
  Non-cyclic GFR-binding peptide
EVVMESMEGIVVKDYEDMIQMTINSLETPV

SEQ ID NO: 2145 - protein, 30 aa, Artificial Sequence
  Non-cyclic GFR-binding peptide
RVVMNSMEGIIVNSSDDMIQMTINSLKTPA

SEQ ID NO: 2146 - protein, 30 aa, Artificial Sequence
  Non-cyclic GFR-binding peptide
RVVMNSMEGIIVNSSDDMIQMTINSLQTPA

SEQ ID NO: 2147 - protein, 30 aa, Artificial Sequence
  Non-cyclic GFR-binding peptide
KVVMNSMEGIIVNNSSDMIQMTINSLKTPA

SEQ ID NO: 2148 - protein, 32 aa, Artificial Sequence
  Non-cyclic GFR-binding peptide
EAVSMGESMEGITPVGMDDMIQMTINSLKTPV

SEQ ID NO: 2149 - protein, 30 aa, Artificial Sequence
  Non-cyclic GFR-binding peptide
SVAMGSMEGIYTVVGKDMIQMTINSLKTPV

SEQ ID NO: 2150 - protein, 30 aa, Artificial Sequence
  Non-cyclic GFR-binding peptide
DVVMGSMEGIIIQQKDNMIQMTINSMKTPT

SEQ ID NO: 2151 - protein, 30 aa, Artificial Sequence
  Non-cyclic GFR-binding peptide
EVVMDSMEGIVVNNAADMIQMTINSLRAPV

SEQ ID NO: 2152 - protein, 30 aa, Artificial Sequence
  Non-cyclic GFR-binding peptide
EVVMDSMEGIVVNNASDMIQMTINSLRTPV

SEQ ID NO: 2153 - protein, 30 aa, Artificial Sequence
  Non-cyclic GFR-binding peptide
EEVIMSMEGILLVRGNDMIQMTINSTKVPA

SEQ ID NO: 2154 - protein, 30 aa, Artificial Sequence
  Non-cyclic GFR-binding peptide
SRVIMSMEGIVKPKRGVMIQMTINSLAQPV

SEQ ID NO: 2155 - protein, 30 aa, Artificial Sequence
  Non-cyclic GFR-binding peptide
SKVIMSMEGIIKPTKGIMIQMTINSLDQSV

SEQ ID NO: 2156 - protein, 30 aa, Artificial Sequence
  Non-cyclic GFR-binding peptide
SKVVMSMEGIVKPTRGVMIQMTINSLDQPV

SEQ ID NO: 2157 - protein, 32 aa, Artificial Sequence
  Non-cyclic GFR-binding peptide
SHEELSMEGIHQGQHPKIRMIQMTINSQGTPV

SEQ ID NO: 2158 - protein, 32 aa, Artificial Sequence
  Non-cyclic GFR-binding peptide
HEELRSMEGILKPKKRVYEMIQMTINSHHVRS

SEQ ID NO: 2159 - protein, 32 aa, Artificial Sequence
  Non-cyclic GFR-binding peptide
HDELTSMEGIFIPKKRVIEMIQMTINSLQVQT

SEQ ID NO: 2160 - protein, 32 aa, Artificial Sequence
  Non-cyclic GFR-binding peptide
SHELFSMEGLHQGQHPKIRMIQMTINSEETPV

SEQ ID NO: 2161 - protein, 30 aa, Artificial Sequence
  Non-cyclic GFR-binding peptide
EVVMDSMEGLVVKENEDMIQMTINSLETPV

SEQ ID NO: 2162 - protein, 30 aa, Artificial Sequence
  Non-cyclic GFR-binding peptide
EVTMNSMEGLVVNKNEDMIQMTINSMKEPV

SEQ ID NO: 2163 - protein, 30 aa, Artificial Sequence
  Non-cyclic GFR-binding peptide
EVVMESMEGLVVKDYEDMIQMTINSLETPV

SEQ ID NO: 2164 - protein, 30 aa, Artificial Sequence
  Non-cyclic GFR-binding peptide
RVVMNSMEGLIVNSSDDMIQMTINSLKTPA

SEQ ID NO: 2165 - protein, 30 aa, Artificial Sequence
  Non-cyclic GFR-binding peptide
RVVMNSMEGLIVNSSDDMIQMTINSLQTPA

SEQ ID NO: 2166 - protein, 30 aa, Artificial Sequence
  Non-cyclic GFR-binding peptide
KVVMNSMEGLIVNNSSDMIQMTINSLKTPA

SEQ ID NO: 2167 - protein, 32 aa, Artificial Sequence
  Non-cyclic GFR-binding peptide
EAVSMGESMEGLTPVGMDDMIQMTINSLKTPV

SEQ ID NO: 2168 - protein, 30 aa, Artificial Sequence
  Non-cyclic GFR-binding peptide
SVAMGSMEGLYTVVGKDMIQMTINSLKTPV

SEQ ID NO: 2169 - protein, 30 aa, Artificial Sequence
  Non-cyclic GFR-binding peptide
DVVMGSMEGLIIQQKDNMIQMTINSMKTPT

SEQ ID NO: 2170 - protein, 30 aa, Artificial Sequence
  Non-cyclic GFR-binding peptide
EVVMDSMEGLVVNNAADMIQMTINSLRAPV

SEQ ID NO: 2171 - protein, 30 aa, Artificial Sequence
  Non-cyclic GFR-binding peptide
EVVMDSMEGLVVNNASDMIQMTINSLRTPV

SEQ ID NO: 2172 - protein, 30 aa, Artificial Sequence
  Non-cyclic GFR-binding peptide
EEVIMSMEGLLLVRGNDMIQMTINSTKVPA

SEQ ID NO: 2173 - protein, 30 aa, Artificial Sequence
  Non-cyclic GFR-binding peptide
SRVIMSMEGLVKPKRGVMIQMTINSLAQPV

SEQ ID NO: 2174 - protein, 30 aa, Artificial Sequence
  Non-cyclic GFR-binding peptide
SKVIMSMEGLIKPTKGIMIQMTINSLDQSV

SEQ ID NO: 2175 - protein, 30 aa, Artificial Sequence
  Non-cyclic GFR-binding peptide
SKVVMSMEGLVKPTRGVMIQMTINSLDQPV

SEQ ID NO: 2176 - protein, 32 aa, Artificial Sequence
  Non-cyclic GFR-binding peptide
NHQLFSMEGLHQGQHPKIRMIQMTINSEETPV

SEQ ID NO: 2177 - protein, 32 aa, Artificial Sequence
  Non-cyclic GFR-binding peptide
HEELRSMEGLLKPKKRVYEMIQMTINSHHVRS

SEQ ID NO: 2178 - protein, 32 aa, Artificial Sequence
  Non-cyclic GFR-binding peptide
HDELTSMEGLFIPKKRVIEMIQMTINSLQVQT

SEQ ID NO: 2179 - protein, 32 aa, Artificial Sequence
  Non-cyclic GFR-binding peptide
HEELTVQVEKFIPKKRVIEVKAVKVSRLQVRS

SEQ ID NO: 2180 - protein, 30 aa, Artificial Sequence
  Non-cyclic GFR-binding peptide
EVVMDVQVEKVVKENEDVKAVKVSRLETPV

SEQ ID NO: 2181 - protein, 30 aa, Artificial Sequence
  Non-cyclic GFR-binding peptide
EVTMNVQVEKVVNKNEDVKAVKVSRMKEPV

SEQ ID NO: 2182 - protein, 30 aa, Artificial Sequence
  Non-cyclic GFR-binding peptide
EVVMEVQVEKVVKDYEDVKAVKVSRLETPV

SEQ ID NO: 2183 - protein, 30 aa, Artificial Sequence
  Non-cyclic GFR-binding peptide
RVVMNVQVEKIVNSSDDVKAVKVSRLKTPA

SEQ ID NO: 2184 - protein, 30 aa, Artificial Sequence
  Non-cyclic GFR-binding peptide
RVVMNVQVEKIVNSSDDVKAVKVSRLQTPA

SEQ ID NO: 2185 - protein, 30 aa, Artificial Sequence
  Non-cyclic GFR-binding peptide
KVVMNVQVEKIVNNSSDVKAVKVSRLKTPA

SEQ ID NO: 2186 - protein, 32 aa, Artificial Sequence
  Non-cyclic GFR-binding peptide
EAVSMGEVQVEKTPVGMDDVKAVKVSRLKTPV

SEQ ID NO: 2187 - protein, 30 aa, Artificial Sequence
  Non-cyclic GFR-binding peptide
SVAMGVQVEKYTVVGKDVKAVKVSRLKTPV

SEQ ID NO: 2188 - protein, 30 aa, Artificial Sequence
  Non-cyclic GFR-binding peptide
DVVMGVQVEKIIQQKDNVKAVKVSRMKTPT

SEQ ID NO: 2189 - protein, 30 aa, Artificial Sequence
  Non-cyclic GFR-binding peptide
EVVMDVQVEKVVNNAADVKAVKVSRLRAPV

SEQ ID NO: 2190 - protein, 30 aa, Artificial Sequence
  Non-cyclic GFR-binding peptide
EVVMDVQVEKVVNNASDVKAVKVSRLRTPV

SEQ ID NO: 2191 - protein, 30 aa, Artificial Sequence
  Non-cyclic GFR-binding peptide
EEVIMVQVEKLLVRGNDVKAVKVSRTKVPA

SEQ ID NO: 2192 - protein, 30 aa, Artificial Sequence
  Non-cyclic GFR-binding peptide
SRVIMVQVEKVKPKRGVVKAVKVSRLAQPV

SEQ ID NO: 2193 - protein, 30 aa, Artificial Sequence
  Non-cyclic GFR-binding peptide
SKVIMVQVEKIKPTKGIVKAVKVSRLDQSV

SEQ ID NO: 2194 - protein, 30 aa, Artificial Sequence
  Non-cyclic GFR-binding peptide
SKVVMVQVEKVKPTRGVVKAVKVSRLDQPV

SEQ ID NO: 2195 - protein, 32 aa, Artificial Sequence
  Non-cyclic GFR-binding peptide
NHQLFVQVEKHQGQHPKIRVKAVKVSREETPV

SEQ ID NO: 2196 - protein, 32 aa, Artificial Sequence
  Non-cyclic GFR-binding peptide
SHEELVQVEKHQGQHPKIRVKAVKVSRQGTPV

SEQ ID NO: 2197 - protein, 32 aa, Artificial Sequence
  Non-cyclic GFR-binding peptide
HDELTVQVEKFIPKKRVIEVKAVKVSRLQVQT

SEQ ID NO: 2198 - protein, 32 aa, Artificial Sequence
  Non-cyclic GFR-binding peptide
HDELRVTAKKLKPKKRVYEIKRVQVPRHHVQT

SEQ ID NO: 2199 - protein, 30 aa, Artificial Sequence
  Non-cyclic GFR-binding peptide
EVVMDVTAKKVVKENEDIKRVQVPRLETPV

SEQ ID NO: 2200 - protein, 30 aa, Artificial Sequence
  Non-cyclic GFR-binding peptide
EVTMNVTAKKVVNKNEDIKRVQVPRMKEPV

SEQ ID NO: 2201 - protein, 30 aa, Artificial Sequence
  Non-cyclic GFR-binding peptide
EVVMEVTAKKVVKDYEDIKRVQVPRLETPV

SEQ ID NO: 2202 - protein, 30 aa, Artificial Sequence
  Non-cyclic GFR-binding peptide
RVVMNVTAKKIVNSSDDIKRVQVPRLKTPA

SEQ ID NO: 2203 - protein, 30 aa, Artificial Sequence
  Non-cyclic GFR-binding peptide
RVVMNVTAKKIVNSSDDIKRVQVPRLQTPA

SEQ ID NO: 2204 - protein, 30 aa, Artificial Sequence
  Non-cyclic GFR-binding peptide
KVVMNVTAKKIVNNSSDIKRVQVPRLKTPA

SEQ ID NO: 2205 - protein, 32 aa, Artificial Sequence
  Non-cyclic GFR-binding peptide
EAVSMGEVTAKKTPVGMDDIKRVQVPRLKTPV

SEQ ID NO: 2206 - protein, 30 aa, Artificial Sequence
  Non-cyclic GFR-binding peptide
SVAMGVTAKKYTVVGKDIKRVQVPRLKTPV

SEQ ID NO: 2207 - protein, 30 aa, Artificial Sequence
  Non-cyclic GFR-binding peptide
DVVMGVTAKKIIQQKDNIKRVQVPRMKTPT

SEQ ID NO: 2208 - protein, 30 aa, Artificial Sequence
  Non-cyclic GFR-binding peptide
EVVMDVTAKKVVNNAADIKRVQVPRLRAPV

SEQ ID NO: 2209 - protein, 30 aa, Artificial Sequence
  Non-cyclic GFR-binding peptide
EVVMDVTAKKVVNNASDIKRVQVPRLRTPV

SEQ ID NO: 2210 - protein, 30 aa, Artificial Sequence
  Non-cyclic GFR-binding peptide
EEVIMVTAKKLLVRGNDIKRVQVPRTKVPA

SEQ ID NO: 2211 - protein, 30 aa, Artificial Sequence
  Non-cyclic GFR-binding peptide
SRVIMVTAKKVKPKRGVIKRVQVPRLAQPV

SEQ ID NO: 2212 - protein, 30 aa, Artificial Sequence
  Non-cyclic GFR-binding peptide
SKVIMVTAKKIKPTKGIIKRVQVPRLDQSV

SEQ ID NO: 2213 - protein, 30 aa, Artificial Sequence
  Non-cyclic GFR-binding peptide
SKVVMVTAKKVKPTRGVIKRVQVPRLDQPV

SEQ ID NO: 2214 - protein, 32 aa, Artificial Sequence
  Non-cyclic GFR-binding peptide
NHQLFVTAKKHQGQHPKIRIKRVQVPREETPV

SEQ ID NO: 2215 - protein, 32 aa, Artificial Sequence
  Non-cyclic GFR-binding peptide
SHEELVTAKKHQGQHPKIRIKRVQVPRQGTPV

SEQ ID NO: 2216 - protein, 32 aa, Artificial Sequence
  Non-cyclic GFR-binding peptide
HEELRVTAKKLKPKKRVYEIKRVQVPRHHVRS

SEQ ID NO: 2217 - protein, 42 aa, Artificial Sequence
  Non-cyclic GFR-binding peptide
KIPKASSVPTELSAISMLYLDENEKVVLKNYQDMVVEGSGSR

SEQ ID NO: 2218 - protein, 42 aa, Artificial Sequence
  Non-cyclic GFR-binding peptide
GIPEPSSVPEKMSSLSILFFDENKNVVLKVYPNMTVESSASR

SEQ ID NO: 2219 - protein, 42 aa, Artificial Sequence
  Non-cyclic GFR-binding peptide
SIPKASSVPTELSAISMLYLDEYDKVVLKNYQEMVVEGSGSR

SEQ ID NO: 2220 - protein, 42 aa, Artificial Sequence
  Non-cyclic GFR-binding peptide
HVTKPTSAPTKLNAISVLYFDDSSNVILKKYRNMVVRSSGSH

SEQ ID NO: 2221 - protein, 42 aa, Artificial Sequence
  Non-cyclic GFR-binding peptide
YVPKPSSAPTKLNAISVLYFDDSSNVILKKYRNMVVRSSGSH

SEQ ID NO: 2222 - protein, 42 aa, Artificial Sequence
  Non-cyclic GFR-binding peptide
TVPKPSSAPTQLNAISVLYFDDSSNVILKKYRNMVVRASGSH

SEQ ID NO: 2223 - protein, 42 aa, Artificial Sequence
  Non-cyclic GFR-binding peptide
AVPKASSAPTKLSATSVLYYDSSNNVILRKHRNMVVKASGSH

SEQ ID NO: 2224 - protein, 43 aa, Artificial Sequence
  Non-cyclic GFR-binding peptide
KVGKASSVPTKLSPISVLYKDDMGVPTLKYHYEGMSVAESGSR

SEQ ID NO: 2225 - protein, 42 aa, Artificial Sequence
  Non-cyclic GFR-binding peptide
KASKASSVPTKLEPISILYLDKGVVTYKFKYEGMAVSESGSR

SEQ ID NO: 2226 - protein, 42 aa, Artificial Sequence
  Non-cyclic GFR-binding peptide
GSAGPSSTPTKMSPINMLYFNDKQQIIYGKIPGMVVDRSGSS

SEQ ID NO: 2227 - protein, 42 aa, Artificial Sequence
  Non-cyclic GFR-binding peptide
AAPASSSVPARLSPISILYIDAANNVVYKQYEDMVVEASGSR

SEQ ID NO: 2228 - protein, 42 aa, Artificial Sequence
  Non-cyclic GFR-binding peptide
STPPTSSVPTRLSPISILFIDSANNVVYKQYEDMVVESSGSR

SEQ ID NO: 2229 - protein, 42 aa, Artificial Sequence
  Non-cyclic GFR-binding peptide
HVPKPSSAPTKLNAISVLYFDDSSNVILKKYRNMVVRSSGSH

SEQ ID NO: 2230 - protein, 41 aa, Artificial Sequence
  Non-cyclic GFR-binding peptide
RVPSTSSAPVKTKPLSMLYVDNGRVLLDHHKDMIVEESGSL

SEQ ID NO: 2231 - protein, 41 aa, Artificial Sequence
  Non-cyclic GFR-binding peptide
ASAAPSSVPQALEPLPIVYYVGRKPKVEQLSNMIVRSSKSS

SEQ ID NO: 2232 - protein, 41 aa, Artificial Sequence
  Non-cyclic GFR-binding peptide
ASASPSSVSQDLEPLTILYYIGKTPKIEQLSNMIVKSSKSS

SEQ ID NO: 2233 - protein, 41 aa, Artificial Sequence
  Non-cyclic GFR-binding peptide
ASASPSSVPQDLEPLTILYYVGRTPKVEQLSNMVVKSSKSS

SEQ ID NO: 2234 - protein, 44 aa, Artificial Sequence
  Non-cyclic GFR-binding peptide
NDEGLESVPTEESNITMQIMRIKPHQGQHIGEMSFLQHNKSESR

SEQ ID NO: 2235 - protein, 44 aa, Artificial Sequence
  Non-cyclic GFR-binding peptide
NDEGLESVPTGQSNITMQIMRIKPHQGQHLGEMSLEEHSQSESR

SEQ ID NO: 2236 - protein, 45 aa, Artificial Sequence
  Non-cyclic GFR-binding peptide
SSVKSQPSRVHHRSVKVAKVEYVRKKPKLKEVQVRLEEHLESASA

SEQ ID NO: 2237 - protein, 45 aa, Artificial Sequence
  Non-cyclic GFR-binding peptide
RNVQSRPTQVQLRPVQVRKIEIVRKKPIFKKATVTLEDHLASKSE

SEQ ID NO: 2238 - protein, 30 aa, Artificial Sequence
  Non-cyclic GFR-binding peptide
VPTELSAISMLYLDENEKVVLKNYQDMVVE

SEQ ID NO: 2239 - protein, 30 aa, Artificial Sequence
  Non-cyclic GFR-binding peptide
VPEKMSSLSILFFDENKNVVLKVYPNMTVE

SEQ ID NO: 2240 - protein, 30 aa, Artificial Sequence
  Non-cyclic GFR-binding peptide
VPTELSAISMLYLDEYDKVVLKNYQEMVVE

SEQ ID NO: 2241 - protein, 30 aa, Artificial Sequence
  Non-cyclic GFR-binding peptide
APTKLNAISVLYFDDSSNVILKKYRNMVVR

SEQ ID NO: 2242 - protein, 30 aa, Artificial Sequence
  Non-cyclic GFR-binding peptide
APTQLNAISVLYFDDSSNVILKKYRNMVVR

SEQ ID NO: 2243 - protein, 30 aa, Artificial Sequence
  Non-cyclic GFR-binding peptide
APTKLSATSVLYYDSSNNVILRKHRNMVVK

SEQ ID NO: 2244 - protein, 32 aa, Artificial Sequence
  Non-cyclic GFR-binding peptide
VPTKLSPISVLYKDDMGVPTLKYHYEGMSVAE

SEQ ID NO: 2245 - protein, 30 aa, Artificial Sequence
  Non-cyclic GFR-binding peptide
VPTKLEPISILYLDKGVVTYKFKYEGMAVS

SEQ ID NO: 2246 - protein, 30 aa, Artificial Sequence
  Non-cyclic GFR-binding peptide
TPTKMSPINMLYFNDKQQIIYGKIPGMVVD

SEQ ID NO: 2247 - protein, 30 aa, Artificial Sequence
  Non-cyclic GFR-binding peptide
VPARLSPISILYIDAANNVVYKQYEDMVVE

SEQ ID NO: 2248 - protein, 30 aa, Artificial Sequence
  Non-cyclic GFR-binding peptide
VPTRLSPISILFIDSANNVVYKQYEDMVVE

SEQ ID NO: 2249 - protein, 30 aa, Artificial Sequence
  Non-cyclic GFR-binding peptide
APVKTKPLSMLYVDNGRVLLDHHKDMIVEE

SEQ ID NO: 2250 - protein, 30 aa, Artificial Sequence
  Non-cyclic GFR-binding peptide
VPQALEPLPIVYYVGRKPKVEQLSNMIVRS

SEQ ID NO: 2251 - protein, 30 aa, Artificial Sequence
  Non-cyclic GFR-binding peptide
VSQDLEPLTILYYIGKTPKIEQLSNMIVKS

SEQ ID NO: 2252 - protein, 30 aa, Artificial Sequence
  Non-cyclic GFR-binding peptide
VPQDLEPLTILYYVGRTPKVEQLSNMVVKS

SEQ ID NO: 2253 - protein, 32 aa, Artificial Sequence
  Non-cyclic GFR-binding peptide
VPTEESNITMQIMRIKPHQGQHIGEMSFLQHN

SEQ ID NO: 2254 - protein, 32 aa, Artificial Sequence
  Non-cyclic GFR-binding peptide
VPTGQSNITMQIMRIKPHQGQHLGEMSLEEHS

SEQ ID NO: 2255 - protein, 32 aa, Artificial Sequence
  Non-cyclic GFR-binding peptide
SRVHHRSVKVAKVEYVRKKPKLKEVQVRLEEH

SEQ ID NO: 2256 - protein, 32 aa, Artificial Sequence
  Non-cyclic GFR-binding peptide
TQVQLRPVQVRKIEIVRKKPIFKKATVTLEDH

SEQ ID NO: 2257 - protein, 42 aa, Artificial Sequence
  Non-cyclic GFR-binding peptide
RSGSGEVVMDQYNKLVVKENEDLYLMSIASLETPVSSAKPIK

SEQ ID NO: 2258 - protein, 42 aa, Artificial Sequence
  Non-cyclic GFR-binding peptide
RSASSEVTMNPYVKLVVNKNEDFFLISLSSMKEPVSSPEPIG

SEQ ID NO: 2259 - protein, 42 aa, Artificial Sequence
  Non-cyclic GFR-binding peptide
RSGSGEVVMEQYNKLVVKDYEDLYLMSIASLETPVSSAKPIS

SEQ ID NO: 2260 - protein, 42 aa, Artificial Sequence
  Non-cyclic GFR-binding peptide
HSGSSRVVMNRYKKLIVNSSDDFYLVSIANLKTPASTPKTVH

SEQ ID NO: 2261 - protein, 42 aa, Artificial Sequence
  Non-cyclic GFR-binding peptide
HSGSSRVVMNRYKKLIVNSSDDFYLVSIANLKTPASSPKPVY

SEQ ID NO: 2262 - protein, 42 aa, Artificial Sequence
  Non-cyclic GFR-binding peptide
HSGSARVVMNRYKKLIVNSSDDFYLVSIANLQTPASSPKPVT

SEQ ID NO: 2263 - protein, 42 aa, Artificial Sequence
  Non-cyclic GFR-binding peptide
HSGSAKVVMNRHKRLIVNNSSDYYLVSTASLKTPASSAKPVA

SEQ ID NO: 2264 - protein, 43 aa, Artificial Sequence
  Non-cyclic GFR-binding peptide
RSGSEAVSMGEYHYKLTPVGMDDKYLVSIPSLKTPVSSAKGVK

SEQ ID NO: 2265 - protein, 42 aa, Artificial Sequence
  Non-cyclic GFR-binding peptide
RSGSESVAMGEYKFKYTVVGKDLYLISIPELKTPVSSAKSAK

SEQ ID NO: 2266 - protein, 42 aa, Artificial Sequence
  Non-cyclic GFR-binding peptide
SSGSRDVVMGPIKGYIIQQKDNFYLMNIPSMKTPTSSPGASG

SEQ ID NO: 2267 - protein, 42 aa, Artificial Sequence
  Non-cyclic GFR-binding peptide
RSGSAEVVMDEYQKYVVNNAADIYLISIPSLRAPVSSSAPAA

SEQ ID NO: 2268 - protein, 42 aa, Artificial Sequence
  Non-cyclic GFR-binding peptide
RSGSSEVVMDEYQKYVVNNASDIFLISIPSLRTPVSSTPPTS

SEQ ID NO: 2269 - protein, 42 aa, Artificial Sequence
  Non-cyclic GFR-binding peptide
HSGSSRVVMNRYKKLIVNSSDDFYLVSIANLKTPASSPKPVH

SEQ ID NO: 2270 - protein, 41 aa, Artificial Sequence
  Non-cyclic GFR-binding peptide
LSGSEEVIMDKHHDLLVRGNDVYLMSLPKTKVPASSTSPVR

SEQ ID NO: 2271 - protein, 41 aa, Artificial Sequence
  Non-cyclic GFR-binding peptide
SSKSSRVIMNSLQEVKPKRGVYYVIPLPELAQPVSSPAASA

SEQ ID NO: 2272 - protein, 41 aa, Artificial Sequence
  Non-cyclic GFR-binding peptide
SSKSSKVIMNSLQEIKPTKGIYYLITLPELDQSVSSPSASA

SEQ ID NO: 2273 - protein, 41 aa, Artificial Sequence
  Non-cyclic GFR-binding peptide
SSKSSKVVMNSLQEVKPTRGVYYLITLPELDQPVSSPSASA

SEQ ID NO: 2274 - protein, 44 aa, Artificial Sequence
  Non-cyclic GFR-binding peptide
RSESKNHQLFSMEGIHQGQHPKIRMIQMTINSEETPVSELGEDN

SEQ ID NO: 2275 - protein, 44 aa, Artificial Sequence
  Non-cyclic GFR-binding peptide
RSESQSHEELSMEGLHQGQHPKIRMIQMTINSQGTPVSELGEDN

SEQ ID NO: 2276 - protein, 45 aa, Artificial Sequence
  Non-cyclic GFR-binding peptide
ASASELHEELRVQVEKLKPKKRVYEVKAVKVSRHHVRSPQSKVSS

SEQ ID NO: 2277 - protein, 45 aa, Artificial Sequence
  Non-cyclic GFR-binding peptide
ESKSALHDELTVTAKKFIPKKRVIEIKRVQVPRLQVQTPRSQVNR

SEQ ID NO: 2278 - protein, 30 aa, Artificial Sequence
  Non-cyclic GFR-binding peptide
EVVMDQYNKLVVKENEDLYLMSIASLETPV

SEQ ID NO: 2279 - protein, 30 aa, Artificial Sequence
  Non-cyclic GFR-binding peptide
EVTMNPYVKLVVNKNEDFFLISLSSMKEPV

SEQ ID NO: 2280 - protein, 30 aa, Artificial Sequence
  Non-cyclic GFR-binding peptide
EVVMEQYNKLVVKDYEDLYLMSIASLETPV

SEQ ID NO: 2281 - protein, 30 aa, Artificial Sequence
  Non-cyclic GFR-binding peptide
RVVMNRYKKLIVNSSDDFYLVSIANLKTPA

SEQ ID NO: 2282 - protein, 30 aa, Artificial Sequence
  Non-cyclic GFR-binding peptide
RVVMNRYKKLIVNSSDDFYLVSIANLQTPA

SEQ ID NO: 2283 - protein, 30 aa, Artificial Sequence
  Non-cyclic GFR-binding peptide
KVVMNRHKRLIVNNSSDYYLVSTASLKTPA

SEQ ID NO: 2284 - protein, 32 aa, Artificial Sequence
  Non-cyclic GFR-binding peptide
EAVSMGEYHYKLTPVGMDDKYLVSIPSLKTPV

SEQ ID NO: 2285 - protein, 30 aa, Artificial Sequence
  Non-cyclic GFR-binding peptide
SVAMGEYKFKYTVVGKDLYLISIPELKTPV

SEQ ID NO: 2286 - protein, 30 aa, Artificial Sequence
  Non-cyclic GFR-binding peptide
DVVMGPIKGYIIQQKDNFYLMNIPSMKTPT

SEQ ID NO: 2287 - protein, 30 aa, Artificial Sequence
  Non-cyclic GFR-binding peptide
EVVMDEYQKYVVNNAADIYLISIPSLRAPV

SEQ ID NO: 2288 - protein, 30 aa, Artificial Sequence
  Non-cyclic GFR-binding peptide
EVVMDEYQKYVVNNASDIFLISIPSLRTPV

SEQ ID NO: 2289 - protein, 30 aa, Artificial Sequence
  Non-cyclic GFR-binding peptide
EEVIMDKHHDLLVRGNDVYLMSLPKTKVPA

SEQ ID NO: 2290 - protein, 30 aa, Artificial Sequence
  Non-cyclic GFR-binding peptide
SRVIMNSLQEVKPKRGVYYVIPLPELAQPV

SEQ ID NO: 2291 - protein, 30 aa, Artificial Sequence
  Non-cyclic GFR-binding peptide
SKVIMNSLQEIKPTKGIYYLITLPELDQSV

SEQ ID NO: 2292 - protein, 30 aa, Artificial Sequence
  Non-cyclic GFR-binding peptide
SKVVMNSLQEVKPTRGVYYLITLPELDQPV

SEQ ID NO: 2293 - protein, 32 aa, Artificial Sequence
  Non-cyclic GFR-binding peptide
NHQLFSMEGIHQGQHPKIRMIQMTINSEETPV

SEQ ID NO: 2294 - protein, 32 aa, Artificial Sequence
  Non-cyclic GFR-binding peptide
SHEELSMEGLHQGQHPKIRMIQMTINSQGTPV

SEQ ID NO: 2295 - protein, 32 aa, Artificial Sequence
  Non-cyclic GFR-binding peptide
HEELRVQVEKLKPKKRVYEVKAVKVSRHHVRS

SEQ ID NO: 2296 - protein, 32 aa, Artificial Sequence
  Non-cyclic GFR-binding peptide
HDELTVTAKKFIPKKRVIEIKRVQVPRLQVQT

SEQ ID NO: 2297 - protein, 38 aa, Artificial Sequence
  Non-cyclic GFR-binding peptide
  MOD_RES (32), (33): Xaa is C or S
GEVVMDRYKKLVVKENEDFYLMSIANLETPVXXAKPIK

SEQ ID NO: 2298 - protein, 35 aa, Artificial Sequence
  Non-cyclic GFR-binding peptide
  MOD_RES (2), (4): Xaa is C or S
HXGXARVVMNQYNKLIVNSSDDLYLVSIASLQTPA

SEQ ID NO: 2299 - protein, 34 aa, Artificial Sequence
  Non-cyclic GFR-binding peptide
  MOD_RES (13), (14), (15), (16), (17): Xaa is A or G
  MOD_RES (18), (19), (20), (21): Xaa is A or G or is absent
EAVSMGERYKKLXXXXXXXXXFYLVSIANLKTPV

SEQ ID NO: 2300 - protein, 38 aa, Artificial Sequence
  Non-cyclic GFR-binding peptide
  MOD_RES (1), (38): Xaa is C or S
  MOD_RES (14), (15), (16), (17), (18): Xaa is A or G
  MOD_RES (19), (20), (21), (22): Xaa is A or G or is absent
XALHDELTRHKRLXXXXXXXXXYYLVSTASLQVQTPRX

SEQ ID NO: 2301 - protein, 42 aa, Artificial Sequence
  Non-cyclic GFR-binding peptide
  MOD_RES (1), (3), (38), (39): Xaa is C or S
  MOD_RES (16), (17), (18), (19), (20): Xaa is A or G
  MOD_RES (21), (22), (23), (24): Xaa is A or G or is absent
XGXEAVSMGERYKKLXXXXXXXXXFYLVSIANLKTPVXXAKG

SEQ ID NO: 2302 - protein, 40 aa, Artificial Sequence
  Non-cyclic GFR-binding peptide
  MOD_RES (1), (3), (36), (37): Xaa is C or S
  MOD_RES (14), (15), (16), (17), (18): Xaa is A or G
  MOD_RES (19), (20), (21), (22): Xaa is A or G or is absent
XKXSRVIMQYNKLXXXXXXXXXLYLISIASLAQPVXXPAA

SEQ ID NO: 2303 - protein, 38 aa, Artificial Sequence
  Non-cyclic GFR-binding peptide
  MOD_RES (32), (32): Xaa is C or S
SRVVMNRHKRLIVNSSDDYYLVSTASLKTPAXTPKTVH

SEQ ID NO: 2304 - protein, 33 aa, Artificial Sequence
  Non-cyclic GFR-binding peptide
  MOD_RES (2), (2): Xaa is C or S
GXGEVVMDRYKKLVVKENEDFYLMSIANLETPV

SEQ ID NO: 2305 - protein, 38 aa, Artificial Sequence
  Non-cyclic GFR-binding peptide
  MOD_RES (1), (3), (36), (37): Xaa is C or S
  MOD_RES (14), (15), (16), (17), (18): Xaa is A or G
  MOD_RES (19), (20), (21), (22): Xaa is A or G or is absent
XKXSKVIMYHYKLXXXXXXXXXKYLISIPSLDQSVXXP

SEQ ID NO: 2306 - protein, 38 aa, Artificial Sequence
  Non-cyclic GFR-binding peptide
  MOD_RES (1), (3), (37), (38): Xaa is C or S
  MOD_RES (15), (16), (17), (18), (19): Xaa is A or G
  MOD_RES (20), (21), (22), (23): Xaa is A or G or is absent
XGXSRVVMNQYNKLXXXXXXXXXLYLVSIASLKTPAXX

SEQ ID NO: 2307 - protein, 36 aa, Artificial Sequence
  Non-cyclic GFR-binding peptide
  MOD_RES (1), (33), (34): Xaa is C or S
XSRVVMNYHYKLIVNSSDDKYLVSIPSLKTPAXXPK

SEQ ID NO: 2308 - protein, 32 aa, Artificial Sequence
  Non-cyclic GFR-binding peptide
  MOD_RES (1), (32): Xaa is C or S
XSKVVMYHYKLVKPTRGVKYLISIPSLDQPVX

SEQ ID NO: 2309 - protein, 37 aa, Artificial Sequence
  Non-cyclic GFR-binding peptide
  MOD_RES (33), (34): Xaa is C or S
  MOD_RES (11), (12), (13), (14), (15): Xaa is A or G
  MOD_RES (16), (17), (18), (19): Xaa is A or G or is absent
RVVMNRHKRLXXXXXXXXXYYLVSTASLKTPAXXPKP

SEQ ID NO: 2310 - protein, 38 aa, Artificial Sequence
  Non-cyclic GFR-binding peptide
  MOD_RES (1), (3), (34), (35): Xaa is C or S
XKXSRVIMQYNKLVKPKRGVLYLISIASLAQPVXXPAA

SEQ ID NO: 2311 - protein, 35 aa, Artificial Sequence
  Non-cyclic GFR-binding peptide
  MOD_RES (1), (35): Xaa is C or S
  MOD_RES (13), (14), (15), (16), (17): Xaa is A or G
  MOD_RES (18), (19), (20), (21): Xaa is A or G or is absent
XSRVVMNRHKRLXXXXXXXXXYYLVSTASLKTPAX

SEQ ID NO: 2312 - protein, 39 aa, Artificial Sequence
  Non-cyclic GFR-binding peptide
  MOD_RES (1), (34), (35): Xaa is C or S
  MOD_RES (12), (13), (14), (15), (16): Xaa is A or G
  MOD_RES (17), (18), (19), (20): Xaa is A or G or is absent
XSRVIMRHKRLXXXXXXXXXYYLISTASLAQPVXXPAAS

SEQ ID NO: 2313 - protein, 38 aa, Artificial Sequence
  Non-cyclic GFR-binding peptide
  MOD_RES (32), (33): Xaa is C or S
SRVVMNRHKRLIVNSSDDYYLVSTASLKTPAXXPKPVY

SEQ ID NO: 2314 - protein, 35 aa, Artificial Sequence
  Non-cyclic GFR-binding peptide
  MOD_RES (31), (32): Xaa is C or S
SKVIMRYKKLIKPTKGIFYLISIANLDQSVXXPSA

SEQ ID NO: 2315 - protein, 42 aa, Artificial Sequence
  Non-cyclic GFR-binding peptide
  MOD_RES (1), (3), (37), (38): Xaa is C or S
  MOD_RES (15), (16), (17), (18), (19): Xaa is A or G
  MOD_RES (20), (21), (22), (23): Xaa is A or G or is absent
XGXGEVVMEYHYKLXXXXXXXXXKYLMSIPSLETPVXXAKPI

SEQ ID NO: 2316 - protein, 39 aa, Artificial Sequence
  Non-cyclic GFR-binding peptide
  MOD_RES (2), (36), (37): Xaa is C or S
  MOD_RES (14), (15), (16), (17), (18): Xaa is A or G
  MOD_RES (19), (20), (21), (22): Xaa is A or G or is absent
GXARVVMNRHKRLXXXXXXXXXYYLVSTASLQTPAXXPK

SEQ ID NO: 2317 - protein, 35 aa, Artificial Sequence
  Non-cyclic GFR-binding peptide
  MOD_RES (13), (14), (15), (16), (17): Xaa is A or G
  MOD_RES (18), (19), (20), (21): Xaa is A or G or is absent
ALHDELTRHKRLXXXXXXXXXYYLVSTASLQVQTP

SEQ ID NO: 2318 - protein, 38 aa, Artificial Sequence
  Non-cyclic GFR-binding peptide
  MOD_RES (2), (4), (37), (38): Xaa is C or S
  MOD_RES (15), (16), (17), (18), (19): Xaa is A or G
  MOD_RES (20), (21), (22), (23): Xaa is A or G or is absent
SXKXSKVVMYHYKLXXXXXXXXXKYLISIPSLDQPVXX

SEQ ID NO: 2319 - protein, 39 aa, Artificial Sequence
  Non-cyclic GFR-binding peptide
  MOD_RES (1), (3), (38), (39): Xaa is C or S
  MOD_RES (16), (17), (18), (19), (20): Xaa is A or G
  MOD_RES (21), (22), (23), (24): Xaa is A or G or is absent
XGXEAVSMGEQYNKLXXXXXXXXXLYLVSIASLKTPVXX

SEQ ID NO: 2320 - protein, 33 aa, Artificial Sequence
  Non-cyclic GFR-binding peptide
  MOD_RES (12), (13), (14), (15), (16): Xaa is A or G
  MOD_RES (17), (18), (19), (20): Xaa is A or G or is absent
GEVVMDRHKRLXXXXXXXXXYYLMSTASLETPV

SEQ ID NO: 2321 - protein, 39 aa, Artificial Sequence
  Non-cyclic GFR-binding peptide
  MOD_RES (1), (3), (35), (36): Xaa is C or S
XGXGEVVMDRYKKLVVKENEDFYLMSIANLETPVXXAKP

SEQ ID NO: 2322 - protein, 35 aa, Artificial Sequence
  Non-cyclic GFR-binding peptide
  MOD_RES (1), (32), (33): Xaa is C or S
XSKVIMQYNKLIKPTKGILYLISIASLDQSVXXPS

SEQ ID NO: 2323 - protein, 32 aa, Artificial Sequence
  Non-cyclic GFR-binding peptide
  MOD_RES (31), (32): Xaa is C or S
SKVIMYHYKLIKPTKGIKYLISIPSLDQSVXX

SEQ ID NO: 2324 - protein, 40 aa, Artificial Sequence
  Non-cyclic GFR-binding peptide
  MOD_RES (1), (3), (36), (37): Xaa is C or S
  MOD_RES (14), (15), (16), (17), (18): Xaa is A or G
  MOD_RES (19), (20), (21), (22): Xaa is A or G or is absent
XKXSKVIMQYNKLXXXXXXXXXLYLISIASLDQSVXXPSA

SEQ ID NO: 2325 - protein, 41 aa, Artificial Sequence
  Non-cyclic GFR-binding peptide
  MOD_RES (1), (35), (36): Xaa is C or S
  MOD_RES (13), (14), (15), (16), (17): Xaa is A or G
  MOD_RES (18), (19), (20), (21): Xaa is A or G or is absent
XGEVVMEYHYKLXXXXXXXXXKYLMSIPSLETPVXXAKPIS

SEQ ID NO: 2326 - protein, 34 aa, Artificial Sequence
  Non-cyclic GFR-binding peptide
  MOD_RES (2), (2): Xaa is C or S
  MOD_RES (13), (14), (15), (16), (17): Xaa is A or G
  MOD_RES (18), (19), (20), (21): Xaa is A or G or is absent
KXSKVVMQYNKLXXXXXXXXXLYLISIASLDQPV

SEQ ID NO: 2327 - protein, 34 aa, Artificial Sequence
  Non-cyclic GFR-binding peptide
  MOD_RES (32), (33): Xaa is C or S
GEVVMDRHKRLVVKENEDYYLMSTASLETPVXXA

SEQ ID NO: 2328 - protein, 32 aa, Artificial Sequence
  Non-cyclic GFR-binding peptide
  MOD_RES (11), (12), (13), (14), (15): Xaa is A or G
  MOD_RES (16), (17), (18), (19): Xaa is A or G or is absent
HDELTRHKRLXXXXXXXXXYYLVSTASLQVQT

SEQ ID NO: 2329 - protein, 30 aa, Artificial Sequence
  Non-cyclic GFR-binding peptide
EVVMEYHYKLVVKDYEDKYLMSIPSLETPV

SEQ ID NO: 2330 - protein, 43 aa, Artificial Sequence
  Non-cyclic GFR-binding peptide
  MOD_RES (2), (4), (38), (39): Xaa is C or S
  MOD_RES (16), (17), (18), (19), (20): Xaa is A or G
  MOD_RES (21), (22), (23), (24): Xaa is A or G or is absent
RXGXGEVVMDYHYKLXXXXXXXXXKYLMSIPSLETPVXXAKPI

SEQ ID NO: 2331 - protein, 37 aa, Artificial Sequence
  Non-cyclic GFR-binding peptide
  MOD_RES (31), (32): Xaa is C or S
RVVMNQYNKLIVNSSDDLYLVSIASLQTPAXXPKPVT

SEQ ID NO: 2332 - protein, 32 aa, Artificial Sequence
  Non-cyclic GFR-binding peptide
  MOD_RES (32), (32): Xaa is C or S
GEVVMEYHYKLVVKDYEDKYLMSIPSLETPVX

SEQ ID NO: 2333 - protein, 35 aa, Artificial Sequence
  Non-cyclic GFR-binding peptide
  MOD_RES (1), (33), (34): Xaa is C or S
XGEVVMERHKRLVVKDYEDYYLMSTASLETPVXXA

SEQ ID NO: 2334 - protein, 35 aa, Artificial Sequence
  Non-cyclic GFR-binding peptide
  MOD_RES (2), (35): Xaa is C or S
GXEAVSMGERHKRLTPVGMDDYYLVSTASLKTPVX

SEQ ID NO: 2335 - protein, 36 aa, Artificial Sequence
  Non-cyclic GFR-binding peptide
  MOD_RES (35), (35): Xaa is C or S
HDELTRHKRLFIPKKRVIEYYLVSTASLQVQTPRXQ

SEQ ID NO: 2336 - protein, 38 aa, Artificial Sequence
  Non-cyclic GFR-binding peptide
  MOD_RES (32), (32): Xaa is C or S
SRVVMNQYNKLIVNSSDDLYLVSIASLKTPAXTPKTVH

SEQ ID NO: 2337 - protein, 32 aa, Artificial Sequence
  Non-cyclic GFR-binding peptide
  MOD_RES (1), (1): Xaa is C or S
XGEVVMEYHYKLVVKDYEDKYLMSIPSLETPV

SEQ ID NO: 2338 - protein, 40 aa, Artificial Sequence
  Non-cyclic GFR-binding peptide
  MOD_RES (2), (35), (36): Xaa is C or S
GXEAVSMGEQYNKLTPVGMDDLYLVSIASLKTPVXXAKGV

SEQ ID NO: 2339 - protein, 38 aa, Artificial Sequence
  Non-cyclic GFR-binding peptide
  MOD_RES (36), (36): Xaa is C or S
  MOD_RES (12), (13), (14), (15), (16): Xaa is A or G
  MOD_RES (17), (18), (19), (20): Xaa is A or G or is absent
LHDELTQYNKLXXXXXXXXXLYLVSIASLQVQTPRXQV

SEQ ID NO: 2340 - protein, 39 aa, Artificial Sequence
  Non-cyclic GFR-binding peptide
  MOD_RES (2), (39): Xaa is C or S
  MOD_RES (15), (16), (17), (18), (19): Xaa is A or G
  MOD_RES (20), (21), (22), (23): Xaa is A or G or is absent
KXALHDELTRHKRLXXXXXXXXXYYLVSTASLQVQTPRX

SEQ ID NO: 2341 - protein, 39 aa, Artificial Sequence
  Non-cyclic GFR-binding peptide
  MOD_RES (2), (4), (38), (39): Xaa is C or S
  MOD_RES (16), (17), (18), (19), (20): Xaa is A or G
  MOD_RES (21), (22), (23), (24): Xaa is A or G or is absent
HXGXSRVVMNRHKRLXXXXXXXXXYYLVSTASLKTPAXX

SEQ ID NO: 2342 - protein, 37 aa, Artificial Sequence
  Non-cyclic GFR-binding peptide
  MOD_RES (2), (4): Xaa is C or S
  MOD_RES (16), (17), (18), (19), (20): Xaa is A or G
  MOD_RES (21), (22), (23), (24): Xaa is A or G or is absent
HXGXAKVVMNRYKKLXXXXXXXXXFYLVSIANLKTPA

SEQ ID NO: 2343 - protein, 36 aa, Artificial Sequence
  Non-cyclic GFR-binding peptide
  MOD_RES (13), (14), (15), (16), (17): Xaa is A or G
  MOD_RES (18), (19), (20), (21): Xaa is A or G or is absent
ALHDELTRYKKLXXXXXXXXXFYLVSIANLQVQTPR

SEQ ID NO: 2344 - protein, 38 aa, Artificial Sequence
  Non-cyclic GFR-binding peptide
  MOD_RES (2), (34), (35): Xaa is C or S
GXGEVVMERHKRLVVKDYEDYYLMSTASLETPVXXAKP

SEQ ID NO: 2345 - protein, 34 aa, Artificial Sequence
  Non-cyclic GFR-binding peptide
  MOD_RES (1), (34): Xaa is C or S
  MOD_RES (12), (13), (14), (15), (16): Xaa is A or G
  MOD_RES (17), (18), (19), (20): Xaa is A or G or is absent
XSKVIMYHYKLXXXXXXXXXKYLISIPSLDQSVX

SEQ ID NO: 2346 - protein, 42 aa, Artificial Sequence
  Non-cyclic GFR-binding peptide
  MOD_RES (2), (4), (37), (38): Xaa is C or S
  MOD_RES (15), (16), (17), (18), (19): Xaa is A or G
  MOD_RES (20), (21), (22), (23): Xaa is A or G or is absent
SXKXSKVIMYHYKLXXXXXXXXXKYLISIPSLDQSVXXPSAS

SEQ ID NO: 2347 - protein, 36 aa, Artificial Sequence
  Non-cyclic GFR-binding peptide
  MOD_RES (1), (35), (36): Xaa is C or S
  MOD_RES (13), (14), (15), (16), (17): Xaa is A or G
  MOD_RES (18), (19), (20), (21): Xaa is A or G or is absent
XSRVVMNRHKRLXXXXXXXXXYYLVSTASLKTPAXX

SEQ ID NO: 2348 - protein, 33 aa, Artificial Sequence
  Non-cyclic GFR-binding peptide
  MOD_RES (1), (1): Xaa is C or S
  MOD_RES (12), (13), (14), (15), (16): Xaa is A or G
  MOD_RES (17), (18), (19), (20): Xaa is A or G or is absent
XSKVVMYHYKLXXXXXXXXXKYLISIPSLDQPV

SEQ ID NO: 2349 - protein, 37 aa, Artificial Sequence
  Non-cyclic GFR-binding peptide
  MOD_RES (1), (3): Xaa is C or S
  MOD_RES (16), (17), (18), (19), (20): Xaa is A or G
  MOD_RES (21), (22), (23), (24): Xaa is A or G or is absent
XKXALHDELTRHKRLXXXXXXXXXYYLVSTASLQVQT

SEQ ID NO: 2350 - protein, 35 aa, Artificial Sequence
  Non-cyclic GFR-binding peptide
  MOD_RES (2), (4), (35): Xaa is C or S
SXKXSKVIMQYNKLIKPTKGILYLISIASLDQSVX

SEQ ID NO: 2351 - protein, 40 aa, Artificial Sequence
  Non-cyclic GFR-binding peptide
  MOD_RES (1), (3), (36), (37): Xaa is C or S
XGXEAVSMGERYKKLTPVGMDDFYLVSIANLKTPVXXAKG

SEQ ID NO: 2352 - protein, 36 aa, Artificial Sequence
  Non-cyclic GFR-binding peptide
  MOD_RES (1), (3): Xaa is C or S
  MOD_RES (15), (16), (17), (18), (19): Xaa is A or G
  MOD_RES (20), (21), (22), (23): Xaa is A or G or is absent
XGXSRVVMNYHYKLXXXXXXXXXKYLVSIPSLKTPA

SEQ ID NO: 2353 - protein, 39 aa, Artificial Sequence
  Non-cyclic GFR-binding peptide
  MOD_RES (2), (35), (36): Xaa is C or S
  MOD_RES (13), (14), (15), (16), (17): Xaa is A or G
  MOD_RES (18), (19), (20), (21): Xaa is A or G or is absent
KXSKVIMQYNKLXXXXXXXXXLYLISIASLDQSVXXPSA

SEQ ID NO: 2354 - protein, 37 aa, Artificial Sequence
  Non-cyclic GFR-binding peptide
  MOD_RES (1), (3), (35), (36): Xaa is C or S
XGXAKVVMNQYNKLIVNNSSDLYLVSIASLKTPAXXA

SEQ ID NO: 2355 - protein, 38 aa, Artificial Sequence
  Non-cyclic GFR-binding peptide
  MOD_RES (1), (38): Xaa is C or S
XALHDELTRHKRLFIPKKRVIEYYLVSTASLQVQTPRX

SEQ ID NO: 2356 - protein, 37 aa, Artificial Sequence
  Non-cyclic GFR-binding peptide
  MOD_RES (1), (33), (34): Xaa is C or S
XARVVMNQYNKLIVNSSDDLYLVSIASLQTPAXXPKP

SEQ ID NO: 2357 - protein, 39 aa, Artificial Sequence
  Non-cyclic GFR-binding peptide
  MOD_RES (33), (34): Xaa is C or S
  MOD_RES (11), (12), (13), (14), (15): Xaa is A or G
  MOD_RES (16), (17), (18), (19): Xaa is A or G or is absent
SKVVMYHYKLXXXXXXXXXKYLISIPSLDQPVXXPSASA

SEQ ID NO: 2358 - protein, 30 aa, Artificial Sequence
  Non-cyclic GFR-binding peptide
SRVIMRHKRLVKPKRGVYYLISTASLAQPV

SEQ ID NO: 2359 - protein, 41 aa, Artificial Sequence
  Non-cyclic GFR-binding peptide
  MOD_RES (1), (3), (37): Xaa is C or S
  MOD_RES (15), (16), (17), (18), (19): Xaa is A or G
  MOD_RES (20), (21), (22), (23): Xaa is A or G or is absent
XGXSRVVMNQYNKLXXXXXXXXXLYLVSIASLKTPAXTPKT

SEQ ID NO: 2360 - protein, 34 aa, Artificial Sequence
  Non-cyclic GFR-binding peptide
  MOD_RES (31), (32): Xaa is C or S
SKVIMQYNKLIKPTKGILYLISIASLDQSVXXPS

SEQ ID NO: 2361 - protein, 43 aa, Artificial Sequence
  Non-cyclic GFR-binding peptide
  MOD_RES (1), (3), (40): Xaa is C or S
  MOD_RES (16), (17), (18), (19), (20): Xaa is A or G
  MOD_RES (21), (22), (23), (24): Xaa is A or G or is absent
XKXALHDELTRHKRLXXXXXXXXXYYLVSTASLQVQTPRXQVN

SEQ ID NO: 2362 - protein, 35 aa, Artificial Sequence
  Non-cyclic GFR-binding peptide
  MOD_RES (2), (2): Xaa is C or S
  MOD_RES (14), (15), (16), (17), (18): Xaa is A or G
  MOD_RES (19), (20), (21), (22): Xaa is A or G or is absent
GXGEVVMERHKRLXXXXXXXXXYYLMSTASLETPV

SEQ ID NO: 2363 - protein, 43 aa, Artificial Sequence
  Non-cyclic GFR-binding peptide
  MOD_RES (2), (4), (38), (39): Xaa is C or S
  MOD_RES (16), (17), (18), (19), (20): Xaa is A or G
  MOD_RES (21), (22), (23), (24): Xaa is A or G or is absent
HXGXSRVVMNYHYKLXXXXXXXXXKYLVSIPSLKTPAXXPKPV

SEQ ID NO: 2364 - protein, 38 aa, Artificial Sequence
  Non-cyclic GFR-binding peptide
  MOD_RES (34), (35): Xaa is C or S
  MOD_RES (12), (13), (14), (15), (16): Xaa is A or G
  MOD_RES (17), (18), (19), (20): Xaa is A or G or is absent
SRVVMNQYNKLXXXXXXXXXLYLVSIASLKTPAXXPKP

SEQ ID NO: 2365 - protein, 33 aa, Artificial Sequence
  Non-cyclic GFR-binding peptide
  MOD_RES (2), (33): Xaa is C or S
KXSKVIMYHYKLIKPTKGIKYLISIPSLDQSVX

SEQ ID NO: 2366 - protein, 42 aa, Artificial Sequence
  Non-cyclic GFR-binding peptide
  MOD_RES (1), (3), (37), (38): Xaa is C or S
  MOD_RES (15), (16), (17), (18), (19): Xaa is A or G
  MOD_RES (20), (21), (22), (23): Xaa is A or G or is absent
XGXAKVVMNQYNKLXXXXXXXXXLYLVSIASLKTPAXXAKPV

SEQ ID NO: 2367 - protein, 36 aa, Artificial Sequence
  Non-cyclic GFR-binding peptide
  MOD_RES (36), (36): Xaa is C or S
LHDELTYHYKLFIPKKRVIEKYLVSIPSLQVQTPRX

SEQ ID NO: 2368 - protein, 43 aa, Artificial Sequence
  Non-cyclic GFR-binding peptide
  MOD_RES (2), (4), (38), (39): Xaa is C or S
  MOD_RES (16), (17), (18), (19), (20): Xaa is A or G
  MOD_RES (21), (22), (23), (24): Xaa is A or G or is absent
RXGXGEVVMDRHKRLXXXXXXXXXYYLMSTASLETPVXXAKPI

SEQ ID NO: 2369 - protein, 34 aa, Artificial Sequence
  Non-cyclic GFR-binding peptide
  MOD_RES (1), (34): Xaa is C or S
  MOD_RES (12), (13), (14), (15), (16): Xaa is A or G
  MOD_RES (17), (18), (19), (20): Xaa is A or G or is absent
XSKVVMRYKKLXXXXXXXXXFYLISIANLDQPVX

SEQ ID NO: 2370 - protein, 33 aa, Artificial Sequence
  Non-cyclic GFR-binding peptide
  MOD_RES (33), (33): Xaa is C or S
  MOD_RES (11), (12), (13), (14), (15): Xaa is A or G
  MOD_RES (16), (17), (18), (19): Xaa is A or G or is absent
SRVIMRYKKLXXXXXXXXXFYLISIANLAQPVX

SEQ ID NO: 2371 - protein, 38 aa, Artificial Sequence
  Non-cyclic GFR-binding peptide
  MOD_RES (1), (34), (35): Xaa is C or S
  MOD_RES (12), (13), (14), (15), (16): Xaa is A or G
  MOD_RES (17), (18), (19), (20): Xaa is A or G or is absent
XSKVVMRYKKLXXXXXXXXXFYLISIANLDQPVXXPSA

SEQ ID NO: 2372 - protein, 37 aa, Artificial Sequence
  Non-cyclic GFR-binding peptide
  MOD_RES (1), (3), (37): Xaa is C or S
  MOD_RES (15), (16), (17), (18), (19): Xaa is A or G
  MOD_RES (20), (21), (22), (23): Xaa is A or G or is absent
XGXGEVVMERYKKLXXXXXXXXXFYLMSIANLETPVX

SEQ ID NO: 2373 - protein, 34 aa, Artificial Sequence
  Non-cyclic GFR-binding peptide
  MOD_RES (1), (33), (34): Xaa is C or S
XSRVVMNQYNKLIVNSSDDLYLVSIASLKTPAXX

SEQ ID NO: 2374 - protein, 39 aa, Artificial Sequence
  Non-cyclic GFR-binding peptide
  MOD_RES (33), (34): Xaa is C or S
  MOD_RES (11), (12), (13), (14), (15): Xaa is A or G
  MOD_RES (16), (17), (18), (19): Xaa is A or G or is absent
SRVIMRYKKLXXXXXXXXXFYLISIANLAQPVXXPAASA

SEQ ID NO: 2375 - protein, 41 aa, Artificial Sequence
  Non-cyclic GFR-binding peptide
  MOD_RES (2), (4), (37), (38): Xaa is C or S
  MOD_RES (15), (16), (17), (18), (19): Xaa is A or G
  MOD_RES (20), (21), (22), (23): Xaa is A or G or is absent
SXKXSRVIMQYNKLXXXXXXXXXLYLISIASLAQPVXXPAA

SEQ ID NO: 2376 - protein, 42 aa, Artificial Sequence
  Non-cyclic GFR-binding peptide
  MOD_RES (1), (3), (40): Xaa is C or S
XKXALHDELTRYKKLFIPKKRVIEFYLVSIANLQVQTPRXQV

SEQ ID NO: 2377 - protein, 33 aa, Artificial Sequence
  Non-cyclic GFR-binding peptide
HDELTRHKRLFIPKKRVIEYYLVSTASLQVQTP

SEQ ID NO: 2378 - protein, 35 aa, Artificial Sequence
  Non-cyclic GFR-binding peptide
  MOD_RES (34), (35): Xaa is C or S
  MOD_RES (12), (13), (14), (15), (16): Xaa is A or G
  MOD_RES (17), (18), (19), (20): Xaa is A or G or is absent
SRVVMNQYNKLXXXXXXXXXLYLVSIASLKTPAXX

SEQ ID NO: 2379 - protein, 33 aa, Artificial Sequence
  Non-cyclic GFR-binding peptide
  MOD_RES (2), (2): Xaa is C or S
GXARVVMNRHKRLIVNSSDDYYLVSTASLQTPA

SEQ ID NO: 2380 - protein, 37 aa, Artificial Sequence
  Non-cyclic GFR-binding peptide
  MOD_RES (32), (33): Xaa is C or S
GEVVMEYHYKLVVKDYEDKYLMSIPSLETPVXXAKPI

SEQ ID NO: 2381 - protein, 35 aa, Artificial Sequence
  Non-cyclic GFR-binding peptide
  MOD_RES (13), (14), (15), (16), (17): Xaa is A or G
  MOD_RES (18), (19), (20), (21): Xaa is A or G or is absent
ALHDELTQYNKLXXXXXXXXXLYLVSIASLQVQTP

SEQ ID NO: 2382 - protein, 39 aa, Artificial Sequence
  Non-cyclic GFR-binding peptide
  MOD_RES (2), (4): Xaa is C or S
  MOD_RES (17), (18), (19), (20), (21): Xaa is A or G
  MOD_RES (22), (23), (24), (25): Xaa is A or G or is absent
EXKXALHDELTRHKRLXXXXXXXXXYYLVSTASLQVQTP

SEQ ID NO: 2383 - protein, 34 aa, Artificial Sequence
  Non-cyclic GFR-binding peptide
HDELTRYKKLFIPKKRVIEFYLVSIANLQVQTPR

SEQ ID NO: 2384 - protein, 38 aa, Artificial Sequence
  Non-cyclic GFR-binding peptide
  MOD_RES (1), (33), (34): Xaa is C or S
XAKVVMNYHYKLIVNNSSDKYLVSIPSLKTPAXXAKPV

SEQ ID NO: 2385 - protein, 37 aa, Artificial Sequence
  Non-cyclic GFR-binding peptide
  MOD_RES (1), (3): Xaa is C or S
  MOD_RES (16), (17), (18), (19), (20): Xaa is A or G
  MOD_RES (21), (22), (23), (24): Xaa is A or G or is absent
XKXALHDELTYHYKLXXXXXXXXXKYLVSIPSLQVQT

SEQ ID NO: 2386 - protein, 39 aa, Artificial Sequence
  Non-cyclic GFR-binding peptide
  MOD_RES (2), (34), (35): Xaa is C or S
GXSRVVMNRHKRLIVNSSDDYYLVSTASLKTPAXXPKPV

SEQ ID NO: 2387 - protein, 37 aa, Artificial Sequence
  Non-cyclic GFR-binding peptide
  MOD_RES (2), (4), (37): Xaa is C or S
RXGXEAVSMGERHKRLTPVGMDDYYLVSTASLKTPVX

SEQ ID NO: 2388 - protein, 42 aa, Artificial Sequence
  Non-cyclic GFR-binding peptide
  MOD_RES (2), (4), (38), (39): Xaa is C or S
  MOD_RES (16), (17), (18), (19), (20): Xaa is A or G
  MOD_RES (21), (22), (23), (24): Xaa is A or G or is absent
HXGXSRVVMNQYNKLXXXXXXXXXLYLVSIASLKTPAXXPKP

SEQ ID NO: 2389 - protein, 38 aa, Artificial Sequence
  Non-cyclic GFR-binding peptide
  MOD_RES (1), (3), (37), (38): Xaa is C or S
  MOD_RES (15), (16), (17), (18), (19): Xaa is A or G
  MOD_RES (20), (21), (22), (23): Xaa is A or G or is absent
XGXGEVVMDYHYKLXXXXXXXXXKYLMSIPSLETPVXX

SEQ ID NO: 2390 - protein, 39 aa, Artificial Sequence
  Non-cyclic GFR-binding peptide
  MOD_RES (2), (36), (37): Xaa is C or S
  MOD_RES (14), (15), (16), (17), (18): Xaa is A or G
  MOD_RES (19), (20), (21), (22): Xaa is A or G or is absent
GXAKVVMNRYKKLXXXXXXXXXFYLVSIANLKTPAXXAK

SEQ ID NO: 2391 - protein, 42 aa, Artificial Sequence
  Non-cyclic GFR-binding peptide
  MOD_RES (2), (36), (37): Xaa is C or S
  MOD_RES (14), (15), (16), (17), (18): Xaa is A or G
  MOD_RES (19), (20), (21), (22): Xaa is A or G or is absent
GXGEVVMDYHYKLXXXXXXXXXKYLMSIPSLETPVXXAKPIK

SEQ ID NO: 2392 - protein, 37 aa, Artificial Sequence
  Non-cyclic GFR-binding peptide
  MOD_RES (31), (32): Xaa is C or S
RVVMNYHYKLIVNSSDDKYLVSIPSLQTPAXXPKPVT

SEQ ID NO: 2393 - protein, 36 aa, Artificial Sequence
  Non-cyclic GFR-binding peptide
  MOD_RES (1), (3), (34), (35): Xaa is C or S
XKXSKVVMYHYKLVKPTRGVKYLISIPSLDQPVXXP

SEQ ID NO: 2394 - protein, 34 aa, Artificial Sequence
  Non-cyclic GFR-binding peptide
  MOD_RES (33), (34): Xaa is C or S
  MOD_RES (11), (12), (13), (14), (15): Xaa is A or G
  MOD_RES (16), (17), (18), (19): Xaa is A or G or is absent
SKVIMQYNKLXXXXXXXXXLYLISIASLDQSVXX

SEQ ID NO: 2395 - protein, 44 aa, Artificial Sequence
  Non-cyclic GFR-binding peptide
  MOD_RES (1), (3), (38), (39): Xaa is C or S
  MOD_RES (16), (17), (18), (19), (20): Xaa is A or G
  MOD_RES (21), (22), (23), (24): Xaa is A or G or is absent
XGXEAVSMGERYKKLXXXXXXXXXFYLVSIANLKTPVXXAKGVK

SEQ ID NO: 2396 - protein, 35 aa, Artificial Sequence
  Non-cyclic GFR-binding peptide
  MOD_RES (1), (32), (33): Xaa is C or S
XSKVIMRYKKLIKPTKGIFYLISIANLDQSVXXPS

SEQ ID NO: 2397 - protein, 40 aa, Artificial Sequence
  Non-cyclic GFR-binding peptide
  MOD_RES (36), (36): Xaa is C or S
LHDELTYHYKLFIPKKRVIEKYLVSIPSLQVQTPRXQVNR

SEQ ID NO: 2398 - protein, 35 aa, Artificial Sequence
  Non-cyclic GFR-binding peptide
  MOD_RES (1), (3), (35): Xaa is C or S
XGXGEVVMDYHYKLVVKENEDKYLMSIPSLETPVX

SEQ ID NO: 2399 - protein, 41 aa, Artificial Sequence
  Non-cyclic GFR-binding peptide
  MOD_RES (2), (36), (37): Xaa is C or S
  MOD_RES (14), (15), (16), (17), (18): Xaa is A or G
  MOD_RES (19), (20), (21), (22): Xaa is A or G or is absent
GXGEVVMDRYKKLXXXXXXXXXFYLMSIANLETPVXXAKPI

SEQ ID NO: 2400 - protein, 39 aa, Artificial Sequence
  Non-cyclic GFR-binding peptide
  MOD_RES (1), (3), (37), (38): Xaa is C or S
  MOD_RES (15), (16), (17), (18), (19): Xaa is A or G
  MOD_RES (20), (21), (22), (23): Xaa is A or G or is absent
XGXGEVVMERHKRLXXXXXXXXXYYLMSTASLETPVXXA

SEQ ID NO: 2401 - protein, 38 aa, Artificial Sequence
  Non-cyclic GFR-binding peptide
  MOD_RES (37), (37): Xaa is C or S
ALHDELTRYKKLFIPKKRVIEFYLVSIANLQVQTPRXQ

SEQ ID NO: 2402 - protein, 35 aa, Artificial Sequence
  Non-cyclic GFR-binding peptide
  MOD_RES (33), (34): Xaa is C or S
  MOD_RES (11), (12), (13), (14), (15): Xaa is A or G
  MOD_RES (16), (17), (18), (19): Xaa is A or G or is absent
SRVIMRHKRLXXXXXXXXXYYLISTASLAQPVXXP

SEQ ID NO: 2403 - protein, 36 aa, Artificial Sequence
  Non-cyclic GFR-binding peptide
  MOD_RES (1), (34), (35): Xaa is C or S
  MOD_RES (12), (13), (14), (15), (16): Xaa is A or G
  MOD_RES (17), (18), (19), (20): Xaa is A or G or is absent
XSKVIMRYKKLXXXXXXXXXFYLISIANLDQSVXXP

SEQ ID NO: 2404 - protein, 34 aa, Artificial Sequence
  Non-cyclic GFR-binding peptide
  MOD_RES (1), (32), (33): Xaa is C or S
XSKVIMRHKRLIKPTKGIYYLISTASLDQSVXXP

SEQ ID NO: 2405 - protein, 41 aa, Artificial Sequence
  Non-cyclic GFR-binding peptide
  MOD_RES (1), (3), (35), (36): Xaa is C or S
XGXARVVMNYHYKLIVNSSDDKYLVSIPSLQTPAXXPKPVT

SEQ ID NO: 2406 - protein, 38 aa, Artificial Sequence
  Non-cyclic GFR-binding peptide
  MOD_RES (2), (4), (36), (37): Xaa is C or S
HXGXAKVVMNRYKKLIVNNSSDFYLVSIANLKTPAXXA

SEQ ID NO: 2407 - protein, 34 aa, Artificial Sequence
  Non-cyclic GFR-binding peptide
  MOD_RES (33), (34): Xaa is C or S
  MOD_RES (11), (12), (13), (14), (15): Xaa is A or G
  MOD_RES (16), (17), (18), (19): Xaa is A or G or is absent
KVVMNQYNKLXXXXXXXXXLYLVSIASLKTPAXX

SEQ ID NO: 2408 - protein, 36 aa, Artificial Sequence
  Non-cyclic GFR-binding peptide
  MOD_RES (2), (34), (35): Xaa is C or S
GXARVVMNRHKRLIVNSSDDYYLVSTASLQTPAXXP

SEQ ID NO: 2409 - protein, 40 aa, Artificial Sequence
  Non-cyclic GFR-binding peptide
  MOD_RES (2), (4), (36), (37): Xaa is C or S
HXGXARVVMNYHYKLIVNSSDDKYLVSIPSLQTPAXXPKP

SEQ ID NO: 2410 - protein, 38 aa, Artificial Sequence
  Non-cyclic GFR-binding peptide
  MOD_RES (33), (34): Xaa is C or S
  MOD_RES (11), (12), (13), (14), (15): Xaa is A or G
  MOD_RES (16), (17), (18), (19): Xaa is A or G or is absent
SKVIMRYKKLXXXXXXXXXFYLISIANLDQSVXXPSAS

SEQ ID NO: 2411 - protein, 34 aa, Artificial Sequence
  Non-cyclic GFR-binding peptide
  MOD_RES (33), (34): Xaa is C or S
  MOD_RES (11), (12), (13), (14), (15): Xaa is A or G
  MOD_RES (16), (17), (18), (19): Xaa is A or G or is absent
RVVMNQYNKLXXXXXXXXXLYLVSIASLKTPAXX

SEQ ID NO: 2412 - protein, 32 aa, Artificial Sequence
  Non-cyclic GFR-binding peptide
  MOD_RES (31), (31): Xaa is C or S
RVVMNQYNKLIVNSSDDLYLVSIASLKTPAXT

SEQ ID NO: 2413 - protein, 34 aa, Artificial Sequence
  Non-cyclic GFR-binding peptide
  MOD_RES (31), (32): Xaa is C or S
SKVIMYHYKLIKPTKGIKYLISIPSLDQSVXXPS

SEQ ID NO: 2414 - protein, 38 aa, Artificial Sequence
  Non-cyclic GFR-binding peptide
  MOD_RES (2), (4), (36), (37): Xaa is C or S
RXGXGEVVMDYHYKLVVKENEDKYLMSIPSLETPVXXA

SEQ ID NO: 2415 - protein, 36 aa, Artificial Sequence
  Non-cyclic GFR-binding peptide
  MOD_RES (2), (35), (36): Xaa is C or S
  MOD_RES (13), (14), (15), (16), (17): Xaa is A or G
  MOD_RES (18), (19), (20), (21): Xaa is A or G or is absent
KXSKVIMRHKRLXXXXXXXXXYYLISTASLDQSVXX

SEQ ID NO: 2416 - protein, 41 aa, Artificial Sequence
  Non-cyclic GFR-binding peptide
  MOD_RES (37), (37): Xaa is C or S
ALHDELTRHKRLFIPKKRVIEYYLVSTASLQVQTPRXQVNR

SEQ ID NO: 2417 - protein, 39 aa, Artificial Sequence
  Non-cyclic GFR-binding peptide
  MOD_RES (1), (3), (35), (36): Xaa is C or S
XGXARVVMNYHYKLIVNSSDDKYLVSIPSLQTPAXXPKP

SEQ ID NO: 2418 - protein, 36 aa, Artificial Sequence
  Non-cyclic GFR-binding peptide
  MOD_RES (35), (35): Xaa is C or S
HDELTYHYKLFIPKKRVIEKYLVSIPSLQVQTPRXQ

SEQ ID NO: 2419 - protein, 38 aa, Artificial Sequence
  Non-cyclic GFR-binding peptide
  MOD_RES (1), (33), (34): Xaa is C or S
XARVVMNYHYKLIVNSSDDKYLVSIPSLQTPAXXPKPV

SEQ ID NO: 2420 - protein, 36 aa, Artificial Sequence
  Non-cyclic GFR-binding peptide
  MOD_RES (1), (32), (33): Xaa is C or S
XSKVIMRYKKLIKPTKGIFYLISIANLDQSVXXPSA

SEQ ID NO: 2421 - protein, 37 aa, Artificial Sequence
  Non-cyclic GFR-binding peptide
  MOD_RES (1), (3), (34), (35): Xaa is C or S
XKXSKVVMRHKRLVKPTRGVYYLISTASLDQPVXXPS

SEQ ID NO: 2422 - protein, 40 aa, Artificial Sequence
  Non-cyclic GFR-binding peptide
  MOD_RES (2), (4), (36), (37): Xaa is C or S
RXGXGEVVMEYHYKLVVKDYEDKYLMSIPSLETPVXXAKP

SEQ ID NO: 2423 - protein, 44 aa, Artificial Sequence
  Non-cyclic GFR-binding peptide
  MOD_RES (1), (3), (40): Xaa is C or S
  MOD_RES (16), (17), (18), (19), (20): Xaa is A or G
  MOD_RES (21), (22), (23), (24): Xaa is A or G or is absent
XKXALHDELTQYNKLXXXXXXXXXLYLVSIASLQVQTPRXQVNR

SEQ ID NO: 2424 - protein, 41 aa, Artificial Sequence
  Non-cyclic GFR-binding peptide
  MOD_RES (1), (38): Xaa is C or S
XALHDELTRYKKLFIPKKRVIEFYLVSIANLQVQTPRXQVN

SEQ ID NO: 2425 - protein, 35 aa, Artificial Sequence
  Non-cyclic GFR-binding peptide
  MOD_RES (2), (35): Xaa is C or S
  MOD_RES (13), (14), (15), (16), (17): Xaa is A or G
  MOD_RES (18), (19), (20), (21): Xaa is A or G or is absent
KXSKVIMQYNKLXXXXXXXXXLYLISIASLDQSVX

SEQ ID NO: 2426 - protein, 35 aa, Artificial Sequence
  Non-cyclic GFR-binding peptide
  MOD_RES (2), (35): Xaa is C or S
  MOD_RES (13), (14), (15), (16), (17): Xaa is A or G
  MOD_RES (18), (19), (20), (21): Xaa is A or G or is absent
KXSKVVMRHKRLXXXXXXXXXYYLISTASLDQPVX

SEQ ID NO: 2427 - protein, 35 aa, Artificial Sequence
  Non-cyclic GFR-binding peptide
  MOD_RES (2), (2): Xaa is C or S
  MOD_RES (14), (15), (16), (17), (18): Xaa is A or G
  MOD_RES (19), (20), (21), (22): Xaa is A or G or is absent
GXGEVVMERYKKLXXXXXXXXXFYLMSIANLETPV

SEQ ID NO: 2428 - protein, 36 aa, Artificial Sequence
  Non-cyclic GFR-binding peptide
  MOD_RES (1), (33), (34): Xaa is C or S
XGEVVMEYHYKLVVKDYEDKYLMSIPSLETPVXXAK

SEQ ID NO: 2429 - protein, 32 aa, Artificial Sequence
  Non-cyclic GFR-binding peptide
  MOD_RES (32), (32): Xaa is C or S
AKVVMNYHYKLIVNNSSDKYLVSIPSLKTPAX

SEQ ID NO: 2430 - protein, 37 aa, Artificial Sequence
  Non-cyclic GFR-binding peptide
  MOD_RES (2), (4), (36), (37): Xaa is C or S
RXGXGEVVMERHKRLVVKDYEDYYLMSTASLETPVXX

SEQ ID NO: 2431 - protein, 41 aa, Artificial Sequence
  Non-cyclic GFR-binding peptide
  MOD_RES (37), (37): Xaa is C or S
ALHDELTQYNKLFIPKKRVIELYLVSIASLQVQTPRXQVNR

SEQ ID NO: 2432 - protein, 40 aa, Artificial Sequence
  Non-cyclic GFR-binding peptide
  MOD_RES (34), (35): Xaa is C or S
  MOD_RES (12), (13), (14), (15), (16): Xaa is A or G
  MOD_RES (17), (18), (19), (20): Xaa is A or G or is absent
GEVVMERHKRLXXXXXXXXXYYLMSTASLETPVXXAKPIS

SEQ ID NO: 2433 - protein, 35 aa, Artificial Sequence
  Non-cyclic GFR-binding peptide
  MOD_RES (1), (33), (34): Xaa is C or S
XARVVMNRHKRLIVNSSDDYYLVSTASLQTPAXXP

SEQ ID NO: 2434 - protein, 37 aa, Artificial Sequence
  Non-cyclic GFR-binding peptide
  MOD_RES (2), (36), (37): Xaa is C or S
  MOD_RES (14), (15), (16), (17), (18): Xaa is A or G
  MOD_RES (19), (20), (21), (22): Xaa is A or G or is absent
GXGEVVMEYHYKLXXXXXXXXXKYLMSIPSLETPVXX

SEQ ID NO: 2435 - protein, 36 aa, Artificial Sequence
  Non-cyclic GFR-binding peptide
  MOD_RES (1), (1): Xaa is C or S
  MOD_RES (14), (15), (16), (17), (18): Xaa is A or G
  MOD_RES (19), (20), (21), (22): Xaa is A or G or is absent
XALHDELTYHYKLXXXXXXXXXKYLVSIPSLQVQTP

SEQ ID NO: 2436 - protein, 42 aa, Artificial Sequence
  Non-cyclic GFR-binding peptide
  MOD_RES (2), (39): Xaa is C or S
  MOD_RES (15), (16), (17), (18), (19): Xaa is A or G
  MOD_RES (20), (21), (22), (23): Xaa is A or G or is absent
KXALHDELTQYNKLXXXXXXXXXLYLVSIASLQVQTPRXQVN

SEQ ID NO: 2437 - protein, 41 aa, Artificial Sequence
  Non-cyclic GFR-binding peptide
  MOD_RES (2), (36), (37): Xaa is C or S
  MOD_RES (14), (15), (16), (17), (18): Xaa is A or G
  MOD_RES (19), (20), (21), (22): Xaa is A or G or is absent
GXGEVVMDRHKRLXXXXXXXXXYYLMSTASLETPVXXAKPI

SEQ ID NO: 2438 - protein, 34 aa, Artificial Sequence
  Non-cyclic GFR-binding peptide
  MOD_RES (1), (3), (34): Xaa is C or S
XKXSRVIMQYNKLVKPKRGVLYLISIASLAQPVX

SEQ ID NO: 2439 - protein, 33 aa, Artificial Sequence
  Non-cyclic GFR-binding peptide
  MOD_RES (31), (32): Xaa is C or S
EVVMDRYKKLVVKENEDFYLMSIANLETPVXXA

SEQ ID NO: 2440 - protein, 36 aa, Artificial Sequence
  Non-cyclic GFR-binding peptide
  MOD_RES (33), (34): Xaa is C or S
EAVSMGERHKRLTPVGMDDYYLVSTASLKTPVXXAK

SEQ ID NO: 2441 - protein, 32 aa, Artificial Sequence
  Non-cyclic GFR-binding peptide
  MOD_RES (11), (12), (13), (14), (15): Xaa is A or G
  MOD_RES (16), (17), (18), (19): Xaa is A or G or is absent
HDELTYHYKLXXXXXXXXXKYLVSIPSLQVQT

SEQ ID NO: 2442 - protein, 35 aa, Artificial Sequence
  Non-cyclic GFR-binding peptide
  MOD_RES (31), (32): Xaa is C or S
EVVMERHKRLVVKDYEDYYLMSTASLETPVXXAKP

SEQ ID NO: 2443 - protein, 43 aa, Artificial Sequence
  Non-cyclic GFR-binding peptide
  MOD_RES (2), (4), (37), (38): Xaa is C or S
  MOD_RES (15), (16), (17), (18), (19): Xaa is A or G
  MOD_RES (20), (21), (22), (23): Xaa is A or G or is absent
SXKXSRVIMRHKRLXXXXXXXXXYYLISTASLAQPVXXPAASA

SEQ ID NO: 2444 - protein, 37 aa, Artificial Sequence
  Non-cyclic GFR-binding peptide
  MOD_RES (2), (2): Xaa is C or S
KXALHDELTRHKRLFIPKKRVIEYYLVSTASLQVQTP

SEQ ID NO: 2445 - protein, 37 aa, Artificial Sequence
  Non-cyclic GFR-binding peptide
  MOD_RES (2), (36): Xaa is C or S
  MOD_RES (14), (15), (16), (17), (18): Xaa is A or G
  MOD_RES (19), (20), (21), (22): Xaa is A or G or is absent
GXSRVVMNYHYKLXXXXXXXXXKYLVSIPSLKTPAXT

SEQ ID NO: 2446 - protein, 39 aa, Artificial Sequence
  Non-cyclic GFR-binding peptide
  MOD_RES (2), (35), (36): Xaa is C or S
  MOD_RES (13), (14), (15), (16), (17): Xaa is A or G
  MOD_RES (18), (19), (20), (21): Xaa is A or G or is absent
KXSKVVMRHKRLXXXXXXXXXYYLISTASLDQPVXXPSA

SEQ ID NO: 2447 - protein, 41 aa, Artificial Sequence
  Non-cyclic GFR-binding peptide
  MOD_RES (1), (3), (40): Xaa is C or S
XKXALHDELTYHYKLFIPKKRVIEKYLVSIPSLQVQTPRXQ

SEQ ID NO: 2448 - protein, 31 aa, Artificial Sequence
  Non-cyclic GFR-binding peptide
  MOD_RES (31), (31): Xaa is C or S
EVVMDRYKKLVVKENEDFYLMSIANLETPVX

SEQ ID NO: 2449 - protein, 33 aa, Artificial Sequence
  Non-cyclic GFR-binding peptide
  MOD_RES (32), (32): Xaa is C or S
SRVVMNRHKRLIVNSSDDYYLVSTASLKTPAXT

SEQ ID NO: 2450 - protein, 41 aa, Artificial Sequence
  Non-cyclic GFR-binding peptide
  MOD_RES (1), (3), (37), (38): Xaa is C or S
  MOD_RES (15), (16), (17), (18), (19): Xaa is A or G
  MOD_RES (20), (21), (22), (23): Xaa is A or G or is absent
XGXARVVMNRHKRLXXXXXXXXXYYLVSTASLQTPAXXPKP

SEQ ID NO: 2451 - protein, 35 aa, Artificial Sequence
  Non-cyclic GFR-binding peptide
  MOD_RES (2), (2): Xaa is C or S
  MOD_RES (14), (15), (16), (17), (18): Xaa is A or G
  MOD_RES (19), (20), (21), (22): Xaa is A or G or is absent
GXARVVMNYHYKLXXXXXXXXXKYLVSIPSLQTPA

SEQ ID NO: 2452 - protein, 40 aa, Artificial Sequence
  Non-cyclic GFR-binding peptide
  MOD_RES (2), (4), (36), (37): Xaa is C or S
RXGXGEVVMDRYKKLVVKENEDFYLMSIANLETPVXXAKP

SEQ ID NO: 2453 - protein, 34 aa, Artificial Sequence
  Non-cyclic GFR-binding peptide
  MOD_RES (1), (3): Xaa is C or S
XGXSRVVMNRHKRLIVNSSDDYYLVSTASLKTPA

SEQ ID NO: 2454 - protein, 32 aa, Artificial Sequence
  Non-cyclic GFR-binding peptide
  MOD_RES (31), (32): Xaa is C or S
SKVIMQYNKLIKPTKGILYLISIASLDQSVXX

SEQ ID NO: 2455 - protein, 33 aa, Artificial Sequence
  Non-cyclic GFR-binding peptide
  MOD_RES (33), (33): Xaa is C or S
  MOD_RES (11), (12), (13), (14), (15): Xaa is A or G
  MOD_RES (16), (17), (18), (19): Xaa is A or G or is absent
EVVMERYKKLXXXXXXXXXFYLMSIANLETPVX

SEQ ID NO: 2456 - protein, 39 aa, Artificial Sequence
  Non-cyclic GFR-binding peptide
  MOD_RES (33), (34): Xaa is C or S
  MOD_RES (11), (12), (13), (14), (15): Xaa is A or G
  MOD_RES (16), (17), (18), (19): Xaa is A or G or is absent
KVVMNYHYKLXXXXXXXXXKYLVSIPSLKTPAXXAKPVA

SEQ ID NO: 2457 - protein, 42 aa, Artificial Sequence
  Non-cyclic GFR-binding peptide
  MOD_RES (1), (38): Xaa is C or S
XALHDELTYHYKLFIPKKRVIEKYLVSIPSLQVQTPRXQVNR

SEQ ID NO: 2458 - protein, 35 aa, Artificial Sequence
  Non-cyclic GFR-binding peptide
  MOD_RES (35), (35): Xaa is C or S
  MOD_RES (13), (14), (15), (16), (17): Xaa is A or G
  MOD_RES (18), (19), (20), (21): Xaa is A or G or is absent
EAVSMGERHKRLXXXXXXXXXYYLVSTASLKTPVX

SEQ ID NO: 2459 - protein, 38 aa, Artificial Sequence
  Non-cyclic GFR-binding peptide
  MOD_RES (1), (32), (33): Xaa is C or S
XSRVIMQYNKLVKPKRGVLYLISIASLAQPVXXPAASA

SEQ ID NO: 2460 - protein, 36 aa, Artificial Sequence
  Non-cyclic GFR-binding peptide
  MOD_RES (2), (36): Xaa is C or S
  MOD_RES (14), (15), (16), (17), (18): Xaa is A or G
  MOD_RES (19), (20), (21), (22): Xaa is A or G or is absent
GXSRVVMNRHKRLXXXXXXXXXYYLVSTASLKTPAX

SEQ ID NO: 2461 - protein, 33 aa, Artificial Sequence
  Non-cyclic GFR-binding peptide
  MOD_RES (33), (33): Xaa is C or S
  MOD_RES (11), (12), (13), (14), (15): Xaa is A or G
  MOD_RES (16), (17), (18), (19): Xaa is A or G or is absent
SKVVMQYNKLXXXXXXXXXLYLISIASLDQPVX

SEQ ID NO: 2462 - protein, 35 aa, Artificial Sequence
  Non-cyclic GFR-binding peptide
  MOD_RES (35), (35): Xaa is C or S
  MOD_RES (13), (14), (15), (16), (17): Xaa is A or G
  MOD_RES (18), (19), (20), (21): Xaa is A or G or is absent
EAVSMGEQYNKLXXXXXXXXXLYLVSIASLKTPVX

SEQ ID NO: 2463 - protein, 32 aa, Artificial Sequence
  Non-cyclic GFR-binding peptide
  MOD_RES (1), (32): Xaa is C or S
XSRVIMQYNKLVKPKRGVLYLISIASLAQPVX

SEQ ID NO: 2464 - protein, 41 aa, Artificial Sequence
  Non-cyclic GFR-binding peptide
  MOD_RES (2), (39): Xaa is C or S
  MOD_RES (15), (16), (17), (18), (19): Xaa is A or G
  MOD_RES (20), (21), (22), (23): Xaa is A or G or is absent
KXALHDELTYHYKLXXXXXXXXXKYLVSIPSLQVQTPRXQV

SEQ ID NO: 2465 - protein, 39 aa, Artificial Sequence
  Non-cyclic GFR-binding peptide
  MOD_RES (33), (34): Xaa is C or S
  MOD_RES (11), (12), (13), (14), (15): Xaa is A or G
  MOD_RES (16), (17), (18), (19): Xaa is A or G or is absent
RVVMNYHYKLXXXXXXXXXKYLVSIPSLQTPAXXPKPVT

SEQ ID NO: 2466 - protein, 40 aa, Artificial Sequence
  Non-cyclic GFR-binding peptide
  MOD_RES (1), (3), (38), (39): Xaa is C or S
  MOD_RES (16), (17), (18), (19), (20): Xaa is A or G
  MOD_RES (21), (22), (23), (24): Xaa is A or G or is absent
XGXEAVSMGERHKRLXXXXXXXXXYYLVSTASLKTPVXXA

SEQ ID NO: 2467 - protein, 35 aa, Artificial Sequence
  Non-cyclic GFR-binding peptide
  MOD_RES (34), (35): Xaa is C or S
  MOD_RES (12), (13), (14), (15), (16): Xaa is A or G
  MOD_RES (17), (18), (19), (20): Xaa is A or G or is absent
AKVVMNQYNKLXXXXXXXXXLYLVSIASLKTPAXX

SEQ ID NO: 2468 - protein, 37 aa, Artificial Sequence
  Non-cyclic GFR-binding peptide
  MOD_RES (32), (33): Xaa is C or S
SRVVMNYHYKLIVNSSDDKYLVSIPSLKTPAXXPKPV

SEQ ID NO: 2469 - protein, 43 aa, Artificial Sequence
  Non-cyclic GFR-binding peptide
  MOD_RES (2), (4), (39), (40): Xaa is C or S
  MOD_RES (17), (18), (19), (20), (21): Xaa is A or G
  MOD_RES (22), (23), (24), (25): Xaa is A or G or is absent
RXGXEAVSMGERYKKLXXXXXXXXXFYLVSIANLKTPVXXAKG

SEQ ID NO: 2470 - protein, 31 aa, Artificial Sequence
  Non-cyclic GFR-binding peptide
  MOD_RES (1), (1): Xaa is C or S
XSKVVMQYNKLVKPTRGVLYLISIASLDQPV

SEQ ID NO: 2471 - protein, 40 aa, Artificial Sequence
  Non-cyclic GFR-binding peptide
  MOD_RES (1), (3), (34), (35): Xaa is C or S
XKXSRVIMYHYKLVKPKRGVKYLISIPSLAQPVXXPAASA

SEQ ID NO: 2472 - protein, 38 aa, Artificial Sequence
  Non-cyclic GFR-binding peptide
  MOD_RES (2), (4): Xaa is C or S
  MOD_RES (17), (18), (19), (20), (21): Xaa is A or G
  MOD_RES (22), (23), (24), (25): Xaa is A or G or is absent
RXGXEAVSMGERYKKLXXXXXXXXXFYLVSIANLKTPV

SEQ ID NO: 2473 - protein, 35 aa, Artificial Sequence
  Non-cyclic GFR-binding peptide
  MOD_RES (31), (32): Xaa is C or S
EVVMEYHYKLVVKDYEDKYLMSIPSLETPVXXAKP

SEQ ID NO: 2474 - protein, 36 aa, Artificial Sequence
  Non-cyclic GFR-binding peptide
  MOD_RES (33), (34): Xaa is C or S
  MOD_RES (11), (12), (13), (14), (15): Xaa is A or G
  MOD_RES (16), (17), (18), (19): Xaa is A or G or is absent
EVVMEYHYKLXXXXXXXXXKYLMSIPSLETPVXXAK

SEQ ID NO: 2475 - protein, 37 aa, Artificial Sequence
  Non-cyclic GFR-binding peptide
  MOD_RES (1), (3), (35), (36): Xaa is C or S
XGXARVVMNYHYKLIVNSSDDKYLVSIPSLQTPAXXP

SEQ ID NO: 2476 - protein, 35 aa, Artificial Sequence
  Non-cyclic GFR-binding peptide
  MOD_RES (1), (1): Xaa is C or S
  MOD_RES (14), (15), (16), (17), (18): Xaa is A or G
  MOD_RES (19), (20), (21), (22): Xaa is A or G or is absent
XEAVSMGERYKKLXXXXXXXXXFYLVSIANLKTPV

SEQ ID NO: 2477 - protein, 40 aa, Artificial Sequence
  Non-cyclic GFR-binding peptide
  MOD_RES (2), (4), (37), (38): Xaa is C or S
  MOD_RES (15), (16), (17), (18), (19): Xaa is A or G
  MOD_RES (20), (21), (22), (23): Xaa is A or G or is absent
SXKXSRVIMQYNKLXXXXXXXXXLYLISIASLAQPVXXPA

SEQ ID NO: 2478 - protein, 38 aa, Artificial Sequence
  Non-cyclic GFR-binding peptide
  MOD_RES (32), (33): Xaa is C or S
SRVVMNQYNKLIVNSSDDLYLVSIASLKTPAXXPKPVY

SEQ ID NO: 2479 - protein, 39 aa, Artificial Sequence
  Non-cyclic GFR-binding peptide
  MOD_RES (2), (4), (35), (36): Xaa is C or S
SXKXSKVVMRYKKLVKPTRGVFYLISIANLDQPVXXPSA

SEQ ID NO: 2480 - protein, 39 aa, Artificial Sequence
  Non-cyclic GFR-binding peptide
  MOD_RES (34), (35): Xaa is C or S
  MOD_RES (12), (13), (14), (15), (16): Xaa is A or G
  MOD_RES (17), (18), (19), (20): Xaa is A or G or is absent
GEVVMERYKKLXXXXXXXXXFYLMSIANLETPVXXAKPI

SEQ ID NO: 2481 - protein, 35 aa, Artificial Sequence
  Non-cyclic GFR-binding peptide
  MOD_RES (1), (3): Xaa is C or S
  MOD_RES (14), (15), (16), (17), (18): Xaa is A or G
  MOD_RES (19), (20), (21), (22): Xaa is A or G or is absent
XKXSKVIMQYNKLXXXXXXXXXLYLISIASLDQSV

SEQ ID NO: 2482 - protein, 40 aa, Artificial Sequence
  Non-cyclic GFR-binding peptide
  MOD_RES (2), (4), (35), (36): Xaa is C or S
SXKXSKVVMYHYKLVKPTRGVKYLISIPSLDQPVXXPSAS

SEQ ID NO: 2483 - protein, 43 aa, Artificial Sequence
  Non-cyclic GFR-binding peptide
  MOD_RES (2), (4), (38), (39): Xaa is C or S
  MOD_RES (16), (17), (18), (19), (20): Xaa is A or G
  MOD_RES (21), (22), (23), (24): Xaa is A or G or is absent
RXGXGEVVMERHKRLXXXXXXXXXYYLMSTASLETPVXXAKPI

SEQ ID NO: 2484 - protein, 40 aa, Artificial Sequence
  Non-cyclic GFR-binding peptide
  MOD_RES (2), (34): Xaa is C or S
GXSRVVMNQYNKLIVNSSDDLYLVSIASLKTPAXTPKTVH

SEQ ID NO: 2485 - protein, 33 aa, Artificial Sequence
  Non-cyclic GFR-binding peptide
LHDELTQYNKLFIPKKRVIELYLVSIASLQVQT

SEQ ID NO: 2486 - protein, 34 aa, Artificial Sequence
  Non-cyclic GFR-binding peptide
  MOD_RES (1), (32), (33): Xaa is C or S
XSRVIMRHKRLVKPKRGVYYLISTASLAQPVXXP

SEQ ID NO: 2487 - protein, 38 aa, Artificial Sequence
  Non-cyclic GFR-binding peptide
  MOD_RES (34), (35): Xaa is C or S
  MOD_RES (12), (13), (14), (15), (16): Xaa is A or G
  MOD_RES (17), (18), (19), (20): Xaa is A or G or is absent
GEVVMEYHYKLXXXXXXXXXKYLMSIPSLETPVXXAKP

SEQ ID NO: 2488 - protein, 38 aa, Artificial Sequence
  Non-cyclic GFR-binding peptide
  MOD_RES (2), (34), (35): Xaa is C or S
GXGEVVMDYHYKLVVKENEDKYLMSIPSLETPVXXAKP

SEQ ID NO: 2489 - protein, 34 aa, Artificial Sequence
  Non-cyclic GFR-binding peptide
  MOD_RES (1), (3): Xaa is C or S
XGXSRVVMNQYNKLIVNSSDDLYLVSIASLKTPA

SEQ ID NO: 2490 - protein, 33 aa, Artificial Sequence
  Non-cyclic GFR-binding peptide
HDELTYHYKLFIPKKRVIEKYLVSIPSLQVQTP

SEQ ID NO: 2491 - protein, 38 aa, Artificial Sequence
  Non-cyclic GFR-binding peptide
  MOD_RES (2), (4), (35), (36): Xaa is C or S
SXKXSKVVMQYNKLVKPTRGVLYLISIASLDQPVXXPS

SEQ ID NO: 2492 - protein, 37 aa, Artificial Sequence
  Non-cyclic GFR-binding peptide
  MOD_RES (33), (34): Xaa is C or S
  MOD_RES (11), (12), (13), (14), (15): Xaa is A or G
  MOD_RES (16), (17), (18), (19): Xaa is A or G or is absent
EVVMDRHKRLXXXXXXXXXYYLMSTASLETPVXXAKP

SEQ ID NO: 2493 - protein, 34 aa, Artificial Sequence
  Non-cyclic GFR-binding peptide
  MOD_RES (2), (4): Xaa is C or S
SXKXSKVIMYHYKLIKPTKGIKYLISIPSLDQSV

SEQ ID NO: 2494 - protein, 34 aa, Artificial Sequence
  Non-cyclic GFR-binding peptide
  MOD_RES (34), (34): Xaa is C or S
  MOD_RES (12), (13), (14), (15), (16): Xaa is A or G
  MOD_RES (17), (18), (19), (20): Xaa is A or G or is absent
ARVVMNRHKRLXXXXXXXXXYYLVSTASLQTPAX

SEQ ID NO: 2495 - protein, 38 aa, Artificial Sequence
  Non-cyclic GFR-binding peptide
  MOD_RES (2), (4), (38): Xaa is C or S
  MOD_RES (16), (17), (18), (19), (20): Xaa is A or G
  MOD_RES (21), (22), (23), (24): Xaa is A or G or is absent
HXGXARVVMNYHYKLXXXXXXXXXKYLVSIPSLQTPAX

SEQ ID NO: 2496 - protein, 38 aa, Artificial Sequence
  Non-cyclic GFR-binding peptide
  MOD_RES (2), (35), (36): Xaa is C or S
  MOD_RES (13), (14), (15), (16), (17): Xaa is A or G
  MOD_RES (18), (19), (20), (21): Xaa is A or G or is absent
KXSKVIMYHYKLXXXXXXXXXKYLISIPSLDQSVXXPS

SEQ ID NO: 2497 - protein, 32 aa, Artificial Sequence
  Non-cyclic GFR-binding peptide
  MOD_RES (31), (31): Xaa is C or S
RVVMNYHYKLIVNSSDDKYLVSIPSLKTPAXT

SEQ ID NO: 2498 - protein, 43 aa, Artificial Sequence
  Non-cyclic GFR-binding peptide
  MOD_RES (2), (39): Xaa is C or S
  MOD_RES (15), (16), (17), (18), (19): Xaa is A or G
  MOD_RES (20), (21), (22), (23): Xaa is A or G or is absent
KXALHDELTYHYKLXXXXXXXXXKYLVSIPSLQVQTPRXQVNR

SEQ ID NO: 2499 - protein, 35 aa, Artificial Sequence
  Non-cyclic GFR-binding peptide
  MOD_RES (33), (33): Xaa is C or S
  MOD_RES (11), (12), (13), (14), (15): Xaa is A or G
  MOD_RES (16), (17), (18), (19): Xaa is A or G or is absent
RVVMNYHYKLXXXXXXXXXKYLVSIPSLKTPAXTP

SEQ ID NO: 2500 - protein, 39 aa, Artificial Sequence
  Non-cyclic GFR-binding peptide
  MOD_RES (1), (3): Xaa is C or S
  MOD_RES (16), (17), (18), (19), (20): Xaa is A or G
  MOD_RES (21), (22), (23), (24): Xaa is A or G or is absent
XKXALHDELTRYKKLXXXXXXXXXFYLVSIANLQVQTPR

SEQ ID NO: 2501 - protein, 36 aa, Artificial Sequence
  Non-cyclic GFR-binding peptide
  MOD_RES (2), (36): Xaa is C or S
  MOD_RES (14), (15), (16), (17), (18): Xaa is A or G
  MOD_RES (19), (20), (21), (22): Xaa is A or G or is absent
GXAKVVMNQYNKLXXXXXXXXXLYLVSIASLKTPAX

SEQ ID NO: 2502 - protein, 38 aa, Artificial Sequence
  Non-cyclic GFR-binding peptide
  MOD_RES (2), (35), (36): Xaa is C or S
GXEAVSMGEQYNKLTPVGMDDLYLVSIASLKTPVXXAK

SEQ ID NO: 2503 - protein, 39 aa, Artificial Sequence
  Non-cyclic GFR-binding peptide
  MOD_RES (1), (33), (34): Xaa is C or S
XARVVMNYHYKLIVNSSDDKYLVSIPSLQTPAXXPKPVT

SEQ ID NO: 2504 - protein, 38 aa, Artificial Sequence
  Non-cyclic GFR-binding peptide
  MOD_RES (1), (3), (35), (36): Xaa is C or S
XGXGEVVMEYHYKLVVKDYEDKYLMSIPSLETPVXXAK

SEQ ID NO: 2505 - protein, 39 aa, Artificial Sequence
  Non-cyclic GFR-binding peptide
  MOD_RES (35), (36): Xaa is C or S
  MOD_RES (13), (14), (15), (16), (17): Xaa is A or G
  MOD_RES (18), (19), (20), (21): Xaa is A or G or is absent
EAVSMGERYKKLXXXXXXXXXFYLVSIANLKTPVXXAKG

SEQ ID NO: 2506 - protein, 33 aa, Artificial Sequence
  Non-cyclic GFR-binding peptide
  MOD_RES (32), (32): Xaa is C or S
SRVVMNQYNKLIVNSSDDLYLVSIASLKTPAXT

SEQ ID NO: 2507 - protein, 42 aa, Artificial Sequence
  Non-cyclic GFR-binding peptide
  MOD_RES (1), (3), (37): Xaa is C or S
  MOD_RES (15), (16), (17), (18), (19): Xaa is A or G
  MOD_RES (20), (21), (22), (23): Xaa is A or G or is absent
XGXSRVVMNYHYKLXXXXXXXXXKYLVSIPSLKTPAXTPKTV

SEQ ID NO: 2508 - protein, 38 aa, Artificial Sequence
  Non-cyclic GFR-binding peptide
  MOD_RES (34), (35): Xaa is C or S
  MOD_RES (12), (13), (14), (15), (16): Xaa is A or G
  MOD_RES (17), (18), (19), (20): Xaa is A or G or is absent
GEVVMERHKRLXXXXXXXXXYYLMSTASLETPVXXAKP

SEQ ID NO: 2509 - protein, 32 aa, Artificial Sequence
  Non-cyclic GFR-binding peptide
  MOD_RES (2), (2): Xaa is C or S
KXSRVIMRHKRLVKPKRGVYYLISTASLAQPV

SEQ ID NO: 2510 - protein, 34 aa, Artificial Sequence
  Non-cyclic GFR-binding peptide
  MOD_RES (34), (34): Xaa is C or S
  MOD_RES (12), (13), (14), (15), (16): Xaa is A or G
  MOD_RES (17), (18), (19), (20): Xaa is A or G or is absent
ARVVMNYHYKLXXXXXXXXXKYLVSIPSLQTPAX

SEQ ID NO: 2511 - protein, 34 aa, Artificial Sequence
  Non-cyclic GFR-binding peptide
  MOD_RES (34), (34): Xaa is C or S
  MOD_RES (12), (13), (14), (15), (16): Xaa is A or G
  MOD_RES (17), (18), (19), (20): Xaa is A or G or is absent
AKVVMNQYNKLXXXXXXXXXLYLVSIASLKTPAX

SEQ ID NO: 2512 - protein, 36 aa, Artificial Sequence
  Non-cyclic GFR-binding peptide
  MOD_RES (2), (36): Xaa is C or S
  MOD_RES (14), (15), (16), (17), (18): Xaa is A or G
  MOD_RES (19), (20), (21), (22): Xaa is A or G or is absent
GXGEVVMDRHKRLXXXXXXXXXYYLMSTASLETPVX

SEQ ID NO: 2513 - protein, 44 aa, Artificial Sequence
  Non-cyclic GFR-binding peptide
  MOD_RES (1), (3), (40): Xaa is C or S
  MOD_RES (16), (17), (18), (19), (20): Xaa is A or G
  MOD_RES (21), (22), (23), (24): Xaa is A or G or is absent
XKXALHDELTYHYKLXXXXXXXXXKYLVSIPSLQVQTPRXQVNR

SEQ ID NO: 2514 - protein, 39 aa, Artificial Sequence
  Non-cyclic GFR-binding peptide
  MOD_RES (1), (3), (34), (35): Xaa is C or S
XKXSKVIMQYNKLIKPTKGILYLISIASLDQSVXXPSAS

SEQ ID NO: 2515 - protein, 37 aa, Artificial Sequence
  Non-cyclic GFR-binding peptide
  MOD_RES (2), (36): Xaa is C or S
  MOD_RES (14), (15), (16), (17), (18): Xaa is A or G
  MOD_RES (19), (20), (21), (22): Xaa is A or G or is absent
GXSRVVMNQYNKLXXXXXXXXXLYLVSIASLKTPAXT

SEQ ID NO: 2516 - protein, 33 aa, Artificial Sequence
  Non-cyclic GFR-binding peptide
HDELTRYKKLFIPKKRVIEFYLVSIANLQVQTP

SEQ ID NO: 2517 - protein, 35 aa, Artificial Sequence
  Non-cyclic GFR-binding peptide
  MOD_RES (2), (34): Xaa is C or S
GXSRVVMNRHKRLIVNSSDDYYLVSTASLKTPAXT

SEQ ID NO: 2518 - protein, 36 aa, Artificial Sequence
  Non-cyclic GFR-binding peptide
  MOD_RES (1), (33), (34): Xaa is C or S
XARVVMNYHYKLIVNSSDDKYLVSIPSLQTPAXXPK

SEQ ID NO: 2519 - protein, 39 aa, Artificial Sequence
  Non-cyclic GFR-binding peptide
  MOD_RES (1), (38): Xaa is C or S
  MOD_RES (14), (15), (16), (17), (18): Xaa is A or G
  MOD_RES (19), (20), (21), (22): Xaa is A or G or is absent
XALHDELTRYKKLXXXXXXXXXFYLVSIANLQVQTPRXQ

SEQ ID NO: 2520 - protein, 39 aa, Artificial Sequence
  Non-cyclic GFR-binding peptide
  MOD_RES (2), (4), (38): Xaa is C or S
  MOD_RES (16), (17), (18), (19), (20): Xaa is A or G
  MOD_RES (21), (22), (23), (24): Xaa is A or G or is absent
HXGXSRVVMNQYNKLXXXXXXXXXLYLVSIASLKTPAXT

SEQ ID NO: 2521 - protein, 36 aa, Artificial Sequence
  Non-cyclic GFR-binding peptide
  MOD_RES (34), (35): Xaa is C or S
  MOD_RES (12), (13), (14), (15), (16): Xaa is A or G
  MOD_RES (17), (18), (19), (20): Xaa is A or G or is absent
SRVVMNYHYKLXXXXXXXXXKYLVSIPSLKTPAXXP

SEQ ID NO: 2522 - protein, 34 aa, Artificial Sequence
  Non-cyclic GFR-binding peptide
  MOD_RES (32), (33): Xaa is C or S
GEVVMERHKRLVVKDYEDYYLMSTASLETPVXXA

SEQ ID NO: 2523 - protein, 38 aa, Artificial Sequence
  Non-cyclic GFR-binding peptide
  MOD_RES (2), (2): Xaa is C or S
  MOD_RES (15), (16), (17), (18), (19): Xaa is A or G
  MOD_RES (20), (21), (22), (23): Xaa is A or G or is absent
KXALHDELTQYNKLXXXXXXXXXLYLVSIASLQVQTPR

SEQ ID NO: 2524 - protein, 38 aa, Artificial Sequence
  Non-cyclic GFR-binding peptide
  MOD_RES (1), (34), (35): Xaa is C or S
  MOD_RES (12), (13), (14), (15), (16): Xaa is A or G
  MOD_RES (17), (18), (19), (20): Xaa is A or G or is absent
XSKVIMQYNKLXXXXXXXXXLYLISIASLDQSVXXPSA

SEQ ID NO: 2525 - protein, 39 aa, Artificial Sequence
  Non-cyclic GFR-binding peptide
  MOD_RES (35), (35): Xaa is C or S
HDELTYHYKLFIPKKRVIEKYLVSIPSLQVQTPRXQVNR

SEQ ID NO: 2526 - protein, 33 aa, Artificial Sequence
  Non-cyclic GFR-binding peptide
  MOD_RES (2), (2): Xaa is C or S
GXAKVVMNRYKKLIVNNSSDFYLVSIANLKTPA

SEQ ID NO: 2527 - protein, 36 aa, Artificial Sequence
  Non-cyclic GFR-binding peptide
  MOD_RES (1), (3), (35), (36): Xaa is C or S
XGXAKVVMNRYKKLIVNNSSDFYLVSIANLKTPAXX

SEQ ID NO: 2528 - protein, 37 aa, Artificial Sequence
  Non-cyclic GFR-binding peptide
  MOD_RES (2), (33), (34): Xaa is C or S
KXSKVIMRYKKLIKPTKGIFYLISIANLDQSVXXPSA

SEQ ID NO: 2529 - protein, 43 aa, Artificial Sequence
  Non-cyclic GFR-binding peptide
  MOD_RES (1), (3), (37), (38): Xaa is C or S
  MOD_RES (15), (16), (17), (18), (19): Xaa is A or G
  MOD_RES (20), (21), (22), (23): Xaa is A or G or is absent
XGXAKVVMNQYNKLXXXXXXXXXLYLVSIASLKTPAXXAKPVA

SEQ ID NO: 2530 - protein, 41 aa, Artificial Sequence
  Non-cyclic GFR-binding peptide
  MOD_RES (1), (3), (37), (38): Xaa is C or S
  MOD_RES (15), (16), (17), (18), (19): Xaa is A or G
  MOD_RES (20), (21), (22), (23): Xaa is A or G or is absent
XGXAKVVMNRYKKLXXXXXXXXXFYLVSIANLKTPAXXAKP

SEQ ID NO: 2531 - protein, 41 aa, Artificial Sequence
  Non-cyclic GFR-binding peptide
  MOD_RES (2), (4), (36), (37): Xaa is C or S
RXGXGEVVMDRYKKLVVKENEDFYLMSIANLETPVXXAKPI

SEQ ID NO: 2532 - protein, 41 aa, Artificial Sequence
  Non-cyclic GFR-binding peptide
  MOD_RES (2), (4), (38), (39): Xaa is C or S
  MOD_RES (16), (17), (18), (19), (20): Xaa is A or G
  MOD_RES (21), (22), (23), (24): Xaa is A or G or is absent
HXGXAKVVMNQYNKLXXXXXXXXXLYLVSIASLKTPAXXAK

SEQ ID NO: 2533 - protein, 35 aa, Artificial Sequence
  Non-cyclic GFR-binding peptide
  MOD_RES (2), (34), (35): Xaa is C or S
GXGEVVMDRHKRLVVKENEDYYLMSTASLETPVXX

SEQ ID NO: 2534 - protein, 35 aa, Artificial Sequence
  Non-cyclic GFR-binding peptide
  MOD_RES (32), (33): Xaa is C or S
ARVVMNRHKRLIVNSSDDYYLVSTASLQTPAXXPK

SEQ ID NO: 2535 - protein, 38 aa, Artificial Sequence
  Non-cyclic GFR-binding peptide
  MOD_RES (2), (35), (36): Xaa is C or S
  MOD_RES (13), (14), (15), (16), (17): Xaa is A or G
  MOD_RES (18), (19), (20), (21): Xaa is A or G or is absent
KXSKVVMQYNKLXXXXXXXXXLYLISIASLDQPVXXPS

SEQ ID NO: 2536 - protein, 34 aa, Artificial Sequence
  Non-cyclic GFR-binding peptide
  MOD_RES (1), (33): Xaa is C or S
XSRVVMNQYNKLIVNSSDDLYLVSIASLKTPAXT

SEQ ID NO: 2537 - protein, 41 aa, Artificial Sequence
  Non-cyclic GFR-binding peptide
  MOD_RES (2), (4), (38), (39): Xaa is C or S
  MOD_RES (16), (17), (18), (19), (20): Xaa is A or G
  MOD_RES (21), (22), (23), (24): Xaa is A or G or is absent
RXGXGEVVMERYKKLXXXXXXXXXFYLMSIANLETPVXXAK

SEQ ID NO: 2538 - protein, 35 aa, Artificial Sequence
  Non-cyclic GFR-binding peptide
  MOD_RES (2), (34), (35): Xaa is C or S
GXSRVVMNYHYKLIVNSSDDKYLVSIPSLKTPAXX

SEQ ID NO: 2539 - protein, 36 aa, Artificial Sequence
  Non-cyclic GFR-binding peptide
  MOD_RES (32), (33): Xaa is C or S
GEVVMERYKKLVVKDYEDFYLMSIANLETPVXXAKP

SEQ ID NO: 2540 - protein, 33 aa, Artificial Sequence
  Non-cyclic GFR-binding peptide
  MOD_RES (31), (32): Xaa is C or S
RVVMNYHYKLIVNSSDDKYLVSIPSLQTPAXXP

SEQ ID NO: 2541 - protein, 35 aa, Artificial Sequence
  Non-cyclic GFR-binding peptide
  MOD_RES (1), (3): Xaa is C or S
  MOD_RES (14), (15), (16), (17), (18): Xaa is A or G
  MOD_RES (19), (20), (21), (22): Xaa is A or G or is absent
XKXSRVIMYHYKLXXXXXXXXXKYLISIPSLAQPV

SEQ ID NO: 2542 - protein, 37 aa, Artificial Sequence
  Non-cyclic GFR-binding peptide
  MOD_RES (2), (4): Xaa is C or S
  MOD_RES (16), (17), (18), (19), (20): Xaa is A or G
  MOD_RES (21), (22), (23), (24): Xaa is A or G or is absent
HXGXSRVVMNQYNKLXXXXXXXXXLYLVSIASLKTPA

SEQ ID NO: 2543 - protein, 34 aa, Artificial Sequence
  Non-cyclic GFR-binding peptide
  MOD_RES (2), (4): Xaa is C or S
SXKXSRVIMRYKKLVKPKRGVFYLISIANLAQPV

SEQ ID NO: 2544 - protein, 38 aa, Artificial Sequence
  Non-cyclic GFR-binding peptide
  MOD_RES (33), (34): Xaa is C or S
EAVSMGEQYNKLTPVGMDDLYLVSIASLKTPVXXAKGV

SEQ ID NO: 2545 - protein, 36 aa, Artificial Sequence
  Non-cyclic GFR-binding peptide
  MOD_RES (1), (3), (36): Xaa is C or S
  MOD_RES (14), (15), (16), (17), (18): Xaa is A or G
  MOD_RES (19), (20), (21), (22): Xaa is A or G or is absent
XKXSKVIMRHKRLXXXXXXXXXYYLISTASLDQSVX

SEQ ID NO: 2546 - protein, 38 aa, Artificial Sequence
  Non-cyclic GFR-binding peptide
  MOD_RES (1), (3), (35), (36): Xaa is C or S
XGXAKVVMNYHYKLIVNNSSDKYLVSIPSLKTPAXXAK

SEQ ID NO: 2547 - protein, 36 aa, Artificial Sequence
  Non-cyclic GFR-binding peptide
  MOD_RES (2), (4), (36): Xaa is C or S
RXGXGEVVMERHKRLVVKDYEDYYLMSTASLETPVX

SEQ ID NO: 2548 - protein, 40 aa, Artificial Sequence
  Non-cyclic GFR-binding peptide
  MOD_RES (1), (3), (35), (36): Xaa is C or S
XGXGEVVMDYHYKLVVKENEDKYLMSIPSLETPVXXAKPI

SEQ ID NO: 2549 - protein, 36 aa, Artificial Sequence
  Non-cyclic GFR-binding peptide
  MOD_RES (1), (3), (36): Xaa is C or S
  MOD_RES (14), (15), (16), (17), (18): Xaa is A or G
  MOD_RES (19), (20), (21), (22): Xaa is A or G or is absent
XKXSRVIMYHYKLXXXXXXXXXKYLISIPSLAQPVX

SEQ ID NO: 2550 - protein, 34 aa, Artificial Sequence
  Non-cyclic GFR-binding peptide
  MOD_RES (32), (33): Xaa is C or S
ARVVMNYHYKLIVNSSDDKYLVSIPSLQTPAXXP

SEQ ID NO: 2551 - protein, 39 aa, Artificial Sequence
  Non-cyclic GFR-binding peptide
  MOD_RES (2), (35), (36): Xaa is C or S
GXEAVSMGERHKRLTPVGMDDYYLVSTASLKTPVXXAKG

SEQ ID NO: 2552 - protein, 35 aa, Artificial Sequence
  Non-cyclic GFR-binding peptide
  MOD_RES (1), (33), (34): Xaa is C or S
XGEVVMERYKKLVVKDYEDFYLMSIANLETPVXXA

SEQ ID NO: 2553 - protein, 34 aa, Artificial Sequence
  Non-cyclic GFR-binding peptide
  MOD_RES (2), (2): Xaa is C or S
  MOD_RES (13), (14), (15), (16), (17): Xaa is A or G
  MOD_RES (18), (19), (20), (21): Xaa is A or G or is absent
KXSKVVMRHKRLXXXXXXXXXYYLISTASLDQPV

SEQ ID NO: 2554 - protein, 39 aa, Artificial Sequence
  Non-cyclic GFR-binding peptide
  MOD_RES (33), (34): Xaa is C or S
  MOD_RES (11), (12), (13), (14), (15): Xaa is A or G
  MOD_RES (16), (17), (18), (19): Xaa is A or G or is absent
RVVMNRHKRLXXXXXXXXXYYLVSTASLQTPAXXPKPVT

SEQ ID NO: 2555 - protein, 39 aa, Artificial Sequence
  Non-cyclic GFR-binding peptide
  MOD_RES (1), (3), (34), (35): Xaa is C or S
XKXSKVVMQYNKLVKPTRGVLYLISIASLDQPVXXPSAS

SEQ ID NO: 2556 - protein, 35 aa, Artificial Sequence
  Non-cyclic GFR-binding peptide
  MOD_RES (1), (3): Xaa is C or S
  MOD_RES (14), (15), (16), (17), (18): Xaa is A or G
  MOD_RES (19), (20), (21), (22): Xaa is A or G or is absent
XKXSKVIMRHKRLXXXXXXXXXYYLISTASLDQSV

SEQ ID NO: 2557 - protein, 39 aa, Artificial Sequence
  Non-cyclic GFR-binding peptide
  MOD_RES (1), (35), (36): Xaa is C or S
  MOD_RES (13), (14), (15), (16), (17): Xaa is A or G
  MOD_RES (18), (19), (20), (21): Xaa is A or G or is absent
XAKVVMNYHYKLXXXXXXXXXKYLVSIPSLKTPAXXAKP

SEQ ID NO: 2558 - protein, 36 aa, Artificial Sequence
  Non-cyclic GFR-binding peptide
  MOD_RES (2), (4): Xaa is C or S
  MOD_RES (15), (16), (17), (18), (19): Xaa is A or G
  MOD_RES (20), (21), (22), (23): Xaa is A or G or is absent
SXKXSRVIMRHKRLXXXXXXXXXYYLISTASLAQPV

SEQ ID NO: 2559 - protein, 42 aa, Artificial Sequence
  Non-cyclic GFR-binding peptide
  MOD_RES (2), (4), (38), (39): Xaa is C or S
  MOD_RES (16), (17), (18), (19), (20): Xaa is A or G
  MOD_RES (21), (22), (23), (24): Xaa is A or G or is absent
HXGXSRVVMNYHYKLXXXXXXXXXKYLVSIPSLKTPAXXPKP

SEQ ID NO: 2560 - protein, 38 aa, Artificial Sequence
  Non-cyclic GFR-binding peptide
  MOD_RES (1), (3), (36), (37): Xaa is C or S
  MOD_RES (14), (15), (16), (17), (18): Xaa is A or G
  MOD_RES (19), (20), (21), (22): Xaa is A or G or is absent
XKXSRVIMRYKKLXXXXXXXXXFYLISIANLAQPVXXP

SEQ ID NO: 2561 - protein, 34 aa, Artificial Sequence
  Non-cyclic GFR-binding peptide
LHDELTRYKKLFIPKKRVIEFYLVSIANLQVQTP

SEQ ID NO: 2562 - protein, 42 aa, Artificial Sequence
  Non-cyclic GFR-binding peptide
  MOD_RES (1), (3), (37), (38): Xaa is C or S
  MOD_RES (15), (16), (17), (18), (19): Xaa is A or G
  MOD_RES (20), (21), (22), (23): Xaa is A or G or is absent
XGXGEVVMDYHYKLXXXXXXXXXKYLMSIPSLETPVXXAKPI

SEQ ID NO: 2563 - protein, 36 aa, Artificial Sequence
  Non-cyclic GFR-binding peptide
  MOD_RES (1), (3): Xaa is C or S
  MOD_RES (15), (16), (17), (18), (19): Xaa is A or G
  MOD_RES (20), (21), (22), (23): Xaa is A or G or is absent
XGXAKVVMNRYKKLXXXXXXXXXFYLVSIANLKTPA

SEQ ID NO: 2564 - protein, 37 aa, Artificial Sequence
  Non-cyclic GFR-binding peptide
  MOD_RES (35), (35): Xaa is C or S
  MOD_RES (11), (12), (13), (14), (15): Xaa is A or G
  MOD_RES (16), (17), (18), (19): Xaa is A or G or is absent
HDELTQYNKLXXXXXXXXXLYLVSIASLQVQTPRXQV

SEQ ID NO: 2565 - protein, 37 aa, Artificial Sequence
  Non-cyclic GFR-binding peptide
  MOD_RES (1), (3): Xaa is C or S
  MOD_RES (16), (17), (18), (19), (20): Xaa is A or G
  MOD_RES (21), (22), (23), (24): Xaa is A or G or is absent
XKXALHDELTQYNKLXXXXXXXXXLYLVSIASLQVQT

SEQ ID NO: 2566 - protein, 36 aa, Artificial Sequence
  Non-cyclic GFR-binding peptide
  MOD_RES (1), (32), (33): Xaa is C or S
XSKVIMQYNKLIKPTKGILYLISIASLDQSVXXPSA

SEQ ID NO: 2567 - protein, 38 aa, Artificial Sequence
  Non-cyclic GFR-binding peptide
  MOD_RES (1), (34), (35): Xaa is C or S
  MOD_RES (12), (13), (14), (15), (16): Xaa is A or G
  MOD_RES (17), (18), (19), (20): Xaa is A or G or is absent
XSKVIMRHKRLXXXXXXXXXYYLISTASLDQSVXXPSA

SEQ ID NO: 2568 - protein, 38 aa, Artificial Sequence
  Non-cyclic GFR-binding peptide
  MOD_RES (2), (4), (35), (36): Xaa is C or S
SXKXSKVIMYHYKLIKPTKGIKYLISIPSLDQSVXXPS

SEQ ID NO: 2569 - protein, 43 aa, Artificial Sequence
  Non-cyclic GFR-binding peptide
  MOD_RES (2), (39): Xaa is C or S
KXALHDELTRYKKLFIPKKRVIEFYLVSIANLQVQTPRXQVNR

SEQ ID NO: 2570 - protein, 37 aa, Artificial Sequence
  Non-cyclic GFR-binding peptide
  MOD_RES (1), (3), (36), (37): Xaa is C or S
  MOD_RES (14), (15), (16), (17), (18): Xaa is A or G
  MOD_RES (19), (20), (21), (22): Xaa is A or G or is absent
XKXSKVIMQYNKLXXXXXXXXXLYLISIASLDQSVXX

SEQ ID NO: 2571 - protein, 33 aa, Artificial Sequence
  Non-cyclic GFR-binding peptide
  MOD_RES (31), (32): Xaa is C or S
RVVMNQYNKLIVNSSDDLYLVSIASLQTPAXXP

SEQ ID NO: 2572 - protein, 42 aa, Artificial Sequence
  Non-cyclic GFR-binding peptide
  MOD_RES (2), (4), (36): Xaa is C or S
HXGXSRVVMNQYNKLIVNSSDDLYLVSIASLKTPAXTPKTVH

SEQ ID NO: 2573 - protein, 41 aa, Artificial Sequence
  Non-cyclic GFR-binding peptide
  MOD_RES (2), (36): Xaa is C or S
  MOD_RES (14), (15), (16), (17), (18): Xaa is A or G
  MOD_RES (19), (20), (21), (22): Xaa is A or G or is absent
GXSRVVMNQYNKLXXXXXXXXXLYLVSIASLKTPAXTPKTV

SEQ ID NO: 2574 - protein, 36 aa, Artificial Sequence
  Non-cyclic GFR-binding peptide
  MOD_RES (36), (36): Xaa is C or S
LHDELTRHKRLFIPKKRVIEYYLVSTASLQVQTPRX

SEQ ID NO: 2575 - protein, 39 aa, Artificial Sequence
  Non-cyclic GFR-binding peptide
  MOD_RES (1), (38): Xaa is C or S
XALHDELTRYKKLFIPKKRVIEFYLVSIANLQVQTPRXQ

SEQ ID NO: 2576 - protein, 34 aa, Artificial Sequence
  Non-cyclic GFR-binding peptide
  MOD_RES (2), (4): Xaa is C or S
SXKXSKVVMRHKRLVKPTRGVYYLISTASLDQPV

SEQ ID NO: 2577 - protein, 34 aa, Artificial Sequence
  Non-cyclic GFR-binding peptide
  MOD_RES (1), (33), (34): Xaa is C or S
XARVVMNQYNKLIVNSSDDLYLVSIASLQTPAXX

SEQ ID NO: 2578 - protein, 36 aa, Artificial Sequence
  Non-cyclic GFR-binding peptide
  MOD_RES (32), (33): Xaa is C or S
SRVVMNRHKRLIVNSSDDYYLVSTASLKTPAXXPKP

SEQ ID NO: 2579 - protein, 36 aa, Artificial Sequence
  Non-cyclic GFR-binding peptide
  MOD_RES (1), (34), (35): Xaa is C or S
  MOD_RES (12), (13), (14), (15), (16): Xaa is A or G
  MOD_RES (17), (18), (19), (20): Xaa is A or G or is absent
XSKVVMRHKRLXXXXXXXXXYYLISTASLDQPVXXP

SEQ ID NO: 2580 - protein, 43 aa, Artificial Sequence
  Non-cyclic GFR-binding peptide
  MOD_RES (1), (3), (37), (38): Xaa is C or S
  MOD_RES (15), (16), (17), (18), (19): Xaa is A or G
  MOD_RES (20), (21), (22), (23): Xaa is A or G or is absent
XGXAKVVMNYHYKLXXXXXXXXXKYLVSIPSLKTPAXXAKPVA

SEQ ID NO: 2581 - protein, 35 aa, Artificial Sequence
  Non-cyclic GFR-binding peptide
  MOD_RES (2), (4), (35): Xaa is C or S
SXKXSKVVMRHKRLVKPTRGVYYLISTASLDQPVX

SEQ ID NO: 2582 - protein, 36 aa, Artificial Sequence
  Non-cyclic GFR-binding peptide
  MOD_RES (2), (34): Xaa is C or S
GXSRVVMNYHYKLIVNSSDDKYLVSIPSLKTPAXTP

SEQ ID NO: 2583 - protein, 32 aa, Artificial Sequence
  Non-cyclic GFR-binding peptide
  MOD_RES (11), (12), (13), (14), (15): Xaa is A or G
  MOD_RES (16), (17), (18), (19): Xaa is A or G or is absent
KVVMNRYKKLXXXXXXXXXFYLVSIANLKTPA

SEQ ID NO: 2584 - protein, 39 aa, Artificial Sequence
  Non-cyclic GFR-binding peptide
  MOD_RES (1), (3), (38), (39): Xaa is C or S
  MOD_RES (16), (17), (18), (19), (20): Xaa is A or G
  MOD_RES (21), (22), (23), (24): Xaa is A or G or is absent
XGXEAVSMGERHKRLXXXXXXXXXYYLVSTASLKTPVXX

SEQ ID NO: 2585 - protein, 33 aa, Artificial Sequence
  Non-cyclic GFR-binding peptide
  MOD_RES (1), (1): Xaa is C or S
  MOD_RES (12), (13), (14), (15), (16): Xaa is A or G
  MOD_RES (17), (18), (19), (20): Xaa is A or G or is absent
XSKVIMRYKKLXXXXXXXXXFYLISIANLDQSV

SEQ ID NO: 2586 - protein, 43 aa, Artificial Sequence
  Non-cyclic GFR-binding peptide
  MOD_RES (2), (4), (38), (39): Xaa is C or S
  MOD_RES (16), (17), (18), (19), (20): Xaa is A or G
  MOD_RES (21), (22), (23), (24): Xaa is A or G or is absent
HXGXSRVVMNRHKRLXXXXXXXXXYYLVSTASLKTPAXXPKPV

SEQ ID NO: 2587 - protein, 35 aa, Artificial Sequence
  Non-cyclic GFR-binding peptide
  MOD_RES (33), (34): Xaa is C or S
  MOD_RES (11), (12), (13), (14), (15): Xaa is A or G
  MOD_RES (16), (17), (18), (19): Xaa is A or G or is absent
SRVIMRYKKLXXXXXXXXXFYLISIANLAQPVXXP

SEQ ID NO: 2588 - protein, 38 aa, Artificial Sequence
  Non-cyclic GFR-binding peptide
  MOD_RES (2), (2): Xaa is C or S
KXALHDELTRYKKLFIPKKRVIEFYLVSIANLQVQTPR

SEQ ID NO: 2589 - protein, 38 aa, Artificial Sequence
  Non-cyclic GFR-binding peptide
  MOD_RES (35), (35): Xaa is C or S
HDELTYHYKLFIPKKRVIEKYLVSIPSLQVQTPRXQVN

SEQ ID NO: 2590 - protein, 37 aa, Artificial Sequence
  Non-cyclic GFR-binding peptide
  MOD_RES (1), (1): Xaa is C or S
XALHDELTYHYKLFIPKKRVIEKYLVSIPSLQVQTPR

SEQ ID NO: 2591 - protein, 40 aa, Artificial Sequence
  Non-cyclic GFR-binding peptide
  MOD_RES (2), (4), (35), (36): Xaa is C or S
SXKXSKVVMQYNKLVKPTRGVLYLISIASLDQPVXXPSAS

SEQ ID NO: 2592 - protein, 39 aa, Artificial Sequence
  Non-cyclic GFR-binding peptide
  MOD_RES (1), (3), (35), (36): Xaa is C or S
XGXGEVVMERHKRLVVKDYEDYYLMSTASLETPVXXAKP

SEQ ID NO: 2593 - protein, 36 aa, Artificial Sequence
  Non-cyclic GFR-binding peptide
  MOD_RES (1), (34), (35): Xaa is C or S
  MOD_RES (12), (13), (14), (15), (16): Xaa is A or G
  MOD_RES (17), (18), (19), (20): Xaa is A or G or is absent
XSKVVMQYNKLXXXXXXXXXLYLISIASLDQPVXXP

SEQ ID NO: 2594 - protein, 41 aa, Artificial Sequence
  Non-cyclic GFR-binding peptide
  MOD_RES (1), (3), (35), (36): Xaa is C or S
XGXARVVMNQYNKLIVNSSDDLYLVSIASLQTPAXXPKPVT

SEQ ID NO: 2595 - protein, 33 aa, Artificial Sequence
  Non-cyclic GFR-binding peptide
  MOD_RES (1), (33): Xaa is C or S
XARVVMNQYNKLIVNSSDDLYLVSIASLQTPAX

SEQ ID NO: 2596 - protein, 42 aa, Artificial Sequence
  Non-cyclic GFR-binding peptide
  MOD_RES (2), (4), (37), (38): Xaa is C or S
  MOD_RES (15), (16), (17), (18), (19): Xaa is A or G
  MOD_RES (20), (21), (22), (23): Xaa is A or G or is absent
SXKXSRVIMRHKRLXXXXXXXXXYYLISTASLAQPVXXPAAS

SEQ ID NO: 2597 - protein, 33 aa, Artificial Sequence
  Non-cyclic GFR-binding peptide
  MOD_RES (31), (32): Xaa is C or S
SKVVMRHKRLVKPTRGVYYLISTASLDQPVXXP

SEQ ID NO: 2598 - protein, 35 aa, Artificial Sequence
  Non-cyclic GFR-binding peptide
  MOD_RES (34), (35): Xaa is C or S
  MOD_RES (12), (13), (14), (15), (16): Xaa is A or G
  MOD_RES (17), (18), (19), (20): Xaa is A or G or is absent
GEVVMDYHYKLXXXXXXXXXKYLMSIPSLETPVXX

SEQ ID NO: 2599 - protein, 41 aa, Artificial Sequence
  Non-cyclic GFR-binding peptide
  MOD_RES (2), (4), (35), (36): Xaa is C or S
SXKXSKVIMYHYKLIKPTKGIKYLISIPSLDQSVXXPSASA

SEQ ID NO: 2600 - protein, 31 aa, Artificial Sequence
  Non-cyclic GFR-binding peptide
  MOD_RES (31), (31): Xaa is C or S
EVVMERYKKLVVKDYEDFYLMSIANLETPVX

SEQ ID NO: 2601 - protein, 37 aa, Artificial Sequence
  Non-cyclic GFR-binding peptide
  MOD_RES (32), (32): Xaa is C or S
SRVVMNQYNKLIVNSSDDLYLVSIASLKTPAXTPKTV

SEQ ID NO: 2602 - protein, 35 aa, Artificial Sequence
  Non-cyclic GFR-binding peptide
  MOD_RES (34), (34): Xaa is C or S
  MOD_RES (12), (13), (14), (15), (16): Xaa is A or G
  MOD_RES (17), (18), (19), (20): Xaa is A or G or is absent
SRVVMNQYNKLXXXXXXXXXLYLVSIASLKTPAXT

SEQ ID NO: 2603 - protein, 36 aa, Artificial Sequence
  Non-cyclic GFR-binding peptide
  MOD_RES (33), (34): Xaa is C or S
  MOD_RES (11), (12), (13), (14), (15): Xaa is A or G
  MOD_RES (16), (17), (18), (19): Xaa is A or G or is absent
EVVMERHKRLXXXXXXXXXYYLMSTASLETPVXXAK

SEQ ID NO: 2604 - protein, 35 aa, Artificial Sequence
  Non-cyclic GFR-binding peptide
ALHDELTQYNKLFIPKKRVIELYLVSIASLQVQTP

SEQ ID NO: 2605 - protein, 41 aa, Artificial Sequence
  Non-cyclic GFR-binding peptide
  MOD_RES (2), (35), (36): Xaa is C or S
  MOD_RES (13), (14), (15), (16), (17): Xaa is A or G
  MOD_RES (18), (19), (20), (21): Xaa is A or G or is absent
KXSRVIMQYNKLXXXXXXXXXLYLISIASLAQPVXXPAASA

SEQ ID NO: 2606 - protein, 37 aa, Artificial Sequence
  Non-cyclic GFR-binding peptide
  MOD_RES (2), (2): Xaa is C or S
KXALHDELTQYNKLFIPKKRVIELYLVSIASLQVQTP

SEQ ID NO: 2607 - protein, 39 aa, Artificial Sequence
  Non-cyclic GFR-binding peptide
  MOD_RES (2), (4), (37), (38): Xaa is C or S
  MOD_RES (15), (16), (17), (18), (19): Xaa is A or G
  MOD_RES (20), (21), (22), (23): Xaa is A or G or is absent
SXKXSKVVMRYKKLXXXXXXXXXFYLISIANLDQPVXXP

SEQ ID NO: 2608 - protein, 37 aa, Artificial Sequence
  Non-cyclic GFR-binding peptide
  MOD_RES (1), (33), (34): Xaa is C or S
XSRVVMNQYNKLIVNSSDDLYLVSIASLKTPAXXPKP

SEQ ID NO: 2609 - protein, 38 aa, Artificial Sequence
  Non-cyclic GFR-binding peptide
  MOD_RES (34), (34): Xaa is C or S
  MOD_RES (12), (13), (14), (15), (16): Xaa is A or G
  MOD_RES (17), (18), (19), (20): Xaa is A or G or is absent
SRVVMNQYNKLXXXXXXXXXLYLVSIASLKTPAXTPKT

SEQ ID NO: 2610 - protein, 39 aa, Artificial Sequence
  Non-cyclic GFR-binding peptide
  MOD_RES (2), (36): Xaa is C or S
  MOD_RES (14), (15), (16), (17), (18): Xaa is A or G
  MOD_RES (19), (20), (21), (22): Xaa is A or G or is absent
GXSRVVMNRHKRLXXXXXXXXXYYLVSTASLKTPAXTPK

SEQ ID NO: 2611 - protein, 37 aa, Artificial Sequence
  Non-cyclic GFR-binding peptide
  MOD_RES (32), (33): Xaa is C or S
GEVVMDYHYKLVVKENEDKYLMSIPSLETPVXXAKPI

SEQ ID NO: 2612 - protein, 37 aa, Artificial Sequence
  Non-cyclic GFR-binding peptide
  MOD_RES (31), (32): Xaa is C or S
EVVMDRYKKLVVKENEDFYLMSIANLETPVXXAKPIK

SEQ ID NO: 2613 - protein, 43 aa, Artificial Sequence
  Non-cyclic GFR-binding peptide
  MOD_RES (2), (4), (37), (38): Xaa is C or S
  MOD_RES (15), (16), (17), (18), (19): Xaa is A or G
  MOD_RES (20), (21), (22), (23): Xaa is A or G or is absent
SXKXSKVIMYHYKLXXXXXXXXXKYLISIPSLDQSVXXPSASA

SEQ ID NO: 2614 - protein, 35 aa, Artificial Sequence
  Non-cyclic GFR-binding peptide
ALHDELTRHKRLFIPKKRVIEYYLVSTASLQVQTP

SEQ ID NO: 2615 - protein, 37 aa, Artificial Sequence
  Non-cyclic GFR-binding peptide
  MOD_RES (1), (33): Xaa is C or S
XSRVVMNQYNKLIVNSSDDLYLVSIASLKTPAXTPKT

SEQ ID NO: 2616 - protein, 32 aa, Artificial Sequence
  Non-cyclic GFR-binding peptide
  MOD_RES (1), (1): Xaa is C or S
XSRVVMNQYNKLIVNSSDDLYLVSIASLKTPA

SEQ ID NO: 2617 - protein, 42 aa, Artificial Sequence
  Non-cyclic GFR-binding peptide
  MOD_RES (1), (38): Xaa is C or S
  MOD_RES (14), (15), (16), (17), (18): Xaa is A or G
  MOD_RES (19), (20), (21), (22): Xaa is A or G or is absent
XALHDELTQYNKLXXXXXXXXXLYLVSIASLQVQTPRXQVNR

SEQ ID NO: 2618 - protein, 39 aa, Artificial Sequence
  Non-cyclic GFR-binding peptide
  MOD_RES (2), (34), (35): Xaa is C or S
GXARVVMNYHYKLIVNSSDDKYLVSIPSLQTPAXXPKPV

SEQ ID NO: 2619 - protein, 39 aa, Artificial Sequence
  Non-cyclic GFR-binding peptide
  MOD_RES (2), (4), (38), (39): Xaa is C or S
  MOD_RES (16), (17), (18), (19), (20): Xaa is A or G
  MOD_RES (21), (22), (23), (24): Xaa is A or G or is absent
HXGXSRVVMNYHYKLXXXXXXXXXKYLVSIPSLKTPAXX

SEQ ID NO: 2620 - protein, 39 aa, Artificial Sequence
  Non-cyclic GFR-binding peptide
  MOD_RES (2), (4), (35), (36): Xaa is C or S
SXKXSRVIMQYNKLVKPKRGVLYLISIASLAQPVXXPAA

SEQ ID NO: 2621 - protein, 39 aa, Artificial Sequence
  Non-cyclic GFR-binding peptide
  MOD_RES (34), (34): Xaa is C or S
  MOD_RES (12), (13), (14), (15), (16): Xaa is A or G
  MOD_RES (17), (18), (19), (20): Xaa is A or G or is absent
SRVVMNYHYKLXXXXXXXXXKYLVSIPSLKTPAXTPKTV

SEQ ID NO: 2622 - protein, 39 aa, Artificial Sequence
  Non-cyclic GFR-binding peptide
  MOD_RES (2), (35), (36): Xaa is C or S
  MOD_RES (13), (14), (15), (16), (17): Xaa is A or G
  MOD_RES (18), (19), (20), (21): Xaa is A or G or is absent
KXSKVIMRHKRLXXXXXXXXXYYLISTASLDQSVXXPSA

SEQ ID NO: 2623 - protein, 42 aa, Artificial Sequence
  Non-cyclic GFR-binding peptide
  MOD_RES (1), (38): Xaa is C or S
  MOD_RES (14), (15), (16), (17), (18): Xaa is A or G
  MOD_RES (19), (20), (21), (22): Xaa is A or G or is absent
XALHDELTYHYKLXXXXXXXXXKYLVSIPSLQVQTPRXQVNR

SEQ ID NO: 2624 - protein, 37 aa, Artificial Sequence
  Non-cyclic GFR-binding peptide
  MOD_RES (1), (3), (36), (37): Xaa is C or S
  MOD_RES (14), (15), (16), (17), (18): Xaa is A or G
  MOD_RES (19), (20), (21), (22): Xaa is A or G or is absent
XKXSKVIMRHKRLXXXXXXXXXYYLISTASLDQSVXX

SEQ ID NO: 2625 - protein, 36 aa, Artificial Sequence
  Non-cyclic GFR-binding peptide
  MOD_RES (1), (3): Xaa is C or S
  MOD_RES (15), (16), (17), (18), (19): Xaa is A or G
  MOD_RES (20), (21), (22), (23): Xaa is A or G or is absent
XGXSRVVMNQYNKLXXXXXXXXXLYLVSIASLKTPA

SEQ ID NO: 2626 - protein, 35 aa, Artificial Sequence
  Non-cyclic GFR-binding peptide
  MOD_RES (2), (4), (35): Xaa is C or S
SXKXSRVIMRYKKLVKPKRGVFYLISIANLAQPVX

SEQ ID NO: 2627 - protein, 37 aa, Artificial Sequence
  Non-cyclic GFR-binding peptide
  MOD_RES (2), (33), (34): Xaa is C or S
KXSKVIMQYNKLIKPTKGILYLISIASLDQSVXXPSA

SEQ ID NO: 2628 - protein, 35 aa, Artificial Sequence
  Non-cyclic GFR-binding peptide
  MOD_RES (1), (3), (34), (35): Xaa is C or S
XKXSRVIMQYNKLVKPKRGVLYLISIASLAQPVXX

SEQ ID NO: 2629 - protein, 38 aa, Artificial Sequence
  Non-cyclic GFR-binding peptide
  MOD_RES (1), (3), (37), (38): Xaa is C or S
  MOD_RES (15), (16), (17), (18), (19): Xaa is A or G
  MOD_RES (20), (21), (22), (23): Xaa is A or G or is absent
XGXAKVVMNRYKKLXXXXXXXXXFYLVSIANLKTPAXX

SEQ ID NO: 2630 - protein, 37 aa, Artificial Sequence
  Non-cyclic GFR-binding peptide
  MOD_RES (33), (34): Xaa is C or S
  MOD_RES (11), (12), (13), (14), (15): Xaa is A or G
  MOD_RES (16), (17), (18), (19): Xaa is A or G or is absent
EVVMDRYKKLXXXXXXXXXFYLMSIANLETPVXXAKP

SEQ ID NO: 2631 - protein, 36 aa, Artificial Sequence
  Non-cyclic GFR-binding peptide
  MOD_RES (2), (36): Xaa is C or S
  MOD_RES (14), (15), (16), (17), (18): Xaa is A or G
  MOD_RES (19), (20), (21), (22): Xaa is A or G or is absent
GXGEVVMDRYKKLXXXXXXXXXFYLMSIANLETPVX

SEQ ID NO: 2632 - protein, 38 aa, Artificial Sequence
  Non-cyclic GFR-binding peptide
  MOD_RES (1), (38): Xaa is C or S
XALHDELTRYKKLFIPKKRVIEFYLVSIANLQVQTPRX

SEQ ID NO: 2633 - protein, 38 aa, Artificial Sequence
  Non-cyclic GFR-binding peptide
  MOD_RES (1), (35), (36): Xaa is C or S
  MOD_RES (13), (14), (15), (16), (17): Xaa is A or G
  MOD_RES (18), (19), (20), (21): Xaa is A or G or is absent
XARVVMNRHKRLXXXXXXXXXYYLVSTASLQTPAXXPK

SEQ ID NO: 2634 - protein, 33 aa, Artificial Sequence
  Non-cyclic GFR-binding peptide
  MOD_RES (1), (1): Xaa is C or S
  MOD_RES (12), (13), (14), (15), (16): Xaa is A or G
  MOD_RES (17), (18), (19), (20): Xaa is A or G or is absent
XSKVVMQYNKLXXXXXXXXXLYLISIASLDQPV

SEQ ID NO: 2635 - protein, 34 aa, Artificial Sequence
  Non-cyclic GFR-binding peptide
  MOD_RES (31), (31): Xaa is C or S
RVVMNQYNKLIVNSSDDLYLVSIASLKTPAXTPK

SEQ ID NO: 2636 - protein, 40 aa, Artificial Sequence
  Non-cyclic GFR-binding peptide
  MOD_RES (2), (4), (38), (39): Xaa is C or S
  MOD_RES (16), (17), (18), (19), (20): Xaa is A or G
  MOD_RES (21), (22), (23), (24): Xaa is A or G or is absent
RXGXGEVVMDRHKRLXXXXXXXXXYYLMSTASLETPVXXA

SEQ ID NO: 2637 - protein, 31 aa, Artificial Sequence
  Non-cyclic GFR-binding peptide
  MOD_RES (31), (31): Xaa is C or S
KVVMNYHYKLIVNNSSDKYLVSIPSLKTPAX

SEQ ID NO: 2638 - protein, 38 aa, Artificial Sequence
  Non-cyclic GFR-binding peptide
  MOD_RES (2), (36), (37): Xaa is C or S
  MOD_RES (14), (15), (16), (17), (18): Xaa is A or G
  MOD_RES (19), (20), (21), (22): Xaa is A or G or is absent
GXGEVVMDYHYKLXXXXXXXXXKYLMSIPSLETPVXXA

SEQ ID NO: 2639 - protein, 38 aa, Artificial Sequence
  Non-cyclic GFR-binding peptide
  MOD_RES (2), (4), (38): Xaa is C or S
  MOD_RES (16), (17), (18), (19), (20): Xaa is A or G
  MOD_RES (21), (22), (23), (24): Xaa is A or G or is absent
HXGXAKVVMNRYKKLXXXXXXXXXFYLVSIANLKTPAX

SEQ ID NO: 2640 - protein, 37 aa, Artificial Sequence
  Non-cyclic GFR-binding peptide
  MOD_RES (31), (32): Xaa is C or S
RVVMNRHKRLIVNSSDDYYLVSTASLQTPAXXPKPVT

SEQ ID NO: 2641 - protein, 36 aa, Artificial Sequence
  Non-cyclic GFR-binding peptide
  MOD_RES (1), (3), (36): Xaa is C or S
  MOD_RES (14), (15), (16), (17), (18): Xaa is A or G
  MOD_RES (19), (20), (21), (22): Xaa is A or G or is absent
XKXSKVIMQYNKLXXXXXXXXXLYLISIASLDQSVX

SEQ ID NO: 2642 - protein, 38 aa, Artificial Sequence
  Non-cyclic GFR-binding peptide
  MOD_RES (34), (35): Xaa is C or S
  MOD_RES (12), (13), (14), (15), (16): Xaa is A or G
  MOD_RES (17), (18), (19), (20): Xaa is A or G or is absent
ARVVMNRHKRLXXXXXXXXXYYLVSTASLQTPAXXPKP

SEQ ID NO: 2643 - protein, 35 aa, Artificial Sequence
  Non-cyclic GFR-binding peptide
  MOD_RES (1), (1): Xaa is C or S
  MOD_RES (14), (15), (16), (17), (18): Xaa is A or G
  MOD_RES (19), (20), (21), (22): Xaa is A or G or is absent
XEAVSMGERHKRLXXXXXXXXXYYLVSTASLKTPV

SEQ ID NO: 2644 - protein, 35 aa, Artificial Sequence
  Non-cyclic GFR-binding peptide
  MOD_RES (1), (33), (34): Xaa is C or S
XGEVVMDRHKRLVVKENEDYYLMSTASLETPVXXA

SEQ ID NO: 2645 - protein, 35 aa, Artificial Sequence
  Non-cyclic GFR-binding peptide
  MOD_RES (32), (32): Xaa is C or S
SRVVMNQYNKLIVNSSDDLYLVSIASLKTPAXTPK

SEQ ID NO: 2646 - protein, 42 aa, Artificial Sequence
  Non-cyclic GFR-binding peptide
  MOD_RES (2), (36): Xaa is C or S
  MOD_RES (14), (15), (16), (17), (18): Xaa is A or G
  MOD_RES (19), (20), (21), (22): Xaa is A or G or is absent
GXSRVVMNRHKRLXXXXXXXXXYYLVSTASLKTPAXTPKTVH

SEQ ID NO: 2647 - protein, 36 aa, Artificial Sequence
  Non-cyclic GFR-binding peptide
  MOD_RES (1), (3), (35): Xaa is C or S
XGXSRVVMNYHYKLIVNSSDDKYLVSIPSLKTPAXT

SEQ ID NO: 2648 - protein, 36 aa, Artificial Sequence
  Non-cyclic GFR-binding peptide
  MOD_RES (1), (1): Xaa is C or S
XALHDELTYHYKLFIPKKRVIEKYLVSIPSLQVQTP

SEQ ID NO: 2649 - protein, 38 aa, Artificial Sequence
  Non-cyclic GFR-binding peptide
  MOD_RES (34), (35): Xaa is C or S
  MOD_RES (12), (13), (14), (15), (16): Xaa is A or G
  MOD_RES (17), (18), (19), (20): Xaa is A or G or is absent
AKVVMNYHYKLXXXXXXXXXKYLVSIPSLKTPAXXAKP

SEQ ID NO: 2650 - protein, 38 aa, Artificial Sequence
  Non-cyclic GFR-binding peptide
  MOD_RES (1), (33), (34): Xaa is C or S
XSRVVMNYHYKLIVNSSDDKYLVSIPSLKTPAXXPKPV

SEQ ID NO: 2651 - protein, 38 aa, Artificial Sequence
  Non-cyclic GFR-binding peptide
  MOD_RES (2), (4), (37), (38): Xaa is C or S
  MOD_RES (15), (16), (17), (18), (19): Xaa is A or G
  MOD_RES (20), (21), (22), (23): Xaa is A or G or is absent
SXKXSRVIMYHYKLXXXXXXXXXKYLISIPSLAQPVXX

SEQ ID NO: 2652 - protein, 36 aa, Artificial Sequence
  Non-cyclic GFR-binding peptide
  MOD_RES (2), (4): Xaa is C or S
  MOD_RES (15), (16), (17), (18), (19): Xaa is A or G
  MOD_RES (20), (21), (22), (23): Xaa is A or G or is absent
SXKXSKVVMRHKRLXXXXXXXXXYYLISTASLDQPV

SEQ ID NO: 2653 - protein, 32 aa, Artificial Sequence
  Non-cyclic GFR-binding peptide
  MOD_RES (31), (32): Xaa is C or S
EVVMDYHYKLVVKENEDKYLMSIPSLETPVXX

SEQ ID NO: 2654 - protein, 36 aa, Artificial Sequence
  Non-cyclic GFR-binding peptide
  MOD_RES (32), (33): Xaa is C or S
AKVVMNRYKKLIVNNSSDFYLVSIANLKTPAXXAKP

SEQ ID NO: 2655 - protein, 43 aa, Artificial Sequence
  Non-cyclic GFR-binding peptide
  MOD_RES (1), (3), (38), (39): Xaa is C or S
  MOD_RES (16), (17), (18), (19), (20): Xaa is A or G
  MOD_RES (21), (22), (23), (24): Xaa is A or G or is absent
XGXEAVSMGERYKKLXXXXXXXXXFYLVSIANLKTPVXXAKGV

SEQ ID NO: 2656 - protein, 34 aa, Artificial Sequence
  Non-cyclic GFR-binding peptide
  MOD_RES (2), (4): Xaa is C or S
SXKXSKVVMQYNKLVKPTRGVLYLISIASLDQPV

SEQ ID NO: 2657 - protein, 36 aa, Artificial Sequence
  Non-cyclic GFR-binding peptide
  MOD_RES (2), (35), (36): Xaa is C or S
  MOD_RES (13), (14), (15), (16), (17): Xaa is A or G
  MOD_RES (18), (19), (20), (21): Xaa is A or G or is absent
KXSKVVMRHKRLXXXXXXXXXYYLISTASLDQPVXX

SEQ ID NO: 2658 - protein, 35 aa, Artificial Sequence
  Non-cyclic GFR-binding peptide
  MOD_RES (33), (34): Xaa is C or S
  MOD_RES (11), (12), (13), (14), (15): Xaa is A or G
  MOD_RES (16), (17), (18), (19): Xaa is A or G or is absent
EVVMEYHYKLXXXXXXXXXKYLMSIPSLETPVXXA

SEQ ID NO: 2659 - protein, 39 aa, Artificial Sequence
  Non-cyclic GFR-binding peptide
  MOD_RES (1), (38): Xaa is C or S
  MOD_RES (14), (15), (16), (17), (18): Xaa is A or G
  MOD_RES (19), (20), (21), (22): Xaa is A or G or is absent
XALHDELTRHKRLXXXXXXXXXYYLVSTASLQVQTPRXQ

SEQ ID NO: 2660 - protein, 34 aa, Artificial Sequence
  Non-cyclic GFR-binding peptide
  MOD_RES (2), (33), (34): Xaa is C or S
KXSKVIMYHYKLIKPTKGIKYLISIPSLDQSVXX

SEQ ID NO: 2661 - protein, 30 aa, Artificial Sequence
  Non-cyclic GFR-binding peptide
SKVVMRYKKLVKPTRGVFYLISIANLDQPV

SEQ ID NO: 2662 - protein, 35 aa, Artificial Sequence
  Non-cyclic GFR-binding peptide
  MOD_RES (33), (33): Xaa is C or S
  MOD_RES (11), (12), (13), (14), (15): Xaa is A or G
  MOD_RES (16), (17), (18), (19): Xaa is A or G or is absent
RVVMNRHKRLXXXXXXXXXYYLVSTASLKTPAXTP

SEQ ID NO: 2663 - protein, 37 aa, Artificial Sequence
  Non-cyclic GFR-binding peptide
  MOD_RES (34), (35): Xaa is C or S
  MOD_RES (12), (13), (14), (15), (16): Xaa is A or G
  MOD_RES (17), (18), (19), (20): Xaa is A or G or is absent
GEVVMDRHKRLXXXXXXXXXYYLMSTASLETPVXXAK

SEQ ID NO: 2664 - protein, 37 aa, Artificial Sequence
  Non-cyclic GFR-binding peptide
  MOD_RES (33), (34): Xaa is C or S
  MOD_RES (11), (12), (13), (14), (15): Xaa is A or G
  MOD_RES (16), (17), (18), (19): Xaa is A or G or is absent
RVVMNRHKRLXXXXXXXXXYYLVSTASLQTPAXXPKP

SEQ ID NO: 2665 - protein, 37 aa, Artificial Sequence
  Non-cyclic GFR-binding peptide
  MOD_RES (1), (3), (36), (37): Xaa is C or S
  MOD_RES (14), (15), (16), (17), (18): Xaa is A or G
  MOD_RES (19), (20), (21), (22): Xaa is A or G or is absent
XKXSRVIMYHYKLXXXXXXXXXKYLISIPSLAQPVXX

SEQ ID NO: 2666 - protein, 33 aa, Artificial Sequence
  Non-cyclic GFR-binding peptide
  MOD_RES (33), (33): Xaa is C or S
  MOD_RES (11), (12), (13), (14), (15): Xaa is A or G
  MOD_RES (16), (17), (18), (19): Xaa is A or G or is absent
SRVIMRHKRLXXXXXXXXXYYLISTASLAQPVX

SEQ ID NO: 2667 - protein, 32 aa, Artificial Sequence
  Non-cyclic GFR-binding peptide
  MOD_RES (11), (12), (13), (14), (15): Xaa is A or G
  MOD_RES (16), (17), (18), (19): Xaa is A or G or is absent
HDELTRYKKLXXXXXXXXXFYLVSIANLQVQT

SEQ ID NO: 2668 - protein, 32 aa, Artificial Sequence
  Non-cyclic GFR-binding peptide
  MOD_RES (11), (12), (13), (14), (15): Xaa is A or G
  MOD_RES (16), (17), (18), (19): Xaa is A or G or is absent
RVVMNRHKRLXXXXXXXXXYYLVSTASLQTPA

SEQ ID NO: 2669 - protein, 34 aa, Artificial Sequence
  Non-cyclic GFR-binding peptide
  MOD_RES (1), (34): Xaa is C or S
XEAVSMGEQYNKLTPVGMDDLYLVSIASLKTPVX

SEQ ID NO: 2670 - protein, 37 aa, Artificial Sequence
  Non-cyclic GFR-binding peptide
  MOD_RES (33), (34): Xaa is C or S
  MOD_RES (11), (12), (13), (14), (15): Xaa is A or G
  MOD_RES (16), (17), (18), (19): Xaa is A or G or is absent
KVVMNYHYKLXXXXXXXXXKYLVSIPSLKTPAXXAKP

SEQ ID NO: 2671 - protein, 34 aa, Artificial Sequence
  Non-cyclic GFR-binding peptide
  MOD_RES (31), (31): Xaa is C or S
RVVMNYHYKLIVNSSDDKYLVSIPSLKTPAXTPK

SEQ ID NO: 2672 - protein, 39 aa, Artificial Sequence
  Non-cyclic GFR-binding peptide
  MOD_RES (1), (3), (37), (38): Xaa is C or S
  MOD_RES (15), (16), (17), (18), (19): Xaa is A or G
  MOD_RES (20), (21), (22), (23): Xaa is A or G or is absent
XGXAKVVMNQYNKLXXXXXXXXXLYLVSIASLKTPAXXA

SEQ ID NO: 2673 - protein, 40 aa, Artificial Sequence
  Non-cyclic GFR-binding peptide
  MOD_RES (2), (4), (38), (39): Xaa is C or S
  MOD_RES (16), (17), (18), (19), (20): Xaa is A or G
  MOD_RES (21), (22), (23), (24): Xaa is A or G or is absent
HXGXSRVVMNRHKRLXXXXXXXXXYYLVSTASLKTPAXXP

SEQ ID NO: 2674 - protein, 35 aa, Artificial Sequence
  Non-cyclic GFR-binding peptide
  MOD_RES (2), (35): Xaa is C or S
  MOD_RES (13), (14), (15), (16), (17): Xaa is A or G
  MOD_RES (18), (19), (20), (21): Xaa is A or G or is absent
KXSKVIMRHKRLXXXXXXXXXYYLISTASLDQSVX

SEQ ID NO: 2675 - protein, 37 aa, Artificial Sequence
  Non-cyclic GFR-binding peptide
  MOD_RES (1), (35), (36): Xaa is C or S
  MOD_RES (13), (14), (15), (16), (17): Xaa is A or G
  MOD_RES (18), (19), (20), (21): Xaa is A or G or is absent
XGEVVMDRHKRLXXXXXXXXXYYLMSTASLETPVXXA

SEQ ID NO: 2676 - protein, 44 aa, Artificial Sequence
  Non-cyclic GFR-binding peptide
  MOD_RES (1), (3), (40): Xaa is C or S
XKXALHDELTRYKKLFIPKKRVIEFYLVSIANLQVQTPRXQVNR

SEQ ID NO: 2677 - protein, 39 aa, Artificial Sequence
  Non-cyclic GFR-binding peptide
  MOD_RES (2), (4), (37), (38): Xaa is C or S
  MOD_RES (15), (16), (17), (18), (19): Xaa is A or G
  MOD_RES (20), (21), (22), (23): Xaa is A or G or is absent
SXKXSKVIMYHYKLXXXXXXXXXKYLISIPSLDQSVXXP

SEQ ID NO: 2678 - protein, 42 aa, Artificial Sequence
  Non-cyclic GFR-binding peptide
  MOD_RES (2), (4), (38), (39): Xaa is C or S
  MOD_RES (16), (17), (18), (19), (20): Xaa is A or G
  MOD_RES (21), (22), (23), (24): Xaa is A or G or is absent
HXGXSRVVMNRHKRLXXXXXXXXXYYLVSTASLKTPAXXPKP

SEQ ID NO: 2679 - protein, 39 aa, Artificial Sequence
  Non-cyclic GFR-binding peptide
  MOD_RES (1), (3), (35): Xaa is C or S
XGXSRVVMNRHKRLIVNSSDDYYLVSTASLKTPAXTPKT

SEQ ID NO: 2680 - protein, 36 aa, Artificial Sequence
  Non-cyclic GFR-binding peptide
  MOD_RES (2), (35), (36): Xaa is C or S
  MOD_RES (13), (14), (15), (16), (17): Xaa is A or G
  MOD_RES (18), (19), (20), (21): Xaa is A or G or is absent
KXSKVIMQYNKLXXXXXXXXXLYLISIASLDQSVXX

SEQ ID NO: 2681 - protein, 41 aa, Artificial Sequence
  Non-cyclic GFR-binding peptide
  MOD_RES (1), (38): Xaa is C or S
XALHDELTRHKRLFIPKKRVIEYYLVSTASLQVQTPRXQVN

SEQ ID NO: 2682 - protein, 34 aa, Artificial Sequence
  Non-cyclic GFR-binding peptide
  MOD_RES (34), (34): Xaa is C or S
  MOD_RES (12), (13), (14), (15), (16): Xaa is A or G
  MOD_RES (17), (18), (19), (20): Xaa is A or G or is absent
SRVVMNRHKRLXXXXXXXXXYYLVSTASLKTPAX

SEQ ID NO: 2683 - protein, 36 aa, Artificial Sequence
  Non-cyclic GFR-binding peptide
  MOD_RES (1), (3), (35), (36): Xaa is C or S
XGXARVVMNYHYKLIVNSSDDKYLVSIPSLQTPAXX

SEQ ID NO: 2684 - protein, 38 aa, Artificial Sequence
  Non-cyclic GFR-binding peptide
  MOD_RES (2), (2): Xaa is C or S
  MOD_RES (15), (16), (17), (18), (19): Xaa is A or G
  MOD_RES (20), (21), (22), (23): Xaa is A or G or is absent
KXALHDELTRHKRLXXXXXXXXXYYLVSTASLQVQTPR

SEQ ID NO: 2685 - protein, 36 aa, Artificial Sequence
  Non-cyclic GFR-binding peptide
  MOD_RES (2), (34), (35): Xaa is C or S
GXSRVVMNQYNKLIVNSSDDLYLVSIASLKTPAXXP

SEQ ID NO: 2686 - protein, 39 aa, Artificial Sequence
  Non-cyclic GFR-binding peptide
  MOD_RES (2), (4), (35), (36): Xaa is C or S
SXKXSRVIMRHKRLVKPKRGVYYLISTASLAQPVXXPAA

SEQ ID NO: 2687 - protein, 30 aa, Artificial Sequence
  Non-cyclic GFR-binding peptide
RVVMNQYNKLIVNSSDDLYLVSIASLKTPA

SEQ ID NO: 2688 - protein, 33 aa, Artificial Sequence
  Non-cyclic GFR-binding peptide
  MOD_RES (32), (33): Xaa is C or S
ARVVMNQYNKLIVNSSDDLYLVSIASLQTPAXX

SEQ ID NO: 2689 - protein, 38 aa, Artificial Sequence
  Non-cyclic GFR-binding peptide
  MOD_RES (1), (33), (34): Xaa is C or S
XGEVVMERHKRLVVKDYEDYYLMSTASLETPVXXAKPI

SEQ ID NO: 2690 - protein, 31 aa, Artificial Sequence
  Non-cyclic GFR-binding peptide
  MOD_RES (31), (31): Xaa is C or S
KVVMNQYNKLIVNNSSDLYLVSIASLKTPAX

SEQ ID NO: 2691 - protein, 41 aa, Artificial Sequence
  Non-cyclic GFR-binding peptide
  MOD_RES (1), (3), (36), (37): Xaa is C or S
XGXEAVSMGERHKRLTPVGMDDYYLVSTASLKTPVXXAKGV

SEQ ID NO: 2692 - protein, 35 aa, Artificial Sequence
  Non-cyclic GFR-binding peptide
  MOD_RES (1), (33), (34): Xaa is C or S
XAKVVMNRYKKLIVNNSSDFYLVSIANLKTPAXXA

SEQ ID NO: 2693 - protein, 31 aa, Artificial Sequence
  Non-cyclic GFR-binding peptide
  MOD_RES (1), (1): Xaa is C or S
XSKVVMRYKKLVKPTRGVFYLISIANLDQPV

SEQ ID NO: 2694 - protein, 39 aa, Artificial Sequence
  Non-cyclic GFR-binding peptide
  MOD_RES (1), (34), (35): Xaa is C or S
  MOD_RES (12), (13), (14), (15), (16): Xaa is A or G
  MOD_RES (17), (18), (19), (20): Xaa is A or G or is absent
XSRVIMQYNKLXXXXXXXXXLYLISIASLAQPVXXPAAS

SEQ ID NO: 2695 - protein, 36 aa, Artificial Sequence
  Non-cyclic GFR-binding peptide
  MOD_RES (1), (3), (34), (35): Xaa is C or S
XKXSRVIMRHKRLVKPKRGVYYLISTASLAQPVXXP

SEQ ID NO: 2696 - protein, 33 aa, Artificial Sequence
  Non-cyclic GFR-binding peptide
  MOD_RES (33), (33): Xaa is C or S
  MOD_RES (11), (12), (13), (14), (15): Xaa is A or G
  MOD_RES (16), (17), (18), (19): Xaa is A or G or is absent
EVVMERHKRLXXXXXXXXXYYLMSTASLETPVX

SEQ ID NO: 2697 - protein, 39 aa, Artificial Sequence
  Non-cyclic GFR-binding peptide
  MOD_RES (33), (34): Xaa is C or S
EAVSMGERHKRLTPVGMDDYYLVSTASLKTPVXXAKGVK

SEQ ID NO: 2698 - protein, 41 aa, Artificial Sequence
  Non-cyclic GFR-binding peptide
  MOD_RES (2), (4), (37), (38): Xaa is C or S
  MOD_RES (15), (16), (17), (18), (19): Xaa is A or G
  MOD_RES (20), (21), (22), (23): Xaa is A or G or is absent
SXKXSKVIMRYKKLXXXXXXXXXFYLISIANLDQSVXXPSA

SEQ ID NO: 2699 - protein, 39 aa, Artificial Sequence
  Non-cyclic GFR-binding peptide
  MOD_RES (2), (4), (35), (36): Xaa is C or S
SXKXSRVIMYHYKLVKPKRGVKYLISIPSLAQPVXXPAA

SEQ ID NO: 2700 - protein, 39 aa, Artificial Sequence
  Non-cyclic GFR-binding peptide
  MOD_RES (33), (34): Xaa is C or S
  MOD_RES (11), (12), (13), (14), (15): Xaa is A or G
  MOD_RES (16), (17), (18), (19): Xaa is A or G or is absent
RVVMNQYNKLXXXXXXXXXLYLVSIASLKTPAXXPKPVY

SEQ ID NO: 2701 - protein, 36 aa, Artificial Sequence
  Non-cyclic GFR-binding peptide
  MOD_RES (2), (4): Xaa is C or S
RXGXEAVSMGEQYNKLTPVGMDDLYLVSIASLKTPV

SEQ ID NO: 2702 - protein, 37 aa, Artificial Sequence
  Non-cyclic GFR-binding peptide
  MOD_RES (2), (35), (36): Xaa is C or S
GXEAVSMGERYKKLTPVGMDDFYLVSIANLKTPVXXA

SEQ ID NO: 2703 - protein, 40 aa, Artificial Sequence
  Non-cyclic GFR-binding peptide
  MOD_RES (1), (3), (37), (38): Xaa is C or S
  MOD_RES (15), (16), (17), (18), (19): Xaa is A or G
  MOD_RES (20), (21), (22), (23): Xaa is A or G or is absent
XGXAKVVMNYHYKLXXXXXXXXXKYLVSIPSLKTPAXXAK

SEQ ID NO: 2704 - protein, 43 aa, Artificial Sequence
  Non-cyclic GFR-binding peptide
  MOD_RES (1), (3), (40): Xaa is C or S
  MOD_RES (16), (17), (18), (19), (20): Xaa is A or G
  MOD_RES (21), (22), (23), (24): Xaa is A or G or is absent
XKXALHDELTYHYKLXXXXXXXXXKYLVSIPSLQVQTPRXQVN

SEQ ID NO: 2705 - protein, 37 aa, Artificial Sequence
  Non-cyclic GFR-binding peptide
  MOD_RES (1), (35), (36): Xaa is C or S
  MOD_RES (13), (14), (15), (16), (17): Xaa is A or G
  MOD_RES (18), (19), (20), (21): Xaa is A or G or is absent
XGEVVMEYHYKLXXXXXXXXXKYLMSIPSLETPVXXA

SEQ ID NO: 2706 - protein, 36 aa, Artificial Sequence
  Non-cyclic GFR-binding peptide
  MOD_RES (2), (2): Xaa is C or S
  MOD_RES (15), (16), (17), (18), (19): Xaa is A or G
  MOD_RES (20), (21), (22), (23): Xaa is A or G or is absent
KXALHDELTYHYKLXXXXXXXXXKYLVSIPSLQVQT

SEQ ID NO: 2707 - protein, 40 aa, Artificial Sequence
  Non-cyclic GFR-binding peptide
  MOD_RES (1), (3), (37): Xaa is C or S
  MOD_RES (15), (16), (17), (18), (19): Xaa is A or G
  MOD_RES (20), (21), (22), (23): Xaa is A or G or is absent
XGXSRVVMNYHYKLXXXXXXXXXKYLVSIPSLKTPAXTPK

SEQ ID NO: 2708 - protein, 37 aa, Artificial Sequence
  Non-cyclic GFR-binding peptide
  MOD_RES (2), (2): Xaa is C or S
  MOD_RES (15), (16), (17), (18), (19): Xaa is A or G
  MOD_RES (20), (21), (22), (23): Xaa is A or G or is absent
KXALHDELTRYKKLXXXXXXXXXFYLVSIANLQVQTP

SEQ ID NO: 2709 - protein, 37 aa, Artificial Sequence
  Non-cyclic GFR-binding peptide
  MOD_RES (2), (4): Xaa is C or S
  MOD_RES (16), (17), (18), (19), (20): Xaa is A or G
  MOD_RES (21), (22), (23), (24): Xaa is A or G or is absent
HXGXSRVVMNRHKRLXXXXXXXXXYYLVSTASLKTPA

SEQ ID NO: 2710 - protein, 41 aa, Artificial Sequence
  Non-cyclic GFR-binding peptide
  MOD_RES (1), (3), (35), (36): Xaa is C or S
XGXAKVVMNYHYKLIVNNSSDKYLVSIPSLKTPAXXAKPVA

SEQ ID NO: 2711 - protein, 40 aa, Artificial Sequence
  Non-cyclic GFR-binding peptide
  MOD_RES (1), (34), (35): Xaa is C or S
  MOD_RES (12), (13), (14), (15), (16): Xaa is A or G
  MOD_RES (17), (18), (19), (20): Xaa is A or G or is absent
XSKVVMRYKKLXXXXXXXXXFYLISIANLDQPVXXPSASA

SEQ ID NO: 2712 - protein, 36 aa, Artificial Sequence
  Non-cyclic GFR-binding peptide
  MOD_RES (1), (1): Xaa is C or S
XALHDELTQYNKLFIPKKRVIELYLVSIASLQVQTP

SEQ ID NO: 2713 - protein, 32 aa, Artificial Sequence
  Non-cyclic GFR-binding peptide
  MOD_RES (11), (12), (13), (14), (15): Xaa is A or G
  MOD_RES (16), (17), (18), (19): Xaa is A or G or is absent
RVVMNQYNKLXXXXXXXXXLYLVSIASLKTPA

SEQ ID NO: 2714 - protein, 37 aa, Artificial Sequence
  Non-cyclic GFR-binding peptide
  MOD_RES (1), (33), (34): Xaa is C or S
XGEVVMDRHKRLVVKENEDYYLMSTASLETPVXXAKP

SEQ ID NO: 2715 - protein, 44 aa, Artificial Sequence
  Non-cyclic GFR-binding peptide
  MOD_RES (2), (4), (38), (39): Xaa is C or S
  MOD_RES (16), (17), (18), (19), (20): Xaa is A or G
  MOD_RES (21), (22), (23), (24): Xaa is A or G or is absent
RXGXGEVVMEYHYKLXXXXXXXXXKYLMSIPSLETPVXXAKPIS

SEQ ID NO: 2716 - protein, 33 aa, Artificial Sequence
  Non-cyclic GFR-binding peptide
  MOD_RES (1), (3): Xaa is C or S
XKXSKVIMRHKRLIKPTKGIYYLISTASLDQSV

SEQ ID NO: 2717 - protein, 40 aa, Artificial Sequence
  Non-cyclic GFR-binding peptide
  MOD_RES (2), (4), (35), (36): Xaa is C or S
SXKXSKVVMRHKRLVKPTRGVYYLISTASLDQPVXXPSAS

SEQ ID NO: 2718 - protein, 35 aa, Artificial Sequence
  Non-cyclic GFR-binding peptide
  MOD_RES (2), (35): Xaa is C or S
  MOD_RES (13), (14), (15), (16), (17): Xaa is A or G
  MOD_RES (18), (19), (20), (21): Xaa is A or G or is absent
KXSRVIMYHYKLXXXXXXXXXKYLISIPSLAQPVX

SEQ ID NO: 2719 - protein, 44 aa, Artificial Sequence
  Non-cyclic GFR-binding peptide
  MOD_RES (2), (4), (41): Xaa is C or S
  MOD_RES (17), (18), (19), (20), (21): Xaa is A or G
  MOD_RES (22), (23), (24), (25): Xaa is A or G or is absent
EXKXALHDELTQYNKLXXXXXXXXXLYLVSIASLQVQTPRXQVN

SEQ ID NO: 2720 - protein, 37 aa, Artificial Sequence
  Non-cyclic GFR-binding peptide
  MOD_RES (1), (34), (35): Xaa is C or S
  MOD_RES (12), (13), (14), (15), (16): Xaa is A or G
  MOD_RES (17), (18), (19), (20): Xaa is A or G or is absent
XSRVIMRYKKLXXXXXXXXXFYLISIANLAQPVXXPA

SEQ ID NO: 2721 - protein, 34 aa, Artificial Sequence
  Non-cyclic GFR-binding peptide
  MOD_RES (2), (33), (34): Xaa is C or S
KXSKVVMYHYKLVKPTRGVKYLISIPSLDQPVXX

SEQ ID NO: 2722 - protein, 39 aa, Artificial Sequence
  Non-cyclic GFR-binding peptide
  MOD_RES (1), (38): Xaa is C or S
XALHDELTRHKRLFIPKKRVIEYYLVSTASLQVQTPRXQ

SEQ ID NO: 2723 - protein, 42 aa, Artificial Sequence
  Non-cyclic GFR-binding peptide
  MOD_RES (2), (37), (38): Xaa is C or S
  MOD_RES (15), (16), (17), (18), (19): Xaa is A or G
  MOD_RES (20), (21), (22), (23): Xaa is A or G or is absent
GXEAVSMGERHKRLXXXXXXXXXYYLVSTASLKTPVXXAKGV

SEQ ID NO: 2724 - protein, 33 aa, Artificial Sequence
  Non-cyclic GFR-binding peptide
  MOD_RES (32), (33): Xaa is C or S
SRVVMNRHKRLIVNSSDDYYLVSTASLKTPAXX

SEQ ID NO: 2725 - protein, 41 aa, Artificial Sequence
  Non-cyclic GFR-binding peptide
  MOD_RES (37), (37): Xaa is C or S
ALHDELTYHYKLFIPKKRVIEKYLVSIPSLQVQTPRXQVNR

SEQ ID NO: 2726 - protein, 35 aa, Artificial Sequence
  Non-cyclic GFR-binding peptide
  MOD_RES (33), (34): Xaa is C or S
  MOD_RES (11), (12), (13), (14), (15): Xaa is A or G
  MOD_RES (16), (17), (18), (19): Xaa is A or G or is absent
SKVVMRYKKLXXXXXXXXXFYLISIANLDQPVXXP

SEQ ID NO: 2727 - protein, 35 aa, Artificial Sequence
  Non-cyclic GFR-binding peptide
  MOD_RES (2), (4), (35): Xaa is C or S
SXKXSKVIMYHYKLIKPTKGIKYLISIPSLDQSVX

SEQ ID NO: 2728 - protein, 37 aa, Artificial Sequence
  Non-cyclic GFR-binding peptide
  MOD_RES (1), (3), (34), (35): Xaa is C or S
XKXSRVIMQYNKLVKPKRGVLYLISIASLAQPVXXPA

SEQ ID NO: 2729 - protein, 36 aa, Artificial Sequence
  Non-cyclic GFR-binding peptide
  MOD_RES (32), (33): Xaa is C or S
GEVVMDRYKKLVVKENEDFYLMSIANLETPVXXAKP

SEQ ID NO: 2730 - protein, 39 aa, Artificial Sequence
  Non-cyclic GFR-binding peptide
  MOD_RES (37), (37): Xaa is C or S
  MOD_RES (13), (14), (15), (16), (17): Xaa is A or G
  MOD_RES (18), (19), (20), (21): Xaa is A or G or is absent
ALHDELTRYKKLXXXXXXXXXFYLVSIANLQVQTPRXQV

SEQ ID NO: 2731 - protein, 32 aa, Artificial Sequence
  Non-cyclic GFR-binding peptide
  MOD_RES (31), (32): Xaa is C or S
SKVVMQYNKLVKPTRGVLYLISIASLDQPVXX

SEQ ID NO: 2732 - protein, 43 aa, Artificial Sequence
  Non-cyclic GFR-binding peptide
  MOD_RES (2), (4), (38), (39): Xaa is C or S
  MOD_RES (16), (17), (18), (19), (20): Xaa is A or G
  MOD_RES (21), (22), (23), (24): Xaa is A or G or is absent
HXGXAKVVMNRYKKLXXXXXXXXXFYLVSIANLKTPAXXAKPV

SEQ ID NO: 2733 - protein, 34 aa, Artificial Sequence
  Non-cyclic GFR-binding peptide
  MOD_RES (31), (32): Xaa is C or S
RVVMNRHKRLIVNSSDDYYLVSTASLKTPAXXPK

SEQ ID NO: 2734 - protein, 33 aa, Artificial Sequence
  Non-cyclic GFR-binding peptide
  MOD_RES (1), (33): Xaa is C or S
XSRVVMNRHKRLIVNSSDDYYLVSTASLKTPAX

SEQ ID NO: 2735 - protein, 39 aa, Artificial Sequence
  Non-cyclic GFR-binding peptide
  MOD_RES (1), (33), (34): Xaa is C or S
XAKVVMNYHYKLIVNNSSDKYLVSIPSLKTPAXXAKPVA

SEQ ID NO: 2736 - protein, 42 aa, Artificial Sequence
  Non-cyclic GFR-binding peptide
  MOD_RES (1), (3), (37), (38): Xaa is C or S
  MOD_RES (15), (16), (17), (18), (19): Xaa is A or G
  MOD_RES (20), (21), (22), (23): Xaa is A or G or is absent
XGXAKVVMNYHYKLXXXXXXXXXKYLVSIPSLKTPAXXAKPV

SEQ ID NO: 2737 - protein, 40 aa, Artificial Sequence
  Non-cyclic GFR-binding peptide
  MOD_RES (2), (4), (37), (38): Xaa is C or S
  MOD_RES (15), (16), (17), (18), (19): Xaa is A or G
  MOD_RES (20), (21), (22), (23): Xaa is A or G or is absent
SXKXSRVIMYHYKLXXXXXXXXXKYLISIPSLAQPVXXPA

SEQ ID NO: 2738 - protein, 37 aa, Artificial Sequence
  Non-cyclic GFR-binding peptide
  MOD_RES (33), (34): Xaa is C or S
EAVSMGERYKKLTPVGMDDFYLVSIANLKTPVXXAKG

SEQ ID NO: 2739 - protein, 34 aa, Artificial Sequence
  Non-cyclic GFR-binding peptide
  MOD_RES (1), (33), (34): Xaa is C or S
XAKVVMNYHYKLIVNNSSDKYLVSIPSLKTPAXX

SEQ ID NO: 2740 - protein, 36 aa, Artificial Sequence
  Non-cyclic GFR-binding peptide
  MOD_RES (2), (33), (34): Xaa is C or S
KXSKVIMYHYKLIKPTKGIKYLISIPSLDQSVXXPS

SEQ ID NO: 2741 - protein, 41 aa, Artificial Sequence
  Non-cyclic GFR-binding peptide
  MOD_RES (1), (3), (37): Xaa is C or S
  MOD_RES (15), (16), (17), (18), (19): Xaa is A or G
  MOD_RES (20), (21), (22), (23): Xaa is A or G or is absent
XGXSRVVMNYHYKLXXXXXXXXXKYLVSIPSLKTPAXTPKT

SEQ ID NO: 2742 - protein, 36 aa, Artificial Sequence
  Non-cyclic GFR-binding peptide
  MOD_RES (1), (33): Xaa is C or S
XSRVVMNYHYKLIVNSSDDKYLVSIPSLKTPAXTPK

SEQ ID NO: 2743 - protein, 40 aa, Artificial Sequence
  Non-cyclic GFR-binding peptide
  MOD_RES (1), (35), (36): Xaa is C or S
  MOD_RES (13), (14), (15), (16), (17): Xaa is A or G
  MOD_RES (18), (19), (20), (21): Xaa is A or G or is absent
XGEVVMERYKKLXXXXXXXXXFYLMSIANLETPVXXAKPI

SEQ ID NO: 2744 - protein, 35 aa, Artificial Sequence
  Non-cyclic GFR-binding peptide
  MOD_RES (32), (33): Xaa is C or S
GEVVMDRYKKLVVKENEDFYLMSIANLETPVXXAK

SEQ ID NO: 2745 - protein, 36 aa, Artificial Sequence
  Non-cyclic GFR-binding peptide
  MOD_RES (2), (36): Xaa is C or S
  MOD_RES (14), (15), (16), (17), (18): Xaa is A or G
  MOD_RES (19), (20), (21), (22): Xaa is A or G or is absent
GXGEVVMERYKKLXXXXXXXXXFYLMSIANLETPVX

SEQ ID NO: 2746 - protein, 33 aa, Artificial Sequence
  Non-cyclic GFR-binding peptide
  MOD_RES (1), (1): Xaa is C or S
  MOD_RES (12), (13), (14), (15), (16): Xaa is A or G
  MOD_RES (17), (18), (19), (20): Xaa is A or G or is absent
XSRVIMRYKKLXXXXXXXXXFYLISIANLAQPV

SEQ ID NO: 2747 - protein, 34 aa, Artificial Sequence
  Non-cyclic GFR-binding peptide
  MOD_RES (33), (34): Xaa is C or S
  MOD_RES (11), (12), (13), (14), (15): Xaa is A or G
  MOD_RES (16), (17), (18), (19): Xaa is A or G or is absent
RVVMNRHKRLXXXXXXXXXYYLVSTASLQTPAXX

SEQ ID NO: 2748 - protein, 34 aa, Artificial Sequence
  Non-cyclic GFR-binding peptide
  MOD_RES (34), (34): Xaa is C or S
  MOD_RES (12), (13), (14), (15), (16): Xaa is A or G
  MOD_RES (17), (18), (19), (20): Xaa is A or G or is absent
ARVVMNQYNKLXXXXXXXXXLYLVSIASLQTPAX

SEQ ID NO: 2749 - protein, 39 aa, Artificial Sequence
  Non-cyclic GFR-binding peptide
  MOD_RES (2), (4), (38): Xaa is C or S
  MOD_RES (16), (17), (18), (19), (20): Xaa is A or G
  MOD_RES (21), (22), (23), (24): Xaa is A or G or is absent
HXGXSRVVMNRHKRLXXXXXXXXXYYLVSTASLKTPAXT

SEQ ID NO: 2750 - protein, 34 aa, Artificial Sequence
  Non-cyclic GFR-binding peptide
  MOD_RES (1), (3), (34): Xaa is C or S
XKXSKVVMRHKRLVKPTRGVYYLISTASLDQPVX

SEQ ID NO: 2751 - protein, 38 aa, Artificial Sequence
  Non-cyclic GFR-binding peptide
  MOD_RES (2), (36), (37): Xaa is C or S
  MOD_RES (14), (15), (16), (17), (18): Xaa is A or G
  MOD_RES (19), (20), (21), (22): Xaa is A or G or is absent
GXSRVVMNQYNKLXXXXXXXXXLYLVSIASLKTPAXXP

SEQ ID NO: 2752 - protein, 36 aa, Artificial Sequence
  Non-cyclic GFR-binding peptide
  MOD_RES (2), (4), (36): Xaa is C or S
HXGXSRVVMNRHKRLIVNSSDDYYLVSTASLKTPAX

SEQ ID NO: 2753 - protein, 33 aa, Artificial Sequence
  Non-cyclic GFR-binding peptide
  MOD_RES (32), (33): Xaa is C or S
GEVVMDRYKKLVVKENEDFYLMSIANLETPVXX

SEQ ID NO: 2754 - protein, 32 aa, Artificial Sequence
  Non-cyclic GFR-binding peptide
  MOD_RES (11), (12), (13), (14), (15): Xaa is A or G
  MOD_RES (16), (17), (18), (19): Xaa is A or G or is absent
RVVMNRHKRLXXXXXXXXXYYLVSTASLKTPA

SEQ ID NO: 2755 - protein, 36 aa, Artificial Sequence
  Non-cyclic GFR-binding peptide
  MOD_RES (1), (3), (34), (35): Xaa is C or S
XKXSKVIMYHYKLIKPTKGIKYLISIPSLDQSVXXP

SEQ ID NO: 2756 - protein, 39 aa, Artificial Sequence
  Non-cyclic GFR-binding peptide
  MOD_RES (33), (34): Xaa is C or S
  MOD_RES (11), (12), (13), (14), (15): Xaa is A or G
  MOD_RES (16), (17), (18), (19): Xaa is A or G or is absent
EVVMDYHYKLXXXXXXXXXKYLMSIPSLETPVXXAKPIK

SEQ ID NO: 2757 - protein, 33 aa, Artificial Sequence
  Non-cyclic GFR-binding peptide
  MOD_RES (31), (32): Xaa is C or S
SKVVMYHYKLVKPTRGVKYLISIPSLDQPVXXP

SEQ ID NO: 2758 - protein, 40 aa, Artificial Sequence
  Non-cyclic GFR-binding peptide
  MOD_RES (1), (35), (36): Xaa is C or S
  MOD_RES (13), (14), (15), (16), (17): Xaa is A or G
  MOD_RES (18), (19), (20), (21): Xaa is A or G or is absent
XGEVVMDYHYKLXXXXXXXXXKYLMSIPSLETPVXXAKPI

SEQ ID NO: 2759 - protein, 32 aa, Artificial Sequence
  Non-cyclic GFR-binding peptide
  MOD_RES (1), (32): Xaa is C or S
XSKVIMRHKRLIKPTKGIYYLISTASLDQSVX

SEQ ID NO: 2760 - protein, 32 aa, Artificial Sequence
  Non-cyclic GFR-binding peptide
  MOD_RES (31), (32): Xaa is C or S
SKVVMYHYKLVKPTRGVKYLISIPSLDQPVXX

SEQ ID NO: 2761 - protein, 39 aa, Artificial Sequence
  Non-cyclic GFR-binding peptide
  MOD_RES (2), (4), (37), (38): Xaa is C or S
  MOD_RES (15), (16), (17), (18), (19): Xaa is A or G
  MOD_RES (20), (21), (22), (23): Xaa is A or G or is absent
SXKXSRVIMQYNKLXXXXXXXXXLYLISIASLAQPVXXP

SEQ ID NO: 2762 - protein, 40 aa, Artificial Sequence
  Non-cyclic GFR-binding peptide
  MOD_RES (1), (3), (37), (38): Xaa is C or S
  MOD_RES (15), (16), (17), (18), (19): Xaa is A or G
  MOD_RES (20), (21), (22), (23): Xaa is A or G or is absent
XGXAKVVMNQYNKLXXXXXXXXXLYLVSIASLKTPAXXAK

SEQ ID NO: 2763 - protein, 39 aa, Artificial Sequence
  Non-cyclic GFR-binding peptide
  MOD_RES (1), (3), (34), (35): Xaa is C or S
XKXSRVIMRHKRLVKPKRGVYYLISTASLAQPVXXPAAS

SEQ ID NO: 2764 - protein, 38 aa, Artificial Sequence
  Non-cyclic GFR-binding peptide
  MOD_RES (1), (35), (36): Xaa is C or S
  MOD_RES (13), (14), (15), (16), (17): Xaa is A or G
  MOD_RES (18), (19), (20), (21): Xaa is A or G or is absent
XGEVVMDYHYKLXXXXXXXXXKYLMSIPSLETPVXXAK

SEQ ID NO: 2765 - protein, 37 aa, Artificial Sequence
  Non-cyclic GFR-binding peptide
  MOD_RES (1), (36), (37): Xaa is C or S
  MOD_RES (14), (15), (16), (17), (18): Xaa is A or G
  MOD_RES (19), (20), (21), (22): Xaa is A or G or is absent
XEAVSMGEQYNKLXXXXXXXXXLYLVSIASLKTPVXX

SEQ ID NO: 2766 - protein, 39 aa, Artificial Sequence
  Non-cyclic GFR-binding peptide
  MOD_RES (2), (4), (36), (37): Xaa is C or S
HXGXSRVVMNYHYKLIVNSSDDKYLVSIPSLKTPAXXPK

SEQ ID NO: 2767 - protein, 33 aa, Artificial Sequence
  Non-cyclic GFR-binding peptide
LHDELTRHKRLFIPKKRVIEYYLVSTASLQVQT

SEQ ID NO: 2768 - protein, 42 aa, Artificial Sequence
  Non-cyclic GFR-binding peptide
  MOD_RES (1), (3), (37), (38): Xaa is C or S
  MOD_RES (15), (16), (17), (18), (19): Xaa is A or G
  MOD_RES (20), (21), (22), (23): Xaa is A or G or is absent
XGXGEVVMDRHKRLXXXXXXXXXYYLMSTASLETPVXXAKPI

SEQ ID NO: 2769 - protein, 36 aa, Artificial Sequence
  Non-cyclic GFR-binding peptide
  MOD_RES (33), (34): Xaa is C or S
  MOD_RES (11), (12), (13), (14), (15): Xaa is A or G
  MOD_RES (16), (17), (18), (19): Xaa is A or G or is absent
SKVIMRHKRLXXXXXXXXXYYLISTASLDQSVXXPS

SEQ ID NO: 2770 - protein, 39 aa, Artificial Sequence
  Non-cyclic GFR-binding peptide
  MOD_RES (2), (4), (39): Xaa is C or S
  MOD_RES (17), (18), (19), (20), (21): Xaa is A or G
  MOD_RES (22), (23), (24), (25): Xaa is A or G or is absent
RXGXEAVSMGERHKRLXXXXXXXXXYYLVSTASLKTPVX

SEQ ID NO: 2771 - protein, 39 aa, Artificial Sequence
  Non-cyclic GFR-binding peptide
  MOD_RES (1), (3), (34), (35): Xaa is C or S
XKXSRVIMYHYKLVKPKRGVKYLISIPSLAQPVXXPAAS

SEQ ID NO: 2772 - protein, 35 aa, Artificial Sequence
  Non-cyclic GFR-binding peptide
  MOD_RES (34), (35): Xaa is C or S
  MOD_RES (12), (13), (14), (15), (16): Xaa is A or G
  MOD_RES (17), (18), (19), (20): Xaa is A or G or is absent
GEVVMDRHKRLXXXXXXXXXYYLMSTASLETPVXX

SEQ ID NO: 2773 - protein, 34 aa, Artificial Sequence
  Non-cyclic GFR-binding peptide
  MOD_RES (33), (34): Xaa is C or S
  MOD_RES (11), (12), (13), (14), (15): Xaa is A or G
  MOD_RES (16), (17), (18), (19): Xaa is A or G or is absent
SKVVMYHYKLXXXXXXXXXKYLISIPSLDQPVXX

SEQ ID NO: 2774 - protein, 34 aa, Artificial Sequence
  Non-cyclic GFR-binding peptide
  MOD_RES (34), (34): Xaa is C or S
  MOD_RES (12), (13), (14), (15), (16): Xaa is A or G
  MOD_RES (17), (18), (19), (20): Xaa is A or G or is absent
AKVVMNYHYKLXXXXXXXXXKYLVSIPSLKTPAX

SEQ ID NO: 2775 - protein, 38 aa, Artificial Sequence
  Non-cyclic GFR-binding peptide
  MOD_RES (2), (4), (36): Xaa is C or S
HXGXSRVVMNYHYKLIVNSSDDKYLVSIPSLKTPAXTP

SEQ ID NO: 2776 - protein, 37 aa, Artificial Sequence
  Non-cyclic GFR-binding peptide
  MOD_RES (1), (32), (33): Xaa is C or S
XSKVVMRHKRLVKPTRGVYYLISTASLDQPVXXPSAS

SEQ ID NO: 2777 - protein, 33 aa, Artificial Sequence
  Non-cyclic GFR-binding peptide
  MOD_RES (1), (3): Xaa is C or S
XKXSRVIMQYNKLVKPKRGVLYLISIASLAQPV

SEQ ID NO: 2778 - protein, 34 aa, Artificial Sequence
  Non-cyclic GFR-binding peptide
  MOD_RES (1), (1): Xaa is C or S
  MOD_RES (13), (14), (15), (16), (17): Xaa is A or G
  MOD_RES (18), (19), (20), (21): Xaa is A or G or is absent
XGEVVMEYHYKLXXXXXXXXXKYLMSIPSLETPV

SEQ ID NO: 2779 - protein, 39 aa, Artificial Sequence
  Non-cyclic GFR-binding peptide
  MOD_RES (1), (35), (36): Xaa is C or S
  MOD_RES (13), (14), (15), (16), (17): Xaa is A or G
  MOD_RES (18), (19), (20), (21): Xaa is A or G or is absent
XSRVVMNRHKRLXXXXXXXXXYYLVSTASLKTPAXXPKP

SEQ ID NO: 2780 - protein, 38 aa, Artificial Sequence
  Non-cyclic GFR-binding peptide
  MOD_RES (32), (33): Xaa is C or S
GEVVMERHKRLVVKDYEDYYLMSTASLETPVXXAKPIS

SEQ ID NO: 2781 - protein, 43 aa, Artificial Sequence
  Non-cyclic GFR-binding peptide
  MOD_RES (1), (3), (37), (38): Xaa is C or S
  MOD_RES (15), (16), (17), (18), (19): Xaa is A or G
  MOD_RES (20), (21), (22), (23): Xaa is A or G or is absent
XGXGEVVMERYKKLXXXXXXXXXFYLMSIANLETPVXXAKPIS

SEQ ID NO: 2782 - protein, 37 aa, Artificial Sequence
  Non-cyclic GFR-binding peptide
  MOD_RES (1), (3): Xaa is C or S
XKXALHDELTRYKKLFIPKKRVIEFYLVSIANLQVQT

SEQ ID NO: 2783 - protein, 38 aa, Artificial Sequence
  Non-cyclic GFR-binding peptide
  MOD_RES (2), (4), (36), (37): Xaa is C or S
RXGXGEVVMERYKKLVVKDYEDFYLMSIANLETPVXXA

SEQ ID NO: 2784 - protein, 35 aa, Artificial Sequence
  Non-cyclic GFR-binding peptide
  MOD_RES (1), (3), (35): Xaa is C or S
XGXGEVVMDRHKRLVVKENEDYYLMSTASLETPVX

SEQ ID NO: 2785 - protein, 40 aa, Artificial Sequence
  Non-cyclic GFR-binding peptide
  MOD_RES (2), (35), (36): Xaa is C or S
  MOD_RES (13), (14), (15), (16), (17): Xaa is A or G
  MOD_RES (18), (19), (20), (21): Xaa is A or G or is absent
KXSRVIMRHKRLXXXXXXXXXYYLISTASLAQPVXXPAAS

SEQ ID NO: 2786 - protein, 36 aa, Artificial Sequence
  Non-cyclic GFR-binding peptide
  MOD_RES (1), (1): Xaa is C or S
  MOD_RES (14), (15), (16), (17), (18): Xaa is A or G
  MOD_RES (19), (20), (21), (22): Xaa is A or G or is absent
XALHDELTQYNKLXXXXXXXXXLYLVSIASLQVQTP

SEQ ID NO: 2787 - protein, 35 aa, Artificial Sequence
  Non-cyclic GFR-binding peptide
  MOD_RES (13), (14), (15), (16), (17): Xaa is A or G
  MOD_RES (18), (19), (20), (21): Xaa is A or G or is absent
ALHDELTYHYKLXXXXXXXXXKYLVSIPSLQVQTP

SEQ ID NO: 2788 - protein, 35 aa, Artificial Sequence
  Non-cyclic GFR-binding peptide
  MOD_RES (2), (4), (35): Xaa is C or S
SXKXSKVVMQYNKLVKPTRGVLYLISIASLDQPVX

SEQ ID NO: 2789 - protein, 36 aa, Artificial Sequence
  Non-cyclic GFR-binding peptide
  MOD_RES (2), (35), (36): Xaa is C or S
  MOD_RES (13), (14), (15), (16), (17): Xaa is A or G
  MOD_RES (18), (19), (20), (21): Xaa is A or G or is absent
KXSRVIMYHYKLXXXXXXXXXKYLISIPSLAQPVXX

SEQ ID NO: 2790 - protein, 37 aa, Artificial Sequence
  Non-cyclic GFR-binding peptide
  MOD_RES (1), (3): Xaa is C or S
  MOD_RES (16), (17), (18), (19), (20): Xaa is A or G
  MOD_RES (21), (22), (23), (24): Xaa is A or G or is absent
XGXEAVSMGEQYNKLXXXXXXXXXLYLVSIASLKTPV

SEQ ID NO: 2791 - protein, 42 aa, Artificial Sequence
  Non-cyclic GFR-binding peptide
  MOD_RES (1), (36), (37): Xaa is C or S
  MOD_RES (14), (15), (16), (17), (18): Xaa is A or G
  MOD_RES (19), (20), (21), (22): Xaa is A or G or is absent
XEAVSMGERHKRLXXXXXXXXXYYLVSTASLKTPVXXAKGVK

SEQ ID NO: 2792 - protein, 39 aa, Artificial Sequence
  Non-cyclic GFR-binding peptide
  MOD_RES (33), (34): Xaa is C or S
  MOD_RES (11), (12), (13), (14), (15): Xaa is A or G
  MOD_RES (16), (17), (18), (19): Xaa is A or G or is absent
SRVIMRHKRLXXXXXXXXXYYLISTASLAQPVXXPAASA

SEQ ID NO: 2793 - protein, 38 aa, Artificial Sequence
  Non-cyclic GFR-binding peptide
  MOD_RES (1), (36), (37): Xaa is C or S
  MOD_RES (14), (15), (16), (17), (18): Xaa is A or G
  MOD_RES (19), (20), (21), (22): Xaa is A or G or is absent
XEAVSMGERHKRLXXXXXXXXXYYLVSTASLKTPVXXA

SEQ ID NO: 2794 - protein, 39 aa, Artificial Sequence
  Non-cyclic GFR-binding peptide
  MOD_RES (1), (34), (35): Xaa is C or S
  MOD_RES (12), (13), (14), (15), (16): Xaa is A or G
  MOD_RES (17), (18), (19), (20): Xaa is A or G or is absent
XSKVIMRYKKLXXXXXXXXXFYLISIANLDQSVXXPSAS

SEQ ID NO: 2795 - protein, 35 aa, Artificial Sequence
  Non-cyclic GFR-binding peptide
  MOD_RES (1), (34), (35): Xaa is C or S
  MOD_RES (12), (13), (14), (15), (16): Xaa is A or G
  MOD_RES (17), (18), (19), (20): Xaa is A or G or is absent
XSKVVMRYKKLXXXXXXXXXFYLISIANLDQPVXX

SEQ ID NO: 2796 - protein, 33 aa, Artificial Sequence
  Non-cyclic GFR-binding peptide
  MOD_RES (33), (33): Xaa is C or S
  MOD_RES (11), (12), (13), (14), (15): Xaa is A or G
  MOD_RES (16), (17), (18), (19): Xaa is A or G or is absent
EVVMEYHYKLXXXXXXXXXKYLMSIPSLETPVX

SEQ ID NO: 2797 - protein, 39 aa, Artificial Sequence
  Non-cyclic GFR-binding peptide
  MOD_RES (2), (4): Xaa is C or S
  MOD_RES (17), (18), (19), (20), (21): Xaa is A or G
  MOD_RES (22), (23), (24), (25): Xaa is A or G or is absent
EXKXALHDELTRYKKLXXXXXXXXXFYLVSIANLQVQTP

SEQ ID NO: 2798 - protein, 39 aa, Artificial Sequence
  Non-cyclic GFR-binding peptide
  MOD_RES (1), (34), (35): Xaa is C or S
  MOD_RES (12), (13), (14), (15), (16): Xaa is A or G
  MOD_RES (17), (18), (19), (20): Xaa is A or G or is absent
XSKVVMRHKRLXXXXXXXXXYYLISTASLDQPVXXPSAS

SEQ ID NO: 2799 - protein, 34 aa, Artificial Sequence
  Non-cyclic GFR-binding peptide
  MOD_RES (1), (32), (33): Xaa is C or S
XSKVVMYHYKLVKPTRGVKYLISIPSLDQPVXXP

SEQ ID NO: 2800 - protein, 34 aa, Artificial Sequence
  Non-cyclic GFR-binding peptide
  MOD_RES (32), (33): Xaa is C or S
AKVVMNRYKKLIVNNSSDFYLVSIANLKTPAXXA

SEQ ID NO: 2801 - protein, 33 aa, Artificial Sequence
  Non-cyclic GFR-binding peptide
  MOD_RES (32), (33): Xaa is C or S
SRVVMNQYNKLIVNSSDDLYLVSIASLKTPAXX

SEQ ID NO: 2802 - protein, 33 aa, Artificial Sequence
  Non-cyclic GFR-binding peptide
  MOD_RES (2), (2): Xaa is C or S
GXSRVVMNRHKRLIVNSSDDYYLVSTASLKTPA

SEQ ID NO: 2803 - protein, 33 aa, Artificial Sequence
  Non-cyclic GFR-binding peptide
  MOD_RES (1), (33): Xaa is C or S
XSRVVMNQYNKLIVNSSDDLYLVSIASLKTPAX

SEQ ID NO: 2804 - protein, 31 aa, Artificial Sequence
  Non-cyclic GFR-binding peptide
GEVVMERHKRLVVKDYEDYYLMSTASLETPV

SEQ ID NO: 2805 - protein, 37 aa, Artificial Sequence
  Non-cyclic GFR-binding peptide
  MOD_RES (2), (33), (34): Xaa is C or S
KXSRVIMYHYKLVKPKRGVKYLISIPSLAQPVXXPAA

SEQ ID NO: 2806 - protein, 43 aa, Artificial Sequence
  Non-cyclic GFR-binding peptide
  MOD_RES (2), (4), (37), (38): Xaa is C or S
  MOD_RES (15), (16), (17), (18), (19): Xaa is A or G
  MOD_RES (20), (21), (22), (23): Xaa is A or G or is absent
SXKXSKVIMRHKRLXXXXXXXXXYYLISTASLDQSVXXPSASA

SEQ ID NO: 2807 - protein, 41 aa, Artificial Sequence
  Non-cyclic GFR-binding peptide
  MOD_RES (37), (37): Xaa is C or S
  MOD_RES (13), (14), (15), (16), (17): Xaa is A or G
  MOD_RES (18), (19), (20), (21): Xaa is A or G or is absent
ALHDELTQYNKLXXXXXXXXXLYLVSIASLQVQTPRXQVNR

SEQ ID NO: 2808 - protein, 40 aa, Artificial Sequence
  Non-cyclic GFR-binding peptide
  MOD_RES (2), (4), (38), (39): Xaa is C or S
  MOD_RES (16), (17), (18), (19), (20): Xaa is A or G
  MOD_RES (21), (22), (23), (24): Xaa is A or G or is absent
RXGXGEVVMDYHYKLXXXXXXXXXKYLMSIPSLETPVXXA

SEQ ID NO: 2809 - protein, 34 aa, Artificial Sequence
  Non-cyclic GFR-binding peptide
  MOD_RES (1), (3): Xaa is C or S
XGXGEVVMDYHYKLVVKENEDKYLMSIPSLETPV

SEQ ID NO: 2810 - protein, 41 aa, Artificial Sequence
  Non-cyclic GFR-binding peptide
  MOD_RES (2), (4), (38), (39): Xaa is C or S
  MOD_RES (16), (17), (18), (19), (20): Xaa is A or G
  MOD_RES (21), (22), (23), (24): Xaa is A or G or is absent
HXGXAKVVMNYHYKLXXXXXXXXXKYLVSIPSLKTPAXXAK

SEQ ID NO: 2811 - protein, 32 aa, Artificial Sequence
  Non-cyclic GFR-binding peptide
  MOD_RES (11), (12), (13), (14), (15): Xaa is A or G
  MOD_RES (16), (17), (18), (19): Xaa is A or G or is absent
KVVMNQYNKLXXXXXXXXXLYLVSIASLKTPA

SEQ ID NO: 2812 - protein, 39 aa, Artificial Sequence
  Non-cyclic GFR-binding peptide
  MOD_RES (1), (34), (35): Xaa is C or S
  MOD_RES (12), (13), (14), (15), (16): Xaa is A or G
  MOD_RES (17), (18), (19), (20): Xaa is A or G or is absent
XSKVVMQYNKLXXXXXXXXXLYLISIASLDQPVXXPSAS

SEQ ID NO: 2813 - protein, 39 aa, Artificial Sequence
  Non-cyclic GFR-binding peptide
  MOD_RES (2), (35), (36): Xaa is C or S
  MOD_RES (13), (14), (15), (16), (17): Xaa is A or G
  MOD_RES (18), (19), (20), (21): Xaa is A or G or is absent
KXSKVVMYHYKLXXXXXXXXXKYLISIPSLDQPVXXPSA

SEQ ID NO: 2814 - protein, 37 aa, Artificial Sequence
  Non-cyclic GFR-binding peptide
  MOD_RES (2), (35), (36): Xaa is C or S
  MOD_RES (13), (14), (15), (16), (17): Xaa is A or G
  MOD_RES (18), (19), (20), (21): Xaa is A or G or is absent
KXSRVIMRYKKLXXXXXXXXXFYLISIANLAQPVXXP

SEQ ID NO: 2815 - protein, 37 aa, Artificial Sequence
  Non-cyclic GFR-binding peptide
  MOD_RES (2), (4), (35), (36): Xaa is C or S
SXKXSKVVMRYKKLVKPTRGVFYLISIANLDQPVXXP

SEQ ID NO: 2816 - protein, 36 aa, Artificial Sequence
  Non-cyclic GFR-binding peptide
  MOD_RES (1), (35), (36): Xaa is C or S
  MOD_RES (13), (14), (15), (16), (17): Xaa is A or G
  MOD_RES (18), (19), (20), (21): Xaa is A or G or is absent
XAKVVMNRYKKLXXXXXXXXXFYLVSIANLKTPAXX

SEQ ID NO: 2817 - protein, 34 aa, Artificial Sequence
  Non-cyclic GFR-binding peptide
  MOD_RES (1), (1): Xaa is C or S
  MOD_RES (13), (14), (15), (16), (17): Xaa is A or G
  MOD_RES (18), (19), (20), (21): Xaa is A or G or is absent
XGEVVMDRHKRLXXXXXXXXXYYLMSTASLETPV

SEQ ID NO: 2818 - protein, 35 aa, Artificial Sequence
  Non-cyclic GFR-binding peptide
  MOD_RES (1), (35): Xaa is C or S
  MOD_RES (13), (14), (15), (16), (17): Xaa is A or G
  MOD_RES (18), (19), (20), (21): Xaa is A or G or is absent
XARVVMNYHYKLXXXXXXXXXKYLVSIPSLQTPAX

SEQ ID NO: 2819 - protein, 41 aa, Artificial Sequence
  Non-cyclic GFR-binding peptide
  MOD_RES (37), (37): Xaa is C or S
  MOD_RES (13), (14), (15), (16), (17): Xaa is A or G
  MOD_RES (18), (19), (20), (21): Xaa is A or G or is absent
ALHDELTRHKRLXXXXXXXXXYYLVSTASLQVQTPRXQVNR

SEQ ID NO: 2820 - protein, 32 aa, Artificial Sequence
  Non-cyclic GFR-binding peptide
  MOD_RES (32), (32): Xaa is C or S
ARVVMNQYNKLIVNSSDDLYLVSIASLQTPAX

SEQ ID NO: 2821 - protein, 44 aa, Artificial Sequence
  Non-cyclic GFR-binding peptide
  MOD_RES (2), (4), (38), (39): Xaa is C or S
  MOD_RES (16), (17), (18), (19), (20): Xaa is A or G
  MOD_RES (21), (22), (23), (24): Xaa is A or G or is absent
RXGXGEVVMERHKRLXXXXXXXXXYYLMSTASLETPVXXAKPIS

SEQ ID NO: 2822 - protein, 31 aa, Artificial Sequence
  Non-cyclic GFR-binding peptide
  MOD_RES (31), (31): Xaa is C or S
RVVMNYHYKLIVNSSDDKYLVSIPSLKTPAX

SEQ ID NO: 2823 - protein, 38 aa, Artificial Sequence
  Non-cyclic GFR-binding peptide
  MOD_RES (2), (4), (36), (37): Xaa is C or S
HXGXSRVVMNYHYKLIVNSSDDKYLVSIPSLKTPAXXP

SEQ ID NO: 2824 - protein, 38 aa, Artificial Sequence
  Non-cyclic GFR-binding peptide
  MOD_RES (2), (4), (37), (38): Xaa is C or S
  MOD_RES (15), (16), (17), (18), (19): Xaa is A or G
  MOD_RES (20), (21), (22), (23): Xaa is A or G or is absent
SXKXSRVIMRHKRLXXXXXXXXXYYLISTASLAQPVXX

SEQ ID NO: 2825 - protein, 36 aa, Artificial Sequence
  Non-cyclic GFR-binding peptide
  MOD_RES (2), (4): Xaa is C or S
  MOD_RES (15), (16), (17), (18), (19): Xaa is A or G
  MOD_RES (20), (21), (22), (23): Xaa is A or G or is absent
SXKXSKVVMYHYKLXXXXXXXXXKYLISIPSLDQPV

SEQ ID NO: 2826 - protein, 35 aa, Artificial Sequence
  Non-cyclic GFR-binding peptide
  MOD_RES (31), (32): Xaa is C or S
RVVMNQYNKLIVNSSDDLYLVSIASLKTPAXXPKP

SEQ ID NO: 2827 - protein, 42 aa, Artificial Sequence
  Non-cyclic GFR-binding peptide
  MOD_RES (2), (4), (37), (38): Xaa is C or S
  MOD_RES (15), (16), (17), (18), (19): Xaa is A or G
  MOD_RES (20), (21), (22), (23): Xaa is A or G or is absent
SXKXSKVVMRYKKLXXXXXXXXXFYLISIANLDQPVXXPSAS

SEQ ID NO: 2828 - protein, 38 aa, Artificial Sequence
  Non-cyclic GFR-binding peptide
  MOD_RES (37), (37): Xaa is C or S
  MOD_RES (13), (14), (15), (16), (17): Xaa is A or G
  MOD_RES (18), (19), (20), (21): Xaa is A or G or is absent
ALHDELTRYKKLXXXXXXXXXFYLVSIANLQVQTPRXQ

SEQ ID NO: 2829 - protein, 40 aa, Artificial Sequence
  Non-cyclic GFR-binding peptide
  MOD_RES (1), (3), (36), (37): Xaa is C or S
XGXEAVSMGEQYNKLTPVGMDDLYLVSIASLKTPVXXAKG

SEQ ID NO: 2830 - protein, 33 aa, Artificial Sequence
  Non-cyclic GFR-binding peptide
  MOD_RES (33), (33): Xaa is C or S
EAVSMGERYKKLTPVGMDDFYLVSIANLKTPVX

SEQ ID NO: 2831 - protein, 35 aa, Artificial Sequence
  Non-cyclic GFR-binding peptide
  MOD_RES (33), (34): Xaa is C or S
  MOD_RES (11), (12), (13), (14), (15): Xaa is A or G
  MOD_RES (16), (17), (18), (19): Xaa is A or G or is absent
EVVMERYKKLXXXXXXXXXFYLMSIANLETPVXXA

SEQ ID NO: 2832 - protein, 41 aa, Artificial Sequence
  Non-cyclic GFR-binding peptide
  MOD_RES (2), (35), (36): Xaa is C or S
GXEAVSMGEQYNKLTPVGMDDLYLVSIASLKTPVXXAKGVK

SEQ ID NO: 2833 - protein, 39 aa, Artificial Sequence
  Non-cyclic GFR-binding peptide
  MOD_RES (2), (4), (38), (39): Xaa is C or S
  MOD_RES (16), (17), (18), (19), (20): Xaa is A or G
  MOD_RES (21), (22), (23), (24): Xaa is A or G or is absent
HXGXAKVVMNRYKKLXXXXXXXXXFYLVSIANLKTPAXX

SEQ ID NO: 2834 - protein, 41 aa, Artificial Sequence
  Non-cyclic GFR-binding peptide
  MOD_RES (2), (4), (39), (40): Xaa is C or S
  MOD_RES (17), (18), (19), (20), (21): Xaa is A or G
  MOD_RES (22), (23), (24), (25): Xaa is A or G or is absent
RXGXEAVSMGEQYNKLXXXXXXXXXLYLVSIASLKTPVXXA

SEQ ID NO: 2835 - protein, 40 aa, Artificial Sequence
  Non-cyclic GFR-binding peptide
  MOD_RES (2), (4), (37), (38): Xaa is C or S
  MOD_RES (15), (16), (17), (18), (19): Xaa is A or G
  MOD_RES (20), (21), (22), (23): Xaa is A or G or is absent
SXKXSKVIMRYKKLXXXXXXXXXFYLISIANLDQSVXXPS

SEQ ID NO: 2836 - protein, 37 aa, Artificial Sequence
  Non-cyclic GFR-binding peptide
  MOD_RES (1), (3): Xaa is C or S
  MOD_RES (16), (17), (18), (19), (20): Xaa is A or G
  MOD_RES (21), (22), (23), (24): Xaa is A or G or is absent
XGXEAVSMGERHKRLXXXXXXXXXYYLVSTASLKTPV

SEQ ID NO: 2837 - protein, 39 aa, Artificial Sequence
  Non-cyclic GFR-binding peptide
  MOD_RES (2), (36), (37): Xaa is C or S
  MOD_RES (14), (15), (16), (17), (18): Xaa is A or G
  MOD_RES (19), (20), (21), (22): Xaa is A or G or is absent
GXGEVVMEYHYKLXXXXXXXXXKYLMSIPSLETPVXXAK

SEQ ID NO: 2838 - protein, 42 aa, Artificial Sequence
  Non-cyclic GFR-binding peptide
  MOD_RES (2), (37), (38): Xaa is C or S
  MOD_RES (15), (16), (17), (18), (19): Xaa is A or G
  MOD_RES (20), (21), (22), (23): Xaa is A or G or is absent
GXEAVSMGEQYNKLXXXXXXXXXLYLVSIASLKTPVXXAKGV

SEQ ID NO: 2839 - protein, 40 aa, Artificial Sequence
  Non-cyclic GFR-binding peptide
  MOD_RES (2), (4), (35), (36): Xaa is C or S
SXKXSKVIMYHYKLIKPTKGIKYLISIPSLDQSVXXPSAS

SEQ ID NO: 2840 - protein, 40 aa, Artificial Sequence
  Non-cyclic GFR-binding peptide
  MOD_RES (1), (3), (34), (35): Xaa is C or S
XKXSKVVMQYNKLVKPTRGVLYLISIASLDQPVXXPSASA

SEQ ID NO: 2841 - protein, 40 aa, Artificial Sequence
  Non-cyclic GFR-binding peptide
  MOD_RES (1), (3), (38), (39): Xaa is C or S
  MOD_RES (16), (17), (18), (19), (20): Xaa is A or G
  MOD_RES (21), (22), (23), (24): Xaa is A or G or is absent
XGXEAVSMGEQYNKLXXXXXXXXXLYLVSIASLKTPVXXA

SEQ ID NO: 2842 - protein, 35 aa, Artificial Sequence
  Non-cyclic GFR-binding peptide
  MOD_RES (1), (34), (35): Xaa is C or S
XEAVSMGEQYNKLTPVGMDDLYLVSIASLKTPVXX

SEQ ID NO: 2843 - protein, 36 aa, Artificial Sequence
  Non-cyclic GFR-binding peptide
  MOD_RES (2), (2): Xaa is C or S
KXALHDELTRYKKLFIPKKRVIEFYLVSIANLQVQT

SEQ ID NO: 2844 - protein, 38 aa, Artificial Sequence
  Non-cyclic GFR-binding peptide
  MOD_RES (2), (34), (35): Xaa is C or S
GXSRVVMNRHKRLIVNSSDDYYLVSTASLKTPAXXPKP

SEQ ID NO: 2845 - protein, 37 aa, Artificial Sequence
  Non-cyclic GFR-binding peptide
  MOD_RES (2), (4), (37): Xaa is C or S
  MOD_RES (15), (16), (17), (18), (19): Xaa is A or G
  MOD_RES (20), (21), (22), (23): Xaa is A or G or is absent
SXKXSKVIMQYNKLXXXXXXXXXLYLISIASLDQSVX

SEQ ID NO: 2846 - protein, 36 aa, Artificial Sequence
  Non-cyclic GFR-binding peptide
  MOD_RES (34), (35): Xaa is C or S
  MOD_RES (12), (13), (14), (15), (16): Xaa is A or G
  MOD_RES (17), (18), (19), (20): Xaa is A or G or is absent
AKVVMNRYKKLXXXXXXXXXFYLVSIANLKTPAXXA

SEQ ID NO: 2847 - protein, 41 aa, Artificial Sequence
  Non-cyclic GFR-binding peptide
  MOD_RES (1), (3), (35), (36): Xaa is C or S
XGXGEVVMERHKRLVVKDYEDYYLMSTASLETPVXXAKPIS

SEQ ID NO: 2848 - protein, 37 aa, Artificial Sequence
  Non-cyclic GFR-binding peptide
  MOD_RES (1), (33), (34): Xaa is C or S
XAKVVMNRYKKLIVNNSSDFYLVSIANLKTPAXXAKP

SEQ ID NO: 2849 - protein, 35 aa, Artificial Sequence
  Non-cyclic GFR-binding peptide
  MOD_RES (1), (3), (34), (35): Xaa is C or S
XKXSKVVMRHKRLVKPTRGVYYLISTASLDQPVXX

SEQ ID NO: 2850 - protein, 38 aa, Artificial Sequence
  Non-cyclic GFR-binding peptide
  MOD_RES (2), (34), (35): Xaa is C or S
GXAKVVMNYHYKLIVNNSSDKYLVSIPSLKTPAXXAKP

SEQ ID NO: 2851 - protein, 38 aa, Artificial Sequence
  Non-cyclic GFR-binding peptide
  MOD_RES (34), (35): Xaa is C or S
  MOD_RES (12), (13), (14), (15), (16): Xaa is A or G
  MOD_RES (17), (18), (19), (20): Xaa is A or G or is absent
SRVVMNYHYKLXXXXXXXXXKYLVSIPSLKTPAXXPKP

SEQ ID NO: 2852 - protein, 40 aa, Artificial Sequence
  Non-cyclic GFR-binding peptide
  MOD_RES (2), (4), (38), (39): Xaa is C or S
  MOD_RES (16), (17), (18), (19), (20): Xaa is A or G
  MOD_RES (21), (22), (23), (24): Xaa is A or G or is absent
HXGXSRVVMNYHYKLXXXXXXXXXKYLVSIPSLKTPAXXP

SEQ ID NO: 2853 - protein, 35 aa, Artificial Sequence
  Non-cyclic GFR-binding peptide
  MOD_RES (32), (33): Xaa is C or S
SRVVMNQYNKLIVNSSDDLYLVSIASLKTPAXXPK

SEQ ID NO: 2854 - protein, 38 aa, Artificial Sequence
  Non-cyclic GFR-binding peptide
  MOD_RES (34), (35): Xaa is C or S
  MOD_RES (12), (13), (14), (15), (16): Xaa is A or G
  MOD_RES (17), (18), (19), (20): Xaa is A or G or is absent
SRVVMNRHKRLXXXXXXXXXYYLVSTASLKTPAXXPKP

SEQ ID NO: 2855 - protein, 34 aa, Artificial Sequence
  Non-cyclic GFR-binding peptide
  MOD_RES (2), (4): Xaa is C or S
SXKXSKVVMYHYKLVKPTRGVKYLISIPSLDQPV

SEQ ID NO: 2856 - protein, 38 aa, Artificial Sequence
  Non-cyclic GFR-binding peptide
  MOD_RES (2), (4), (35), (36): Xaa is C or S
SXKXSKVVMRHKRLVKPTRGVYYLISTASLDQPVXXPS

SEQ ID NO: 2857 - protein, 38 aa, Artificial Sequence
  Non-cyclic GFR-binding peptide
  MOD_RES (1), (34), (35): Xaa is C or S
  MOD_RES (12), (13), (14), (15), (16): Xaa is A or G
  MOD_RES (17), (18), (19), (20): Xaa is A or G or is absent
XSRVIMRYKKLXXXXXXXXXFYLISIANLAQPVXXPAA

SEQ ID NO: 2858 - protein, 32 aa, Artificial Sequence
  Non-cyclic GFR-binding peptide
  MOD_RES (11), (12), (13), (14), (15): Xaa is A or G
  MOD_RES (16), (17), (18), (19): Xaa is A or G or is absent
KVVMNYHYKLXXXXXXXXXKYLVSIPSLKTPA

SEQ ID NO: 2859 - protein, 41 aa, Artificial Sequence
  Non-cyclic GFR-binding peptide
  MOD_RES (1), (3), (35): Xaa is C or S
XGXSRVVMNRHKRLIVNSSDDYYLVSTASLKTPAXTPKTVH

SEQ ID NO: 2860 - protein, 40 aa, Artificial Sequence
  Non-cyclic GFR-binding peptide
  MOD_RES (1), (34), (35): Xaa is C or S
  MOD_RES (12), (13), (14), (15), (16): Xaa is A or G
  MOD_RES (17), (18), (19), (20): Xaa is A or G or is absent
XSKVIMYHYKLXXXXXXXXXKYLISIPSLDQSVXXPSASA

SEQ ID NO: 2861 - protein, 31 aa, Artificial Sequence
  Non-cyclic GFR-binding peptide
  MOD_RES (31), (31): Xaa is C or S
SRVIMQYNKLVKPKRGVLYLISIASLAQPVX

SEQ ID NO: 2862 - protein, 41 aa, Artificial Sequence
  Non-cyclic GFR-binding peptide
  MOD_RES (1), (3), (35), (36): Xaa is C or S
XGXARVVMNRHKRLIVNSSDDYYLVSTASLQTPAXXPKPVT

SEQ ID NO: 2863 - protein, 39 aa, Artificial Sequence
  Non-cyclic GFR-binding peptide
  MOD_RES (2), (34): Xaa is C or S
GXSRVVMNRHKRLIVNSSDDYYLVSTASLKTPAXTPKTV

SEQ ID NO: 2864 - protein, 31 aa, Artificial Sequence
  Non-cyclic GFR-binding peptide
  MOD_RES (31), (31): Xaa is C or S
RVVMNQYNKLIVNSSDDLYLVSIASLKTPAX

SEQ ID NO: 2865 - protein, 41 aa, Artificial Sequence
  Non-cyclic GFR-binding peptide
  MOD_RES (2), (4), (36): Xaa is C or S
HXGXSRVVMNRHKRLIVNSSDDYYLVSTASLKTPAXTPKTV

SEQ ID NO: 2866 - protein, 35 aa, Artificial Sequence
  Non-cyclic GFR-binding peptide
  MOD_RES (31), (32): Xaa is C or S
RVVMNYHYKLIVNSSDDKYLVSIPSLKTPAXXPKP

SEQ ID NO: 2867 - protein, 39 aa, Artificial Sequence
  Non-cyclic GFR-binding peptide
  MOD_RES (1), (3), (36), (37): Xaa is C or S
  MOD_RES (14), (15), (16), (17), (18): Xaa is A or G
  MOD_RES (19), (20), (21), (22): Xaa is A or G or is absent
XKXSRVIMRHKRLXXXXXXXXXYYLISTASLAQPVXXPA

SEQ ID NO: 2868 - protein, 37 aa, Artificial Sequence
  Non-cyclic GFR-binding peptide
  MOD_RES (1), (35): Xaa is C or S
  MOD_RES (13), (14), (15), (16), (17): Xaa is A or G
  MOD_RES (18), (19), (20), (21): Xaa is A or G or is absent
XSRVVMNYHYKLXXXXXXXXXKYLVSIPSLKTPAXTP

SEQ ID NO: 2869 - protein, 35 aa, Artificial Sequence
  Non-cyclic GFR-binding peptide
  MOD_RES (2), (4): Xaa is C or S
HXGXSRVVMNRHKRLIVNSSDDYYLVSTASLKTPA

SEQ ID NO: 2870 - protein, 36 aa, Artificial Sequence
  Non-cyclic GFR-binding peptide
  MOD_RES (1), (3): Xaa is C or S
  MOD_RES (15), (16), (17), (18), (19): Xaa is A or G
  MOD_RES (20), (21), (22), (23): Xaa is A or G or is absent
XGXGEVVMERHKRLXXXXXXXXXYYLMSTASLETPV

SEQ ID NO: 2871 - protein, 34 aa, Artificial Sequence
  Non-cyclic GFR-binding peptide
  MOD_RES (32), (33): Xaa is C or S
AKVVMNQYNKLIVNNSSDLYLVSIASLKTPAXXA

SEQ ID NO: 2872 - protein, 36 aa, Artificial Sequence
  Non-cyclic GFR-binding peptide
  MOD_RES (33), (34): Xaa is C or S
  MOD_RES (11), (12), (13), (14), (15): Xaa is A or G
  MOD_RES (16), (17), (18), (19): Xaa is A or G or is absent
SKVVMQYNKLXXXXXXXXXLYLISIASLDQPVXXPS

SEQ ID NO: 2873 - protein, 41 aa, Artificial Sequence
  Non-cyclic GFR-binding peptide
  MOD_RES (2), (4), (36), (37): Xaa is C or S
HXGXARVVMNQYNKLIVNSSDDLYLVSIASLQTPAXXPKPV

SEQ ID NO: 2874 - protein, 32 aa, Artificial Sequence
  Non-cyclic GFR-binding peptide
  MOD_RES (11), (12), (13), (14), (15): Xaa is A or G
  MOD_RES (16), (17), (18), (19): Xaa is A or G or is absent
RVVMNYHYKLXXXXXXXXXKYLVSIPSLKTPA

SEQ ID NO: 2875 - protein, 37 aa, Artificial Sequence
  Non-cyclic GFR-binding peptide
  MOD_RES (2), (36), (37): Xaa is C or S
  MOD_RES (14), (15), (16), (17), (18): Xaa is A or G
  MOD_RES (19), (20), (21), (22): Xaa is A or G or is absent
GXARVVMNRHKRLXXXXXXXXXYYLVSTASLQTPAXX

SEQ ID NO: 2876 - protein, 37 aa, Artificial Sequence
  Non-cyclic GFR-binding peptide
  MOD_RES (1), (34), (35): Xaa is C or S
XEAVSMGERHKRLTPVGMDDYYLVSTASLKTPVXXAK

SEQ ID NO: 2877 - protein, 37 aa, Artificial Sequence
  Non-cyclic GFR-binding peptide
  MOD_RES (35), (35): Xaa is C or S
  MOD_RES (11), (12), (13), (14), (15): Xaa is A or G
  MOD_RES (16), (17), (18), (19): Xaa is A or G or is absent
HDELTRYKKLXXXXXXXXXFYLVSIANLQVQTPRXQV

SEQ ID NO: 2878 - protein, 32 aa, Artificial Sequence
  Non-cyclic GFR-binding peptide
  MOD_RES (31), (32): Xaa is C or S
EVVMEYHYKLVVKDYEDKYLMSIPSLETPVXX

SEQ ID NO: 2879 - protein, 40 aa, Artificial Sequence
  Non-cyclic GFR-binding peptide
  MOD_RES (2), (34), (35): Xaa is C or S
GXARVVMNYHYKLIVNSSDDKYLVSIPSLQTPAXXPKPVT

SEQ ID NO: 2880 - protein, 33 aa, Artificial Sequence
  Non-cyclic GFR-binding peptide
  MOD_RES (33), (33): Xaa is C or S
  MOD_RES (11), (12), (13), (14), (15): Xaa is A or G
  MOD_RES (16), (17), (18), (19): Xaa is A or G or is absent
SRVIMYHYKLXXXXXXXXXKYLISIPSLAQPVX

SEQ ID NO: 2881 - protein, 38 aa, Artificial Sequence
  Non-cyclic GFR-binding peptide
  MOD_RES (2), (4), (37), (38): Xaa is C or S
  MOD_RES (15), (16), (17), (18), (19): Xaa is A or G
  MOD_RES (20), (21), (22), (23): Xaa is A or G or is absent
SXKXSRVIMQYNKLXXXXXXXXXLYLISIASLAQPVXX

SEQ ID NO: 2882 - protein, 36 aa, Artificial Sequence
  Non-cyclic GFR-binding peptide
  MOD_RES (33), (34): Xaa is C or S
  MOD_RES (11), (12), (13), (14), (15): Xaa is A or G
  MOD_RES (16), (17), (18), (19): Xaa is A or G or is absent
SKVIMYHYKLXXXXXXXXXKYLISIPSLDQSVXXPS

SEQ ID NO: 2883 - protein, 38 aa, Artificial Sequence
  Non-cyclic GFR-binding peptide
  MOD_RES (36), (36): Xaa is C or S
  MOD_RES (12), (13), (14), (15), (16): Xaa is A or G
  MOD_RES (17), (18), (19), (20): Xaa is A or G or is absent
LHDELTRHKRLXXXXXXXXXYYLVSTASLQVQTPRXQV

SEQ ID NO: 2884 - protein, 40 aa, Artificial Sequence
  Non-cyclic GFR-binding peptide
  MOD_RES (34), (35): Xaa is C or S
  MOD_RES (12), (13), (14), (15), (16): Xaa is A or G
  MOD_RES (17), (18), (19), (20): Xaa is A or G or is absent
GEVVMEYHYKLXXXXXXXXXKYLMSIPSLETPVXXAKPIS

SEQ ID NO: 2885 - protein, 38 aa, Artificial Sequence
  Non-cyclic GFR-binding peptide
  MOD_RES (36), (36): Xaa is C or S
  MOD_RES (12), (13), (14), (15), (16): Xaa is A or G
  MOD_RES (17), (18), (19), (20): Xaa is A or G or is absent
LHDELTYHYKLXXXXXXXXXKYLVSIPSLQVQTPRXQV

SEQ ID NO: 2886 - protein, 39 aa, Artificial Sequence
  Non-cyclic GFR-binding peptide
  MOD_RES (1), (3), (36), (37): Xaa is C or S
  MOD_RES (14), (15), (16), (17), (18): Xaa is A or G
  MOD_RES (19), (20), (21), (22): Xaa is A or G or is absent
XKXSKVIMRHKRLXXXXXXXXXYYLISTASLDQSVXXPS

SEQ ID NO: 2887 - protein, 40 aa, Artificial Sequence
  Non-cyclic GFR-binding peptide
  MOD_RES (1), (3), (34), (35): Xaa is C or S
XKXSRVIMRYKKLVKPKRGVFYLISIANLAQPVXXPAASA

SEQ ID NO: 2888 - protein, 39 aa, Artificial Sequence
  Non-cyclic GFR-binding peptide
  MOD_RES (34), (34): Xaa is C or S
  MOD_RES (12), (13), (14), (15), (16): Xaa is A or G
  MOD_RES (17), (18), (19), (20): Xaa is A or G or is absent
SRVVMNQYNKLXXXXXXXXXLYLVSIASLKTPAXTPKTV

SEQ ID NO: 2889 - protein, 36 aa, Artificial Sequence
  Non-cyclic GFR-binding peptide
  MOD_RES (1), (32), (33): Xaa is C or S
XSRVIMYHYKLVKPKRGVKYLISIPSLAQPVXXPAA

SEQ ID NO: 2890 - protein, 37 aa, Artificial Sequence
  Non-cyclic GFR-binding peptide
  MOD_RES (2), (4): Xaa is C or S
  MOD_RES (16), (17), (18), (19), (20): Xaa is A or G
  MOD_RES (21), (22), (23), (24): Xaa is A or G or is absent
HXGXSRVVMNYHYKLXXXXXXXXXKYLVSIPSLKTPA

SEQ ID NO: 2891 - protein, 41 aa, Artificial Sequence
  Non-cyclic GFR-binding peptide
  MOD_RES (1), (3), (40): Xaa is C or S
XKXALHDELTQYNKLFIPKKRVIELYLVSIASLQVQTPRXQ

SEQ ID NO: 2892 - protein, 32 aa, Artificial Sequence
  Non-cyclic GFR-binding peptide
  MOD_RES (32), (32): Xaa is C or S
ARVVMNRHKRLIVNSSDDYYLVSTASLQTPAX

SEQ ID NO: 2893 - protein, 33 aa, Artificial Sequence
  Non-cyclic GFR-binding peptide
  MOD_RES (1), (32), (33): Xaa is C or S
XSKVVMRYKKLVKPTRGVFYLISIANLDQPVXX

SEQ ID NO: 2894 - protein, 38 aa, Artificial Sequence
  Non-cyclic GFR-binding peptide
  MOD_RES (33), (34): Xaa is C or S
  MOD_RES (11), (12), (13), (14), (15): Xaa is A or G
  MOD_RES (16), (17), (18), (19): Xaa is A or G or is absent
RVVMNYHYKLXXXXXXXXXKYLVSIPSLKTPAXXPKPV

SEQ ID NO: 2895 - protein, 37 aa, Artificial Sequence
  Non-cyclic GFR-binding peptide
  MOD_RES (36), (36): Xaa is C or S
LHDELTRHKRLFIPKKRVIEYYLVSTASLQVQTPRXQ

SEQ ID NO: 2896 - protein, 30 aa, Artificial Sequence
  Non-cyclic GFR-binding peptide
KVVMNQYNKLIVNNSSDLYLVSIASLKTPA

SEQ ID NO: 2897 - protein, 38 aa, Artificial Sequence
  Non-cyclic GFR-binding peptide
  MOD_RES (2), (4), (38): Xaa is C or S
  MOD_RES (16), (17), (18), (19), (20): Xaa is A or G
  MOD_RES (21), (22), (23), (24): Xaa is A or G or is absent
HXGXARVVMNQYNKLXXXXXXXXXLYLVSIASLQTPAX

SEQ ID NO: 2898 - protein, 38 aa, Artificial Sequence
  Non-cyclic GFR-binding peptide
  MOD_RES (1), (35), (36): Xaa is C or S
  MOD_RES (13), (14), (15), (16), (17): Xaa is A or G
  MOD_RES (18), (19), (20), (21): Xaa is A or G or is absent
XARVVMNQYNKLXXXXXXXXXLYLVSIASLQTPAXXPK

SEQ ID NO: 2899 - protein, 37 aa, Artificial Sequence
  Non-cyclic GFR-binding peptide
  MOD_RES (2), (4), (35), (36): Xaa is C or S
SXKXSRVIMRHKRLVKPKRGVYYLISTASLAQPVXXP

SEQ ID NO: 2900 - protein, 37 aa, Artificial Sequence
  Non-cyclic GFR-binding peptide
  MOD_RES (2), (34), (35): Xaa is C or S
GXGEVVMEYHYKLVVKDYEDKYLMSIPSLETPVXXAK

SEQ ID NO: 2901 - protein, 39 aa, Artificial Sequence
  Non-cyclic GFR-binding peptide
  MOD_RES (2), (34), (35): Xaa is C or S
GXGEVVMEYHYKLVVKDYEDKYLMSIPSLETPVXXAKPI

SEQ ID NO: 2902 - protein, 35 aa, Artificial Sequence
  Non-cyclic GFR-binding peptide
  MOD_RES (1), (34), (35): Xaa is C or S
  MOD_RES (12), (13), (14), (15), (16): Xaa is A or G
  MOD_RES (17), (18), (19), (20): Xaa is A or G or is absent
XSRVIMRYKKLXXXXXXXXXFYLISIANLAQPVXX

SEQ ID NO: 2903 - protein, 36 aa, Artificial Sequence
  Non-cyclic GFR-binding peptide
  MOD_RES (33), (33): Xaa is C or S
  MOD_RES (11), (12), (13), (14), (15): Xaa is A or G
  MOD_RES (16), (17), (18), (19): Xaa is A or G or is absent
RVVMNQYNKLXXXXXXXXXLYLVSIASLKTPAXTPK

SEQ ID NO: 2904 - protein, 36 aa, Artificial Sequence
  Non-cyclic GFR-binding peptide
  MOD_RES (2), (4), (36): Xaa is C or S
RXGXGEVVMDYHYKLVVKENEDKYLMSIPSLETPVX

SEQ ID NO: 2905 - protein, 39 aa, Artificial Sequence
  Non-cyclic GFR-binding peptide
  MOD_RES (1), (3), (35), (36): Xaa is C or S
XGXARVVMNRHKRLIVNSSDDYYLVSTASLQTPAXXPKP

SEQ ID NO: 2906 - protein, 41 aa, Artificial Sequence
  Non-cyclic GFR-binding peptide
  MOD_RES (1), (3), (37), (38): Xaa is C or S
  MOD_RES (15), (16), (17), (18), (19): Xaa is A or G
  MOD_RES (20), (21), (22), (23): Xaa is A or G or is absent
XGXGEVVMDRHKRLXXXXXXXXXYYLMSTASLETPVXXAKP

SEQ ID NO: 2907 - protein, 34 aa, Artificial Sequence
  Non-cyclic GFR-binding peptide
  MOD_RES (2), (2): Xaa is C or S
GXEAVSMGERHKRLTPVGMDDYYLVSTASLKTPV

SEQ ID NO: 2908 - protein, 39 aa, Artificial Sequence
  Non-cyclic GFR-binding peptide
  MOD_RES (2), (36), (37): Xaa is C or S
  MOD_RES (14), (15), (16), (17), (18): Xaa is A or G
  MOD_RES (19), (20), (21), (22): Xaa is A or G or is absent
GXGEVVMDYHYKLXXXXXXXXXKYLMSIPSLETPVXXAK

SEQ ID NO: 2909 - protein, 33 aa, Artificial Sequence
  Non-cyclic GFR-binding peptide
  MOD_RES (2), (2): Xaa is C or S
GXGEVVMERYKKLVVKDYEDFYLMSIANLETPV

SEQ ID NO: 2910 - protein, 36 aa, Artificial Sequence
  Non-cyclic GFR-binding peptide
ALHDELTRYKKLFIPKKRVIEFYLVSIANLQVQTPR

SEQ ID NO: 2911 - protein, 35 aa, Artificial Sequence
  Non-cyclic GFR-binding peptide
  MOD_RES (1), (32), (33): Xaa is C or S
XSRVIMYHYKLVKPKRGVKYLISIPSLAQPVXXPA

SEQ ID NO: 2912 - protein, 34 aa, Artificial Sequence
  Non-cyclic GFR-binding peptide
  MOD_RES (32), (33): Xaa is C or S
SRVVMNRHKRLIVNSSDDYYLVSTASLKTPAXXP

SEQ ID NO: 2913 - protein, 38 aa, Artificial Sequence
  Non-cyclic GFR-binding peptide
  MOD_RES (34), (35): Xaa is C or S
  MOD_RES (12), (13), (14), (15), (16): Xaa is A or G
  MOD_RES (17), (18), (19), (20): Xaa is A or G or is absent
ARVVMNQYNKLXXXXXXXXXLYLVSIASLQTPAXXPKP

SEQ ID NO: 2914 - protein, 37 aa, Artificial Sequence
  Non-cyclic GFR-binding peptide
  MOD_RES (33), (34): Xaa is C or S
  MOD_RES (11), (12), (13), (14), (15): Xaa is A or G
  MOD_RES (16), (17), (18), (19): Xaa is A or G or is absent
RVVMNYHYKLXXXXXXXXXKYLVSIPSLQTPAXXPKP

SEQ ID NO: 2915 - protein, 43 aa, Artificial Sequence
  Non-cyclic GFR-binding peptide
  MOD_RES (2), (4), (37), (38): Xaa is C or S
  MOD_RES (15), (16), (17), (18), (19): Xaa is A or G
  MOD_RES (20), (21), (22), (23): Xaa is A or G or is absent
SXKXSKVIMQYNKLXXXXXXXXXLYLISIASLDQSVXXPSASA

SEQ ID NO: 2916 - protein, 35 aa, Artificial Sequence
  Non-cyclic GFR-binding peptide
  MOD_RES (1), (34), (35): Xaa is C or S
  MOD_RES (12), (13), (14), (15), (16): Xaa is A or G
  MOD_RES (17), (18), (19), (20): Xaa is A or G or is absent
XSKVIMRHKRLXXXXXXXXXYYLISTASLDQSVXX

SEQ ID NO: 2917 - protein, 38 aa, Artificial Sequence
  Non-cyclic GFR-binding peptide
  MOD_RES (2), (34): Xaa is C or S
GXSRVVMNRHKRLIVNSSDDYYLVSTASLKTPAXTPKT

SEQ ID NO: 2918 - protein, 33 aa, Artificial Sequence
  Non-cyclic GFR-binding peptide
  MOD_RES (31), (32): Xaa is C or S
SKVIMRHKRLIKPTKGIYYLISTASLDQSVXXP

SEQ ID NO: 2919 - protein, 37 aa, Artificial Sequence
  Non-cyclic GFR-binding peptide
  MOD_RES (32), (32): Xaa is C or S
SRVVMNRHKRLIVNSSDDYYLVSTASLKTPAXTPKTV

SEQ ID NO: 2920 - protein, 40 aa, Artificial Sequence
  Non-cyclic GFR-binding peptide
  MOD_RES (2), (4), (37), (38): Xaa is C or S
  MOD_RES (15), (16), (17), (18), (19): Xaa is A or G
  MOD_RES (20), (21), (22), (23): Xaa is A or G or is absent
SXKXSKVVMRYKKLXXXXXXXXXFYLISIANLDQPVXXPS

SEQ ID NO: 2921 - protein, 35 aa, Artificial Sequence
  Non-cyclic GFR-binding peptide
  MOD_RES (1), (3), (35): Xaa is C or S
XGXSRVVMNQYNKLIVNSSDDLYLVSIASLKTPAX

SEQ ID NO: 2922 - protein, 35 aa, Artificial Sequence
  Non-cyclic GFR-binding peptide
  MOD_RES (34), (35): Xaa is C or S
  MOD_RES (12), (13), (14), (15), (16): Xaa is A or G
  MOD_RES (17), (18), (19), (20): Xaa is A or G or is absent
ARVVMNRHKRLXXXXXXXXXYYLVSTASLQTPAXX

SEQ ID NO: 2923 - protein, 35 aa, Artificial Sequence
  Non-cyclic GFR-binding peptide
  MOD_RES (32), (33): Xaa is C or S
ARVVMNQYNKLIVNSSDDLYLVSIASLQTPAXXPK

SEQ ID NO: 2924 - protein, 38 aa, Artificial Sequence
  Non-cyclic GFR-binding peptide
  MOD_RES (35), (36): Xaa is C or S
  MOD_RES (13), (14), (15), (16), (17): Xaa is A or G
  MOD_RES (18), (19), (20), (21): Xaa is A or G or is absent
EAVSMGEQYNKLXXXXXXXXXLYLVSIASLKTPVXXAK

SEQ ID NO: 2925 - protein, 39 aa, Artificial Sequence
  Non-cyclic GFR-binding peptide
  MOD_RES (36), (36): Xaa is C or S
LHDELTYHYKLFIPKKRVIEKYLVSIPSLQVQTPRXQVN

SEQ ID NO: 2926 - protein, 35 aa, Artificial Sequence
  Non-cyclic GFR-binding peptide
  MOD_RES (1), (34), (35): Xaa is C or S
  MOD_RES (12), (13), (14), (15), (16): Xaa is A or G
  MOD_RES (17), (18), (19), (20): Xaa is A or G or is absent
XSKVIMQYNKLXXXXXXXXXLYLISIASLDQSVXX

SEQ ID NO: 2927 - protein, 40 aa, Artificial Sequence
  Non-cyclic GFR-binding peptide
  MOD_RES (2), (4), (35), (36): Xaa is C or S
SXKXSRVIMRHKRLVKPKRGVYYLISTASLAQPVXXPAAS

SEQ ID NO: 2928 - protein, 35 aa, Artificial Sequence
  Non-cyclic GFR-binding peptide
  MOD_RES (2), (33), (34): Xaa is C or S
KXSKVIMQYNKLIKPTKGILYLISIASLDQSVXXP

SEQ ID NO: 2929 - protein, 38 aa, Artificial Sequence
  Non-cyclic GFR-binding peptide
  MOD_RES (35), (36): Xaa is C or S
  MOD_RES (13), (14), (15), (16), (17): Xaa is A or G
  MOD_RES (18), (19), (20), (21): Xaa is A or G or is absent
EAVSMGERHKRLXXXXXXXXXYYLVSTASLKTPVXXAK

SEQ ID NO: 2930 - protein, 45 aa, Artificial Sequence
  Non-cyclic GFR-binding peptide
  MOD_RES (2), (4), (41): Xaa is C or S
EXKXALHDELTRHKRLFIPKKRVIEYYLVSTASLQVQTPRXQVNR

SEQ ID NO: 2931 - protein, 41 aa, Artificial Sequence
  Non-cyclic GFR-binding peptide
  MOD_RES (2), (4), (36), (37): Xaa is C or S
RXGXGEVVMEYHYKLVVKDYEDKYLMSIPSLETPVXXAKPI

SEQ ID NO: 2932 - protein, 42 aa, Artificial Sequence
  Non-cyclic GFR-binding peptide
  MOD_RES (2), (4), (36), (37): Xaa is C or S
RXGXGEVVMDRHKRLVVKENEDYYLMSTASLETPVXXAKPIK

SEQ ID NO: 2933 - protein, 36 aa, Artificial Sequence
  Non-cyclic GFR-binding peptide
  MOD_RES (1), (34), (35): Xaa is C or S
  MOD_RES (12), (13), (14), (15), (16): Xaa is A or G
  MOD_RES (17), (18), (19), (20): Xaa is A or G or is absent
XSKVVMYHYKLXXXXXXXXXKYLISIPSLDQPVXXP

SEQ ID NO: 2934 - protein, 39 aa, Artificial Sequence
  Non-cyclic GFR-binding peptide
  MOD_RES (2), (35), (36): Xaa is C or S
  MOD_RES (13), (14), (15), (16), (17): Xaa is A or G
  MOD_RES (18), (19), (20), (21): Xaa is A or G or is absent
KXSKVVMQYNKLXXXXXXXXXLYLISIASLDQPVXXPSA

SEQ ID NO: 2935 - protein, 40 aa, Artificial Sequence
  Non-cyclic GFR-binding peptide
  MOD_RES (2), (39): Xaa is C or S
KXALHDELTYHYKLFIPKKRVIEKYLVSIPSLQVQTPRXQ

SEQ ID NO: 2936 - protein, 38 aa, Artificial Sequence
  Non-cyclic GFR-binding peptide
  MOD_RES (1), (3), (35): Xaa is C or S
XGXSRVVMNQYNKLIVNSSDDLYLVSIASLKTPAXTPK

SEQ ID NO: 2937 - protein, 35 aa, Artificial Sequence
  Non-cyclic GFR-binding peptide
  MOD_RES (32), (33): Xaa is C or S
GEVVMERYKKLVVKDYEDFYLMSIANLETPVXXAK

SEQ ID NO: 2938 - protein, 37 aa, Artificial Sequence
  Non-cyclic GFR-binding peptide
  MOD_RES (2), (2): Xaa is C or S
KXALHDELTYHYKLFIPKKRVIEKYLVSIPSLQVQTP

SEQ ID NO: 2939 - protein, 37 aa, Artificial Sequence
  Non-cyclic GFR-binding peptide
  MOD_RES (2), (33), (34): Xaa is C or S
KXSKVVMRHKRLVKPTRGVYYLISTASLDQPVXXPSA

SEQ ID NO: 2940 - protein, 37 aa, Artificial Sequence
  Non-cyclic GFR-binding peptide
  MOD_RES (1), (1): Xaa is C or S
  MOD_RES (14), (15), (16), (17), (18): Xaa is A or G
  MOD_RES (19), (20), (21), (22): Xaa is A or G or is absent
XALHDELTYHYKLXXXXXXXXXKYLVSIPSLQVQTPR

SEQ ID NO: 2941 - protein, 37 aa, Artificial Sequence
  Non-cyclic GFR-binding peptide
  MOD_RES (2), (33), (34): Xaa is C or S
KXSKVVMQYNKLVKPTRGVLYLISIASLDQPVXXPSA

SEQ ID NO: 2942 - protein, 35 aa, Artificial Sequence
  Non-cyclic GFR-binding peptide
  MOD_RES (34), (35): Xaa is C or S
  MOD_RES (12), (13), (14), (15), (16): Xaa is A or G
  MOD_RES (17), (18), (19), (20): Xaa is A or G or is absent
SRVVMNYHYKLXXXXXXXXXKYLVSIPSLKTPAXX

SEQ ID NO: 2943 - protein, 41 aa, Artificial Sequence
  Non-cyclic GFR-binding peptide
  MOD_RES (2), (4), (35), (36): Xaa is C or S
SXKXSKVVMQYNKLVKPTRGVLYLISIASLDQPVXXPSASA

SEQ ID NO: 2944 - protein, 41 aa, Artificial Sequence
  Non-cyclic GFR-binding peptide
  MOD_RES (37), (37): Xaa is C or S
  MOD_RES (13), (14), (15), (16), (17): Xaa is A or G
  MOD_RES (18), (19), (20), (21): Xaa is A or G or is absent
ALHDELTYHYKLXXXXXXXXXKYLVSIPSLQVQTPRXQVNR

SEQ ID NO: 2945 - protein, 44 aa, Artificial Sequence
  Non-cyclic GFR-binding peptide
  MOD_RES (2), (4), (38), (39): Xaa is C or S
  MOD_RES (16), (17), (18), (19), (20): Xaa is A or G
  MOD_RES (21), (22), (23), (24): Xaa is A or G or is absent
HXGXAKVVMNQYNKLXXXXXXXXXLYLVSIASLKTPAXXAKPVA

SEQ ID NO: 2946 - protein, 39 aa, Artificial Sequence
  Non-cyclic GFR-binding peptide
  MOD_RES (1), (35), (36): Xaa is C or S
  MOD_RES (13), (14), (15), (16), (17): Xaa is A or G
  MOD_RES (18), (19), (20), (21): Xaa is A or G or is absent
XSRVVMNQYNKLXXXXXXXXXLYLVSIASLKTPAXXPKP

SEQ ID NO: 2947 - protein, 38 aa, Artificial Sequence
  Non-cyclic GFR-binding peptide
  MOD_RES (1), (3), (36), (37): Xaa is C or S
  MOD_RES (14), (15), (16), (17), (18): Xaa is A or G
  MOD_RES (19), (20), (21), (22): Xaa is A or G or is absent
XKXSKVVMRYKKLXXXXXXXXXFYLISIANLDQPVXXP

SEQ ID NO: 2948 - protein, 33 aa, Artificial Sequence
  Non-cyclic GFR-binding peptide
  MOD_RES (32), (33): Xaa is C or S
AKVVMNYHYKLIVNNSSDKYLVSIPSLKTPAXX

SEQ ID NO: 2949 - protein, 38 aa, Artificial Sequence
  Non-cyclic GFR-binding peptide
  MOD_RES (1), (3), (37), (38): Xaa is C or S
  MOD_RES (15), (16), (17), (18), (19): Xaa is A or G
  MOD_RES (20), (21), (22), (23): Xaa is A or G or is absent
XGXGEVVMEYHYKLXXXXXXXXXKYLMSIPSLETPVXX

SEQ ID NO: 2950 - protein, 40 aa, Artificial Sequence
  Non-cyclic GFR-binding peptide
  MOD_RES (2), (4), (38), (39): Xaa is C or S
  MOD_RES (16), (17), (18), (19), (20): Xaa is A or G
  MOD_RES (21), (22), (23), (24): Xaa is A or G or is absent
HXGXAKVVMNRYKKLXXXXXXXXXFYLVSIANLKTPAXXA

SEQ ID NO: 2951 - protein, 40 aa, Artificial Sequence
  Non-cyclic GFR-binding peptide
  MOD_RES (1), (3), (37): Xaa is C or S
  MOD_RES (15), (16), (17), (18), (19): Xaa is A or G
  MOD_RES (20), (21), (22), (23): Xaa is A or G or is absent
XGXSRVVMNQYNKLXXXXXXXXXLYLVSIASLKTPAXTPK

SEQ ID NO: 2952 - protein, 36 aa, Artificial Sequence
  Non-cyclic GFR-binding peptide
  MOD_RES (2), (34): Xaa is C or S
GXSRVVMNRHKRLIVNSSDDYYLVSTASLKTPAXTP

SEQ ID NO: 2953 - protein, 32 aa, Artificial Sequence
  Non-cyclic GFR-binding peptide
  MOD_RES (11), (12), (13), (14), (15): Xaa is A or G
  MOD_RES (16), (17), (18), (19): Xaa is A or G or is absent
EVVMDRYKKLXXXXXXXXXFYLMSIANLETPV

SEQ ID NO: 2954 - protein, 37 aa, Artificial Sequence
  Non-cyclic GFR-binding peptide
  MOD_RES (33), (34): Xaa is C or S
  MOD_RES (11), (12), (13), (14), (15): Xaa is A or G
  MOD_RES (16), (17), (18), (19): Xaa is A or G or is absent
SKVIMYHYKLXXXXXXXXXKYLISIPSLDQSVXXPSA

SEQ ID NO: 2955 - protein, 41 aa, Artificial Sequence
  Non-cyclic GFR-binding peptide
  MOD_RES (1), (38): Xaa is C or S
  MOD_RES (14), (15), (16), (17), (18): Xaa is A or G
  MOD_RES (19), (20), (21), (22): Xaa is A or G or is absent
XALHDELTRHKRLXXXXXXXXXYYLVSTASLQVQTPRXQVN

SEQ ID NO: 2956 - protein, 40 aa, Artificial Sequence
  Non-cyclic GFR-binding peptide
  MOD_RES (2), (34), (35): Xaa is C or S
GXSRVVMNYHYKLIVNSSDDKYLVSIPSLKTPAXXPKPVY

SEQ ID NO: 2957 - protein, 39 aa, Artificial Sequence
  Non-cyclic GFR-binding peptide
  MOD_RES (2), (33), (34): Xaa is C or S
KXSKVVMYHYKLVKPTRGVKYLISIPSLDQPVXXPSASA

SEQ ID NO: 2958 - protein, 42 aa, Artificial Sequence
  Non-cyclic GFR-binding peptide
  MOD_RES (2), (4), (41): Xaa is C or S
  MOD_RES (17), (18), (19), (20), (21): Xaa is A or G
  MOD_RES (22), (23), (24), (25): Xaa is A or G or is absent
EXKXALHDELTQYNKLXXXXXXXXXLYLVSIASLQVQTPRXQ

SEQ ID NO: 2959 - protein, 45 aa, Artificial Sequence
  Non-cyclic GFR-binding peptide
  MOD_RES (2), (4), (41): Xaa is C or S
  MOD_RES (17), (18), (19), (20), (21): Xaa is A or G
  MOD_RES (22), (23), (24), (25): Xaa is A or G or is absent
EXKXALHDELTQYNKLXXXXXXXXXLYLVSIASLQVQTPRXQVNR

SEQ ID NO: 2960 - protein, 36 aa, Artificial Sequence
  Non-cyclic GFR-binding peptide
  MOD_RES (1), (3): Xaa is C or S
  MOD_RES (15), (16), (17), (18), (19): Xaa is A or G
  MOD_RES (20), (21), (22), (23): Xaa is A or G or is absent
XGXSRVVMNRHKRLXXXXXXXXXYYLVSTASLKTPA

SEQ ID NO: 2961 - protein, 38 aa, Artificial Sequence
  Non-cyclic GFR-binding peptide
  MOD_RES (34), (34): Xaa is C or S
  MOD_RES (12), (13), (14), (15), (16): Xaa is A or G
  MOD_RES (17), (18), (19), (20): Xaa is A or G or is absent
SRVVMNRHKRLXXXXXXXXXYYLVSTASLKTPAXTPKT

SEQ ID NO: 2962 - protein, 39 aa, Artificial Sequence
  Non-cyclic GFR-binding peptide
  MOD_RES (1), (33), (34): Xaa is C or S
XSRVVMNYHYKLIVNSSDDKYLVSIPSLKTPAXXPKPVY

SEQ ID NO: 2963 - protein, 35 aa, Artificial Sequence
  Non-cyclic GFR-binding peptide
  MOD_RES (2), (2): Xaa is C or S
  MOD_RES (14), (15), (16), (17), (18): Xaa is A or G
  MOD_RES (19), (20), (21), (22): Xaa is A or G or is absent
GXAKVVMNYHYKLXXXXXXXXXKYLVSIPSLKTPA

SEQ ID NO: 2964 - protein, 31 aa, Artificial Sequence
  Non-cyclic GFR-binding peptide
  MOD_RES (31), (31): Xaa is C or S
SKVIMRYKKLIKPTKGIFYLISIANLDQSVX

SEQ ID NO: 2965 - protein, 41 aa, Artificial Sequence
  Non-cyclic GFR-binding peptide
  MOD_RES (2), (37), (38): Xaa is C or S
  MOD_RES (15), (16), (17), (18), (19): Xaa is A or G
  MOD_RES (20), (21), (22), (23): Xaa is A or G or is absent
GXEAVSMGERYKKLXXXXXXXXXFYLVSIANLKTPVXXAKG

SEQ ID NO: 2966 - protein, 40 aa, Artificial Sequence
  Non-cyclic GFR-binding peptide
  MOD_RES (1), (3), (36), (37): Xaa is C or S
  MOD_RES (14), (15), (16), (17), (18): Xaa is A or G
  MOD_RES (19), (20), (21), (22): Xaa is A or G or is absent
XKXSKVIMRHKRLXXXXXXXXXYYLISTASLDQSVXXPSA

SEQ ID NO: 2967 - protein, 32 aa, Artificial Sequence
  Non-cyclic GFR-binding peptide
  MOD_RES (31), (32): Xaa is C or S
SKVIMRHKRLIKPTKGIYYLISTASLDQSVXX

SEQ ID NO: 2968 - protein, 34 aa, Artificial Sequence
  Non-cyclic GFR-binding peptide
  MOD_RES (33), (34): Xaa is C or S
  MOD_RES (11), (12), (13), (14), (15): Xaa is A or G
  MOD_RES (16), (17), (18), (19): Xaa is A or G or is absent
SKVIMRYKKLXXXXXXXXXFYLISIANLDQSVXX

SEQ ID NO: 2969 - protein, 41 aa, Artificial Sequence
  Non-cyclic GFR-binding peptide
  MOD_RES (2), (36), (37): Xaa is C or S
  MOD_RES (14), (15), (16), (17), (18): Xaa is A or G
  MOD_RES (19), (20), (21), (22): Xaa is A or G or is absent
GXARVVMNRHKRLXXXXXXXXXYYLVSTASLQTPAXXPKPV

SEQ ID NO: 2970 - protein, 38 aa, Artificial Sequence
  Non-cyclic GFR-binding peptide
  MOD_RES (2), (4): Xaa is C or S
  MOD_RES (17), (18), (19), (20), (21): Xaa is A or G
  MOD_RES (22), (23), (24), (25): Xaa is A or G or is absent
EXKXALHDELTRYKKLXXXXXXXXXFYLVSIANLQVQT

SEQ ID NO: 2971 - protein, 41 aa, Artificial Sequence
  Non-cyclic GFR-binding peptide
  MOD_RES (1), (3), (40): Xaa is C or S
XKXALHDELTRHKRLFIPKKRVIEYYLVSTASLQVQTPRXQ

SEQ ID NO: 2972 - protein, 35 aa, Artificial Sequence
  Non-cyclic GFR-binding peptide
  MOD_RES (1), (33), (34): Xaa is C or S
XARVVMNQYNKLIVNSSDDLYLVSIASLQTPAXXP

SEQ ID NO: 2973 - protein, 40 aa, Artificial Sequence
  Non-cyclic GFR-binding peptide
  MOD_RES (2), (4), (38), (39): Xaa is C or S
  MOD_RES (16), (17), (18), (19), (20): Xaa is A or G
  MOD_RES (21), (22), (23), (24): Xaa is A or G or is absent
RXGXGEVVMERHKRLXXXXXXXXXYYLMSTASLETPVXXA

SEQ ID NO: 2974 - protein, 35 aa, Artificial Sequence
  Non-cyclic GFR-binding peptide
  MOD_RES (1), (1): Xaa is C or S
  MOD_RES (14), (15), (16), (17), (18): Xaa is A or G
  MOD_RES (19), (20), (21), (22): Xaa is A or G or is absent
XALHDELTRYKKLXXXXXXXXXFYLVSIANLQVQT

SEQ ID NO: 2975 - protein, 35 aa, Artificial Sequence
  Non-cyclic GFR-binding peptide
  MOD_RES (31), (32): Xaa is C or S
EVVMDYHYKLVVKENEDKYLMSIPSLETPVXXAKP

SEQ ID NO: 2976 - protein, 34 aa, Artificial Sequence
  Non-cyclic GFR-binding peptide
  MOD_RES (1), (3): Xaa is C or S
XGXARVVMNRHKRLIVNSSDDYYLVSTASLQTPA

SEQ ID NO: 2977 - protein, 34 aa, Artificial Sequence
  Non-cyclic GFR-binding peptide
  MOD_RES (1), (32), (33): Xaa is C or S
XSRVIMRYKKLVKPKRGVFYLISIANLAQPVXXP

SEQ ID NO: 2978 - protein, 38 aa, Artificial Sequence
  Non-cyclic GFR-binding peptide
  MOD_RES (1), (32), (33): Xaa is C or S
XSRVIMRYKKLVKPKRGVFYLISIANLAQPVXXPAASA

SEQ ID NO: 2979 - protein, 38 aa, Artificial Sequence
  Non-cyclic GFR-binding peptide
  MOD_RES (35), (35): Xaa is C or S
  MOD_RES (11), (12), (13), (14), (15): Xaa is A or G
  MOD_RES (16), (17), (18), (19): Xaa is A or G or is absent
HDELTQYNKLXXXXXXXXXLYLVSIASLQVQTPRXQVN

SEQ ID NO: 2980 - protein, 38 aa, Artificial Sequence
  Non-cyclic GFR-binding peptide
  MOD_RES (2), (4), (38): Xaa is C or S
  MOD_RES (16), (17), (18), (19), (20): Xaa is A or G
  MOD_RES (21), (22), (23), (24): Xaa is A or G or is absent
HXGXARVVMNRHKRLXXXXXXXXXYYLVSTASLQTPAX

SEQ ID NO: 2981 - protein, 40 aa, Artificial Sequence
  Non-cyclic GFR-binding peptide
  MOD_RES (1), (3), (36), (37): Xaa is C or S
  MOD_RES (14), (15), (16), (17), (18): Xaa is A or G
  MOD_RES (19), (20), (21), (22): Xaa is A or G or is absent
XKXSRVIMRHKRLXXXXXXXXXYYLISTASLAQPVXXPAA

SEQ ID NO: 2982 - protein, 33 aa, Artificial Sequence
  Non-cyclic GFR-binding peptide
  MOD_RES (12), (13), (14), (15), (16): Xaa is A or G
  MOD_RES (17), (18), (19), (20): Xaa is A or G or is absent
ARVVMNQYNKLXXXXXXXXXLYLVSIASLQTPA

SEQ ID NO: 2983 - protein, 39 aa, Artificial Sequence
  Non-cyclic GFR-binding peptide
  MOD_RES (2), (4), (38), (39): Xaa is C or S
  MOD_RES (16), (17), (18), (19), (20): Xaa is A or G
  MOD_RES (21), (22), (23), (24): Xaa is A or G or is absent
HXGXSRVVMNQYNKLXXXXXXXXXLYLVSIASLKTPAXX

SEQ ID NO: 2984 - protein, 38 aa, Artificial Sequence
  Non-cyclic GFR-binding peptide
  MOD_RES (1), (38): Xaa is C or S
  MOD_RES (14), (15), (16), (17), (18): Xaa is A or G
  MOD_RES (19), (20), (21), (22): Xaa is A or G or is absent
XALHDELTRYKKLXXXXXXXXXFYLVSIANLQVQTPRX

SEQ ID NO: 2985 - protein, 40 aa, Artificial Sequence
  Non-cyclic GFR-binding peptide
  MOD_RES (2), (36), (37): Xaa is C or S
  MOD_RES (14), (15), (16), (17), (18): Xaa is A or G
  MOD_RES (19), (20), (21), (22): Xaa is A or G or is absent
GXGEVVMDYHYKLXXXXXXXXXKYLMSIPSLETPVXXAKP

SEQ ID NO: 2986 - protein, 32 aa, Artificial Sequence
  Non-cyclic GFR-binding peptide
  MOD_RES (11), (12), (13), (14), (15): Xaa is A or G
  MOD_RES (16), (17), (18), (19): Xaa is A or G or is absent
RVVMNYHYKLXXXXXXXXXKYLVSIPSLQTPA

SEQ ID NO: 2987 - protein, 39 aa, Artificial Sequence
  Non-cyclic GFR-binding peptide
  MOD_RES (2), (35), (36): Xaa is C or S
  MOD_RES (13), (14), (15), (16), (17): Xaa is A or G
  MOD_RES (18), (19), (20), (21): Xaa is A or G or is absent
KXSRVIMYHYKLXXXXXXXXXKYLISIPSLAQPVXXPAA

SEQ ID NO: 2988 - protein, 41 aa, Artificial Sequence
  Non-cyclic GFR-binding peptide
  MOD_RES (2), (39): Xaa is C or S
KXALHDELTRHKRLFIPKKRVIEYYLVSTASLQVQTPRXQV

SEQ ID NO: 2989 - protein, 37 aa, Artificial Sequence
  Non-cyclic GFR-binding peptide
  MOD_RES (1), (3), (35), (36): Xaa is C or S
XGXGEVVMDRYKKLVVKENEDFYLMSIANLETPVXXA

SEQ ID NO: 2990 - protein, 40 aa, Artificial Sequence
  Non-cyclic GFR-binding peptide
  MOD_RES (34), (35): Xaa is C or S
  MOD_RES (12), (13), (14), (15), (16): Xaa is A or G
  MOD_RES (17), (18), (19), (20): Xaa is A or G or is absent
SRVVMNQYNKLXXXXXXXXXLYLVSIASLKTPAXXPKPVY

SEQ ID NO: 2991 - protein, 40 aa, Artificial Sequence
  Non-cyclic GFR-binding peptide
  MOD_RES (1), (38): Xaa is C or S
  MOD_RES (14), (15), (16), (17), (18): Xaa is A or G
  MOD_RES (19), (20), (21), (22): Xaa is A or G or is absent
XALHDELTRYKKLXXXXXXXXXFYLVSIANLQVQTPRXQV

SEQ ID NO: 2992 - protein, 37 aa, Artificial Sequence
  Non-cyclic GFR-binding peptide
  MOD_RES (33), (34): Xaa is C or S
  MOD_RES (11), (12), (13), (14), (15): Xaa is A or G
  MOD_RES (16), (17), (18), (19): Xaa is A or G or is absent
SKVIMRHKRLXXXXXXXXXYYLISTASLDQSVXXPSA

SEQ ID NO: 2993 - protein, 36 aa, Artificial Sequence
  Non-cyclic GFR-binding peptide
  MOD_RES (1), (3), (35), (36): Xaa is C or S
XGXGEVVMDRHKRLVVKENEDYYLMSTASLETPVXX

SEQ ID NO: 2994 - protein, 40 aa, Artificial Sequence
  Non-cyclic GFR-binding peptide
  MOD_RES (1), (3), (34), (35): Xaa is C or S
XKXSKVIMQYNKLIKPTKGILYLISIASLDQSVXXPSASA

SEQ ID NO: 2995 - protein, 40 aa, Artificial Sequence
  Non-cyclic GFR-binding peptide
  MOD_RES (1), (34), (35): Xaa is C or S
  MOD_RES (12), (13), (14), (15), (16): Xaa is A or G
  MOD_RES (17), (18), (19), (20): Xaa is A or G or is absent
XSKVIMRHKRLXXXXXXXXXYYLISTASLDQSVXXPSASA

SEQ ID NO: 2996 - protein, 36 aa, Artificial Sequence
  Non-cyclic GFR-binding peptide
  MOD_RES (32), (33): Xaa is C or S
ARVVMNYHYKLIVNSSDDKYLVSIPSLQTPAXXPKP

SEQ ID NO: 2997 - protein, 35 aa, Artificial Sequence
  Non-cyclic GFR-binding peptide
  MOD_RES (1), (3): Xaa is C or S
  MOD_RES (14), (15), (16), (17), (18): Xaa is A or G
  MOD_RES (19), (20), (21), (22): Xaa is A or G or is absent
XKXSKVVMYHYKLXXXXXXXXXKYLISIPSLDQPV

SEQ ID NO: 2998 - protein, 38 aa, Artificial Sequence
  Non-cyclic GFR-binding peptide
  MOD_RES (2), (36): Xaa is C or S
  MOD_RES (14), (15), (16), (17), (18): Xaa is A or G
  MOD_RES (19), (20), (21), (22): Xaa is A or G or is absent
GXSRVVMNRHKRLXXXXXXXXXYYLVSTASLKTPAXTP

SEQ ID NO: 2999 - protein, 35 aa, Artificial Sequence
  Non-cyclic GFR-binding peptide
  MOD_RES (33), (34): Xaa is C or S
EAVSMGERHKRLTPVGMDDYYLVSTASLKTPVXXA

SEQ ID NO: 3000 - protein, 40 aa, Artificial Sequence
  Non-cyclic GFR-binding peptide
  MOD_RES (2), (36), (37): Xaa is C or S
  MOD_RES (14), (15), (16), (17), (18): Xaa is A or G
  MOD_RES (19), (20), (21), (22): Xaa is A or G or is absent
GXSRVVMNQYNKLXXXXXXXXXLYLVSIASLKTPAXXPKP

SEQ ID NO: 3001 - protein, 37 aa, Artificial Sequence
  Non-cyclic GFR-binding peptide
  MOD_RES (33), (34): Xaa is C or S
  MOD_RES (11), (12), (13), (14), (15): Xaa is A or G
  MOD_RES (16), (17), (18), (19): Xaa is A or G or is absent
SKVVMQYNKLXXXXXXXXXLYLISIASLDQPVXXPSA

SEQ ID NO: 3002 - protein, 34 aa, Artificial Sequence
  Non-cyclic GFR-binding peptide
  MOD_RES (31), (32): Xaa is C or S
RVVMNYHYKLIVNSSDDKYLVSIPSLKTPAXXPK

SEQ ID NO: 3003 - protein, 37 aa, Artificial Sequence
  Non-cyclic GFR-binding peptide
  MOD_RES (33), (34): Xaa is C or S
  MOD_RES (11), (12), (13), (14), (15): Xaa is A or G
  MOD_RES (16), (17), (18), (19): Xaa is A or G or is absent
RVVMNYHYKLXXXXXXXXXKYLVSIPSLKTPAXXPKP

SEQ ID NO: 3004 - protein, 39 aa, Artificial Sequence
  Non-cyclic GFR-binding peptide
  MOD_RES (2), (35), (36): Xaa is C or S
  MOD_RES (13), (14), (15), (16), (17): Xaa is A or G
  MOD_RES (18), (19), (20), (21): Xaa is A or G or is absent
KXSRVIMQYNKLXXXXXXXXXLYLISIASLAQPVXXPAA

SEQ ID NO: 3005 - protein, 34 aa, Artificial Sequence
  Non-cyclic GFR-binding peptide
  MOD_RES (32), (32): Xaa is C or S
SRVVMNYHYKLIVNSSDDKYLVSIPSLKTPAXTP

SEQ ID NO: 3006 - protein, 33 aa, Artificial Sequence
  Non-cyclic GFR-binding peptide
  MOD_RES (2), (2): Xaa is C or S
GXAKVVMNQYNKLIVNNSSDLYLVSIASLKTPA

SEQ ID NO: 3007 - protein, 37 aa, Artificial Sequence
  Non-cyclic GFR-binding peptide
  MOD_RES (2), (4), (37): Xaa is C or S
  MOD_RES (15), (16), (17), (18), (19): Xaa is A or G
  MOD_RES (20), (21), (22), (23): Xaa is A or G or is absent
SXKXSKVVMRYKKLXXXXXXXXXFYLISIANLDQPVX

SEQ ID NO: 3008 - protein, 40 aa, Artificial Sequence
  Non-cyclic GFR-binding peptide
  MOD_RES (1), (34), (35): Xaa is C or S
  MOD_RES (12), (13), (14), (15), (16): Xaa is A or G
  MOD_RES (17), (18), (19), (20): Xaa is A or G or is absent
XSKVIMQYNKLXXXXXXXXXLYLISIASLDQSVXXPSASA

SEQ ID NO: 3009 - protein, 38 aa, Artificial Sequence
  Non-cyclic GFR-binding peptide
  MOD_RES (1), (34), (35): Xaa is C or S
  MOD_RES (12), (13), (14), (15), (16): Xaa is A or G
  MOD_RES (17), (18), (19), (20): Xaa is A or G or is absent
XSKVIMYHYKLXXXXXXXXXKYLISIPSLDQSVXXPSA

SEQ ID NO: 3010 - protein, 41 aa, Artificial Sequence
  Non-cyclic GFR-binding peptide
  MOD_RES (2), (36): Xaa is C or S
  MOD_RES (14), (15), (16), (17), (18): Xaa is A or G
  MOD_RES (19), (20), (21), (22): Xaa is A or G or is absent
GXSRVVMNYHYKLXXXXXXXXXKYLVSIPSLKTPAXTPKTV

SEQ ID NO: 3011 - protein, 37 aa, Artificial Sequence
  Non-cyclic GFR-binding peptide
  MOD_RES (2), (36), (37): Xaa is C or S
  MOD_RES (14), (15), (16), (17), (18): Xaa is A or G
  MOD_RES (19), (20), (21), (22): Xaa is A or G or is absent
GXSRVVMNQYNKLXXXXXXXXXLYLVSIASLKTPAXX

SEQ ID NO: 3012 - protein, 35 aa, Artificial Sequence
  Non-cyclic GFR-binding peptide
  MOD_RES (33), (34): Xaa is C or S
  MOD_RES (11), (12), (13), (14), (15): Xaa is A or G
  MOD_RES (16), (17), (18), (19): Xaa is A or G or is absent
EVVMERHKRLXXXXXXXXXYYLMSTASLETPVXXA

SEQ ID NO: 3013 - protein, 40 aa, Artificial Sequence
  Non-cyclic GFR-binding peptide
  MOD_RES (1), (3), (36), (37): Xaa is C or S
  MOD_RES (14), (15), (16), (17), (18): Xaa is A or G
  MOD_RES (19), (20), (21), (22): Xaa is A or G or is absent
XKXSKVVMYHYKLXXXXXXXXXKYLISIPSLDQPVXXPSA

SEQ ID NO: 3014 - protein, 37 aa, Artificial Sequence
  Non-cyclic GFR-binding peptide
  MOD_RES (2), (34), (35): Xaa is C or S
GXAKVVMNYHYKLIVNNSSDKYLVSIPSLKTPAXXAK

SEQ ID NO: 3015 - protein, 35 aa, Artificial Sequence
  Non-cyclic GFR-binding peptide
  MOD_RES (34), (35): Xaa is C or S
  MOD_RES (12), (13), (14), (15), (16): Xaa is A or G
  MOD_RES (17), (18), (19), (20): Xaa is A or G or is absent
ARVVMNQYNKLXXXXXXXXXLYLVSIASLQTPAXX

SEQ ID NO: 3016 - protein, 39 aa, Artificial Sequence
  Non-cyclic GFR-binding peptide
  MOD_RES (2), (39): Xaa is C or S
  MOD_RES (15), (16), (17), (18), (19): Xaa is A or G
  MOD_RES (20), (21), (22), (23): Xaa is A or G or is absent
KXALHDELTQYNKLXXXXXXXXXLYLVSIASLQVQTPRX

SEQ ID NO: 3017 - protein, 32 aa, Artificial Sequence
  Non-cyclic GFR-binding peptide
  MOD_RES (31), (32): Xaa is C or S
EVVMDRHKRLVVKENEDYYLMSTASLETPVXX

SEQ ID NO: 3018 - protein, 36 aa, Artificial Sequence
  Non-cyclic GFR-binding peptide
  MOD_RES (1), (3): Xaa is C or S
  MOD_RES (15), (16), (17), (18), (19): Xaa is A or G
  MOD_RES (20), (21), (22), (23): Xaa is A or G or is absent
XGXAKVVMNQYNKLXXXXXXXXXLYLVSIASLKTPA

SEQ ID NO: 3019 - protein, 37 aa, Artificial Sequence
  Non-cyclic GFR-binding peptide
  MOD_RES (1), (3), (35), (36): Xaa is C or S
XGXARVVMNQYNKLIVNSSDDLYLVSIASLQTPAXXP

SEQ ID NO: 3020 - protein, 38 aa, Artificial Sequence
  Non-cyclic GFR-binding peptide
  MOD_RES (34), (35): Xaa is C or S
  MOD_RES (12), (13), (14), (15), (16): Xaa is A or G
  MOD_RES (17), (18), (19), (20): Xaa is A or G or is absent
GEVVMDRYKKLXXXXXXXXXFYLMSIANLETPVXXAKP

SEQ ID NO: 3021 - protein, 32 aa, Artificial Sequence
  Non-cyclic GFR-binding peptide
  MOD_RES (11), (12), (13), (14), (15): Xaa is A or G
  MOD_RES (16), (17), (18), (19): Xaa is A or G or is absent
SKVIMQYNKLXXXXXXXXXLYLISIASLDQSV

SEQ ID NO: 3022 - protein, 38 aa, Artificial Sequence
  Non-cyclic GFR-binding peptide
  MOD_RES (2), (33), (34): Xaa is C or S
KXSKVVMYHYKLVKPTRGVKYLISIPSLDQPVXXPSAS

SEQ ID NO: 3023 - protein, 37 aa, Artificial Sequence
  Non-cyclic GFR-binding peptide
  MOD_RES (36), (36): Xaa is C or S
  MOD_RES (12), (13), (14), (15), (16): Xaa is A or G
  MOD_RES (17), (18), (19), (20): Xaa is A or G or is absent
LHDELTRYKKLXXXXXXXXXFYLVSIANLQVQTPRXQ

SEQ ID NO: 3024 - protein, 41 aa, Artificial Sequence
  Non-cyclic GFR-binding peptide
  MOD_RES (2), (39): Xaa is C or S
KXALHDELTQYNKLFIPKKRVIELYLVSIASLQVQTPRXQV

SEQ ID NO: 3025 - protein, 35 aa, Artificial Sequence
  Non-cyclic GFR-binding peptide
  MOD_RES (35), (35): Xaa is C or S
  MOD_RES (11), (12), (13), (14), (15): Xaa is A or G
  MOD_RES (16), (17), (18), (19): Xaa is A or G or is absent
HDELTRYKKLXXXXXXXXXFYLVSIANLQVQTPRX

SEQ ID NO: 3026 - protein, 33 aa, Artificial Sequence
  Non-cyclic GFR-binding peptide
  MOD_RES (33), (33): Xaa is C or S
  MOD_RES (11), (12), (13), (14), (15): Xaa is A or G
  MOD_RES (16), (17), (18), (19): Xaa is A or G or is absent
SRVIMQYNKLXXXXXXXXXLYLISIASLAQPVX

SEQ ID NO: 3027 - protein, 32 aa, Artificial Sequence
  Non-cyclic GFR-binding peptide
  MOD_RES (1), (32): Xaa is C or S
XSRVIMRHKRLVKPKRGVYYLISTASLAQPVX

SEQ ID NO: 3028 - protein, 32 aa, Artificial Sequence
  Non-cyclic GFR-binding peptide
  MOD_RES (31), (32): Xaa is C or S
SRVIMRHKRLVKPKRGVYYLISTASLAQPVXX

SEQ ID NO: 3029 - protein, 34 aa, Artificial Sequence
  Non-cyclic GFR-binding peptide
  MOD_RES (31), (32): Xaa is C or S
RVVMNQYNKLIVNSSDDLYLVSIASLKTPAXXPK

SEQ ID NO: 3030 - protein, 33 aa, Artificial Sequence
  Non-cyclic GFR-binding peptide
  MOD_RES (1), (3): Xaa is C or S
XKXSKVVMRHKRLVKPTRGVYYLISTASLDQPV

SEQ ID NO: 3031 - protein, 31 aa, Artificial Sequence
  Non-cyclic GFR-binding peptide
  MOD_RES (31), (31): Xaa is C or S
SRVIMRYKKLVKPKRGVFYLISIANLAQPVX

SEQ ID NO: 3032 - protein, 36 aa, Artificial Sequence
  Non-cyclic GFR-binding peptide
  MOD_RES (2), (4), (35), (36): Xaa is C or S
SXKXSRVIMRHKRLVKPKRGVYYLISTASLAQPVXX

SEQ ID NO: 3033 - protein, 38 aa, Artificial Sequence
  Non-cyclic GFR-binding peptide
  MOD_RES (2), (4), (38): Xaa is C or S
  MOD_RES (16), (17), (18), (19), (20): Xaa is A or G
  MOD_RES (21), (22), (23), (24): Xaa is A or G or is absent
HXGXAKVVMNYHYKLXXXXXXXXXKYLVSIPSLKTPAX

SEQ ID NO: 3034 - protein, 38 aa, Artificial Sequence
  Non-cyclic GFR-binding peptide
  MOD_RES (2), (34), (35): Xaa is C or S
GXGEVVMEYHYKLVVKDYEDKYLMSIPSLETPVXXAKP

SEQ ID NO: 3035 - protein, 38 aa, Artificial Sequence
  Non-cyclic GFR-binding peptide
  MOD_RES (1), (3), (37), (38): Xaa is C or S
  MOD_RES (15), (16), (17), (18), (19): Xaa is A or G
  MOD_RES (20), (21), (22), (23): Xaa is A or G or is absent
XGXSRVVMNYHYKLXXXXXXXXXKYLVSIPSLKTPAXX

SEQ ID NO: 3036 - protein, 34 aa, Artificial Sequence
  Non-cyclic GFR-binding peptide
  MOD_RES (31), (32): Xaa is C or S
EVVMDRHKRLVVKENEDYYLMSTASLETPVXXAK

SEQ ID NO: 3037 - protein, 38 aa, Artificial Sequence
  Non-cyclic GFR-binding peptide
  MOD_RES (1), (32), (33): Xaa is C or S
XSKVIMYHYKLIKPTKGIKYLISIPSLDQSVXXPSASA

SEQ ID NO: 3038 - protein, 38 aa, Artificial Sequence
  Non-cyclic GFR-binding peptide
  MOD_RES (32), (33): Xaa is C or S
ARVVMNQYNKLIVNSSDDLYLVSIASLQTPAXXPKPVT

SEQ ID NO: 3039 - protein, 38 aa, Artificial Sequence
  Non-cyclic GFR-binding peptide
  MOD_RES (2), (35), (36): Xaa is C or S
  MOD_RES (13), (14), (15), (16), (17): Xaa is A or G
  MOD_RES (18), (19), (20), (21): Xaa is A or G or is absent
KXSKVVMYHYKLXXXXXXXXXKYLISIPSLDQPVXXPS

SEQ ID NO: 3040 - protein, 38 aa, Artificial Sequence
  Non-cyclic GFR-binding peptide
  MOD_RES (2), (4): Xaa is C or S
EXKXALHDELTQYNKLFIPKKRVIELYLVSIASLQVQT

SEQ ID NO: 3041 - protein, 36 aa, Artificial Sequence
  Non-cyclic GFR-binding peptide
  MOD_RES (1), (3): Xaa is C or S
  MOD_RES (15), (16), (17), (18), (19): Xaa is A or G
  MOD_RES (20), (21), (22), (23): Xaa is A or G or is absent
XGXARVVMNYHYKLXXXXXXXXXKYLVSIPSLQTPA

SEQ ID NO: 3042 - protein, 44 aa, Artificial Sequence
  Non-cyclic GFR-binding peptide
  MOD_RES (2), (4), (41): Xaa is C or S
EXKXALHDELTQYNKLFIPKKRVIELYLVSIASLQVQTPRXQVN

SEQ ID NO: 3043 - protein, 37 aa, Artificial Sequence
  Non-cyclic GFR-binding peptide
  MOD_RES (33), (34): Xaa is C or S
  MOD_RES (11), (12), (13), (14), (15): Xaa is A or G
  MOD_RES (16), (17), (18), (19): Xaa is A or G or is absent
EVVMDYHYKLXXXXXXXXXKYLMSIPSLETPVXXAKP

SEQ ID NO: 3044 - protein, 38 aa, Artificial Sequence
  Non-cyclic GFR-binding peptide
  MOD_RES (2), (4), (36), (37): Xaa is C or S
RXGXGEVVMERHKRLVVKDYEDYYLMSTASLETPVXXA

SEQ ID NO: 3045 - protein, 34 aa, Artificial Sequence
  Non-cyclic GFR-binding peptide
  MOD_RES (1), (3), (34): Xaa is C or S
XKXSKVIMRHKRLIKPTKGIYYLISTASLDQSVX

SEQ ID NO: 3046 - protein, 40 aa, Artificial Sequence
  Non-cyclic GFR-binding peptide
  MOD_RES (2), (36), (37): Xaa is C or S
  MOD_RES (14), (15), (16), (17), (18): Xaa is A or G
  MOD_RES (19), (20), (21), (22): Xaa is A or G or is absent
GXGEVVMERHKRLXXXXXXXXXYYLMSTASLETPVXXAKP

SEQ ID NO: 3047 - protein, 37 aa, Artificial Sequence
  Non-cyclic GFR-binding peptide
  MOD_RES (2), (34), (35): Xaa is C or S
GXSRVVMNRHKRLIVNSSDDYYLVSTASLKTPAXXPK

SEQ ID NO: 3048 - protein, 38 aa, Artificial Sequence
  Non-cyclic GFR-binding peptide
  MOD_RES (33), (34): Xaa is C or S
  MOD_RES (11), (12), (13), (14), (15): Xaa is A or G
  MOD_RES (16), (17), (18), (19): Xaa is A or G or is absent
RVVMNRHKRLXXXXXXXXXYYLVSTASLKTPAXXPKPV

SEQ ID NO: 3049 - protein, 37 aa, Artificial Sequence
  Non-cyclic GFR-binding peptide
  MOD_RES (2), (4), (36): Xaa is C or S
HXGXSRVVMNYHYKLIVNSSDDKYLVSIPSLKTPAXT

SEQ ID NO: 3050 - protein, 35 aa, Artificial Sequence
  Non-cyclic GFR-binding peptide
  MOD_RES (1), (3): Xaa is C or S
  MOD_RES (14), (15), (16), (17), (18): Xaa is A or G
  MOD_RES (19), (20), (21), (22): Xaa is A or G or is absent
XKXSKVVMRYKKLXXXXXXXXXFYLISIANLDQPV

SEQ ID NO: 3051 - protein, 36 aa, Artificial Sequence
  Non-cyclic GFR-binding peptide
  MOD_RES (2), (4), (35), (36): Xaa is C or S
SXKXSKVVMRYKKLVKPTRGVFYLISIANLDQPVXX

SEQ ID NO: 3052 - protein, 40 aa, Artificial Sequence
  Non-cyclic GFR-binding peptide
  MOD_RES (2), (4), (37), (38): Xaa is C or S
RXGXEAVSMGERYKKLTPVGMDDFYLVSIANLKTPVXXAK

SEQ ID NO: 3053 - protein, 33 aa, Artificial Sequence
  Non-cyclic GFR-binding peptide
  MOD_RES (2), (33): Xaa is C or S
KXSKVVMYHYKLVKPTRGVKYLISIPSLDQPVX

SEQ ID NO: 3054 - protein, 34 aa, Artificial Sequence
  Non-cyclic GFR-binding peptide
  MOD_RES (1), (32), (33): Xaa is C or S
XSRVIMQYNKLVKPKRGVLYLISIASLAQPVXXP

SEQ ID NO: 3055 - protein, 38 aa, Artificial Sequence
  Non-cyclic GFR-binding peptide
  MOD_RES (2), (4), (35), (36): Xaa is C or S
SXKXSRVIMRHKRLVKPKRGVYYLISTASLAQPVXXPA

SEQ ID NO: 3056 - protein, 34 aa, Artificial Sequence
  Non-cyclic GFR-binding peptide
  MOD_RES (2), (34): Xaa is C or S
GXGEVVMDRHKRLVVKENEDYYLMSTASLETPVX

SEQ ID NO: 3057 - protein, 34 aa, Artificial Sequence
  Non-cyclic GFR-binding peptide
  MOD_RES (1), (34): Xaa is C or S
  MOD_RES (12), (13), (14), (15), (16): Xaa is A or G
  MOD_RES (17), (18), (19), (20): Xaa is A or G or is absent
XSRVIMRHKRLXXXXXXXXXYYLISTASLAQPVX

SEQ ID NO: 3058 - protein, 39 aa, Artificial Sequence
  Non-cyclic GFR-binding peptide
  MOD_RES (1), (3), (36), (37): Xaa is C or S
  MOD_RES (14), (15), (16), (17), (18): Xaa is A or G
  MOD_RES (19), (20), (21), (22): Xaa is A or G or is absent
XKXSKVIMQYNKLXXXXXXXXXLYLISIASLDQSVXXPS

SEQ ID NO: 3059 - protein, 34 aa, Artificial Sequence
  Non-cyclic GFR-binding peptide
  MOD_RES (2), (34): Xaa is C or S
GXSRVVMNYHYKLIVNSSDDKYLVSIPSLKTPAX

SEQ ID NO: 3060 - protein, 37 aa, Artificial Sequence
  Non-cyclic GFR-binding peptide
  MOD_RES (2), (4), (36), (37): Xaa is C or S
HXGXAKVVMNRYKKLIVNNSSDFYLVSIANLKTPAXX

SEQ ID NO: 3061 - protein, 36 aa, Artificial Sequence
  Non-cyclic GFR-binding peptide
  MOD_RES (1), (34), (35): Xaa is C or S
XEAVSMGERYKKLTPVGMDDFYLVSIANLKTPVXXA

SEQ ID NO: 3062 - protein, 42 aa, Artificial Sequence
  Non-cyclic GFR-binding peptide
  MOD_RES (1), (3), (40): Xaa is C or S
  MOD_RES (16), (17), (18), (19), (20): Xaa is A or G
  MOD_RES (21), (22), (23), (24): Xaa is A or G or is absent
XKXALHDELTQYNKLXXXXXXXXXLYLVSIASLQVQTPRXQV

SEQ ID NO: 3063 - protein, 34 aa, Artificial Sequence
  Non-cyclic GFR-binding peptide
  MOD_RES (1), (1): Xaa is C or S
  MOD_RES (13), (14), (15), (16), (17): Xaa is A or G
  MOD_RES (18), (19), (20), (21): Xaa is A or G or is absent
XAKVVMNRYKKLXXXXXXXXXFYLVSIANLKTPA

SEQ ID NO: 3064 - protein, 41 aa, Artificial Sequence
  Non-cyclic GFR-binding peptide
  MOD_RES (2), (4), (38): Xaa is C or S
  MOD_RES (16), (17), (18), (19), (20): Xaa is A or G
  MOD_RES (21), (22), (23), (24): Xaa is A or G or is absent
HXGXSRVVMNQYNKLXXXXXXXXXLYLVSIASLKTPAXTPK

SEQ ID NO: 3065 - protein, 36 aa, Artificial Sequence
  Non-cyclic GFR-binding peptide
  MOD_RES (1), (3): Xaa is C or S
  MOD_RES (15), (16), (17), (18), (19): Xaa is A or G
  MOD_RES (20), (21), (22), (23): Xaa is A or G or is absent
XGXGEVVMEYHYKLXXXXXXXXXKYLMSIPSLETPV

SEQ ID NO: 3066 - protein, 36 aa, Artificial Sequence
  Non-cyclic GFR-binding peptide
  MOD_RES (34), (35): Xaa is C or S
  MOD_RES (12), (13), (14), (15), (16): Xaa is A or G
  MOD_RES (17), (18), (19), (20): Xaa is A or G or is absent
GEVVMEYHYKLXXXXXXXXXKYLMSIPSLETPVXXA

SEQ ID NO: 3067 - protein, 36 aa, Artificial Sequence
  Non-cyclic GFR-binding peptide
  MOD_RES (1), (3), (35), (36): Xaa is C or S
XGXGEVVMERYKKLVVKDYEDFYLMSIANLETPVXX

SEQ ID NO: 3068 - protein, 42 aa, Artificial Sequence
  Non-cyclic GFR-binding peptide
  MOD_RES (2), (4), (38), (39): Xaa is C or S
  MOD_RES (16), (17), (18), (19), (20): Xaa is A or G
  MOD_RES (21), (22), (23), (24): Xaa is A or G or is absent
HXGXAKVVMNRYKKLXXXXXXXXXFYLVSIANLKTPAXXAKP

SEQ ID NO: 3069 - protein, 39 aa, Artificial Sequence
  Non-cyclic GFR-binding peptide
  MOD_RES (34), (34): Xaa is C or S
  MOD_RES (12), (13), (14), (15), (16): Xaa is A or G
  MOD_RES (17), (18), (19), (20): Xaa is A or G or is absent
SRVVMNRHKRLXXXXXXXXXYYLVSTASLKTPAXTPKTV

SEQ ID NO: 3070 - protein, 34 aa, Artificial Sequence
  Non-cyclic GFR-binding peptide
  MOD_RES (1), (34): Xaa is C or S
  MOD_RES (12), (13), (14), (15), (16): Xaa is A or G
  MOD_RES (17), (18), (19), (20): Xaa is A or G or is absent
XSRVIMQYNKLXXXXXXXXXLYLISIASLAQPVX

SEQ ID NO: 3071 - protein, 35 aa, Artificial Sequence
  Non-cyclic GFR-binding peptide
ALHDELTYHYKLFIPKKRVIEKYLVSIPSLQVQTP

SEQ ID NO: 3072 - protein, 41 aa, Artificial Sequence
  Non-cyclic GFR-binding peptide
  MOD_RES (1), (3), (36), (37): Xaa is C or S
  MOD_RES (14), (15), (16), (17), (18): Xaa is A or G
  MOD_RES (19), (20), (21), (22): Xaa is A or G or is absent
XKXSKVVMRYKKLXXXXXXXXXFYLISIANLDQPVXXPSAS

SEQ ID NO: 3073 - protein, 38 aa, Artificial Sequence
  Non-cyclic GFR-binding peptide
  MOD_RES (1), (3): Xaa is C or S
  MOD_RES (16), (17), (18), (19), (20): Xaa is A or G
  MOD_RES (21), (22), (23), (24): Xaa is A or G or is absent
XKXALHDELTRYKKLXXXXXXXXXFYLVSIANLQVQTP

SEQ ID NO: 3074 - protein, 39 aa, Artificial Sequence
  Non-cyclic GFR-binding peptide
  MOD_RES (2), (4): Xaa is C or S
  MOD_RES (17), (18), (19), (20), (21): Xaa is A or G
  MOD_RES (22), (23), (24), (25): Xaa is A or G or is absent
EXKXALHDELTYHYKLXXXXXXXXXKYLVSIPSLQVQTP

SEQ ID NO: 3075 - protein, 37 aa, Artificial Sequence
  Non-cyclic GFR-binding peptide
  MOD_RES (1), (3), (35), (36): Xaa is C or S
XGXGEVVMERHKRLVVKDYEDYYLMSTASLETPVXXA

SEQ ID NO: 3076 - protein, 34 aa, Artificial Sequence
  Non-cyclic GFR-binding peptide
  MOD_RES (2), (2): Xaa is C or S
  MOD_RES (13), (14), (15), (16), (17): Xaa is A or G
  MOD_RES (18), (19), (20), (21): Xaa is A or G or is absent
KXSRVIMYHYKLXXXXXXXXXKYLISIPSLAQPV

SEQ ID NO: 3077 - protein, 42 aa, Artificial Sequence
  Non-cyclic GFR-binding peptide
  MOD_RES (1), (3), (37): Xaa is C or S
  MOD_RES (15), (16), (17), (18), (19): Xaa is A or G
  MOD_RES (20), (21), (22), (23): Xaa is A or G or is absent
XGXSRVVMNQYNKLXXXXXXXXXLYLVSIASLKTPAXTPKTV

SEQ ID NO: 3078 - protein, 36 aa, Artificial Sequence
  Non-cyclic GFR-binding peptide
  MOD_RES (2), (33), (34): Xaa is C or S
KXSKVVMYHYKLVKPTRGVKYLISIPSLDQPVXXPS

SEQ ID NO: 3079 - protein, 38 aa, Artificial Sequence
  Non-cyclic GFR-binding peptide
  MOD_RES (33), (34): Xaa is C or S
EAVSMGERYKKLTPVGMDDFYLVSIANLKTPVXXAKGV

SEQ ID NO: 3080 - protein, 33 aa, Artificial Sequence
  Non-cyclic GFR-binding peptide
LHDELTYHYKLFIPKKRVIEKYLVSIPSLQVQT

SEQ ID NO: 3081 - protein, 40 aa, Artificial Sequence
  Non-cyclic GFR-binding peptide
  MOD_RES (2), (4), (36), (37): Xaa is C or S
HXGXAKVVMNYHYKLIVNNSSDKYLVSIPSLKTPAXXAKP

SEQ ID NO: 3082 - protein, 33 aa, Artificial Sequence
  Non-cyclic GFR-binding peptide
  MOD_RES (2), (33): Xaa is C or S
KXSRVIMRHKRLVKPKRGVYYLISTASLAQPVX

SEQ ID NO: 3083 - protein, 40 aa, Artificial Sequence
  Non-cyclic GFR-binding peptide
  MOD_RES (2), (4), (36), (37): Xaa is C or S
HXGXSRVVMNQYNKLIVNSSDDLYLVSIASLKTPAXXPKP

SEQ ID NO: 3084 - protein, 37 aa, Artificial Sequence
  Non-cyclic GFR-binding peptide
  MOD_RES (1), (35): Xaa is C or S
  MOD_RES (13), (14), (15), (16), (17): Xaa is A or G
  MOD_RES (18), (19), (20), (21): Xaa is A or G or is absent
XSRVVMNQYNKLXXXXXXXXXLYLVSIASLKTPAXTP

SEQ ID NO: 3085 - protein, 40 aa, Artificial Sequence
  Non-cyclic GFR-binding peptide
  MOD_RES (2), (39): Xaa is C or S
  MOD_RES (15), (16), (17), (18), (19): Xaa is A or G
  MOD_RES (20), (21), (22), (23): Xaa is A or G or is absent
KXALHDELTRYKKLXXXXXXXXXFYLVSIANLQVQTPRXQ

SEQ ID NO: 3086 - protein, 43 aa, Artificial Sequence
  Non-cyclic GFR-binding peptide
  MOD_RES (2), (4), (37), (38): Xaa is C or S
  MOD_RES (15), (16), (17), (18), (19): Xaa is A or G
  MOD_RES (20), (21), (22), (23): Xaa is A or G or is absent
SXKXSRVIMYHYKLXXXXXXXXXKYLISIPSLAQPVXXPAASA

SEQ ID NO: 3087 - protein, 34 aa, Artificial Sequence
  Non-cyclic GFR-binding peptide
  MOD_RES (34), (34): Xaa is C or S
  MOD_RES (12), (13), (14), (15), (16): Xaa is A or G
  MOD_RES (17), (18), (19), (20): Xaa is A or G or is absent
SRVVMNYHYKLXXXXXXXXXKYLVSIPSLKTPAX

SEQ ID NO: 3088 - protein, 41 aa, Artificial Sequence
  Non-cyclic GFR-binding peptide
  MOD_RES (2), (35), (36): Xaa is C or S
  MOD_RES (13), (14), (15), (16), (17): Xaa is A or G
  MOD_RES (18), (19), (20), (21): Xaa is A or G or is absent
KXSKVIMRHKRLXXXXXXXXXYYLISTASLDQSVXXPSASA

SEQ ID NO: 3089 - protein, 35 aa, Artificial Sequence
  Non-cyclic GFR-binding peptide
  MOD_RES (1), (34), (35): Xaa is C or S
XEAVSMGERYKKLTPVGMDDFYLVSIANLKTPVXX

SEQ ID NO: 3090 - protein, 40 aa, Artificial Sequence
  Non-cyclic GFR-binding peptide
  MOD_RES (1), (3), (35), (36): Xaa is C or S
XGXAKVVMNRYKKLIVNNSSDFYLVSIANLKTPAXXAKPV

SEQ ID NO: 3091 - protein, 39 aa, Artificial Sequence
  Non-cyclic GFR-binding peptide
  MOD_RES (35), (35): Xaa is C or S
  MOD_RES (11), (12), (13), (14), (15): Xaa is A or G
  MOD_RES (16), (17), (18), (19): Xaa is A or G or is absent
HDELTQYNKLXXXXXXXXXLYLVSIASLQVQTPRXQVNR

SEQ ID NO: 3092 - protein, 35 aa, Artificial Sequence
  Non-cyclic GFR-binding peptide
LHDELTYHYKLFIPKKRVIEKYLVSIPSLQVQTPR

SEQ ID NO: 3093 - protein, 39 aa, Artificial Sequence
  Non-cyclic GFR-binding peptide
  MOD_RES (2), (35), (36): Xaa is C or S
  MOD_RES (13), (14), (15), (16), (17): Xaa is A or G
  MOD_RES (18), (19), (20), (21): Xaa is A or G or is absent
KXSKVIMYHYKLXXXXXXXXXKYLISIPSLDQSVXXPSA

SEQ ID NO: 3094 - protein, 35 aa, Artificial Sequence
  Non-cyclic GFR-binding peptide
  MOD_RES (2), (2): Xaa is C or S
  MOD_RES (14), (15), (16), (17), (18): Xaa is A or G
  MOD_RES (19), (20), (21), (22): Xaa is A or G or is absent
GXSRVVMNRHKRLXXXXXXXXXYYLVSTASLKTPA

SEQ ID NO: 3095 - protein, 41 aa, Artificial Sequence
  Non-cyclic GFR-binding peptide
  MOD_RES (2), (4), (35), (36): Xaa is C or S
SXKXSKVVMYHYKLVKPTRGVKYLISIPSLDQPVXXPSASA

SEQ ID NO: 3096 - protein, 36 aa, Artificial Sequence
  Non-cyclic GFR-binding peptide
  MOD_RES (2), (35), (36): Xaa is C or S
GXEAVSMGERHKRLTPVGMDDYYLVSTASLKTPVXX

SEQ ID NO: 3097 - protein, 43 aa, Artificial Sequence
  Non-cyclic GFR-binding peptide
  MOD_RES (2), (4), (37), (38): Xaa is C or S
  MOD_RES (15), (16), (17), (18), (19): Xaa is A or G
  MOD_RES (20), (21), (22), (23): Xaa is A or G or is absent
SXKXSKVVMQYNKLXXXXXXXXXLYLISIASLDQPVXXPSASA

SEQ ID NO: 3098 - protein, 36 aa, Artificial Sequence
  Non-cyclic GFR-binding peptide
  MOD_RES (31), (32): Xaa is C or S
EVVMERHKRLVVKDYEDYYLMSTASLETPVXXAKPI

SEQ ID NO: 3099 - protein, 42 aa, Artificial Sequence
  Non-cyclic GFR-binding peptide
  MOD_RES (2), (4), (36), (37): Xaa is C or S
RXGXGEVVMDRYKKLVVKENEDFYLMSIANLETPVXXAKPIK

SEQ ID NO: 3100 - protein, 39 aa, Artificial Sequence
  Non-cyclic GFR-binding peptide
  MOD_RES (1), (33), (34): Xaa is C or S
XGEVVMDYHYKLVVKENEDKYLMSIPSLETPVXXAKPIK

SEQ ID NO: 3101 - protein, 34 aa, Artificial Sequence
  Non-cyclic GFR-binding peptide
  MOD_RES (33), (34): Xaa is C or S
  MOD_RES (11), (12), (13), (14), (15): Xaa is A or G
  MOD_RES (16), (17), (18), (19): Xaa is A or G or is absent
SKVVMRHKRLXXXXXXXXXYYLISTASLDQPVXX

SEQ ID NO: 3102 - protein, 39 aa, Artificial Sequence
  Non-cyclic GFR-binding peptide
  MOD_RES (1), (3), (36), (37): Xaa is C or S
  MOD_RES (14), (15), (16), (17), (18): Xaa is A or G
  MOD_RES (19), (20), (21), (22): Xaa is A or G or is absent
XKXSKVVMYHYKLXXXXXXXXXKYLISIPSLDQPVXXPS

SEQ ID NO: 3103 - protein, 39 aa, Artificial Sequence
  Non-cyclic GFR-binding peptide
  MOD_RES (2), (4), (38): Xaa is C or S
  MOD_RES (16), (17), (18), (19), (20): Xaa is A or G
  MOD_RES (21), (22), (23), (24): Xaa is A or G or is absent
HXGXSRVVMNYHYKLXXXXXXXXXKYLVSIPSLKTPAXT

SEQ ID NO: 3104 - protein, 33 aa, Artificial Sequence
  Non-cyclic GFR-binding peptide
  MOD_RES (32), (33): Xaa is C or S
ARVVMNRHKRLIVNSSDDYYLVSTASLQTPAXX

SEQ ID NO: 3105 - protein, 42 aa, Artificial Sequence
  Non-cyclic GFR-binding peptide
  MOD_RES (2), (4), (38), (39): Xaa is C or S
  MOD_RES (16), (17), (18), (19), (20): Xaa is A or G
  MOD_RES (21), (22), (23), (24): Xaa is A or G or is absent
HXGXARVVMNQYNKLXXXXXXXXXLYLVSIASLQTPAXXPKP

SEQ ID NO: 3106 - protein, 42 aa, Artificial Sequence
  Non-cyclic GFR-binding peptide
  MOD_RES (2), (39): Xaa is C or S
  MOD_RES (15), (16), (17), (18), (19): Xaa is A or G
  MOD_RES (20), (21), (22), (23): Xaa is A or G or is absent
KXALHDELTRHKRLXXXXXXXXXYYLVSTASLQVQTPRXQVN

SEQ ID NO: 3107 - protein, 35 aa, Artificial Sequence
  Non-cyclic GFR-binding peptide
  MOD_RES (34), (35): Xaa is C or S
  MOD_RES (12), (13), (14), (15), (16): Xaa is A or G
  MOD_RES (17), (18), (19), (20): Xaa is A or G or is absent
AKVVMNYHYKLXXXXXXXXXKYLVSIPSLKTPAXX

SEQ ID NO: 3108 - protein, 33 aa, Artificial Sequence
  Non-cyclic GFR-binding peptide
  MOD_RES (1), (32), (33): Xaa is C or S
XSKVVMQYNKLVKPTRGVLYLISIASLDQPVXX

SEQ ID NO: 3109 - protein, 31 aa, Artificial Sequence
  Non-cyclic GFR-binding peptide
  MOD_RES (1), (1): Xaa is C or S
XSRVIMYHYKLVKPKRGVKYLISIPSLAQPV

SEQ ID NO: 3110 - protein, 38 aa, Artificial Sequence
  Non-cyclic GFR-binding peptide
  MOD_RES (1), (32), (33): Xaa is C or S
XSKVIMRHKRLIKPTKGIYYLISTASLDQSVXXPSASA

SEQ ID NO: 3111 - protein, 33 aa, Artificial Sequence
  Non-cyclic GFR-binding peptide
  MOD_RES (33), (33): Xaa is C or S
EAVSMGEQYNKLTPVGMDDLYLVSIASLKTPVX

SEQ ID NO: 3112 - protein, 36 aa, Artificial Sequence
  Non-cyclic GFR-binding peptide
  MOD_RES (1), (3), (34), (35): Xaa is C or S
XKXSKVIMRHKRLIKPTKGIYYLISTASLDQSVXXP

SEQ ID NO: 3113 - protein, 41 aa, Artificial Sequence
  Non-cyclic GFR-binding peptide
  MOD_RES (2), (35), (36): Xaa is C or S
  MOD_RES (13), (14), (15), (16), (17): Xaa is A or G
  MOD_RES (18), (19), (20), (21): Xaa is A or G or is absent
KXSRVIMRHKRLXXXXXXXXXYYLISTASLAQPVXXPAASA

SEQ ID NO: 3114 - protein, 40 aa, Artificial Sequence
  Non-cyclic GFR-binding peptide
  MOD_RES (2), (4), (38), (39): Xaa is C or S
  MOD_RES (16), (17), (18), (19), (20): Xaa is A or G
  MOD_RES (21), (22), (23), (24): Xaa is A or G or is absent
RXGXGEVVMEYHYKLXXXXXXXXXKYLMSIPSLETPVXXA

SEQ ID NO: 3115 - protein, 33 aa, Artificial Sequence
  Non-cyclic GFR-binding peptide
  MOD_RES (31), (32): Xaa is C or S
SKVVMQYNKLVKPTRGVLYLISIASLDQPVXXP

SEQ ID NO: 3116 - protein, 34 aa, Artificial Sequence
  Non-cyclic GFR-binding peptide
  MOD_RES (2), (33), (34): Xaa is C or S
KXSRVIMRHKRLVKPKRGVYYLISTASLAQPVXX

SEQ ID NO: 3117 - protein, 33 aa, Artificial Sequence
  Non-cyclic GFR-binding peptide
  MOD_RES (31), (32): Xaa is C or S
SRVIMRYKKLVKPKRGVFYLISIANLAQPVXXP

SEQ ID NO: 3118 - protein, 36 aa, Artificial Sequence
  Non-cyclic GFR-binding peptide
  MOD_RES (34), (35): Xaa is C or S
  MOD_RES (12), (13), (14), (15), (16): Xaa is A or G
  MOD_RES (17), (18), (19), (20): Xaa is A or G or is absent
SRVVMNRHKRLXXXXXXXXXYYLVSTASLKTPAXXP

SEQ ID NO: 3119 - protein, 43 aa, Artificial Sequence
  Non-cyclic GFR-binding peptide
  MOD_RES (2), (4), (41): Xaa is C or S
  MOD_RES (17), (18), (19), (20), (21): Xaa is A or G
  MOD_RES (22), (23), (24), (25): Xaa is A or G or is absent
EXKXALHDELTQYNKLXXXXXXXXXLYLVSIASLQVQTPRXQV

SEQ ID NO: 3120 - protein, 32 aa, Artificial Sequence
  Non-cyclic GFR-binding peptide
  MOD_RES (1), (1): Xaa is C or S
XAKVVMNYHYKLIVNNSSDKYLVSIPSLKTPA

SEQ ID NO: 3121 - protein, 41 aa, Artificial Sequence
  Non-cyclic GFR-binding peptide
  MOD_RES (1), (3), (37), (38): Xaa is C or S
  MOD_RES (15), (16), (17), (18), (19): Xaa is A or G
  MOD_RES (20), (21), (22), (23): Xaa is A or G or is absent
XGXGEVVMDYHYKLXXXXXXXXXKYLMSIPSLETPVXXAKP

SEQ ID NO: 3122 - protein, 32 aa, Artificial Sequence
  Non-cyclic GFR-binding peptide
  MOD_RES (2), (2): Xaa is C or S
KXSRVIMQYNKLVKPKRGVLYLISIASLAQPV

SEQ ID NO: 3123 - protein, 35 aa, Artificial Sequence
  Non-cyclic GFR-binding peptide
  MOD_RES (1), (35): Xaa is C or S
  MOD_RES (13), (14), (15), (16), (17): Xaa is A or G
  MOD_RES (18), (19), (20), (21): Xaa is A or G or is absent
XAKVVMNRYKKLXXXXXXXXXFYLVSIANLKTPAX

SEQ ID NO: 3124 - protein, 37 aa, Artificial Sequence
  Non-cyclic GFR-binding peptide
  MOD_RES (2), (4), (37): Xaa is C or S
  MOD_RES (15), (16), (17), (18), (19): Xaa is A or G
  MOD_RES (20), (21), (22), (23): Xaa is A or G or is absent
SXKXSRVIMYHYKLXXXXXXXXXKYLISIPSLAQPVX

SEQ ID NO: 3125 - protein, 39 aa, Artificial Sequence
  Non-cyclic GFR-binding peptide
  MOD_RES (1), (3), (36), (37): Xaa is C or S
  MOD_RES (14), (15), (16), (17), (18): Xaa is A or G
  MOD_RES (19), (20), (21), (22): Xaa is A or G or is absent
XKXSRVIMQYNKLXXXXXXXXXLYLISIASLAQPVXXPA

SEQ ID NO: 3126 - protein, 36 aa, Artificial Sequence
  Non-cyclic GFR-binding peptide
  MOD_RES (2), (4), (36): Xaa is C or S
HXGXARVVMNQYNKLIVNSSDDLYLVSIASLQTPAX

SEQ ID NO: 3127 - protein, 32 aa, Artificial Sequence
  Non-cyclic GFR-binding peptide
  MOD_RES (2), (2): Xaa is C or S
KXSKVIMRHKRLIKPTKGIYYLISTASLDQSV

SEQ ID NO: 3128 - protein, 36 aa, Artificial Sequence
  Non-cyclic GFR-binding peptide
  MOD_RES (1), (33), (34): Xaa is C or S
XAKVVMNYHYKLIVNNSSDKYLVSIPSLKTPAXXAK

SEQ ID NO: 3129 - protein, 32 aa, Artificial Sequence
  Non-cyclic GFR-binding peptide
  MOD_RES (11), (12), (13), (14), (15): Xaa is A or G
  MOD_RES (16), (17), (18), (19): Xaa is A or G or is absent
RVVMNQYNKLXXXXXXXXXLYLVSIASLQTPA

SEQ ID NO: 3130 - protein, 37 aa, Artificial Sequence
  Non-cyclic GFR-binding peptide
  MOD_RES (35), (35): Xaa is C or S
  MOD_RES (11), (12), (13), (14), (15): Xaa is A or G
  MOD_RES (16), (17), (18), (19): Xaa is A or G or is absent
HDELTRHKRLXXXXXXXXXYYLVSTASLQVQTPRXQV

SEQ ID NO: 3131 - protein, 30 aa, Artificial Sequence
  Non-cyclic GFR-binding peptide
EVVMERHKRLVVKDYEDYYLMSTASLETPV

SEQ ID NO: 3132 - protein, 42 aa, Artificial Sequence
  Non-cyclic GFR-binding peptide
  MOD_RES (2), (4), (36), (37): Xaa is C or S
HXGXSRVVMNQYNKLIVNSSDDLYLVSIASLKTPAXXPKPVY

SEQ ID NO: 3133 - protein, 35 aa, Artificial Sequence
  Non-cyclic GFR-binding peptide
  MOD_RES (2), (4): Xaa is C or S
RXGXGEVVMDYHYKLVVKENEDKYLMSIPSLETPV

SEQ ID NO: 3134 - protein, 42 aa, Artificial Sequence
  Non-cyclic GFR-binding peptide
  MOD_RES (2), (4), (36), (37): Xaa is C or S
RXGXGEVVMERYKKLVVKDYEDFYLMSIANLETPVXXAKPIS

SEQ ID NO: 3135 - protein, 37 aa, Artificial Sequence
  Non-cyclic GFR-binding peptide
  MOD_RES (33), (33): Xaa is C or S
  MOD_RES (11), (12), (13), (14), (15): Xaa is A or G
  MOD_RES (16), (17), (18), (19): Xaa is A or G or is absent
RVVMNYHYKLXXXXXXXXXKYLVSIPSLKTPAXTPKT

SEQ ID NO: 3136 - protein, 35 aa, Artificial Sequence
  Non-cyclic GFR-binding peptide
  MOD_RES (33), (34): Xaa is C or S
  MOD_RES (11), (12), (13), (14), (15): Xaa is A or G
  MOD_RES (16), (17), (18), (19): Xaa is A or G or is absent
RVVMNQYNKLXXXXXXXXXLYLVSIASLQTPAXXP

SEQ ID NO: 3137 - protein, 39 aa, Artificial Sequence
  Non-cyclic GFR-binding peptide
  MOD_RES (1), (33), (34): Xaa is C or S
XGEVVMEYHYKLVVKDYEDKYLMSIPSLETPVXXAKPIS

SEQ ID NO: 3138 - protein, 41 aa, Artificial Sequence
  Non-cyclic GFR-binding peptide
  MOD_RES (2), (35), (36): Xaa is C or S
GXEAVSMGERYKKLTPVGMDDFYLVSIANLKTPVXXAKGVK

SEQ ID NO: 3139 - protein, 40 aa, Artificial Sequence
  Non-cyclic GFR-binding peptide
  MOD_RES (2), (36), (37): Xaa is C or S
  MOD_RES (14), (15), (16), (17), (18): Xaa is A or G
  MOD_RES (19), (20), (21), (22): Xaa is A or G or is absent
GXARVVMNRHKRLXXXXXXXXXYYLVSTASLQTPAXXPKP

SEQ ID NO: 3140 - protein, 33 aa, Artificial Sequence
  Non-cyclic GFR-binding peptide
  MOD_RES (2), (33): Xaa is C or S
KXSRVIMRYKKLVKPKRGVFYLISIANLAQPVX

SEQ ID NO: 3141 - protein, 41 aa, Artificial Sequence
  Non-cyclic GFR-binding peptide
  MOD_RES (2), (35), (36): Xaa is C or S
  MOD_RES (13), (14), (15), (16), (17): Xaa is A or G
  MOD_RES (18), (19), (20), (21): Xaa is A or G or is absent
KXSKVVMRHKRLXXXXXXXXXYYLISTASLDQPVXXPSASA

SEQ ID NO: 3142 - protein, 34 aa, Artificial Sequence
  Non-cyclic GFR-binding peptide
  MOD_RES (31), (32): Xaa is C or S
SKVVMRHKRLVKPTRGVYYLISTASLDQPVXXPS

SEQ ID NO: 3143 - protein, 37 aa, Artificial Sequence
  Non-cyclic GFR-binding peptide
  MOD_RES (1), (3), (36), (37): Xaa is C or S
  MOD_RES (14), (15), (16), (17), (18): Xaa is A or G
  MOD_RES (19), (20), (21), (22): Xaa is A or G or is absent
XKXSRVIMRHKRLXXXXXXXXXYYLISTASLAQPVXX

SEQ ID NO: 3144 - protein, 35 aa, Artificial Sequence
  Non-cyclic GFR-binding peptide
  MOD_RES (1), (3), (34), (35): Xaa is C or S
XKXSRVIMYHYKLVKPKRGVKYLISIPSLAQPVXX

SEQ ID NO: 3145 - protein, 36 aa, Artificial Sequence
  Non-cyclic GFR-binding peptide
  MOD_RES (2), (4), (36): Xaa is C or S
HXGXSRVVMNQYNKLIVNSSDDLYLVSIASLKTPAX

SEQ ID NO: 3146 - protein, 37 aa, Artificial Sequence
  Non-cyclic GFR-binding peptide
  MOD_RES (1), (33), (34): Xaa is C or S
XARVVMNRHKRLIVNSSDDYYLVSTASLQTPAXXPKP

SEQ ID NO: 3147 - protein, 42 aa, Artificial Sequence
  Non-cyclic GFR-binding peptide
  MOD_RES (2), (36), (37): Xaa is C or S
  MOD_RES (14), (15), (16), (17), (18): Xaa is A or G
  MOD_RES (19), (20), (21), (22): Xaa is A or G or is absent
GXARVVMNRHKRLXXXXXXXXXYYLVSTASLQTPAXXPKPVT

SEQ ID NO: 3148 - protein, 32 aa, Artificial Sequence
  Non-cyclic GFR-binding peptide
  MOD_RES (1), (1): Xaa is C or S
XSRVVMNYHYKLIVNSSDDKYLVSIPSLKTPA

SEQ ID NO: 3149 - protein, 41 aa, Artificial Sequence
  Non-cyclic GFR-binding peptide
  MOD_RES (1), (3), (36), (37): Xaa is C or S
  MOD_RES (14), (15), (16), (17), (18): Xaa is A or G
  MOD_RES (19), (20), (21), (22): Xaa is A or G or is absent
XKXSKVIMRYKKLXXXXXXXXXFYLISIANLDQSVXXPSAS

SEQ ID NO: 3150 - protein, 42 aa, Artificial Sequence
  Non-cyclic GFR-binding peptide
  MOD_RES (2), (4), (38), (39): Xaa is C or S
  MOD_RES (16), (17), (18), (19), (20): Xaa is A or G
  MOD_RES (21), (22), (23), (24): Xaa is A or G or is absent
RXGXGEVVMDRHKRLXXXXXXXXXYYLMSTASLETPVXXAKP

SEQ ID NO: 3151 - protein, 33 aa, Artificial Sequence
  Non-cyclic GFR-binding peptide
  MOD_RES (2), (33): Xaa is C or S
KXSRVIMYHYKLVKPKRGVKYLISIPSLAQPVX

SEQ ID NO: 3152 - protein, 35 aa, Artificial Sequence
  Non-cyclic GFR-binding peptide
  MOD_RES (1), (1): Xaa is C or S
XALHDELTQYNKLFIPKKRVIELYLVSIASLQVQT

SEQ ID NO: 3153 - protein, 36 aa, Artificial Sequence
  Non-cyclic GFR-binding peptide
  MOD_RES (1), (35), (36): Xaa is C or S
  MOD_RES (13), (14), (15), (16), (17): Xaa is A or G
  MOD_RES (18), (19), (20), (21): Xaa is A or G or is absent
XAKVVMNYHYKLXXXXXXXXXKYLVSIPSLKTPAXX

SEQ ID NO: 3154 - protein, 39 aa, Artificial Sequence
  Non-cyclic GFR-binding peptide
  MOD_RES (1), (36), (37): Xaa is C or S
  MOD_RES (14), (15), (16), (17), (18): Xaa is A or G
  MOD_RES (19), (20), (21), (22): Xaa is A or G or is absent
XEAVSMGEQYNKLXXXXXXXXXLYLVSIASLKTPVXXAK

SEQ ID NO: 3155 - protein, 41 aa, Artificial Sequence
  Non-cyclic GFR-binding peptide
  MOD_RES (1), (3), (37), (38): Xaa is C or S
  MOD_RES (15), (16), (17), (18), (19): Xaa is A or G
  MOD_RES (20), (21), (22), (23): Xaa is A or G or is absent
XGXSRVVMNRHKRLXXXXXXXXXYYLVSTASLKTPAXXPKP

SEQ ID NO: 3156 - protein, 36 aa, Artificial Sequence
  Non-cyclic GFR-binding peptide
  MOD_RES (2), (34), (35): Xaa is C or S
GXARVVMNQYNKLIVNSSDDLYLVSIASLQTPAXXP

SEQ ID NO: 3157 - protein, 37 aa, Artificial Sequence
  Non-cyclic GFR-binding peptide
  MOD_RES (31), (31): Xaa is C or S
RVVMNQYNKLIVNSSDDLYLVSIASLKTPAXTPKTVH

SEQ ID NO: 3158 - protein, 43 aa, Artificial Sequence
  Non-cyclic GFR-binding peptide
  MOD_RES (2), (39): Xaa is C or S
KXALHDELTQYNKLFIPKKRVIELYLVSIASLQVQTPRXQVNR

SEQ ID NO: 3159 - protein, 32 aa, Artificial Sequence
  Non-cyclic GFR-binding peptide
  MOD_RES (11), (12), (13), (14), (15): Xaa is A or G
  MOD_RES (16), (17), (18), (19): Xaa is A or G or is absent
EVVMDRHKRLXXXXXXXXXYYLMSTASLETPV

SEQ ID NO: 3160 - protein, 31 aa, Artificial Sequence
  Non-cyclic GFR-binding peptide
  MOD_RES (31), (31): Xaa is C or S
EVVMEYHYKLVVKDYEDKYLMSIPSLETPVX

SEQ ID NO: 3161 - protein, 36 aa, Artificial Sequence
  Non-cyclic GFR-binding peptide
  MOD_RES (1), (3), (34), (35): Xaa is C or S
XKXSKVVMRHKRLVKPTRGVYYLISTASLDQPVXXP

SEQ ID NO: 3162 - protein, 41 aa, Artificial Sequence
  Non-cyclic GFR-binding peptide
  MOD_RES (35), (36): Xaa is C or S
  MOD_RES (13), (14), (15), (16), (17): Xaa is A or G
  MOD_RES (18), (19), (20), (21): Xaa is A or G or is absent
EAVSMGEQYNKLXXXXXXXXXLYLVSIASLKTPVXXAKGVK

SEQ ID NO: 3163 - protein, 41 aa, Artificial Sequence
  Non-cyclic GFR-binding peptide
  MOD_RES (2), (4), (38), (39): Xaa is C or S
  MOD_RES (16), (17), (18), (19), (20): Xaa is A or G
  MOD_RES (21), (22), (23), (24): Xaa is A or G or is absent
HXGXARVVMNYHYKLXXXXXXXXXKYLVSIPSLQTPAXXPK

SEQ ID NO: 3164 - protein, 34 aa, Artificial Sequence
  Non-cyclic GFR-binding peptide
  MOD_RES (1), (34): Xaa is C or S
XEAVSMGERHKRLTPVGMDDYYLVSTASLKTPVX

SEQ ID NO: 3165 - protein, 38 aa, Artificial Sequence
  Non-cyclic GFR-binding peptide
  MOD_RES (1), (3): Xaa is C or S
XKXALHDELTRHKRLFIPKKRVIEYYLVSTASLQVQTP

SEQ ID NO: 3166 - protein, 37 aa, Artificial Sequence
  Non-cyclic GFR-binding peptide
  MOD_RES (31), (32): Xaa is C or S
RVVMNRHKRLIVNSSDDYYLVSTASLKTPAXXPKPVY

SEQ ID NO: 3167 - protein, 40 aa, Artificial Sequence
  Non-cyclic GFR-binding peptide
  MOD_RES (1), (35), (36): Xaa is C or S
  MOD_RES (13), (14), (15), (16), (17): Xaa is A or G
  MOD_RES (18), (19), (20), (21): Xaa is A or G or is absent
XSRVVMNYHYKLXXXXXXXXXKYLVSIPSLKTPAXXPKPV

SEQ ID NO: 3168 - protein, 38 aa, Artificial Sequence
  Non-cyclic GFR-binding peptide
  MOD_RES (2), (4): Xaa is C or S
EXKXALHDELTRYKKLFIPKKRVIEFYLVSIANLQVQT

SEQ ID NO: 3169 - protein, 43 aa, Artificial Sequence
  Non-cyclic GFR-binding peptide
  MOD_RES (1), (3), (37), (38): Xaa is C or S
  MOD_RES (15), (16), (17), (18), (19): Xaa is A or G
  MOD_RES (20), (21), (22), (23): Xaa is A or G or is absent
XGXARVVMNRHKRLXXXXXXXXXYYLVSTASLQTPAXXPKPVT

SEQ ID NO: 3170 - protein, 37 aa, Artificial Sequence
  Non-cyclic GFR-binding peptide
  MOD_RES (32), (33): Xaa is C or S
AKVVMNYHYKLIVNNSSDKYLVSIPSLKTPAXXAKPV

SEQ ID NO: 3171 - protein, 34 aa, Artificial Sequence
  Non-cyclic GFR-binding peptide
  MOD_RES (2), (2): Xaa is C or S
GXEAVSMGERYKKLTPVGMDDFYLVSIANLKTPV

SEQ ID NO: 3172 - protein, 42 aa, Artificial Sequence
  Non-cyclic GFR-binding peptide
  MOD_RES (2), (4), (36): Xaa is C or S
HXGXSRVVMNYHYKLIVNSSDDKYLVSIPSLKTPAXTPKTVH

SEQ ID NO: 3173 - protein, 43 aa, Artificial Sequence
  Non-cyclic GFR-binding peptide
  MOD_RES (1), (3), (40): Xaa is C or S
  MOD_RES (16), (17), (18), (19), (20): Xaa is A or G
  MOD_RES (21), (22), (23), (24): Xaa is A or G or is absent
XKXALHDELTRYKKLXXXXXXXXXFYLVSIANLQVQTPRXQVN

SEQ ID NO: 3174 - protein, 33 aa, Artificial Sequence
  Non-cyclic GFR-binding peptide
  MOD_RES (1), (1): Xaa is C or S
XEAVSMGERHKRLTPVGMDDYYLVSTASLKTPV

SEQ ID NO: 3175 - protein, 30 aa, Artificial Sequence
  Non-cyclic GFR-binding peptide
SKVIMRHKRLIKPTKGIYYLISTASLDQSV

SEQ ID NO: 3176 - protein, 40 aa, Artificial Sequence
  Non-cyclic GFR-binding peptide
  MOD_RES (1), (3), (37), (38): Xaa is C or S
  MOD_RES (15), (16), (17), (18), (19): Xaa is A or G
  MOD_RES (20), (21), (22), (23): Xaa is A or G or is absent
XGXGEVVMDRYKKLXXXXXXXXXFYLMSIANLETPVXXAK

SEQ ID NO: 3177 - protein, 37 aa, Artificial Sequence
  Non-cyclic GFR-binding peptide
  MOD_RES (1), (3), (37): Xaa is C or S
  MOD_RES (15), (16), (17), (18), (19): Xaa is A or G
  MOD_RES (20), (21), (22), (23): Xaa is A or G or is absent
XGXSRVVMNQYNKLXXXXXXXXXLYLVSIASLKTPAX

SEQ ID NO: 3178 - protein, 36 aa, Artificial Sequence
  Non-cyclic GFR-binding peptide
  MOD_RES (2), (4), (36): Xaa is C or S
HXGXAKVVMNQYNKLIVNNSSDLYLVSIASLKTPAX

SEQ ID NO: 3179 - protein, 38 aa, Artificial Sequence
  Non-cyclic GFR-binding peptide
  MOD_RES (2), (36), (37): Xaa is C or S
  MOD_RES (14), (15), (16), (17), (18): Xaa is A or G
  MOD_RES (19), (20), (21), (22): Xaa is A or G or is absent
GXGEVVMEYHYKLXXXXXXXXXKYLMSIPSLETPVXXA

SEQ ID NO: 3180 - protein, 40 aa, Artificial Sequence
  Non-cyclic GFR-binding peptide
  MOD_RES (1), (38): Xaa is C or S
XALHDELTQYNKLFIPKKRVIELYLVSIASLQVQTPRXQV

SEQ ID NO: 3181 - protein, 39 aa, Artificial Sequence
  Non-cyclic GFR-binding peptide
  MOD_RES (33), (34): Xaa is C or S
EAVSMGEQYNKLTPVGMDDLYLVSIASLKTPVXXAKGVK

SEQ ID NO: 3182 - protein, 40 aa, Artificial Sequence
  Non-cyclic GFR-binding peptide
  MOD_RES (1), (3), (36), (37): Xaa is C or S
  MOD_RES (14), (15), (16), (17), (18): Xaa is A or G
  MOD_RES (19), (20), (21), (22): Xaa is A or G or is absent
XKXSRVIMYHYKLXXXXXXXXXKYLISIPSLAQPVXXPAA

SEQ ID NO: 3183 - protein, 38 aa, Artificial Sequence
  Non-cyclic GFR-binding peptide
  MOD_RES (34), (34): Xaa is C or S
  MOD_RES (12), (13), (14), (15), (16): Xaa is A or G
  MOD_RES (17), (18), (19), (20): Xaa is A or G or is absent
SRVVMNYHYKLXXXXXXXXXKYLVSIPSLKTPAXTPKT

SEQ ID NO: 3184 - protein, 35 aa, Artificial Sequence
  Non-cyclic GFR-binding peptide
  MOD_RES (2), (4): Xaa is C or S
RXGXGEVVMEYHYKLVVKDYEDKYLMSIPSLETPV

SEQ ID NO: 3185 - protein, 39 aa, Artificial Sequence
  Non-cyclic GFR-binding peptide
  MOD_RES (1), (33), (34): Xaa is C or S
XGEVVMERYKKLVVKDYEDFYLMSIANLETPVXXAKPIS

SEQ ID NO: 3186 - protein, 40 aa, Artificial Sequence
  Non-cyclic GFR-binding peptide
  MOD_RES (2), (4), (37), (38): Xaa is C or S
  MOD_RES (15), (16), (17), (18), (19): Xaa is A or G
  MOD_RES (20), (21), (22), (23): Xaa is A or G or is absent
SXKXSKVIMYHYKLXXXXXXXXXKYLISIPSLDQSVXXPS

SEQ ID NO: 3187 - protein, 38 aa, Artificial Sequence
  Non-cyclic GFR-binding peptide
  MOD_RES (1), (3), (36), (37): Xaa is C or S
  MOD_RES (14), (15), (16), (17), (18): Xaa is A or G
  MOD_RES (19), (20), (21), (22): Xaa is A or G or is absent
XKXSKVVMQYNKLXXXXXXXXXLYLISIASLDQPVXXP

SEQ ID NO: 3188 - protein, 41 aa, Artificial Sequence
  Non-cyclic GFR-binding peptide
  MOD_RES (2), (4), (35), (36): Xaa is C or S
SXKXSKVIMRHKRLIKPTKGIYYLISTASLDQSVXXPSASA

SEQ ID NO: 3189 - protein, 39 aa, Artificial Sequence
  Non-cyclic GFR-binding peptide
  MOD_RES (2), (33), (34): Xaa is C or S
KXSRVIMRHKRLVKPKRGVYYLISTASLAQPVXXPAASA

SEQ ID NO: 3190 - protein, 43 aa, Artificial Sequence
  Non-cyclic GFR-binding peptide
  MOD_RES (2), (4), (41): Xaa is C or S
  MOD_RES (17), (18), (19), (20), (21): Xaa is A or G
  MOD_RES (22), (23), (24), (25): Xaa is A or G or is absent
EXKXALHDELTYHYKLXXXXXXXXXKYLVSIPSLQVQTPRXQV

SEQ ID NO: 3191 - protein, 41 aa, Artificial Sequence
  Non-cyclic GFR-binding peptide
  MOD_RES (35), (36): Xaa is C or S
  MOD_RES (13), (14), (15), (16), (17): Xaa is A or G
  MOD_RES (18), (19), (20), (21): Xaa is A or G or is absent
EAVSMGERHKRLXXXXXXXXXYYLVSTASLKTPVXXAKGVK

SEQ ID NO: 3192 - protein, 36 aa, Artificial Sequence
  Non-cyclic GFR-binding peptide
  MOD_RES (2), (36): Xaa is C or S
  MOD_RES (14), (15), (16), (17), (18): Xaa is A or G
  MOD_RES (19), (20), (21), (22): Xaa is A or G or is absent
GXARVVMNRHKRLXXXXXXXXXYYLVSTASLQTPAX

SEQ ID NO: 3193 - protein, 41 aa, Artificial Sequence
  Non-cyclic GFR-binding peptide
  MOD_RES (2), (4), (38): Xaa is C or S
  MOD_RES (16), (17), (18), (19), (20): Xaa is A or G
  MOD_RES (21), (22), (23), (24): Xaa is A or G or is absent
HXGXSRVVMNRHKRLXXXXXXXXXYYLVSTASLKTPAXTPK

SEQ ID NO: 3194 - protein, 37 aa, Artificial Sequence
  Non-cyclic GFR-binding peptide
  MOD_RES (1), (32), (33): Xaa is C or S
XSKVIMQYNKLIKPTKGILYLISIASLDQSVXXPSAS

SEQ ID NO: 3195 - protein, 37 aa, Artificial Sequence
  Non-cyclic GFR-binding peptide
  MOD_RES (2), (4), (37): Xaa is C or S
  MOD_RES (15), (16), (17), (18), (19): Xaa is A or G
  MOD_RES (20), (21), (22), (23): Xaa is A or G or is absent
SXKXSKVVMYHYKLXXXXXXXXXKYLISIPSLDQPVX

SEQ ID NO: 3196 - protein, 37 aa, Artificial Sequence
  Non-cyclic GFR-binding peptide
  MOD_RES (2), (35), (36): Xaa is C or S
  MOD_RES (13), (14), (15), (16), (17): Xaa is A or G
  MOD_RES (18), (19), (20), (21): Xaa is A or G or is absent
KXSKVVMRYKKLXXXXXXXXXFYLISIANLDQPVXXP

SEQ ID NO: 3197 - protein, 37 aa, Artificial Sequence
  Non-cyclic GFR-binding peptide
  MOD_RES (1), (32), (33): Xaa is C or S
XSKVIMRYKKLIKPTKGIFYLISIANLDQSVXXPSAS

SEQ ID NO: 3198 - protein, 40 aa, Artificial Sequence
  Non-cyclic GFR-binding peptide
  MOD_RES (2), (4), (36), (37): Xaa is C or S
RXGXGEVVMDRHKRLVVKENEDYYLMSTASLETPVXXAKP

SEQ ID NO: 3199 - protein, 41 aa, Artificial Sequence
  Non-cyclic GFR-binding peptide
  MOD_RES (1), (35), (36): Xaa is C or S
  MOD_RES (13), (14), (15), (16), (17): Xaa is A or G
  MOD_RES (18), (19), (20), (21): Xaa is A or G or is absent
XSRVVMNQYNKLXXXXXXXXXLYLVSIASLKTPAXXPKPVY

SEQ ID NO: 3200 - protein, 40 aa, Artificial Sequence
  Non-cyclic GFR-binding peptide
  MOD_RES (37), (37): Xaa is C or S
  MOD_RES (13), (14), (15), (16), (17): Xaa is A or G
  MOD_RES (18), (19), (20), (21): Xaa is A or G or is absent
ALHDELTRHKRLXXXXXXXXXYYLVSTASLQVQTPRXQVN

SEQ ID NO: 3201 - protein, 40 aa, Artificial Sequence
  Non-cyclic GFR-binding peptide
  MOD_RES (1), (38): Xaa is C or S
XALHDELTRHKRLFIPKKRVIEYYLVSTASLQVQTPRXQV

SEQ ID NO: 3202 - protein, 36 aa, Artificial Sequence
  Non-cyclic GFR-binding peptide
  MOD_RES (2), (4): Xaa is C or S
  MOD_RES (15), (16), (17), (18), (19): Xaa is A or G
  MOD_RES (20), (21), (22), (23): Xaa is A or G or is absent
SXKXSRVIMQYNKLXXXXXXXXXLYLISIASLAQPV

SEQ ID NO: 3203 - protein, 35 aa, Artificial Sequence
  Non-cyclic GFR-binding peptide
  MOD_RES (1), (3), (34), (35): Xaa is C or S
XKXSKVIMRHKRLIKPTKGIYYLISTASLDQSVXX

SEQ ID NO: 3204 - protein, 37 aa, Artificial Sequence
  Non-cyclic GFR-binding peptide
  MOD_RES (2), (35), (36): Xaa is C or S
  MOD_RES (13), (14), (15), (16), (17): Xaa is A or G
  MOD_RES (18), (19), (20), (21): Xaa is A or G or is absent
KXSKVVMQYNKLXXXXXXXXXLYLISIASLDQPVXXP

SEQ ID NO: 3205 - protein, 40 aa, Artificial Sequence
  Non-cyclic GFR-binding peptide
  MOD_RES (34), (35): Xaa is C or S
  MOD_RES (12), (13), (14), (15), (16): Xaa is A or G
  MOD_RES (17), (18), (19), (20): Xaa is A or G or is absent
SRVVMNRHKRLXXXXXXXXXYYLVSTASLKTPAXXPKPVY

SEQ ID NO: 3206 - protein, 33 aa, Artificial Sequence
  Non-cyclic GFR-binding peptide
  MOD_RES (33), (33): Xaa is C or S
  MOD_RES (11), (12), (13), (14), (15): Xaa is A or G
  MOD_RES (16), (17), (18), (19): Xaa is A or G or is absent
SKVIMRHKRLXXXXXXXXXYYLISTASLDQSVX

SEQ ID NO: 3207 - protein, 36 aa, Artificial Sequence
  Non-cyclic GFR-binding peptide
  MOD_RES (2), (34), (35): Xaa is C or S
GXARVVMNYHYKLIVNSSDDKYLVSIPSLQTPAXXP

SEQ ID NO: 3208 - protein, 35 aa, Artificial Sequence
  Non-cyclic GFR-binding peptide
  MOD_RES (2), (4): Xaa is C or S
HXGXAKVVMNQYNKLIVNNSSDLYLVSIASLKTPA

SEQ ID NO: 3209 - protein, 38 aa, Artificial Sequence
  Non-cyclic GFR-binding peptide
  MOD_RES (2), (4), (37), (38): Xaa is C or S
  MOD_RES (15), (16), (17), (18), (19): Xaa is A or G
  MOD_RES (20), (21), (22), (23): Xaa is A or G or is absent
SXKXSKVIMYHYKLXXXXXXXXXKYLISIPSLDQSVXX

SEQ ID NO: 3210 - protein, 43 aa, Artificial Sequence
  Non-cyclic GFR-binding peptide
  MOD_RES (1), (3), (37), (38): Xaa is C or S
  MOD_RES (15), (16), (17), (18), (19): Xaa is A or G
  MOD_RES (20), (21), (22), (23): Xaa is A or G or is absent
XGXGEVVMDRYKKLXXXXXXXXXFYLMSIANLETPVXXAKPIK

SEQ ID NO: 3211 - protein, 31 aa, Artificial Sequence
  Non-cyclic GFR-binding peptide
  MOD_RES (31), (31): Xaa is C or S
SRVIMRHKRLVKPKRGVYYLISTASLAQPVX

SEQ ID NO: 3212 - protein, 36 aa, Artificial Sequence
  Non-cyclic GFR-binding peptide
  MOD_RES (1), (35), (36): Xaa is C or S
  MOD_RES (13), (14), (15), (16), (17): Xaa is A or G
  MOD_RES (18), (19), (20), (21): Xaa is A or G or is absent
XARVVMNQYNKLXXXXXXXXXLYLVSIASLQTPAXX

SEQ ID NO: 3213 - protein, 34 aa, Artificial Sequence
  Non-cyclic GFR-binding peptide
  MOD_RES (1), (32), (33): Xaa is C or S
XSRVIMYHYKLVKPKRGVKYLISIPSLAQPVXXP

SEQ ID NO: 3214 - protein, 40 aa, Artificial Sequence
  Non-cyclic GFR-binding peptide
  MOD_RES (37), (37): Xaa is C or S
  MOD_RES (13), (14), (15), (16), (17): Xaa is A or G
  MOD_RES (18), (19), (20), (21): Xaa is A or G or is absent
ALHDELTQYNKLXXXXXXXXXLYLVSIASLQVQTPRXQVN

SEQ ID NO: 3215 - protein, 42 aa, Artificial Sequence
  Non-cyclic GFR-binding peptide
  MOD_RES (2), (4), (37), (38): Xaa is C or S
  MOD_RES (15), (16), (17), (18), (19): Xaa is A or G
  MOD_RES (20), (21), (22), (23): Xaa is A or G or is absent
SXKXSKVVMYHYKLXXXXXXXXXKYLISIPSLDQPVXXPSAS

SEQ ID NO: 3216 - protein, 31 aa, Artificial Sequence
  Non-cyclic GFR-binding peptide
AKVVMNYHYKLIVNNSSDKYLVSIPSLKTPA

SEQ ID NO: 3217 - protein, 33 aa, Artificial Sequence
  Non-cyclic GFR-binding peptide
  MOD_RES (31), (32): Xaa is C or S
KVVMNRYKKLIVNNSSDFYLVSIANLKTPAXXA

SEQ ID NO: 3218 - protein, 33 aa, Artificial Sequence
  Non-cyclic GFR-binding peptide
HDELTQYNKLFIPKKRVIELYLVSIASLQVQTP

SEQ ID NO: 3219 - protein, 37 aa, Artificial Sequence
  Non-cyclic GFR-binding peptide
  MOD_RES (2), (4), (36), (37): Xaa is C or S
RXGXGEVVMERYKKLVVKDYEDFYLMSIANLETPVXX

SEQ ID NO: 3220 - protein, 37 aa, Artificial Sequence
  Non-cyclic GFR-binding peptide
  MOD_RES (2), (4), (36), (37): Xaa is C or S
HXGXARVVMNYHYKLIVNSSDDKYLVSIPSLQTPAXX

SEQ ID NO: 3221 - protein, 37 aa, Artificial Sequence
  Non-cyclic GFR-binding peptide
  MOD_RES (1), (3), (34), (35): Xaa is C or S
XKXSRVIMRYKKLVKPKRGVFYLISIANLAQPVXXPA

SEQ ID NO: 3222 - protein, 37 aa, Artificial Sequence
  Non-cyclic GFR-binding peptide
  MOD_RES (1), (3), (37): Xaa is C or S
  MOD_RES (15), (16), (17), (18), (19): Xaa is A or G
  MOD_RES (20), (21), (22), (23): Xaa is A or G or is absent
XGXARVVMNRHKRLXXXXXXXXXYYLVSTASLQTPAX

SEQ ID NO: 3223 - protein, 34 aa, Artificial Sequence
  Non-cyclic GFR-binding peptide
  MOD_RES (13), (14), (15), (16), (17): Xaa is A or G
  MOD_RES (18), (19), (20), (21): Xaa is A or G or is absent
ALHDELTRHKRLXXXXXXXXXYYLVSTASLQVQT

SEQ ID NO: 3224 - protein, 36 aa, Artificial Sequence
  Non-cyclic GFR-binding peptide
  MOD_RES (2), (33), (34): Xaa is C or S
KXSKVVMQYNKLVKPTRGVLYLISIASLDQPVXXPS

SEQ ID NO: 3225 - protein, 40 aa, Artificial Sequence
  Non-cyclic GFR-binding peptide
  MOD_RES (2), (34), (35): Xaa is C or S
GXGEVVMEYHYKLVVKDYEDKYLMSIPSLETPVXXAKPIS

SEQ ID NO: 3226 - protein, 37 aa, Artificial Sequence
  Non-cyclic GFR-binding peptide
  MOD_RES (1), (33), (34): Xaa is C or S
XGEVVMERHKRLVVKDYEDYYLMSTASLETPVXXAKP

SEQ ID NO: 3227 - protein, 36 aa, Artificial Sequence
  Non-cyclic GFR-binding peptide
  MOD_RES (1), (3), (34), (35): Xaa is C or S
XKXSKVVMQYNKLVKPTRGVLYLISIASLDQPVXXP

SEQ ID NO: 3228 - protein, 36 aa, Artificial Sequence
  Non-cyclic GFR-binding peptide
  MOD_RES (1), (35), (36): Xaa is C or S
  MOD_RES (13), (14), (15), (16), (17): Xaa is A or G
  MOD_RES (18), (19), (20), (21): Xaa is A or G or is absent
XGEVVMEYHYKLXXXXXXXXXKYLMSIPSLETPVXX

SEQ ID NO: 3229 - protein, 38 aa, Artificial Sequence
  Non-cyclic GFR-binding peptide
  MOD_RES (2), (4), (38): Xaa is C or S
  MOD_RES (16), (17), (18), (19), (20): Xaa is A or G
  MOD_RES (21), (22), (23), (24): Xaa is A or G or is absent
HXGXAKVVMNQYNKLXXXXXXXXXLYLVSIASLKTPAX

SEQ ID NO: 3230 - protein, 34 aa, Artificial Sequence
  Non-cyclic GFR-binding peptide
  MOD_RES (13), (14), (15), (16), (17): Xaa is A or G
  MOD_RES (18), (19), (20), (21): Xaa is A or G or is absent
ALHDELTQYNKLXXXXXXXXXLYLVSIASLQVQT

SEQ ID NO: 3231 - protein, 40 aa, Artificial Sequence
  Non-cyclic GFR-binding peptide
  MOD_RES (1), (3), (40): Xaa is C or S
XKXALHDELTRHKRLFIPKKRVIEYYLVSTASLQVQTPRX

SEQ ID NO: 3232 - protein, 37 aa, Artificial Sequence
  Non-cyclic GFR-binding peptide
  MOD_RES (31), (32): Xaa is C or S
SRVIMRHKRLVKPKRGVYYLISTASLAQPVXXPAASA

SEQ ID NO: 3233 - protein, 36 aa, Artificial Sequence
  Non-cyclic GFR-binding peptide
  MOD_RES (2), (4), (36): Xaa is C or S
RXGXGEVVMDRYKKLVVKENEDFYLMSIANLETPVX

SEQ ID NO: 3234 - protein, 32 aa, Artificial Sequence
  Non-cyclic GFR-binding peptide
  MOD_RES (11), (12), (13), (14), (15): Xaa is A or G
  MOD_RES (16), (17), (18), (19): Xaa is A or G or is absent
SRVIMQYNKLXXXXXXXXXLYLISIASLAQPV

SEQ ID NO: 3235 - protein, 36 aa, Artificial Sequence
  Non-cyclic GFR-binding peptide
  MOD_RES (31), (32): Xaa is C or S
SKVVMRHKRLVKPTRGVYYLISTASLDQPVXXPSAS

SEQ ID NO: 3236 - protein, 35 aa, Artificial Sequence
  Non-cyclic GFR-binding peptide
LHDELTQYNKLFIPKKRVIELYLVSIASLQVQTPR

SEQ ID NO: 3237 - protein, 36 aa, Artificial Sequence
  Non-cyclic GFR-binding peptide
  MOD_RES (33), (34): Xaa is C or S
EAVSMGEQYNKLTPVGMDDLYLVSIASLKTPVXXAK

SEQ ID NO: 3238 - protein, 41 aa, Artificial Sequence
  Non-cyclic GFR-binding peptide
  MOD_RES (2), (4), (37), (38): Xaa is C or S
  MOD_RES (15), (16), (17), (18), (19): Xaa is A or G
  MOD_RES (20), (21), (22), (23): Xaa is A or G or is absent
SXKXSKVVMRHKRLXXXXXXXXXYYLISTASLDQPVXXPSA

SEQ ID NO: 3239 - protein, 41 aa, Artificial Sequence
  Non-cyclic GFR-binding peptide
  MOD_RES (2), (4), (38), (39): Xaa is C or S
  MOD_RES (16), (17), (18), (19), (20): Xaa is A or G
  MOD_RES (21), (22), (23), (24): Xaa is A or G or is absent
RXGXGEVVMEYHYKLXXXXXXXXXKYLMSIPSLETPVXXAK

SEQ ID NO: 3240 - protein, 34 aa, Artificial Sequence
  Non-cyclic GFR-binding peptide
  MOD_RES (1), (33), (34): Xaa is C or S
XSRVVMNRHKRLIVNSSDDYYLVSTASLKTPAXX

SEQ ID NO: 3241 - protein, 40 aa, Artificial Sequence
  Non-cyclic GFR-binding peptide
  MOD_RES (2), (36), (37): Xaa is C or S
  MOD_RES (14), (15), (16), (17), (18): Xaa is A or G
  MOD_RES (19), (20), (21), (22): Xaa is A or G or is absent
GXGEVVMDRHKRLXXXXXXXXXYYLMSTASLETPVXXAKP

SEQ ID NO: 3242 - protein, 34 aa, Artificial Sequence
  Non-cyclic GFR-binding peptide
  MOD_RES (1), (33), (34): Xaa is C or S
XAKVVMNQYNKLIVNNSSDLYLVSIASLKTPAXX

SEQ ID NO: 3243 - protein, 37 aa, Artificial Sequence
  Non-cyclic GFR-binding peptide
  MOD_RES (1), (34), (35): Xaa is C or S
  MOD_RES (12), (13), (14), (15), (16): Xaa is A or G
  MOD_RES (17), (18), (19), (20): Xaa is A or G or is absent
XSKVIMYHYKLXXXXXXXXXKYLISIPSLDQSVXXPS

SEQ ID NO: 3244 - protein, 36 aa, Artificial Sequence
  Non-cyclic GFR-binding peptide
  MOD_RES (1), (36): Xaa is C or S
  MOD_RES (14), (15), (16), (17), (18): Xaa is A or G
  MOD_RES (19), (20), (21), (22): Xaa is A or G or is absent
XEAVSMGEQYNKLXXXXXXXXXLYLVSIASLKTPVX

SEQ ID NO: 3245 - protein, 40 aa, Artificial Sequence
  Non-cyclic GFR-binding peptide
  MOD_RES (2), (35), (36): Xaa is C or S
  MOD_RES (13), (14), (15), (16), (17): Xaa is A or G
  MOD_RES (18), (19), (20), (21): Xaa is A or G or is absent
KXSKVIMRHKRLXXXXXXXXXYYLISTASLDQSVXXPSAS

SEQ ID NO: 3246 - protein, 40 aa, Artificial Sequence
  Non-cyclic GFR-binding peptide
  MOD_RES (37), (37): Xaa is C or S
ALHDELTRYKKLFIPKKRVIEFYLVSIANLQVQTPRXQVN

SEQ ID NO: 3247 - protein, 35 aa, Artificial Sequence
  Non-cyclic GFR-binding peptide
  MOD_RES (1), (1): Xaa is C or S
  MOD_RES (14), (15), (16), (17), (18): Xaa is A or G
  MOD_RES (19), (20), (21), (22): Xaa is A or G or is absent
XALHDELTRHKRLXXXXXXXXXYYLVSTASLQVQT

SEQ ID NO: 3248 - protein, 39 aa, Artificial Sequence
  Non-cyclic GFR-binding peptide
  MOD_RES (2), (34), (35): Xaa is C or S
GXAKVVMNYHYKLIVNNSSDKYLVSIPSLKTPAXXAKPV

SEQ ID NO: 3249 - protein, 41 aa, Artificial Sequence
  Non-cyclic GFR-binding peptide
  MOD_RES (2), (4), (36), (37): Xaa is C or S
HXGXSRVVMNRHKRLIVNSSDDYYLVSTASLKTPAXXPKPV

SEQ ID NO: 3250 - protein, 37 aa, Artificial Sequence
  Non-cyclic GFR-binding peptide
  MOD_RES (31), (32): Xaa is C or S
EVVMEYHYKLVVKDYEDKYLMSIPSLETPVXXAKPIS

SEQ ID NO: 3251 - protein, 34 aa, Artificial Sequence
  Non-cyclic GFR-binding peptide
  MOD_RES (1), (33): Xaa is C or S
XSRVVMNYHYKLIVNSSDDKYLVSIPSLKTPAXT

SEQ ID NO: 3252 - protein, 35 aa, Artificial Sequence
  Non-cyclic GFR-binding peptide
  MOD_RES (2), (2): Xaa is C or S
  MOD_RES (14), (15), (16), (17), (18): Xaa is A or G
  MOD_RES (19), (20), (21), (22): Xaa is A or G or is absent
GXSRVVMNYHYKLXXXXXXXXXKYLVSIPSLKTPA

SEQ ID NO: 3253 - protein, 40 aa, Artificial Sequence
  Non-cyclic GFR-binding peptide
  MOD_RES (1), (34), (35): Xaa is C or S
  MOD_RES (12), (13), (14), (15), (16): Xaa is A or G
  MOD_RES (17), (18), (19), (20): Xaa is A or G or is absent
XSRVIMRYKKLXXXXXXXXXFYLISIANLAQPVXXPAASA

SEQ ID NO: 3254 - protein, 42 aa, Artificial Sequence
  Non-cyclic GFR-binding peptide
  MOD_RES (2), (36), (37): Xaa is C or S
  MOD_RES (14), (15), (16), (17), (18): Xaa is A or G
  MOD_RES (19), (20), (21), (22): Xaa is A or G or is absent
GXSRVVMNRHKRLXXXXXXXXXYYLVSTASLKTPAXXPKPVY

SEQ ID NO: 3255 - protein, 36 aa, Artificial Sequence
  Non-cyclic GFR-binding peptide
  MOD_RES (2), (33), (34): Xaa is C or S
KXSKVIMQYNKLIKPTKGILYLISIASLDQSVXXPS

SEQ ID NO: 3256 - protein, 31 aa, Artificial Sequence
  Non-cyclic GFR-binding peptide
GEVVMDRHKRLVVKENEDYYLMSTASLETPV

SEQ ID NO: 3257 - protein, 36 aa, Artificial Sequence
  Non-cyclic GFR-binding peptide
  MOD_RES (33), (34): Xaa is C or S
  MOD_RES (11), (12), (13), (14), (15): Xaa is A or G
  MOD_RES (16), (17), (18), (19): Xaa is A or G or is absent
SKVIMRYKKLXXXXXXXXXFYLISIANLDQSVXXPS

SEQ ID NO: 3258 - protein, 39 aa, Artificial Sequence
  Non-cyclic GFR-binding peptide
  MOD_RES (1), (35), (36): Xaa is C or S
  MOD_RES (13), (14), (15), (16), (17): Xaa is A or G
  MOD_RES (18), (19), (20), (21): Xaa is A or G or is absent
XGEVVMERHKRLXXXXXXXXXYYLMSTASLETPVXXAKP

SEQ ID NO: 3259 - protein, 35 aa, Artificial Sequence
  Non-cyclic GFR-binding peptide
  MOD_RES (32), (33): Xaa is C or S
GEVVMEYHYKLVVKDYEDKYLMSIPSLETPVXXAK

SEQ ID NO: 3260 - protein, 31 aa, Artificial Sequence
  Non-cyclic GFR-binding peptide
GEVVMEYHYKLVVKDYEDKYLMSIPSLETPV

SEQ ID NO: 3261 - protein, 35 aa, Artificial Sequence
  Non-cyclic GFR-binding peptide
  MOD_RES (35), (35): Xaa is C or S
  MOD_RES (11), (12), (13), (14), (15): Xaa is A or G
  MOD_RES (16), (17), (18), (19): Xaa is A or G or is absent
HDELTYHYKLXXXXXXXXXKYLVSIPSLQVQTPRX

SEQ ID NO: 3262 - protein, 36 aa, Artificial Sequence
  Non-cyclic GFR-binding peptide
  MOD_RES (1), (34), (35): Xaa is C or S
  MOD_RES (12), (13), (14), (15), (16): Xaa is A or G
  MOD_RES (17), (18), (19), (20): Xaa is A or G or is absent
XSRVIMYHYKLXXXXXXXXXKYLISIPSLAQPVXXP

SEQ ID NO: 3263 - protein, 33 aa, Artificial Sequence
  Non-cyclic GFR-binding peptide
  MOD_RES (12), (13), (14), (15), (16): Xaa is A or G
  MOD_RES (17), (18), (19), (20): Xaa is A or G or is absent
SRVVMNYHYKLXXXXXXXXXKYLVSIPSLKTPA

SEQ ID NO: 3264 - protein, 34 aa, Artificial Sequence
  Non-cyclic GFR-binding peptide
ALHDELTRYKKLFIPKKRVIEFYLVSIANLQVQT

SEQ ID NO: 3265 - protein, 40 aa, Artificial Sequence
  Non-cyclic GFR-binding peptide
  MOD_RES (2), (4), (36): Xaa is C or S
HXGXSRVVMNYHYKLIVNSSDDKYLVSIPSLKTPAXTPKT

SEQ ID NO: 3266 - protein, 43 aa, Artificial Sequence
  Non-cyclic GFR-binding peptide
  MOD_RES (2), (4), (38), (39): Xaa is C or S
  MOD_RES (16), (17), (18), (19), (20): Xaa is A or G
  MOD_RES (21), (22), (23), (24): Xaa is A or G or is absent
RXGXGEVVMERYKKLXXXXXXXXXFYLMSIANLETPVXXAKPI

SEQ ID NO: 3267 - protein, 34 aa, Artificial Sequence
  Non-cyclic GFR-binding peptide
  MOD_RES (34), (34): Xaa is C or S
  MOD_RES (12), (13), (14), (15), (16): Xaa is A or G
  MOD_RES (17), (18), (19), (20): Xaa is A or G or is absent
GEVVMDRHKRLXXXXXXXXXYYLMSTASLETPVX

SEQ ID NO: 3268 - protein, 37 aa, Artificial Sequence
  Non-cyclic GFR-binding peptide
  MOD_RES (1), (33): Xaa is C or S
XSRVVMNYHYKLIVNSSDDKYLVSIPSLKTPAXTPKT

SEQ ID NO: 3269 - protein, 38 aa, Artificial Sequence
  Non-cyclic GFR-binding peptide
  MOD_RES (2), (35), (36): Xaa is C or S
  MOD_RES (13), (14), (15), (16), (17): Xaa is A or G
  MOD_RES (18), (19), (20), (21): Xaa is A or G or is absent
KXSKVIMRHKRLXXXXXXXXXYYLISTASLDQSVXXPS

SEQ ID NO: 3270 - protein, 35 aa, Artificial Sequence
  Non-cyclic GFR-binding peptide
  MOD_RES (1), (33), (34): Xaa is C or S
XAKVVMNQYNKLIVNNSSDLYLVSIASLKTPAXXA

SEQ ID NO: 3271 - protein, 38 aa, Artificial Sequence
  Non-cyclic GFR-binding peptide
  MOD_RES (1), (3), (37), (38): Xaa is C or S
  MOD_RES (15), (16), (17), (18), (19): Xaa is A or G
  MOD_RES (20), (21), (22), (23): Xaa is A or G or is absent
XGXSRVVMNRHKRLXXXXXXXXXYYLVSTASLKTPAXX

SEQ ID NO: 3272 - protein, 40 aa, Artificial Sequence
  Non-cyclic GFR-binding peptide
  MOD_RES (2), (4), (35), (36): Xaa is C or S
SXKXSKVVMRYKKLVKPTRGVFYLISIANLDQPVXXPSAS

SEQ ID NO: 3273 - protein, 30 aa, Artificial Sequence
  Non-cyclic GFR-binding peptide
SKVVMQYNKLVKPTRGVLYLISIASLDQPV

SEQ ID NO: 3274 - protein, 42 aa, Artificial Sequence
  Non-cyclic GFR-binding peptide
  MOD_RES (1), (3), (38), (39): Xaa is C or S
  MOD_RES (16), (17), (18), (19), (20): Xaa is A or G
  MOD_RES (21), (22), (23), (24): Xaa is A or G or is absent
XGXEAVSMGERHKRLXXXXXXXXXYYLVSTASLKTPVXXAKG

SEQ ID NO: 3275 - protein, 32 aa, Artificial Sequence
  Non-cyclic GFR-binding peptide
  MOD_RES (11), (12), (13), (14), (15): Xaa is A or G
  MOD_RES (16), (17), (18), (19): Xaa is A or G or is absent
EVVMDYHYKLXXXXXXXXXKYLMSIPSLETPV

SEQ ID NO: 3276 - protein, 42 aa, Artificial Sequence
  Non-cyclic GFR-binding peptide
  MOD_RES (1), (3), (38), (39): Xaa is C or S
  MOD_RES (16), (17), (18), (19), (20): Xaa is A or G
  MOD_RES (21), (22), (23), (24): Xaa is A or G or is absent
XGXEAVSMGEQYNKLXXXXXXXXXLYLVSIASLKTPVXXAKG

SEQ ID NO: 3277 - protein, 40 aa, Artificial Sequence
  Non-cyclic GFR-binding peptide
  MOD_RES (2), (4), (37), (38): Xaa is C or S
RXGXEAVSMGEQYNKLTPVGMDDLYLVSIASLKTPVXXAK

SEQ ID NO: 3278 - protein, 40 aa, Artificial Sequence
  Non-cyclic GFR-binding peptide
  MOD_RES (1), (3), (36), (37): Xaa is C or S
XGXEAVSMGERHKRLTPVGMDDYYLVSTASLKTPVXXAKG

SEQ ID NO: 3279 - protein, 33 aa, Artificial Sequence
  Non-cyclic GFR-binding peptide
  MOD_RES (32), (33): Xaa is C or S
GEVVMDYHYKLVVKENEDKYLMSIPSLETPVXX

SEQ ID NO: 3280 - protein, 38 aa, Artificial Sequence
  Non-cyclic GFR-binding peptide
  MOD_RES (1), (3), (36), (37): Xaa is C or S
  MOD_RES (14), (15), (16), (17), (18): Xaa is A or G
  MOD_RES (19), (20), (21), (22): Xaa is A or G or is absent
XKXSKVIMRHKRLXXXXXXXXXYYLISTASLDQSVXXP

SEQ ID NO: 3281 - protein, 45 aa, Artificial Sequence
  Non-cyclic GFR-binding peptide
  MOD_RES (2), (4), (41): Xaa is C or S
  MOD_RES (17), (18), (19), (20), (21): Xaa is A or G
  MOD_RES (22), (23), (24), (25): Xaa is A or G or is absent
EXKXALHDELTRYKKLXXXXXXXXXFYLVSIANLQVQTPRXQVNR

SEQ ID NO: 3282 - protein, 37 aa, Artificial Sequence
  Non-cyclic GFR-binding peptide
  MOD_RES (36), (36): Xaa is C or S
LHDELTRYKKLFIPKKRVIEFYLVSIANLQVQTPRXQ

SEQ ID NO: 3283 - protein, 33 aa, Artificial Sequence
  Non-cyclic GFR-binding peptide
  MOD_RES (12), (13), (14), (15), (16): Xaa is A or G
  MOD_RES (17), (18), (19), (20): Xaa is A or G or is absent
SRVVMNRHKRLXXXXXXXXXYYLVSTASLKTPA

SEQ ID NO: 3284 - protein, 36 aa, Artificial Sequence
  Non-cyclic GFR-binding peptide
  MOD_RES (33), (34): Xaa is C or S
  MOD_RES (11), (12), (13), (14), (15): Xaa is A or G
  MOD_RES (16), (17), (18), (19): Xaa is A or G or is absent
KVVMNQYNKLXXXXXXXXXLYLVSIASLKTPAXXAK

SEQ ID NO: 3285 - protein, 40 aa, Artificial Sequence
  Non-cyclic GFR-binding peptide
  MOD_RES (1), (3), (37): Xaa is C or S
  MOD_RES (15), (16), (17), (18), (19): Xaa is A or G
  MOD_RES (20), (21), (22), (23): Xaa is A or G or is absent
XGXSRVVMNRHKRLXXXXXXXXXYYLVSTASLKTPAXTPK

SEQ ID NO: 3286 - protein, 38 aa, Artificial Sequence
  Non-cyclic GFR-binding peptide
  MOD_RES (1), (32), (33): Xaa is C or S
XSKVVMQYNKLVKPTRGVLYLISIASLDQPVXXPSASA

SEQ ID NO: 3287 - protein, 38 aa, Artificial Sequence
  Non-cyclic GFR-binding peptide
  MOD_RES (2), (35), (36): Xaa is C or S
  MOD_RES (13), (14), (15), (16), (17): Xaa is A or G
  MOD_RES (18), (19), (20), (21): Xaa is A or G or is absent
KXSRVIMYHYKLXXXXXXXXXKYLISIPSLAQPVXXPA

SEQ ID NO: 3288 - protein, 38 aa, Artificial Sequence
  Non-cyclic GFR-binding peptide
  MOD_RES (1), (3): Xaa is C or S
XKXALHDELTQYNKLFIPKKRVIELYLVSIASLQVQTP

SEQ ID NO: 3289 - protein, 41 aa, Artificial Sequence
  Non-cyclic GFR-binding peptide
  MOD_RES (2), (4), (37), (38): Xaa is C or S
  MOD_RES (15), (16), (17), (18), (19): Xaa is A or G
  MOD_RES (20), (21), (22), (23): Xaa is A or G or is absent
SXKXSKVIMYHYKLXXXXXXXXXKYLISIPSLDQSVXXPSA

SEQ ID NO: 3290 - protein, 34 aa, Artificial Sequence
  Non-cyclic GFR-binding peptide
  MOD_RES (31), (32): Xaa is C or S
EVVMERYKKLVVKDYEDFYLMSIANLETPVXXAK

SEQ ID NO: 3291 - protein, 36 aa, Artificial Sequence
  Non-cyclic GFR-binding peptide
  MOD_RES (2), (4), (36): Xaa is C or S
HXGXARVVMNYHYKLIVNSSDDKYLVSIPSLQTPAX

SEQ ID NO: 3292 - protein, 39 aa, Artificial Sequence
  Non-cyclic GFR-binding peptide
  MOD_RES (2), (34), (35): Xaa is C or S
GXGEVVMERYKKLVVKDYEDFYLMSIANLETPVXXAKPI

SEQ ID NO: 3293 - protein, 36 aa, Artificial Sequence
  Non-cyclic GFR-binding peptide
  MOD_RES (1), (34), (35): Xaa is C or S
XEAVSMGEQYNKLTPVGMDDLYLVSIASLKTPVXXA

SEQ ID NO: 3294 - protein, 33 aa, Artificial Sequence
  Non-cyclic GFR-binding peptide
  MOD_RES (2), (2): Xaa is C or S
GXGEVVMEYHYKLVVKDYEDKYLMSIPSLETPV

SEQ ID NO: 3295 - protein, 38 aa, Artificial Sequence
  Non-cyclic GFR-binding peptide
  MOD_RES (1), (3), (35), (36): Xaa is C or S
XGXGEVVMERHKRLVVKDYEDYYLMSTASLETPVXXAK

SEQ ID NO: 3296 - protein, 34 aa, Artificial Sequence
  Non-cyclic GFR-binding peptide
  MOD_RES (2), (33), (34): Xaa is C or S
KXSKVVMRHKRLVKPTRGVYYLISTASLDQPVXX

SEQ ID NO: 3297 - protein, 37 aa, Artificial Sequence
  Non-cyclic GFR-binding peptide
  MOD_RES (34), (35): Xaa is C or S
  MOD_RES (12), (13), (14), (15), (16): Xaa is A or G
  MOD_RES (17), (18), (19), (20): Xaa is A or G or is absent
GEVVMERYKKLXXXXXXXXXFYLMSIANLETPVXXAK

SEQ ID NO: 3298 - protein, 42 aa, Artificial Sequence
  Non-cyclic GFR-binding peptide
  MOD_RES (1), (3), (37), (38): Xaa is C or S
  MOD_RES (15), (16), (17), (18), (19): Xaa is A or G
  MOD_RES (20), (21), (22), (23): Xaa is A or G or is absent
XGXAKVVMNRYKKLXXXXXXXXXFYLVSIANLKTPAXXAKPV

SEQ ID NO: 3299 - protein, 34 aa, Artificial Sequence
  Non-cyclic GFR-binding peptide
  MOD_RES (2), (4): Xaa is C or S
SXKXSKVIMRYKKLIKPTKGIFYLISIANLDQSV

SEQ ID NO: 3300 - protein, 39 aa, Artificial Sequence
  Non-cyclic GFR-binding peptide
  MOD_RES (1), (3), (35), (36): Xaa is C or S
XGXAKVVMNYHYKLIVNNSSDKYLVSIPSLKTPAXXAKP

SEQ ID NO: 3301 - protein, 37 aa, Artificial Sequence
  Non-cyclic GFR-binding peptide
  MOD_RES (31), (32): Xaa is C or S
EVVMERHKRLVVKDYEDYYLMSTASLETPVXXAKPIS

SEQ ID NO: 3302 - protein, 35 aa, Artificial Sequence
  Non-cyclic GFR-binding peptide
  MOD_RES (33), (34): Xaa is C or S
  MOD_RES (11), (12), (13), (14), (15): Xaa is A or G
  MOD_RES (16), (17), (18), (19): Xaa is A or G or is absent
SKVVMYHYKLXXXXXXXXXKYLISIPSLDQPVXXP

SEQ ID NO: 3303 - protein, 35 aa, Artificial Sequence
  Non-cyclic GFR-binding peptide
  MOD_RES (31), (32): Xaa is C or S
EVVMDRYKKLVVKENEDFYLMSIANLETPVXXAKP

SEQ ID NO: 3304 - protein, 35 aa, Artificial Sequence
  Non-cyclic GFR-binding peptide
  MOD_RES (1), (3): Xaa is C or S
XGXEAVSMGEQYNKLTPVGMDDLYLVSIASLKTPV

SEQ ID NO: 3305 - protein, 41 aa, Artificial Sequence
  Non-cyclic GFR-binding peptide
  MOD_RES (2), (4), (41): Xaa is C or S
EXKXALHDELTYHYKLFIPKKRVIEKYLVSIPSLQVQTPRX

SEQ ID NO: 3306 - protein, 35 aa, Artificial Sequence
  Non-cyclic GFR-binding peptide
  MOD_RES (2), (34): Xaa is C or S
GXSRVVMNYHYKLIVNSSDDKYLVSIPSLKTPAXT

SEQ ID NO: 3307 - protein, 35 aa, Artificial Sequence
  Non-cyclic GFR-binding peptide
  MOD_RES (34), (35): Xaa is C or S
  MOD_RES (12), (13), (14), (15), (16): Xaa is A or G
  MOD_RES (17), (18), (19), (20): Xaa is A or G or is absent
GEVVMDRYKKLXXXXXXXXXFYLMSIANLETPVXX

SEQ ID NO: 3308 - protein, 40 aa, Artificial Sequence
  Non-cyclic GFR-binding peptide
  MOD_RES (1), (3), (36), (37): Xaa is C or S
  MOD_RES (14), (15), (16), (17), (18): Xaa is A or G
  MOD_RES (19), (20), (21), (22): Xaa is A or G or is absent
XKXSKVIMYHYKLXXXXXXXXXKYLISIPSLDQSVXXPSA

SEQ ID NO: 3309 - protein, 40 aa, Artificial Sequence
  Non-cyclic GFR-binding peptide
  MOD_RES (1), (35), (36): Xaa is C or S
  MOD_RES (13), (14), (15), (16), (17): Xaa is A or G
  MOD_RES (18), (19), (20), (21): Xaa is A or G or is absent
XGEVVMDRHKRLXXXXXXXXXYYLMSTASLETPVXXAKPI

SEQ ID NO: 3310 - protein, 38 aa, Artificial Sequence
  Non-cyclic GFR-binding peptide
  MOD_RES (2), (4), (37), (38): Xaa is C or S
  MOD_RES (15), (16), (17), (18), (19): Xaa is A or G
  MOD_RES (20), (21), (22), (23): Xaa is A or G or is absent
SXKXSKVVMRHKRLXXXXXXXXXYYLISTASLDQPVXX

SEQ ID NO: 3311 - protein, 38 aa, Artificial Sequence
  Non-cyclic GFR-binding peptide
  MOD_RES (1), (3), (36), (37): Xaa is C or S
  MOD_RES (14), (15), (16), (17), (18): Xaa is A or G
  MOD_RES (19), (20), (21), (22): Xaa is A or G or is absent
XKXSKVVMRHKRLXXXXXXXXXYYLISTASLDQPVXXP

SEQ ID NO: 3312 - protein, 41 aa, Artificial Sequence
  Non-cyclic GFR-binding peptide
  MOD_RES (1), (3), (36), (37): Xaa is C or S
  MOD_RES (14), (15), (16), (17), (18): Xaa is A or G
  MOD_RES (19), (20), (21), (22): Xaa is A or G or is absent
XKXSRVIMRYKKLXXXXXXXXXFYLISIANLAQPVXXPAAS

SEQ ID NO: 3313 - protein, 37 aa, Artificial Sequence
  Non-cyclic GFR-binding peptide
  MOD_RES (33), (34): Xaa is C or S
  MOD_RES (11), (12), (13), (14), (15): Xaa is A or G
  MOD_RES (16), (17), (18), (19): Xaa is A or G or is absent
RVVMNQYNKLXXXXXXXXXLYLVSIASLKTPAXXPKP

SEQ ID NO: 3314 - protein, 30 aa, Artificial Sequence
  Non-cyclic GFR-binding peptide
SKVVMYHYKLVKPTRGVKYLISIPSLDQPV

SEQ ID NO: 3315 - protein, 34 aa, Artificial Sequence
  Non-cyclic GFR-binding peptide
  MOD_RES (33), (34): Xaa is C or S
  MOD_RES (11), (12), (13), (14), (15): Xaa is A or G
  MOD_RES (16), (17), (18), (19): Xaa is A or G or is absent
SKVVMRYKKLXXXXXXXXXFYLISIANLDQPVXX

SEQ ID NO: 3316 - protein, 32 aa, Artificial Sequence
  Non-cyclic GFR-binding peptide
  MOD_RES (11), (12), (13), (14), (15): Xaa is A or G
  MOD_RES (16), (17), (18), (19): Xaa is A or G or is absent
SKVIMYHYKLXXXXXXXXXKYLISIPSLDQSV

SEQ ID NO: 3317 - protein, 33 aa, Artificial Sequence
  Non-cyclic GFR-binding peptide
  MOD_RES (33), (33): Xaa is C or S
  MOD_RES (11), (12), (13), (14), (15): Xaa is A or G
  MOD_RES (16), (17), (18), (19): Xaa is A or G or is absent
SKVIMYHYKLXXXXXXXXXKYLISIPSLDQSVX

SEQ ID NO: 3318 - protein, 39 aa, Artificial Sequence
  Non-cyclic GFR-binding peptide
  MOD_RES (2), (36), (37): Xaa is C or S
  MOD_RES (14), (15), (16), (17), (18): Xaa is A or G
  MOD_RES (19), (20), (21), (22): Xaa is A or G or is absent
GXSRVVMNQYNKLXXXXXXXXXLYLVSIASLKTPAXXPK

SEQ ID NO: 3319 - protein, 36 aa, Artificial Sequence
  Non-cyclic GFR-binding peptide
  MOD_RES (34), (35): Xaa is C or S
  MOD_RES (12), (13), (14), (15), (16): Xaa is A or G
  MOD_RES (17), (18), (19), (20): Xaa is A or G or is absent
AKVVMNYHYKLXXXXXXXXXKYLVSIPSLKTPAXXA

SEQ ID NO: 3320 - protein, 37 aa, Artificial Sequence
  Non-cyclic GFR-binding peptide
  MOD_RES (1), (3), (34), (35): Xaa is C or S
XKXSKVVMYHYKLVKPTRGVKYLISIPSLDQPVXXPS

SEQ ID NO: 3321 - protein, 40 aa, Artificial Sequence
  Non-cyclic GFR-binding peptide
  MOD_RES (2), (4), (35), (36): Xaa is C or S
SXKXSKVIMRHKRLIKPTKGIYYLISTASLDQSVXXPSAS

SEQ ID NO: 3322 - protein, 38 aa, Artificial Sequence
  Non-cyclic GFR-binding peptide
  MOD_RES (1), (3), (34), (35): Xaa is C or S
XKXSRVIMYHYKLVKPKRGVKYLISIPSLAQPVXXPAA

SEQ ID NO: 3323 - protein, 40 aa, Artificial Sequence
  Non-cyclic GFR-binding peptide
  MOD_RES (2), (4), (36), (37): Xaa is C or S
HXGXSRVVMNYHYKLIVNSSDDKYLVSIPSLKTPAXXPKP

SEQ ID NO: 3324 - protein, 42 aa, Artificial Sequence
  Non-cyclic GFR-binding peptide
  MOD_RES (2), (4), (38), (39): Xaa is C or S
  MOD_RES (16), (17), (18), (19), (20): Xaa is A or G
  MOD_RES (21), (22), (23), (24): Xaa is A or G or is absent
HXGXAKVVMNYHYKLXXXXXXXXXKYLVSIPSLKTPAXXAKP

SEQ ID NO: 3325 - protein, 35 aa, Artificial Sequence
  Non-cyclic GFR-binding peptide
  MOD_RES (2), (2): Xaa is C or S
  MOD_RES (14), (15), (16), (17), (18): Xaa is A or G
  MOD_RES (19), (20), (21), (22): Xaa is A or G or is absent
GXGEVVMDYHYKLXXXXXXXXXKYLMSIPSLETPV

SEQ ID NO: 3326 - protein, 39 aa, Artificial Sequence
  Non-cyclic GFR-binding peptide
  MOD_RES (1), (35): Xaa is C or S
  MOD_RES (13), (14), (15), (16), (17): Xaa is A or G
  MOD_RES (18), (19), (20), (21): Xaa is A or G or is absent
XSRVVMNYHYKLXXXXXXXXXKYLVSIPSLKTPAXTPKT

SEQ ID NO: 3327 - protein, 34 aa, Artificial Sequence
  Non-cyclic GFR-binding peptide
  MOD_RES (32), (32): Xaa is C or S
SRVVMNQYNKLIVNSSDDLYLVSIASLKTPAXTP

SEQ ID NO: 3328 - protein, 40 aa, Artificial Sequence
  Non-cyclic GFR-binding peptide
  MOD_RES (1), (3), (40): Xaa is C or S
XKXALHDELTQYNKLFIPKKRVIELYLVSIASLQVQTPRX

SEQ ID NO: 3329 - protein, 34 aa, Artificial Sequence
  Non-cyclic GFR-binding peptide
  MOD_RES (34), (34): Xaa is C or S
  MOD_RES (12), (13), (14), (15), (16): Xaa is A or G
  MOD_RES (17), (18), (19), (20): Xaa is A or G or is absent
GEVVMDRYKKLXXXXXXXXXFYLMSIANLETPVX

SEQ ID NO: 3330 - protein, 37 aa, Artificial Sequence
  Non-cyclic GFR-binding peptide
  MOD_RES (2), (4), (35), (36): Xaa is C or S
SXKXSKVIMRYKKLIKPTKGIFYLISIANLDQSVXXP

SEQ ID NO: 3331 - protein, 37 aa, Artificial Sequence
  Non-cyclic GFR-binding peptide
  MOD_RES (1), (3), (36), (37): Xaa is C or S
  MOD_RES (14), (15), (16), (17), (18): Xaa is A or G
  MOD_RES (19), (20), (21), (22): Xaa is A or G or is absent
XKXSRVIMQYNKLXXXXXXXXXLYLISIASLAQPVXX

SEQ ID NO: 3332 - protein, 34 aa, Artificial Sequence
  Non-cyclic GFR-binding peptide
  MOD_RES (2), (34): Xaa is C or S
GXARVVMNQYNKLIVNSSDDLYLVSIASLQTPAX

SEQ ID NO: 3333 - protein, 38 aa, Artificial Sequence
  Non-cyclic GFR-binding peptide
  MOD_RES (35), (35): Xaa is C or S
HDELTRYKKLFIPKKRVIEFYLVSIANLQVQTPRXQVN

SEQ ID NO: 3334 - protein, 41 aa, Artificial Sequence
  Non-cyclic GFR-binding peptide
  MOD_RES (2), (4), (37), (38): Xaa is C or S
  MOD_RES (15), (16), (17), (18), (19): Xaa is A or G
  MOD_RES (20), (21), (22), (23): Xaa is A or G or is absent
SXKXSKVVMRYKKLXXXXXXXXXFYLISIANLDQPVXXPSA

SEQ ID NO: 3335 - protein, 40 aa, Artificial Sequence
  Non-cyclic GFR-binding peptide
  MOD_RES (2), (34), (35): Xaa is C or S
GXAKVVMNRYKKLIVNNSSDFYLVSIANLKTPAXXAKPVA

SEQ ID NO: 3336 - protein, 34 aa, Artificial Sequence
  Non-cyclic GFR-binding peptide
  MOD_RES (1), (32), (33): Xaa is C or S
XSKVIMQYNKLIKPTKGILYLISIASLDQSVXXP

SEQ ID NO: 3337 - protein, 35 aa, Artificial Sequence
  Non-cyclic GFR-binding peptide
  MOD_RES (1), (1): Xaa is C or S
XALHDELTRYKKLFIPKKRVIEFYLVSIANLQVQT

SEQ ID NO: 3338 - protein, 32 aa, Artificial Sequence
  Non-cyclic GFR-binding peptide
  MOD_RES (1), (1): Xaa is C or S
XARVVMNYHYKLIVNSSDDKYLVSIPSLQTPA

SEQ ID NO: 3339 - protein, 36 aa, Artificial Sequence
  Non-cyclic GFR-binding peptide
  MOD_RES (1), (3), (34), (35): Xaa is C or S
XKXSKVIMRYKKLIKPTKGIFYLISIANLDQSVXXP

SEQ ID NO: 3340 - protein, 38 aa, Artificial Sequence
  Non-cyclic GFR-binding peptide
  MOD_RES (2), (4), (35), (36): Xaa is C or S
SXKXSKVIMQYNKLIKPTKGILYLISIASLDQSVXXPS

SEQ ID NO: 3341 - protein, 38 aa, Artificial Sequence
  Non-cyclic GFR-binding peptide
  MOD_RES (34), (35): Xaa is C or S
  MOD_RES (12), (13), (14), (15), (16): Xaa is A or G
  MOD_RES (17), (18), (19), (20): Xaa is A or G or is absent
AKVVMNQYNKLXXXXXXXXXLYLVSIASLKTPAXXAKP

SEQ ID NO: 3342 - protein, 36 aa, Artificial Sequence
  Non-cyclic GFR-binding peptide
  MOD_RES (32), (33): Xaa is C or S
AKVVMNQYNKLIVNNSSDLYLVSIASLKTPAXXAKP

SEQ ID NO: 3343 - protein, 43 aa, Artificial Sequence
  Non-cyclic GFR-binding peptide
  MOD_RES (2), (4), (37), (38): Xaa is C or S
RXGXEAVSMGERYKKLTPVGMDDFYLVSIANLKTPVXXAKGVK

SEQ ID NO: 3344 - protein, 38 aa, Artificial Sequence
  Non-cyclic GFR-binding peptide
  MOD_RES (34), (35): Xaa is C or S
  MOD_RES (12), (13), (14), (15), (16): Xaa is A or G
  MOD_RES (17), (18), (19), (20): Xaa is A or G or is absent
AKVVMNRYKKLXXXXXXXXXFYLVSIANLKTPAXXAKP

SEQ ID NO: 3345 - protein, 39 aa, Artificial Sequence
  Non-cyclic GFR-binding peptide
  MOD_RES (37), (37): Xaa is C or S
ALHDELTRYKKLFIPKKRVIEFYLVSIANLQVQTPRXQV

SEQ ID NO: 3346 - protein, 35 aa, Artificial Sequence
  Non-cyclic GFR-binding peptide
  MOD_RES (1), (34), (35): Xaa is C or S
  MOD_RES (12), (13), (14), (15), (16): Xaa is A or G
  MOD_RES (17), (18), (19), (20): Xaa is A or G or is absent
XSKVVMYHYKLXXXXXXXXXKYLISIPSLDQPVXX

SEQ ID NO: 3347 - protein, 36 aa, Artificial Sequence
  Non-cyclic GFR-binding peptide
  MOD_RES (1), (3), (36): Xaa is C or S
  MOD_RES (14), (15), (16), (17), (18): Xaa is A or G
  MOD_RES (19), (20), (21), (22): Xaa is A or G or is absent
XKXSKVVMYHYKLXXXXXXXXXKYLISIPSLDQPVX

SEQ ID NO: 3348 - protein, 34 aa, Artificial Sequence
  Non-cyclic GFR-binding peptide
  MOD_RES (1), (34): Xaa is C or S
  MOD_RES (12), (13), (14), (15), (16): Xaa is A or G
  MOD_RES (17), (18), (19), (20): Xaa is A or G or is absent
XSRVIMYHYKLXXXXXXXXXKYLISIPSLAQPVX

SEQ ID NO: 3349 - protein, 36 aa, Artificial Sequence
  Non-cyclic GFR-binding peptide
  MOD_RES (32), (33): Xaa is C or S
ARVVMNQYNKLIVNSSDDLYLVSIASLQTPAXXPKP

SEQ ID NO: 3350 - protein, 35 aa, Artificial Sequence
  Non-cyclic GFR-binding peptide
  MOD_RES (2), (33), (34): Xaa is C or S
KXSRVIMRHKRLVKPKRGVYYLISTASLAQPVXXP

SEQ ID NO: 3351 - protein, 37 aa, Artificial Sequence
  Non-cyclic GFR-binding peptide
  MOD_RES (2), (35), (36): Xaa is C or S
GXEAVSMGEQYNKLTPVGMDDLYLVSIASLKTPVXXA

SEQ ID NO: 3352 - protein, 41 aa, Artificial Sequence
  Non-cyclic GFR-binding peptide
  MOD_RES (1), (3), (37): Xaa is C or S
  MOD_RES (15), (16), (17), (18), (19): Xaa is A or G
  MOD_RES (20), (21), (22), (23): Xaa is A or G or is absent
XGXSRVVMNRHKRLXXXXXXXXXYYLVSTASLKTPAXTPKT

SEQ ID NO: 3353 - protein, 39 aa, Artificial Sequence
  Non-cyclic GFR-binding peptide
  MOD_RES (2), (4): Xaa is C or S
EXKXALHDELTRYKKLFIPKKRVIEFYLVSIANLQVQTP

SEQ ID NO: 3354 - protein, 38 aa, Artificial Sequence
  Non-cyclic GFR-binding peptide
  MOD_RES (1), (3), (35), (36): Xaa is C or S
XGXAKVVMNRYKKLIVNNSSDFYLVSIANLKTPAXXAK

SEQ ID NO: 3355 - protein, 37 aa, Artificial Sequence
  Non-cyclic GFR-binding peptide
  MOD_RES (2), (36), (37): Xaa is C or S
  MOD_RES (14), (15), (16), (17), (18): Xaa is A or G
  MOD_RES (19), (20), (21), (22): Xaa is A or G or is absent
GXSRVVMNRHKRLXXXXXXXXXYYLVSTASLKTPAXX

SEQ ID NO: 3356 - protein, 35 aa, Artificial Sequence
  Non-cyclic GFR-binding peptide
  MOD_RES (1), (35): Xaa is C or S
  MOD_RES (13), (14), (15), (16), (17): Xaa is A or G
  MOD_RES (18), (19), (20), (21): Xaa is A or G or is absent
XGEVVMDRHKRLXXXXXXXXXYYLMSTASLETPVX

SEQ ID NO: 3357 - protein, 34 aa, Artificial Sequence
  Non-cyclic GFR-binding peptide
  MOD_RES (2), (33), (34): Xaa is C or S
KXSRVIMQYNKLVKPKRGVLYLISIASLAQPVXX

SEQ ID NO: 3358 - protein, 34 aa, Artificial Sequence
  Non-cyclic GFR-binding peptide
  MOD_RES (2), (2): Xaa is C or S
  MOD_RES (13), (14), (15), (16), (17): Xaa is A or G
  MOD_RES (18), (19), (20), (21): Xaa is A or G or is absent
KXSRVIMRYKKLXXXXXXXXXFYLISIANLAQPV

SEQ ID NO: 3359 - protein, 40 aa, Artificial Sequence
  Non-cyclic GFR-binding peptide
  MOD_RES (2), (4), (38), (39): Xaa is C or S
  MOD_RES (16), (17), (18), (19), (20): Xaa is A or G
  MOD_RES (21), (22), (23), (24): Xaa is A or G or is absent
RXGXGEVVMDRYKKLXXXXXXXXXFYLMSIANLETPVXXA

SEQ ID NO: 3360 - protein, 34 aa, Artificial Sequence
  Non-cyclic GFR-binding peptide
  MOD_RES (32), (33): Xaa is C or S
SRVVMNQYNKLIVNSSDDLYLVSIASLKTPAXXP

SEQ ID NO: 3361 - protein, 37 aa, Artificial Sequence
  Non-cyclic GFR-binding peptide
  MOD_RES (2), (4), (37): Xaa is C or S
RXGXEAVSMGERYKKLTPVGMDDFYLVSIANLKTPVX

SEQ ID NO: 3362 - protein, 33 aa, Artificial Sequence
  Non-cyclic GFR-binding peptide
  MOD_RES (2), (2): Xaa is C or S
GXAKVVMNYHYKLIVNNSSDKYLVSIPSLKTPA

SEQ ID NO: 3363 - protein, 39 aa, Artificial Sequence
  Non-cyclic GFR-binding peptide
  MOD_RES (1), (33), (34): Xaa is C or S
XGEVVMERHKRLVVKDYEDYYLMSTASLETPVXXAKPIS

SEQ ID NO: 3364 - protein, 41 aa, Artificial Sequence
  Non-cyclic GFR-binding peptide
  MOD_RES (1), (3), (36), (37): Xaa is C or S
XGXEAVSMGEQYNKLTPVGMDDLYLVSIASLKTPVXXAKGV

SEQ ID NO: 3365 - protein, 39 aa, Artificial Sequence
  Non-cyclic GFR-binding peptide
  MOD_RES (2), (33), (34): Xaa is C or S
KXSRVIMRYKKLVKPKRGVFYLISIANLAQPVXXPAASA

SEQ ID NO: 3366 - protein, 35 aa, Artificial Sequence
  Non-cyclic GFR-binding peptide
  MOD_RES (32), (33): Xaa is C or S
ARVVMNYHYKLIVNSSDDKYLVSIPSLQTPAXXPK

SEQ ID NO: 3367 - protein, 33 aa, Artificial Sequence
  Non-cyclic GFR-binding peptide
  MOD_RES (12), (13), (14), (15), (16): Xaa is A or G
  MOD_RES (17), (18), (19), (20): Xaa is A or G or is absent
AKVVMNYHYKLXXXXXXXXXKYLVSIPSLKTPA

SEQ ID NO: 3368 - protein, 39 aa, Artificial Sequence
  Non-cyclic GFR-binding peptide
  MOD_RES (2), (4), (36), (37): Xaa is C or S
RXGXGEVVMERHKRLVVKDYEDYYLMSTASLETPVXXAK

SEQ ID NO: 3369 - protein, 33 aa, Artificial Sequence
  Non-cyclic GFR-binding peptide
  MOD_RES (1), (33): Xaa is C or S
XGEVVMDYHYKLVVKENEDKYLMSIPSLETPVX

SEQ ID NO: 3370 - protein, 35 aa, Artificial Sequence
  Non-cyclic GFR-binding peptide
  MOD_RES (2), (4): Xaa is C or S
RXGXGEVVMERYKKLVVKDYEDFYLMSIANLETPV

SEQ ID NO: 3371 - protein, 36 aa, Artificial Sequence
  Non-cyclic GFR-binding peptide
  MOD_RES (31), (32): Xaa is C or S
SKVIMRYKKLIKPTKGIFYLISIANLDQSVXXPSAS

SEQ ID NO: 3372 - protein, 32 aa, Artificial Sequence
  Non-cyclic GFR-binding peptide
  MOD_RES (11), (12), (13), (14), (15): Xaa is A or G
  MOD_RES (16), (17), (18), (19): Xaa is A or G or is absent
SKVIMRHKRLXXXXXXXXXYYLISTASLDQSV

SEQ ID NO: 3373 - protein, 35 aa, Artificial Sequence
  Non-cyclic GFR-binding peptide
  MOD_RES (1), (33): Xaa is C or S
XSRVVMNRHKRLIVNSSDDYYLVSTASLKTPAXTP

SEQ ID NO: 3374 - protein, 37 aa, Artificial Sequence
  Non-cyclic GFR-binding peptide
  MOD_RES (33), (34): Xaa is C or S
  MOD_RES (11), (12), (13), (14), (15): Xaa is A or G
  MOD_RES (16), (17), (18), (19): Xaa is A or G or is absent
KVVMNQYNKLXXXXXXXXXLYLVSIASLKTPAXXAKP

SEQ ID NO: 3375 - protein, 34 aa, Artificial Sequence
  Non-cyclic GFR-binding peptide
  MOD_RES (33), (33): Xaa is C or S
  MOD_RES (11), (12), (13), (14), (15): Xaa is A or G
  MOD_RES (16), (17), (18), (19): Xaa is A or G or is absent
RVVMNRHKRLXXXXXXXXXYYLVSTASLKTPAXT

SEQ ID NO: 3376 - protein, 35 aa, Artificial Sequence
  Non-cyclic GFR-binding peptide
  MOD_RES (2), (34), (35): Xaa is C or S
GXSRVVMNRHKRLIVNSSDDYYLVSTASLKTPAXX

SEQ ID NO: 3377 - protein, 30 aa, Artificial Sequence
  Non-cyclic GFR-binding peptide
SKVIMRYKKLIKPTKGIFYLISIANLDQSV

SEQ ID NO: 3378 - protein, 38 aa, Artificial Sequence
  Non-cyclic GFR-binding peptide
  MOD_RES (2), (4), (38): Xaa is C or S
  MOD_RES (16), (17), (18), (19), (20): Xaa is A or G
  MOD_RES (21), (22), (23), (24): Xaa is A or G or is absent
HXGXSRVVMNYHYKLXXXXXXXXXKYLVSIPSLKTPAX

SEQ ID NO: 3379 - protein, 38 aa, Artificial Sequence
  Non-cyclic GFR-binding peptide
  MOD_RES (2), (4), (35), (36): Xaa is C or S
SXKXSKVIMRYKKLIKPTKGIFYLISIANLDQSVXXPS

SEQ ID NO: 3380 - protein, 43 aa, Artificial Sequence
  Non-cyclic GFR-binding peptide
  MOD_RES (2), (39): Xaa is C or S
  MOD_RES (15), (16), (17), (18), (19): Xaa is A or G
  MOD_RES (20), (21), (22), (23): Xaa is A or G or is absent
KXALHDELTQYNKLXXXXXXXXXLYLVSIASLQVQTPRXQVNR

SEQ ID NO: 3381 - protein, 36 aa, Artificial Sequence
  Non-cyclic GFR-binding peptide
  MOD_RES (2), (35), (36): Xaa is C or S
  MOD_RES (13), (14), (15), (16), (17): Xaa is A or G
  MOD_RES (18), (19), (20), (21): Xaa is A or G or is absent
KXSRVIMQYNKLXXXXXXXXXLYLISIASLAQPVXX

SEQ ID NO: 3382 - protein, 40 aa, Artificial Sequence
  Non-cyclic GFR-binding peptide
  MOD_RES (2), (36), (37): Xaa is C or S
  MOD_RES (14), (15), (16), (17), (18): Xaa is A or G
  MOD_RES (19), (20), (21), (22): Xaa is A or G or is absent
GXGEVVMDRYKKLXXXXXXXXXFYLMSIANLETPVXXAKP

SEQ ID NO: 3383 - protein, 32 aa, Artificial Sequence
  Non-cyclic GFR-binding peptide
  MOD_RES (1), (1): Xaa is C or S
XSRVVMNRHKRLIVNSSDDYYLVSTASLKTPA

SEQ ID NO: 3384 - protein, 44 aa, Artificial Sequence
  Non-cyclic GFR-binding peptide
  MOD_RES (1), (3), (40): Xaa is C or S
XKXALHDELTRHKRLFIPKKRVIEYYLVSTASLQVQTPRXQVNR

SEQ ID NO: 3385 - protein, 37 aa, Artificial Sequence
  Non-cyclic GFR-binding peptide
  MOD_RES (2), (36), (37): Xaa is C or S
  MOD_RES (14), (15), (16), (17), (18): Xaa is A or G
  MOD_RES (19), (20), (21), (22): Xaa is A or G or is absent
GXGEVVMDYHYKLXXXXXXXXXKYLMSIPSLETPVXX

SEQ ID NO: 3386 - protein, 37 aa, Artificial Sequence
  Non-cyclic GFR-binding peptide
  MOD_RES (34), (35): Xaa is C or S
  MOD_RES (12), (13), (14), (15), (16): Xaa is A or G
  MOD_RES (17), (18), (19), (20): Xaa is A or G or is absent
AKVVMNRYKKLXXXXXXXXXFYLVSIANLKTPAXXAK

SEQ ID NO: 3387 - protein, 38 aa, Artificial Sequence
  Non-cyclic GFR-binding peptide
  MOD_RES (32), (33): Xaa is C or S
ARVVMNRHKRLIVNSSDDYYLVSTASLQTPAXXPKPVT

SEQ ID NO: 3388 - protein, 36 aa, Artificial Sequence
  Non-cyclic GFR-binding peptide
  MOD_RES (35), (35): Xaa is C or S
  MOD_RES (11), (12), (13), (14), (15): Xaa is A or G
  MOD_RES (16), (17), (18), (19): Xaa is A or G or is absent
HDELTQYNKLXXXXXXXXXLYLVSIASLQVQTPRXQ

SEQ ID NO: 3389 - protein, 34 aa, Artificial Sequence
  Non-cyclic GFR-binding peptide
  MOD_RES (1), (33), (34): Xaa is C or S
XARVVMNYHYKLIVNSSDDKYLVSIPSLQTPAXX

SEQ ID NO: 3390 - protein, 39 aa, Artificial Sequence
  Non-cyclic GFR-binding peptide
  MOD_RES (2), (4), (36), (37): Xaa is C or S
HXGXARVVMNRHKRLIVNSSDDYYLVSTASLQTPAXXPK

SEQ ID NO: 3391 - protein, 38 aa, Artificial Sequence
  Non-cyclic GFR-binding peptide
  MOD_RES (1), (3), (37), (38): Xaa is C or S
  MOD_RES (15), (16), (17), (18), (19): Xaa is A or G
  MOD_RES (20), (21), (22), (23): Xaa is A or G or is absent
XGXGEVVMDRHKRLXXXXXXXXXYYLMSTASLETPVXX

SEQ ID NO: 3392 - protein, 42 aa, Artificial Sequence
  Non-cyclic GFR-binding peptide
  MOD_RES (1), (3), (40): Xaa is C or S
  MOD_RES (16), (17), (18), (19), (20): Xaa is A or G
  MOD_RES (21), (22), (23), (24): Xaa is A or G or is absent
XKXALHDELTYHYKLXXXXXXXXXKYLVSIPSLQVQTPRXQV

SEQ ID NO: 3393 - protein, 36 aa, Artificial Sequence
  Non-cyclic GFR-binding peptide
  MOD_RES (1), (3), (36): Xaa is C or S
  MOD_RES (14), (15), (16), (17), (18): Xaa is A or G
  MOD_RES (19), (20), (21), (22): Xaa is A or G or is absent
XKXSKVIMRYKKLXXXXXXXXXFYLISIANLDQSVX

SEQ ID NO: 3394 - protein, 39 aa, Artificial Sequence
  Non-cyclic GFR-binding peptide
  MOD_RES (2), (34), (35): Xaa is C or S
GXAKVVMNQYNKLIVNNSSDLYLVSIASLKTPAXXAKPV

SEQ ID NO: 3395 - protein, 40 aa, Artificial Sequence
  Non-cyclic GFR-binding peptide
  MOD_RES (1), (3), (37), (38): Xaa is C or S
  MOD_RES (15), (16), (17), (18), (19): Xaa is A or G
  MOD_RES (20), (21), (22), (23): Xaa is A or G or is absent
XGXGEVVMEYHYKLXXXXXXXXXKYLMSIPSLETPVXXAK

SEQ ID NO: 3396 - protein, 40 aa, Artificial Sequence
  Non-cyclic GFR-binding peptide
  MOD_RES (1), (3), (34), (35): Xaa is C or S
XKXSKVIMYHYKLIKPTKGIKYLISIPSLDQSVXXPSASA

SEQ ID NO: 3397 - protein, 41 aa, Artificial Sequence
  Non-cyclic GFR-binding peptide
  MOD_RES (1), (3), (36), (37): Xaa is C or S
XGXEAVSMGERYKKLTPVGMDDFYLVSIANLKTPVXXAKGV

SEQ ID NO: 3398 - protein, 40 aa, Artificial Sequence
  Non-cyclic GFR-binding peptide
  MOD_RES (37), (37): Xaa is C or S
  MOD_RES (13), (14), (15), (16), (17): Xaa is A or G
  MOD_RES (18), (19), (20), (21): Xaa is A or G or is absent
ALHDELTRYKKLXXXXXXXXXFYLVSIANLQVQTPRXQVN

SEQ ID NO: 3399 - protein, 42 aa, Artificial Sequence
  Non-cyclic GFR-binding peptide
  MOD_RES (1), (3), (36), (37): Xaa is C or S
  MOD_RES (14), (15), (16), (17), (18): Xaa is A or G
  MOD_RES (19), (20), (21), (22): Xaa is A or G or is absent
XKXSKVVMRHKRLXXXXXXXXXYYLISTASLDQPVXXPSASA

SEQ ID NO: 3400 - protein, 38 aa, Artificial Sequence
  Non-cyclic GFR-binding peptide
  MOD_RES (2), (4), (36): Xaa is C or S
HXGXSRVVMNQYNKLIVNSSDDLYLVSIASLKTPAXTP

SEQ ID NO: 3401 - protein, 36 aa, Artificial Sequence
  Non-cyclic GFR-binding peptide
  MOD_RES (1), (3), (35), (36): Xaa is C or S
XGXAKVVMNYHYKLIVNNSSDKYLVSIPSLKTPAXX

SEQ ID NO: 3402 - protein, 34 aa, Artificial Sequence
  Non-cyclic GFR-binding peptide
LHDELTYHYKLFIPKKRVIEKYLVSIPSLQVQTP

SEQ ID NO: 3403 - protein, 38 aa, Artificial Sequence
  Non-cyclic GFR-binding peptide
  MOD_RES (1), (3), (36), (37): Xaa is C or S
XGXEAVSMGERHKRLTPVGMDDYYLVSTASLKTPVXXA

SEQ ID NO: 3404 - protein, 42 aa, Artificial Sequence
  Non-cyclic GFR-binding peptide
  MOD_RES (1), (3), (36), (37): Xaa is C or S
  MOD_RES (14), (15), (16), (17), (18): Xaa is A or G
  MOD_RES (19), (20), (21), (22): Xaa is A or G or is absent
XKXSKVVMQYNKLXXXXXXXXXLYLISIASLDQPVXXPSASA

SEQ ID NO: 3405 - protein, 43 aa, Artificial Sequence
  Non-cyclic GFR-binding peptide
  MOD_RES (2), (39): Xaa is C or S
  MOD_RES (15), (16), (17), (18), (19): Xaa is A or G
  MOD_RES (20), (21), (22), (23): Xaa is A or G or is absent
KXALHDELTRHKRLXXXXXXXXXYYLVSTASLQVQTPRXQVNR

SEQ ID NO: 3406 - protein, 35 aa, Artificial Sequence
  Non-cyclic GFR-binding peptide
  MOD_RES (1), (3): Xaa is C or S
  MOD_RES (14), (15), (16), (17), (18): Xaa is A or G
  MOD_RES (19), (20), (21), (22): Xaa is A or G or is absent
XKXSRVIMRHKRLXXXXXXXXXYYLISTASLAQPV

SEQ ID NO: 3407 - protein, 39 aa, Artificial Sequence
  Non-cyclic GFR-binding peptide
  MOD_RES (2), (36), (37): Xaa is C or S
  MOD_RES (14), (15), (16), (17), (18): Xaa is A or G
  MOD_RES (19), (20), (21), (22): Xaa is A or G or is absent
GXSRVVMNRHKRLXXXXXXXXXYYLVSTASLKTPAXXPK

SEQ ID NO: 3408 - protein, 39 aa, Artificial Sequence
  Non-cyclic GFR-binding peptide
  MOD_RES (2), (4), (38), (39): Xaa is C or S
  MOD_RES (16), (17), (18), (19), (20): Xaa is A or G
  MOD_RES (21), (22), (23), (24): Xaa is A or G or is absent
RXGXGEVVMDRHKRLXXXXXXXXXYYLMSTASLETPVXX

SEQ ID NO: 3409 - protein, 37 aa, Artificial Sequence
  Non-cyclic GFR-binding peptide
  MOD_RES (1), (3), (37): Xaa is C or S
  MOD_RES (15), (16), (17), (18), (19): Xaa is A or G
  MOD_RES (20), (21), (22), (23): Xaa is A or G or is absent
XGXGEVVMEYHYKLXXXXXXXXXKYLMSIPSLETPVX

SEQ ID NO: 3410 - protein, 38 aa, Artificial Sequence
  Non-cyclic GFR-binding peptide
  MOD_RES (1), (34), (35): Xaa is C or S
XEAVSMGERYKKLTPVGMDDFYLVSIANLKTPVXXAKG

SEQ ID NO: 3411 - protein, 39 aa, Artificial Sequence
  Non-cyclic GFR-binding peptide
  MOD_RES (1), (3), (34), (35): Xaa is C or S
XKXSRVIMRYKKLVKPKRGVFYLISIANLAQPVXXPAAS

SEQ ID NO: 3412 - protein, 36 aa, Artificial Sequence
  Non-cyclic GFR-binding peptide
  MOD_RES (31), (32): Xaa is C or S
RVVMNYHYKLIVNSSDDKYLVSIPSLKTPAXXPKPV

SEQ ID NO: 3413 - protein, 35 aa, Artificial Sequence
  Non-cyclic GFR-binding peptide
  MOD_RES (31), (32): Xaa is C or S
EVVMDRHKRLVVKENEDYYLMSTASLETPVXXAKP

SEQ ID NO: 3414 - protein, 40 aa, Artificial Sequence
  Non-cyclic GFR-binding peptide
  MOD_RES (2), (4), (38), (39): Xaa is C or S
  MOD_RES (16), (17), (18), (19), (20): Xaa is A or G
  MOD_RES (21), (22), (23), (24): Xaa is A or G or is absent
HXGXARVVMNRHKRLXXXXXXXXXYYLVSTASLQTPAXXP

SEQ ID NO: 3415 - protein, 34 aa, Artificial Sequence
  Non-cyclic GFR-binding peptide
ALHDELTQYNKLFIPKKRVIELYLVSIASLQVQT

SEQ ID NO: 3416 - protein, 34 aa, Artificial Sequence
  Non-cyclic GFR-binding peptide
  MOD_RES (31), (32): Xaa is C or S
SKVVMRYKKLVKPTRGVFYLISIANLDQPVXXPS

SEQ ID NO: 3417 - protein, 34 aa, Artificial Sequence
  Non-cyclic GFR-binding peptide
ALHDELTRHKRLFIPKKRVIEYYLVSTASLQVQT

SEQ ID NO: 3418 - protein, 42 aa, Artificial Sequence
  Non-cyclic GFR-binding peptide
  MOD_RES (2), (4), (36), (37): Xaa is C or S
RXGXGEVVMEYHYKLVVKDYEDKYLMSIPSLETPVXXAKPIS

SEQ ID NO: 3419 - protein, 35 aa, Artificial Sequence
  Non-cyclic GFR-binding peptide
  MOD_RES (35), (35): Xaa is C or S
  MOD_RES (11), (12), (13), (14), (15): Xaa is A or G
  MOD_RES (16), (17), (18), (19): Xaa is A or G or is absent
HDELTRHKRLXXXXXXXXXYYLVSTASLQVQTPRX

SEQ ID NO: 3420 - protein, 39 aa, Artificial Sequence
  Non-cyclic GFR-binding peptide
  MOD_RES (2), (4), (36), (37): Xaa is C or S
RXGXGEVVMDYHYKLVVKENEDKYLMSIPSLETPVXXAK

SEQ ID NO: 3421 - protein, 40 aa, Artificial Sequence
  Non-cyclic GFR-binding peptide
  MOD_RES (2), (4), (37), (38): Xaa is C or S
  MOD_RES (15), (16), (17), (18), (19): Xaa is A or G
  MOD_RES (20), (21), (22), (23): Xaa is A or G or is absent
SXKXSKVIMQYNKLXXXXXXXXXLYLISIASLDQSVXXPS

SEQ ID NO: 3422 - protein, 35 aa, Artificial Sequence
  Non-cyclic GFR-binding peptide
  MOD_RES (2), (35): Xaa is C or S
GXEAVSMGERYKKLTPVGMDDFYLVSIANLKTPVX

SEQ ID NO: 3423 - protein, 43 aa, Artificial Sequence
  Non-cyclic GFR-binding peptide
  MOD_RES (2), (39): Xaa is C or S
KXALHDELTRHKRLFIPKKRVIEYYLVSTASLQVQTPRXQVNR

SEQ ID NO: 3424 - protein, 33 aa, Artificial Sequence
  Non-cyclic GFR-binding peptide
  MOD_RES (12), (13), (14), (15), (16): Xaa is A or G
  MOD_RES (17), (18), (19), (20): Xaa is A or G or is absent
LHDELTYHYKLXXXXXXXXXKYLVSIPSLQVQT

SEQ ID NO: 3425 - protein, 33 aa, Artificial Sequence
  Non-cyclic GFR-binding peptide
  MOD_RES (1), (33): Xaa is C or S
XGEVVMDRYKKLVVKENEDFYLMSIANLETPVX

SEQ ID NO: 3426 - protein, 37 aa, Artificial Sequence
  Non-cyclic GFR-binding peptide
  MOD_RES (1), (3), (36), (37): Xaa is C or S
  MOD_RES (14), (15), (16), (17), (18): Xaa is A or G
  MOD_RES (19), (20), (21), (22): Xaa is A or G or is absent
XKXSKVIMYHYKLXXXXXXXXXKYLISIPSLDQSVXX

SEQ ID NO: 3427 - protein, 37 aa, Artificial Sequence
  Non-cyclic GFR-binding peptide
  MOD_RES (1), (34), (35): Xaa is C or S
  MOD_RES (12), (13), (14), (15), (16): Xaa is A or G
  MOD_RES (17), (18), (19), (20): Xaa is A or G or is absent
XSKVVMRHKRLXXXXXXXXXYYLISTASLDQPVXXPS

SEQ ID NO: 3428 - protein, 38 aa, Artificial Sequence
  Non-cyclic GFR-binding peptide
  MOD_RES (33), (34): Xaa is C or S
  MOD_RES (11), (12), (13), (14), (15): Xaa is A or G
  MOD_RES (16), (17), (18), (19): Xaa is A or G or is absent
EVVMDRYKKLXXXXXXXXXFYLMSIANLETPVXXAKPI

SEQ ID NO: 3429 - protein, 34 aa, Artificial Sequence
  Non-cyclic GFR-binding peptide
  MOD_RES (1), (33), (34): Xaa is C or S
XGEVVMDRYKKLVVKENEDFYLMSIANLETPVXX

SEQ ID NO: 3430 - protein, 39 aa, Artificial Sequence
  Non-cyclic GFR-binding peptide
  MOD_RES (33), (34): Xaa is C or S
EAVSMGERYKKLTPVGMDDFYLVSIANLKTPVXXAKGVK

SEQ ID NO: 3431 - protein, 35 aa, Artificial Sequence
  Non-cyclic GFR-binding peptide
  MOD_RES (2), (34), (35): Xaa is C or S
GXARVVMNRHKRLIVNSSDDYYLVSTASLQTPAXX

SEQ ID NO: 3432 - protein, 37 aa, Artificial Sequence
  Non-cyclic GFR-binding peptide
  MOD_RES (1), (3), (34), (35): Xaa is C or S
XKXSRVIMYHYKLVKPKRGVKYLISIPSLAQPVXXPA

SEQ ID NO: 3433 - protein, 37 aa, Artificial Sequence
  Non-cyclic GFR-binding peptide
  MOD_RES (2), (35), (36): Xaa is C or S
  MOD_RES (13), (14), (15), (16), (17): Xaa is A or G
  MOD_RES (18), (19), (20), (21): Xaa is A or G or is absent
KXSKVVMRHKRLXXXXXXXXXYYLISTASLDQPVXXP

SEQ ID NO: 3434 - protein, 40 aa, Artificial Sequence
  Non-cyclic GFR-binding peptide
  MOD_RES (1), (34), (35): Xaa is C or S
  MOD_RES (12), (13), (14), (15), (16): Xaa is A or G
  MOD_RES (17), (18), (19), (20): Xaa is A or G or is absent
XSKVVMYHYKLXXXXXXXXXKYLISIPSLDQPVXXPSASA

SEQ ID NO: 3435 - protein, 35 aa, Artificial Sequence
  Non-cyclic GFR-binding peptide
  MOD_RES (2), (35): Xaa is C or S
  MOD_RES (13), (14), (15), (16), (17): Xaa is A or G
  MOD_RES (18), (19), (20), (21): Xaa is A or G or is absent
KXSRVIMRYKKLXXXXXXXXXFYLISIANLAQPVX

SEQ ID NO: 3436 - protein, 34 aa, Artificial Sequence
  Non-cyclic GFR-binding peptide
  MOD_RES (1), (33), (34): Xaa is C or S
XGEVVMDYHYKLVVKENEDKYLMSIPSLETPVXX

SEQ ID NO: 3437 - protein, 36 aa, Artificial Sequence
  Non-cyclic GFR-binding peptide
  MOD_RES (2), (4), (35), (36): Xaa is C or S
SXKXSKVIMRYKKLIKPTKGIFYLISIANLDQSVXX

SEQ ID NO: 3438 - protein, 36 aa, Artificial Sequence
  Non-cyclic GFR-binding peptide
  MOD_RES (1), (35), (36): Xaa is C or S
  MOD_RES (13), (14), (15), (16), (17): Xaa is A or G
  MOD_RES (18), (19), (20), (21): Xaa is A or G or is absent
XGEVVMDRYKKLXXXXXXXXXFYLMSIANLETPVXX

SEQ ID NO: 3439 - protein, 42 aa, Artificial Sequence
  Non-cyclic GFR-binding peptide
  MOD_RES (2), (4), (38), (39): Xaa is C or S
  MOD_RES (16), (17), (18), (19), (20): Xaa is A or G
  MOD_RES (21), (22), (23), (24): Xaa is A or G or is absent
HXGXARVVMNRHKRLXXXXXXXXXYYLVSTASLQTPAXXPKP

SEQ ID NO: 3440 - protein, 32 aa, Artificial Sequence
  Non-cyclic GFR-binding peptide
  MOD_RES (1), (1): Xaa is C or S
XARVVMNQYNKLIVNSSDDLYLVSIASLQTPA

SEQ ID NO: 3441 - protein, 38 aa, Artificial Sequence
  Non-cyclic GFR-binding peptide
  MOD_RES (1), (33), (34): Xaa is C or S
XGEVVMERYKKLVVKDYEDFYLMSIANLETPVXXAKPI

SEQ ID NO: 3442 - protein, 37 aa, Artificial Sequence
  Non-cyclic GFR-binding peptide
  MOD_RES (31), (32): Xaa is C or S
RVVMNQYNKLIVNSSDDLYLVSIASLKTPAXXPKPVY

SEQ ID NO: 3443 - protein, 42 aa, Artificial Sequence
  Non-cyclic GFR-binding peptide
  MOD_RES (2), (36), (37): Xaa is C or S
  MOD_RES (14), (15), (16), (17), (18): Xaa is A or G
  MOD_RES (19), (20), (21), (22): Xaa is A or G or is absent
GXGEVVMERHKRLXXXXXXXXXYYLMSTASLETPVXXAKPIS

SEQ ID NO: 3444 - protein, 43 aa, Artificial Sequence
  Non-cyclic GFR-binding peptide
  MOD_RES (2), (4), (38), (39): Xaa is C or S
  MOD_RES (16), (17), (18), (19), (20): Xaa is A or G
  MOD_RES (21), (22), (23), (24): Xaa is A or G or is absent
HXGXARVVMNYHYKLXXXXXXXXXKYLVSIPSLQTPAXXPKPV

SEQ ID NO: 3445 - protein, 38 aa, Artificial Sequence
  Non-cyclic GFR-binding peptide
  MOD_RES (2), (36), (37): Xaa is C or S
  MOD_RES (14), (15), (16), (17), (18): Xaa is A or G
  MOD_RES (19), (20), (21), (22): Xaa is A or G or is absent
GXGEVVMERYKKLXXXXXXXXXFYLMSIANLETPVXXA

SEQ ID NO: 3446 - protein, 37 aa, Artificial Sequence
  Non-cyclic GFR-binding peptide
  MOD_RES (1), (34), (35): Xaa is C or S
  MOD_RES (12), (13), (14), (15), (16): Xaa is A or G
  MOD_RES (17), (18), (19), (20): Xaa is A or G or is absent
XSKVVMQYNKLXXXXXXXXXLYLISIASLDQPVXXPS

SEQ ID NO: 3447 - protein, 39 aa, Artificial Sequence
  Non-cyclic GFR-binding peptide
  MOD_RES (1), (3), (35): Xaa is C or S
XGXSRVVMNYHYKLIVNSSDDKYLVSIPSLKTPAXTPKT

SEQ ID NO: 3448 - protein, 35 aa, Artificial Sequence
  Non-cyclic GFR-binding peptide
  MOD_RES (1), (3): Xaa is C or S
  MOD_RES (14), (15), (16), (17), (18): Xaa is A or G
  MOD_RES (19), (20), (21), (22): Xaa is A or G or is absent
XKXSKVIMYHYKLXXXXXXXXXKYLISIPSLDQSV

SEQ ID NO: 3449 - protein, 35 aa, Artificial Sequence
  Non-cyclic GFR-binding peptide
  MOD_RES (32), (33): Xaa is C or S
GEVVMDRHKRLVVKENEDYYLMSTASLETPVXXAK

SEQ ID NO: 3450 - protein, 40 aa, Artificial Sequence
  Non-cyclic GFR-binding peptide
  MOD_RES (1), (3), (34), (35): Xaa is C or S
XKXSKVVMRHKRLVKPTRGVYYLISTASLDQPVXXPSASA

SEQ ID NO: 3451 - protein, 39 aa, Artificial Sequence
  Non-cyclic GFR-binding peptide
  MOD_RES (1), (3), (34), (35): Xaa is C or S
XKXSKVVMYHYKLVKPTRGVKYLISIPSLDQPVXXPSAS

SEQ ID NO: 3452 - protein, 32 aa, Artificial Sequence
  Non-cyclic GFR-binding peptide
  MOD_RES (32), (32): Xaa is C or S
GEVVMERHKRLVVKDYEDYYLMSTASLETPVX

SEQ ID NO: 3453 - protein, 36 aa, Artificial Sequence
  Non-cyclic GFR-binding peptide
  MOD_RES (1), (3), (35), (36): Xaa is C or S
XGXARVVMNQYNKLIVNSSDDLYLVSIASLQTPAXX

SEQ ID NO: 3454 - protein, 34 aa, Artificial Sequence
  Non-cyclic GFR-binding peptide
  MOD_RES (33), (34): Xaa is C or S
  MOD_RES (11), (12), (13), (14), (15): Xaa is A or G
  MOD_RES (16), (17), (18), (19): Xaa is A or G or is absent
KVVMNRYKKLXXXXXXXXXFYLVSIANLKTPAXX

SEQ ID NO: 3455 - protein, 37 aa, Artificial Sequence
  Non-cyclic GFR-binding peptide
  MOD_RES (2), (4), (37): Xaa is C or S
  MOD_RES (15), (16), (17), (18), (19): Xaa is A or G
  MOD_RES (20), (21), (22), (23): Xaa is A or G or is absent
SXKXSKVVMQYNKLXXXXXXXXXLYLISIASLDQPVX

SEQ ID NO: 3456 - protein, 37 aa, Artificial Sequence
  Non-cyclic GFR-binding peptide
  MOD_RES (37), (37): Xaa is C or S
  MOD_RES (13), (14), (15), (16), (17): Xaa is A or G
  MOD_RES (18), (19), (20), (21): Xaa is A or G or is absent
ALHDELTRYKKLXXXXXXXXXFYLVSIANLQVQTPRX

SEQ ID NO: 3457 - protein, 35 aa, Artificial Sequence
  Non-cyclic GFR-binding peptide
  MOD_RES (1), (34), (35): Xaa is C or S
  MOD_RES (12), (13), (14), (15), (16): Xaa is A or G
  MOD_RES (17), (18), (19), (20): Xaa is A or G or is absent
XSKVIMYHYKLXXXXXXXXXKYLISIPSLDQSVXX

SEQ ID NO: 3458 - protein, 36 aa, Artificial Sequence
  Non-cyclic GFR-binding peptide
  MOD_RES (32), (32): Xaa is C or S
SRVVMNYHYKLIVNSSDDKYLVSIPSLKTPAXTPKT

SEQ ID NO: 3459 - protein, 39 aa, Artificial Sequence
  Non-cyclic GFR-binding peptide
  MOD_RES (34), (35): Xaa is C or S
  MOD_RES (12), (13), (14), (15), (16): Xaa is A or G
  MOD_RES (17), (18), (19), (20): Xaa is A or G or is absent
AKVVMNYHYKLXXXXXXXXXKYLVSIPSLKTPAXXAKPV

SEQ ID NO: 3460 - protein, 41 aa, Artificial Sequence
  Non-cyclic GFR-binding peptide
  MOD_RES (1), (3), (35), (36): Xaa is C or S
XGXGEVVMDRYKKLVVKENEDFYLMSIANLETPVXXAKPIK

SEQ ID NO: 3461 - protein, 34 aa, Artificial Sequence
  Non-cyclic GFR-binding peptide
  MOD_RES (12), (13), (14), (15), (16): Xaa is A or G
  MOD_RES (17), (18), (19), (20): Xaa is A or G or is absent
LHDELTRHKRLXXXXXXXXXYYLVSTASLQVQTP

SEQ ID NO: 3462 - protein, 35 aa, Artificial Sequence
  Non-cyclic GFR-binding peptide
  MOD_RES (2), (34), (35): Xaa is C or S
GXAKVVMNQYNKLIVNNSSDLYLVSIASLKTPAXX

SEQ ID NO: 3463 - protein, 37 aa, Artificial Sequence
  Non-cyclic GFR-binding peptide
  MOD_RES (1), (3), (37): Xaa is C or S
  MOD_RES (15), (16), (17), (18), (19): Xaa is A or G
  MOD_RES (20), (21), (22), (23): Xaa is A or G or is absent
XGXGEVVMDYHYKLXXXXXXXXXKYLMSIPSLETPVX

SEQ ID NO: 3464 - protein, 39 aa, Artificial Sequence
  Non-cyclic GFR-binding peptide
  MOD_RES (1), (35), (36): Xaa is C or S
  MOD_RES (13), (14), (15), (16), (17): Xaa is A or G
  MOD_RES (18), (19), (20), (21): Xaa is A or G or is absent
XAKVVMNQYNKLXXXXXXXXXLYLVSIASLKTPAXXAKP

SEQ ID NO: 3465 - protein, 40 aa, Artificial Sequence
  Non-cyclic GFR-binding peptide
  MOD_RES (1), (3), (35), (36): Xaa is C or S
XGXGEVVMERHKRLVVKDYEDYYLMSTASLETPVXXAKPI

SEQ ID NO: 3466 - protein, 39 aa, Artificial Sequence
  Non-cyclic GFR-binding peptide
  MOD_RES (1), (3), (37), (38): Xaa is C or S
  MOD_RES (15), (16), (17), (18), (19): Xaa is A or G
  MOD_RES (20), (21), (22), (23): Xaa is A or G or is absent
XGXGEVVMDYHYKLXXXXXXXXXKYLMSIPSLETPVXXA

SEQ ID NO: 3467 - protein, 41 aa, Artificial Sequence
  Non-cyclic GFR-binding peptide
  MOD_RES (1), (3), (37), (38): Xaa is C or S
  MOD_RES (15), (16), (17), (18), (19): Xaa is A or G
  MOD_RES (20), (21), (22), (23): Xaa is A or G or is absent
XGXARVVMNYHYKLXXXXXXXXXKYLVSIPSLQTPAXXPKP

SEQ ID NO: 3468 - protein, 41 aa, Artificial Sequence
  Non-cyclic GFR-binding peptide
  MOD_RES (2), (4), (41): Xaa is C or S
EXKXALHDELTQYNKLFIPKKRVIELYLVSIASLQVQTPRX

SEQ ID NO: 3469 - protein, 36 aa, Artificial Sequence
  Non-cyclic GFR-binding peptide
  MOD_RES (34), (35): Xaa is C or S
  MOD_RES (12), (13), (14), (15), (16): Xaa is A or G
  MOD_RES (17), (18), (19), (20): Xaa is A or G or is absent
GEVVMERHKRLXXXXXXXXXYYLMSTASLETPVXXA

SEQ ID NO: 3470 - protein, 39 aa, Artificial Sequence
  Non-cyclic GFR-binding peptide
  MOD_RES (1), (35), (36): Xaa is C or S
  MOD_RES (13), (14), (15), (16), (17): Xaa is A or G
  MOD_RES (18), (19), (20), (21): Xaa is A or G or is absent
XSRVVMNYHYKLXXXXXXXXXKYLVSIPSLKTPAXXPKP

SEQ ID NO: 3471 - protein, 34 aa, Artificial Sequence
  Non-cyclic GFR-binding peptide
  MOD_RES (1), (32), (33): Xaa is C or S
XSKVIMRYKKLIKPTKGIFYLISIANLDQSVXXP

SEQ ID NO: 3472 - protein, 35 aa, Artificial Sequence
  Non-cyclic GFR-binding peptide
  MOD_RES (33), (34): Xaa is C or S
  MOD_RES (11), (12), (13), (14), (15): Xaa is A or G
  MOD_RES (16), (17), (18), (19): Xaa is A or G or is absent
SKVVMRHKRLXXXXXXXXXYYLISTASLDQPVXXP

SEQ ID NO: 3473 - protein, 38 aa, Artificial Sequence
  Non-cyclic GFR-binding peptide
  MOD_RES (2), (33), (34): Xaa is C or S
KXSKVIMRHKRLIKPTKGIYYLISTASLDQSVXXPSAS

SEQ ID NO: 3474 - protein, 37 aa, Artificial Sequence
  Non-cyclic GFR-binding peptide
  MOD_RES (33), (34): Xaa is C or S
  MOD_RES (11), (12), (13), (14), (15): Xaa is A or G
  MOD_RES (16), (17), (18), (19): Xaa is A or G or is absent
SRVIMYHYKLXXXXXXXXXKYLISIPSLAQPVXXPAA

SEQ ID NO: 3475 - protein, 38 aa, Artificial Sequence
  Non-cyclic GFR-binding peptide
  MOD_RES (1), (3), (37), (38): Xaa is C or S
  MOD_RES (15), (16), (17), (18), (19): Xaa is A or G
  MOD_RES (20), (21), (22), (23): Xaa is A or G or is absent
XGXGEVVMERYKKLXXXXXXXXXFYLMSIANLETPVXX

SEQ ID NO: 3476 - protein, 38 aa, Artificial Sequence
  Non-cyclic GFR-binding peptide
  MOD_RES (2), (35), (36): Xaa is C or S
  MOD_RES (13), (14), (15), (16), (17): Xaa is A or G
  MOD_RES (18), (19), (20), (21): Xaa is A or G or is absent
KXSRVIMQYNKLXXXXXXXXXLYLISIASLAQPVXXPA

SEQ ID NO: 3477 - protein, 41 aa, Artificial Sequence
  Non-cyclic GFR-binding peptide
  MOD_RES (2), (4), (35), (36): Xaa is C or S
SXKXSKVIMQYNKLIKPTKGILYLISIASLDQSVXXPSASA

SEQ ID NO: 3478 - protein, 41 aa, Artificial Sequence
  Non-cyclic GFR-binding peptide
  MOD_RES (1), (35), (36): Xaa is C or S
  MOD_RES (13), (14), (15), (16), (17): Xaa is A or G
  MOD_RES (18), (19), (20), (21): Xaa is A or G or is absent
XSRVVMNYHYKLXXXXXXXXXKYLVSIPSLKTPAXXPKPVY

SEQ ID NO: 3479 - protein, 40 aa, Artificial Sequence
  Non-cyclic GFR-binding peptide
  MOD_RES (1), (3), (34), (35): Xaa is C or S
XKXSRVIMQYNKLVKPKRGVLYLISIASLAQPVXXPAASA

SEQ ID NO: 3480 - protein, 34 aa, Artificial Sequence
  Non-cyclic GFR-binding peptide
  MOD_RES (2), (34): Xaa is C or S
GXGEVVMERYKKLVVKDYEDFYLMSIANLETPVX

SEQ ID NO: 3481 - protein, 38 aa, Artificial Sequence
  Non-cyclic GFR-binding peptide
  MOD_RES (1), (3), (37), (38): Xaa is C or S
  MOD_RES (15), (16), (17), (18), (19): Xaa is A or G
  MOD_RES (20), (21), (22), (23): Xaa is A or G or is absent
XGXGEVVMERHKRLXXXXXXXXXYYLMSTASLETPVXX

SEQ ID NO: 3482 - protein, 33 aa, Artificial Sequence
  Non-cyclic GFR-binding peptide
  MOD_RES (12), (13), (14), (15), (16): Xaa is A or G
  MOD_RES (17), (18), (19), (20): Xaa is A or G or is absent
ARVVMNRHKRLXXXXXXXXXYYLVSTASLQTPA

SEQ ID NO: 3483 - protein, 41 aa, Artificial Sequence
  Non-cyclic GFR-binding peptide
  MOD_RES (2), (35), (36): Xaa is C or S
  MOD_RES (13), (14), (15), (16), (17): Xaa is A or G
  MOD_RES (18), (19), (20), (21): Xaa is A or G or is absent
KXSKVVMQYNKLXXXXXXXXXLYLISIASLDQPVXXPSASA

SEQ ID NO: 3484 - protein, 37 aa, Artificial Sequence
  Non-cyclic GFR-binding peptide
  MOD_RES (31), (32): Xaa is C or S
SRVIMRYKKLVKPKRGVFYLISIANLAQPVXXPAASA

SEQ ID NO: 3485 - protein, 36 aa, Artificial Sequence
  Non-cyclic GFR-binding peptide
  MOD_RES (1), (36): Xaa is C or S
  MOD_RES (14), (15), (16), (17), (18): Xaa is A or G
  MOD_RES (19), (20), (21), (22): Xaa is A or G or is absent
XEAVSMGERYKKLXXXXXXXXXFYLVSIANLKTPVX

SEQ ID NO: 3486 - protein, 41 aa, Artificial Sequence
  Non-cyclic GFR-binding peptide
  MOD_RES (2), (4), (37), (38): Xaa is C or S
RXGXEAVSMGERYKKLTPVGMDDFYLVSIANLKTPVXXAKG

SEQ ID NO: 3487 - protein, 42 aa, Artificial Sequence
  Non-cyclic GFR-binding peptide
  MOD_RES (2), (36), (37): Xaa is C or S
  MOD_RES (14), (15), (16), (17), (18): Xaa is A or G
  MOD_RES (19), (20), (21), (22): Xaa is A or G or is absent
GXARVVMNQYNKLXXXXXXXXXLYLVSIASLQTPAXXPKPVT

SEQ ID NO: 3488 - protein, 40 aa, Artificial Sequence
  Non-cyclic GFR-binding peptide
  MOD_RES (1), (38): Xaa is C or S
  MOD_RES (14), (15), (16), (17), (18): Xaa is A or G
  MOD_RES (19), (20), (21), (22): Xaa is A or G or is absent
XALHDELTQYNKLXXXXXXXXXLYLVSIASLQVQTPRXQV

SEQ ID NO: 3489 - protein, 36 aa, Artificial Sequence
  Non-cyclic GFR-binding peptide
  MOD_RES (2), (4), (35), (36): Xaa is C or S
SXKXSKVIMQYNKLIKPTKGILYLISIASLDQSVXX

SEQ ID NO: 3490 - protein, 31 aa, Artificial Sequence
  Non-cyclic GFR-binding peptide
ARVVMNYHYKLIVNSSDDKYLVSIPSLQTPA

SEQ ID NO: 3491 - protein, 36 aa, Artificial Sequence
  Non-cyclic GFR-binding peptide
  MOD_RES (31), (32): Xaa is C or S
RVVMNQYNKLIVNSSDDLYLVSIASLKTPAXXPKPV

SEQ ID NO: 3492 - protein, 33 aa, Artificial Sequence
  Non-cyclic GFR-binding peptide
  MOD_RES (32), (33): Xaa is C or S
GEVVMERYKKLVVKDYEDFYLMSIANLETPVXX

SEQ ID NO: 3493 - protein, 36 aa, Artificial Sequence
  Non-cyclic GFR-binding peptide
  MOD_RES (33), (34): Xaa is C or S
  MOD_RES (11), (12), (13), (14), (15): Xaa is A or G
  MOD_RES (16), (17), (18), (19): Xaa is A or G or is absent
RVVMNQYNKLXXXXXXXXXLYLVSIASLQTPAXXPK

SEQ ID NO: 3494 - protein, 33 aa, Artificial Sequence
  Non-cyclic GFR-binding peptide
  MOD_RES (33), (33): Xaa is C or S
  MOD_RES (11), (12), (13), (14), (15): Xaa is A or G
  MOD_RES (16), (17), (18), (19): Xaa is A or G or is absent
EVVMDRHKRLXXXXXXXXXYYLMSTASLETPVX

SEQ ID NO: 3495 - protein, 37 aa, Artificial Sequence
  Non-cyclic GFR-binding peptide
  MOD_RES (2), (4), (36), (37): Xaa is C or S
RXGXGEVVMDRYKKLVVKENEDFYLMSIANLETPVXX

SEQ ID NO: 3496 - protein, 38 aa, Artificial Sequence
  Non-cyclic GFR-binding peptide
  MOD_RES (1), (3), (36), (37): Xaa is C or S
  MOD_RES (14), (15), (16), (17), (18): Xaa is A or G
  MOD_RES (19), (20), (21), (22): Xaa is A or G or is absent
XKXSKVIMQYNKLXXXXXXXXXLYLISIASLDQSVXXP

SEQ ID NO: 3497 - protein, 38 aa, Artificial Sequence
  Non-cyclic GFR-binding peptide
  MOD_RES (2), (4), (36), (37): Xaa is C or S
HXGXSRVVMNRHKRLIVNSSDDYYLVSTASLKTPAXXP

SEQ ID NO: 3498 - protein, 37 aa, Artificial Sequence
  Non-cyclic GFR-binding peptide
  MOD_RES (1), (3): Xaa is C or S
XKXALHDELTRHKRLFIPKKRVIEYYLVSTASLQVQT

SEQ ID NO: 3499 - protein, 36 aa, Artificial Sequence
  Non-cyclic GFR-binding peptide
  MOD_RES (31), (32): Xaa is C or S
SKVVMRYKKLVKPTRGVFYLISIANLDQPVXXPSAS

SEQ ID NO: 3500 - protein, 35 aa, Artificial Sequence
  Non-cyclic GFR-binding peptide
  MOD_RES (2), (4), (35): Xaa is C or S
SXKXSRVIMRHKRLVKPKRGVYYLISTASLAQPVX

SEQ ID NO: 3501 - protein, 35 aa, Artificial Sequence
  Non-cyclic GFR-binding peptide
  MOD_RES (1), (3), (35): Xaa is C or S
XGXGEVVMERHKRLVVKDYEDYYLMSTASLETPVX

SEQ ID NO: 3502 - protein, 35 aa, Artificial Sequence
  Non-cyclic GFR-binding peptide
  MOD_RES (2), (4), (35): Xaa is C or S
SXKXSRVIMYHYKLVKPKRGVKYLISIPSLAQPVX

SEQ ID NO: 3503 - protein, 39 aa, Artificial Sequence
  Non-cyclic GFR-binding peptide
  MOD_RES (2), (4), (38), (39): Xaa is C or S
  MOD_RES (16), (17), (18), (19), (20): Xaa is A or G
  MOD_RES (21), (22), (23), (24): Xaa is A or G or is absent
HXGXARVVMNYHYKLXXXXXXXXXKYLVSIPSLQTPAXX

SEQ ID NO: 3504 - protein, 39 aa, Artificial Sequence
  Non-cyclic GFR-binding peptide
  MOD_RES (1), (3), (34), (35): Xaa is C or S
XKXSKVIMYHYKLIKPTKGIKYLISIPSLDQSVXXPSAS

SEQ ID NO: 3505 - protein, 39 aa, Artificial Sequence
  Non-cyclic GFR-binding peptide
  MOD_RES (2), (34), (35): Xaa is C or S
GXGEVVMDYHYKLVVKENEDKYLMSIPSLETPVXXAKPI

SEQ ID NO: 3506 - protein, 38 aa, Artificial Sequence
  Non-cyclic GFR-binding peptide
  MOD_RES (2), (35), (36): Xaa is C or S
  MOD_RES (13), (14), (15), (16), (17): Xaa is A or G
  MOD_RES (18), (19), (20), (21): Xaa is A or G or is absent
KXSKVIMQYNKLXXXXXXXXXLYLISIASLDQSVXXPS

SEQ ID NO: 3507 - protein, 39 aa, Artificial Sequence
  Non-cyclic GFR-binding peptide
  MOD_RES (2), (33), (34): Xaa is C or S
KXSRVIMYHYKLVKPKRGVKYLISIPSLAQPVXXPAASA

SEQ ID NO: 3508 - protein, 39 aa, Artificial Sequence
  Non-cyclic GFR-binding peptide
  MOD_RES (2), (35), (36): Xaa is C or S
  MOD_RES (13), (14), (15), (16), (17): Xaa is A or G
  MOD_RES (18), (19), (20), (21): Xaa is A or G or is absent
KXSRVIMRHKRLXXXXXXXXXYYLISTASLAQPVXXPAA

SEQ ID NO: 3509 - protein, 34 aa, Artificial Sequence
  Non-cyclic GFR-binding peptide
  MOD_RES (2), (2): Xaa is C or S
  MOD_RES (13), (14), (15), (16), (17): Xaa is A or G
  MOD_RES (18), (19), (20), (21): Xaa is A or G or is absent
KXSKVIMRHKRLXXXXXXXXXYYLISTASLDQSV

SEQ ID NO: 3510 - protein, 40 aa, Artificial Sequence
  Non-cyclic GFR-binding peptide
  MOD_RES (1), (3), (35): Xaa is C or S
XGXSRVVMNYHYKLIVNSSDDKYLVSIPSLKTPAXTPKTV

SEQ ID NO: 3511 - protein, 40 aa, Artificial Sequence
  Non-cyclic GFR-binding peptide
  MOD_RES (2), (4), (36), (37): Xaa is C or S
RXGXGEVVMERHKRLVVKDYEDYYLMSTASLETPVXXAKP

SEQ ID NO: 3512 - protein, 39 aa, Artificial Sequence
  Non-cyclic GFR-binding peptide
  MOD_RES (33), (34): Xaa is C or S
  MOD_RES (11), (12), (13), (14), (15): Xaa is A or G
  MOD_RES (16), (17), (18), (19): Xaa is A or G or is absent
EVVMERYKKLXXXXXXXXXFYLMSIANLETPVXXAKPIS

SEQ ID NO: 3513 - protein, 37 aa, Artificial Sequence
  Non-cyclic GFR-binding peptide
  MOD_RES (2), (36), (37): Xaa is C or S
  MOD_RES (14), (15), (16), (17), (18): Xaa is A or G
  MOD_RES (19), (20), (21), (22): Xaa is A or G or is absent
GXAKVVMNYHYKLXXXXXXXXXKYLVSIPSLKTPAXX

SEQ ID NO: 3514 - protein, 40 aa, Artificial Sequence
  Non-cyclic GFR-binding peptide
  MOD_RES (2), (36), (37): Xaa is C or S
  MOD_RES (14), (15), (16), (17), (18): Xaa is A or G
  MOD_RES (19), (20), (21), (22): Xaa is A or G or is absent
GXAKVVMNRYKKLXXXXXXXXXFYLVSIANLKTPAXXAKP

SEQ ID NO: 3515 - protein, 37 aa, Artificial Sequence
  Non-cyclic GFR-binding peptide
  MOD_RES (31), (31): Xaa is C or S
RVVMNYHYKLIVNSSDDKYLVSIPSLKTPAXTPKTVH

SEQ ID NO: 3516 - protein, 33 aa, Artificial Sequence
  Non-cyclic GFR-binding peptide
  MOD_RES (1), (1): Xaa is C or S
XEAVSMGERYKKLTPVGMDDFYLVSIANLKTPV

SEQ ID NO: 3517 - protein, 39 aa, Artificial Sequence
  Non-cyclic GFR-binding peptide
  MOD_RES (34), (35): Xaa is C or S
  MOD_RES (12), (13), (14), (15), (16): Xaa is A or G
  MOD_RES (17), (18), (19), (20): Xaa is A or G or is absent
GEVVMDRYKKLXXXXXXXXXFYLMSIANLETPVXXAKPI

SEQ ID NO: 3518 - protein, 40 aa, Artificial Sequence
  Non-cyclic GFR-binding peptide
  MOD_RES (1), (34), (35): Xaa is C or S
XEAVSMGEQYNKLTPVGMDDLYLVSIASLKTPVXXAKGVK

SEQ ID NO: 3519 - protein, 37 aa, Artificial Sequence
  Non-cyclic GFR-binding peptide
  MOD_RES (34), (35): Xaa is C or S
  MOD_RES (12), (13), (14), (15), (16): Xaa is A or G
  MOD_RES (17), (18), (19), (20): Xaa is A or G or is absent
AKVVMNQYNKLXXXXXXXXXLYLVSIASLKTPAXXAK

SEQ ID NO: 3520 - protein, 45 aa, Artificial Sequence
  Non-cyclic GFR-binding peptide
  MOD_RES (2), (4), (41): Xaa is C or S
EXKXALHDELTQYNKLFIPKKRVIELYLVSIASLQVQTPRXQVNR

SEQ ID NO: 3521 - protein, 37 aa, Artificial Sequence
  Non-cyclic GFR-binding peptide
  MOD_RES (31), (32): Xaa is C or S
RVVMNYHYKLIVNSSDDKYLVSIPSLKTPAXXPKPVY

SEQ ID NO: 3522 - protein, 32 aa, Artificial Sequence
  Non-cyclic GFR-binding peptide
  MOD_RES (2), (2): Xaa is C or S
KXSKVVMRHKRLVKPTRGVYYLISTASLDQPV

SEQ ID NO: 3523 - protein, 38 aa, Artificial Sequence
  Non-cyclic GFR-binding peptide
  MOD_RES (32), (33): Xaa is C or S
GEVVMEYHYKLVVKDYEDKYLMSIPSLETPVXXAKPIS

SEQ ID NO: 3524 - protein, 36 aa, Artificial Sequence
  Non-cyclic GFR-binding peptide
  MOD_RES (1), (3): Xaa is C or S
  MOD_RES (15), (16), (17), (18), (19): Xaa is A or G
  MOD_RES (20), (21), (22), (23): Xaa is A or G or is absent
XGXARVVMNQYNKLXXXXXXXXXLYLVSIASLQTPA

SEQ ID NO: 3525 - protein, 38 aa, Artificial Sequence
  Non-cyclic GFR-binding peptide
  MOD_RES (35), (36): Xaa is C or S
  MOD_RES (13), (14), (15), (16), (17): Xaa is A or G
  MOD_RES (18), (19), (20), (21): Xaa is A or G or is absent
EAVSMGERYKKLXXXXXXXXXFYLVSIANLKTPVXXAK

SEQ ID NO: 3526 - protein, 37 aa, Artificial Sequence
  Non-cyclic GFR-binding peptide
  MOD_RES (2), (4), (37): Xaa is C or S
  MOD_RES (15), (16), (17), (18), (19): Xaa is A or G
  MOD_RES (20), (21), (22), (23): Xaa is A or G or is absent
SXKXSRVIMRYKKLXXXXXXXXXFYLISIANLAQPVX

SEQ ID NO: 3527 - protein, 39 aa, Artificial Sequence
  Non-cyclic GFR-binding peptide
  MOD_RES (1), (3), (34), (35): Xaa is C or S
XKXSKVIMRYKKLIKPTKGIFYLISIANLDQSVXXPSAS

SEQ ID NO: 3528 - protein, 36 aa, Artificial Sequence
  Non-cyclic GFR-binding peptide
ALHDELTQYNKLFIPKKRVIELYLVSIASLQVQTPR

SEQ ID NO: 3529 - protein, 37 aa, Artificial Sequence
  Non-cyclic GFR-binding peptide
  MOD_RES (1), (35), (36): Xaa is C or S
  MOD_RES (13), (14), (15), (16), (17): Xaa is A or G
  MOD_RES (18), (19), (20), (21): Xaa is A or G or is absent
XARVVMNQYNKLXXXXXXXXXLYLVSIASLQTPAXXP

SEQ ID NO: 3530 - protein, 34 aa, Artificial Sequence
  Non-cyclic GFR-binding peptide
  MOD_RES (1), (3): Xaa is C or S
XGXARVVMNYHYKLIVNSSDDKYLVSIPSLQTPA

SEQ ID NO: 3531 - protein, 33 aa, Artificial Sequence
  Non-cyclic GFR-binding peptide
  MOD_RES (11), (12), (13), (14), (15): Xaa is A or G
  MOD_RES (16), (17), (18), (19): Xaa is A or G or is absent
HDELTYHYKLXXXXXXXXXKYLVSIPSLQVQTP

SEQ ID NO: 3532 - protein, 37 aa, Artificial Sequence
  Non-cyclic GFR-binding peptide
  MOD_RES (34), (35): Xaa is C or S
  MOD_RES (12), (13), (14), (15), (16): Xaa is A or G
  MOD_RES (17), (18), (19), (20): Xaa is A or G or is absent
SRVVMNQYNKLXXXXXXXXXLYLVSIASLKTPAXXPK

SEQ ID NO: 3533 - protein, 40 aa, Artificial Sequence
  Non-cyclic GFR-binding peptide
  MOD_RES (1), (3), (37), (38): Xaa is C or S
  MOD_RES (15), (16), (17), (18), (19): Xaa is A or G
  MOD_RES (20), (21), (22), (23): Xaa is A or G or is absent
XGXAKVVMNRYKKLXXXXXXXXXFYLVSIANLKTPAXXAK

SEQ ID NO: 3534 - protein, 38 aa, Artificial Sequence
  Non-cyclic GFR-binding peptide
  MOD_RES (2), (4), (38): Xaa is C or S
  MOD_RES (16), (17), (18), (19), (20): Xaa is A or G
  MOD_RES (21), (22), (23), (24): Xaa is A or G or is absent
RXGXGEVVMERYKKLXXXXXXXXXFYLMSIANLETPVX

SEQ ID NO: 3535 - protein, 41 aa, Artificial Sequence
  Non-cyclic GFR-binding peptide
  MOD_RES (2), (4), (41): Xaa is C or S
  MOD_RES (17), (18), (19), (20), (21): Xaa is A or G
  MOD_RES (22), (23), (24), (25): Xaa is A or G or is absent
EXKXALHDELTQYNKLXXXXXXXXXLYLVSIASLQVQTPRX

SEQ ID NO: 3536 - protein, 36 aa, Artificial Sequence
  Non-cyclic GFR-binding peptide
  MOD_RES (2), (35), (36): Xaa is C or S
  MOD_RES (13), (14), (15), (16), (17): Xaa is A or G
  MOD_RES (18), (19), (20), (21): Xaa is A or G or is absent
KXSKVVMQYNKLXXXXXXXXXLYLISIASLDQPVXX

SEQ ID NO: 3537 - protein, 37 aa, Artificial Sequence
  Non-cyclic GFR-binding peptide
  MOD_RES (31), (32): Xaa is C or S
EVVMERYKKLVVKDYEDFYLMSIANLETPVXXAKPIS

SEQ ID NO: 3538 - protein, 35 aa, Artificial Sequence
  Non-cyclic GFR-binding peptide
  MOD_RES (2), (4): Xaa is C or S
HXGXAKVVMNRYKKLIVNNSSDFYLVSIANLKTPA

SEQ ID NO: 3539 - protein, 38 aa, Artificial Sequence
  Non-cyclic GFR-binding peptide
  MOD_RES (35), (35): Xaa is C or S
  MOD_RES (11), (12), (13), (14), (15): Xaa is A or G
  MOD_RES (16), (17), (18), (19): Xaa is A or G or is absent
HDELTRYKKLXXXXXXXXXFYLVSIANLQVQTPRXQVN

SEQ ID NO: 3540 - protein, 38 aa, Artificial Sequence
  Non-cyclic GFR-binding peptide
  MOD_RES (2), (4): Xaa is C or S
  MOD_RES (17), (18), (19), (20), (21): Xaa is A or G
  MOD_RES (22), (23), (24), (25): Xaa is A or G or is absent
RXGXEAVSMGERHKRLXXXXXXXXXYYLVSTASLKTPV

SEQ ID NO: 3541 - protein, 35 aa, Artificial Sequence
  Non-cyclic GFR-binding peptide
  MOD_RES (2), (35): Xaa is C or S
  MOD_RES (13), (14), (15), (16), (17): Xaa is A or G
  MOD_RES (18), (19), (20), (21): Xaa is A or G or is absent
KXSKVIMYHYKLXXXXXXXXXKYLISIPSLDQSVX

SEQ ID NO: 3542 - protein, 37 aa, Artificial Sequence
  Non-cyclic GFR-binding peptide
  MOD_RES (33), (34): Xaa is C or S
  MOD_RES (11), (12), (13), (14), (15): Xaa is A or G
  MOD_RES (16), (17), (18), (19): Xaa is A or G or is absent
SKVVMRYKKLXXXXXXXXXFYLISIANLDQPVXXPSA

SEQ ID NO: 3543 - protein, 38 aa, Artificial Sequence
  Non-cyclic GFR-binding peptide
  MOD_RES (2), (34), (35): Xaa is C or S
GXSRVVMNQYNKLIVNSSDDLYLVSIASLKTPAXXPKP

SEQ ID NO: 3544 - protein, 34 aa, Artificial Sequence
  Non-cyclic GFR-binding peptide
  MOD_RES (33), (34): Xaa is C or S
  MOD_RES (11), (12), (13), (14), (15): Xaa is A or G
  MOD_RES (16), (17), (18), (19): Xaa is A or G or is absent
RVVMNQYNKLXXXXXXXXXLYLVSIASLQTPAXX

SEQ ID NO: 3545 - protein, 38 aa, Artificial Sequence
  Non-cyclic GFR-binding peptide
  MOD_RES (2), (35), (36): Xaa is C or S
  MOD_RES (13), (14), (15), (16), (17): Xaa is A or G
  MOD_RES (18), (19), (20), (21): Xaa is A or G or is absent
KXSRVIMRHKRLXXXXXXXXXYYLISTASLAQPVXXPA

SEQ ID NO: 3546 - protein, 38 aa, Artificial Sequence
  Non-cyclic GFR-binding peptide
  MOD_RES (2), (34), (35): Xaa is C or S
GXSRVVMNYHYKLIVNSSDDKYLVSIPSLKTPAXXPKP

SEQ ID NO: 3547 - protein, 36 aa, Artificial Sequence
  Non-cyclic GFR-binding peptide
ALHDELTRHKRLFIPKKRVIEYYLVSTASLQVQTPR

SEQ ID NO: 3548 - protein, 40 aa, Artificial Sequence
  Non-cyclic GFR-binding peptide
  MOD_RES (1), (3), (35), (36): Xaa is C or S
XGXGEVVMDRHKRLVVKENEDYYLMSTASLETPVXXAKPI

SEQ ID NO: 3549 - protein, 31 aa, Artificial Sequence
  Non-cyclic GFR-binding peptide
  MOD_RES (1), (1): Xaa is C or S
XSRVIMQYNKLVKPKRGVLYLISIASLAQPV

SEQ ID NO: 3550 - protein, 44 aa, Artificial Sequence
  Non-cyclic GFR-binding peptide
  MOD_RES (2), (4), (41): Xaa is C or S
EXKXALHDELTRYKKLFIPKKRVIEFYLVSIANLQVQTPRXQVN

SEQ ID NO: 3551 - protein, 39 aa, Artificial Sequence
  Non-cyclic GFR-binding peptide
  MOD_RES (1), (3), (36), (37): Xaa is C or S
  MOD_RES (14), (15), (16), (17), (18): Xaa is A or G
  MOD_RES (19), (20), (21), (22): Xaa is A or G or is absent
XKXSKVVMQYNKLXXXXXXXXXLYLISIASLDQPVXXPS

SEQ ID NO: 3552 - protein, 42 aa, Artificial Sequence
  Non-cyclic GFR-binding peptide
  MOD_RES (2), (36), (37): Xaa is C or S
  MOD_RES (14), (15), (16), (17), (18): Xaa is A or G
  MOD_RES (19), (20), (21), (22): Xaa is A or G or is absent
GXAKVVMNYHYKLXXXXXXXXXKYLVSIPSLKTPAXXAKPVA

SEQ ID NO: 3553 - protein, 34 aa, Artificial Sequence
  Non-cyclic GFR-binding peptide
  MOD_RES (1), (34): Xaa is C or S
XEAVSMGERYKKLTPVGMDDFYLVSIANLKTPVX

SEQ ID NO: 3554 - protein, 41 aa, Artificial Sequence
  Non-cyclic GFR-binding peptide
  MOD_RES (2), (4), (36), (37): Xaa is C or S
RXGXGEVVMDYHYKLVVKENEDKYLMSIPSLETPVXXAKPI

SEQ ID NO: 3555 - protein, 35 aa, Artificial Sequence
  Non-cyclic GFR-binding peptide
  MOD_RES (1), (3), (35): Xaa is C or S
XGXARVVMNRHKRLIVNSSDDYYLVSTASLQTPAX

SEQ ID NO: 3556 - protein, 36 aa, Artificial Sequence
  Non-cyclic GFR-binding peptide
  MOD_RES (1), (3): Xaa is C or S
  MOD_RES (15), (16), (17), (18), (19): Xaa is A or G
  MOD_RES (20), (21), (22), (23): Xaa is A or G or is absent
XGXGEVVMERYKKLXXXXXXXXXFYLMSIANLETPV

SEQ ID NO: 3557 - protein, 35 aa, Artificial Sequence
  Non-cyclic GFR-binding peptide
  MOD_RES (1), (3), (35): Xaa is C or S
XGXSRVVMNRHKRLIVNSSDDYYLVSTASLKTPAX

SEQ ID NO: 3558 - protein, 37 aa, Artificial Sequence
  Non-cyclic GFR-binding peptide
  MOD_RES (1), (3), (35), (36): Xaa is C or S
XGXAKVVMNYHYKLIVNNSSDKYLVSIPSLKTPAXXA

SEQ ID NO: 3559 - protein, 33 aa, Artificial Sequence
  Non-cyclic GFR-binding peptide
  MOD_RES (1), (33): Xaa is C or S
XAKVVMNQYNKLIVNNSSDLYLVSIASLKTPAX

SEQ ID NO: 3560 - protein, 38 aa, Artificial Sequence
  Non-cyclic GFR-binding peptide
  MOD_RES (33), (34): Xaa is C or S
  MOD_RES (11), (12), (13), (14), (15): Xaa is A or G
  MOD_RES (16), (17), (18), (19): Xaa is A or G or is absent
KVVMNRYKKLXXXXXXXXXFYLVSIANLKTPAXXAKPV

SEQ ID NO: 3561 - protein, 31 aa, Artificial Sequence
  Non-cyclic GFR-binding peptide
AKVVMNQYNKLIVNNSSDLYLVSIASLKTPA

SEQ ID NO: 3562 - protein, 40 aa, Artificial Sequence
  Non-cyclic GFR-binding peptide
  MOD_RES (2), (36), (37): Xaa is C or S
  MOD_RES (14), (15), (16), (17), (18): Xaa is A or G
  MOD_RES (19), (20), (21), (22): Xaa is A or G or is absent
GXGEVVMERYKKLXXXXXXXXXFYLMSIANLETPVXXAKP

SEQ ID NO: 3563 - protein, 43 aa, Artificial Sequence
  Non-cyclic GFR-binding peptide
  MOD_RES (1), (3), (37), (38): Xaa is C or S
  MOD_RES (15), (16), (17), (18), (19): Xaa is A or G
  MOD_RES (20), (21), (22), (23): Xaa is A or G or is absent
XGXGEVVMDYHYKLXXXXXXXXXKYLMSIPSLETPVXXAKPIK

SEQ ID NO: 3564 - protein, 40 aa, Artificial Sequence
  Non-cyclic GFR-binding peptide
  MOD_RES (2), (4), (35), (36): Xaa is C or S
SXKXSRVIMYHYKLVKPKRGVKYLISIPSLAQPVXXPAAS

SEQ ID NO: 3565 - protein, 33 aa, Artificial Sequence
  Non-cyclic GFR-binding peptide
  MOD_RES (33), (33): Xaa is C or S
  MOD_RES (11), (12), (13), (14), (15): Xaa is A or G
  MOD_RES (16), (17), (18), (19): Xaa is A or G or is absent
EVVMDYHYKLXXXXXXXXXKYLMSIPSLETPVX

SEQ ID NO: 3566 - protein, 34 aa, Artificial Sequence
  Non-cyclic GFR-binding peptide
  MOD_RES (33), (33): Xaa is C or S
  MOD_RES (11), (12), (13), (14), (15): Xaa is A or G
  MOD_RES (16), (17), (18), (19): Xaa is A or G or is absent
RVVMNYHYKLXXXXXXXXXKYLVSIPSLKTPAXT

SEQ ID NO: 3567 - protein, 35 aa, Artificial Sequence
  Non-cyclic GFR-binding peptide
  MOD_RES (2), (4): Xaa is C or S
HXGXARVVMNRHKRLIVNSSDDYYLVSTASLQTPA

SEQ ID NO: 3568 - protein, 42 aa, Artificial Sequence
  Non-cyclic GFR-binding peptide
  MOD_RES (2), (4), (41): Xaa is C or S
EXKXALHDELTYHYKLFIPKKRVIEKYLVSIPSLQVQTPRXQ

SEQ ID NO: 3569 - protein, 39 aa, Artificial Sequence
  Non-cyclic GFR-binding peptide
  MOD_RES (2), (4), (37), (38): Xaa is C or S
  MOD_RES (15), (16), (17), (18), (19): Xaa is A or G
  MOD_RES (20), (21), (22), (23): Xaa is A or G or is absent
SXKXSKVIMQYNKLXXXXXXXXXLYLISIASLDQSVXXP

SEQ ID NO: 3570 - protein, 38 aa, Artificial Sequence
  Non-cyclic GFR-binding peptide
  MOD_RES (1), (3): Xaa is C or S
  MOD_RES (16), (17), (18), (19), (20): Xaa is A or G
  MOD_RES (21), (22), (23), (24): Xaa is A or G or is absent
XKXALHDELTRHKRLXXXXXXXXXYYLVSTASLQVQTP

SEQ ID NO: 3571 - protein, 35 aa, Artificial Sequence
  Non-cyclic GFR-binding peptide
  MOD_RES (1), (32), (33): Xaa is C or S
XSKVVMRHKRLVKPTRGVYYLISTASLDQPVXXPS

SEQ ID NO: 3572 - protein, 36 aa, Artificial Sequence
  Non-cyclic GFR-binding peptide
  MOD_RES (1), (3), (34), (35): Xaa is C or S
XKXSRVIMYHYKLVKPKRGVKYLISIPSLAQPVXXP

SEQ ID NO: 3573 - protein, 35 aa, Artificial Sequence
  Non-cyclic GFR-binding peptide
  MOD_RES (1), (34), (35): Xaa is C or S
  MOD_RES (12), (13), (14), (15), (16): Xaa is A or G
  MOD_RES (17), (18), (19), (20): Xaa is A or G or is absent
XSKVIMRYKKLXXXXXXXXXFYLISIANLDQSVXX

SEQ ID NO: 3574 - protein, 33 aa, Artificial Sequence
  Non-cyclic GFR-binding peptide
  MOD_RES (2), (2): Xaa is C or S
GXGEVVMDRHKRLVVKENEDYYLMSTASLETPV

SEQ ID NO: 3575 - protein, 42 aa, Artificial Sequence
  Non-cyclic GFR-binding peptide
  MOD_RES (1), (3), (40): Xaa is C or S
  MOD_RES (16), (17), (18), (19), (20): Xaa is A or G
  MOD_RES (21), (22), (23), (24): Xaa is A or G or is absent
XKXALHDELTRYKKLXXXXXXXXXFYLVSIANLQVQTPRXQV

SEQ ID NO: 3576 - protein, 39 aa, Artificial Sequence
  Non-cyclic GFR-binding peptide
  MOD_RES (1), (35): Xaa is C or S
  MOD_RES (13), (14), (15), (16), (17): Xaa is A or G
  MOD_RES (18), (19), (20), (21): Xaa is A or G or is absent
XSRVVMNRHKRLXXXXXXXXXYYLVSTASLKTPAXTPKT

SEQ ID NO: 3577 - protein, 38 aa, Artificial Sequence
  Non-cyclic GFR-binding peptide
  MOD_RES (2), (33), (34): Xaa is C or S
KXSKVVMRHKRLVKPTRGVYYLISTASLDQPVXXPSAS

SEQ ID NO: 3578 - protein, 40 aa, Artificial Sequence
  Non-cyclic GFR-binding peptide
  MOD_RES (1), (3), (35), (36): Xaa is C or S
XGXAKVVMNYHYKLIVNNSSDKYLVSIPSLKTPAXXAKPV

SEQ ID NO: 3579 - protein, 37 aa, Artificial Sequence
  Non-cyclic GFR-binding peptide
  MOD_RES (34), (35): Xaa is C or S
  MOD_RES (12), (13), (14), (15), (16): Xaa is A or G
  MOD_RES (17), (18), (19), (20): Xaa is A or G or is absent
GEVVMDYHYKLXXXXXXXXXKYLMSIPSLETPVXXAK

SEQ ID NO: 3580 - protein, 38 aa, Artificial Sequence
  Non-cyclic GFR-binding peptide
  MOD_RES (2), (4), (36), (37): Xaa is C or S
HXGXAKVVMNQYNKLIVNNSSDLYLVSIASLKTPAXXA

SEQ ID NO: 3581 - protein, 38 aa, Artificial Sequence
  Non-cyclic GFR-binding peptide
  MOD_RES (1), (3), (36), (37): Xaa is C or S
  MOD_RES (14), (15), (16), (17), (18): Xaa is A or G
  MOD_RES (19), (20), (21), (22): Xaa is A or G or is absent
XKXSRVIMQYNKLXXXXXXXXXLYLISIASLAQPVXXP

SEQ ID NO: 3582 - protein, 39 aa, Artificial Sequence
  Non-cyclic GFR-binding peptide
  MOD_RES (1), (33), (34): Xaa is C or S
XSRVVMNQYNKLIVNSSDDLYLVSIASLKTPAXXPKPVY

SEQ ID NO: 3583 - protein, 40 aa, Artificial Sequence
  Non-cyclic GFR-binding peptide
  MOD_RES (36), (36): Xaa is C or S
  MOD_RES (12), (13), (14), (15), (16): Xaa is A or G
  MOD_RES (17), (18), (19), (20): Xaa is A or G or is absent
LHDELTQYNKLXXXXXXXXXLYLVSIASLQVQTPRXQVNR

SEQ ID NO: 3584 - protein, 35 aa, Artificial Sequence
  Non-cyclic GFR-binding peptide
  MOD_RES (2), (33), (34): Xaa is C or S
KXSRVIMRYKKLVKPKRGVFYLISIANLAQPVXXP

SEQ ID NO: 3585 - protein, 31 aa, Artificial Sequence
  Non-cyclic GFR-binding peptide
AKVVMNRYKKLIVNNSSDFYLVSIANLKTPA

SEQ ID NO: 3586 - protein, 38 aa, Artificial Sequence
  Non-cyclic GFR-binding peptide
  MOD_RES (1), (32), (33): Xaa is C or S
XSRVIMYHYKLVKPKRGVKYLISIPSLAQPVXXPAASA

SEQ ID NO: 3587 - protein, 34 aa, Artificial Sequence
  Non-cyclic GFR-binding peptide
  MOD_RES (1), (3): Xaa is C or S
XGXSRVVMNYHYKLIVNSSDDKYLVSIPSLKTPA

SEQ ID NO: 3588 - protein, 35 aa, Artificial Sequence
  Non-cyclic GFR-binding peptide
  MOD_RES (31), (32): Xaa is C or S
EVVMERYKKLVVKDYEDFYLMSIANLETPVXXAKP

SEQ ID NO: 3589 - protein, 35 aa, Artificial Sequence
  Non-cyclic GFR-binding peptide
  MOD_RES (2), (33), (34): Xaa is C or S
KXSRVIMYHYKLVKPKRGVKYLISIPSLAQPVXXP

SEQ ID NO: 3590 - protein, 40 aa, Artificial Sequence
  Non-cyclic GFR-binding peptide
  MOD_RES (1), (38): Xaa is C or S
  MOD_RES (14), (15), (16), (17), (18): Xaa is A or G
  MOD_RES (19), (20), (21), (22): Xaa is A or G or is absent
XALHDELTYHYKLXXXXXXXXXKYLVSIPSLQVQTPRXQV

SEQ ID NO: 3591 - protein, 37 aa, Artificial Sequence
  Non-cyclic GFR-binding peptide
  MOD_RES (33), (34): Xaa is C or S
  MOD_RES (11), (12), (13), (14), (15): Xaa is A or G
  MOD_RES (16), (17), (18), (19): Xaa is A or G or is absent
EVVMEYHYKLXXXXXXXXXKYLMSIPSLETPVXXAKP

SEQ ID NO: 3592 - protein, 32 aa, Artificial Sequence
  Non-cyclic GFR-binding peptide
  MOD_RES (1), (1): Xaa is C or S
XGEVVMDRYKKLVVKENEDFYLMSIANLETPV

SEQ ID NO: 3593 - protein, 35 aa, Artificial Sequence
  Non-cyclic GFR-binding peptide
  MOD_RES (34), (35): Xaa is C or S
  MOD_RES (12), (13), (14), (15), (16): Xaa is A or G
  MOD_RES (17), (18), (19), (20): Xaa is A or G or is absent
SRVVMNRHKRLXXXXXXXXXYYLVSTASLKTPAXX

SEQ ID NO: 3594 - protein, 35 aa, Artificial Sequence
  Non-cyclic GFR-binding peptide
  MOD_RES (2), (34), (35): Xaa is C or S
GXAKVVMNYHYKLIVNNSSDKYLVSIPSLKTPAXX

SEQ ID NO: 3595 - protein, 36 aa, Artificial Sequence
  Non-cyclic GFR-binding peptide
  MOD_RES (1), (35), (36): Xaa is C or S
  MOD_RES (13), (14), (15), (16), (17): Xaa is A or G
  MOD_RES (18), (19), (20), (21): Xaa is A or G or is absent
XARVVMNYHYKLXXXXXXXXXKYLVSIPSLQTPAXX

SEQ ID NO: 3596 - protein, 39 aa, Artificial Sequence
  Non-cyclic GFR-binding peptide
  MOD_RES (33), (34): Xaa is C or S
  MOD_RES (11), (12), (13), (14), (15): Xaa is A or G
  MOD_RES (16), (17), (18), (19): Xaa is A or G or is absent
EVVMDRHKRLXXXXXXXXXYYLMSTASLETPVXXAKPIK

SEQ ID NO: 3597 - protein, 41 aa, Artificial Sequence
  Non-cyclic GFR-binding peptide
  MOD_RES (2), (39): Xaa is C or S
  MOD_RES (15), (16), (17), (18), (19): Xaa is A or G
  MOD_RES (20), (21), (22), (23): Xaa is A or G or is absent
KXALHDELTRYKKLXXXXXXXXXFYLVSIANLQVQTPRXQV

SEQ ID NO: 3598 - protein, 36 aa, Artificial Sequence
  Non-cyclic GFR-binding peptide
  MOD_RES (32), (33): Xaa is C or S
GEVVMDRHKRLVVKENEDYYLMSTASLETPVXXAKP

SEQ ID NO: 3599 - protein, 38 aa, Artificial Sequence
  Non-cyclic GFR-binding peptide
  MOD_RES (1), (33), (34): Xaa is C or S
XGEVVMEYHYKLVVKDYEDKYLMSIPSLETPVXXAKPI

SEQ ID NO: 3600 - protein, 39 aa, Artificial Sequence
  Non-cyclic GFR-binding peptide
  MOD_RES (2), (34): Xaa is C or S
GXSRVVMNQYNKLIVNSSDDLYLVSIASLKTPAXTPKTV

SEQ ID NO: 3601 - protein, 39 aa, Artificial Sequence
  Non-cyclic GFR-binding peptide
  MOD_RES (35), (35): Xaa is C or S
HDELTRHKRLFIPKKRVIEYYLVSTASLQVQTPRXQVNR

SEQ ID NO: 3602 - protein, 39 aa, Artificial Sequence
  Non-cyclic GFR-binding peptide
  MOD_RES (37), (37): Xaa is C or S
ALHDELTYHYKLFIPKKRVIEKYLVSIPSLQVQTPRXQV

SEQ ID NO: 3603 - protein, 42 aa, Artificial Sequence
  Non-cyclic GFR-binding peptide
  MOD_RES (1), (3), (36), (37): Xaa is C or S
  MOD_RES (14), (15), (16), (17), (18): Xaa is A or G
  MOD_RES (19), (20), (21), (22): Xaa is A or G or is absent
XKXSKVIMYHYKLXXXXXXXXXKYLISIPSLDQSVXXPSASA

SEQ ID NO: 3604 - protein, 35 aa, Artificial Sequence
  Non-cyclic GFR-binding peptide
  MOD_RES (1), (33): Xaa is C or S
XSRVVMNYHYKLIVNSSDDKYLVSIPSLKTPAXTP

SEQ ID NO: 3605 - protein, 40 aa, Artificial Sequence
  Non-cyclic GFR-binding peptide
  MOD_RES (2), (34), (35): Xaa is C or S
GXARVVMNQYNKLIVNSSDDLYLVSIASLQTPAXXPKPVT

SEQ ID NO: 3606 - protein, 34 aa, Artificial Sequence
  Non-cyclic GFR-binding peptide
  MOD_RES (2), (33), (34): Xaa is C or S
KXSRVIMRYKKLVKPKRGVFYLISIANLAQPVXX

SEQ ID NO: 3607 - protein, 39 aa, Artificial Sequence
  Non-cyclic GFR-binding peptide
  MOD_RES (1), (3), (36), (37): Xaa is C or S
  MOD_RES (14), (15), (16), (17), (18): Xaa is A or G
  MOD_RES (19), (20), (21), (22): Xaa is A or G or is absent
XKXSKVIMYHYKLXXXXXXXXXKYLISIPSLDQSVXXPS

SEQ ID NO: 3608 - protein, 42 aa, Artificial Sequence
  Non-cyclic GFR-binding peptide
  MOD_RES (1), (3), (37), (38): Xaa is C or S
  MOD_RES (15), (16), (17), (18), (19): Xaa is A or G
  MOD_RES (20), (21), (22), (23): Xaa is A or G or is absent
XGXARVVMNYHYKLXXXXXXXXXKYLVSIPSLQTPAXXPKPV

SEQ ID NO: 3609 - protein, 36 aa, Artificial Sequence
  Non-cyclic GFR-binding peptide
  MOD_RES (33), (34): Xaa is C or S
  MOD_RES (11), (12), (13), (14), (15): Xaa is A or G
  MOD_RES (16), (17), (18), (19): Xaa is A or G or is absent
EVVMERYKKLXXXXXXXXXFYLMSIANLETPVXXAK

SEQ ID NO: 3610 - protein, 41 aa, Artificial Sequence
  Non-cyclic GFR-binding peptide
  MOD_RES (2), (36), (37): Xaa is C or S
  MOD_RES (14), (15), (16), (17), (18): Xaa is A or G
  MOD_RES (19), (20), (21), (22): Xaa is A or G or is absent
GXSRVVMNRHKRLXXXXXXXXXYYLVSTASLKTPAXXPKPV

SEQ ID NO: 3611 - protein, 40 aa, Artificial Sequence
  Non-cyclic GFR-binding peptide
  MOD_RES (36), (36): Xaa is C or S
LHDELTRHKRLFIPKKRVIEYYLVSTASLQVQTPRXQVNR

SEQ ID NO: 3612 - protein, 37 aa, Artificial Sequence
  Non-cyclic GFR-binding peptide
  MOD_RES (37), (37): Xaa is C or S
ALHDELTYHYKLFIPKKRVIEKYLVSIPSLQVQTPRX

SEQ ID NO: 3613 - protein, 31 aa, Artificial Sequence
  Non-cyclic GFR-binding peptide
  MOD_RES (31), (31): Xaa is C or S
EVVMERHKRLVVKDYEDYYLMSTASLETPVX

SEQ ID NO: 3614 - protein, 37 aa, Artificial Sequence
  Non-cyclic GFR-binding peptide
  MOD_RES (1), (35), (36): Xaa is C or S
  MOD_RES (13), (14), (15), (16), (17): Xaa is A or G
  MOD_RES (18), (19), (20), (21): Xaa is A or G or is absent
XAKVVMNRYKKLXXXXXXXXXFYLVSIANLKTPAXXA

SEQ ID NO: 3615 - protein, 36 aa, Artificial Sequence
  Non-cyclic GFR-binding peptide
  MOD_RES (1), (3), (34), (35): Xaa is C or S
XKXSKVVMRYKKLVKPTRGVFYLISIANLDQPVXXP

SEQ ID NO: 3616 - protein, 37 aa, Artificial Sequence
  Non-cyclic GFR-binding peptide
  MOD_RES (2), (34), (35): Xaa is C or S
GXARVVMNYHYKLIVNSSDDKYLVSIPSLQTPAXXPK

SEQ ID NO: 3617 - protein, 38 aa, Artificial Sequence
  Non-cyclic GFR-binding peptide
  MOD_RES (2), (36), (37): Xaa is C or S
  MOD_RES (14), (15), (16), (17), (18): Xaa is A or G
  MOD_RES (19), (20), (21), (22): Xaa is A or G or is absent
GXARVVMNYHYKLXXXXXXXXXKYLVSIPSLQTPAXXP

SEQ ID NO: 3618 - protein, 39 aa, Artificial Sequence
  Non-cyclic GFR-binding peptide
  MOD_RES (2), (39): Xaa is C or S
KXALHDELTRYKKLFIPKKRVIEFYLVSIANLQVQTPRX

SEQ ID NO: 3619 - protein, 38 aa, Artificial Sequence
  Non-cyclic GFR-binding peptide
  MOD_RES (34), (35): Xaa is C or S
  MOD_RES (12), (13), (14), (15), (16): Xaa is A or G
  MOD_RES (17), (18), (19), (20): Xaa is A or G or is absent
GEVVMERYKKLXXXXXXXXXFYLMSIANLETPVXXAKP

SEQ ID NO: 3620 - protein, 41 aa, Artificial Sequence
  Non-cyclic GFR-binding peptide
  MOD_RES (2), (4), (38), (39): Xaa is C or S
  MOD_RES (16), (17), (18), (19), (20): Xaa is A or G
  MOD_RES (21), (22), (23), (24): Xaa is A or G or is absent
HXGXAKVVMNRYKKLXXXXXXXXXFYLVSIANLKTPAXXAK

SEQ ID NO: 3621 - protein, 40 aa, Artificial Sequence
  Non-cyclic GFR-binding peptide
  MOD_RES (34), (35): Xaa is C or S
  MOD_RES (12), (13), (14), (15), (16): Xaa is A or G
  MOD_RES (17), (18), (19), (20): Xaa is A or G or is absent
GEVVMDRYKKLXXXXXXXXXFYLMSIANLETPVXXAKPIK

SEQ ID NO: 3622 - protein, 34 aa, Artificial Sequence
  Non-cyclic GFR-binding peptide
  MOD_RES (31), (32): Xaa is C or S
EVVMERHKRLVVKDYEDYYLMSTASLETPVXXAK

SEQ ID NO: 3623 - protein, 42 aa, Artificial Sequence
  Non-cyclic GFR-binding peptide
  MOD_RES (2), (36), (37): Xaa is C or S
  MOD_RES (14), (15), (16), (17), (18): Xaa is A or G
  MOD_RES (19), (20), (21), (22): Xaa is A or G or is absent
GXAKVVMNRYKKLXXXXXXXXXFYLVSIANLKTPAXXAKPVA

SEQ ID NO: 3624 - protein, 38 aa, Artificial Sequence
  Non-cyclic GFR-binding peptide
  MOD_RES (33), (34): Xaa is C or S
  MOD_RES (11), (12), (13), (14), (15): Xaa is A or G
  MOD_RES (16), (17), (18), (19): Xaa is A or G or is absent
SKVVMRHKRLXXXXXXXXXYYLISTASLDQPVXXPSAS

SEQ ID NO: 3625 - protein, 42 aa, Artificial Sequence
  Non-cyclic GFR-binding peptide
  MOD_RES (2), (4), (37), (38): Xaa is C or S
  MOD_RES (15), (16), (17), (18), (19): Xaa is A or G
  MOD_RES (20), (21), (22), (23): Xaa is A or G or is absent
SXKXSRVIMYHYKLXXXXXXXXXKYLISIPSLAQPVXXPAAS

SEQ ID NO: 3626 - protein, 37 aa, Artificial Sequence
  Non-cyclic GFR-binding peptide
  MOD_RES (1), (1): Xaa is C or S
  MOD_RES (14), (15), (16), (17), (18): Xaa is A or G
  MOD_RES (19), (20), (21), (22): Xaa is A or G or is absent
XALHDELTQYNKLXXXXXXXXXLYLVSIASLQVQTPR

SEQ ID NO: 3627 - protein, 38 aa, Artificial Sequence
  Non-cyclic GFR-binding peptide
  MOD_RES (1), (3), (35), (36): Xaa is C or S
XGXARVVMNQYNKLIVNSSDDLYLVSIASLQTPAXXPK

SEQ ID NO: 3628 - protein, 33 aa, Artificial Sequence
  Non-cyclic GFR-binding peptide
  MOD_RES (2), (33): Xaa is C or S
KXSKVVMRHKRLVKPTRGVYYLISTASLDQPVX

SEQ ID NO: 3629 - protein, 39 aa, Artificial Sequence
  Non-cyclic GFR-binding peptide
  MOD_RES (1), (3), (35), (36): Xaa is C or S
XGXGEVVMDRHKRLVVKENEDYYLMSTASLETPVXXAKP

SEQ ID NO: 3630 - protein, 37 aa, Artificial Sequence
  Non-cyclic GFR-binding peptide
  MOD_RES (1), (1): Xaa is C or S
XALHDELTRHKRLFIPKKRVIEYYLVSTASLQVQTPR

SEQ ID NO: 3631 - protein, 41 aa, Artificial Sequence
  Non-cyclic GFR-binding peptide
  MOD_RES (2), (36), (37): Xaa is C or S
  MOD_RES (14), (15), (16), (17), (18): Xaa is A or G
  MOD_RES (19), (20), (21), (22): Xaa is A or G or is absent
GXAKVVMNRYKKLXXXXXXXXXFYLVSIANLKTPAXXAKPV

SEQ ID NO: 3632 - protein, 35 aa, Artificial Sequence
  Non-cyclic GFR-binding peptide
  MOD_RES (1), (1): Xaa is C or S
XALHDELTYHYKLFIPKKRVIEKYLVSIPSLQVQT

SEQ ID NO: 3633 - protein, 37 aa, Artificial Sequence
  Non-cyclic GFR-binding peptide
  MOD_RES (1), (3), (36), (37): Xaa is C or S
  MOD_RES (14), (15), (16), (17), (18): Xaa is A or G
  MOD_RES (19), (20), (21), (22): Xaa is A or G or is absent
XKXSKVVMYHYKLXXXXXXXXXKYLISIPSLDQPVXX

SEQ ID NO: 3634 - protein, 42 aa, Artificial Sequence
  Non-cyclic GFR-binding peptide
  MOD_RES (2), (4), (37), (38): Xaa is C or S
  MOD_RES (15), (16), (17), (18), (19): Xaa is A or G
  MOD_RES (20), (21), (22), (23): Xaa is A or G or is absent
SXKXSKVVMQYNKLXXXXXXXXXLYLISIASLDQPVXXPSAS

SEQ ID NO: 3635 - protein, 39 aa, Artificial Sequence
  Non-cyclic GFR-binding peptide
  MOD_RES (36), (36): Xaa is C or S
LHDELTRYKKLFIPKKRVIEFYLVSIANLQVQTPRXQVN

SEQ ID NO: 3636 - protein, 37 aa, Artificial Sequence
  Non-cyclic GFR-binding peptide
  MOD_RES (1), (34), (35): Xaa is C or S
XEAVSMGEQYNKLTPVGMDDLYLVSIASLKTPVXXAK

SEQ ID NO: 3637 - protein, 36 aa, Artificial Sequence
  Non-cyclic GFR-binding peptide
  MOD_RES (35), (35): Xaa is C or S
HDELTRYKKLFIPKKRVIEFYLVSIANLQVQTPRXQ

SEQ ID NO: 3638 - protein, 36 aa, Artificial Sequence
  Non-cyclic GFR-binding peptide
  MOD_RES (31), (32): Xaa is C or S
KVVMNRYKKLIVNNSSDFYLVSIANLKTPAXXAKPV

SEQ ID NO: 3639 - protein, 39 aa, Artificial Sequence
  Non-cyclic GFR-binding peptide
  MOD_RES (1), (3), (35), (36): Xaa is C or S
XGXARVVMNQYNKLIVNSSDDLYLVSIASLQTPAXXPKP

SEQ ID NO: 3640 - protein, 40 aa, Artificial Sequence
  Non-cyclic GFR-binding peptide
  MOD_RES (1), (3), (37), (38): Xaa is C or S
  MOD_RES (15), (16), (17), (18), (19): Xaa is A or G
  MOD_RES (20), (21), (22), (23): Xaa is A or G or is absent
XGXGEVVMDYHYKLXXXXXXXXXKYLMSIPSLETPVXXAK

SEQ ID NO: 3641 - protein, 38 aa, Artificial Sequence
  Non-cyclic GFR-binding peptide
  MOD_RES (1), (3), (35), (36): Xaa is C or S
XGXGEVVMDRHKRLVVKENEDYYLMSTASLETPVXXAK

SEQ ID NO: 3642 - protein, 40 aa, Artificial Sequence
  Non-cyclic GFR-binding peptide
  MOD_RES (35), (36): Xaa is C or S
  MOD_RES (13), (14), (15), (16), (17): Xaa is A or G
  MOD_RES (18), (19), (20), (21): Xaa is A or G or is absent
EAVSMGERYKKLXXXXXXXXXFYLVSIANLKTPVXXAKGV

SEQ ID NO: 3643 - protein, 38 aa, Artificial Sequence
  Non-cyclic GFR-binding peptide
  MOD_RES (1), (3), (34), (35): Xaa is C or S
XKXSRVIMRYKKLVKPKRGVFYLISIANLAQPVXXPAA

SEQ ID NO: 3644 - protein, 34 aa, Artificial Sequence
  Non-cyclic GFR-binding peptide
  MOD_RES (1), (1): Xaa is C or S
  MOD_RES (13), (14), (15), (16), (17): Xaa is A or G
  MOD_RES (18), (19), (20), (21): Xaa is A or G or is absent
XSRVVMNRHKRLXXXXXXXXXYYLVSTASLKTPA

SEQ ID NO: 3645 - protein, 38 aa, Artificial Sequence
  Non-cyclic GFR-binding peptide
  MOD_RES (1), (35): Xaa is C or S
  MOD_RES (13), (14), (15), (16), (17): Xaa is A or G
  MOD_RES (18), (19), (20), (21): Xaa is A or G or is absent
XSRVVMNRHKRLXXXXXXXXXYYLVSTASLKTPAXTPK

SEQ ID NO: 3646 - protein, 37 aa, Artificial Sequence
  Non-cyclic GFR-binding peptide
  MOD_RES (2), (4), (35), (36): Xaa is C or S
SXKXSKVVMYHYKLVKPTRGVKYLISIPSLDQPVXXP

SEQ ID NO: 3647 - protein, 41 aa, Artificial Sequence
  Non-cyclic GFR-binding peptide
  MOD_RES (37), (37): Xaa is C or S
  MOD_RES (13), (14), (15), (16), (17): Xaa is A or G
  MOD_RES (18), (19), (20), (21): Xaa is A or G or is absent
ALHDELTRYKKLXXXXXXXXXFYLVSIANLQVQTPRXQVNR

SEQ ID NO: 3648 - protein, 42 aa, Artificial Sequence
  Non-cyclic GFR-binding peptide
  MOD_RES (2), (4), (39), (40): Xaa is C or S
  MOD_RES (17), (18), (19), (20), (21): Xaa is A or G
  MOD_RES (22), (23), (24), (25): Xaa is A or G or is absent
RXGXEAVSMGERHKRLXXXXXXXXXYYLVSTASLKTPVXXAK

SEQ ID NO: 3649 - protein, 34 aa, Artificial Sequence
  Non-cyclic GFR-binding peptide
  MOD_RES (33), (34): Xaa is C or S
  MOD_RES (11), (12), (13), (14), (15): Xaa is A or G
  MOD_RES (16), (17), (18), (19): Xaa is A or G or is absent
RVVMNYHYKLXXXXXXXXXKYLVSIPSLQTPAXX

SEQ ID NO: 3650 - protein, 40 aa, Artificial Sequence
  Non-cyclic GFR-binding peptide
  MOD_RES (1), (3), (35), (36): Xaa is C or S
XGXSRVVMNQYNKLIVNSSDDLYLVSIASLKTPAXXPKPV

SEQ ID NO: 3651 - protein, 42 aa, Artificial Sequence
  Non-cyclic GFR-binding peptide
  MOD_RES (2), (4), (36), (37): Xaa is C or S
HXGXAKVVMNYHYKLIVNNSSDKYLVSIPSLKTPAXXAKPVA

SEQ ID NO: 3652 - protein, 34 aa, Artificial Sequence
  Non-cyclic GFR-binding peptide
  MOD_RES (1), (3): Xaa is C or S
XGXGEVVMDRYKKLVVKENEDFYLMSIANLETPV

SEQ ID NO: 3653 - protein, 37 aa, Artificial Sequence
  Non-cyclic GFR-binding peptide
  MOD_RES (32), (33): Xaa is C or S
GEVVMERHKRLVVKDYEDYYLMSTASLETPVXXAKPI

SEQ ID NO: 3654 - protein, 36 aa, Artificial Sequence
  Non-cyclic GFR-binding peptide
  MOD_RES (2), (34), (35): Xaa is C or S
GXGEVVMERYKKLVVKDYEDFYLMSIANLETPVXXA

SEQ ID NO: 3655 - protein, 35 aa, Artificial Sequence
  Non-cyclic GFR-binding peptide
  MOD_RES (35), (35): Xaa is C or S
  MOD_RES (11), (12), (13), (14), (15): Xaa is A or G
  MOD_RES (16), (17), (18), (19): Xaa is A or G or is absent
HDELTQYNKLXXXXXXXXXLYLVSIASLQVQTPRX

SEQ ID NO: 3656 - protein, 37 aa, Artificial Sequence
  Non-cyclic GFR-binding peptide
  MOD_RES (2), (4), (35), (36): Xaa is C or S
SXKXSRVIMQYNKLVKPKRGVLYLISIASLAQPVXXP

SEQ ID NO: 3657 - protein, 36 aa, Artificial Sequence
  Non-cyclic GFR-binding peptide
  MOD_RES (31), (32): Xaa is C or S
RVVMNYHYKLIVNSSDDKYLVSIPSLQTPAXXPKPV

SEQ ID NO: 3658 - protein, 34 aa, Artificial Sequence
  Non-cyclic GFR-binding peptide
  MOD_RES (1), (33), (34): Xaa is C or S
XSRVVMNYHYKLIVNSSDDKYLVSIPSLKTPAXX

SEQ ID NO: 3659 - protein, 32 aa, Artificial Sequence
  Non-cyclic GFR-binding peptide
  MOD_RES (1), (1): Xaa is C or S
XGEVVMDYHYKLVVKENEDKYLMSIPSLETPV

SEQ ID NO: 3660 - protein, 39 aa, Artificial Sequence
  Non-cyclic GFR-binding peptide
  MOD_RES (1), (3), (36), (37): Xaa is C or S
  MOD_RES (14), (15), (16), (17), (18): Xaa is A or G
  MOD_RES (19), (20), (21), (22): Xaa is A or G or is absent
XKXSRVIMYHYKLXXXXXXXXXKYLISIPSLAQPVXXPA

SEQ ID NO: 3661 - protein, 37 aa, Artificial Sequence
  Non-cyclic GFR-binding peptide
  MOD_RES (1), (3), (37): Xaa is C or S
  MOD_RES (15), (16), (17), (18), (19): Xaa is A or G
  MOD_RES (20), (21), (22), (23): Xaa is A or G or is absent
XGXGEVVMDRYKKLXXXXXXXXXFYLMSIANLETPVX

SEQ ID NO: 3662 - protein, 37 aa, Artificial Sequence
  Non-cyclic GFR-binding peptide
  MOD_RES (2), (35), (36): Xaa is C or S
  MOD_RES (13), (14), (15), (16), (17): Xaa is A or G
  MOD_RES (18), (19), (20), (21): Xaa is A or G or is absent
KXSRVIMRHKRLXXXXXXXXXYYLISTASLAQPVXXP

SEQ ID NO: 3663 - protein, 35 aa, Artificial Sequence
  Non-cyclic GFR-binding peptide
  MOD_RES (31), (32): Xaa is C or S
SRVIMRYKKLVKPKRGVFYLISIANLAQPVXXPAA

SEQ ID NO: 3664 - protein, 41 aa, Artificial Sequence
  Non-cyclic GFR-binding peptide
  MOD_RES (2), (35), (36): Xaa is C or S
  MOD_RES (13), (14), (15), (16), (17): Xaa is A or G
  MOD_RES (18), (19), (20), (21): Xaa is A or G or is absent
KXSKVVMRYKKLXXXXXXXXXFYLISIANLDQPVXXPSASA

SEQ ID NO: 3665 - protein, 41 aa, Artificial Sequence
  Non-cyclic GFR-binding peptide
  MOD_RES (2), (35), (36): Xaa is C or S
  MOD_RES (13), (14), (15), (16), (17): Xaa is A or G
  MOD_RES (18), (19), (20), (21): Xaa is A or G or is absent
KXSKVVMYHYKLXXXXXXXXXKYLISIPSLDQPVXXPSASA

SEQ ID NO: 3666 - protein, 33 aa, Artificial Sequence
  Non-cyclic GFR-binding peptide
  MOD_RES (31), (32): Xaa is C or S
KVVMNYHYKLIVNNSSDKYLVSIPSLKTPAXXA

SEQ ID NO: 3667 - protein, 40 aa, Artificial Sequence
  Non-cyclic GFR-binding peptide
  MOD_RES (2), (35), (36): Xaa is C or S
GXEAVSMGERYKKLTPVGMDDFYLVSIANLKTPVXXAKGV

SEQ ID NO: 3668 - protein, 40 aa, Artificial Sequence
  Non-cyclic GFR-binding peptide
  MOD_RES (36), (36): Xaa is C or S
  MOD_RES (12), (13), (14), (15), (16): Xaa is A or G
  MOD_RES (17), (18), (19), (20): Xaa is A or G or is absent
LHDELTRYKKLXXXXXXXXXFYLVSIANLQVQTPRXQVNR

SEQ ID NO: 3669 - protein, 35 aa, Artificial Sequence
  Non-cyclic GFR-binding peptide
  MOD_RES (1), (34), (35): Xaa is C or S
XEAVSMGERHKRLTPVGMDDYYLVSTASLKTPVXX

SEQ ID NO: 3670 - protein, 37 aa, Artificial Sequence
  Non-cyclic GFR-binding peptide
  MOD_RES (33), (34): Xaa is C or S
  MOD_RES (11), (12), (13), (14), (15): Xaa is A or G
  MOD_RES (16), (17), (18), (19): Xaa is A or G or is absent
SRVIMRHKRLXXXXXXXXXYYLISTASLAQPVXXPAA

SEQ ID NO: 3671 - protein, 39 aa, Artificial Sequence
  Non-cyclic GFR-binding peptide
  MOD_RES (33), (34): Xaa is C or S
  MOD_RES (11), (12), (13), (14), (15): Xaa is A or G
  MOD_RES (16), (17), (18), (19): Xaa is A or G or is absent
SKVIMRYKKLXXXXXXXXXFYLISIANLDQSVXXPSASA

SEQ ID NO: 3672 - protein, 34 aa, Artificial Sequence
  Non-cyclic GFR-binding peptide
  MOD_RES (2), (33), (34): Xaa is C or S
KXSRVIMYHYKLVKPKRGVKYLISIPSLAQPVXX

SEQ ID NO: 3673 - protein, 41 aa, Artificial Sequence
  Non-cyclic GFR-binding peptide
  MOD_RES (1), (36), (37): Xaa is C or S
  MOD_RES (14), (15), (16), (17), (18): Xaa is A or G
  MOD_RES (19), (20), (21), (22): Xaa is A or G or is absent
XEAVSMGERHKRLXXXXXXXXXYYLVSTASLKTPVXXAKGV

SEQ ID NO: 3674 - protein, 37 aa, Artificial Sequence
  Non-cyclic GFR-binding peptide
  MOD_RES (2), (4), (36): Xaa is C or S
HXGXSRVVMNQYNKLIVNSSDDLYLVSIASLKTPAXT

SEQ ID NO: 3675 - protein, 36 aa, Artificial Sequence
  Non-cyclic GFR-binding peptide
  MOD_RES (31), (32): Xaa is C or S
RVVMNRHKRLIVNSSDDYYLVSTASLKTPAXXPKPV

SEQ ID NO: 3676 - protein, 40 aa, Artificial Sequence
  Non-cyclic GFR-binding peptide
  MOD_RES (2), (4), (38), (39): Xaa is C or S
  MOD_RES (16), (17), (18), (19), (20): Xaa is A or G
  MOD_RES (21), (22), (23), (24): Xaa is A or G or is absent
HXGXAKVVMNYHYKLXXXXXXXXXKYLVSIPSLKTPAXXA

SEQ ID NO: 3677 - protein, 42 aa, Artificial Sequence
  Non-cyclic GFR-binding peptide
  MOD_RES (2), (4), (38): Xaa is C or S
  MOD_RES (16), (17), (18), (19), (20): Xaa is A or G
  MOD_RES (21), (22), (23), (24): Xaa is A or G or is absent
HXGXSRVVMNYHYKLXXXXXXXXXKYLVSIPSLKTPAXTPKT

SEQ ID NO: 3678 - protein, 35 aa, Artificial Sequence
  Non-cyclic GFR-binding peptide
  MOD_RES (1), (33), (34): Xaa is C or S
XGEVVMDRYKKLVVKENEDFYLMSIANLETPVXXA

SEQ ID NO: 3679 - protein, 35 aa, Artificial Sequence
  Non-cyclic GFR-binding peptide
  MOD_RES (33), (34): Xaa is C or S
  MOD_RES (11), (12), (13), (14), (15): Xaa is A or G
  MOD_RES (16), (17), (18), (19): Xaa is A or G or is absent
EVVMDRYKKLXXXXXXXXXFYLMSIANLETPVXXA

SEQ ID NO: 3680 - protein, 35 aa, Artificial Sequence
  Non-cyclic GFR-binding peptide
  MOD_RES (1), (33), (34): Xaa is C or S
XGEVVMDYHYKLVVKENEDKYLMSIPSLETPVXXA

SEQ ID NO: 3681 - protein, 35 aa, Artificial Sequence
  Non-cyclic GFR-binding peptide
  MOD_RES (1), (3), (34), (35): Xaa is C or S
XKXSKVIMRYKKLIKPTKGIFYLISIANLDQSVXX

SEQ ID NO: 3682 - protein, 34 aa, Artificial Sequence
  Non-cyclic GFR-binding peptide
  MOD_RES (1), (1): Xaa is C or S
  MOD_RES (13), (14), (15), (16), (17): Xaa is A or G
  MOD_RES (18), (19), (20), (21): Xaa is A or G or is absent
XSRVVMNYHYKLXXXXXXXXXKYLVSIPSLKTPA

SEQ ID NO: 3683 - protein, 44 aa, Artificial Sequence
  Non-cyclic GFR-binding peptide
  MOD_RES (2), (4), (38): Xaa is C or S
  MOD_RES (16), (17), (18), (19), (20): Xaa is A or G
  MOD_RES (21), (22), (23), (24): Xaa is A or G or is absent
HXGXSRVVMNRHKRLXXXXXXXXXYYLVSTASLKTPAXTPKTVH

SEQ ID NO: 3684 - protein, 32 aa, Artificial Sequence
  Non-cyclic GFR-binding peptide
  MOD_RES (31), (32): Xaa is C or S
EVVMERHKRLVVKDYEDYYLMSTASLETPVXX

SEQ ID NO: 3685 - protein, 39 aa, Artificial Sequence
  Non-cyclic GFR-binding peptide
  MOD_RES (2), (39): Xaa is C or S
  MOD_RES (15), (16), (17), (18), (19): Xaa is A or G
  MOD_RES (20), (21), (22), (23): Xaa is A or G or is absent
KXALHDELTRYKKLXXXXXXXXXFYLVSIANLQVQTPRX

SEQ ID NO: 3686 - protein, 34 aa, Artificial Sequence
  Non-cyclic GFR-binding peptide
  MOD_RES (33), (34): Xaa is C or S
  MOD_RES (11), (12), (13), (14), (15): Xaa is A or G
  MOD_RES (16), (17), (18), (19): Xaa is A or G or is absent
EVVMDRHKRLXXXXXXXXXYYLMSTASLETPVXX

SEQ ID NO: 3687 - protein, 43 aa, Artificial Sequence
  Non-cyclic GFR-binding peptide
  MOD_RES (1), (3), (40): Xaa is C or S
XKXALHDELTRYKKLFIPKKRVIEFYLVSIANLQVQTPRXQVN

SEQ ID NO: 3688 - protein, 33 aa, Artificial Sequence
  Non-cyclic GFR-binding peptide
  MOD_RES (1), (32), (33): Xaa is C or S
XSRVIMYHYKLVKPKRGVKYLISIPSLAQPVXX

SEQ ID NO: 3689 - protein, 38 aa, Artificial Sequence
  Non-cyclic GFR-binding peptide
  MOD_RES (1), (33): Xaa is C or S
XSRVVMNQYNKLIVNSSDDLYLVSIASLKTPAXTPKTV

SEQ ID NO: 3690 - protein, 38 aa, Artificial Sequence
  Non-cyclic GFR-binding peptide
  MOD_RES (2), (4), (37), (38): Xaa is C or S
  MOD_RES (15), (16), (17), (18), (19): Xaa is A or G
  MOD_RES (20), (21), (22), (23): Xaa is A or G or is absent
SXKXSKVIMQYNKLXXXXXXXXXLYLISIASLDQSVXX

SEQ ID NO: 3691 - protein, 35 aa, Artificial Sequence
  Non-cyclic GFR-binding peptide
  MOD_RES (1), (3), (34), (35): Xaa is C or S
XKXSRVIMRYKKLVKPKRGVFYLISIANLAQPVXX

SEQ ID NO: 3692 - protein, 40 aa, Artificial Sequence
  Non-cyclic GFR-binding peptide
  MOD_RES (1), (35), (36): Xaa is C or S
  MOD_RES (13), (14), (15), (16), (17): Xaa is A or G
  MOD_RES (18), (19), (20), (21): Xaa is A or G or is absent
XSRVVMNRHKRLXXXXXXXXXYYLVSTASLKTPAXXPKPV

SEQ ID NO: 3693 - protein, 44 aa, Artificial Sequence
  Non-cyclic GFR-binding peptide
  MOD_RES (1), (3), (40): Xaa is C or S
XKXALHDELTQYNKLFIPKKRVIELYLVSIASLQVQTPRXQVNR

SEQ ID NO: 3694 - protein, 40 aa, Artificial Sequence
  Non-cyclic GFR-binding peptide
  MOD_RES (1), (3), (36), (37): Xaa is C or S
  MOD_RES (14), (15), (16), (17), (18): Xaa is A or G
  MOD_RES (19), (20), (21), (22): Xaa is A or G or is absent
XKXSKVVMRHKRLXXXXXXXXXYYLISTASLDQPVXXPSA

SEQ ID NO: 3695 - protein, 41 aa, Artificial Sequence
  Non-cyclic GFR-binding peptide
  MOD_RES (1), (3), (35): Xaa is C or S
XGXSRVVMNQYNKLIVNSSDDLYLVSIASLKTPAXTPKTVH

SEQ ID NO: 3696 - protein, 39 aa, Artificial Sequence
  Non-cyclic GFR-binding peptide
  MOD_RES (2), (36), (37): Xaa is C or S
  MOD_RES (14), (15), (16), (17), (18): Xaa is A or G
  MOD_RES (19), (20), (21), (22): Xaa is A or G or is absent
GXGEVVMERYKKLXXXXXXXXXFYLMSIANLETPVXXAK

SEQ ID NO: 3697 - protein, 34 aa, Artificial Sequence
  Non-cyclic GFR-binding peptide
  MOD_RES (1), (3): Xaa is C or S
XGXGEVVMERYKKLVVKDYEDFYLMSIANLETPV

SEQ ID NO: 3698 - protein, 36 aa, Artificial Sequence
  Non-cyclic GFR-binding peptide
  MOD_RES (34), (35): Xaa is C or S
  MOD_RES (12), (13), (14), (15), (16): Xaa is A or G
  MOD_RES (17), (18), (19), (20): Xaa is A or G or is absent
ARVVMNRHKRLXXXXXXXXXYYLVSTASLQTPAXXP

SEQ ID NO: 3699 - protein, 34 aa, Artificial Sequence
  Non-cyclic GFR-binding peptide
  MOD_RES (31), (32): Xaa is C or S
SKVIMRHKRLIKPTKGIYYLISTASLDQSVXXPS

SEQ ID NO: 3700 - protein, 38 aa, Artificial Sequence
  Non-cyclic GFR-binding peptide
  MOD_RES (2), (2): Xaa is C or S
KXALHDELTQYNKLFIPKKRVIELYLVSIASLQVQTPR

SEQ ID NO: 3701 - protein, 39 aa, Artificial Sequence
  Non-cyclic GFR-binding peptide
  MOD_RES (2), (4), (36), (37): Xaa is C or S
RXGXGEVVMDRYKKLVVKENEDFYLMSIANLETPVXXAK

SEQ ID NO: 3702 - protein, 43 aa, Artificial Sequence
  Non-cyclic GFR-binding peptide
  MOD_RES (2), (4), (37), (38): Xaa is C or S
  MOD_RES (15), (16), (17), (18), (19): Xaa is A or G
  MOD_RES (20), (21), (22), (23): Xaa is A or G or is absent
SXKXSRVIMQYNKLXXXXXXXXXLYLISIASLAQPVXXPAASA

SEQ ID NO: 3703 - protein, 37 aa, Artificial Sequence
  Non-cyclic GFR-binding peptide
  MOD_RES (2), (4): Xaa is C or S
  MOD_RES (16), (17), (18), (19), (20): Xaa is A or G
  MOD_RES (21), (22), (23), (24): Xaa is A or G or is absent
HXGXAKVVMNYHYKLXXXXXXXXXKYLVSIPSLKTPA

SEQ ID NO: 3704 - protein, 41 aa, Artificial Sequence
  Non-cyclic GFR-binding peptide
  MOD_RES (1), (3), (35), (36): Xaa is C or S
XGXGEVVMEYHYKLVVKDYEDKYLMSIPSLETPVXXAKPIS

SEQ ID NO: 3705 - protein, 38 aa, Artificial Sequence
  Non-cyclic GFR-binding peptide
  MOD_RES (33), (34): Xaa is C or S
  MOD_RES (11), (12), (13), (14), (15): Xaa is A or G
  MOD_RES (16), (17), (18), (19): Xaa is A or G or is absent
SKVVMQYNKLXXXXXXXXXLYLISIASLDQPVXXPSAS

SEQ ID NO: 3706 - protein, 37 aa, Artificial Sequence
  Non-cyclic GFR-binding peptide
  MOD_RES (37), (37): Xaa is C or S
ALHDELTRYKKLFIPKKRVIEFYLVSIANLQVQTPRX

SEQ ID NO: 3707 - protein, 36 aa, Artificial Sequence
  Non-cyclic GFR-binding peptide
  MOD_RES (1), (3): Xaa is C or S
  MOD_RES (15), (16), (17), (18), (19): Xaa is A or G
  MOD_RES (20), (21), (22), (23): Xaa is A or G or is absent
XGXGEVVMDRHKRLXXXXXXXXXYYLMSTASLETPV

SEQ ID NO: 3708 - protein, 37 aa, Artificial Sequence
  Non-cyclic GFR-binding peptide
  MOD_RES (2), (34), (35): Xaa is C or S
GXSRVVMNYHYKLIVNSSDDKYLVSIPSLKTPAXXPK

SEQ ID NO: 3709 - protein, 39 aa, Artificial Sequence
  Non-cyclic GFR-binding peptide
  MOD_RES (36), (36): Xaa is C or S
LHDELTQYNKLFIPKKRVIELYLVSIASLQVQTPRXQVN

SEQ ID NO: 3710 - protein, 34 aa, Artificial Sequence
  Non-cyclic GFR-binding peptide
  MOD_RES (1), (34): Xaa is C or S
  MOD_RES (12), (13), (14), (15), (16): Xaa is A or G
  MOD_RES (17), (18), (19), (20): Xaa is A or G or is absent
XSKVIMRHKRLXXXXXXXXXYYLISTASLDQSVX

SEQ ID NO: 3711 - protein, 35 aa, Artificial Sequence
  Non-cyclic GFR-binding peptide
  MOD_RES (1), (35): Xaa is C or S
  MOD_RES (13), (14), (15), (16), (17): Xaa is A or G
  MOD_RES (18), (19), (20), (21): Xaa is A or G or is absent
XSRVVMNYHYKLXXXXXXXXXKYLVSIPSLKTPAX

SEQ ID NO: 3712 - protein, 34 aa, Artificial Sequence
  Non-cyclic GFR-binding peptide
  MOD_RES (1), (34): Xaa is C or S
  MOD_RES (12), (13), (14), (15), (16): Xaa is A or G
  MOD_RES (17), (18), (19), (20): Xaa is A or G or is absent
XSKVIMQYNKLXXXXXXXXXLYLISIASLDQSVX

SEQ ID NO: 3713 - protein, 39 aa, Artificial Sequence
  Non-cyclic GFR-binding peptide
  MOD_RES (1), (3), (37), (38): Xaa is C or S
  MOD_RES (15), (16), (17), (18), (19): Xaa is A or G
  MOD_RES (20), (21), (22), (23): Xaa is A or G or is absent
XGXAKVVMNYHYKLXXXXXXXXXKYLVSIPSLKTPAXXA

SEQ ID NO: 3714 - protein, 41 aa, Artificial Sequence
  Non-cyclic GFR-binding peptide
  MOD_RES (2), (4), (37), (38): Xaa is C or S
  MOD_RES (15), (16), (17), (18), (19): Xaa is A or G
  MOD_RES (20), (21), (22), (23): Xaa is A or G or is absent
SXKXSRVIMRHKRLXXXXXXXXXYYLISTASLAQPVXXPAA

SEQ ID NO: 3715 - protein, 39 aa, Artificial Sequence
  Non-cyclic GFR-binding peptide
  MOD_RES (33), (34): Xaa is C or S
  MOD_RES (11), (12), (13), (14), (15): Xaa is A or G
  MOD_RES (16), (17), (18), (19): Xaa is A or G or is absent
SKVVMQYNKLXXXXXXXXXLYLISIASLDQPVXXPSASA

SEQ ID NO: 3716 - protein, 36 aa, Artificial Sequence
  Non-cyclic GFR-binding peptide
  MOD_RES (13), (14), (15), (16), (17): Xaa is A or G
  MOD_RES (18), (19), (20), (21): Xaa is A or G or is absent
ALHDELTRHKRLXXXXXXXXXYYLVSTASLQVQTPR

SEQ ID NO: 3717 - protein, 37 aa, Artificial Sequence
  Non-cyclic GFR-binding peptide
  MOD_RES (2), (4), (37): Xaa is C or S
  MOD_RES (15), (16), (17), (18), (19): Xaa is A or G
  MOD_RES (20), (21), (22), (23): Xaa is A or G or is absent
SXKXSKVIMRHKRLXXXXXXXXXYYLISTASLDQSVX

SEQ ID NO: 3718 - protein, 34 aa, Artificial Sequence
  Non-cyclic GFR-binding peptide
  MOD_RES (31), (32): Xaa is C or S
SKVIMRYKKLIKPTKGIFYLISIANLDQSVXXPS

SEQ ID NO: 3719 - protein, 42 aa, Artificial Sequence
  Non-cyclic GFR-binding peptide
  MOD_RES (1), (3), (40): Xaa is C or S
XKXALHDELTYHYKLFIPKKRVIEKYLVSIPSLQVQTPRXQV

SEQ ID NO: 3720 - protein, 36 aa, Artificial Sequence
  Non-cyclic GFR-binding peptide
  MOD_RES (1), (3), (34), (35): Xaa is C or S
XKXSRVIMRYKKLVKPKRGVFYLISIANLAQPVXXP

SEQ ID NO: 3721 - protein, 34 aa, Artificial Sequence
  Non-cyclic GFR-binding peptide
  MOD_RES (1), (3): Xaa is C or S
XGXAKVVMNQYNKLIVNNSSDLYLVSIASLKTPA

SEQ ID NO: 3722 - protein, 36 aa, Artificial Sequence
  Non-cyclic GFR-binding peptide
  MOD_RES (13), (14), (15), (16), (17): Xaa is A or G
  MOD_RES (18), (19), (20), (21): Xaa is A or G or is absent
ALHDELTQYNKLXXXXXXXXXLYLVSIASLQVQTPR

SEQ ID NO: 3723 - protein, 41 aa, Artificial Sequence
  Non-cyclic GFR-binding peptide
  MOD_RES (1), (3), (37), (38): Xaa is C or S
  MOD_RES (15), (16), (17), (18), (19): Xaa is A or G
  MOD_RES (20), (21), (22), (23): Xaa is A or G or is absent
XGXGEVVMDRYKKLXXXXXXXXXFYLMSIANLETPVXXAKP

SEQ ID NO: 3724 - protein, 39 aa, Artificial Sequence
  Non-cyclic GFR-binding peptide
  MOD_RES (2), (35), (36): Xaa is C or S
  MOD_RES (13), (14), (15), (16), (17): Xaa is A or G
  MOD_RES (18), (19), (20), (21): Xaa is A or G or is absent
KXSKVVMRYKKLXXXXXXXXXFYLISIANLDQPVXXPSA

SEQ ID NO: 3725 - protein, 38 aa, Artificial Sequence
  Non-cyclic GFR-binding peptide
  MOD_RES (1), (35): Xaa is C or S
  MOD_RES (13), (14), (15), (16), (17): Xaa is A or G
  MOD_RES (18), (19), (20), (21): Xaa is A or G or is absent
XSRVVMNQYNKLXXXXXXXXXLYLVSIASLKTPAXTPK

SEQ ID NO: 3726 - protein, 38 aa, Artificial Sequence
  Non-cyclic GFR-binding peptide
  MOD_RES (33), (34): Xaa is C or S
  MOD_RES (11), (12), (13), (14), (15): Xaa is A or G
  MOD_RES (16), (17), (18), (19): Xaa is A or G or is absent
SKVVMYHYKLXXXXXXXXXKYLISIPSLDQPVXXPSAS

SEQ ID NO: 3727 - protein, 36 aa, Artificial Sequence
  Non-cyclic GFR-binding peptide
  MOD_RES (1), (34), (35): Xaa is C or S
  MOD_RES (12), (13), (14), (15), (16): Xaa is A or G
  MOD_RES (17), (18), (19), (20): Xaa is A or G or is absent
XSRVIMRYKKLXXXXXXXXXFYLISIANLAQPVXXP

SEQ ID NO: 3728 - protein, 32 aa, Artificial Sequence
  Non-cyclic GFR-binding peptide
  MOD_RES (32), (32): Xaa is C or S
GEVVMDYHYKLVVKENEDKYLMSIPSLETPVX

SEQ ID NO: 3729 - protein, 40 aa, Artificial Sequence
  Non-cyclic GFR-binding peptide
  MOD_RES (1), (3), (37), (38): Xaa is C or S
  MOD_RES (15), (16), (17), (18), (19): Xaa is A or G
  MOD_RES (20), (21), (22), (23): Xaa is A or G or is absent
XGXSRVVMNRHKRLXXXXXXXXXYYLVSTASLKTPAXXPK

SEQ ID NO: 3730 - protein, 33 aa, Artificial Sequence
  Non-cyclic GFR-binding peptide
  MOD_RES (31), (32): Xaa is C or S
KVVMNQYNKLIVNNSSDLYLVSIASLKTPAXXA

SEQ ID NO: 3731 - protein, 39 aa, Artificial Sequence
  Non-cyclic GFR-binding peptide
  MOD_RES (1), (35): Xaa is C or S
  MOD_RES (13), (14), (15), (16), (17): Xaa is A or G
  MOD_RES (18), (19), (20), (21): Xaa is A or G or is absent
XSRVVMNQYNKLXXXXXXXXXLYLVSIASLKTPAXTPKT

SEQ ID NO: 3732 - protein, 38 aa, Artificial Sequence
  Non-cyclic GFR-binding peptide
  MOD_RES (2), (4), (35), (36): Xaa is C or S
SXKXSKVVMYHYKLVKPTRGVKYLISIPSLDQPVXXPS

SEQ ID NO: 3733 - protein, 36 aa, Artificial Sequence
  Non-cyclic GFR-binding peptide
  MOD_RES (1), (1): Xaa is C or S
XALHDELTRYKKLFIPKKRVIEFYLVSIANLQVQTP

SEQ ID NO: 3734 - protein, 39 aa, Artificial Sequence
  Non-cyclic GFR-binding peptide
  MOD_RES (2), (4), (37), (38): Xaa is C or S
RXGXEAVSMGERHKRLTPVGMDDYYLVSTASLKTPVXXA

SEQ ID NO: 3735 - protein, 32 aa, Artificial Sequence
  Non-cyclic GFR-binding peptide
  MOD_RES (32), (32): Xaa is C or S
SRVVMNYHYKLIVNSSDDKYLVSIPSLKTPAX

SEQ ID NO: 3736 - protein, 35 aa, Artificial Sequence
  Non-cyclic GFR-binding peptide
  MOD_RES (34), (34): Xaa is C or S
  MOD_RES (12), (13), (14), (15), (16): Xaa is A or G
  MOD_RES (17), (18), (19), (20): Xaa is A or G or is absent
SRVVMNRHKRLXXXXXXXXXYYLVSTASLKTPAXT

SEQ ID NO: 3737 - protein, 36 aa, Artificial Sequence
  Non-cyclic GFR-binding peptide
  MOD_RES (34), (35): Xaa is C or S
  MOD_RES (12), (13), (14), (15), (16): Xaa is A or G
  MOD_RES (17), (18), (19), (20): Xaa is A or G or is absent
GEVVMDRHKRLXXXXXXXXXYYLMSTASLETPVXXA

SEQ ID NO: 3738 - protein, 38 aa, Artificial Sequence
  Non-cyclic GFR-binding peptide
  MOD_RES (1), (3), (34), (35): Xaa is C or S
XKXSKVIMYHYKLIKPTKGIKYLISIPSLDQSVXXPSA

SEQ ID NO: 3739 - protein, 41 aa, Artificial Sequence
  Non-cyclic GFR-binding peptide
  MOD_RES (2), (4), (35), (36): Xaa is C or S
SXKXSRVIMRHKRLVKPKRGVYYLISTASLAQPVXXPAASA

SEQ ID NO: 3740 - protein, 37 aa, Artificial Sequence
  Non-cyclic GFR-binding peptide
  MOD_RES (2), (4): Xaa is C or S
  MOD_RES (16), (17), (18), (19), (20): Xaa is A or G
  MOD_RES (21), (22), (23), (24): Xaa is A or G or is absent
RXGXGEVVMDRHKRLXXXXXXXXXYYLMSTASLETPV

SEQ ID NO: 3741 - protein, 39 aa, Artificial Sequence
  Non-cyclic GFR-binding peptide
  MOD_RES (1), (3), (35), (36): Xaa is C or S
XGXSRVVMNQYNKLIVNSSDDLYLVSIASLKTPAXXPKP

SEQ ID NO: 3742 - protein, 37 aa, Artificial Sequence
  Non-cyclic GFR-binding peptide
  MOD_RES (33), (34): Xaa is C or S
  MOD_RES (11), (12), (13), (14), (15): Xaa is A or G
  MOD_RES (16), (17), (18), (19): Xaa is A or G or is absent
EVVMERHKRLXXXXXXXXXYYLMSTASLETPVXXAKP

SEQ ID NO: 3743 - protein, 37 aa, Artificial Sequence
  Non-cyclic GFR-binding peptide
  MOD_RES (1), (3), (34), (35): Xaa is C or S
XKXSKVIMYHYKLIKPTKGIKYLISIPSLDQSVXXPS

SEQ ID NO: 3744 - protein, 36 aa, Artificial Sequence
  Non-cyclic GFR-binding peptide
  MOD_RES (1), (32), (33): Xaa is C or S
XSRVIMRYKKLVKPKRGVFYLISIANLAQPVXXPAA

SEQ ID NO: 3745 - protein, 42 aa, Artificial Sequence
  Non-cyclic GFR-binding peptide
  MOD_RES (1), (3), (36), (37): Xaa is C or S
XGXEAVSMGERHKRLTPVGMDDYYLVSTASLKTPVXXAKGVK

SEQ ID NO: 3746 - protein, 36 aa, Artificial Sequence
  Non-cyclic GFR-binding peptide
  MOD_RES (1), (35), (36): Xaa is C or S
  MOD_RES (13), (14), (15), (16), (17): Xaa is A or G
  MOD_RES (18), (19), (20), (21): Xaa is A or G or is absent
XARVVMNRHKRLXXXXXXXXXYYLVSTASLQTPAXX

SEQ ID NO: 3747 - protein, 41 aa, Artificial Sequence
  Non-cyclic GFR-binding peptide
  MOD_RES (2), (4), (39), (40): Xaa is C or S
  MOD_RES (17), (18), (19), (20), (21): Xaa is A or G
  MOD_RES (22), (23), (24), (25): Xaa is A or G or is absent
RXGXEAVSMGERYKKLXXXXXXXXXFYLVSIANLKTPVXXA

SEQ ID NO: 3748 - protein, 36 aa, Artificial Sequence
  Non-cyclic GFR-binding peptide
  MOD_RES (2), (34), (35): Xaa is C or S
GXAKVVMNRYKKLIVNNSSDFYLVSIANLKTPAXXA

SEQ ID NO: 3749 - protein, 38 aa, Artificial Sequence
  Non-cyclic GFR-binding peptide
  MOD_RES (2), (33), (34): Xaa is C or S
KXSRVIMYHYKLVKPKRGVKYLISIPSLAQPVXXPAAS

SEQ ID NO: 3750 - protein, 34 aa, Artificial Sequence
  Non-cyclic GFR-binding peptide
  MOD_RES (2), (2): Xaa is C or S
  MOD_RES (13), (14), (15), (16), (17): Xaa is A or G
  MOD_RES (18), (19), (20), (21): Xaa is A or G or is absent
KXSKVIMQYNKLXXXXXXXXXLYLISIASLDQSV

SEQ ID NO: 3751 - protein, 38 aa, Artificial Sequence
  Non-cyclic GFR-binding peptide
  MOD_RES (1), (3), (35), (36): Xaa is C or S
XGXSRVVMNQYNKLIVNSSDDLYLVSIASLKTPAXXPK

SEQ ID NO: 3752 - protein, 39 aa, Artificial Sequence
  Non-cyclic GFR-binding peptide
  MOD_RES (33), (34): Xaa is C or S
  MOD_RES (11), (12), (13), (14), (15): Xaa is A or G
  MOD_RES (16), (17), (18), (19): Xaa is A or G or is absent
SKVVMRHKRLXXXXXXXXXYYLISTASLDQPVXXPSASA

SEQ ID NO: 3753 - protein, 37 aa, Artificial Sequence
  Non-cyclic GFR-binding peptide
  MOD_RES (1), (32), (33): Xaa is C or S
XSKVVMQYNKLVKPTRGVLYLISIASLDQPVXXPSAS

SEQ ID NO: 3754 - protein, 42 aa, Artificial Sequence
  Non-cyclic GFR-binding peptide
  MOD_RES (2), (4), (37), (38): Xaa is C or S
  MOD_RES (15), (16), (17), (18), (19): Xaa is A or G
  MOD_RES (20), (21), (22), (23): Xaa is A or G or is absent
SXKXSKVIMRHKRLXXXXXXXXXYYLISTASLDQSVXXPSAS

SEQ ID NO: 3755 - protein, 38 aa, Artificial Sequence
  Non-cyclic GFR-binding peptide
  MOD_RES (1), (38): Xaa is C or S
XALHDELTYHYKLFIPKKRVIEKYLVSIPSLQVQTPRX

SEQ ID NO: 3756 - protein, 34 aa, Artificial Sequence
  Non-cyclic GFR-binding peptide
  MOD_RES (33), (33): Xaa is C or S
  MOD_RES (11), (12), (13), (14), (15): Xaa is A or G
  MOD_RES (16), (17), (18), (19): Xaa is A or G or is absent
RVVMNQYNKLXXXXXXXXXLYLVSIASLKTPAXT

SEQ ID NO: 3757 - protein, 37 aa, Artificial Sequence
  Non-cyclic GFR-binding peptide
  MOD_RES (1), (3), (34), (35): Xaa is C or S
XKXSKVIMRHKRLIKPTKGIYYLISTASLDQSVXXPS

SEQ ID NO: 3758 - protein, 36 aa, Artificial Sequence
  Non-cyclic GFR-binding peptide
  MOD_RES (1), (35), (36): Xaa is C or S
  MOD_RES (13), (14), (15), (16), (17): Xaa is A or G
  MOD_RES (18), (19), (20), (21): Xaa is A or G or is absent
XGEVVMERHKRLXXXXXXXXXYYLMSTASLETPVXX

SEQ ID NO: 3759 - protein, 40 aa, Artificial Sequence
  Non-cyclic GFR-binding peptide
  MOD_RES (37), (37): Xaa is C or S
ALHDELTRHKRLFIPKKRVIEYYLVSTASLQVQTPRXQVN

SEQ ID NO: 3760 - protein, 33 aa, Artificial Sequence
  Non-cyclic GFR-binding peptide
  MOD_RES (11), (12), (13), (14), (15): Xaa is A or G
  MOD_RES (16), (17), (18), (19): Xaa is A or G or is absent
HDELTQYNKLXXXXXXXXXLYLVSIASLQVQTP

SEQ ID NO: 3761 - protein, 32 aa, Artificial Sequence
  Non-cyclic GFR-binding peptide
  MOD_RES (1), (1): Xaa is C or S
XAKVVMNQYNKLIVNNSSDLYLVSIASLKTPA

SEQ ID NO: 3762 - protein, 34 aa, Artificial Sequence
  Non-cyclic GFR-binding peptide
  MOD_RES (2), (34): Xaa is C or S
GXGEVVMERHKRLVVKDYEDYYLMSTASLETPVX

SEQ ID NO: 3763 - protein, 33 aa, Artificial Sequence
  Non-cyclic GFR-binding peptide
  MOD_RES (1), (1): Xaa is C or S
  MOD_RES (12), (13), (14), (15), (16): Xaa is A or G
  MOD_RES (17), (18), (19), (20): Xaa is A or G or is absent
XSRVIMYHYKLXXXXXXXXXKYLISIPSLAQPV

SEQ ID NO: 3764 - protein, 35 aa, Artificial Sequence
  Non-cyclic GFR-binding peptide
  MOD_RES (33), (34): Xaa is C or S
  MOD_RES (11), (12), (13), (14), (15): Xaa is A or G
  MOD_RES (16), (17), (18), (19): Xaa is A or G or is absent
RVVMNYHYKLXXXXXXXXXKYLVSIPSLQTPAXXP

SEQ ID NO: 3765 - protein, 37 aa, Artificial Sequence
  Non-cyclic GFR-binding peptide
  MOD_RES (2), (35), (36): Xaa is C or S
  MOD_RES (13), (14), (15), (16), (17): Xaa is A or G
  MOD_RES (18), (19), (20), (21): Xaa is A or G or is absent
KXSKVVMYHYKLXXXXXXXXXKYLISIPSLDQPVXXP

SEQ ID NO: 3766 - protein, 44 aa, Artificial Sequence
  Non-cyclic GFR-binding peptide
  MOD_RES (2), (4), (38), (39): Xaa is C or S
  MOD_RES (16), (17), (18), (19), (20): Xaa is A or G
  MOD_RES (21), (22), (23), (24): Xaa is A or G or is absent
RXGXGEVVMDRHKRLXXXXXXXXXYYLMSTASLETPVXXAKPIK

SEQ ID NO: 3767 - protein, 39 aa, Artificial Sequence
  Non-cyclic GFR-binding peptide
  MOD_RES (1), (34), (35): Xaa is C or S
XEAVSMGEQYNKLTPVGMDDLYLVSIASLKTPVXXAKGV

SEQ ID NO: 3768 - protein, 43 aa, Artificial Sequence
  Non-cyclic GFR-binding peptide
  MOD_RES (1), (3), (37), (38): Xaa is C or S
  MOD_RES (15), (16), (17), (18), (19): Xaa is A or G
  MOD_RES (20), (21), (22), (23): Xaa is A or G or is absent
XGXSRVVMNRHKRLXXXXXXXXXYYLVSTASLKTPAXXPKPVY

SEQ ID NO: 3769 - protein, 38 aa, Artificial Sequence
  Non-cyclic GFR-binding peptide
  MOD_RES (1), (34), (35): Xaa is C or S
  MOD_RES (12), (13), (14), (15), (16): Xaa is A or G
  MOD_RES (17), (18), (19), (20): Xaa is A or G or is absent
XSRVIMYHYKLXXXXXXXXXKYLISIPSLAQPVXXPAA

SEQ ID NO: 3770 - protein, 36 aa, Artificial Sequence
  Non-cyclic GFR-binding peptide
  MOD_RES (36), (36): Xaa is C or S
LHDELTQYNKLFIPKKRVIELYLVSIASLQVQTPRX

SEQ ID NO: 3771 - protein, 33 aa, Artificial Sequence
  Non-cyclic GFR-binding peptide
  MOD_RES (1), (32), (33): Xaa is C or S
XSRVIMRHKRLVKPKRGVYYLISTASLAQPVXX

SEQ ID NO: 3772 - protein, 37 aa, Artificial Sequence
  Non-cyclic GFR-binding peptide
  MOD_RES (1), (3), (36), (37): Xaa is C or S
XGXEAVSMGERHKRLTPVGMDDYYLVSTASLKTPVXX

SEQ ID NO: 3773 - protein, 37 aa, Artificial Sequence
  Non-cyclic GFR-binding peptide
  MOD_RES (37), (37): Xaa is C or S
  MOD_RES (13), (14), (15), (16), (17): Xaa is A or G
  MOD_RES (18), (19), (20), (21): Xaa is A or G or is absent
ALHDELTYHYKLXXXXXXXXXKYLVSIPSLQVQTPRX

SEQ ID NO: 3774 - protein, 40 aa, Artificial Sequence
  Non-cyclic GFR-binding peptide
  MOD_RES (1), (35), (36): Xaa is C or S
  MOD_RES (13), (14), (15), (16), (17): Xaa is A or G
  MOD_RES (18), (19), (20), (21): Xaa is A or G or is absent
XSRVVMNQYNKLXXXXXXXXXLYLVSIASLKTPAXXPKPV

SEQ ID NO: 3775 - protein, 40 aa, Artificial Sequence
  Non-cyclic GFR-binding peptide
  MOD_RES (2), (35), (36): Xaa is C or S
  MOD_RES (13), (14), (15), (16), (17): Xaa is A or G
  MOD_RES (18), (19), (20), (21): Xaa is A or G or is absent
KXSKVVMRYKKLXXXXXXXXXFYLISIANLDQPVXXPSAS

SEQ ID NO: 3776 - protein, 41 aa, Artificial Sequence
  Non-cyclic GFR-binding peptide
  MOD_RES (2), (39): Xaa is C or S
KXALHDELTRYKKLFIPKKRVIEFYLVSIANLQVQTPRXQV

SEQ ID NO: 3777 - protein, 35 aa, Artificial Sequence
  Non-cyclic GFR-binding peptide
  MOD_RES (34), (35): Xaa is C or S
  MOD_RES (12), (13), (14), (15), (16): Xaa is A or G
  MOD_RES (17), (18), (19), (20): Xaa is A or G or is absent
GEVVMERHKRLXXXXXXXXXYYLMSTASLETPVXX

SEQ ID NO: 3778 - protein, 36 aa, Artificial Sequence
  Non-cyclic GFR-binding peptide
  MOD_RES (2), (36): Xaa is C or S
  MOD_RES (14), (15), (16), (17), (18): Xaa is A or G
  MOD_RES (19), (20), (21), (22): Xaa is A or G or is absent
GXGEVVMERHKRLXXXXXXXXXYYLMSTASLETPVX

SEQ ID NO: 3779 - protein, 39 aa, Artificial Sequence
  Non-cyclic GFR-binding peptide
  MOD_RES (33), (34): Xaa is C or S
  MOD_RES (11), (12), (13), (14), (15): Xaa is A or G
  MOD_RES (16), (17), (18), (19): Xaa is A or G or is absent
KVVMNRYKKLXXXXXXXXXFYLVSIANLKTPAXXAKPVA

SEQ ID NO: 3780 - protein, 42 aa, Artificial Sequence
  Non-cyclic GFR-binding peptide
  MOD_RES (1), (36), (37): Xaa is C or S
  MOD_RES (14), (15), (16), (17), (18): Xaa is A or G
  MOD_RES (19), (20), (21), (22): Xaa is A or G or is absent
XEAVSMGERYKKLXXXXXXXXXFYLVSIANLKTPVXXAKGVK

SEQ ID NO: 3781 - protein, 40 aa, Artificial Sequence
  Non-cyclic GFR-binding peptide
  MOD_RES (1), (34), (35): Xaa is C or S
  MOD_RES (12), (13), (14), (15), (16): Xaa is A or G
  MOD_RES (17), (18), (19), (20): Xaa is A or G or is absent
XSRVIMRHKRLXXXXXXXXXYYLISTASLAQPVXXPAASA

SEQ ID NO: 3782 - protein, 35 aa, Artificial Sequence
  Non-cyclic GFR-binding peptide
  MOD_RES (1), (3): Xaa is C or S
  MOD_RES (14), (15), (16), (17), (18): Xaa is A or G
  MOD_RES (19), (20), (21), (22): Xaa is A or G or is absent
XKXSRVIMQYNKLXXXXXXXXXLYLISIASLAQPV

SEQ ID NO: 3783 - protein, 38 aa, Artificial Sequence
  Non-cyclic GFR-binding peptide
  MOD_RES (2), (4), (36), (37): Xaa is C or S
RXGXGEVVMDRYKKLVVKENEDFYLMSIANLETPVXXA

SEQ ID NO: 3784 - protein, 36 aa, Artificial Sequence
  Non-cyclic GFR-binding peptide
  MOD_RES (2), (4): Xaa is C or S
  MOD_RES (15), (16), (17), (18), (19): Xaa is A or G
  MOD_RES (20), (21), (22), (23): Xaa is A or G or is absent
SXKXSKVIMQYNKLXXXXXXXXXLYLISIASLDQSV

SEQ ID NO: 3785 - protein, 35 aa, Artificial Sequence
  Non-cyclic GFR-binding peptide
  MOD_RES (2), (34): Xaa is C or S
GXSRVVMNQYNKLIVNSSDDLYLVSIASLKTPAXT

SEQ ID NO: 3786 - protein, 34 aa, Artificial Sequence
  Non-cyclic GFR-binding peptide
  MOD_RES (31), (31): Xaa is C or S
RVVMNRHKRLIVNSSDDYYLVSTASLKTPAXTPK

SEQ ID NO: 3787 - protein, 40 aa, Artificial Sequence
  Non-cyclic GFR-binding peptide
  MOD_RES (1), (3), (37), (38): Xaa is C or S
  MOD_RES (15), (16), (17), (18), (19): Xaa is A or G
  MOD_RES (20), (21), (22), (23): Xaa is A or G or is absent
XGXARVVMNYHYKLXXXXXXXXXKYLVSIPSLQTPAXXPK

SEQ ID NO: 3788 - protein, 37 aa, Artificial Sequence
  Non-cyclic GFR-binding peptide
  MOD_RES (1), (34), (35): Xaa is C or S
  MOD_RES (12), (13), (14), (15), (16): Xaa is A or G
  MOD_RES (17), (18), (19), (20): Xaa is A or G or is absent
XSRVIMYHYKLXXXXXXXXXKYLISIPSLAQPVXXPA

SEQ ID NO: 3789 - protein, 32 aa, Artificial Sequence
  Non-cyclic GFR-binding peptide
  MOD_RES (2), (2): Xaa is C or S
KXSRVIMRYKKLVKPKRGVFYLISIANLAQPV

SEQ ID NO: 3790 - protein, 45 aa, Artificial Sequence
  Non-cyclic GFR-binding peptide
  MOD_RES (2), (4), (41): Xaa is C or S
EXKXALHDELTRYKKLFIPKKRVIEFYLVSIANLQVQTPRXQVNR

SEQ ID NO: 3791 - protein, 35 aa, Artificial Sequence
  Non-cyclic GFR-binding peptide
  MOD_RES (1), (32), (33): Xaa is C or S
XSKVIMYHYKLIKPTKGIKYLISIPSLDQSVXXPS

SEQ ID NO: 3792 - protein, 35 aa, Artificial Sequence
  Non-cyclic GFR-binding peptide
  MOD_RES (32), (33): Xaa is C or S
AKVVMNQYNKLIVNNSSDLYLVSIASLKTPAXXAK

SEQ ID NO: 3793 - protein, 34 aa, Artificial Sequence
  Non-cyclic GFR-binding peptide
  MOD_RES (34), (34): Xaa is C or S
  MOD_RES (12), (13), (14), (15), (16): Xaa is A or G
  MOD_RES (17), (18), (19), (20): Xaa is A or G or is absent
GEVVMERHKRLXXXXXXXXXYYLMSTASLETPVX

SEQ ID NO: 3794 - protein, 35 aa, Artificial Sequence
  Non-cyclic GFR-binding peptide
  MOD_RES (33), (34): Xaa is C or S
  MOD_RES (11), (12), (13), (14), (15): Xaa is A or G
  MOD_RES (16), (17), (18), (19): Xaa is A or G or is absent
KVVMNYHYKLXXXXXXXXXKYLVSIPSLKTPAXXA

SEQ ID NO: 3795 - protein, 40 aa, Artificial Sequence
  Non-cyclic GFR-binding peptide
  MOD_RES (2), (4), (38), (39): Xaa is C or S
  MOD_RES (16), (17), (18), (19), (20): Xaa is A or G
  MOD_RES (21), (22), (23), (24): Xaa is A or G or is absent
HXGXSRVVMNQYNKLXXXXXXXXXLYLVSIASLKTPAXXP

SEQ ID NO: 3796 - protein, 35 aa, Artificial Sequence
  Non-cyclic GFR-binding peptide
  MOD_RES (32), (33): Xaa is C or S
SRVVMNRHKRLIVNSSDDYYLVSTASLKTPAXXPK

SEQ ID NO: 3797 - protein, 33 aa, Artificial Sequence
  Non-cyclic GFR-binding peptide
LHDELTRYKKLFIPKKRVIEFYLVSIANLQVQT

SEQ ID NO: 3798 - protein, 39 aa, Artificial Sequence
  Non-cyclic GFR-binding peptide
  MOD_RES (1), (35), (36): Xaa is C or S
  MOD_RES (13), (14), (15), (16), (17): Xaa is A or G
  MOD_RES (18), (19), (20), (21): Xaa is A or G or is absent
XGEVVMDRYKKLXXXXXXXXXFYLMSIANLETPVXXAKP

SEQ ID NO: 3799 - protein, 38 aa, Artificial Sequence
  Non-cyclic GFR-binding peptide
  MOD_RES (2), (4): Xaa is C or S
  MOD_RES (17), (18), (19), (20), (21): Xaa is A or G
  MOD_RES (22), (23), (24), (25): Xaa is A or G or is absent
RXGXEAVSMGEQYNKLXXXXXXXXXLYLVSIASLKTPV

SEQ ID NO: 3800 - protein, 43 aa, Artificial Sequence
  Non-cyclic GFR-binding peptide
  MOD_RES (2), (4), (41): Xaa is C or S
EXKXALHDELTYHYKLFIPKKRVIEKYLVSIPSLQVQTPRXQV

SEQ ID NO: 3801 - protein, 37 aa, Artificial Sequence
  Non-cyclic GFR-binding peptide
  MOD_RES (1), (32), (33): Xaa is C or S
XSRVIMYHYKLVKPKRGVKYLISIPSLAQPVXXPAAS

SEQ ID NO: 3802 - protein, 39 aa, Artificial Sequence
  Non-cyclic GFR-binding peptide
  MOD_RES (1), (3), (36), (37): Xaa is C or S
  MOD_RES (14), (15), (16), (17), (18): Xaa is A or G
  MOD_RES (19), (20), (21), (22): Xaa is A or G or is absent
XKXSKVVMRHKRLXXXXXXXXXYYLISTASLDQPVXXPS

SEQ ID NO: 3803 - protein, 39 aa, Artificial Sequence
  Non-cyclic GFR-binding peptide
  MOD_RES (2), (4), (38), (39): Xaa is C or S
  MOD_RES (16), (17), (18), (19), (20): Xaa is A or G
  MOD_RES (21), (22), (23), (24): Xaa is A or G or is absent
HXGXAKVVMNYHYKLXXXXXXXXXKYLVSIPSLKTPAXX

SEQ ID NO: 3804 - protein, 41 aa, Artificial Sequence
  Non-cyclic GFR-binding peptide
  MOD_RES (35), (36): Xaa is C or S
  MOD_RES (13), (14), (15), (16), (17): Xaa is A or G
  MOD_RES (18), (19), (20), (21): Xaa is A or G or is absent
EAVSMGERYKKLXXXXXXXXXFYLVSIANLKTPVXXAKGVK

SEQ ID NO: 3805 - protein, 35 aa, Artificial Sequence
  Non-cyclic GFR-binding peptide
  MOD_RES (33), (34): Xaa is C or S
  MOD_RES (11), (12), (13), (14), (15): Xaa is A or G
  MOD_RES (16), (17), (18), (19): Xaa is A or G or is absent
SKVVMQYNKLXXXXXXXXXLYLISIASLDQPVXXP

SEQ ID NO: 3806 - protein, 38 aa, Artificial Sequence
  Non-cyclic GFR-binding peptide
  MOD_RES (1), (3), (34), (35): Xaa is C or S
XKXSKVIMRHKRLIKPTKGIYYLISTASLDQSVXXPSA

SEQ ID NO: 3807 - protein, 37 aa, Artificial Sequence
  Non-cyclic GFR-binding peptide
  MOD_RES (2), (4): Xaa is C or S
  MOD_RES (16), (17), (18), (19), (20): Xaa is A or G
  MOD_RES (21), (22), (23), (24): Xaa is A or G or is absent
HXGXARVVMNYHYKLXXXXXXXXXKYLVSIPSLQTPA

SEQ ID NO: 3808 - protein, 33 aa, Artificial Sequence
  Non-cyclic GFR-binding peptide
  MOD_RES (12), (13), (14), (15), (16): Xaa is A or G
  MOD_RES (17), (18), (19), (20): Xaa is A or G or is absent
GEVVMERHKRLXXXXXXXXXYYLMSTASLETPV

SEQ ID NO: 3809 - protein, 30 aa, Artificial Sequence
  Non-cyclic GFR-binding peptide
SKVIMQYNKLIKPTKGILYLISIASLDQSV

SEQ ID NO: 3810 - protein, 38 aa, Artificial Sequence
  Non-cyclic GFR-binding peptide
  MOD_RES (1), (3), (37), (38): Xaa is C or S
  MOD_RES (15), (16), (17), (18), (19): Xaa is A or G
  MOD_RES (20), (21), (22), (23): Xaa is A or G or is absent
XGXARVVMNQYNKLXXXXXXXXXLYLVSIASLQTPAXX

SEQ ID NO: 3811 - protein, 36 aa, Artificial Sequence
  Non-cyclic GFR-binding peptide
  MOD_RES (33), (34): Xaa is C or S
  MOD_RES (11), (12), (13), (14), (15): Xaa is A or G
  MOD_RES (16), (17), (18), (19): Xaa is A or G or is absent
SRVIMRYKKLXXXXXXXXXFYLISIANLAQPVXXPA

SEQ ID NO: 3812 - protein, 39 aa, Artificial Sequence
  Non-cyclic GFR-binding peptide
  MOD_RES (2), (34): Xaa is C or S
GXSRVVMNYHYKLIVNSSDDKYLVSIPSLKTPAXTPKTV

SEQ ID NO: 3813 - protein, 35 aa, Artificial Sequence
  Non-cyclic GFR-binding peptide
  MOD_RES (32), (32): Xaa is C or S
SRVVMNRHKRLIVNSSDDYYLVSTASLKTPAXTPK

SEQ ID NO: 3814 - protein, 38 aa, Artificial Sequence
  Non-cyclic GFR-binding peptide
  MOD_RES (2), (4), (36), (37): Xaa is C or S
HXGXARVVMNRHKRLIVNSSDDYYLVSTASLQTPAXXP

SEQ ID NO: 3815 - protein, 41 aa, Artificial Sequence
  Non-cyclic GFR-binding peptide
  MOD_RES (1), (38): Xaa is C or S
XALHDELTQYNKLFIPKKRVIELYLVSIASLQVQTPRXQVN

SEQ ID NO: 3816 - protein, 40 aa, Artificial Sequence
  Non-cyclic GFR-binding peptide
  MOD_RES (1), (36), (37): Xaa is C or S
  MOD_RES (14), (15), (16), (17), (18): Xaa is A or G
  MOD_RES (19), (20), (21), (22): Xaa is A or G or is absent
XEAVSMGERHKRLXXXXXXXXXYYLVSTASLKTPVXXAKG

SEQ ID NO: 3817 - protein, 42 aa, Artificial Sequence
  Non-cyclic GFR-binding peptide
  MOD_RES (2), (4), (41): Xaa is C or S
  MOD_RES (17), (18), (19), (20), (21): Xaa is A or G
  MOD_RES (22), (23), (24), (25): Xaa is A or G or is absent
EXKXALHDELTYHYKLXXXXXXXXXKYLVSIPSLQVQTPRXQ

SEQ ID NO: 3818 - protein, 40 aa, Artificial Sequence
  Non-cyclic GFR-binding peptide
  MOD_RES (1), (3), (34), (35): Xaa is C or S
XKXSKVIMRYKKLIKPTKGIFYLISIANLDQSVXXPSASA

SEQ ID NO: 3819 - protein, 38 aa, Artificial Sequence
  Non-cyclic GFR-binding peptide
  MOD_RES (1), (33), (34): Xaa is C or S
XAKVVMNQYNKLIVNNSSDLYLVSIASLKTPAXXAKPV

SEQ ID NO: 3820 - protein, 34 aa, Artificial Sequence
  Non-cyclic GFR-binding peptide
  MOD_RES (1), (34): Xaa is C or S
  MOD_RES (12), (13), (14), (15), (16): Xaa is A or G
  MOD_RES (17), (18), (19), (20): Xaa is A or G or is absent
XSRVIMRYKKLXXXXXXXXXFYLISIANLAQPVX

SEQ ID NO: 3821 - protein, 38 aa, Artificial Sequence
  Non-cyclic GFR-binding peptide
  MOD_RES (1), (32), (33): Xaa is C or S
XSKVIMRYKKLIKPTKGIFYLISIANLDQSVXXPSASA

SEQ ID NO: 3822 - protein, 37 aa, Artificial Sequence
  Non-cyclic GFR-binding peptide
  MOD_RES (2), (37): Xaa is C or S
  MOD_RES (15), (16), (17), (18), (19): Xaa is A or G
  MOD_RES (20), (21), (22), (23): Xaa is A or G or is absent
GXEAVSMGERYKKLXXXXXXXXXFYLVSIANLKTPVX

SEQ ID NO: 3823 - protein, 36 aa, Artificial Sequence
  Non-cyclic GFR-binding peptide
  MOD_RES (1), (35), (36): Xaa is C or S
  MOD_RES (13), (14), (15), (16), (17): Xaa is A or G
  MOD_RES (18), (19), (20), (21): Xaa is A or G or is absent
XAKVVMNQYNKLXXXXXXXXXLYLVSIASLKTPAXX

SEQ ID NO: 3824 - protein, 39 aa, Artificial Sequence
  Non-cyclic GFR-binding peptide
  MOD_RES (1), (3), (34), (35): Xaa is C or S
XKXSKVVMRYKKLVKPTRGVFYLISIANLDQPVXXPSAS

SEQ ID NO: 3825 - protein, 38 aa, Artificial Sequence
  Non-cyclic GFR-binding peptide
  MOD_RES (2), (35), (36): Xaa is C or S
GXEAVSMGERYKKLTPVGMDDFYLVSIANLKTPVXXAK

SEQ ID NO: 3826 - protein, 37 aa, Artificial Sequence
  Non-cyclic GFR-binding peptide
  MOD_RES (36), (36): Xaa is C or S
  MOD_RES (12), (13), (14), (15), (16): Xaa is A or G
  MOD_RES (17), (18), (19), (20): Xaa is A or G or is absent
LHDELTYHYKLXXXXXXXXXKYLVSIPSLQVQTPRXQ

SEQ ID NO: 3827 - protein, 34 aa, Artificial Sequence
  Non-cyclic GFR-binding peptide
  MOD_RES (31), (32): Xaa is C or S
SKVVMQYNKLVKPTRGVLYLISIASLDQPVXXPS

SEQ ID NO: 3828 - protein, 38 aa, Artificial Sequence
  Non-cyclic GFR-binding peptide
  MOD_RES (37), (37): Xaa is C or S
  MOD_RES (13), (14), (15), (16), (17): Xaa is A or G
  MOD_RES (18), (19), (20), (21): Xaa is A or G or is absent
ALHDELTQYNKLXXXXXXXXXLYLVSIASLQVQTPRXQ

SEQ ID NO: 3829 - protein, 41 aa, Artificial Sequence
  Non-cyclic GFR-binding peptide
  MOD_RES (2), (36), (37): Xaa is C or S
  MOD_RES (14), (15), (16), (17), (18): Xaa is A or G
  MOD_RES (19), (20), (21), (22): Xaa is A or G or is absent
GXGEVVMERYKKLXXXXXXXXXFYLMSIANLETPVXXAKPI

SEQ ID NO: 3830 - protein, 38 aa, Artificial Sequence
  Non-cyclic GFR-binding peptide
  MOD_RES (1), (3), (34), (35): Xaa is C or S
XKXSKVVMYHYKLVKPTRGVKYLISIPSLDQPVXXPSA

SEQ ID NO: 3831 - protein, 35 aa, Artificial Sequence
  Non-cyclic GFR-binding peptide
  MOD_RES (33), (34): Xaa is C or S
  MOD_RES (11), (12), (13), (14), (15): Xaa is A or G
  MOD_RES (16), (17), (18), (19): Xaa is A or G or is absent
KVVMNQYNKLXXXXXXXXXLYLVSIASLKTPAXXA

SEQ ID NO: 3832 - protein, 44 aa, Artificial Sequence
  Non-cyclic GFR-binding peptide
  MOD_RES (1), (3), (40): Xaa is C or S
  MOD_RES (16), (17), (18), (19), (20): Xaa is A or G
  MOD_RES (21), (22), (23), (24): Xaa is A or G or is absent
XKXALHDELTRHKRLXXXXXXXXXYYLVSTASLQVQTPRXQVNR

SEQ ID NO: 3833 - protein, 37 aa, Artificial Sequence
  Non-cyclic GFR-binding peptide
  MOD_RES (1), (33), (34): Xaa is C or S
XGEVVMEYHYKLVVKDYEDKYLMSIPSLETPVXXAKP

SEQ ID NO: 3834 - protein, 38 aa, Artificial Sequence
  Non-cyclic GFR-binding peptide
  MOD_RES (37), (37): Xaa is C or S
  MOD_RES (13), (14), (15), (16), (17): Xaa is A or G
  MOD_RES (18), (19), (20), (21): Xaa is A or G or is absent
ALHDELTRHKRLXXXXXXXXXYYLVSTASLQVQTPRXQ

SEQ ID NO: 3835 - protein, 37 aa, Artificial Sequence
  Non-cyclic GFR-binding peptide
  MOD_RES (33), (33): Xaa is C or S
  MOD_RES (11), (12), (13), (14), (15): Xaa is A or G
  MOD_RES (16), (17), (18), (19): Xaa is A or G or is absent
RVVMNRHKRLXXXXXXXXXYYLVSTASLKTPAXTPKT

SEQ ID NO: 3836 - protein, 37 aa, Artificial Sequence
  Non-cyclic GFR-binding peptide
  MOD_RES (1), (33): Xaa is C or S
XSRVVMNRHKRLIVNSSDDYYLVSTASLKTPAXTPKT

SEQ ID NO: 3837 - protein, 36 aa, Artificial Sequence
  Non-cyclic GFR-binding peptide
  MOD_RES (2), (4), (35), (36): Xaa is C or S
SXKXSRVIMQYNKLVKPKRGVLYLISIASLAQPVXX

SEQ ID NO: 3838 - protein, 36 aa, Artificial Sequence
  Non-cyclic GFR-binding peptide
  MOD_RES (1), (33), (34): Xaa is C or S
XGEVVMERYKKLVVKDYEDFYLMSIANLETPVXXAK

SEQ ID NO: 3839 - protein, 37 aa, Artificial Sequence
  Non-cyclic GFR-binding peptide
  MOD_RES (1), (3): Xaa is C or S
XKXALHDELTQYNKLFIPKKRVIELYLVSIASLQVQT

SEQ ID NO: 3840 - protein, 36 aa, Artificial Sequence
  Non-cyclic GFR-binding peptide
  MOD_RES (31), (32): Xaa is C or S
RVVMNQYNKLIVNSSDDLYLVSIASLQTPAXXPKPV

SEQ ID NO: 3841 - protein, 40 aa, Artificial Sequence
  Non-cyclic GFR-binding peptide
  MOD_RES (2), (4), (39), (40): Xaa is C or S
  MOD_RES (17), (18), (19), (20), (21): Xaa is A or G
  MOD_RES (22), (23), (24), (25): Xaa is A or G or is absent
RXGXEAVSMGEQYNKLXXXXXXXXXLYLVSIASLKTPVXX

SEQ ID NO: 3842 - protein, 37 aa, Artificial Sequence
  Non-cyclic GFR-binding peptide
  MOD_RES (2), (4), (36), (37): Xaa is C or S
RXGXGEVVMDYHYKLVVKENEDKYLMSIPSLETPVXX

SEQ ID NO: 3843 - protein, 35 aa, Artificial Sequence
  Non-cyclic GFR-binding peptide
  MOD_RES (1), (32), (33): Xaa is C or S
XSKVVMYHYKLVKPTRGVKYLISIPSLDQPVXXPS

SEQ ID NO: 3844 - protein, 35 aa, Artificial Sequence
  Non-cyclic GFR-binding peptide
  MOD_RES (31), (32): Xaa is C or S
SRVIMQYNKLVKPKRGVLYLISIASLAQPVXXPAA

SEQ ID NO: 3845 - protein, 35 aa, Artificial Sequence
  Non-cyclic GFR-binding peptide
LHDELTRYKKLFIPKKRVIEFYLVSIANLQVQTPR

SEQ ID NO: 3846 - protein, 38 aa, Artificial Sequence
  Non-cyclic GFR-binding peptide
  MOD_RES (34), (35): Xaa is C or S
  MOD_RES (12), (13), (14), (15), (16): Xaa is A or G
  MOD_RES (17), (18), (19), (20): Xaa is A or G or is absent
ARVVMNYHYKLXXXXXXXXXKYLVSIPSLQTPAXXPKP

SEQ ID NO: 3847 - protein, 37 aa, Artificial Sequence
  Non-cyclic GFR-binding peptide
  MOD_RES (1), (32), (33): Xaa is C or S
XSKVVMRYKKLVKPTRGVFYLISIANLDQPVXXPSAS

SEQ ID NO: 3848 - protein, 34 aa, Artificial Sequence
  Non-cyclic GFR-binding peptide
  MOD_RES (13), (14), (15), (16), (17): Xaa is A or G
  MOD_RES (18), (19), (20), (21): Xaa is A or G or is absent
ALHDELTRYKKLXXXXXXXXXFYLVSIANLQVQT

SEQ ID NO: 3849 - protein, 39 aa, Artificial Sequence
  Non-cyclic GFR-binding peptide
  MOD_RES (2), (4), (37), (38): Xaa is C or S
RXGXEAVSMGEQYNKLTPVGMDDLYLVSIASLKTPVXXA

SEQ ID NO: 3850 - protein, 40 aa, Artificial Sequence
  Non-cyclic GFR-binding peptide
  MOD_RES (2), (4), (37), (38): Xaa is C or S
  MOD_RES (15), (16), (17), (18), (19): Xaa is A or G
  MOD_RES (20), (21), (22), (23): Xaa is A or G or is absent
SXKXSKVVMRHKRLXXXXXXXXXYYLISTASLDQPVXXPS

SEQ ID NO: 3851 - protein, 37 aa, Artificial Sequence
  Non-cyclic GFR-binding peptide
  MOD_RES (1), (33), (34): Xaa is C or S
XGEVVMERYKKLVVKDYEDFYLMSIANLETPVXXAKP

SEQ ID NO: 3852 - protein, 41 aa, Artificial Sequence
  Non-cyclic GFR-binding peptide
  MOD_RES (2), (4), (37), (38): Xaa is C or S
  MOD_RES (15), (16), (17), (18), (19): Xaa is A or G
  MOD_RES (20), (21), (22), (23): Xaa is A or G or is absent
SXKXSKVIMQYNKLXXXXXXXXXLYLISIASLDQSVXXPSA

SEQ ID NO: 3853 - protein, 37 aa, Artificial Sequence
  Non-cyclic GFR-binding peptide
  MOD_RES (2), (36), (37): Xaa is C or S
  MOD_RES (14), (15), (16), (17), (18): Xaa is A or G
  MOD_RES (19), (20), (21), (22): Xaa is A or G or is absent
GXAKVVMNRYKKLXXXXXXXXXFYLVSIANLKTPAXX

SEQ ID NO: 3854 - protein, 42 aa, Artificial Sequence
  Non-cyclic GFR-binding peptide
  MOD_RES (2), (4), (36), (37): Xaa is C or S
HXGXARVVMNYHYKLIVNSSDDKYLVSIPSLQTPAXXPKPVT

SEQ ID NO: 3855 - protein, 38 aa, Artificial Sequence
  Non-cyclic GFR-binding peptide
  MOD_RES (2), (34), (35): Xaa is C or S
GXARVVMNYHYKLIVNSSDDKYLVSIPSLQTPAXXPKP

SEQ ID NO: 3856 - protein, 39 aa, Artificial Sequence
  Non-cyclic GFR-binding peptide
  MOD_RES (2), (34), (35): Xaa is C or S
GXARVVMNRHKRLIVNSSDDYYLVSTASLQTPAXXPKPV

SEQ ID NO: 3857 - protein, 40 aa, Artificial Sequence
  Non-cyclic GFR-binding peptide
  MOD_RES (2), (37), (38): Xaa is C or S
  MOD_RES (15), (16), (17), (18), (19): Xaa is A or G
  MOD_RES (20), (21), (22), (23): Xaa is A or G or is absent
GXEAVSMGERYKKLXXXXXXXXXFYLVSIANLKTPVXXAK

SEQ ID NO: 3858 - protein, 38 aa, Artificial Sequence
  Non-cyclic GFR-binding peptide
  MOD_RES (1), (3), (34), (35): Xaa is C or S
XKXSKVVMRHKRLVKPTRGVYYLISTASLDQPVXXPSA

SEQ ID NO: 3859 - protein, 36 aa, Artificial Sequence
  Non-cyclic GFR-binding peptide
  MOD_RES (2), (35), (36): Xaa is C or S
  MOD_RES (13), (14), (15), (16), (17): Xaa is A or G
  MOD_RES (18), (19), (20), (21): Xaa is A or G or is absent
KXSRVIMRHKRLXXXXXXXXXYYLISTASLAQPVXX

SEQ ID NO: 3860 - protein, 40 aa, Artificial Sequence
  Non-cyclic GFR-binding peptide
  MOD_RES (1), (34), (35): Xaa is C or S
  MOD_RES (12), (13), (14), (15), (16): Xaa is A or G
  MOD_RES (17), (18), (19), (20): Xaa is A or G or is absent
XSRVIMQYNKLXXXXXXXXXLYLISIASLAQPVXXPAASA

SEQ ID NO: 3861 - protein, 35 aa, Artificial Sequence
  Non-cyclic GFR-binding peptide
  MOD_RES (1), (32), (33): Xaa is C or S
XSKVIMRHKRLIKPTKGIYYLISTASLDQSVXXPS

SEQ ID NO: 3862 - protein, 38 aa, Artificial Sequence
  Non-cyclic GFR-binding peptide
  MOD_RES (34), (35): Xaa is C or S
  MOD_RES (12), (13), (14), (15), (16): Xaa is A or G
  MOD_RES (17), (18), (19), (20): Xaa is A or G or is absent
GEVVMDYHYKLXXXXXXXXXKYLMSIPSLETPVXXAKP

SEQ ID NO: 3863 - protein, 34 aa, Artificial Sequence
  Non-cyclic GFR-binding peptide
  MOD_RES (1), (1): Xaa is C or S
  MOD_RES (13), (14), (15), (16), (17): Xaa is A or G
  MOD_RES (18), (19), (20), (21): Xaa is A or G or is absent
XSRVVMNQYNKLXXXXXXXXXLYLVSIASLKTPA

SEQ ID NO: 3864 - protein, 43 aa, Artificial Sequence
  Non-cyclic GFR-binding peptide
  MOD_RES (1), (3), (40): Xaa is C or S
  MOD_RES (16), (17), (18), (19), (20): Xaa is A or G
  MOD_RES (21), (22), (23), (24): Xaa is A or G or is absent
XKXALHDELTQYNKLXXXXXXXXXLYLVSIASLQVQTPRXQVN

SEQ ID NO: 3865 - protein, 37 aa, Artificial Sequence
  Non-cyclic GFR-binding peptide
  MOD_RES (2), (4), (36), (37): Xaa is C or S
HXGXAKVVMNQYNKLIVNNSSDLYLVSIASLKTPAXX

SEQ ID NO: 3866 - protein, 40 aa, Artificial Sequence
  Non-cyclic GFR-binding peptide
  MOD_RES (1), (34), (35): Xaa is C or S
  MOD_RES (12), (13), (14), (15), (16): Xaa is A or G
  MOD_RES (17), (18), (19), (20): Xaa is A or G or is absent
XSKVIMRYKKLXXXXXXXXXFYLISIANLDQSVXXPSASA

SEQ ID NO: 3867 - protein, 35 aa, Artificial Sequence
  Non-cyclic GFR-binding peptide
  MOD_RES (1), (3), (35): Xaa is C or S
XGXAKVVMNRYKKLIVNNSSDFYLVSIANLKTPAX

SEQ ID NO: 3868 - protein, 34 aa, Artificial Sequence
  Non-cyclic GFR-binding peptide
  MOD_RES (2), (2): Xaa is C or S
  MOD_RES (13), (14), (15), (16), (17): Xaa is A or G
  MOD_RES (18), (19), (20), (21): Xaa is A or G or is absent
KXSKVIMYHYKLXXXXXXXXXKYLISIPSLDQSV

SEQ ID NO: 3869 - protein, 32 aa, Artificial Sequence
  Non-cyclic GFR-binding peptide
  MOD_RES (2), (2): Xaa is C or S
KXSRVIMYHYKLVKPKRGVKYLISIPSLAQPV

SEQ ID NO: 3870 - protein, 36 aa, Artificial Sequence
  Non-cyclic GFR-binding peptide
  MOD_RES (1), (1): Xaa is C or S
  MOD_RES (14), (15), (16), (17), (18): Xaa is A or G
  MOD_RES (19), (20), (21), (22): Xaa is A or G or is absent
XALHDELTRHKRLXXXXXXXXXYYLVSTASLQVQTP

SEQ ID NO: 3871 - protein, 36 aa, Artificial Sequence
  Non-cyclic GFR-binding peptide
  MOD_RES (31), (32): Xaa is C or S
KVVMNQYNKLIVNNSSDLYLVSIASLKTPAXXAKPV

SEQ ID NO: 3872 - protein, 35 aa, Artificial Sequence
  Non-cyclic GFR-binding peptide
  MOD_RES (1), (33), (34): Xaa is C or S
XSRVVMNRHKRLIVNSSDDYYLVSTASLKTPAXXP

SEQ ID NO: 3873 - protein, 39 aa, Artificial Sequence
  Non-cyclic GFR-binding peptide
  MOD_RES (2), (4), (36): Xaa is C or S
HXGXSRVVMNQYNKLIVNSSDDLYLVSIASLKTPAXTPK

SEQ ID NO: 3874 - protein, 38 aa, Artificial Sequence
  Non-cyclic GFR-binding peptide
  MOD_RES (2), (36), (37): Xaa is C or S
  MOD_RES (14), (15), (16), (17), (18): Xaa is A or G
  MOD_RES (19), (20), (21), (22): Xaa is A or G or is absent
GXAKVVMNRYKKLXXXXXXXXXFYLVSIANLKTPAXXA

SEQ ID NO: 3875 - protein, 42 aa, Artificial Sequence
  Non-cyclic GFR-binding peptide
  MOD_RES (2), (4), (36), (37): Xaa is C or S
HXGXAKVVMNRYKKLIVNNSSDFYLVSIANLKTPAXXAKPVA

SEQ ID NO: 3876 - protein, 40 aa, Artificial Sequence
  Non-cyclic GFR-binding peptide
  MOD_RES (2), (34), (35): Xaa is C or S
GXGEVVMDYHYKLVVKENEDKYLMSIPSLETPVXXAKPIK

SEQ ID NO: 3877 - protein, 37 aa, Artificial Sequence
  Non-cyclic GFR-binding peptide
  MOD_RES (2), (4), (36), (37): Xaa is C or S
HXGXSRVVMNYHYKLIVNSSDDKYLVSIPSLKTPAXX

SEQ ID NO: 3878 - protein, 35 aa, Artificial Sequence
  Non-cyclic GFR-binding peptide
  MOD_RES (31), (32): Xaa is C or S
SRVIMYHYKLVKPKRGVKYLISIPSLAQPVXXPAA

SEQ ID NO: 3879 - protein, 40 aa, Artificial Sequence
  Non-cyclic GFR-binding peptide
  MOD_RES (2), (36): Xaa is C or S
  MOD_RES (14), (15), (16), (17), (18): Xaa is A or G
  MOD_RES (19), (20), (21), (22): Xaa is A or G or is absent
GXSRVVMNYHYKLXXXXXXXXXKYLVSIPSLKTPAXTPKT

SEQ ID NO: 3880 - protein, 42 aa, Artificial Sequence
  Non-cyclic GFR-binding peptide
  MOD_RES (2), (39): Xaa is C or S
KXALHDELTRYKKLFIPKKRVIEFYLVSIANLQVQTPRXQVN

SEQ ID NO: 3881 - protein, 37 aa, Artificial Sequence
  Non-cyclic GFR-binding peptide
  MOD_RES (1), (32), (33): Xaa is C or S
XSRVIMRHKRLVKPKRGVYYLISTASLAQPVXXPAAS

SEQ ID NO: 3882 - protein, 40 aa, Artificial Sequence
  Non-cyclic GFR-binding peptide
  MOD_RES (37), (37): Xaa is C or S
ALHDELTQYNKLFIPKKRVIELYLVSIASLQVQTPRXQVN

SEQ ID NO: 3883 - protein, 35 aa, Artificial Sequence
  Non-cyclic GFR-binding peptide
  MOD_RES (2), (2): Xaa is C or S
  MOD_RES (14), (15), (16), (17), (18): Xaa is A or G
  MOD_RES (19), (20), (21), (22): Xaa is A or G or is absent
GXARVVMNQYNKLXXXXXXXXXLYLVSIASLQTPA

SEQ ID NO: 3884 - protein, 34 aa, Artificial Sequence
  Non-cyclic GFR-binding peptide
  MOD_RES (33), (34): Xaa is C or S
EAVSMGERYKKLTPVGMDDFYLVSIANLKTPVXX

SEQ ID NO: 3885 - protein, 35 aa, Artificial Sequence
  Non-cyclic GFR-binding peptide
  MOD_RES (32), (33): Xaa is C or S
AKVVMNRYKKLIVNNSSDFYLVSIANLKTPAXXAK

SEQ ID NO: 3886 - protein, 35 aa, Artificial Sequence
  Non-cyclic GFR-binding peptide
  MOD_RES (1), (35): Xaa is C or S
  MOD_RES (13), (14), (15), (16), (17): Xaa is A or G
  MOD_RES (18), (19), (20), (21): Xaa is A or G or is absent
XSRVVMNQYNKLXXXXXXXXXLYLVSIASLKTPAX

SEQ ID NO: 3887 - protein, 37 aa, Artificial Sequence
  Non-cyclic GFR-binding peptide
  MOD_RES (1), (35), (36): Xaa is C or S
  MOD_RES (13), (14), (15), (16), (17): Xaa is A or G
  MOD_RES (18), (19), (20), (21): Xaa is A or G or is absent
XARVVMNRHKRLXXXXXXXXXYYLVSTASLQTPAXXP

SEQ ID NO: 3888 - protein, 38 aa, Artificial Sequence
  Non-cyclic GFR-binding peptide
  MOD_RES (1), (3), (37): Xaa is C or S
  MOD_RES (15), (16), (17), (18), (19): Xaa is A or G
  MOD_RES (20), (21), (22), (23): Xaa is A or G or is absent
XGXSRVVMNQYNKLXXXXXXXXXLYLVSIASLKTPAXT

SEQ ID NO: 3889 - protein, 43 aa, Artificial Sequence
  Non-cyclic GFR-binding peptide
  MOD_RES (2), (4), (38), (39): Xaa is C or S
  MOD_RES (16), (17), (18), (19), (20): Xaa is A or G
  MOD_RES (21), (22), (23), (24): Xaa is A or G or is absent
RXGXGEVVMEYHYKLXXXXXXXXXKYLMSIPSLETPVXXAKPI

SEQ ID NO: 3890 - protein, 39 aa, Artificial Sequence
  Non-cyclic GFR-binding peptide
  MOD_RES (1), (34), (35): Xaa is C or S
  MOD_RES (12), (13), (14), (15), (16): Xaa is A or G
  MOD_RES (17), (18), (19), (20): Xaa is A or G or is absent
XSRVIMYHYKLXXXXXXXXXKYLISIPSLAQPVXXPAAS

SEQ ID NO: 3891 - protein, 38 aa, Artificial Sequence
  Non-cyclic GFR-binding peptide
  MOD_RES (2), (4), (35), (36): Xaa is C or S
SXKXSRVIMQYNKLVKPKRGVLYLISIASLAQPVXXPA

SEQ ID NO: 3892 - protein, 38 aa, Artificial Sequence
  Non-cyclic GFR-binding peptide
  MOD_RES (1), (35), (36): Xaa is C or S
  MOD_RES (13), (14), (15), (16), (17): Xaa is A or G
  MOD_RES (18), (19), (20), (21): Xaa is A or G or is absent
XSRVVMNRHKRLXXXXXXXXXYYLVSTASLKTPAXXPK

SEQ ID NO: 3893 - protein, 38 aa, Artificial Sequence
  Non-cyclic GFR-binding peptide
  MOD_RES (1), (32), (33): Xaa is C or S
XSKVVMRYKKLVKPTRGVFYLISIANLDQPVXXPSASA

SEQ ID NO: 3894 - protein, 39 aa, Artificial Sequence
  Non-cyclic GFR-binding peptide
  MOD_RES (1), (3): Xaa is C or S
  MOD_RES (16), (17), (18), (19), (20): Xaa is A or G
  MOD_RES (21), (22), (23), (24): Xaa is A or G or is absent
XKXALHDELTYHYKLXXXXXXXXXKYLVSIPSLQVQTPR

SEQ ID NO: 3895 - protein, 34 aa, Artificial Sequence
  Non-cyclic GFR-binding peptide
  MOD_RES (32), (33): Xaa is C or S
GEVVMDRYKKLVVKENEDFYLMSIANLETPVXXA

SEQ ID NO: 3896 - protein, 42 aa, Artificial Sequence
  Non-cyclic GFR-binding peptide
  MOD_RES (2), (39): Xaa is C or S
  MOD_RES (15), (16), (17), (18), (19): Xaa is A or G
  MOD_RES (20), (21), (22), (23): Xaa is A or G or is absent
KXALHDELTRYKKLXXXXXXXXXFYLVSIANLQVQTPRXQVN

SEQ ID NO: 3897 - protein, 36 aa, Artificial Sequence
  Non-cyclic GFR-binding peptide
  MOD_RES (31), (32): Xaa is C or S
KVVMNYHYKLIVNNSSDKYLVSIPSLKTPAXXAKPV

SEQ ID NO: 3898 - protein, 40 aa, Artificial Sequence
  Non-cyclic GFR-binding peptide
  MOD_RES (34), (35): Xaa is C or S
  MOD_RES (12), (13), (14), (15), (16): Xaa is A or G
  MOD_RES (17), (18), (19), (20): Xaa is A or G or is absent
ARVVMNRHKRLXXXXXXXXXYYLVSTASLQTPAXXPKPVT

SEQ ID NO: 3899 - protein, 41 aa, Artificial Sequence
  Non-cyclic GFR-binding peptide
  MOD_RES (1), (3), (37), (38): Xaa is C or S
  MOD_RES (15), (16), (17), (18), (19): Xaa is A or G
  MOD_RES (20), (21), (22), (23): Xaa is A or G or is absent
XGXGEVVMEYHYKLXXXXXXXXXKYLMSIPSLETPVXXAKP

SEQ ID NO: 3900 - protein, 37 aa, Artificial Sequence
  Non-cyclic GFR-binding peptide
  MOD_RES (2), (34), (35): Xaa is C or S
GXGEVVMDYHYKLVVKENEDKYLMSIPSLETPVXXAK

SEQ ID NO: 3901 - protein, 42 aa, Artificial Sequence
  Non-cyclic GFR-binding peptide
  MOD_RES (1), (3), (36), (37): Xaa is C or S
  MOD_RES (14), (15), (16), (17), (18): Xaa is A or G
  MOD_RES (19), (20), (21), (22): Xaa is A or G or is absent
XKXSRVIMYHYKLXXXXXXXXXKYLISIPSLAQPVXXPAASA

SEQ ID NO: 3902 - protein, 38 aa, Artificial Sequence
  Non-cyclic GFR-binding peptide
  MOD_RES (1), (3), (35): Xaa is C or S
XGXSRVVMNRHKRLIVNSSDDYYLVSTASLKTPAXTPK

SEQ ID NO: 3903 - protein, 36 aa, Artificial Sequence
  Non-cyclic GFR-binding peptide
  MOD_RES (35), (36): Xaa is C or S
  MOD_RES (13), (14), (15), (16), (17): Xaa is A or G
  MOD_RES (18), (19), (20), (21): Xaa is A or G or is absent
EAVSMGEQYNKLXXXXXXXXXLYLVSIASLKTPVXX

SEQ ID NO: 3904 - protein, 35 aa, Artificial Sequence
  Non-cyclic GFR-binding peptide
  MOD_RES (1), (33), (34): Xaa is C or S
XARVVMNYHYKLIVNSSDDKYLVSIPSLQTPAXXP

SEQ ID NO: 3905 - protein, 33 aa, Artificial Sequence
  Non-cyclic GFR-binding peptide
  MOD_RES (31), (32): Xaa is C or S
RVVMNRHKRLIVNSSDDYYLVSTASLQTPAXXP

SEQ ID NO: 3906 - protein, 41 aa, Artificial Sequence
  Non-cyclic GFR-binding peptide
  MOD_RES (2), (4), (35), (36): Xaa is C or S
SXKXSKVVMRYKKLVKPTRGVFYLISIANLDQPVXXPSASA

SEQ ID NO: 3907 - protein, 32 aa, Artificial Sequence
  Non-cyclic GFR-binding peptide
  MOD_RES (11), (12), (13), (14), (15): Xaa is A or G
  MOD_RES (16), (17), (18), (19): Xaa is A or G or is absent
SKVVMRYKKLXXXXXXXXXFYLISIANLDQPV

SEQ ID NO: 3908 - protein, 38 aa, Artificial Sequence
  Non-cyclic GFR-binding peptide
  MOD_RES (33), (34): Xaa is C or S
EAVSMGERHKRLTPVGMDDYYLVSTASLKTPVXXAKGV

SEQ ID NO: 3909 - protein, 34 aa, Artificial Sequence
  Non-cyclic GFR-binding peptide
  MOD_RES (31), (32): Xaa is C or S
SKVVMYHYKLVKPTRGVKYLISIPSLDQPVXXPS

SEQ ID NO: 3910 - protein, 37 aa, Artificial Sequence
  Non-cyclic GFR-binding peptide
  MOD_RES (1), (3), (37): Xaa is C or S
  MOD_RES (15), (16), (17), (18), (19): Xaa is A or G
  MOD_RES (20), (21), (22), (23): Xaa is A or G or is absent
XGXAKVVMNRYKKLXXXXXXXXXFYLVSIANLKTPAX

SEQ ID NO: 3911 - protein, 35 aa, Artificial Sequence
  Non-cyclic GFR-binding peptide
  MOD_RES (1), (3): Xaa is C or S
  MOD_RES (14), (15), (16), (17), (18): Xaa is A or G
  MOD_RES (19), (20), (21), (22): Xaa is A or G or is absent
XKXSKVVMRHKRLXXXXXXXXXYYLISTASLDQPV

SEQ ID NO: 3912 - protein, 38 aa, Artificial Sequence
  Non-cyclic GFR-binding peptide
  MOD_RES (2), (36), (37): Xaa is C or S
  MOD_RES (14), (15), (16), (17), (18): Xaa is A or G
  MOD_RES (19), (20), (21), (22): Xaa is A or G or is absent
GXGEVVMDRYKKLXXXXXXXXXFYLMSIANLETPVXXA

SEQ ID NO: 3913 - protein, 36 aa, Artificial Sequence
  Non-cyclic GFR-binding peptide
  MOD_RES (35), (36): Xaa is C or S
  MOD_RES (13), (14), (15), (16), (17): Xaa is A or G
  MOD_RES (18), (19), (20), (21): Xaa is A or G or is absent
EAVSMGERHKRLXXXXXXXXXYYLVSTASLKTPVXX

SEQ ID NO: 3914 - protein, 41 aa, Artificial Sequence
  Non-cyclic GFR-binding peptide
  MOD_RES (2), (4), (41): Xaa is C or S
EXKXALHDELTRHKRLFIPKKRVIEYYLVSTASLQVQTPRX

SEQ ID NO: 3915 - protein, 38 aa, Artificial Sequence
  Non-cyclic GFR-binding peptide
  MOD_RES (1), (35), (36): Xaa is C or S
  MOD_RES (13), (14), (15), (16), (17): Xaa is A or G
  MOD_RES (18), (19), (20), (21): Xaa is A or G or is absent
XGEVVMDRHKRLXXXXXXXXXYYLMSTASLETPVXXAK

SEQ ID NO: 3916 - protein, 33 aa, Artificial Sequence
  Non-cyclic GFR-binding peptide
  MOD_RES (33), (33): Xaa is C or S
  MOD_RES (11), (12), (13), (14), (15): Xaa is A or G
  MOD_RES (16), (17), (18), (19): Xaa is A or G or is absent
SKVVMRYKKLXXXXXXXXXFYLISIANLDQPVX

SEQ ID NO: 3917 - protein, 38 aa, Artificial Sequence
  Non-cyclic GFR-binding peptide
  MOD_RES (2), (36), (37): Xaa is C or S
  MOD_RES (14), (15), (16), (17), (18): Xaa is A or G
  MOD_RES (19), (20), (21), (22): Xaa is A or G or is absent
GXSRVVMNRHKRLXXXXXXXXXYYLVSTASLKTPAXXP

SEQ ID NO: 3918 - protein, 36 aa, Artificial Sequence
  Non-cyclic GFR-binding peptide
  MOD_RES (2), (35), (36): Xaa is C or S
  MOD_RES (13), (14), (15), (16), (17): Xaa is A or G
  MOD_RES (18), (19), (20), (21): Xaa is A or G or is absent
KXSKVVMYHYKLXXXXXXXXXKYLISIPSLDQPVXX

SEQ ID NO: 3919 - protein, 35 aa, Artificial Sequence
  Non-cyclic GFR-binding peptide
  MOD_RES (2), (2): Xaa is C or S
  MOD_RES (14), (15), (16), (17), (18): Xaa is A or G
  MOD_RES (19), (20), (21), (22): Xaa is A or G or is absent
GXAKVVMNQYNKLXXXXXXXXXLYLVSIASLKTPA

SEQ ID NO: 3920 - protein, 37 aa, Artificial Sequence
  Non-cyclic GFR-binding peptide
  MOD_RES (1), (35), (36): Xaa is C or S
  MOD_RES (13), (14), (15), (16), (17): Xaa is A or G
  MOD_RES (18), (19), (20), (21): Xaa is A or G or is absent
XGEVVMERYKKLXXXXXXXXXFYLMSIANLETPVXXA

SEQ ID NO: 3921 - protein, 38 aa, Artificial Sequence
  Non-cyclic GFR-binding peptide
  MOD_RES (1), (32), (33): Xaa is C or S
XSRVIMRHKRLVKPKRGVYYLISTASLAQPVXXPAASA

SEQ ID NO: 3922 - protein, 30 aa, Artificial Sequence
  Non-cyclic GFR-binding peptide
SKVIMYHYKLIKPTKGIKYLISIPSLDQSV

SEQ ID NO: 3923 - protein, 36 aa, Artificial Sequence
  Non-cyclic GFR-binding peptide
  MOD_RES (36), (36): Xaa is C or S
LHDELTRYKKLFIPKKRVIEFYLVSIANLQVQTPRX

SEQ ID NO: 3924 - protein, 32 aa, Artificial Sequence
  Non-cyclic GFR-binding peptide
  MOD_RES (1), (32): Xaa is C or S
XSRVIMRYKKLVKPKRGVFYLISIANLAQPVX

SEQ ID NO: 3925 - protein, 31 aa, Artificial Sequence
  Non-cyclic GFR-binding peptide
  MOD_RES (1), (1): Xaa is C or S
XSRVIMRYKKLVKPKRGVFYLISIANLAQPV

SEQ ID NO: 3926 - protein, 41 aa, Artificial Sequence
  Non-cyclic GFR-binding peptide
  MOD_RES (1), (38): Xaa is C or S
  MOD_RES (14), (15), (16), (17), (18): Xaa is A or G
  MOD_RES (19), (20), (21), (22): Xaa is A or G or is absent
XALHDELTRYKKLXXXXXXXXXFYLVSIANLQVQTPRXQVN

SEQ ID NO: 3927 - protein, 37 aa, Artificial Sequence
  Non-cyclic GFR-binding peptide
  MOD_RES (2), (36), (37): Xaa is C or S
  MOD_RES (14), (15), (16), (17), (18): Xaa is A or G
  MOD_RES (19), (20), (21), (22): Xaa is A or G or is absent
GXGEVVMDRYKKLXXXXXXXXXFYLMSIANLETPVXX

SEQ ID NO: 3928 - protein, 36 aa, Artificial Sequence
  Non-cyclic GFR-binding peptide
  MOD_RES (2), (4), (35), (36): Xaa is C or S
SXKXSKVVMYHYKLVKPTRGVKYLISIPSLDQPVXX

SEQ ID NO: 3929 - protein, 35 aa, Artificial Sequence
  Non-cyclic GFR-binding peptide
  MOD_RES (2), (4), (35): Xaa is C or S
SXKXSKVIMRHKRLIKPTKGIYYLISTASLDQSVX

SEQ ID NO: 3930 - protein, 40 aa, Artificial Sequence
  Non-cyclic GFR-binding peptide
  MOD_RES (1), (3), (34), (35): Xaa is C or S
XKXSKVVMRYKKLVKPTRGVFYLISIANLDQPVXXPSASA

SEQ ID NO: 3931 - protein, 38 aa, Artificial Sequence
  Non-cyclic GFR-binding peptide
  MOD_RES (1), (34), (35): Xaa is C or S
  MOD_RES (12), (13), (14), (15), (16): Xaa is A or G
  MOD_RES (17), (18), (19), (20): Xaa is A or G or is absent
XSKVIMRYKKLXXXXXXXXXFYLISIANLDQSVXXPSA

SEQ ID NO: 3932 - protein, 37 aa, Artificial Sequence
  Non-cyclic GFR-binding peptide
  MOD_RES (2), (4), (35), (36): Xaa is C or S
SXKXSRVIMRYKKLVKPKRGVFYLISIANLAQPVXXP

SEQ ID NO: 3933 - protein, 42 aa, Artificial Sequence
  Non-cyclic GFR-binding peptide
  MOD_RES (1), (38): Xaa is C or S
  MOD_RES (14), (15), (16), (17), (18): Xaa is A or G
  MOD_RES (19), (20), (21), (22): Xaa is A or G or is absent
XALHDELTRYKKLXXXXXXXXXFYLVSIANLQVQTPRXQVNR

SEQ ID NO: 3934 - protein, 35 aa, Artificial Sequence
  Non-cyclic GFR-binding peptide
  MOD_RES (1), (3), (34), (35): Xaa is C or S
XKXSKVIMYHYKLIKPTKGIKYLISIPSLDQSVXX

SEQ ID NO: 3935 - protein, 42 aa, Artificial Sequence
  Non-cyclic GFR-binding peptide
  MOD_RES (2), (4), (37), (38): Xaa is C or S
  MOD_RES (15), (16), (17), (18), (19): Xaa is A or G
  MOD_RES (20), (21), (22), (23): Xaa is A or G or is absent
SXKXSRVIMRYKKLXXXXXXXXXFYLISIANLAQPVXXPAAS

SEQ ID NO: 3936 - protein, 36 aa, Artificial Sequence
  Non-cyclic GFR-binding peptide
  MOD_RES (2), (4), (36): Xaa is C or S
RXGXGEVVMDRHKRLVVKENEDYYLMSTASLETPVX

SEQ ID NO: 3937 - protein, 38 aa, Artificial Sequence
  Non-cyclic GFR-binding peptide
  MOD_RES (1), (33), (34): Xaa is C or S
XAKVVMNRYKKLIVNNSSDFYLVSIANLKTPAXXAKPV

SEQ ID NO: 3938 - protein, 39 aa, Artificial Sequence
  Non-cyclic GFR-binding peptide
  MOD_RES (1), (3), (37): Xaa is C or S
  MOD_RES (15), (16), (17), (18), (19): Xaa is A or G
  MOD_RES (20), (21), (22), (23): Xaa is A or G or is absent
XGXSRVVMNRHKRLXXXXXXXXXYYLVSTASLKTPAXTP

SEQ ID NO: 3939 - protein, 43 aa, Artificial Sequence
  Non-cyclic GFR-binding peptide
  MOD_RES (1), (3), (37): Xaa is C or S
  MOD_RES (15), (16), (17), (18), (19): Xaa is A or G
  MOD_RES (20), (21), (22), (23): Xaa is A or G or is absent
XGXSRVVMNQYNKLXXXXXXXXXLYLVSIASLKTPAXTPKTVH

SEQ ID NO: 3940 - protein, 33 aa, Artificial Sequence
  Non-cyclic GFR-binding peptide
  MOD_RES (11), (12), (13), (14), (15): Xaa is A or G
  MOD_RES (16), (17), (18), (19): Xaa is A or G or is absent
HDELTRYKKLXXXXXXXXXFYLVSIANLQVQTP

SEQ ID NO: 3941 - protein, 37 aa, Artificial Sequence
  Non-cyclic GFR-binding peptide
  MOD_RES (1), (3), (35), (36): Xaa is C or S
XGXGEVVMDRHKRLVVKENEDYYLMSTASLETPVXXA

SEQ ID NO: 3942 - protein, 37 aa, Artificial Sequence
  Non-cyclic GFR-binding peptide
  MOD_RES (2), (2): Xaa is C or S
  MOD_RES (15), (16), (17), (18), (19): Xaa is A or G
  MOD_RES (20), (21), (22), (23): Xaa is A or G or is absent
KXALHDELTRHKRLXXXXXXXXXYYLVSTASLQVQTP

SEQ ID NO: 3943 - protein, 36 aa, Artificial Sequence
  Non-cyclic GFR-binding peptide
  MOD_RES (36), (36): Xaa is C or S
  MOD_RES (12), (13), (14), (15), (16): Xaa is A or G
  MOD_RES (17), (18), (19), (20): Xaa is A or G or is absent
LHDELTRHKRLXXXXXXXXXYYLVSTASLQVQTPRX

SEQ ID NO: 3944 - protein, 44 aa, Artificial Sequence
  Non-cyclic GFR-binding peptide
  MOD_RES (2), (4), (38), (39): Xaa is C or S
  MOD_RES (16), (17), (18), (19), (20): Xaa is A or G
  MOD_RES (21), (22), (23), (24): Xaa is A or G or is absent
HXGXARVVMNQYNKLXXXXXXXXXLYLVSIASLQTPAXXPKPVT

SEQ ID NO: 3945 - protein, 41 aa, Artificial Sequence
  Non-cyclic GFR-binding peptide
  MOD_RES (1), (3), (38), (39): Xaa is C or S
  MOD_RES (16), (17), (18), (19), (20): Xaa is A or G
  MOD_RES (21), (22), (23), (24): Xaa is A or G or is absent
XGXEAVSMGERHKRLXXXXXXXXXYYLVSTASLKTPVXXAK

SEQ ID NO: 3946 - protein, 38 aa, Artificial Sequence
  Non-cyclic GFR-binding peptide
  MOD_RES (2), (35), (36): Xaa is C or S
GXEAVSMGERHKRLTPVGMDDYYLVSTASLKTPVXXAK

SEQ ID NO: 3947 - protein, 37 aa, Artificial Sequence
  Non-cyclic GFR-binding peptide
  MOD_RES (2), (35), (36): Xaa is C or S
  MOD_RES (13), (14), (15), (16), (17): Xaa is A or G
  MOD_RES (18), (19), (20), (21): Xaa is A or G or is absent
KXSRVIMYHYKLXXXXXXXXXKYLISIPSLAQPVXXP

SEQ ID NO: 3948 - protein, 39 aa, Artificial Sequence
  Non-cyclic GFR-binding peptide
  MOD_RES (2), (36), (37): Xaa is C or S
  MOD_RES (14), (15), (16), (17), (18): Xaa is A or G
  MOD_RES (19), (20), (21), (22): Xaa is A or G or is absent
GXGEVVMDRHKRLXXXXXXXXXYYLMSTASLETPVXXAK

SEQ ID NO: 3949 - protein, 31 aa, Artificial Sequence
  Non-cyclic GFR-binding peptide
  MOD_RES (31), (31): Xaa is C or S
SKVIMRHKRLIKPTKGIYYLISTASLDQSVX

SEQ ID NO: 3950 - protein, 38 aa, Artificial Sequence
  Non-cyclic GFR-binding peptide
  MOD_RES (1), (33): Xaa is C or S
XSRVVMNYHYKLIVNSSDDKYLVSIPSLKTPAXTPKTV

SEQ ID NO: 3951 - protein, 35 aa, Artificial Sequence
  Non-cyclic GFR-binding peptide
  MOD_RES (2), (4), (35): Xaa is C or S
SXKXSKVVMRYKKLVKPTRGVFYLISIANLDQPVX

SEQ ID NO: 3952 - protein, 35 aa, Artificial Sequence
  Non-cyclic GFR-binding peptide
  MOD_RES (1), (3), (35): Xaa is C or S
XGXGEVVMEYHYKLVVKDYEDKYLMSIPSLETPVX

SEQ ID NO: 3953 - protein, 35 aa, Artificial Sequence
  Non-cyclic GFR-binding peptide
  MOD_RES (2), (35): Xaa is C or S
GXEAVSMGEQYNKLTPVGMDDLYLVSIASLKTPVX

SEQ ID NO: 3954 - protein, 37 aa, Artificial Sequence
  Non-cyclic GFR-binding peptide
  MOD_RES (31), (32): Xaa is C or S
EVVMDRHKRLVVKENEDYYLMSTASLETPVXXAKPIK

SEQ ID NO: 3955 - protein, 41 aa, Artificial Sequence
  Non-cyclic GFR-binding peptide
  MOD_RES (1), (38): Xaa is C or S
XALHDELTYHYKLFIPKKRVIEKYLVSIPSLQVQTPRXQVN

SEQ ID NO: 3956 - protein, 41 aa, Artificial Sequence
  Non-cyclic GFR-binding peptide
  MOD_RES (2), (4), (36), (37): Xaa is C or S
RXGXGEVVMERYKKLVVKDYEDFYLMSIANLETPVXXAKPI

SEQ ID NO: 3957 - protein, 39 aa, Artificial Sequence
  Non-cyclic GFR-binding peptide
  MOD_RES (34), (35): Xaa is C or S
  MOD_RES (12), (13), (14), (15), (16): Xaa is A or G
  MOD_RES (17), (18), (19), (20): Xaa is A or G or is absent
SRVVMNYHYKLXXXXXXXXXKYLVSIPSLKTPAXXPKPV

SEQ ID NO: 3958 - protein, 37 aa, Artificial Sequence
  Non-cyclic GFR-binding peptide
  MOD_RES (2), (4), (35), (36): Xaa is C or S
SXKXSKVVMRHKRLVKPTRGVYYLISTASLDQPVXXP

SEQ ID NO: 3959 - protein, 44 aa, Artificial Sequence
  Non-cyclic GFR-binding peptide
  MOD_RES (2), (4), (41): Xaa is C or S
EXKXALHDELTRHKRLFIPKKRVIEYYLVSTASLQVQTPRXQVN

SEQ ID NO: 3960 - protein, 41 aa, Artificial Sequence
  Non-cyclic GFR-binding peptide
  MOD_RES (1), (38): Xaa is C or S
  MOD_RES (14), (15), (16), (17), (18): Xaa is A or G
  MOD_RES (19), (20), (21), (22): Xaa is A or G or is absent
XALHDELTYHYKLXXXXXXXXXKYLVSIPSLQVQTPRXQVN

SEQ ID NO: 3961 - protein, 39 aa, Artificial Sequence
  Non-cyclic GFR-binding peptide
  MOD_RES (33), (33): Xaa is C or S
  MOD_RES (11), (12), (13), (14), (15): Xaa is A or G
  MOD_RES (16), (17), (18), (19): Xaa is A or G or is absent
RVVMNYHYKLXXXXXXXXXKYLVSIPSLKTPAXTPKTVH

SEQ ID NO: 3962 - protein, 37 aa, Artificial Sequence
  Non-cyclic GFR-binding peptide
  MOD_RES (34), (34): Xaa is C or S
  MOD_RES (12), (13), (14), (15), (16): Xaa is A or G
  MOD_RES (17), (18), (19), (20): Xaa is A or G or is absent
SRVVMNQYNKLXXXXXXXXXLYLVSIASLKTPAXTPK

SEQ ID NO: 3963 - protein, 34 aa, Artificial Sequence
  Non-cyclic GFR-binding peptide
  MOD_RES (1), (3), (34): Xaa is C or S
XKXSKVIMYHYKLIKPTKGIKYLISIPSLDQSVX

SEQ ID NO: 3964 - protein, 36 aa, Artificial Sequence
  Non-cyclic GFR-binding peptide
  MOD_RES (2), (33), (34): Xaa is C or S
KXSRVIMQYNKLVKPKRGVLYLISIASLAQPVXXPA

SEQ ID NO: 3965 - protein, 36 aa, Artificial Sequence
  Non-cyclic GFR-binding peptide
  MOD_RES (2), (35), (36): Xaa is C or S
GXEAVSMGEQYNKLTPVGMDDLYLVSIASLKTPVXX

SEQ ID NO: 3966 - protein, 38 aa, Artificial Sequence
  Non-cyclic GFR-binding peptide
  MOD_RES (35), (35): Xaa is C or S
  MOD_RES (11), (12), (13), (14), (15): Xaa is A or G
  MOD_RES (16), (17), (18), (19): Xaa is A or G or is absent
HDELTYHYKLXXXXXXXXXKYLVSIPSLQVQTPRXQVN

SEQ ID NO: 3967 - protein, 39 aa, Artificial Sequence
  Non-cyclic GFR-binding peptide
  MOD_RES (35), (35): Xaa is C or S
  MOD_RES (11), (12), (13), (14), (15): Xaa is A or G
  MOD_RES (16), (17), (18), (19): Xaa is A or G or is absent
HDELTYHYKLXXXXXXXXXKYLVSIPSLQVQTPRXQVNR

SEQ ID NO: 3968 - protein, 35 aa, Artificial Sequence
  Non-cyclic GFR-binding peptide
ALHDELTRYKKLFIPKKRVIEFYLVSIANLQVQTP

SEQ ID NO: 3969 - protein, 42 aa, Artificial Sequence
  Non-cyclic GFR-binding peptide
  MOD_RES (1), (38): Xaa is C or S
XALHDELTRYKKLFIPKKRVIEFYLVSIANLQVQTPRXQVNR

SEQ ID NO: 3970 - protein, 42 aa, Artificial Sequence
  Non-cyclic GFR-binding peptide
  MOD_RES (1), (3), (37), (38): Xaa is C or S
  MOD_RES (15), (16), (17), (18), (19): Xaa is A or G
  MOD_RES (20), (21), (22), (23): Xaa is A or G or is absent
XGXARVVMNQYNKLXXXXXXXXXLYLVSIASLQTPAXXPKPV

SEQ ID NO: 3971 - protein, 34 aa, Artificial Sequence
  Non-cyclic GFR-binding peptide
  MOD_RES (1), (32), (33): Xaa is C or S
XSKVVMQYNKLVKPTRGVLYLISIASLDQPVXXP

SEQ ID NO: 3972 - protein, 40 aa, Artificial Sequence
  Non-cyclic GFR-binding peptide
  MOD_RES (36), (36): Xaa is C or S
  MOD_RES (12), (13), (14), (15), (16): Xaa is A or G
  MOD_RES (17), (18), (19), (20): Xaa is A or G or is absent
LHDELTRHKRLXXXXXXXXXYYLVSTASLQVQTPRXQVNR

SEQ ID NO: 3973 - protein, 42 aa, Artificial Sequence
  Non-cyclic GFR-binding peptide
  MOD_RES (2), (4), (37), (38): Xaa is C or S
RXGXEAVSMGERYKKLTPVGMDDFYLVSIANLKTPVXXAKGV

SEQ ID NO: 3974 - protein, 39 aa, Artificial Sequence
  Non-cyclic GFR-binding peptide
  MOD_RES (2), (36), (37): Xaa is C or S
  MOD_RES (14), (15), (16), (17), (18): Xaa is A or G
  MOD_RES (19), (20), (21), (22): Xaa is A or G or is absent
GXARVVMNQYNKLXXXXXXXXXLYLVSIASLQTPAXXPK

SEQ ID NO: 3975 - protein, 36 aa, Artificial Sequence
  Non-cyclic GFR-binding peptide
  MOD_RES (1), (35): Xaa is C or S
  MOD_RES (13), (14), (15), (16), (17): Xaa is A or G
  MOD_RES (18), (19), (20), (21): Xaa is A or G or is absent
XSRVVMNYHYKLXXXXXXXXXKYLVSIPSLKTPAXT

SEQ ID NO: 3976 - protein, 34 aa, Artificial Sequence
  Non-cyclic GFR-binding peptide
  MOD_RES (1), (1): Xaa is C or S
  MOD_RES (13), (14), (15), (16), (17): Xaa is A or G
  MOD_RES (18), (19), (20), (21): Xaa is A or G or is absent
XGEVVMERYKKLXXXXXXXXXFYLMSIANLETPV

SEQ ID NO: 3977 - protein, 39 aa, Artificial Sequence
  Non-cyclic GFR-binding peptide
  MOD_RES (1), (33): Xaa is C or S
XSRVVMNQYNKLIVNSSDDLYLVSIASLKTPAXTPKTVH

SEQ ID NO: 3978 - protein, 37 aa, Artificial Sequence
  Non-cyclic GFR-binding peptide
  MOD_RES (2), (4), (36): Xaa is C or S
HXGXSRVVMNRHKRLIVNSSDDYYLVSTASLKTPAXT

SEQ ID NO: 3979 - protein, 40 aa, Artificial Sequence
  Non-cyclic GFR-binding peptide
  MOD_RES (34), (34): Xaa is C or S
  MOD_RES (12), (13), (14), (15), (16): Xaa is A or G
  MOD_RES (17), (18), (19), (20): Xaa is A or G or is absent
SRVVMNQYNKLXXXXXXXXXLYLVSIASLKTPAXTPKTVH

SEQ ID NO: 3980 - protein, 33 aa, Artificial Sequence
  Non-cyclic GFR-binding peptide
  MOD_RES (31), (31): Xaa is C or S
RVVMNYHYKLIVNSSDDKYLVSIPSLKTPAXTP

SEQ ID NO: 3981 - protein, 44 aa, Artificial Sequence
  Non-cyclic GFR-binding peptide
  MOD_RES (2), (4), (38), (39): Xaa is C or S
  MOD_RES (16), (17), (18), (19), (20): Xaa is A or G
  MOD_RES (21), (22), (23), (24): Xaa is A or G or is absent
HXGXSRVVMNYHYKLXXXXXXXXXKYLVSIPSLKTPAXXPKPVY

SEQ ID NO: 3982 - protein, 39 aa, Artificial Sequence
  Non-cyclic GFR-binding peptide
  MOD_RES (2), (33), (34): Xaa is C or S
KXSRVIMQYNKLVKPKRGVLYLISIASLAQPVXXPAASA

SEQ ID NO: 3983 - protein, 35 aa, Artificial Sequence
  Non-cyclic GFR-binding peptide
  MOD_RES (1), (3), (34), (35): Xaa is C or S
XKXSRVIMRHKRLVKPKRGVYYLISTASLAQPVXX

SEQ ID NO: 3984 - protein, 44 aa, Artificial Sequence
  Non-cyclic GFR-binding peptide
  MOD_RES (2), (4), (38), (39): Xaa is C or S
  MOD_RES (16), (17), (18), (19), (20): Xaa is A or G
  MOD_RES (21), (22), (23), (24): Xaa is A or G or is absent
HXGXSRVVMNRHKRLXXXXXXXXXYYLVSTASLKTPAXXPKPVY

SEQ ID NO: 3985 - protein, 37 aa, Artificial Sequence
  Non-cyclic GFR-binding peptide
  MOD_RES (1), (3), (37): Xaa is C or S
  MOD_RES (15), (16), (17), (18), (19): Xaa is A or G
  MOD_RES (20), (21), (22), (23): Xaa is A or G or is absent
XGXARVVMNQYNKLXXXXXXXXXLYLVSIASLQTPAX

SEQ ID NO: 3986 - protein, 38 aa, Artificial Sequence
  Non-cyclic GFR-binding peptide
  MOD_RES (36), (36): Xaa is C or S
  MOD_RES (12), (13), (14), (15), (16): Xaa is A or G
  MOD_RES (17), (18), (19), (20): Xaa is A or G or is absent
LHDELTRYKKLXXXXXXXXXFYLVSIANLQVQTPRXQV

SEQ ID NO: 3987 - protein, 43 aa, Artificial Sequence
  Non-cyclic GFR-binding peptide
  MOD_RES (1), (3), (37), (38): Xaa is C or S
  MOD_RES (15), (16), (17), (18), (19): Xaa is A or G
  MOD_RES (20), (21), (22), (23): Xaa is A or G or is absent
XGXGEVVMEYHYKLXXXXXXXXXKYLMSIPSLETPVXXAKPIS

SEQ ID NO: 3988 - protein, 40 aa, Artificial Sequence
  Non-cyclic GFR-binding peptide
  MOD_RES (2), (39): Xaa is C or S
  MOD_RES (15), (16), (17), (18), (19): Xaa is A or G
  MOD_RES (20), (21), (22), (23): Xaa is A or G or is absent
KXALHDELTYHYKLXXXXXXXXXKYLVSIPSLQVQTPRXQ

SEQ ID NO: 3989 - protein, 40 aa, Artificial Sequence
  Non-cyclic GFR-binding peptide
  MOD_RES (2), (35), (36): Xaa is C or S
  MOD_RES (13), (14), (15), (16), (17): Xaa is A or G
  MOD_RES (18), (19), (20), (21): Xaa is A or G or is absent
KXSKVVMYHYKLXXXXXXXXXKYLISIPSLDQPVXXPSAS

SEQ ID NO: 3990 - protein, 40 aa, Artificial Sequence
  Non-cyclic GFR-binding peptide
  MOD_RES (2), (4), (36), (37): Xaa is C or S
HXGXAKVVMNQYNKLIVNNSSDLYLVSIASLKTPAXXAKP

SEQ ID NO: 3991 - protein, 37 aa, Artificial Sequence
  Non-cyclic GFR-binding peptide
  MOD_RES (34), (35): Xaa is C or S
  MOD_RES (12), (13), (14), (15), (16): Xaa is A or G
  MOD_RES (17), (18), (19), (20): Xaa is A or G or is absent
ARVVMNYHYKLXXXXXXXXXKYLVSIPSLQTPAXXPK

SEQ ID NO: 3992 - protein, 38 aa, Artificial Sequence
  Non-cyclic GFR-binding peptide
  MOD_RES (33), (34): Xaa is C or S
  MOD_RES (11), (12), (13), (14), (15): Xaa is A or G
  MOD_RES (16), (17), (18), (19): Xaa is A or G or is absent
EVVMERYKKLXXXXXXXXXFYLMSIANLETPVXXAKPI

SEQ ID NO: 3993 - protein, 33 aa, Artificial Sequence
  Non-cyclic GFR-binding peptide
  MOD_RES (2), (33): Xaa is C or S
KXSKVVMRYKKLVKPTRGVFYLISIANLDQPVX

SEQ ID NO: 3994 - protein, 39 aa, Artificial Sequence
  Non-cyclic GFR-binding peptide
  MOD_RES (2), (4), (38), (39): Xaa is C or S
  MOD_RES (16), (17), (18), (19), (20): Xaa is A or G
  MOD_RES (21), (22), (23), (24): Xaa is A or G or is absent
RXGXGEVVMERYKKLXXXXXXXXXFYLMSIANLETPVXX

SEQ ID NO: 3995 - protein, 33 aa, Artificial Sequence
  Non-cyclic GFR-binding peptide
  MOD_RES (2), (33): Xaa is C or S
KXSKVIMRYKKLIKPTKGIFYLISIANLDQSVX

SEQ ID NO: 3996 - protein, 37 aa, Artificial Sequence
  Non-cyclic GFR-binding peptide
  MOD_RES (2), (36), (37): Xaa is C or S
  MOD_RES (14), (15), (16), (17), (18): Xaa is A or G
  MOD_RES (19), (20), (21), (22): Xaa is A or G or is absent
GXGEVVMERYKKLXXXXXXXXXFYLMSIANLETPVXX

SEQ ID NO: 3997 - protein, 36 aa, Artificial Sequence
  Non-cyclic GFR-binding peptide
  MOD_RES (2), (33), (34): Xaa is C or S
KXSKVVMRHKRLVKPTRGVYYLISTASLDQPVXXPS

SEQ ID NO: 3998 - protein, 40 aa, Artificial Sequence
  Non-cyclic GFR-binding peptide
  MOD_RES (2), (34): Xaa is C or S
GXSRVVMNYHYKLIVNSSDDKYLVSIPSLKTPAXTPKTVH

SEQ ID NO: 3999 - protein, 36 aa, Artificial Sequence
  Non-cyclic GFR-binding peptide
  MOD_RES (34), (35): Xaa is C or S
  MOD_RES (12), (13), (14), (15), (16): Xaa is A or G
  MOD_RES (17), (18), (19), (20): Xaa is A or G or is absent
GEVVMDYHYKLXXXXXXXXXKYLMSIPSLETPVXXA

SEQ ID NO: 4000 - protein, 38 aa, Artificial Sequence
  Non-cyclic GFR-binding peptide
  MOD_RES (1), (35), (36): Xaa is C or S
  MOD_RES (13), (14), (15), (16), (17): Xaa is A or G
  MOD_RES (18), (19), (20), (21): Xaa is A or G or is absent
XSRVVMNQYNKLXXXXXXXXXLYLVSIASLKTPAXXPK

SEQ ID NO: 4001 - protein, 36 aa, Artificial Sequence
  Non-cyclic GFR-binding peptide
  MOD_RES (2), (4), (35), (36): Xaa is C or S
SXKXSKVVMQYNKLVKPTRGVLYLISIASLDQPVXX

SEQ ID NO: 4002 - protein, 40 aa, Artificial Sequence
  Non-cyclic GFR-binding peptide
  MOD_RES (2), (4), (36), (37): Xaa is C or S
RXGXGEVVMERYKKLVVKDYEDFYLMSIANLETPVXXAKP

SEQ ID NO: 4003 - protein, 40 aa, Artificial Sequence
  Non-cyclic GFR-binding peptide
  MOD_RES (2), (35), (36): Xaa is C or S
GXEAVSMGERHKRLTPVGMDDYYLVSTASLKTPVXXAKGV

SEQ ID NO: 4004 - protein, 32 aa, Artificial Sequence
  Non-cyclic GFR-binding peptide
  MOD_RES (31), (32): Xaa is C or S
EVVMERYKKLVVKDYEDFYLMSIANLETPVXX

SEQ ID NO: 4005 - protein, 36 aa, Artificial Sequence
  Non-cyclic GFR-binding peptide
  MOD_RES (35), (35): Xaa is C or S
  MOD_RES (11), (12), (13), (14), (15): Xaa is A or G
  MOD_RES (16), (17), (18), (19): Xaa is A or G or is absent
HDELTRYKKLXXXXXXXXXFYLVSIANLQVQTPRXQ

SEQ ID NO: 4006 - protein, 33 aa, Artificial Sequence
  Non-cyclic GFR-binding peptide
  MOD_RES (33), (33): Xaa is C or S
  MOD_RES (11), (12), (13), (14), (15): Xaa is A or G
  MOD_RES (16), (17), (18), (19): Xaa is A or G or is absent
SKVIMQYNKLXXXXXXXXXLYLISIASLDQSVX

SEQ ID NO: 4007 - protein, 41 aa, Artificial Sequence
  Non-cyclic GFR-binding peptide
  MOD_RES (1), (35), (36): Xaa is C or S
  MOD_RES (13), (14), (15), (16), (17): Xaa is A or G
  MOD_RES (18), (19), (20), (21): Xaa is A or G or is absent
XARVVMNYHYKLXXXXXXXXXKYLVSIPSLQTPAXXPKPVT

SEQ ID NO: 4008 - protein, 36 aa, Artificial Sequence
  Non-cyclic GFR-binding peptide
  MOD_RES (1), (34), (35): Xaa is C or S
XEAVSMGERHKRLTPVGMDDYYLVSTASLKTPVXXA

SEQ ID NO: 4009 - protein, 32 aa, Artificial Sequence
  Non-cyclic GFR-binding peptide
  MOD_RES (1), (1): Xaa is C or S
XGEVVMERYKKLVVKDYEDFYLMSIANLETPV

SEQ ID NO: 4010 - protein, 39 aa, Artificial Sequence
  Non-cyclic GFR-binding peptide
  MOD_RES (2), (33), (34): Xaa is C or S
KXSKVVMRHKRLVKPTRGVYYLISTASLDQPVXXPSASA

SEQ ID NO: 4011 - protein, 38 aa, Artificial Sequence
  Non-cyclic GFR-binding peptide
  MOD_RES (1), (3), (35), (36): Xaa is C or S
XGXGEVVMDYHYKLVVKENEDKYLMSIPSLETPVXXAK

SEQ ID NO: 4012 - protein, 41 aa, Artificial Sequence
  Non-cyclic GFR-binding peptide
  MOD_RES (1), (35): Xaa is C or S
  MOD_RES (13), (14), (15), (16), (17): Xaa is A or G
  MOD_RES (18), (19), (20), (21): Xaa is A or G or is absent
XSRVVMNYHYKLXXXXXXXXXKYLVSIPSLKTPAXTPKTVH

SEQ ID NO: 4013 - protein, 36 aa, Artificial Sequence
  Non-cyclic GFR-binding peptide
  MOD_RES (1), (3), (35), (36): Xaa is C or S
XGXSRVVMNRHKRLIVNSSDDYYLVSTASLKTPAXX

SEQ ID NO: 4014 - protein, 36 aa, Artificial Sequence
  Non-cyclic GFR-binding peptide
  MOD_RES (2), (36): Xaa is C or S
  MOD_RES (14), (15), (16), (17), (18): Xaa is A or G
  MOD_RES (19), (20), (21), (22): Xaa is A or G or is absent
GXAKVVMNRYKKLXXXXXXXXXFYLVSIANLKTPAX

SEQ ID NO: 4015 - protein, 38 aa, Artificial Sequence
  Non-cyclic GFR-binding peptide
  MOD_RES (1), (35): Xaa is C or S
  MOD_RES (13), (14), (15), (16), (17): Xaa is A or G
  MOD_RES (18), (19), (20), (21): Xaa is A or G or is absent
XSRVVMNYHYKLXXXXXXXXXKYLVSIPSLKTPAXTPK

SEQ ID NO: 4016 - protein, 38 aa, Artificial Sequence
  Non-cyclic GFR-binding peptide
  MOD_RES (33), (34): Xaa is C or S
  MOD_RES (11), (12), (13), (14), (15): Xaa is A or G
  MOD_RES (16), (17), (18), (19): Xaa is A or G or is absent
RVVMNQYNKLXXXXXXXXXLYLVSIASLKTPAXXPKPV

SEQ ID NO: 4017 - protein, 34 aa, Artificial Sequence
  Non-cyclic GFR-binding peptide
  MOD_RES (2), (34): Xaa is C or S
GXARVVMNRHKRLIVNSSDDYYLVSTASLQTPAX

SEQ ID NO: 4018 - protein, 38 aa, Artificial Sequence
  Non-cyclic GFR-binding peptide
  MOD_RES (2), (34), (35): Xaa is C or S
GXAKVVMNRYKKLIVNNSSDFYLVSIANLKTPAXXAKP

SEQ ID NO: 4019 - protein, 37 aa, Artificial Sequence
  Non-cyclic GFR-binding peptide
  MOD_RES (31), (32): Xaa is C or S
KVVMNYHYKLIVNNSSDKYLVSIPSLKTPAXXAKPVA

SEQ ID NO: 4020 - protein, 33 aa, Artificial Sequence
  Non-cyclic GFR-binding peptide
  MOD_RES (31), (32): Xaa is C or S
SRVIMYHYKLVKPKRGVKYLISIPSLAQPVXXP

SEQ ID NO: 4021 - protein, 35 aa, Artificial Sequence
  Non-cyclic GFR-binding peptide
  MOD_RES (31), (32): Xaa is C or S
SRVIMRHKRLVKPKRGVYYLISTASLAQPVXXPAA

SEQ ID NO: 4022 - protein, 38 aa, Artificial Sequence
  Non-cyclic GFR-binding peptide
  MOD_RES (1), (3), (36), (37): Xaa is C or S
  MOD_RES (14), (15), (16), (17), (18): Xaa is A or G
  MOD_RES (19), (20), (21), (22): Xaa is A or G or is absent
XKXSKVVMYHYKLXXXXXXXXXKYLISIPSLDQPVXXP

SEQ ID NO: 4023 - protein, 37 aa, Artificial Sequence
  Non-cyclic GFR-binding peptide
  MOD_RES (2), (4), (35), (36): Xaa is C or S
SXKXSKVIMYHYKLIKPTKGIKYLISIPSLDQSVXXP

SEQ ID NO: 4024 - protein, 36 aa, Artificial Sequence
  Non-cyclic GFR-binding peptide
  MOD_RES (2), (36): Xaa is C or S
  MOD_RES (14), (15), (16), (17), (18): Xaa is A or G
  MOD_RES (19), (20), (21), (22): Xaa is A or G or is absent
GXSRVVMNQYNKLXXXXXXXXXLYLVSIASLKTPAX

SEQ ID NO: 4025 - protein, 35 aa, Artificial Sequence
  Non-cyclic GFR-binding peptide
  MOD_RES (12), (13), (14), (15), (16): Xaa is A or G
  MOD_RES (17), (18), (19), (20): Xaa is A or G or is absent
LHDELTYHYKLXXXXXXXXXKYLVSIPSLQVQTPR

SEQ ID NO: 4026 - protein, 39 aa, Artificial Sequence
  Non-cyclic GFR-binding peptide
  MOD_RES (1), (38): Xaa is C or S
  MOD_RES (14), (15), (16), (17), (18): Xaa is A or G
  MOD_RES (19), (20), (21), (22): Xaa is A or G or is absent
XALHDELTYHYKLXXXXXXXXXKYLVSIPSLQVQTPRXQ

SEQ ID NO: 4027 - protein, 33 aa, Artificial Sequence
  Non-cyclic GFR-binding peptide
  MOD_RES (1), (1): Xaa is C or S
  MOD_RES (12), (13), (14), (15), (16): Xaa is A or G
  MOD_RES (17), (18), (19), (20): Xaa is A or G or is absent
XSKVVMRYKKLXXXXXXXXXFYLISIANLDQPV

SEQ ID NO: 4028 - protein, 39 aa, Artificial Sequence
  Non-cyclic GFR-binding peptide
  MOD_RES (2), (39): Xaa is C or S
KXALHDELTRHKRLFIPKKRVIEYYLVSTASLQVQTPRX

SEQ ID NO: 4029 - protein, 34 aa, Artificial Sequence
  Non-cyclic GFR-binding peptide
  MOD_RES (1), (34): Xaa is C or S
  MOD_RES (12), (13), (14), (15), (16): Xaa is A or G
  MOD_RES (17), (18), (19), (20): Xaa is A or G or is absent
XSKVIMRYKKLXXXXXXXXXFYLISIANLDQSVX

SEQ ID NO: 4030 - protein, 36 aa, Artificial Sequence
  Non-cyclic GFR-binding peptide
  MOD_RES (32), (33): Xaa is C or S
GEVVMEYHYKLVVKDYEDKYLMSIPSLETPVXXAKP

SEQ ID NO: 4031 - protein, 39 aa, Artificial Sequence
  Non-cyclic GFR-binding peptide
  MOD_RES (2), (33), (34): Xaa is C or S
KXSKVIMRHKRLIKPTKGIYYLISTASLDQSVXXPSASA

SEQ ID NO: 4032 - protein, 37 aa, Artificial Sequence
  Non-cyclic GFR-binding peptide
  MOD_RES (37), (37): Xaa is C or S
ALHDELTRHKRLFIPKKRVIEYYLVSTASLQVQTPRX

SEQ ID NO: 4033 - protein, 36 aa, Artificial Sequence
  Non-cyclic GFR-binding peptide
  MOD_RES (2), (34), (35): Xaa is C or S
GXGEVVMEYHYKLVVKDYEDKYLMSIPSLETPVXXA

SEQ ID NO: 4034 - protein, 42 aa, Artificial Sequence
  Non-cyclic GFR-binding peptide
  MOD_RES (2), (4), (41): Xaa is C or S
  MOD_RES (17), (18), (19), (20), (21): Xaa is A or G
  MOD_RES (22), (23), (24), (25): Xaa is A or G or is absent
EXKXALHDELTRYKKLXXXXXXXXXFYLVSIANLQVQTPRXQ

SEQ ID NO: 4035 - protein, 36 aa, Artificial Sequence
  Non-cyclic GFR-binding peptide
  MOD_RES (1), (32), (33): Xaa is C or S
XSKVIMYHYKLIKPTKGIKYLISIPSLDQSVXXPSA

SEQ ID NO: 4036 - protein, 37 aa, Artificial Sequence
  Non-cyclic GFR-binding peptide
  MOD_RES (1), (3), (37): Xaa is C or S
  MOD_RES (15), (16), (17), (18), (19): Xaa is A or G
  MOD_RES (20), (21), (22), (23): Xaa is A or G or is absent
XGXGEVVMERHKRLXXXXXXXXXYYLMSTASLETPVX

SEQ ID NO: 4037 - protein, 32 aa, Artificial Sequence
  Non-cyclic GFR-binding peptide
  MOD_RES (11), (12), (13), (14), (15): Xaa is A or G
  MOD_RES (16), (17), (18), (19): Xaa is A or G or is absent
SKVVMQYNKLXXXXXXXXXLYLISIASLDQPV

SEQ ID NO: 4038 - protein, 40 aa, Artificial Sequence
  Non-cyclic GFR-binding peptide
  MOD_RES (2), (4), (37), (38): Xaa is C or S
  MOD_RES (15), (16), (17), (18), (19): Xaa is A or G
  MOD_RES (20), (21), (22), (23): Xaa is A or G or is absent
SXKXSKVVMYHYKLXXXXXXXXXKYLISIPSLDQPVXXPS

SEQ ID NO: 4039 - protein, 35 aa, Artificial Sequence
  Non-cyclic GFR-binding peptide
  MOD_RES (35), (35): Xaa is C or S
HDELTRYKKLFIPKKRVIEFYLVSIANLQVQTPRX

SEQ ID NO: 4040 - protein, 39 aa, Artificial Sequence
  Non-cyclic GFR-binding peptide
  MOD_RES (1), (3), (37), (38): Xaa is C or S
  MOD_RES (15), (16), (17), (18), (19): Xaa is A or G
  MOD_RES (20), (21), (22), (23): Xaa is A or G or is absent
XGXARVVMNQYNKLXXXXXXXXXLYLVSIASLQTPAXXP

SEQ ID NO: 4041 - protein, 34 aa, Artificial Sequence
  Non-cyclic GFR-binding peptide
  MOD_RES (1), (32), (33): Xaa is C or S
XSKVVMRYKKLVKPTRGVFYLISIANLDQPVXXP

SEQ ID NO: 4042 - protein, 38 aa, Artificial Sequence
  Non-cyclic GFR-binding peptide
  MOD_RES (37), (37): Xaa is C or S
ALHDELTQYNKLFIPKKRVIELYLVSIASLQVQTPRXQ

SEQ ID NO: 4043 - protein, 37 aa, Artificial Sequence
  Non-cyclic GFR-binding peptide
  MOD_RES (2), (4), (36), (37): Xaa is C or S
HXGXAKVVMNYHYKLIVNNSSDKYLVSIPSLKTPAXX

SEQ ID NO: 4044 - protein, 33 aa, Artificial Sequence
  Non-cyclic GFR-binding peptide
  MOD_RES (1), (1): Xaa is C or S
XEAVSMGEQYNKLTPVGMDDLYLVSIASLKTPV

SEQ ID NO: 4045 - protein, 37 aa, Artificial Sequence
  Non-cyclic GFR-binding peptide
  MOD_RES (2), (4), (36), (37): Xaa is C or S
RXGXGEVVMDRHKRLVVKENEDYYLMSTASLETPVXX

SEQ ID NO: 4046 - protein, 37 aa, Artificial Sequence
  Non-cyclic GFR-binding peptide
  MOD_RES (2), (4): Xaa is C or S
  MOD_RES (16), (17), (18), (19), (20): Xaa is A or G
  MOD_RES (21), (22), (23), (24): Xaa is A or G or is absent
RXGXGEVVMDRYKKLXXXXXXXXXFYLMSIANLETPV

SEQ ID NO: 4047 - protein, 42 aa, Artificial Sequence
  Non-cyclic GFR-binding peptide
  MOD_RES (2), (4), (38), (39): Xaa is C or S
  MOD_RES (16), (17), (18), (19), (20): Xaa is A or G
  MOD_RES (21), (22), (23), (24): Xaa is A or G or is absent
RXGXGEVVMDRYKKLXXXXXXXXXFYLMSIANLETPVXXAKP

SEQ ID NO: 4048 - protein, 42 aa, Artificial Sequence
  Non-cyclic GFR-binding peptide
  MOD_RES (2), (36), (37): Xaa is C or S
  MOD_RES (14), (15), (16), (17), (18): Xaa is A or G
  MOD_RES (19), (20), (21), (22): Xaa is A or G or is absent
GXGEVVMDRYKKLXXXXXXXXXFYLMSIANLETPVXXAKPIK

SEQ ID NO: 4049 - protein, 35 aa, Artificial Sequence
  Non-cyclic GFR-binding peptide
  MOD_RES (31), (32): Xaa is C or S
SKVVMYHYKLVKPTRGVKYLISIPSLDQPVXXPSA

SEQ ID NO: 4050 - protein, 32 aa, Artificial Sequence
  Non-cyclic GFR-binding peptide
  MOD_RES (32), (32): Xaa is C or S
ARVVMNYHYKLIVNSSDDKYLVSIPSLQTPAX

SEQ ID NO: 4051 - protein, 40 aa, Artificial Sequence
  Non-cyclic GFR-binding peptide
  MOD_RES (1), (3), (35), (36): Xaa is C or S
XGXSRVVMNYHYKLIVNSSDDKYLVSIPSLKTPAXXPKPV

SEQ ID NO: 4052 - protein, 38 aa, Artificial Sequence
  Non-cyclic GFR-binding peptide
  MOD_RES (37), (37): Xaa is C or S
ALHDELTRHKRLFIPKKRVIEYYLVSTASLQVQTPRXQ

SEQ ID NO: 4053 - protein, 36 aa, Artificial Sequence
  Non-cyclic GFR-binding peptide
  MOD_RES (13), (14), (15), (16), (17): Xaa is A or G
  MOD_RES (18), (19), (20), (21): Xaa is A or G or is absent
ALHDELTYHYKLXXXXXXXXXKYLVSIPSLQVQTPR

SEQ ID NO: 4054 - protein, 39 aa, Artificial Sequence
  Non-cyclic GFR-binding peptide
  MOD_RES (2), (35), (36): Xaa is C or S
GXEAVSMGEQYNKLTPVGMDDLYLVSIASLKTPVXXAKG

SEQ ID NO: 4055 - protein, 39 aa, Artificial Sequence
  Non-cyclic GFR-binding peptide
  MOD_RES (2), (36): Xaa is C or S
  MOD_RES (14), (15), (16), (17), (18): Xaa is A or G
  MOD_RES (19), (20), (21), (22): Xaa is A or G or is absent
GXSRVVMNQYNKLXXXXXXXXXLYLVSIASLKTPAXTPK

SEQ ID NO: 4056 - protein, 35 aa, Artificial Sequence
  Non-cyclic GFR-binding peptide
  MOD_RES (35), (35): Xaa is C or S
  MOD_RES (13), (14), (15), (16), (17): Xaa is A or G
  MOD_RES (18), (19), (20), (21): Xaa is A or G or is absent
EAVSMGERYKKLXXXXXXXXXFYLVSIANLKTPVX

SEQ ID NO: 4057 - protein, 36 aa, Artificial Sequence
  Non-cyclic GFR-binding peptide
  MOD_RES (2), (34): Xaa is C or S
GXSRVVMNQYNKLIVNSSDDLYLVSIASLKTPAXTP

SEQ ID NO: 4058 - protein, 37 aa, Artificial Sequence
  Non-cyclic GFR-binding peptide
  MOD_RES (37), (37): Xaa is C or S
ALHDELTQYNKLFIPKKRVIELYLVSIASLQVQTPRX

SEQ ID NO: 4059 - protein, 39 aa, Artificial Sequence
  Non-cyclic GFR-binding peptide
  MOD_RES (1), (33), (34): Xaa is C or S
XAKVVMNQYNKLIVNNSSDLYLVSIASLKTPAXXAKPVA

SEQ ID NO: 4060 - protein, 39 aa, Artificial Sequence
  Non-cyclic GFR-binding peptide
  MOD_RES (1), (3), (36), (37): Xaa is C or S
XGXEAVSMGERHKRLTPVGMDDYYLVSTASLKTPVXXAK

SEQ ID NO: 4061 - protein, 39 aa, Artificial Sequence
  Non-cyclic GFR-binding peptide
  MOD_RES (2), (4), (35), (36): Xaa is C or S
SXKXSKVIMRHKRLIKPTKGIYYLISTASLDQSVXXPSA

SEQ ID NO: 4062 - protein, 35 aa, Artificial Sequence
  Non-cyclic GFR-binding peptide
  MOD_RES (1), (3): Xaa is C or S
  MOD_RES (14), (15), (16), (17), (18): Xaa is A or G
  MOD_RES (19), (20), (21), (22): Xaa is A or G or is absent
XKXSKVVMQYNKLXXXXXXXXXLYLISIASLDQPV

SEQ ID NO: 4063 - protein, 37 aa, Artificial Sequence
  Non-cyclic GFR-binding peptide
  MOD_RES (1), (3), (37): Xaa is C or S
  MOD_RES (15), (16), (17), (18), (19): Xaa is A or G
  MOD_RES (20), (21), (22), (23): Xaa is A or G or is absent
XGXGEVVMDRHKRLXXXXXXXXXYYLMSTASLETPVX

SEQ ID NO: 4064 - protein, 40 aa, Artificial Sequence
  Non-cyclic GFR-binding peptide
  MOD_RES (2), (4), (37), (38): Xaa is C or S
  MOD_RES (15), (16), (17), (18), (19): Xaa is A or G
  MOD_RES (20), (21), (22), (23): Xaa is A or G or is absent
SXKXSKVIMRHKRLXXXXXXXXXYYLISTASLDQSVXXPS

SEQ ID NO: 4065 - protein, 40 aa, Artificial Sequence
  Non-cyclic GFR-binding peptide
  MOD_RES (2), (4), (38), (39): Xaa is C or S
  MOD_RES (16), (17), (18), (19), (20): Xaa is A or G
  MOD_RES (21), (22), (23), (24): Xaa is A or G or is absent
HXGXAKVVMNQYNKLXXXXXXXXXLYLVSIASLKTPAXXA

SEQ ID NO: 4066 - protein, 36 aa, Artificial Sequence
  Non-cyclic GFR-binding peptide
  MOD_RES (2), (4): Xaa is C or S
  MOD_RES (15), (16), (17), (18), (19): Xaa is A or G
  MOD_RES (20), (21), (22), (23): Xaa is A or G or is absent
SXKXSRVIMRYKKLXXXXXXXXXFYLISIANLAQPV

SEQ ID NO: 4067 - protein, 42 aa, Artificial Sequence
  Non-cyclic GFR-binding peptide
  MOD_RES (2), (4), (38): Xaa is C or S
  MOD_RES (16), (17), (18), (19), (20): Xaa is A or G
  MOD_RES (21), (22), (23), (24): Xaa is A or G or is absent
HXGXSRVVMNQYNKLXXXXXXXXXLYLVSIASLKTPAXTPKT

SEQ ID NO: 4068 - protein, 42 aa, Artificial Sequence
  Non-cyclic GFR-binding peptide
  MOD_RES (2), (4), (38), (39): Xaa is C or S
  MOD_RES (16), (17), (18), (19), (20): Xaa is A or G
  MOD_RES (21), (22), (23), (24): Xaa is A or G or is absent
RXGXGEVVMERYKKLXXXXXXXXXFYLMSIANLETPVXXAKP

SEQ ID NO: 4069 - protein, 33 aa, Artificial Sequence
  Non-cyclic GFR-binding peptide
  MOD_RES (32), (33): Xaa is C or S
AKVVMNQYNKLIVNNSSDLYLVSIASLKTPAXX

SEQ ID NO: 4070 - protein, 33 aa, Artificial Sequence
  Non-cyclic GFR-binding peptide
  MOD_RES (1), (3): Xaa is C or S
XKXSKVVMQYNKLVKPTRGVLYLISIASLDQPV

SEQ ID NO: 4071 - protein, 34 aa, Artificial Sequence
  Non-cyclic GFR-binding peptide
LHDELTQYNKLFIPKKRVIELYLVSIASLQVQTP

SEQ ID NO: 4072 - protein, 37 aa, Artificial Sequence
  Non-cyclic GFR-binding peptide
  MOD_RES (35), (35): Xaa is C or S
HDELTRYKKLFIPKKRVIEFYLVSIANLQVQTPRXQV

SEQ ID NO: 4073 - protein, 33 aa, Artificial Sequence
  Non-cyclic GFR-binding peptide
  MOD_RES (32), (33): Xaa is C or S
SRVVMNYHYKLIVNSSDDKYLVSIPSLKTPAXX

SEQ ID NO: 4074 - protein, 38 aa, Artificial Sequence
  Non-cyclic GFR-binding peptide
  MOD_RES (33), (34): Xaa is C or S
  MOD_RES (11), (12), (13), (14), (15): Xaa is A or G
  MOD_RES (16), (17), (18), (19): Xaa is A or G or is absent
SRVIMQYNKLXXXXXXXXXLYLISIASLAQPVXXPAAS

SEQ ID NO: 4075 - protein, 35 aa, Artificial Sequence
  Non-cyclic GFR-binding peptide
  MOD_RES (2), (33), (34): Xaa is C or S
KXSKVVMRHKRLVKPTRGVYYLISTASLDQPVXXP

SEQ ID NO: 4076 - protein, 40 aa, Artificial Sequence
  Non-cyclic GFR-binding peptide
  MOD_RES (34), (35): Xaa is C or S
  MOD_RES (12), (13), (14), (15), (16): Xaa is A or G
  MOD_RES (17), (18), (19), (20): Xaa is A or G or is absent
AKVVMNYHYKLXXXXXXXXXKYLVSIPSLKTPAXXAKPVA

SEQ ID NO: 4077 - protein, 41 aa, Artificial Sequence
  Non-cyclic GFR-binding peptide
  MOD_RES (2), (4), (36), (37): Xaa is C or S
HXGXARVVMNRHKRLIVNSSDDYYLVSTASLQTPAXXPKPV

SEQ ID NO: 4078 - protein, 33 aa, Artificial Sequence
  Non-cyclic GFR-binding peptide
  MOD_RES (1), (33): Xaa is C or S
XSRVVMNYHYKLIVNSSDDKYLVSIPSLKTPAX

SEQ ID NO: 4079 - protein, 38 aa, Artificial Sequence
  Non-cyclic GFR-binding peptide
  MOD_RES (1), (38): Xaa is C or S
  MOD_RES (14), (15), (16), (17), (18): Xaa is A or G
  MOD_RES (19), (20), (21), (22): Xaa is A or G or is absent
XALHDELTQYNKLXXXXXXXXXLYLVSIASLQVQTPRX

SEQ ID NO: 4080 - protein, 38 aa, Artificial Sequence
  Non-cyclic GFR-binding peptide
  MOD_RES (1), (3), (34), (35): Xaa is C or S
XKXSRVIMRHKRLVKPKRGVYYLISTASLAQPVXXPAA

SEQ ID NO: 4081 - protein, 34 aa, Artificial Sequence
  Non-cyclic GFR-binding peptide
  MOD_RES (1), (3): Xaa is C or S
XGXAKVVMNRYKKLIVNNSSDFYLVSIANLKTPA

SEQ ID NO: 4082 - protein, 34 aa, Artificial Sequence
  Non-cyclic GFR-binding peptide
  MOD_RES (31), (32): Xaa is C or S
RVVMNRHKRLIVNSSDDYYLVSTASLQTPAXXPK

SEQ ID NO: 4083 - protein, 43 aa, Artificial Sequence
  Non-cyclic GFR-binding peptide
  MOD_RES (2), (37), (38): Xaa is C or S
  MOD_RES (15), (16), (17), (18), (19): Xaa is A or G
  MOD_RES (20), (21), (22), (23): Xaa is A or G or is absent
GXEAVSMGERYKKLXXXXXXXXXFYLVSIANLKTPVXXAKGVK

SEQ ID NO: 4084 - protein, 43 aa, Artificial Sequence
  Non-cyclic GFR-binding peptide
  MOD_RES (2), (39): Xaa is C or S
KXALHDELTYHYKLFIPKKRVIEKYLVSIPSLQVQTPRXQVNR

SEQ ID NO: 4085 - protein, 34 aa, Artificial Sequence
  Non-cyclic GFR-binding peptide
  MOD_RES (2), (34): Xaa is C or S
GXGEVVMDRYKKLVVKENEDFYLMSIANLETPVX

SEQ ID NO: 4086 - protein, 38 aa, Artificial Sequence
  Non-cyclic GFR-binding peptide
  MOD_RES (33), (34): Xaa is C or S
  MOD_RES (11), (12), (13), (14), (15): Xaa is A or G
  MOD_RES (16), (17), (18), (19): Xaa is A or G or is absent
KVVMNQYNKLXXXXXXXXXLYLVSIASLKTPAXXAKPV

SEQ ID NO: 4087 - protein, 42 aa, Artificial Sequence
  Non-cyclic GFR-binding peptide
  MOD_RES (1), (38): Xaa is C or S
  MOD_RES (14), (15), (16), (17), (18): Xaa is A or G
  MOD_RES (19), (20), (21), (22): Xaa is A or G or is absent
XALHDELTRHKRLXXXXXXXXXYYLVSTASLQVQTPRXQVNR

SEQ ID NO: 4088 - protein, 42 aa, Artificial Sequence
  Non-cyclic GFR-binding peptide
  MOD_RES (2), (4), (36), (37): Xaa is C or S
HXGXSRVVMNYHYKLIVNSSDDKYLVSIPSLKTPAXXPKPVY

SEQ ID NO: 4089 - protein, 35 aa, Artificial Sequence
  Non-cyclic GFR-binding peptide
  MOD_RES (2), (33), (34): Xaa is C or S
KXSRVIMQYNKLVKPKRGVLYLISIASLAQPVXXP

SEQ ID NO: 4090 - protein, 33 aa, Artificial Sequence
  Non-cyclic GFR-binding peptide
  MOD_RES (1), (32), (33): Xaa is C or S
XSKVVMYHYKLVKPTRGVKYLISIPSLDQPVXX

SEQ ID NO: 4091 - protein, 35 aa, Artificial Sequence
  Non-cyclic GFR-binding peptide
  MOD_RES (1), (3), (34), (35): Xaa is C or S
XKXSKVVMRYKKLVKPTRGVFYLISIANLDQPVXX

SEQ ID NO: 4092 - protein, 35 aa, Artificial Sequence
  Non-cyclic GFR-binding peptide
  MOD_RES (31), (32): Xaa is C or S
KVVMNRYKKLIVNNSSDFYLVSIANLKTPAXXAKP

SEQ ID NO: 4093 - protein, 40 aa, Artificial Sequence
  Non-cyclic GFR-binding peptide
  MOD_RES (35), (36): Xaa is C or S
  MOD_RES (13), (14), (15), (16), (17): Xaa is A or G
  MOD_RES (18), (19), (20), (21): Xaa is A or G or is absent
EAVSMGERHKRLXXXXXXXXXYYLVSTASLKTPVXXAKGV

SEQ ID NO: 4094 - protein, 33 aa, Artificial Sequence
  Non-cyclic GFR-binding peptide
  MOD_RES (31), (32): Xaa is C or S
SKVVMRYKKLVKPTRGVFYLISIANLDQPVXXP

SEQ ID NO: 4095 - protein, 36 aa, Artificial Sequence
  Non-cyclic GFR-binding peptide
  MOD_RES (2), (35), (36): Xaa is C or S
  MOD_RES (13), (14), (15), (16), (17): Xaa is A or G
  MOD_RES (18), (19), (20), (21): Xaa is A or G or is absent
KXSKVIMRYKKLXXXXXXXXXFYLISIANLDQSVXX

SEQ ID NO: 4096 - protein, 33 aa, Artificial Sequence
  Non-cyclic GFR-binding peptide
  MOD_RES (31), (32): Xaa is C or S
SRVIMQYNKLVKPKRGVLYLISIASLAQPVXXP

SEQ ID NO: 4097 - protein, 40 aa, Artificial Sequence
  Non-cyclic GFR-binding peptide
  MOD_RES (35), (36): Xaa is C or S
  MOD_RES (13), (14), (15), (16), (17): Xaa is A or G
  MOD_RES (18), (19), (20), (21): Xaa is A or G or is absent
EAVSMGEQYNKLXXXXXXXXXLYLVSIASLKTPVXXAKGV

SEQ ID NO: 4098 - protein, 34 aa, Artificial Sequence
  Non-cyclic GFR-binding peptide
  MOD_RES (2), (4): Xaa is C or S
SXKXSRVIMRHKRLVKPKRGVYYLISTASLAQPV

SEQ ID NO: 4099 - protein, 40 aa, Artificial Sequence
  Non-cyclic GFR-binding peptide
  MOD_RES (2), (36): Xaa is C or S
  MOD_RES (14), (15), (16), (17), (18): Xaa is A or G
  MOD_RES (19), (20), (21), (22): Xaa is A or G or is absent
GXSRVVMNQYNKLXXXXXXXXXLYLVSIASLKTPAXTPKT

SEQ ID NO: 4100 - protein, 34 aa, Artificial Sequence
  Non-cyclic GFR-binding peptide
  MOD_RES (1), (34): Xaa is C or S
  MOD_RES (12), (13), (14), (15), (16): Xaa is A or G
  MOD_RES (17), (18), (19), (20): Xaa is A or G or is absent
XSKVVMYHYKLXXXXXXXXXKYLISIPSLDQPVX

SEQ ID NO: 4101 - protein, 41 aa, Artificial Sequence
  Non-cyclic GFR-binding peptide
  MOD_RES (1), (3), (37), (38): Xaa is C or S
  MOD_RES (15), (16), (17), (18), (19): Xaa is A or G
  MOD_RES (20), (21), (22), (23): Xaa is A or G or is absent
XGXSRVVMNYHYKLXXXXXXXXXKYLVSIPSLKTPAXXPKP

SEQ ID NO: 4102 - protein, 36 aa, Artificial Sequence
  Non-cyclic GFR-binding peptide
  MOD_RES (2), (4): Xaa is C or S
RXGXEAVSMGERYKKLTPVGMDDFYLVSIANLKTPV

SEQ ID NO: 4103 - protein, 33 aa, Artificial Sequence
  Non-cyclic GFR-binding peptide
  MOD_RES (31), (32): Xaa is C or S
RVVMNQYNKLIVNSSDDLYLVSIASLKTPAXXP

SEQ ID NO: 4104 - protein, 38 aa, Artificial Sequence
  Non-cyclic GFR-binding peptide
  MOD_RES (2), (33), (34): Xaa is C or S
KXSRVIMRYKKLVKPKRGVFYLISIANLAQPVXXPAAS

SEQ ID NO: 4105 - protein, 36 aa, Artificial Sequence
  Non-cyclic GFR-binding peptide
  MOD_RES (1), (34), (35): Xaa is C or S
  MOD_RES (12), (13), (14), (15), (16): Xaa is A or G
  MOD_RES (17), (18), (19), (20): Xaa is A or G or is absent
XSKVVMRYKKLXXXXXXXXXFYLISIANLDQPVXXP

SEQ ID NO: 4106 - protein, 35 aa, Artificial Sequence
  Non-cyclic GFR-binding peptide
  MOD_RES (2), (4): Xaa is C or S
RXGXGEVVMDRHKRLVVKENEDYYLMSTASLETPV

SEQ ID NO: 4107 - protein, 34 aa, Artificial Sequence
  Non-cyclic GFR-binding peptide
  MOD_RES (2), (2): Xaa is C or S
  MOD_RES (13), (14), (15), (16), (17): Xaa is A or G
  MOD_RES (18), (19), (20), (21): Xaa is A or G or is absent
KXSKVVMRYKKLXXXXXXXXXFYLISIANLDQPV

SEQ ID NO: 4108 - protein, 34 aa, Artificial Sequence
  Non-cyclic GFR-binding peptide
  MOD_RES (1), (33), (34): Xaa is C or S
XGEVVMERHKRLVVKDYEDYYLMSTASLETPVXX

SEQ ID NO: 4109 - protein, 35 aa, Artificial Sequence
  Non-cyclic GFR-binding peptide
  MOD_RES (2), (34), (35): Xaa is C or S
GXGEVVMEYHYKLVVKDYEDKYLMSIPSLETPVXX

SEQ ID NO: 4110 - protein, 33 aa, Artificial Sequence
  Non-cyclic GFR-binding peptide
  MOD_RES (1), (32), (33): Xaa is C or S
XSRVIMRYKKLVKPKRGVFYLISIANLAQPVXX

SEQ ID NO: 4111 - protein, 36 aa, Artificial Sequence
  Non-cyclic GFR-binding peptide
  MOD_RES (1), (1): Xaa is C or S
  MOD_RES (14), (15), (16), (17), (18): Xaa is A or G
  MOD_RES (19), (20), (21), (22): Xaa is A or G or is absent
XALHDELTRYKKLXXXXXXXXXFYLVSIANLQVQTP

SEQ ID NO: 4112 - protein, 38 aa, Artificial Sequence
  Non-cyclic GFR-binding peptide
  MOD_RES (1), (3), (36), (37): Xaa is C or S
XGXEAVSMGERYKKLTPVGMDDFYLVSIANLKTPVXXA

SEQ ID NO: 4113 - protein, 41 aa, Artificial Sequence
  Non-cyclic GFR-binding peptide
  MOD_RES (2), (36), (37): Xaa is C or S
  MOD_RES (14), (15), (16), (17), (18): Xaa is A or G
  MOD_RES (19), (20), (21), (22): Xaa is A or G or is absent
GXAKVVMNQYNKLXXXXXXXXXLYLVSIASLKTPAXXAKPV

SEQ ID NO: 4114 - protein, 36 aa, Artificial Sequence
  Non-cyclic GFR-binding peptide
  MOD_RES (32), (33): Xaa is C or S
GEVVMDYHYKLVVKENEDKYLMSIPSLETPVXXAKP

SEQ ID NO: 4115 - protein, 39 aa, Artificial Sequence
  Non-cyclic GFR-binding peptide
  MOD_RES (2), (34), (35): Xaa is C or S
GXGEVVMDRHKRLVVKENEDYYLMSTASLETPVXXAKPI

SEQ ID NO: 4116 - protein, 35 aa, Artificial Sequence
  Non-cyclic GFR-binding peptide
  MOD_RES (33), (34): Xaa is C or S
  MOD_RES (11), (12), (13), (14), (15): Xaa is A or G
  MOD_RES (16), (17), (18), (19): Xaa is A or G or is absent
RVVMNRHKRLXXXXXXXXXYYLVSTASLQTPAXXP

SEQ ID NO: 4117 - protein, 32 aa, Artificial Sequence
  Non-cyclic GFR-binding peptide
  MOD_RES (2), (2): Xaa is C or S
KXSKVIMQYNKLIKPTKGILYLISIASLDQSV

SEQ ID NO: 4118 - protein, 34 aa, Artificial Sequence
  Non-cyclic GFR-binding peptide
  MOD_RES (33), (34): Xaa is C or S
EAVSMGEQYNKLTPVGMDDLYLVSIASLKTPVXX

SEQ ID NO: 4119 - protein, 39 aa, Artificial Sequence
  Non-cyclic GFR-binding peptide
  MOD_RES (33), (33): Xaa is C or S
  MOD_RES (11), (12), (13), (14), (15): Xaa is A or G
  MOD_RES (16), (17), (18), (19): Xaa is A or G or is absent
RVVMNRHKRLXXXXXXXXXYYLVSTASLKTPAXTPKTVH

SEQ ID NO: 4120 - protein, 36 aa, Artificial Sequence
  Non-cyclic GFR-binding peptide
  MOD_RES (31), (32): Xaa is C or S
RVVMNRHKRLIVNSSDDYYLVSTASLQTPAXXPKPV

SEQ ID NO: 4121 - protein, 38 aa, Artificial Sequence
  Non-cyclic GFR-binding peptide
  MOD_RES (2), (34), (35): Xaa is C or S
GXARVVMNQYNKLIVNSSDDLYLVSIASLQTPAXXPKP

SEQ ID NO: 4122 - protein, 39 aa, Artificial Sequence
  Non-cyclic GFR-binding peptide
  MOD_RES (2), (4), (35), (36): Xaa is C or S
SXKXSKVIMQYNKLIKPTKGILYLISIASLDQSVXXPSA

SEQ ID NO: 4123 - protein, 35 aa, Artificial Sequence
  Non-cyclic GFR-binding peptide
  MOD_RES (33), (34): Xaa is C or S
  MOD_RES (11), (12), (13), (14), (15): Xaa is A or G
  MOD_RES (16), (17), (18), (19): Xaa is A or G or is absent
KVVMNRYKKLXXXXXXXXXFYLVSIANLKTPAXXA

SEQ ID NO: 4124 - protein, 33 aa, Artificial Sequence
  Non-cyclic GFR-binding peptide
  MOD_RES (31), (32): Xaa is C or S
EVVMDRHKRLVVKENEDYYLMSTASLETPVXXA

SEQ ID NO: 4125 - protein, 32 aa, Artificial Sequence
  Non-cyclic GFR-binding peptide
  MOD_RES (11), (12), (13), (14), (15): Xaa is A or G
  MOD_RES (16), (17), (18), (19): Xaa is A or G or is absent
EVVMERYKKLXXXXXXXXXFYLMSIANLETPV

SEQ ID NO: 4126 - protein, 43 aa, Artificial Sequence
  Non-cyclic GFR-binding peptide
  MOD_RES (2), (4), (37), (38): Xaa is C or S
  MOD_RES (15), (16), (17), (18), (19): Xaa is A or G
  MOD_RES (20), (21), (22), (23): Xaa is A or G or is absent
SXKXSKVIMRYKKLXXXXXXXXXFYLISIANLDQSVXXPSASA

SEQ ID NO: 4127 - protein, 39 aa, Artificial Sequence
  Non-cyclic GFR-binding peptide
  MOD_RES (1), (3): Xaa is C or S
XKXALHDELTYHYKLFIPKKRVIEKYLVSIPSLQVQTPR

SEQ ID NO: 4128 - protein, 38 aa, Artificial Sequence
  Non-cyclic GFR-binding peptide
  MOD_RES (1), (34), (35): Xaa is C or S
XEAVSMGEQYNKLTPVGMDDLYLVSIASLKTPVXXAKG

SEQ ID NO: 4129 - protein, 39 aa, Artificial Sequence
  Non-cyclic GFR-binding peptide
  MOD_RES (2), (34), (35): Xaa is C or S
GXARVVMNQYNKLIVNSSDDLYLVSIASLQTPAXXPKPV

SEQ ID NO: 4130 - protein, 41 aa, Artificial Sequence
  Non-cyclic GFR-binding peptide
  MOD_RES (2), (36), (37): Xaa is C or S
  MOD_RES (14), (15), (16), (17), (18): Xaa is A or G
  MOD_RES (19), (20), (21), (22): Xaa is A or G or is absent
GXARVVMNQYNKLXXXXXXXXXLYLVSIASLQTPAXXPKPV

SEQ ID NO: 4131 - protein, 36 aa, Artificial Sequence
  Non-cyclic GFR-binding peptide
  MOD_RES (2), (4): Xaa is C or S
  MOD_RES (15), (16), (17), (18), (19): Xaa is A or G
  MOD_RES (20), (21), (22), (23): Xaa is A or G or is absent
SXKXSKVVMRYKKLXXXXXXXXXFYLISIANLDQPV

SEQ ID NO: 4132 - protein, 36 aa, Artificial Sequence
  Non-cyclic GFR-binding peptide
  MOD_RES (1), (34), (35): Xaa is C or S
  MOD_RES (12), (13), (14), (15), (16): Xaa is A or G
  MOD_RES (17), (18), (19), (20): Xaa is A or G or is absent
XSKVIMRHKRLXXXXXXXXXYYLISTASLDQSVXXP

SEQ ID NO: 4133 - protein, 34 aa, Artificial Sequence
  Non-cyclic GFR-binding peptide
  MOD_RES (1), (3), (34): Xaa is C or S
XKXSKVIMRYKKLIKPTKGIFYLISIANLDQSVX

SEQ ID NO: 4134 - protein, 34 aa, Artificial Sequence
  Non-cyclic GFR-binding peptide
  MOD_RES (13), (14), (15), (16), (17): Xaa is A or G
  MOD_RES (18), (19), (20), (21): Xaa is A or G or is absent
EAVSMGEQYNKLXXXXXXXXXLYLVSIASLKTPV

SEQ ID NO: 4135 - protein, 40 aa, Artificial Sequence
  Non-cyclic GFR-binding peptide
  MOD_RES (2), (4), (37), (38): Xaa is C or S
  MOD_RES (15), (16), (17), (18), (19): Xaa is A or G
  MOD_RES (20), (21), (22), (23): Xaa is A or G or is absent
SXKXSKVVMQYNKLXXXXXXXXXLYLISIASLDQPVXXPS

SEQ ID NO: 4136 - protein, 35 aa, Artificial Sequence
  Non-cyclic GFR-binding peptide
  MOD_RES (1), (33), (34): Xaa is C or S
XGEVVMEYHYKLVVKDYEDKYLMSIPSLETPVXXA

SEQ ID NO: 4137 - protein, 44 aa, Artificial Sequence
  Non-cyclic GFR-binding peptide
  MOD_RES (2), (4), (38), (39): Xaa is C or S
  MOD_RES (16), (17), (18), (19), (20): Xaa is A or G
  MOD_RES (21), (22), (23), (24): Xaa is A or G or is absent
HXGXSRVVMNQYNKLXXXXXXXXXLYLVSIASLKTPAXXPKPVY

SEQ ID NO: 4138 - protein, 34 aa, Artificial Sequence
  Non-cyclic GFR-binding peptide
  MOD_RES (13), (14), (15), (16), (17): Xaa is A or G
  MOD_RES (18), (19), (20), (21): Xaa is A or G or is absent
EAVSMGERHKRLXXXXXXXXXYYLVSTASLKTPV

SEQ ID NO: 4139 - protein, 38 aa, Artificial Sequence
  Non-cyclic GFR-binding peptide
  MOD_RES (2), (35), (36): Xaa is C or S
  MOD_RES (13), (14), (15), (16), (17): Xaa is A or G
  MOD_RES (18), (19), (20), (21): Xaa is A or G or is absent
KXSKVVMRYKKLXXXXXXXXXFYLISIANLDQPVXXPS

SEQ ID NO: 4140 - protein, 39 aa, Artificial Sequence
  Non-cyclic GFR-binding peptide
  MOD_RES (34), (35): Xaa is C or S
  MOD_RES (12), (13), (14), (15), (16): Xaa is A or G
  MOD_RES (17), (18), (19), (20): Xaa is A or G or is absent
SRVVMNRHKRLXXXXXXXXXYYLVSTASLKTPAXXPKPV

SEQ ID NO: 4141 - protein, 37 aa, Artificial Sequence
  Non-cyclic GFR-binding peptide
  MOD_RES (2), (34), (35): Xaa is C or S
GXSRVVMNQYNKLIVNSSDDLYLVSIASLKTPAXXPK

SEQ ID NO: 4142 - protein, 33 aa, Artificial Sequence
  Non-cyclic GFR-binding peptide
  MOD_RES (2), (2): Xaa is C or S
GXGEVVMERHKRLVVKDYEDYYLMSTASLETPV

SEQ ID NO: 4143 - protein, 40 aa, Artificial Sequence
  Non-cyclic GFR-binding peptide
  MOD_RES (2), (4), (39), (40): Xaa is C or S
  MOD_RES (17), (18), (19), (20), (21): Xaa is A or G
  MOD_RES (22), (23), (24), (25): Xaa is A or G or is absent
RXGXEAVSMGERYKKLXXXXXXXXXFYLVSIANLKTPVXX

SEQ ID NO: 4144 - protein, 39 aa, Artificial Sequence
  Non-cyclic GFR-binding peptide
  MOD_RES (1), (34), (35): Xaa is C or S
  MOD_RES (12), (13), (14), (15), (16): Xaa is A or G
  MOD_RES (17), (18), (19), (20): Xaa is A or G or is absent
XSKVIMYHYKLXXXXXXXXXKYLISIPSLDQSVXXPSAS

SEQ ID NO: 4145 - protein, 36 aa, Artificial Sequence
  Non-cyclic GFR-binding peptide
  MOD_RES (33), (34): Xaa is C or S
  MOD_RES (11), (12), (13), (14), (15): Xaa is A or G
  MOD_RES (16), (17), (18), (19): Xaa is A or G or is absent
RVVMNYHYKLXXXXXXXXXKYLVSIPSLQTPAXXPK

SEQ ID NO: 4146 - protein, 38 aa, Artificial Sequence
  Non-cyclic GFR-binding peptide
  MOD_RES (2), (4), (38): Xaa is C or S
  MOD_RES (16), (17), (18), (19), (20): Xaa is A or G
  MOD_RES (21), (22), (23), (24): Xaa is A or G or is absent
RXGXGEVVMEYHYKLXXXXXXXXXKYLMSIPSLETPVX

SEQ ID NO: 4147 - protein, 38 aa, Artificial Sequence
  Non-cyclic GFR-binding peptide
  MOD_RES (2), (2): Xaa is C or S
KXALHDELTRHKRLFIPKKRVIEYYLVSTASLQVQTPR

SEQ ID NO: 4148 - protein, 34 aa, Artificial Sequence
  Non-cyclic GFR-binding peptide
  MOD_RES (33), (34): Xaa is C or S
  MOD_RES (11), (12), (13), (14), (15): Xaa is A or G
  MOD_RES (16), (17), (18), (19): Xaa is A or G or is absent
SKVVMQYNKLXXXXXXXXXLYLISIASLDQPVXX

SEQ ID NO: 4149 - protein, 35 aa, Artificial Sequence
  Non-cyclic GFR-binding peptide
  MOD_RES (31), (32): Xaa is C or S
SKVVMRHKRLVKPTRGVYYLISTASLDQPVXXPSA

SEQ ID NO: 4150 - protein, 40 aa, Artificial Sequence
  Non-cyclic GFR-binding peptide
  MOD_RES (2), (35), (36): Xaa is C or S
  MOD_RES (13), (14), (15), (16), (17): Xaa is A or G
  MOD_RES (18), (19), (20), (21): Xaa is A or G or is absent
KXSKVIMYHYKLXXXXXXXXXKYLISIPSLDQSVXXPSAS

SEQ ID NO: 4151 - protein, 39 aa, Artificial Sequence
  Non-cyclic GFR-binding peptide
  MOD_RES (1), (34), (35): Xaa is C or S
  MOD_RES (12), (13), (14), (15), (16): Xaa is A or G
  MOD_RES (17), (18), (19), (20): Xaa is A or G or is absent
XSRVIMRYKKLXXXXXXXXXFYLISIANLAQPVXXPAAS

SEQ ID NO: 4152 - protein, 39 aa, Artificial Sequence
  Non-cyclic GFR-binding peptide
  MOD_RES (33), (34): Xaa is C or S
  MOD_RES (11), (12), (13), (14), (15): Xaa is A or G
  MOD_RES (16), (17), (18), (19): Xaa is A or G or is absent
SKVIMYHYKLXXXXXXXXXKYLISIPSLDQSVXXPSASA

SEQ ID NO: 4153 - protein, 37 aa, Artificial Sequence
  Non-cyclic GFR-binding peptide
  MOD_RES (2), (33), (34): Xaa is C or S
KXSKVIMYHYKLIKPTKGIKYLISIPSLDQSVXXPSA

SEQ ID NO: 4154 - protein, 34 aa, Artificial Sequence
  Non-cyclic GFR-binding peptide
  MOD_RES (2), (33), (34): Xaa is C or S
KXSKVIMQYNKLIKPTKGILYLISIASLDQSVXX

SEQ ID NO: 4155 - protein, 36 aa, Artificial Sequence
  Non-cyclic GFR-binding peptide
  MOD_RES (33), (34): Xaa is C or S
  MOD_RES (11), (12), (13), (14), (15): Xaa is A or G
  MOD_RES (16), (17), (18), (19): Xaa is A or G or is absent
SRVIMRHKRLXXXXXXXXXYYLISTASLAQPVXXPA

SEQ ID NO: 4156 - protein, 41 aa, Artificial Sequence
  Non-cyclic GFR-binding peptide
  MOD_RES (1), (3), (35), (36): Xaa is C or S
XGXSRVVMNQYNKLIVNSSDDLYLVSIASLKTPAXXPKPVY

SEQ ID NO: 4157 - protein, 38 aa, Artificial Sequence
  Non-cyclic GFR-binding peptide
  MOD_RES (1), (32), (33): Xaa is C or S
XSKVIMQYNKLIKPTKGILYLISIASLDQSVXXPSASA

SEQ ID NO: 4158 - protein, 35 aa, Artificial Sequence
  Non-cyclic GFR-binding peptide
  MOD_RES (1), (33), (34): Xaa is C or S
XAKVVMNYHYKLIVNNSSDKYLVSIPSLKTPAXXA

SEQ ID NO: 4159 - protein, 38 aa, Artificial Sequence
  Non-cyclic GFR-binding peptide
  MOD_RES (1), (3), (34), (35): Xaa is C or S
XKXSKVVMQYNKLVKPTRGVLYLISIASLDQPVXXPSA

SEQ ID NO: 4160 - protein, 41 aa, Artificial Sequence
  Non-cyclic GFR-binding peptide
  MOD_RES (1), (3), (35), (36): Xaa is C or S
XGXSRVVMNYHYKLIVNSSDDKYLVSIPSLKTPAXXPKPVY

SEQ ID NO: 4161 - protein, 38 aa, Artificial Sequence
  Non-cyclic GFR-binding peptide
  MOD_RES (1), (3): Xaa is C or S
  MOD_RES (16), (17), (18), (19), (20): Xaa is A or G
  MOD_RES (21), (22), (23), (24): Xaa is A or G or is absent
XKXALHDELTQYNKLXXXXXXXXXLYLVSIASLQVQTP

SEQ ID NO: 4162 - protein, 36 aa, Artificial Sequence
  Non-cyclic GFR-binding peptide
  MOD_RES (1), (34), (35): Xaa is C or S
  MOD_RES (12), (13), (14), (15), (16): Xaa is A or G
  MOD_RES (17), (18), (19), (20): Xaa is A or G or is absent
XSKVIMQYNKLXXXXXXXXXLYLISIASLDQSVXXP

SEQ ID NO: 4163 - protein, 42 aa, Artificial Sequence
  Non-cyclic GFR-binding peptide
  MOD_RES (1), (3), (36), (37): Xaa is C or S
  MOD_RES (14), (15), (16), (17), (18): Xaa is A or G
  MOD_RES (19), (20), (21), (22): Xaa is A or G or is absent
XKXSKVVMYHYKLXXXXXXXXXKYLISIPSLDQPVXXPSASA

SEQ ID NO: 4164 - protein, 40 aa, Artificial Sequence
  Non-cyclic GFR-binding peptide
  MOD_RES (2), (36), (37): Xaa is C or S
  MOD_RES (14), (15), (16), (17), (18): Xaa is A or G
  MOD_RES (19), (20), (21), (22): Xaa is A or G or is absent
GXSRVVMNRHKRLXXXXXXXXXYYLVSTASLKTPAXXPKP

SEQ ID NO: 4165 - protein, 40 aa, Artificial Sequence
  Non-cyclic GFR-binding peptide
  MOD_RES (2), (35), (36): Xaa is C or S
  MOD_RES (13), (14), (15), (16), (17): Xaa is A or G
  MOD_RES (18), (19), (20), (21): Xaa is A or G or is absent
KXSKVVMQYNKLXXXXXXXXXLYLISIASLDQPVXXPSAS

SEQ ID NO: 4166 - protein, 37 aa, Artificial Sequence
  Non-cyclic GFR-binding peptide
  MOD_RES (2), (34), (35): Xaa is C or S
GXGEVVMERYKKLVVKDYEDFYLMSIANLETPVXXAK

SEQ ID NO: 4167 - protein, 39 aa, Artificial Sequence
  Non-cyclic GFR-binding peptide
  MOD_RES (34), (35): Xaa is C or S
  MOD_RES (12), (13), (14), (15), (16): Xaa is A or G
  MOD_RES (17), (18), (19), (20): Xaa is A or G or is absent
GEVVMDYHYKLXXXXXXXXXKYLMSIPSLETPVXXAKPI

SEQ ID NO: 4168 - protein, 34 aa, Artificial Sequence
  Non-cyclic GFR-binding peptide
  MOD_RES (2), (2): Xaa is C or S
  MOD_RES (13), (14), (15), (16), (17): Xaa is A or G
  MOD_RES (18), (19), (20), (21): Xaa is A or G or is absent
KXSKVIMRYKKLXXXXXXXXXFYLISIANLDQSV

SEQ ID NO: 4169 - protein, 39 aa, Artificial Sequence
  Non-cyclic GFR-binding peptide
  MOD_RES (1), (33), (34): Xaa is C or S
XARVVMNRHKRLIVNSSDDYYLVSTASLQTPAXXPKPVT

SEQ ID NO: 4170 - protein, 37 aa, Artificial Sequence
  Non-cyclic GFR-binding peptide
  MOD_RES (2), (4), (35), (36): Xaa is C or S
SXKXSKVVMQYNKLVKPTRGVLYLISIASLDQPVXXP

SEQ ID NO: 4171 - protein, 43 aa, Artificial Sequence
  Non-cyclic GFR-binding peptide
  MOD_RES (2), (4), (39), (40): Xaa is C or S
  MOD_RES (17), (18), (19), (20), (21): Xaa is A or G
  MOD_RES (22), (23), (24), (25): Xaa is A or G or is absent
RXGXEAVSMGEQYNKLXXXXXXXXXLYLVSIASLKTPVXXAKG

SEQ ID NO: 4172 - protein, 41 aa, Artificial Sequence
  Non-cyclic GFR-binding peptide
  MOD_RES (1), (3), (35), (36): Xaa is C or S
XGXGEVVMDRHKRLVVKENEDYYLMSTASLETPVXXAKPIK

SEQ ID NO: 4173 - protein, 42 aa, Artificial Sequence
  Non-cyclic GFR-binding peptide
  MOD_RES (1), (3), (37), (38): Xaa is C or S
  MOD_RES (15), (16), (17), (18), (19): Xaa is A or G
  MOD_RES (20), (21), (22), (23): Xaa is A or G or is absent
XGXSRVVMNRHKRLXXXXXXXXXYYLVSTASLKTPAXXPKPV

SEQ ID NO: 4174 - protein, 36 aa, Artificial Sequence
  Non-cyclic GFR-binding peptide
  MOD_RES (1), (35): Xaa is C or S
  MOD_RES (13), (14), (15), (16), (17): Xaa is A or G
  MOD_RES (18), (19), (20), (21): Xaa is A or G or is absent
XSRVVMNQYNKLXXXXXXXXXLYLVSIASLKTPAXT

SEQ ID NO: 4175 - protein, 41 aa, Artificial Sequence
  Non-cyclic GFR-binding peptide
  MOD_RES (1), (38): Xaa is C or S
  MOD_RES (14), (15), (16), (17), (18): Xaa is A or G
  MOD_RES (19), (20), (21), (22): Xaa is A or G or is absent
XALHDELTQYNKLXXXXXXXXXLYLVSIASLQVQTPRXQVN

SEQ ID NO: 4176 - protein, 37 aa, Artificial Sequence
  Non-cyclic GFR-binding peptide
  MOD_RES (2), (35), (36): Xaa is C or S
  MOD_RES (13), (14), (15), (16), (17): Xaa is A or G
  MOD_RES (18), (19), (20), (21): Xaa is A or G or is absent
KXSKVIMRHKRLXXXXXXXXXYYLISTASLDQSVXXP

SEQ ID NO: 4177 - protein, 34 aa, Artificial Sequence
  Non-cyclic GFR-binding peptide
  MOD_RES (1), (1): Xaa is C or S
  MOD_RES (13), (14), (15), (16), (17): Xaa is A or G
  MOD_RES (18), (19), (20), (21): Xaa is A or G or is absent
XAKVVMNQYNKLXXXXXXXXXLYLVSIASLKTPA

SEQ ID NO: 4178 - protein, 35 aa, Artificial Sequence
  Non-cyclic GFR-binding peptide
  MOD_RES (34), (35): Xaa is C or S
  MOD_RES (12), (13), (14), (15), (16): Xaa is A or G
  MOD_RES (17), (18), (19), (20): Xaa is A or G or is absent
GEVVMERYKKLXXXXXXXXXFYLMSIANLETPVXX

SEQ ID NO: 4179 - protein, 39 aa, Artificial Sequence
  Non-cyclic GFR-binding peptide
  MOD_RES (2), (36), (37): Xaa is C or S
  MOD_RES (14), (15), (16), (17), (18): Xaa is A or G
  MOD_RES (19), (20), (21), (22): Xaa is A or G or is absent
GXGEVVMDRYKKLXXXXXXXXXFYLMSIANLETPVXXAK

SEQ ID NO: 4180 - protein, 37 aa, Artificial Sequence
  Non-cyclic GFR-binding peptide
  MOD_RES (2), (34): Xaa is C or S
GXSRVVMNRHKRLIVNSSDDYYLVSTASLKTPAXTPK

SEQ ID NO: 4181 - protein, 37 aa, Artificial Sequence
  Non-cyclic GFR-binding peptide
  MOD_RES (33), (34): Xaa is C or S
  MOD_RES (11), (12), (13), (14), (15): Xaa is A or G
  MOD_RES (16), (17), (18), (19): Xaa is A or G or is absent
SKVVMRHKRLXXXXXXXXXYYLISTASLDQPVXXPSA

SEQ ID NO: 4182 - protein, 43 aa, Artificial Sequence
  Non-cyclic GFR-binding peptide
  MOD_RES (2), (4), (38): Xaa is C or S
  MOD_RES (16), (17), (18), (19), (20): Xaa is A or G
  MOD_RES (21), (22), (23), (24): Xaa is A or G or is absent
HXGXSRVVMNRHKRLXXXXXXXXXYYLVSTASLKTPAXTPKTV

SEQ ID NO: 4183 - protein, 37 aa, Artificial Sequence
  Non-cyclic GFR-binding peptide
  MOD_RES (1), (3), (35), (36): Xaa is C or S
XGXSRVVMNRHKRLIVNSSDDYYLVSTASLKTPAXXP

SEQ ID NO: 4184 - protein, 33 aa, Artificial Sequence
  Non-cyclic GFR-binding peptide
  MOD_RES (31), (32): Xaa is C or S
RVVMNRHKRLIVNSSDDYYLVSTASLKTPAXXP

SEQ ID NO: 4185 - protein, 37 aa, Artificial Sequence
  Non-cyclic GFR-binding peptide
  MOD_RES (34), (35): Xaa is C or S
  MOD_RES (12), (13), (14), (15), (16): Xaa is A or G
  MOD_RES (17), (18), (19), (20): Xaa is A or G or is absent
ARVVMNRHKRLXXXXXXXXXYYLVSTASLQTPAXXPK

SEQ ID NO: 4186 - protein, 36 aa, Artificial Sequence
  Non-cyclic GFR-binding peptide
  MOD_RES (1), (33): Xaa is C or S
XSRVVMNQYNKLIVNSSDDLYLVSIASLKTPAXTPK

SEQ ID NO: 4187 - protein, 35 aa, Artificial Sequence
  Non-cyclic GFR-binding peptide
  MOD_RES (33), (34): Xaa is C or S
  MOD_RES (11), (12), (13), (14), (15): Xaa is A or G
  MOD_RES (16), (17), (18), (19): Xaa is A or G or is absent
SKVIMRYKKLXXXXXXXXXFYLISIANLDQSVXXP

SEQ ID NO: 4188 - protein, 36 aa, Artificial Sequence
  Non-cyclic GFR-binding peptide
  MOD_RES (1), (3): Xaa is C or S
  MOD_RES (15), (16), (17), (18), (19): Xaa is A or G
  MOD_RES (20), (21), (22), (23): Xaa is A or G or is absent
XGXARVVMNRHKRLXXXXXXXXXYYLVSTASLQTPA

SEQ ID NO: 4189 - protein, 42 aa, Artificial Sequence
  Non-cyclic GFR-binding peptide
  MOD_RES (2), (4), (36): Xaa is C or S
HXGXSRVVMNRHKRLIVNSSDDYYLVSTASLKTPAXTPKTVH

SEQ ID NO: 4190 - protein, 34 aa, Artificial Sequence
  Non-cyclic GFR-binding peptide
  MOD_RES (11), (12), (13), (14), (15): Xaa is A or G
  MOD_RES (16), (17), (18), (19): Xaa is A or G or is absent
HDELTRYKKLXXXXXXXXXFYLVSIANLQVQTPR

SEQ ID NO: 4191 - protein, 35 aa, Artificial Sequence
  Non-cyclic GFR-binding peptide
  MOD_RES (32), (33): Xaa is C or S
GEVVMERHKRLVVKDYEDYYLMSTASLETPVXXAK

SEQ ID NO: 4192 - protein, 37 aa, Artificial Sequence
  Non-cyclic GFR-binding peptide
  MOD_RES (1), (3), (37): Xaa is C or S
  MOD_RES (15), (16), (17), (18), (19): Xaa is A or G
  MOD_RES (20), (21), (22), (23): Xaa is A or G or is absent
XGXARVVMNYHYKLXXXXXXXXXKYLVSIPSLQTPAX

SEQ ID NO: 4193 - protein, 38 aa, Artificial Sequence
  Non-cyclic GFR-binding peptide
  MOD_RES (2), (4), (36), (37): Xaa is C or S
HXGXAKVVMNYHYKLIVNNSSDKYLVSIPSLKTPAXXA

SEQ ID NO: 4194 - protein, 34 aa, Artificial Sequence
  Non-cyclic GFR-binding peptide
  MOD_RES (2), (4): Xaa is C or S
SXKXSRVIMQYNKLVKPKRGVLYLISIASLAQPV

SEQ ID NO: 4195 - protein, 37 aa, Artificial Sequence
  Non-cyclic GFR-binding peptide
  MOD_RES (33), (33): Xaa is C or S
  MOD_RES (11), (12), (13), (14), (15): Xaa is A or G
  MOD_RES (16), (17), (18), (19): Xaa is A or G or is absent
RVVMNQYNKLXXXXXXXXXLYLVSIASLKTPAXTPKT

SEQ ID NO: 4196 - protein, 41 aa, Artificial Sequence
  Non-cyclic GFR-binding peptide
  MOD_RES (2), (4), (39), (40): Xaa is C or S
  MOD_RES (17), (18), (19), (20), (21): Xaa is A or G
  MOD_RES (22), (23), (24), (25): Xaa is A or G or is absent
RXGXEAVSMGERHKRLXXXXXXXXXYYLVSTASLKTPVXXA

SEQ ID NO: 4197 - protein, 39 aa, Artificial Sequence
  Non-cyclic GFR-binding peptide
  MOD_RES (1), (35), (36): Xaa is C or S
  MOD_RES (13), (14), (15), (16), (17): Xaa is A or G
  MOD_RES (18), (19), (20), (21): Xaa is A or G or is absent
XGEVVMDYHYKLXXXXXXXXXKYLMSIPSLETPVXXAKP

SEQ ID NO: 4198 - protein, 38 aa, Artificial Sequence
  Non-cyclic GFR-binding peptide
  MOD_RES (2), (4), (36): Xaa is C or S
HXGXSRVVMNRHKRLIVNSSDDYYLVSTASLKTPAXTP

SEQ ID NO: 4199 - protein, 43 aa, Artificial Sequence
  Non-cyclic GFR-binding peptide
  MOD_RES (2), (4), (41): Xaa is C or S
  MOD_RES (17), (18), (19), (20), (21): Xaa is A or G
  MOD_RES (22), (23), (24), (25): Xaa is A or G or is absent
EXKXALHDELTRHKRLXXXXXXXXXYYLVSTASLQVQTPRXQV

SEQ ID NO: 4200 - protein, 35 aa, Artificial Sequence
  Non-cyclic GFR-binding peptide
  MOD_RES (2), (4): Xaa is C or S
HXGXAKVVMNYHYKLIVNNSSDKYLVSIPSLKTPA

SEQ ID NO: 4201 - protein, 34 aa, Artificial Sequence
  Non-cyclic GFR-binding peptide
  MOD_RES (2), (33), (34): Xaa is C or S
KXSKVIMRYKKLIKPTKGIFYLISIANLDQSVXX

SEQ ID NO: 4202 - protein, 34 aa, Artificial Sequence
  Non-cyclic GFR-binding peptide
  MOD_RES (32), (33): Xaa is C or S
AKVVMNYHYKLIVNNSSDKYLVSIPSLKTPAXXA

SEQ ID NO: 4203 - protein, 34 aa, Artificial Sequence
  Non-cyclic GFR-binding peptide
  MOD_RES (2), (34): Xaa is C or S
GXAKVVMNRYKKLIVNNSSDFYLVSIANLKTPAX

SEQ ID NO: 4204 - protein, 37 aa, Artificial Sequence
  Non-cyclic GFR-binding peptide
  MOD_RES (34), (34): Xaa is C or S
  MOD_RES (12), (13), (14), (15), (16): Xaa is A or G
  MOD_RES (17), (18), (19), (20): Xaa is A or G or is absent
SRVVMNRHKRLXXXXXXXXXYYLVSTASLKTPAXTPK

SEQ ID NO: 4205 - protein, 38 aa, Artificial Sequence
  Non-cyclic GFR-binding peptide
  MOD_RES (2), (34): Xaa is C or S
GXSRVVMNQYNKLIVNSSDDLYLVSIASLKTPAXTPKT

SEQ ID NO: 4206 - protein, 40 aa, Artificial Sequence
  Non-cyclic GFR-binding peptide
  MOD_RES (1), (3), (34), (35): Xaa is C or S
XKXSKVIMRHKRLIKPTKGIYYLISTASLDQSVXXPSASA

SEQ ID NO: 4207 - protein, 39 aa, Artificial Sequence
  Non-cyclic GFR-binding peptide
  MOD_RES (2), (4), (36), (37): Xaa is C or S
HXGXARVVMNQYNKLIVNSSDDLYLVSIASLQTPAXXPK

SEQ ID NO: 4208 - protein, 41 aa, Artificial Sequence
  Non-cyclic GFR-binding peptide
  MOD_RES (2), (4), (38), (39): Xaa is C or S
  MOD_RES (16), (17), (18), (19), (20): Xaa is A or G
  MOD_RES (21), (22), (23), (24): Xaa is A or G or is absent
HXGXSRVVMNRHKRLXXXXXXXXXYYLVSTASLKTPAXXPK

SEQ ID NO: 4209 - protein, 39 aa, Artificial Sequence
  Non-cyclic GFR-binding peptide
  MOD_RES (37), (37): Xaa is C or S
  MOD_RES (13), (14), (15), (16), (17): Xaa is A or G
  MOD_RES (18), (19), (20), (21): Xaa is A or G or is absent
ALHDELTYHYKLXXXXXXXXXKYLVSIPSLQVQTPRXQV

SEQ ID NO: 4210 - protein, 41 aa, Artificial Sequence
  Non-cyclic GFR-binding peptide
  MOD_RES (1), (35): Xaa is C or S
  MOD_RES (13), (14), (15), (16), (17): Xaa is A or G
  MOD_RES (18), (19), (20), (21): Xaa is A or G or is absent
XSRVVMNQYNKLXXXXXXXXXLYLVSIASLKTPAXTPKTVH

SEQ ID NO: 4211 - protein, 38 aa, Artificial Sequence
  Non-cyclic GFR-binding peptide
  MOD_RES (1), (35), (36): Xaa is C or S
  MOD_RES (13), (14), (15), (16), (17): Xaa is A or G
  MOD_RES (18), (19), (20), (21): Xaa is A or G or is absent
XGEVVMERHKRLXXXXXXXXXYYLMSTASLETPVXXAK

SEQ ID NO: 4212 - protein, 40 aa, Artificial Sequence
  Non-cyclic GFR-binding peptide
  MOD_RES (1), (35), (36): Xaa is C or S
  MOD_RES (13), (14), (15), (16), (17): Xaa is A or G
  MOD_RES (18), (19), (20), (21): Xaa is A or G or is absent
XGEVVMERHKRLXXXXXXXXXYYLMSTASLETPVXXAKPI

SEQ ID NO: 4213 - protein, 34 aa, Artificial Sequence
  Non-cyclic GFR-binding peptide
  MOD_RES (31), (32): Xaa is C or S
EVVMEYHYKLVVKDYEDKYLMSIPSLETPVXXAK

SEQ ID NO: 4214 - protein, 40 aa, Artificial Sequence
  Non-cyclic GFR-binding peptide
  MOD_RES (34), (35): Xaa is C or S
  MOD_RES (12), (13), (14), (15), (16): Xaa is A or G
  MOD_RES (17), (18), (19), (20): Xaa is A or G or is absent
GEVVMERYKKLXXXXXXXXXFYLMSIANLETPVXXAKPIS

SEQ ID NO: 4215 - protein, 33 aa, Artificial Sequence
  Non-cyclic GFR-binding peptide
  MOD_RES (33), (33): Xaa is C or S
  MOD_RES (11), (12), (13), (14), (15): Xaa is A or G
  MOD_RES (16), (17), (18), (19): Xaa is A or G or is absent
RVVMNQYNKLXXXXXXXXXLYLVSIASLKTPAX

SEQ ID NO: 4216 - protein, 33 aa, Artificial Sequence
  Non-cyclic GFR-binding peptide
  MOD_RES (33), (33): Xaa is C or S
  MOD_RES (11), (12), (13), (14), (15): Xaa is A or G
  MOD_RES (16), (17), (18), (19): Xaa is A or G or is absent
KVVMNQYNKLXXXXXXXXXLYLVSIASLKTPAX

SEQ ID NO: 4217 - protein, 38 aa, Artificial Sequence
  Non-cyclic GFR-binding peptide
  MOD_RES (1), (3), (36), (37): Xaa is C or S
  MOD_RES (14), (15), (16), (17), (18): Xaa is A or G
  MOD_RES (19), (20), (21), (22): Xaa is A or G or is absent
XKXSRVIMRHKRLXXXXXXXXXYYLISTASLAQPVXXP

SEQ ID NO: 4218 - protein, 39 aa, Artificial Sequence
  Non-cyclic GFR-binding peptide
  MOD_RES (2), (4), (37), (38): Xaa is C or S
  MOD_RES (15), (16), (17), (18), (19): Xaa is A or G
  MOD_RES (20), (21), (22), (23): Xaa is A or G or is absent
SXKXSKVVMRHKRLXXXXXXXXXYYLISTASLDQPVXXP

SEQ ID NO: 4219 - protein, 38 aa, Artificial Sequence
  Non-cyclic GFR-binding peptide
  MOD_RES (1), (33), (34): Xaa is C or S
XSRVVMNRHKRLIVNSSDDYYLVSTASLKTPAXXPKPV

SEQ ID NO: 4220 - protein, 37 aa, Artificial Sequence
  Non-cyclic GFR-binding peptide
  MOD_RES (1), (35), (36): Xaa is C or S
  MOD_RES (13), (14), (15), (16), (17): Xaa is A or G
  MOD_RES (18), (19), (20), (21): Xaa is A or G or is absent
XAKVVMNYHYKLXXXXXXXXXKYLVSIPSLKTPAXXA

SEQ ID NO: 4221 - protein, 33 aa, Artificial Sequence
  Non-cyclic GFR-binding peptide
  MOD_RES (11), (12), (13), (14), (15): Xaa is A or G
  MOD_RES (16), (17), (18), (19): Xaa is A or G or is absent
HDELTRHKRLXXXXXXXXXYYLVSTASLQVQTP

SEQ ID NO: 4222 - protein, 39 aa, Artificial Sequence
  Non-cyclic GFR-binding peptide
  MOD_RES (1), (3): Xaa is C or S
XKXALHDELTRHKRLFIPKKRVIEYYLVSTASLQVQTPR

SEQ ID NO: 4223 - protein, 36 aa, Artificial Sequence
  Non-cyclic GFR-binding peptide
  MOD_RES (34), (34): Xaa is C or S
  MOD_RES (12), (13), (14), (15), (16): Xaa is A or G
  MOD_RES (17), (18), (19), (20): Xaa is A or G or is absent
SRVVMNRHKRLXXXXXXXXXYYLVSTASLKTPAXTP

SEQ ID NO: 4224 - protein, 38 aa, Artificial Sequence
  Non-cyclic GFR-binding peptide
  MOD_RES (1), (3), (36), (37): Xaa is C or S
  MOD_RES (14), (15), (16), (17), (18): Xaa is A or G
  MOD_RES (19), (20), (21), (22): Xaa is A or G or is absent
XKXSKVIMRYKKLXXXXXXXXXFYLISIANLDQSVXXP

SEQ ID NO: 4225 - protein, 37 aa, Artificial Sequence
  Non-cyclic GFR-binding peptide
  MOD_RES (1), (3), (37): Xaa is C or S
  MOD_RES (15), (16), (17), (18), (19): Xaa is A or G
  MOD_RES (20), (21), (22), (23): Xaa is A or G or is absent
XGXSRVVMNRHKRLXXXXXXXXXYYLVSTASLKTPAX

SEQ ID NO: 4226 - protein, 36 aa, Artificial Sequence
  Non-cyclic GFR-binding peptide
  MOD_RES (2), (33), (34): Xaa is C or S
KXSKVIMRHKRLIKPTKGIYYLISTASLDQSVXXPS

SEQ ID NO: 4227 - protein, 37 aa, Artificial Sequence
  Non-cyclic GFR-binding peptide
  MOD_RES (2), (2): Xaa is C or S
  MOD_RES (15), (16), (17), (18), (19): Xaa is A or G
  MOD_RES (20), (21), (22), (23): Xaa is A or G or is absent
KXALHDELTQYNKLXXXXXXXXXLYLVSIASLQVQTP

SEQ ID NO: 4228 - protein, 39 aa, Artificial Sequence
  Non-cyclic GFR-binding peptide
  MOD_RES (1), (3), (35), (36): Xaa is C or S
XGXGEVVMERYKKLVVKDYEDFYLMSIANLETPVXXAKP

SEQ ID NO: 4229 - protein, 43 aa, Artificial Sequence
  Non-cyclic GFR-binding peptide
  MOD_RES (2), (4), (38), (39): Xaa is C or S
  MOD_RES (16), (17), (18), (19), (20): Xaa is A or G
  MOD_RES (21), (22), (23), (24): Xaa is A or G or is absent
HXGXAKVVMNQYNKLXXXXXXXXXLYLVSIASLKTPAXXAKPV

SEQ ID NO: 4230 - protein, 37 aa, Artificial Sequence
  Non-cyclic GFR-binding peptide
  MOD_RES (2), (4): Xaa is C or S
  MOD_RES (16), (17), (18), (19), (20): Xaa is A or G
  MOD_RES (21), (22), (23), (24): Xaa is A or G or is absent
RXGXGEVVMEYHYKLXXXXXXXXXKYLMSIPSLETPV

SEQ ID NO: 4231 - protein, 37 aa, Artificial Sequence
  Non-cyclic GFR-binding peptide
  MOD_RES (34), (35): Xaa is C or S
  MOD_RES (12), (13), (14), (15), (16): Xaa is A or G
  MOD_RES (17), (18), (19), (20): Xaa is A or G or is absent
SRVVMNRHKRLXXXXXXXXXYYLVSTASLKTPAXXPK

SEQ ID NO: 4232 - protein, 41 aa, Artificial Sequence
  Non-cyclic GFR-binding peptide
  MOD_RES (1), (3), (40): Xaa is C or S
  MOD_RES (16), (17), (18), (19), (20): Xaa is A or G
  MOD_RES (21), (22), (23), (24): Xaa is A or G or is absent
XKXALHDELTRYKKLXXXXXXXXXFYLVSIANLQVQTPRXQ

SEQ ID NO: 4233 - protein, 41 aa, Artificial Sequence
  Non-cyclic GFR-binding peptide
  MOD_RES (1), (3), (35), (36): Xaa is C or S
XGXGEVVMDYHYKLVVKENEDKYLMSIPSLETPVXXAKPIK

SEQ ID NO: 4234 - protein, 39 aa, Artificial Sequence
  Non-cyclic GFR-binding peptide
  MOD_RES (35), (35): Xaa is C or S
  MOD_RES (11), (12), (13), (14), (15): Xaa is A or G
  MOD_RES (16), (17), (18), (19): Xaa is A or G or is absent
HDELTRHKRLXXXXXXXXXYYLVSTASLQVQTPRXQVNR

SEQ ID NO: 4235 - protein, 40 aa, Artificial Sequence
  Non-cyclic GFR-binding peptide
  MOD_RES (1), (3), (36), (37): Xaa is C or S
  MOD_RES (14), (15), (16), (17), (18): Xaa is A or G
  MOD_RES (19), (20), (21), (22): Xaa is A or G or is absent
XKXSKVVMQYNKLXXXXXXXXXLYLISIASLDQPVXXPSA

SEQ ID NO: 4236 - protein, 38 aa, Artificial Sequence
  Non-cyclic GFR-binding peptide
  MOD_RES (32), (33): Xaa is C or S
GEVVMDYHYKLVVKENEDKYLMSIPSLETPVXXAKPIK

SEQ ID NO: 4237 - protein, 32 aa, Artificial Sequence
  Non-cyclic GFR-binding peptide
  MOD_RES (11), (12), (13), (14), (15): Xaa is A or G
  MOD_RES (16), (17), (18), (19): Xaa is A or G or is absent
SRVIMRHKRLXXXXXXXXXYYLISTASLAQPV

SEQ ID NO: 4238 - protein, 37 aa, Artificial Sequence
  Non-cyclic GFR-binding peptide
  MOD_RES (36), (36): Xaa is C or S
  MOD_RES (12), (13), (14), (15), (16): Xaa is A or G
  MOD_RES (17), (18), (19), (20): Xaa is A or G or is absent
LHDELTRHKRLXXXXXXXXXYYLVSTASLQVQTPRXQ

SEQ ID NO: 4239 - protein, 37 aa, Artificial Sequence
  Non-cyclic GFR-binding peptide
  MOD_RES (2), (35), (36): Xaa is C or S
  MOD_RES (13), (14), (15), (16), (17): Xaa is A or G
  MOD_RES (18), (19), (20), (21): Xaa is A or G or is absent
KXSRVIMQYNKLXXXXXXXXXLYLISIASLAQPVXXP

SEQ ID NO: 4240 - protein, 35 aa, Artificial Sequence
  Non-cyclic GFR-binding peptide
  MOD_RES (2), (2): Xaa is C or S
  MOD_RES (14), (15), (16), (17), (18): Xaa is A or G
  MOD_RES (19), (20), (21), (22): Xaa is A or G or is absent
GXARVVMNRHKRLXXXXXXXXXYYLVSTASLQTPA

SEQ ID NO: 4241 - protein, 31 aa, Artificial Sequence
  Non-cyclic GFR-binding peptide
SRVVMNQYNKLIVNSSDDLYLVSIASLKTPA

SEQ ID NO: 4242 - protein, 41 aa, Artificial Sequence
  Non-cyclic GFR-binding peptide
  MOD_RES (37), (37): Xaa is C or S
ALHDELTRYKKLFIPKKRVIEFYLVSIANLQVQTPRXQVNR

SEQ ID NO: 4243 - protein, 38 aa, Artificial Sequence
  Non-cyclic GFR-binding peptide
  MOD_RES (2), (4), (38): Xaa is C or S
  MOD_RES (16), (17), (18), (19), (20): Xaa is A or G
  MOD_RES (21), (22), (23), (24): Xaa is A or G or is absent
RXGXGEVVMERHKRLXXXXXXXXXYYLMSTASLETPVX

SEQ ID NO: 4244 - protein, 35 aa, Artificial Sequence
  Non-cyclic GFR-binding peptide
  MOD_RES (2), (35): Xaa is C or S
  MOD_RES (13), (14), (15), (16), (17): Xaa is A or G
  MOD_RES (18), (19), (20), (21): Xaa is A or G or is absent
KXSKVIMRYKKLXXXXXXXXXFYLISIANLDQSVX

SEQ ID NO: 4245 - protein, 37 aa, Artificial Sequence
  Non-cyclic GFR-binding peptide
  MOD_RES (1), (35), (36): Xaa is C or S
  MOD_RES (13), (14), (15), (16), (17): Xaa is A or G
  MOD_RES (18), (19), (20), (21): Xaa is A or G or is absent
XGEVVMDRYKKLXXXXXXXXXFYLMSIANLETPVXXA

SEQ ID NO: 4246 - protein, 36 aa, Artificial Sequence
  Non-cyclic GFR-binding peptide
ALHDELTYHYKLFIPKKRVIEKYLVSIPSLQVQTPR

SEQ ID NO: 4247 - protein, 33 aa, Artificial Sequence
  Non-cyclic GFR-binding peptide
  MOD_RES (31), (31): Xaa is C or S
RVVMNQYNKLIVNSSDDLYLVSIASLKTPAXTP

SEQ ID NO: 4248 - protein, 33 aa, Artificial Sequence
  Non-cyclic GFR-binding peptide
  MOD_RES (1), (32), (33): Xaa is C or S
XSRVIMQYNKLVKPKRGVLYLISIASLAQPVXX

SEQ ID NO: 4249 - protein, 37 aa, Artificial Sequence
  Non-cyclic GFR-binding peptide
  MOD_RES (2), (36), (37): Xaa is C or S
  MOD_RES (14), (15), (16), (17), (18): Xaa is A or G
  MOD_RES (19), (20), (21), (22): Xaa is A or G or is absent
GXGEVVMERHKRLXXXXXXXXXYYLMSTASLETPVXX

SEQ ID NO: 4250 - protein, 37 aa, Artificial Sequence
  Non-cyclic GFR-binding peptide
  MOD_RES (1), (35), (36): Xaa is C or S
  MOD_RES (13), (14), (15), (16), (17): Xaa is A or G
  MOD_RES (18), (19), (20), (21): Xaa is A or G or is absent
XARVVMNYHYKLXXXXXXXXXKYLVSIPSLQTPAXXP

SEQ ID NO: 4251 - protein, 41 aa, Artificial Sequence
  Non-cyclic GFR-binding peptide
  MOD_RES (1), (35), (36): Xaa is C or S
  MOD_RES (13), (14), (15), (16), (17): Xaa is A or G
  MOD_RES (18), (19), (20), (21): Xaa is A or G or is absent
XARVVMNQYNKLXXXXXXXXXLYLVSIASLQTPAXXPKPVT

SEQ ID NO: 4252 - protein, 36 aa, Artificial Sequence
  Non-cyclic GFR-binding peptide
  MOD_RES (1), (33), (34): Xaa is C or S
XARVVMNQYNKLIVNSSDDLYLVSIASLQTPAXXPK

SEQ ID NO: 4253 - protein, 36 aa, Artificial Sequence
  Non-cyclic GFR-binding peptide
  MOD_RES (33), (34): Xaa is C or S
  MOD_RES (11), (12), (13), (14), (15): Xaa is A or G
  MOD_RES (16), (17), (18), (19): Xaa is A or G or is absent
KVVMNRYKKLXXXXXXXXXFYLVSIANLKTPAXXAK

SEQ ID NO: 4254 - protein, 40 aa, Artificial Sequence
  Non-cyclic GFR-binding peptide
  MOD_RES (1), (3), (35), (36): Xaa is C or S
XGXARVVMNRHKRLIVNSSDDYYLVSTASLQTPAXXPKPV

SEQ ID NO: 4255 - protein, 34 aa, Artificial Sequence
  Non-cyclic GFR-binding peptide
  MOD_RES (1), (3), (34): Xaa is C or S
XKXSRVIMRHKRLVKPKRGVYYLISTASLAQPVX

SEQ ID NO: 4256 - protein, 34 aa, Artificial Sequence
  Non-cyclic GFR-binding peptide
  MOD_RES (1), (3), (34): Xaa is C or S
XKXSKVVMRYKKLVKPTRGVFYLISIANLDQPVX

SEQ ID NO: 4257 - protein, 38 aa, Artificial Sequence
  Non-cyclic GFR-binding peptide
  MOD_RES (1), (35), (36): Xaa is C or S
  MOD_RES (13), (14), (15), (16), (17): Xaa is A or G
  MOD_RES (18), (19), (20), (21): Xaa is A or G or is absent
XSRVVMNYHYKLXXXXXXXXXKYLVSIPSLKTPAXXPK

SEQ ID NO: 4258 - protein, 36 aa, Artificial Sequence
  Non-cyclic GFR-binding peptide
  MOD_RES (36), (36): Xaa is C or S
  MOD_RES (12), (13), (14), (15), (16): Xaa is A or G
  MOD_RES (17), (18), (19), (20): Xaa is A or G or is absent
LHDELTQYNKLXXXXXXXXXLYLVSIASLQVQTPRX

SEQ ID NO: 4259 - protein, 37 aa, Artificial Sequence
  Non-cyclic GFR-binding peptide
  MOD_RES (37), (37): Xaa is C or S
  MOD_RES (13), (14), (15), (16), (17): Xaa is A or G
  MOD_RES (18), (19), (20), (21): Xaa is A or G or is absent
ALHDELTQYNKLXXXXXXXXXLYLVSIASLQVQTPRX

SEQ ID NO: 4260 - protein, 42 aa, Artificial Sequence
  Non-cyclic GFR-binding peptide
  MOD_RES (2), (4), (38): Xaa is C or S
  MOD_RES (16), (17), (18), (19), (20): Xaa is A or G
  MOD_RES (21), (22), (23), (24): Xaa is A or G or is absent
HXGXSRVVMNRHKRLXXXXXXXXXYYLVSTASLKTPAXTPKT

SEQ ID NO: 4261 - protein, 36 aa, Artificial Sequence
  Non-cyclic GFR-binding peptide
  MOD_RES (2), (4), (35), (36): Xaa is C or S
SXKXSKVIMYHYKLIKPTKGIKYLISIPSLDQSVXX

SEQ ID NO: 4262 - protein, 38 aa, Artificial Sequence
  Non-cyclic GFR-binding peptide
  MOD_RES (1), (36), (37): Xaa is C or S
  MOD_RES (14), (15), (16), (17), (18): Xaa is A or G
  MOD_RES (19), (20), (21), (22): Xaa is A or G or is absent
XEAVSMGEQYNKLXXXXXXXXXLYLVSIASLKTPVXXA

SEQ ID NO: 4263 - protein, 34 aa, Artificial Sequence
  Non-cyclic GFR-binding peptide
  MOD_RES (31), (32): Xaa is C or S
KVVMNYHYKLIVNNSSDKYLVSIPSLKTPAXXAK

SEQ ID NO: 4264 - protein, 38 aa, Artificial Sequence
  Non-cyclic GFR-binding peptide
  MOD_RES (36), (36): Xaa is C or S
LHDELTRHKRLFIPKKRVIEYYLVSTASLQVQTPRXQV

SEQ ID NO: 4265 - protein, 38 aa, Artificial Sequence
  Non-cyclic GFR-binding peptide
  MOD_RES (1), (3): Xaa is C or S
XKXALHDELTRYKKLFIPKKRVIEFYLVSIANLQVQTP

SEQ ID NO: 4266 - protein, 40 aa, Artificial Sequence
  Non-cyclic GFR-binding peptide
  MOD_RES (1), (3), (35): Xaa is C or S
XGXSRVVMNRHKRLIVNSSDDYYLVSTASLKTPAXTPKTV

SEQ ID NO: 4267 - protein, 36 aa, Artificial Sequence
  Non-cyclic GFR-binding peptide
  MOD_RES (1), (3), (35), (36): Xaa is C or S
XGXSRVVMNQYNKLIVNSSDDLYLVSIASLKTPAXX

SEQ ID NO: 4268 - protein, 43 aa, Artificial Sequence
  Non-cyclic GFR-binding peptide
  MOD_RES (1), (3), (37): Xaa is C or S
  MOD_RES (15), (16), (17), (18), (19): Xaa is A or G
  MOD_RES (20), (21), (22), (23): Xaa is A or G or is absent
XGXSRVVMNYHYKLXXXXXXXXXKYLVSIPSLKTPAXTPKTVH

SEQ ID NO: 4269 - protein, 37 aa, Artificial Sequence
  Non-cyclic GFR-binding peptide
  MOD_RES (2), (34), (35): Xaa is C or S
GXAKVVMNQYNKLIVNNSSDLYLVSIASLKTPAXXAK

SEQ ID NO: 4270 - protein, 40 aa, Artificial Sequence
  Non-cyclic GFR-binding peptide
  MOD_RES (1), (35), (36): Xaa is C or S
  MOD_RES (13), (14), (15), (16), (17): Xaa is A or G
  MOD_RES (18), (19), (20), (21): Xaa is A or G or is absent
XAKVVMNYHYKLXXXXXXXXXKYLVSIPSLKTPAXXAKPV

SEQ ID NO: 4271 - protein, 33 aa, Artificial Sequence
  Non-cyclic GFR-binding peptide
  MOD_RES (1), (33): Xaa is C or S
XARVVMNYHYKLIVNSSDDKYLVSIPSLQTPAX

SEQ ID NO: 4272 - protein, 38 aa, Artificial Sequence
  Non-cyclic GFR-binding peptide
  MOD_RES (1), (3), (36), (37): Xaa is C or S
XGXEAVSMGEQYNKLTPVGMDDLYLVSIASLKTPVXXA

SEQ ID NO: 4273 - protein, 31 aa, Artificial Sequence
  Non-cyclic GFR-binding peptide
  MOD_RES (1), (1): Xaa is C or S
XSKVIMRHKRLIKPTKGIYYLISTASLDQSV

SEQ ID NO: 4274 - protein, 43 aa, Artificial Sequence
  Non-cyclic GFR-binding peptide
  MOD_RES (2), (39): Xaa is C or S
  MOD_RES (15), (16), (17), (18), (19): Xaa is A or G
  MOD_RES (20), (21), (22), (23): Xaa is A or G or is absent
KXALHDELTRYKKLXXXXXXXXXFYLVSIANLQVQTPRXQVNR

SEQ ID NO: 4275 - protein, 41 aa, Artificial Sequence
  Non-cyclic GFR-binding peptide
  MOD_RES (2), (4), (38), (39): Xaa is C or S
  MOD_RES (16), (17), (18), (19), (20): Xaa is A or G
  MOD_RES (21), (22), (23), (24): Xaa is A or G or is absent
HXGXSRVVMNYHYKLXXXXXXXXXKYLVSIPSLKTPAXXPK

SEQ ID NO: 4276 - protein, 37 aa, Artificial Sequence
  Non-cyclic GFR-binding peptide
  MOD_RES (1), (3), (35): Xaa is C or S
XGXSRVVMNQYNKLIVNSSDDLYLVSIASLKTPAXTP

SEQ ID NO: 4277 - protein, 36 aa, Artificial Sequence
  Non-cyclic GFR-binding peptide
  MOD_RES (1), (32), (33): Xaa is C or S
XSRVIMQYNKLVKPKRGVLYLISIASLAQPVXXPAA

SEQ ID NO: 4278 - protein, 34 aa, Artificial Sequence
  Non-cyclic GFR-binding peptide
  MOD_RES (31), (32): Xaa is C or S
KVVMNQYNKLIVNNSSDLYLVSIASLKTPAXXAK

SEQ ID NO: 4279 - protein, 33 aa, Artificial Sequence
  Non-cyclic GFR-binding peptide
  MOD_RES (1), (3): Xaa is C or S
XKXSKVIMRYKKLIKPTKGIFYLISIANLDQSV

SEQ ID NO: 4280 - protein, 41 aa, Artificial Sequence
  Non-cyclic GFR-binding peptide
  MOD_RES (2), (4), (41): Xaa is C or S
  MOD_RES (17), (18), (19), (20), (21): Xaa is A or G
  MOD_RES (22), (23), (24), (25): Xaa is A or G or is absent
EXKXALHDELTRHKRLXXXXXXXXXYYLVSTASLQVQTPRX

SEQ ID NO: 4281 - protein, 37 aa, Artificial Sequence
  Non-cyclic GFR-binding peptide
  MOD_RES (2), (34), (35): Xaa is C or S
GXARVVMNQYNKLIVNSSDDLYLVSIASLQTPAXXPK

SEQ ID NO: 4282 - protein, 39 aa, Artificial Sequence
  Non-cyclic GFR-binding peptide
  MOD_RES (1), (34), (35): Xaa is C or S
  MOD_RES (12), (13), (14), (15), (16): Xaa is A or G
  MOD_RES (17), (18), (19), (20): Xaa is A or G or is absent
XSKVVMRYKKLXXXXXXXXXFYLISIANLDQPVXXPSAS

SEQ ID NO: 4283 - protein, 37 aa, Artificial Sequence
  Non-cyclic GFR-binding peptide
  MOD_RES (1), (3), (37): Xaa is C or S
  MOD_RES (15), (16), (17), (18), (19): Xaa is A or G
  MOD_RES (20), (21), (22), (23): Xaa is A or G or is absent
XGXAKVVMNQYNKLXXXXXXXXXLYLVSIASLKTPAX

SEQ ID NO: 4284 - protein, 42 aa, Artificial Sequence
  Non-cyclic GFR-binding peptide
  MOD_RES (1), (3), (37), (38): Xaa is C or S
  MOD_RES (15), (16), (17), (18), (19): Xaa is A or G
  MOD_RES (20), (21), (22), (23): Xaa is A or G or is absent
XGXGEVVMDRYKKLXXXXXXXXXFYLMSIANLETPVXXAKPI

SEQ ID NO: 4285 - protein, 38 aa, Artificial Sequence
  Non-cyclic GFR-binding peptide
  MOD_RES (2), (4), (36), (37): Xaa is C or S
HXGXSRVVMNQYNKLIVNSSDDLYLVSIASLKTPAXXP

SEQ ID NO: 4286 - protein, 35 aa, Artificial Sequence
  Non-cyclic GFR-binding peptide
  MOD_RES (32), (33): Xaa is C or S
SRVVMNYHYKLIVNSSDDKYLVSIPSLKTPAXXPK

SEQ ID NO: 4287 - protein, 38 aa, Artificial Sequence
  Non-cyclic GFR-binding peptide
  MOD_RES (33), (33): Xaa is C or S
  MOD_RES (11), (12), (13), (14), (15): Xaa is A or G
  MOD_RES (16), (17), (18), (19): Xaa is A or G or is absent
RVVMNYHYKLXXXXXXXXXKYLVSIPSLKTPAXTPKTV

SEQ ID NO: 4288 - protein, 34 aa, Artificial Sequence
  Non-cyclic GFR-binding peptide
  MOD_RES (2), (2): Xaa is C or S
GXEAVSMGEQYNKLTPVGMDDLYLVSIASLKTPV

SEQ ID NO: 4289 - protein, 41 aa, Artificial Sequence
  Non-cyclic GFR-binding peptide
  MOD_RES (2), (4), (36), (37): Xaa is C or S
HXGXAKVVMNRYKKLIVNNSSDFYLVSIANLKTPAXXAKPV

SEQ ID NO: 4290 - protein, 33 aa, Artificial Sequence
  Non-cyclic GFR-binding peptide
  MOD_RES (2), (2): Xaa is C or S
GXGEVVMDYHYKLVVKENEDKYLMSIPSLETPV

SEQ ID NO: 4291 - protein, 38 aa, Artificial Sequence
  Non-cyclic GFR-binding peptide
  MOD_RES (1), (3), (34), (35): Xaa is C or S
XKXSKVVMRYKKLVKPTRGVFYLISIANLDQPVXXPSA

SEQ ID NO: 4292 - protein, 39 aa, Artificial Sequence
  Non-cyclic GFR-binding peptide
  MOD_RES (34), (35): Xaa is C or S
  MOD_RES (12), (13), (14), (15), (16): Xaa is A or G
  MOD_RES (17), (18), (19), (20): Xaa is A or G or is absent
ARVVMNRHKRLXXXXXXXXXYYLVSTASLQTPAXXPKPV

SEQ ID NO: 4293 - protein, 39 aa, Artificial Sequence
  Non-cyclic GFR-binding peptide
  MOD_RES (2), (35), (36): Xaa is C or S
  MOD_RES (13), (14), (15), (16), (17): Xaa is A or G
  MOD_RES (18), (19), (20), (21): Xaa is A or G or is absent
KXSKVIMRYKKLXXXXXXXXXFYLISIANLDQSVXXPSA

SEQ ID NO: 4294 - protein, 40 aa, Artificial Sequence
  Non-cyclic GFR-binding peptide
  MOD_RES (1), (3), (35), (36): Xaa is C or S
XGXGEVVMEYHYKLVVKDYEDKYLMSIPSLETPVXXAKPI

SEQ ID NO: 4295 - protein, 38 aa, Artificial Sequence
  Non-cyclic GFR-binding peptide
  MOD_RES (1), (34), (35): Xaa is C or S
  MOD_RES (12), (13), (14), (15), (16): Xaa is A or G
  MOD_RES (17), (18), (19), (20): Xaa is A or G or is absent
XSKVVMQYNKLXXXXXXXXXLYLISIASLDQPVXXPSA

SEQ ID NO: 4296 - protein, 36 aa, Artificial Sequence
  Non-cyclic GFR-binding peptide
  MOD_RES (1), (33), (34): Xaa is C or S
XSRVVMNRHKRLIVNSSDDYYLVSTASLKTPAXXPK

SEQ ID NO: 4297 - protein, 43 aa, Artificial Sequence
  Non-cyclic GFR-binding peptide
  MOD_RES (1), (3), (40): Xaa is C or S
XKXALHDELTQYNKLFIPKKRVIELYLVSIASLQVQTPRXQVN

SEQ ID NO: 4298 - protein, 41 aa, Artificial Sequence
  Non-cyclic GFR-binding peptide
  MOD_RES (2), (4), (37), (38): Xaa is C or S
  MOD_RES (15), (16), (17), (18), (19): Xaa is A or G
  MOD_RES (20), (21), (22), (23): Xaa is A or G or is absent
SXKXSKVIMRHKRLXXXXXXXXXYYLISTASLDQSVXXPSA

SEQ ID NO: 4299 - protein, 38 aa, Artificial Sequence
  Non-cyclic GFR-binding peptide
  MOD_RES (1), (3), (34), (35): Xaa is C or S
XKXSKVIMRYKKLIKPTKGIFYLISIANLDQSVXXPSA

SEQ ID NO: 4300 - protein, 37 aa, Artificial Sequence
  Non-cyclic GFR-binding peptide
  MOD_RES (2), (33), (34): Xaa is C or S
KXSRVIMRHKRLVKPKRGVYYLISTASLAQPVXXPAA

SEQ ID NO: 4301 - protein, 37 aa, Artificial Sequence
  Non-cyclic GFR-binding peptide
  MOD_RES (32), (32): Xaa is C or S
SRVVMNYHYKLIVNSSDDKYLVSIPSLKTPAXTPKTV

SEQ ID NO: 4302 - protein, 39 aa, Artificial Sequence
  Non-cyclic GFR-binding peptide
  MOD_RES (1), (3), (34), (35): Xaa is C or S
XKXSKVVMRHKRLVKPTRGVYYLISTASLDQPVXXPSAS

SEQ ID NO: 4303 - protein, 37 aa, Artificial Sequence
  Non-cyclic GFR-binding peptide
  MOD_RES (1), (3), (35): Xaa is C or S
XGXSRVVMNYHYKLIVNSSDDKYLVSIPSLKTPAXTP

SEQ ID NO: 4304 - protein, 31 aa, Artificial Sequence
  Non-cyclic GFR-binding peptide
  MOD_RES (1), (1): Xaa is C or S
XSKVVMYHYKLVKPTRGVKYLISIPSLDQPV

SEQ ID NO: 4305 - protein, 38 aa, Artificial Sequence
  Non-cyclic GFR-binding peptide
  MOD_RES (1), (34), (35): Xaa is C or S
  MOD_RES (12), (13), (14), (15), (16): Xaa is A or G
  MOD_RES (17), (18), (19), (20): Xaa is A or G or is absent
XSKVVMRHKRLXXXXXXXXXYYLISTASLDQPVXXPSA

SEQ ID NO: 4306 - protein, 32 aa, Artificial Sequence
  Non-cyclic GFR-binding peptide
  MOD_RES (32), (32): Xaa is C or S
GEVVMDRHKRLVVKENEDYYLMSTASLETPVX

SEQ ID NO: 4307 - protein, 34 aa, Artificial Sequence
  Non-cyclic GFR-binding peptide
  MOD_RES (34), (34): Xaa is C or S
  MOD_RES (12), (13), (14), (15), (16): Xaa is A or G
  MOD_RES (17), (18), (19), (20): Xaa is A or G or is absent
GEVVMERYKKLXXXXXXXXXFYLMSIANLETPVX

SEQ ID NO: 4308 - protein, 39 aa, Artificial Sequence
  Non-cyclic GFR-binding peptide
  MOD_RES (2), (37), (38): Xaa is C or S
  MOD_RES (15), (16), (17), (18), (19): Xaa is A or G
  MOD_RES (20), (21), (22), (23): Xaa is A or G or is absent
GXEAVSMGERYKKLXXXXXXXXXFYLVSIANLKTPVXXA

SEQ ID NO: 4309 - protein, 38 aa, Artificial Sequence
  Non-cyclic GFR-binding peptide
  MOD_RES (1), (38): Xaa is C or S
  MOD_RES (14), (15), (16), (17), (18): Xaa is A or G
  MOD_RES (19), (20), (21), (22): Xaa is A or G or is absent
XALHDELTYHYKLXXXXXXXXXKYLVSIPSLQVQTPRX

SEQ ID NO: 4310 - protein, 43 aa, Artificial Sequence
  Non-cyclic GFR-binding peptide
  MOD_RES (2), (4), (38): Xaa is C or S
  MOD_RES (16), (17), (18), (19), (20): Xaa is A or G
  MOD_RES (21), (22), (23), (24): Xaa is A or G or is absent
HXGXSRVVMNYHYKLXXXXXXXXXKYLVSIPSLKTPAXTPKTV

SEQ ID NO: 4311 - protein, 31 aa, Artificial Sequence
  Non-cyclic GFR-binding peptide
GEVVMDRYKKLVVKENEDFYLMSIANLETPV

SEQ ID NO: 4312 - protein, 38 aa, Artificial Sequence
  Non-cyclic GFR-binding peptide
  MOD_RES (2), (36), (37): Xaa is C or S
  MOD_RES (14), (15), (16), (17), (18): Xaa is A or G
  MOD_RES (19), (20), (21), (22): Xaa is A or G or is absent
GXAKVVMNYHYKLXXXXXXXXXKYLVSIPSLKTPAXXA

SEQ ID NO: 4313 - protein, 40 aa, Artificial Sequence
  Non-cyclic GFR-binding peptide
  MOD_RES (34), (35): Xaa is C or S
  MOD_RES (12), (13), (14), (15), (16): Xaa is A or G
  MOD_RES (17), (18), (19), (20): Xaa is A or G or is absent
ARVVMNYHYKLXXXXXXXXXKYLVSIPSLQTPAXXPKPVT

SEQ ID NO: 4314 - protein, 40 aa, Artificial Sequence
  Non-cyclic GFR-binding peptide
  MOD_RES (1), (3), (35), (36): Xaa is C or S
XGXARVVMNQYNKLIVNSSDDLYLVSIASLQTPAXXPKPV

SEQ ID NO: 4315 - protein, 38 aa, Artificial Sequence
  Non-cyclic GFR-binding peptide
  MOD_RES (33), (34): Xaa is C or S
  MOD_RES (11), (12), (13), (14), (15): Xaa is A or G
  MOD_RES (16), (17), (18), (19): Xaa is A or G or is absent
SKVVMRYKKLXXXXXXXXXFYLISIANLDQPVXXPSAS

SEQ ID NO: 4316 - protein, 39 aa, Artificial Sequence
  Non-cyclic GFR-binding peptide
  MOD_RES (1), (3), (34), (35): Xaa is C or S
XKXSKVIMRHKRLIKPTKGIYYLISTASLDQSVXXPSAS

SEQ ID NO: 4317 - protein, 37 aa, Artificial Sequence
  Non-cyclic GFR-binding peptide
  MOD_RES (32), (33): Xaa is C or S
ARVVMNRHKRLIVNSSDDYYLVSTASLQTPAXXPKPV

SEQ ID NO: 4318 - protein, 37 aa, Artificial Sequence
  Non-cyclic GFR-binding peptide
  MOD_RES (2), (36), (37): Xaa is C or S
  MOD_RES (14), (15), (16), (17), (18): Xaa is A or G
  MOD_RES (19), (20), (21), (22): Xaa is A or G or is absent
GXARVVMNYHYKLXXXXXXXXXKYLVSIPSLQTPAXX

SEQ ID NO: 4319 - protein, 32 aa, Artificial Sequence
  Non-cyclic GFR-binding peptide
  MOD_RES (11), (12), (13), (14), (15): Xaa is A or G
  MOD_RES (16), (17), (18), (19): Xaa is A or G or is absent
EVVMERHKRLXXXXXXXXXYYLMSTASLETPV

SEQ ID NO: 4320 - protein, 33 aa, Artificial Sequence
  Non-cyclic GFR-binding peptide
  MOD_RES (1), (1): Xaa is C or S
  MOD_RES (12), (13), (14), (15), (16): Xaa is A or G
  MOD_RES (17), (18), (19), (20): Xaa is A or G or is absent
XSKVIMQYNKLXXXXXXXXXLYLISIASLDQSV

SEQ ID NO: 4321 - protein, 38 aa, Artificial Sequence
  Non-cyclic GFR-binding peptide
  MOD_RES (35), (35): Xaa is C or S
  MOD_RES (11), (12), (13), (14), (15): Xaa is A or G
  MOD_RES (16), (17), (18), (19): Xaa is A or G or is absent
HDELTRHKRLXXXXXXXXXYYLVSTASLQVQTPRXQVN

SEQ ID NO: 4322 - protein, 37 aa, Artificial Sequence
  Non-cyclic GFR-binding peptide
  MOD_RES (37), (37): Xaa is C or S
  MOD_RES (13), (14), (15), (16), (17): Xaa is A or G
  MOD_RES (18), (19), (20), (21): Xaa is A or G or is absent
ALHDELTRHKRLXXXXXXXXXYYLVSTASLQVQTPRX

SEQ ID NO: 4323 - protein, 40 aa, Artificial Sequence
  Non-cyclic GFR-binding peptide
  MOD_RES (2), (34), (35): Xaa is C or S
GXSRVVMNRHKRLIVNSSDDYYLVSTASLKTPAXXPKPVY

SEQ ID NO: 4324 - protein, 40 aa, Artificial Sequence
  Non-cyclic GFR-binding peptide
  MOD_RES (1), (3), (40): Xaa is C or S
XKXALHDELTRYKKLFIPKKRVIEFYLVSIANLQVQTPRX

SEQ ID NO: 4325 - protein, 37 aa, Artificial Sequence
  Non-cyclic GFR-binding peptide
  MOD_RES (1), (3), (34), (35): Xaa is C or S
XKXSRVIMRHKRLVKPKRGVYYLISTASLAQPVXXPA

SEQ ID NO: 4326 - protein, 36 aa, Artificial Sequence
  Non-cyclic GFR-binding peptide
  MOD_RES (2), (33), (34): Xaa is C or S
KXSKVIMRYKKLIKPTKGIFYLISIANLDQSVXXPS

SEQ ID NO: 4327 - protein, 42 aa, Artificial Sequence
  Non-cyclic GFR-binding peptide
  MOD_RES (1), (38): Xaa is C or S
XALHDELTRHKRLFIPKKRVIEYYLVSTASLQVQTPRXQVNR

SEQ ID NO: 4328 - protein, 36 aa, Artificial Sequence
  Non-cyclic GFR-binding peptide
  MOD_RES (2), (2): Xaa is C or S
KXALHDELTYHYKLFIPKKRVIEKYLVSIPSLQVQT

SEQ ID NO: 4329 - protein, 32 aa, Artificial Sequence
  Non-cyclic GFR-binding peptide
  MOD_RES (1), (32): Xaa is C or S
XSKVVMRYKKLVKPTRGVFYLISIANLDQPVX

SEQ ID NO: 4330 - protein, 36 aa, Artificial Sequence
  Non-cyclic GFR-binding peptide
  MOD_RES (2), (35), (36): Xaa is C or S
  MOD_RES (13), (14), (15), (16), (17): Xaa is A or G
  MOD_RES (18), (19), (20), (21): Xaa is A or G or is absent
KXSKVVMRYKKLXXXXXXXXXFYLISIANLDQPVXX

SEQ ID NO: 4331 - protein, 38 aa, Artificial Sequence
  Non-cyclic GFR-binding peptide
  MOD_RES (1), (3), (37), (38): Xaa is C or S
  MOD_RES (15), (16), (17), (18), (19): Xaa is A or G
  MOD_RES (20), (21), (22), (23): Xaa is A or G or is absent
XGXARVVMNRHKRLXXXXXXXXXYYLVSTASLQTPAXX

SEQ ID NO: 4332 - protein, 36 aa, Artificial Sequence
  Non-cyclic GFR-binding peptide
  MOD_RES (2), (36): Xaa is C or S
  MOD_RES (14), (15), (16), (17), (18): Xaa is A or G
  MOD_RES (19), (20), (21), (22): Xaa is A or G or is absent
GXSRVVMNYHYKLXXXXXXXXXKYLVSIPSLKTPAX

SEQ ID NO: 4333 - protein, 34 aa, Artificial Sequence
  Non-cyclic GFR-binding peptide
  MOD_RES (13), (14), (15), (16), (17): Xaa is A or G
  MOD_RES (18), (19), (20), (21): Xaa is A or G or is absent
ALHDELTYHYKLXXXXXXXXXKYLVSIPSLQVQT

SEQ ID NO: 4334 - protein, 41 aa, Artificial Sequence
  Non-cyclic GFR-binding peptide
  MOD_RES (2), (36), (37): Xaa is C or S
  MOD_RES (14), (15), (16), (17), (18): Xaa is A or G
  MOD_RES (19), (20), (21), (22): Xaa is A or G or is absent
GXAKVVMNYHYKLXXXXXXXXXKYLVSIPSLKTPAXXAKPV

SEQ ID NO: 4335 - protein, 34 aa, Artificial Sequence
  Non-cyclic GFR-binding peptide
  MOD_RES (33), (34): Xaa is C or S
  MOD_RES (11), (12), (13), (14), (15): Xaa is A or G
  MOD_RES (16), (17), (18), (19): Xaa is A or G or is absent
SRVIMRHKRLXXXXXXXXXYYLISTASLAQPVXX

SEQ ID NO: 4336 - protein, 36 aa, Artificial Sequence
  Non-cyclic GFR-binding peptide
  MOD_RES (1), (34), (35): Xaa is C or S
  MOD_RES (12), (13), (14), (15), (16): Xaa is A or G
  MOD_RES (17), (18), (19), (20): Xaa is A or G or is absent
XSRVIMQYNKLXXXXXXXXXLYLISIASLAQPVXXP

SEQ ID NO: 4337 - protein, 39 aa, Artificial Sequence
  Non-cyclic GFR-binding peptide
  MOD_RES (1), (33), (34): Xaa is C or S
XAKVVMNRYKKLIVNNSSDFYLVSIANLKTPAXXAKPVA

SEQ ID NO: 4338 - protein, 34 aa, Artificial Sequence
  Non-cyclic GFR-binding peptide
  MOD_RES (2), (33), (34): Xaa is C or S
KXSKVVMRYKKLVKPTRGVFYLISIANLDQPVXX

SEQ ID NO: 4339 - protein, 37 aa, Artificial Sequence
  Non-cyclic GFR-binding peptide
  MOD_RES (2), (36), (37): Xaa is C or S
  MOD_RES (14), (15), (16), (17), (18): Xaa is A or G
  MOD_RES (19), (20), (21), (22): Xaa is A or G or is absent
GXARVVMNQYNKLXXXXXXXXXLYLVSIASLQTPAXX

SEQ ID NO: 4340 - protein, 38 aa, Artificial Sequence
  Non-cyclic GFR-binding peptide
  MOD_RES (1), (33), (34): Xaa is C or S
XARVVMNQYNKLIVNSSDDLYLVSIASLQTPAXXPKPV

SEQ ID NO: 4341 - protein, 36 aa, Artificial Sequence
  Non-cyclic GFR-binding peptide
  MOD_RES (1), (34), (35): Xaa is C or S
  MOD_RES (12), (13), (14), (15), (16): Xaa is A or G
  MOD_RES (17), (18), (19), (20): Xaa is A or G or is absent
XSRVIMRHKRLXXXXXXXXXYYLISTASLAQPVXXP

SEQ ID NO: 4342 - protein, 40 aa, Artificial Sequence
  Non-cyclic GFR-binding peptide
  MOD_RES (2), (4), (38): Xaa is C or S
  MOD_RES (16), (17), (18), (19), (20): Xaa is A or G
  MOD_RES (21), (22), (23), (24): Xaa is A or G or is absent
HXGXSRVVMNRHKRLXXXXXXXXXYYLVSTASLKTPAXTP

SEQ ID NO: 4343 - protein, 36 aa, Artificial Sequence
  Non-cyclic GFR-binding peptide
  MOD_RES (1), (35), (36): Xaa is C or S
  MOD_RES (13), (14), (15), (16), (17): Xaa is A or G
  MOD_RES (18), (19), (20), (21): Xaa is A or G or is absent
XGEVVMERYKKLXXXXXXXXXFYLMSIANLETPVXX

SEQ ID NO: 4344 - protein, 39 aa, Artificial Sequence
  Non-cyclic GFR-binding peptide
  MOD_RES (2), (4), (36), (37): Xaa is C or S
HXGXAKVVMNQYNKLIVNNSSDLYLVSIASLKTPAXXAK

SEQ ID NO: 4345 - protein, 35 aa, Artificial Sequence
  Non-cyclic GFR-binding peptide
  MOD_RES (1), (3), (34), (35): Xaa is C or S
XKXSKVVMQYNKLVKPTRGVLYLISIASLDQPVXX

SEQ ID NO: 4346 - protein, 38 aa, Artificial Sequence
  Non-cyclic GFR-binding peptide
  MOD_RES (2), (4), (35), (36): Xaa is C or S
SXKXSRVIMRYKKLVKPKRGVFYLISIANLAQPVXXPA

SEQ ID NO: 4347 - protein, 34 aa, Artificial Sequence
  Non-cyclic GFR-binding peptide
  MOD_RES (1), (33), (34): Xaa is C or S
XAKVVMNRYKKLIVNNSSDFYLVSIANLKTPAXX

SEQ ID NO: 4348 - protein, 36 aa, Artificial Sequence
  Non-cyclic GFR-binding peptide
  MOD_RES (2), (2): Xaa is C or S
  MOD_RES (15), (16), (17), (18), (19): Xaa is A or G
  MOD_RES (20), (21), (22), (23): Xaa is A or G or is absent
KXALHDELTRYKKLXXXXXXXXXFYLVSIANLQVQT

SEQ ID NO: 4349 - protein, 39 aa, Artificial Sequence
  Non-cyclic GFR-binding peptide
  MOD_RES (1), (38): Xaa is C or S
  MOD_RES (14), (15), (16), (17), (18): Xaa is A or G
  MOD_RES (19), (20), (21), (22): Xaa is A or G or is absent
XALHDELTQYNKLXXXXXXXXXLYLVSIASLQVQTPRXQ

SEQ ID NO: 4350 - protein, 38 aa, Artificial Sequence
  Non-cyclic GFR-binding peptide
  MOD_RES (2), (37), (38): Xaa is C or S
  MOD_RES (15), (16), (17), (18), (19): Xaa is A or G
  MOD_RES (20), (21), (22), (23): Xaa is A or G or is absent
GXEAVSMGERYKKLXXXXXXXXXFYLVSIANLKTPVXX

SEQ ID NO: 4351 - protein, 44 aa, Artificial Sequence
  Non-cyclic GFR-binding peptide
  MOD_RES (2), (4), (38): Xaa is C or S
  MOD_RES (16), (17), (18), (19), (20): Xaa is A or G
  MOD_RES (21), (22), (23), (24): Xaa is A or G or is absent
HXGXSRVVMNQYNKLXXXXXXXXXLYLVSIASLKTPAXTPKTVH

SEQ ID NO: 4352 - protein, 38 aa, Artificial Sequence
  Non-cyclic GFR-binding peptide
  MOD_RES (37), (37): Xaa is C or S
  MOD_RES (13), (14), (15), (16), (17): Xaa is A or G
  MOD_RES (18), (19), (20), (21): Xaa is A or G or is absent
ALHDELTYHYKLXXXXXXXXXKYLVSIPSLQVQTPRXQ

SEQ ID NO: 4353 - protein, 36 aa, Artificial Sequence
  Non-cyclic GFR-binding peptide
  MOD_RES (1), (3), (35), (36): Xaa is C or S
XGXGEVVMDRYKKLVVKENEDFYLMSIANLETPVXX

SEQ ID NO: 4354 - protein, 41 aa, Artificial Sequence
  Non-cyclic GFR-binding peptide
  MOD_RES (1), (3), (37), (38): Xaa is C or S
  MOD_RES (15), (16), (17), (18), (19): Xaa is A or G
  MOD_RES (20), (21), (22), (23): Xaa is A or G or is absent
XGXGEVVMERYKKLXXXXXXXXXFYLMSIANLETPVXXAKP

SEQ ID NO: 4355 - protein, 40 aa, Artificial Sequence
  Non-cyclic GFR-binding peptide
  MOD_RES (37), (37): Xaa is C or S
  MOD_RES (13), (14), (15), (16), (17): Xaa is A or G
  MOD_RES (18), (19), (20), (21): Xaa is A or G or is absent
ALHDELTYHYKLXXXXXXXXXKYLVSIPSLQVQTPRXQVN

SEQ ID NO: 4356 - protein, 37 aa, Artificial Sequence
  Non-cyclic GFR-binding peptide
  MOD_RES (1), (32), (33): Xaa is C or S
XSRVIMRYKKLVKPKRGVFYLISIANLAQPVXXPAAS

SEQ ID NO: 4357 - protein, 33 aa, Artificial Sequence
  Non-cyclic GFR-binding peptide
  MOD_RES (33), (33): Xaa is C or S
  MOD_RES (11), (12), (13), (14), (15): Xaa is A or G
  MOD_RES (16), (17), (18), (19): Xaa is A or G or is absent
KVVMNRYKKLXXXXXXXXXFYLVSIANLKTPAX

SEQ ID NO: 4358 - protein, 34 aa, Artificial Sequence
  Non-cyclic GFR-binding peptide
  MOD_RES (33), (34): Xaa is C or S
  MOD_RES (11), (12), (13), (14), (15): Xaa is A or G
  MOD_RES (16), (17), (18), (19): Xaa is A or G or is absent
EVVMERHKRLXXXXXXXXXYYLMSTASLETPVXX

SEQ ID NO: 4359 - protein, 37 aa, Artificial Sequence
  Non-cyclic GFR-binding peptide
  MOD_RES (35), (35): Xaa is C or S
HDELTQYNKLFIPKKRVIELYLVSIASLQVQTPRXQV

SEQ ID NO: 4360 - protein, 41 aa, Artificial Sequence
  Non-cyclic GFR-binding peptide
  MOD_RES (2), (4), (38), (39): Xaa is C or S
  MOD_RES (16), (17), (18), (19), (20): Xaa is A or G
  MOD_RES (21), (22), (23), (24): Xaa is A or G or is absent
HXGXSRVVMNQYNKLXXXXXXXXXLYLVSIASLKTPAXXPK

SEQ ID NO: 4361 - protein, 43 aa, Artificial Sequence
  Non-cyclic GFR-binding peptide
  MOD_RES (2), (4), (37), (38): Xaa is C or S
  MOD_RES (15), (16), (17), (18), (19): Xaa is A or G
  MOD_RES (20), (21), (22), (23): Xaa is A or G or is absent
SXKXSKVVMRHKRLXXXXXXXXXYYLISTASLDQPVXXPSASA

SEQ ID NO: 4362 - protein, 37 aa, Artificial Sequence
  Non-cyclic GFR-binding peptide
  MOD_RES (35), (35): Xaa is C or S
HDELTRHKRLFIPKKRVIEYYLVSTASLQVQTPRXQV

SEQ ID NO: 4363 - protein, 39 aa, Artificial Sequence
  Non-cyclic GFR-binding peptide
  MOD_RES (1), (3), (35), (36): Xaa is C or S
XGXSRVVMNRHKRLIVNSSDDYYLVSTASLKTPAXXPKP

SEQ ID NO: 4364 - protein, 37 aa, Artificial Sequence
  Non-cyclic GFR-binding peptide
  MOD_RES (32), (33): Xaa is C or S
SRVVMNQYNKLIVNSSDDLYLVSIASLKTPAXXPKPV

SEQ ID NO: 4365 - protein, 33 aa, Artificial Sequence
  Non-cyclic GFR-binding peptide
  MOD_RES (1), (1): Xaa is C or S
  MOD_RES (12), (13), (14), (15), (16): Xaa is A or G
  MOD_RES (17), (18), (19), (20): Xaa is A or G or is absent
XSKVIMRHKRLXXXXXXXXXYYLISTASLDQSV

SEQ ID NO: 4366 - protein, 38 aa, Artificial Sequence
  Non-cyclic GFR-binding peptide
  MOD_RES (2), (4), (37), (38): Xaa is C or S
  MOD_RES (15), (16), (17), (18), (19): Xaa is A or G
  MOD_RES (20), (21), (22), (23): Xaa is A or G or is absent
SXKXSKVIMRYKKLXXXXXXXXXFYLISIANLDQSVXX

SEQ ID NO: 4367 - protein, 33 aa, Artificial Sequence
  Non-cyclic GFR-binding peptide
  MOD_RES (31), (32): Xaa is C or S
EVVMDYHYKLVVKENEDKYLMSIPSLETPVXXA

SEQ ID NO: 4368 - protein, 32 aa, Artificial Sequence
  Non-cyclic GFR-binding peptide
  MOD_RES (31), (32): Xaa is C or S
EVVMDRYKKLVVKENEDFYLMSIANLETPVXX

SEQ ID NO: 4369 - protein, 35 aa, Artificial Sequence
  Non-cyclic GFR-binding peptide
  MOD_RES (1), (3): Xaa is C or S
XGXEAVSMGERHKRLTPVGMDDYYLVSTASLKTPV

SEQ ID NO: 4370 - protein, 41 aa, Artificial Sequence
  Non-cyclic GFR-binding peptide
  MOD_RES (2), (36), (37): Xaa is C or S
  MOD_RES (14), (15), (16), (17), (18): Xaa is A or G
  MOD_RES (19), (20), (21), (22): Xaa is A or G or is absent
GXGEVVMEYHYKLXXXXXXXXXKYLMSIPSLETPVXXAKPI

SEQ ID NO: 4371 - protein, 40 aa, Artificial Sequence
  Non-cyclic GFR-binding peptide
  MOD_RES (1), (3), (40): Xaa is C or S
  MOD_RES (16), (17), (18), (19), (20): Xaa is A or G
  MOD_RES (21), (22), (23), (24): Xaa is A or G or is absent
XKXALHDELTRHKRLXXXXXXXXXYYLVSTASLQVQTPRX

SEQ ID NO: 4372 - protein, 37 aa, Artificial Sequence
  Non-cyclic GFR-binding peptide
  MOD_RES (1), (1): Xaa is C or S
XALHDELTRYKKLFIPKKRVIEFYLVSIANLQVQTPR

SEQ ID NO: 4373 - protein, 41 aa, Artificial Sequence
  Non-cyclic GFR-binding peptide
  MOD_RES (1), (3), (36), (37): Xaa is C or S
  MOD_RES (14), (15), (16), (17), (18): Xaa is A or G
  MOD_RES (19), (20), (21), (22): Xaa is A or G or is absent
XKXSKVIMRHKRLXXXXXXXXXYYLISTASLDQSVXXPSAS

SEQ ID NO: 4374 - protein, 40 aa, Artificial Sequence
  Non-cyclic GFR-binding peptide
  MOD_RES (1), (3), (34), (35): Xaa is C or S
XKXSKVVMYHYKLVKPTRGVKYLISIPSLDQPVXXPSASA

SEQ ID NO: 4375 - protein, 41 aa, Artificial Sequence
  Non-cyclic GFR-binding peptide
  MOD_RES (2), (4), (41): Xaa is C or S
EXKXALHDELTRYKKLFIPKKRVIEFYLVSIANLQVQTPRX

SEQ ID NO: 4376 - protein, 37 aa, Artificial Sequence
  Non-cyclic GFR-binding peptide
  MOD_RES (2), (36), (37): Xaa is C or S
  MOD_RES (14), (15), (16), (17), (18): Xaa is A or G
  MOD_RES (19), (20), (21), (22): Xaa is A or G or is absent
GXGEVVMDRHKRLXXXXXXXXXYYLMSTASLETPVXX

SEQ ID NO: 4377 - protein, 33 aa, Artificial Sequence
  Non-cyclic GFR-binding peptide
  MOD_RES (12), (13), (14), (15), (16): Xaa is A or G
  MOD_RES (17), (18), (19), (20): Xaa is A or G or is absent
LHDELTQYNKLXXXXXXXXXLYLVSIASLQVQT

SEQ ID NO: 4378 - protein, 39 aa, Artificial Sequence
  Non-cyclic GFR-binding peptide
  MOD_RES (1), (35), (36): Xaa is C or S
  MOD_RES (13), (14), (15), (16), (17): Xaa is A or G
  MOD_RES (18), (19), (20), (21): Xaa is A or G or is absent
XGEVVMDRHKRLXXXXXXXXXYYLMSTASLETPVXXAKP

SEQ ID NO: 4379 - protein, 34 aa, Artificial Sequence
  Non-cyclic GFR-binding peptide
  MOD_RES (33), (34): Xaa is C or S
  MOD_RES (11), (12), (13), (14), (15): Xaa is A or G
  MOD_RES (16), (17), (18), (19): Xaa is A or G or is absent
EVVMDYHYKLXXXXXXXXXKYLMSIPSLETPVXX

SEQ ID NO: 4380 - protein, 39 aa, Artificial Sequence
  Non-cyclic GFR-binding peptide
  MOD_RES (1), (3), (37), (38): Xaa is C or S
  MOD_RES (15), (16), (17), (18), (19): Xaa is A or G
  MOD_RES (20), (21), (22), (23): Xaa is A or G or is absent
XGXGEVVMDRYKKLXXXXXXXXXFYLMSIANLETPVXXA

SEQ ID NO: 4381 - protein, 37 aa, Artificial Sequence
  Non-cyclic GFR-binding peptide
  MOD_RES (31), (32): Xaa is C or S
SKVVMRYKKLVKPTRGVFYLISIANLDQPVXXPSASA

SEQ ID NO: 4382 - protein, 33 aa, Artificial Sequence
  Non-cyclic GFR-binding peptide
  MOD_RES (33), (33): Xaa is C or S
  MOD_RES (11), (12), (13), (14), (15): Xaa is A or G
  MOD_RES (16), (17), (18), (19): Xaa is A or G or is absent
RVVMNRHKRLXXXXXXXXXYYLVSTASLQTPAX

SEQ ID NO: 4383 - protein, 33 aa, Artificial Sequence
  Non-cyclic GFR-binding peptide
  MOD_RES (31), (32): Xaa is C or S
SKVIMRYKKLIKPTKGIFYLISIANLDQSVXXP

SEQ ID NO: 4384 - protein, 36 aa, Artificial Sequence
  Non-cyclic GFR-binding peptide
  MOD_RES (2), (4): Xaa is C or S
  MOD_RES (15), (16), (17), (18), (19): Xaa is A or G
  MOD_RES (20), (21), (22), (23): Xaa is A or G or is absent
SXKXSKVIMYHYKLXXXXXXXXXKYLISIPSLDQSV

SEQ ID NO: 4385 - protein, 37 aa, Artificial Sequence
  Non-cyclic GFR-binding peptide
  MOD_RES (1), (3), (35), (36): Xaa is C or S
XGXGEVVMERYKKLVVKDYEDFYLMSIANLETPVXXA

SEQ ID NO: 4386 - protein, 38 aa, Artificial Sequence
  Non-cyclic GFR-binding peptide
  MOD_RES (2), (2): Xaa is C or S
  MOD_RES (15), (16), (17), (18), (19): Xaa is A or G
  MOD_RES (20), (21), (22), (23): Xaa is A or G or is absent
KXALHDELTRYKKLXXXXXXXXXFYLVSIANLQVQTPR

SEQ ID NO: 4387 - protein, 34 aa, Artificial Sequence
  Non-cyclic GFR-binding peptide
  MOD_RES (31), (32): Xaa is C or S
EVVMDRYKKLVVKENEDFYLMSIANLETPVXXAK

SEQ ID NO: 4388 - protein, 37 aa, Artificial Sequence
  Non-cyclic GFR-binding peptide
  MOD_RES (1), (3), (37): Xaa is C or S
  MOD_RES (15), (16), (17), (18), (19): Xaa is A or G
  MOD_RES (20), (21), (22), (23): Xaa is A or G or is absent
XGXSRVVMNYHYKLXXXXXXXXXKYLVSIPSLKTPAX

SEQ ID NO: 4389 - protein, 38 aa, Artificial Sequence
  Non-cyclic GFR-binding peptide
  MOD_RES (1), (3), (35), (36): Xaa is C or S
XGXARVVMNRHKRLIVNSSDDYYLVSTASLQTPAXXPK

SEQ ID NO: 4390 - protein, 37 aa, Artificial Sequence
  Non-cyclic GFR-binding peptide
  MOD_RES (34), (35): Xaa is C or S
  MOD_RES (12), (13), (14), (15), (16): Xaa is A or G
  MOD_RES (17), (18), (19), (20): Xaa is A or G or is absent
AKVVMNYHYKLXXXXXXXXXKYLVSIPSLKTPAXXAK

SEQ ID NO: 4391 - protein, 39 aa, Artificial Sequence
  Non-cyclic GFR-binding peptide
  MOD_RES (35), (35): Xaa is C or S
HDELTQYNKLFIPKKRVIELYLVSIASLQVQTPRXQVNR

SEQ ID NO: 4392 - protein, 35 aa, Artificial Sequence
  Non-cyclic GFR-binding peptide
  MOD_RES (35), (35): Xaa is C or S
HDELTRHKRLFIPKKRVIEYYLVSTASLQVQTPRX

SEQ ID NO: 4393 - protein, 38 aa, Artificial Sequence
  Non-cyclic GFR-binding peptide
  MOD_RES (32), (33): Xaa is C or S
SRVVMNYHYKLIVNSSDDKYLVSIPSLKTPAXXPKPVY

SEQ ID NO: 4394 - protein, 39 aa, Artificial Sequence
  Non-cyclic GFR-binding peptide
  MOD_RES (2), (36): Xaa is C or S
  MOD_RES (14), (15), (16), (17), (18): Xaa is A or G
  MOD_RES (19), (20), (21), (22): Xaa is A or G or is absent
GXSRVVMNYHYKLXXXXXXXXXKYLVSIPSLKTPAXTPK

SEQ ID NO: 4395 - protein, 39 aa, Artificial Sequence
  Non-cyclic GFR-binding peptide
  MOD_RES (34), (35): Xaa is C or S
  MOD_RES (12), (13), (14), (15), (16): Xaa is A or G
  MOD_RES (17), (18), (19), (20): Xaa is A or G or is absent
GEVVMERHKRLXXXXXXXXXYYLMSTASLETPVXXAKPI

SEQ ID NO: 4396 - protein, 33 aa, Artificial Sequence
  Non-cyclic GFR-binding peptide
  MOD_RES (1), (3): Xaa is C or S
XKXSKVIMQYNKLIKPTKGILYLISIASLDQSV

SEQ ID NO: 4397 - protein, 40 aa, Artificial Sequence
  Non-cyclic GFR-binding peptide
  MOD_RES (1), (3), (37), (38): Xaa is C or S
  MOD_RES (15), (16), (17), (18), (19): Xaa is A or G
  MOD_RES (20), (21), (22), (23): Xaa is A or G or is absent
XGXARVVMNQYNKLXXXXXXXXXLYLVSIASLQTPAXXPK

SEQ ID NO: 4398 - protein, 37 aa, Artificial Sequence
  Non-cyclic GFR-binding peptide
  MOD_RES (34), (35): Xaa is C or S
  MOD_RES (12), (13), (14), (15), (16): Xaa is A or G
  MOD_RES (17), (18), (19), (20): Xaa is A or G or is absent
GEVVMEYHYKLXXXXXXXXXKYLMSIPSLETPVXXAK

SEQ ID NO: 4399 - protein, 39 aa, Artificial Sequence
  Non-cyclic GFR-binding peptide
  MOD_RES (1), (3), (34), (35): Xaa is C or S
XKXSRVIMQYNKLVKPKRGVLYLISIASLAQPVXXPAAS

SEQ ID NO: 4400 - protein, 37 aa, Artificial Sequence
  Non-cyclic GFR-binding peptide
  MOD_RES (1), (1): Xaa is C or S
  MOD_RES (14), (15), (16), (17), (18): Xaa is A or G
  MOD_RES (19), (20), (21), (22): Xaa is A or G or is absent
XALHDELTRHKRLXXXXXXXXXYYLVSTASLQVQTPR

SEQ ID NO: 4401 - protein, 33 aa, Artificial Sequence
  Non-cyclic GFR-binding peptide
  MOD_RES (1), (3): Xaa is C or S
XKXSKVIMYHYKLIKPTKGIKYLISIPSLDQSV

SEQ ID NO: 4402 - protein, 41 aa, Artificial Sequence
  Non-cyclic GFR-binding peptide
  MOD_RES (1), (3), (35), (36): Xaa is C or S
XGXSRVVMNRHKRLIVNSSDDYYLVSTASLKTPAXXPKPVY

SEQ ID NO: 4403 - protein, 40 aa, Artificial Sequence
  Non-cyclic GFR-binding peptide
  MOD_RES (2), (4), (35), (36): Xaa is C or S
SXKXSRVIMRYKKLVKPKRGVFYLISIANLAQPVXXPAAS

SEQ ID NO: 4404 - protein, 41 aa, Artificial Sequence
  Non-cyclic GFR-binding peptide
  MOD_RES (1), (3), (36), (37): Xaa is C or S
  MOD_RES (14), (15), (16), (17), (18): Xaa is A or G
  MOD_RES (19), (20), (21), (22): Xaa is A or G or is absent
XKXSRVIMRHKRLXXXXXXXXXYYLISTASLAQPVXXPAAS

SEQ ID NO: 4405 - protein, 35 aa, Artificial Sequence
  Non-cyclic GFR-binding peptide
  MOD_RES (32), (32): Xaa is C or S
SRVVMNYHYKLIVNSSDDKYLVSIPSLKTPAXTPK

SEQ ID NO: 4406 - protein, 36 aa, Artificial Sequence
  Non-cyclic GFR-binding peptide
  MOD_RES (2), (4): Xaa is C or S
RXGXEAVSMGERHKRLTPVGMDDYYLVSTASLKTPV

SEQ ID NO: 4407 - protein, 42 aa, Artificial Sequence
  Non-cyclic GFR-binding peptide
  MOD_RES (2), (4), (41): Xaa is C or S
  MOD_RES (17), (18), (19), (20), (21): Xaa is A or G
  MOD_RES (22), (23), (24), (25): Xaa is A or G or is absent
EXKXALHDELTRHKRLXXXXXXXXXYYLVSTASLQVQTPRXQ

SEQ ID NO: 4408 - protein, 41 aa, Artificial Sequence
  Non-cyclic GFR-binding peptide
  MOD_RES (2), (4), (38), (39): Xaa is C or S
  MOD_RES (16), (17), (18), (19), (20): Xaa is A or G
  MOD_RES (21), (22), (23), (24): Xaa is A or G or is absent
RXGXGEVVMDRHKRLXXXXXXXXXYYLMSTASLETPVXXAK

SEQ ID NO: 4409 - protein, 38 aa, Artificial Sequence
  Non-cyclic GFR-binding peptide
  MOD_RES (1), (33), (34): Xaa is C or S
XARVVMNRHKRLIVNSSDDYYLVSTASLQTPAXXPKPV

SEQ ID NO: 4410 - protein, 37 aa, Artificial Sequence
  Non-cyclic GFR-binding peptide
  MOD_RES (1), (36), (37): Xaa is C or S
  MOD_RES (14), (15), (16), (17), (18): Xaa is A or G
  MOD_RES (19), (20), (21), (22): Xaa is A or G or is absent
XEAVSMGERHKRLXXXXXXXXXYYLVSTASLKTPVXX

SEQ ID NO: 4411 - protein, 30 aa, Artificial Sequence
  Non-cyclic GFR-binding peptide
SKVVMRHKRLVKPTRGVYYLISTASLDQPV

SEQ ID NO: 4412 - protein, 36 aa, Artificial Sequence
  Non-cyclic GFR-binding peptide
  MOD_RES (34), (34): Xaa is C or S
  MOD_RES (12), (13), (14), (15), (16): Xaa is A or G
  MOD_RES (17), (18), (19), (20): Xaa is A or G or is absent
SRVVMNYHYKLXXXXXXXXXKYLVSIPSLKTPAXTP

SEQ ID NO: 4413 - protein, 35 aa, Artificial Sequence
  Non-cyclic GFR-binding peptide
  MOD_RES (1), (35): Xaa is C or S
  MOD_RES (13), (14), (15), (16), (17): Xaa is A or G
  MOD_RES (18), (19), (20), (21): Xaa is A or G or is absent
XGEVVMERYKKLXXXXXXXXXFYLMSIANLETPVX

SEQ ID NO: 4414 - protein, 35 aa, Artificial Sequence
  Non-cyclic GFR-binding peptide
  MOD_RES (1), (34), (35): Xaa is C or S
  MOD_RES (12), (13), (14), (15), (16): Xaa is A or G
  MOD_RES (17), (18), (19), (20): Xaa is A or G or is absent
XSRVIMYHYKLXXXXXXXXXKYLISIPSLAQPVXX

SEQ ID NO: 4415 - protein, 36 aa, Artificial Sequence
  Non-cyclic GFR-binding peptide
  MOD_RES (31), (32): Xaa is C or S
SKVIMRHKRLIKPTKGIYYLISTASLDQSVXXPSAS

SEQ ID NO: 4416 - protein, 42 aa, Artificial Sequence
  Non-cyclic GFR-binding peptide
  MOD_RES (2), (4), (36), (37): Xaa is C or S
RXGXGEVVMDYHYKLVVKENEDKYLMSIPSLETPVXXAKPIK

SEQ ID NO: 4417 - protein, 39 aa, Artificial Sequence
  Non-cyclic GFR-binding peptide
  MOD_RES (36), (36): Xaa is C or S
  MOD_RES (12), (13), (14), (15), (16): Xaa is A or G
  MOD_RES (17), (18), (19), (20): Xaa is A or G or is absent
LHDELTYHYKLXXXXXXXXXKYLVSIPSLQVQTPRXQVN

SEQ ID NO: 4418 - protein, 38 aa, Artificial Sequence
  Non-cyclic GFR-binding peptide
  MOD_RES (2), (33), (34): Xaa is C or S
KXSRVIMRHKRLVKPKRGVYYLISTASLAQPVXXPAAS

SEQ ID NO: 4419 - protein, 38 aa, Artificial Sequence
  Non-cyclic GFR-binding peptide
  MOD_RES (2), (33), (34): Xaa is C or S
KXSRVIMQYNKLVKPKRGVLYLISIASLAQPVXXPAAS

SEQ ID NO: 4420 - protein, 35 aa, Artificial Sequence
  Non-cyclic GFR-binding peptide
  MOD_RES (31), (31): Xaa is C or S
RVVMNRHKRLIVNSSDDYYLVSTASLKTPAXTPKT

SEQ ID NO: 4421 - protein, 36 aa, Artificial Sequence
  Non-cyclic GFR-binding peptide
  MOD_RES (31), (32): Xaa is C or S
SRVIMQYNKLVKPKRGVLYLISIASLAQPVXXPAAS

SEQ ID NO: 4422 - protein, 33 aa, Artificial Sequence
  Non-cyclic GFR-binding peptide
  MOD_RES (33), (33): Xaa is C or S
  MOD_RES (11), (12), (13), (14), (15): Xaa is A or G
  MOD_RES (16), (17), (18), (19): Xaa is A or G or is absent
RVVMNYHYKLXXXXXXXXXKYLVSIPSLQTPAX

SEQ ID NO: 4423 - protein, 40 aa, Artificial Sequence
  Non-cyclic GFR-binding peptide
  MOD_RES (2), (4): Xaa is C or S
  MOD_RES (17), (18), (19), (20), (21): Xaa is A or G
  MOD_RES (22), (23), (24), (25): Xaa is A or G or is absent
EXKXALHDELTYHYKLXXXXXXXXXKYLVSIPSLQVQTPR

SEQ ID NO: 4424 - protein, 33 aa, Artificial Sequence
  Non-cyclic GFR-binding peptide
  MOD_RES (1), (3): Xaa is C or S
XKXSRVIMYHYKLVKPKRGVKYLISIPSLAQPV

SEQ ID NO: 4425 - protein, 37 aa, Artificial Sequence
  Non-cyclic GFR-binding peptide
  MOD_RES (1), (3), (36), (37): Xaa is C or S
  MOD_RES (14), (15), (16), (17), (18): Xaa is A or G
  MOD_RES (19), (20), (21), (22): Xaa is A or G or is absent
XKXSKVVMRHKRLXXXXXXXXXYYLISTASLDQPVXX

SEQ ID NO: 4426 - protein, 34 aa, Artificial Sequence
  Non-cyclic GFR-binding peptide
  MOD_RES (31), (32): Xaa is C or S
RVVMNQYNKLIVNSSDDLYLVSIASLQTPAXXPK

SEQ ID NO: 4427 - protein, 39 aa, Artificial Sequence
  Non-cyclic GFR-binding peptide
  MOD_RES (1), (3), (37), (38): Xaa is C or S
  MOD_RES (15), (16), (17), (18), (19): Xaa is A or G
  MOD_RES (20), (21), (22), (23): Xaa is A or G or is absent
XGXSRVVMNYHYKLXXXXXXXXXKYLVSIPSLKTPAXXP

SEQ ID NO: 4428 - protein, 41 aa, Artificial Sequence
  Non-cyclic GFR-binding peptide
  MOD_RES (1), (3), (36), (37): Xaa is C or S
  MOD_RES (14), (15), (16), (17), (18): Xaa is A or G
  MOD_RES (19), (20), (21), (22): Xaa is A or G or is absent
XKXSKVVMYHYKLXXXXXXXXXKYLISIPSLDQPVXXPSAS

SEQ ID NO: 4429 - protein, 35 aa, Artificial Sequence
  Non-cyclic GFR-binding peptide
  MOD_RES (35), (35): Xaa is C or S
HDELTQYNKLFIPKKRVIELYLVSIASLQVQTPRX

SEQ ID NO: 4430 - protein, 41 aa, Artificial Sequence
  Non-cyclic GFR-binding peptide
  MOD_RES (2), (36), (37): Xaa is C or S
  MOD_RES (14), (15), (16), (17), (18): Xaa is A or G
  MOD_RES (19), (20), (21), (22): Xaa is A or G or is absent
GXARVVMNYHYKLXXXXXXXXXKYLVSIPSLQTPAXXPKPV

SEQ ID NO: 4431 - protein, 39 aa, Artificial Sequence
  Non-cyclic GFR-binding peptide
  MOD_RES (2), (4), (35), (36): Xaa is C or S
SXKXSKVIMYHYKLIKPTKGIKYLISIPSLDQSVXXPSA

SEQ ID NO: 4432 - protein, 33 aa, Artificial Sequence
  Non-cyclic GFR-binding peptide
  MOD_RES (1), (3): Xaa is C or S
XKXSRVIMRHKRLVKPKRGVYYLISTASLAQPV

SEQ ID NO: 4433 - protein, 37 aa, Artificial Sequence
  Non-cyclic GFR-binding peptide
  MOD_RES (1), (3), (35), (36): Xaa is C or S
XGXAKVVMNRYKKLIVNNSSDFYLVSIANLKTPAXXA

SEQ ID NO: 4434 - protein, 32 aa, Artificial Sequence
  Non-cyclic GFR-binding peptide
  MOD_RES (1), (1): Xaa is C or S
XARVVMNRHKRLIVNSSDDYYLVSTASLQTPA

SEQ ID NO: 4435 - protein, 40 aa, Artificial Sequence
  Non-cyclic GFR-binding peptide
  MOD_RES (2), (37), (38): Xaa is C or S
  MOD_RES (15), (16), (17), (18), (19): Xaa is A or G
  MOD_RES (20), (21), (22), (23): Xaa is A or G or is absent
GXEAVSMGERHKRLXXXXXXXXXYYLVSTASLKTPVXXAK

SEQ ID NO: 4436 - protein, 33 aa, Artificial Sequence
  Non-cyclic GFR-binding peptide
  MOD_RES (12), (13), (14), (15), (16): Xaa is A or G
  MOD_RES (17), (18), (19), (20): Xaa is A or G or is absent
GEVVMEYHYKLXXXXXXXXXKYLMSIPSLETPV

SEQ ID NO: 4437 - protein, 36 aa, Artificial Sequence
  Non-cyclic GFR-binding peptide
  MOD_RES (33), (34): Xaa is C or S
  MOD_RES (11), (12), (13), (14), (15): Xaa is A or G
  MOD_RES (16), (17), (18), (19): Xaa is A or G or is absent
SKVIMQYNKLXXXXXXXXXLYLISIASLDQSVXXPS

SEQ ID NO: 4438 - protein, 37 aa, Artificial Sequence
  Non-cyclic GFR-binding peptide
  MOD_RES (33), (34): Xaa is C or S
  MOD_RES (11), (12), (13), (14), (15): Xaa is A or G
  MOD_RES (16), (17), (18), (19): Xaa is A or G or is absent
RVVMNQYNKLXXXXXXXXXLYLVSIASLQTPAXXPKP

SEQ ID NO: 4439 - protein, 31 aa, Artificial Sequence
  Non-cyclic GFR-binding peptide
  MOD_RES (31), (31): Xaa is C or S
SKVVMRHKRLVKPTRGVYYLISTASLDQPVX

SEQ ID NO: 4440 - protein, 40 aa, Artificial Sequence
  Non-cyclic GFR-binding peptide
  MOD_RES (2), (4), (38): Xaa is C or S
  MOD_RES (16), (17), (18), (19), (20): Xaa is A or G
  MOD_RES (21), (22), (23), (24): Xaa is A or G or is absent
HXGXSRVVMNYHYKLXXXXXXXXXKYLVSIPSLKTPAXTP

SEQ ID NO: 4441 - protein, 37 aa, Artificial Sequence
  Non-cyclic GFR-binding peptide
  MOD_RES (1), (33), (34): Xaa is C or S
XAKVVMNYHYKLIVNNSSDKYLVSIPSLKTPAXXAKP

SEQ ID NO: 4442 - protein, 36 aa, Artificial Sequence
  Non-cyclic GFR-binding peptide
  MOD_RES (33), (34): Xaa is C or S
  MOD_RES (11), (12), (13), (14), (15): Xaa is A or G
  MOD_RES (16), (17), (18), (19): Xaa is A or G or is absent
RVVMNRHKRLXXXXXXXXXYYLVSTASLKTPAXXPK

SEQ ID NO: 4443 - protein, 40 aa, Artificial Sequence
  Non-cyclic GFR-binding peptide
  MOD_RES (1), (36), (37): Xaa is C or S
  MOD_RES (14), (15), (16), (17), (18): Xaa is A or G
  MOD_RES (19), (20), (21), (22): Xaa is A or G or is absent
XEAVSMGERYKKLXXXXXXXXXFYLVSIANLKTPVXXAKG

SEQ ID NO: 4444 - protein, 37 aa, Artificial Sequence
  Non-cyclic GFR-binding peptide
  MOD_RES (32), (33): Xaa is C or S
GEVVMDRYKKLVVKENEDFYLMSIANLETPVXXAKPI

SEQ ID NO: 4445 - protein, 39 aa, Artificial Sequence
  Non-cyclic GFR-binding peptide
  MOD_RES (2), (35), (36): Xaa is C or S
GXEAVSMGERYKKLTPVGMDDFYLVSIANLKTPVXXAKG

SEQ ID NO: 4446 - protein, 33 aa, Artificial Sequence
  Non-cyclic GFR-binding peptide
  MOD_RES (1), (32), (33): Xaa is C or S
XSKVIMRYKKLIKPTKGIFYLISIANLDQSVXX

SEQ ID NO: 4447 - protein, 37 aa, Artificial Sequence
  Non-cyclic GFR-binding peptide
  MOD_RES (31), (32): Xaa is C or S
EVVMDYHYKLVVKENEDKYLMSIPSLETPVXXAKPIK

SEQ ID NO: 4448 - protein, 39 aa, Artificial Sequence
  Non-cyclic GFR-binding peptide
  MOD_RES (35), (36): Xaa is C or S
  MOD_RES (13), (14), (15), (16), (17): Xaa is A or G
  MOD_RES (18), (19), (20), (21): Xaa is A or G or is absent
EAVSMGERHKRLXXXXXXXXXYYLVSTASLKTPVXXAKG

SEQ ID NO: 4449 - protein, 33 aa, Artificial Sequence
  Non-cyclic GFR-binding peptide
  MOD_RES (2), (33): Xaa is C or S
KXSRVIMQYNKLVKPKRGVLYLISIASLAQPVX

SEQ ID NO: 4450 - protein, 40 aa, Artificial Sequence
  Non-cyclic GFR-binding peptide
  MOD_RES (1), (3), (40): Xaa is C or S
  MOD_RES (16), (17), (18), (19), (20): Xaa is A or G
  MOD_RES (21), (22), (23), (24): Xaa is A or G or is absent
XKXALHDELTYHYKLXXXXXXXXXKYLVSIPSLQVQTPRX

SEQ ID NO: 4451 - protein, 39 aa, Artificial Sequence
  Non-cyclic GFR-binding peptide
  MOD_RES (2), (4), (37), (38): Xaa is C or S
  MOD_RES (15), (16), (17), (18), (19): Xaa is A or G
  MOD_RES (20), (21), (22), (23): Xaa is A or G or is absent
SXKXSRVIMRHKRLXXXXXXXXXYYLISTASLAQPVXXP

SEQ ID NO: 4452 - protein, 35 aa, Artificial Sequence
  Non-cyclic GFR-binding peptide
  MOD_RES (1), (3), (34), (35): Xaa is C or S
XKXSKVVMYHYKLVKPTRGVKYLISIPSLDQPVXX

SEQ ID NO: 4453 - protein, 41 aa, Artificial Sequence
  Non-cyclic GFR-binding peptide
  MOD_RES (2), (4), (36), (37): Xaa is C or S
HXGXAKVVMNQYNKLIVNNSSDLYLVSIASLKTPAXXAKPV

SEQ ID NO: 4454 - protein, 38 aa, Artificial Sequence
  Non-cyclic GFR-binding peptide
  MOD_RES (2), (4), (37), (38): Xaa is C or S
  MOD_RES (15), (16), (17), (18), (19): Xaa is A or G
  MOD_RES (20), (21), (22), (23): Xaa is A or G or is absent
SXKXSKVVMRYKKLXXXXXXXXXFYLISIANLDQPVXX

SEQ ID NO: 4455 - protein, 39 aa, Artificial Sequence
  Non-cyclic GFR-binding peptide
  MOD_RES (1), (33), (34): Xaa is C or S
XARVVMNQYNKLIVNSSDDLYLVSIASLQTPAXXPKPVT

SEQ ID NO: 4456 - protein, 36 aa, Artificial Sequence
  Non-cyclic GFR-binding peptide
  MOD_RES (31), (32): Xaa is C or S
SKVVMQYNKLVKPTRGVLYLISIASLDQPVXXPSAS

SEQ ID NO: 4457 - protein, 36 aa, Artificial Sequence
  Non-cyclic GFR-binding peptide
  MOD_RES (35), (35): Xaa is C or S
  MOD_RES (11), (12), (13), (14), (15): Xaa is A or G
  MOD_RES (16), (17), (18), (19): Xaa is A or G or is absent
HDELTYHYKLXXXXXXXXXKYLVSIPSLQVQTPRXQ

SEQ ID NO: 4458 - protein, 37 aa, Artificial Sequence
  Non-cyclic GFR-binding peptide
  MOD_RES (31), (32): Xaa is C or S
SRVIMQYNKLVKPKRGVLYLISIASLAQPVXXPAASA

SEQ ID NO: 4459 - protein, 36 aa, Artificial Sequence
  Non-cyclic GFR-binding peptide
  MOD_RES (1), (32), (33): Xaa is C or S
XSRVIMRHKRLVKPKRGVYYLISTASLAQPVXXPAA

SEQ ID NO: 4460 - protein, 41 aa, Artificial Sequence
  Non-cyclic GFR-binding peptide
  MOD_RES (2), (4), (41): Xaa is C or S
  MOD_RES (17), (18), (19), (20), (21): Xaa is A or G
  MOD_RES (22), (23), (24), (25): Xaa is A or G or is absent
EXKXALHDELTRYKKLXXXXXXXXXFYLVSIANLQVQTPRX

SEQ ID NO: 4461 - protein, 37 aa, Artificial Sequence
  Non-cyclic GFR-binding peptide
  MOD_RES (33), (34): Xaa is C or S
  MOD_RES (11), (12), (13), (14), (15): Xaa is A or G
  MOD_RES (16), (17), (18), (19): Xaa is A or G or is absent
SRVIMQYNKLXXXXXXXXXLYLISIASLAQPVXXPAA

SEQ ID NO: 4462 - protein, 43 aa, Artificial Sequence
  Non-cyclic GFR-binding peptide
  MOD_RES (2), (4), (41): Xaa is C or S
EXKXALHDELTRHKRLFIPKKRVIEYYLVSTASLQVQTPRXQV

SEQ ID NO: 4463 - protein, 38 aa, Artificial Sequence
  Non-cyclic GFR-binding peptide
  MOD_RES (2), (4), (36), (37): Xaa is C or S
RXGXGEVVMEYHYKLVVKDYEDKYLMSIPSLETPVXXA

SEQ ID NO: 4464 - protein, 36 aa, Artificial Sequence
  Non-cyclic GFR-binding peptide
  MOD_RES (33), (34): Xaa is C or S
  MOD_RES (11), (12), (13), (14), (15): Xaa is A or G
  MOD_RES (16), (17), (18), (19): Xaa is A or G or is absent
KVVMNYHYKLXXXXXXXXXKYLVSIPSLKTPAXXAK

SEQ ID NO: 4465 - protein, 37 aa, Artificial Sequence
  Non-cyclic GFR-binding peptide
  MOD_RES (1), (35), (36): Xaa is C or S
  MOD_RES (13), (14), (15), (16), (17): Xaa is A or G
  MOD_RES (18), (19), (20), (21): Xaa is A or G or is absent
XAKVVMNQYNKLXXXXXXXXXLYLVSIASLKTPAXXA

SEQ ID NO: 4466 - protein, 39 aa, Artificial Sequence
  Non-cyclic GFR-binding peptide
  MOD_RES (2), (4), (35), (36): Xaa is C or S
SXKXSKVVMQYNKLVKPTRGVLYLISIASLDQPVXXPSA

SEQ ID NO: 4467 - protein, 41 aa, Artificial Sequence
  Non-cyclic GFR-binding peptide
  MOD_RES (2), (4), (41): Xaa is C or S
  MOD_RES (17), (18), (19), (20), (21): Xaa is A or G
  MOD_RES (22), (23), (24), (25): Xaa is A or G or is absent
EXKXALHDELTYHYKLXXXXXXXXXKYLVSIPSLQVQTPRX

SEQ ID NO: 4468 - protein, 44 aa, Artificial Sequence
  Non-cyclic GFR-binding peptide
  MOD_RES (2), (4), (41): Xaa is C or S
  MOD_RES (17), (18), (19), (20), (21): Xaa is A or G
  MOD_RES (22), (23), (24), (25): Xaa is A or G or is absent
EXKXALHDELTRYKKLXXXXXXXXXFYLVSIANLQVQTPRXQVN

SEQ ID NO: 4469 - protein, 32 aa, Artificial Sequence
  Non-cyclic GFR-binding peptide
  MOD_RES (32), (32): Xaa is C or S
GEVVMDRYKKLVVKENEDFYLMSIANLETPVX

SEQ ID NO: 4470 - protein, 39 aa, Artificial Sequence
  Non-cyclic GFR-binding peptide
  MOD_RES (35), (36): Xaa is C or S
  MOD_RES (13), (14), (15), (16), (17): Xaa is A or G
  MOD_RES (18), (19), (20), (21): Xaa is A or G or is absent
EAVSMGEQYNKLXXXXXXXXXLYLVSIASLKTPVXXAKG

SEQ ID NO: 4471 - protein, 37 aa, Artificial Sequence
  Non-cyclic GFR-binding peptide
  MOD_RES (1), (3), (35), (36): Xaa is C or S
XGXSRVVMNQYNKLIVNSSDDLYLVSIASLKTPAXXP

SEQ ID NO: 4472 - protein, 36 aa, Artificial Sequence
  Non-cyclic GFR-binding peptide
  MOD_RES (33), (33): Xaa is C or S
  MOD_RES (11), (12), (13), (14), (15): Xaa is A or G
  MOD_RES (16), (17), (18), (19): Xaa is A or G or is absent
RVVMNYHYKLXXXXXXXXXKYLVSIPSLKTPAXTPK

SEQ ID NO: 4473 - protein, 38 aa, Artificial Sequence
  Non-cyclic GFR-binding peptide
  MOD_RES (2), (34), (35): Xaa is C or S
GXAKVVMNQYNKLIVNNSSDLYLVSIASLKTPAXXAKP

SEQ ID NO: 4474 - protein, 37 aa, Artificial Sequence
  Non-cyclic GFR-binding peptide
  MOD_RES (33), (34): Xaa is C or S
  MOD_RES (11), (12), (13), (14), (15): Xaa is A or G
  MOD_RES (16), (17), (18), (19): Xaa is A or G or is absent
SKVIMQYNKLXXXXXXXXXLYLISIASLDQSVXXPSA

SEQ ID NO: 4475 - protein, 36 aa, Artificial Sequence
  Non-cyclic GFR-binding peptide
  MOD_RES (33), (34): Xaa is C or S
  MOD_RES (11), (12), (13), (14), (15): Xaa is A or G
  MOD_RES (16), (17), (18), (19): Xaa is A or G or is absent
SRVIMYHYKLXXXXXXXXXKYLISIPSLAQPVXXPA

SEQ ID NO: 4476 - protein, 41 aa, Artificial Sequence
  Non-cyclic GFR-binding peptide
  MOD_RES (1), (35), (36): Xaa is C or S
  MOD_RES (13), (14), (15), (16), (17): Xaa is A or G
  MOD_RES (18), (19), (20), (21): Xaa is A or G or is absent
XGEVVMERYKKLXXXXXXXXXFYLMSIANLETPVXXAKPIS

SEQ ID NO: 4477 - protein, 32 aa, Artificial Sequence
  Non-cyclic GFR-binding peptide
  MOD_RES (32), (32): Xaa is C or S
GEVVMERYKKLVVKDYEDFYLMSIANLETPVX

SEQ ID NO: 4478 - protein, 38 aa, Artificial Sequence
  Non-cyclic GFR-binding peptide
  MOD_RES (2), (36), (37): Xaa is C or S
  MOD_RES (14), (15), (16), (17), (18): Xaa is A or G
  MOD_RES (19), (20), (21), (22): Xaa is A or G or is absent
GXGEVVMDRHKRLXXXXXXXXXYYLMSTASLETPVXXA

SEQ ID NO: 4479 - protein, 40 aa, Artificial Sequence
  Non-cyclic GFR-binding peptide
  MOD_RES (2), (35), (36): Xaa is C or S
  MOD_RES (13), (14), (15), (16), (17): Xaa is A or G
  MOD_RES (18), (19), (20), (21): Xaa is A or G or is absent
KXSKVIMQYNKLXXXXXXXXXLYLISIASLDQSVXXPSAS

SEQ ID NO: 4480 - protein, 36 aa, Artificial Sequence
  Non-cyclic GFR-binding peptide
  MOD_RES (1), (3), (34), (35): Xaa is C or S
XKXSKVIMQYNKLIKPTKGILYLISIASLDQSVXXP

SEQ ID NO: 4481 - protein, 39 aa, Artificial Sequence
  Non-cyclic GFR-binding peptide
  MOD_RES (1), (35), (36): Xaa is C or S
  MOD_RES (13), (14), (15), (16), (17): Xaa is A or G
  MOD_RES (18), (19), (20), (21): Xaa is A or G or is absent
XGEVVMEYHYKLXXXXXXXXXKYLMSIPSLETPVXXAKP

SEQ ID NO: 4482 - protein, 37 aa, Artificial Sequence
  Non-cyclic GFR-binding peptide
  MOD_RES (2), (4): Xaa is C or S
  MOD_RES (16), (17), (18), (19), (20): Xaa is A or G
  MOD_RES (21), (22), (23), (24): Xaa is A or G or is absent
RXGXGEVVMERYKKLXXXXXXXXXFYLMSIANLETPV

SEQ ID NO: 4483 - protein, 36 aa, Artificial Sequence
  Non-cyclic GFR-binding peptide
  MOD_RES (1), (3), (34), (35): Xaa is C or S
XKXSRVIMQYNKLVKPKRGVLYLISIASLAQPVXXP

SEQ ID NO: 4484 - protein, 36 aa, Artificial Sequence
  Non-cyclic GFR-binding peptide
  MOD_RES (1), (3), (36): Xaa is C or S
XGXEAVSMGERYKKLTPVGMDDFYLVSIANLKTPVX

SEQ ID NO: 4485 - protein, 40 aa, Artificial Sequence
  Non-cyclic GFR-binding peptide
  MOD_RES (2), (34), (35): Xaa is C or S
GXGEVVMERYKKLVVKDYEDFYLMSIANLETPVXXAKPIS

SEQ ID NO: 4486 - protein, 37 aa, Artificial Sequence
  Non-cyclic GFR-binding peptide
  MOD_RES (2), (36), (37): Xaa is C or S
  MOD_RES (14), (15), (16), (17), (18): Xaa is A or G
  MOD_RES (19), (20), (21), (22): Xaa is A or G or is absent
GXAKVVMNQYNKLXXXXXXXXXLYLVSIASLKTPAXX

SEQ ID NO: 4487 - protein, 34 aa, Artificial Sequence
  Non-cyclic GFR-binding peptide
  MOD_RES (31), (32): Xaa is C or S
RVVMNYHYKLIVNSSDDKYLVSIPSLQTPAXXPK

SEQ ID NO: 4488 - protein, 35 aa, Artificial Sequence
  Non-cyclic GFR-binding peptide
  MOD_RES (2), (33), (34): Xaa is C or S
KXSKVIMRHKRLIKPTKGIYYLISTASLDQSVXXP

SEQ ID NO: 4489 - protein, 35 aa, Artificial Sequence
  Non-cyclic GFR-binding peptide
  MOD_RES (1), (3): Xaa is C or S
  MOD_RES (14), (15), (16), (17), (18): Xaa is A or G
  MOD_RES (19), (20), (21), (22): Xaa is A or G or is absent
XKXSRVIMRYKKLXXXXXXXXXFYLISIANLAQPV

SEQ ID NO: 4490 - protein, 41 aa, Artificial Sequence
  Non-cyclic GFR-binding peptide
  MOD_RES (1), (3), (35), (36): Xaa is C or S
XGXGEVVMERYKKLVVKDYEDFYLMSIANLETPVXXAKPIS

SEQ ID NO: 4491 - protein, 36 aa, Artificial Sequence
  Non-cyclic GFR-binding peptide
  MOD_RES (31), (32): Xaa is C or S
SKVVMYHYKLVKPTRGVKYLISIPSLDQPVXXPSAS

SEQ ID NO: 4492 - protein, 40 aa, Artificial Sequence
  Non-cyclic GFR-binding peptide
  MOD_RES (2), (4), (36), (37): Xaa is C or S
HXGXAKVVMNRYKKLIVNNSSDFYLVSIANLKTPAXXAKP

SEQ ID NO: 4493 - protein, 37 aa, Artificial Sequence
  Non-cyclic GFR-binding peptide
  MOD_RES (1), (32), (33): Xaa is C or S
XSRVIMQYNKLVKPKRGVLYLISIASLAQPVXXPAAS

SEQ ID NO: 4494 - protein, 37 aa, Artificial Sequence
  Non-cyclic GFR-binding peptide
  MOD_RES (2), (4), (35), (36): Xaa is C or S
SXKXSKVIMQYNKLIKPTKGILYLISIASLDQSVXXP

SEQ ID NO: 4495 - protein, 31 aa, Artificial Sequence
  Non-cyclic GFR-binding peptide
  MOD_RES (31), (31): Xaa is C or S
SKVIMQYNKLIKPTKGILYLISIASLDQSVX

SEQ ID NO: 4496 - protein, 44 aa, Artificial Sequence
  Non-cyclic GFR-binding peptide
  MOD_RES (2), (4), (39), (40): Xaa is C or S
  MOD_RES (17), (18), (19), (20), (21): Xaa is A or G
  MOD_RES (22), (23), (24), (25): Xaa is A or G or is absent
RXGXEAVSMGERHKRLXXXXXXXXXYYLVSTASLKTPVXXAKGV

SEQ ID NO: 4497 - protein, 40 aa, Artificial Sequence
  Non-cyclic GFR-binding peptide
  MOD_RES (2), (4), (39), (40): Xaa is C or S
  MOD_RES (17), (18), (19), (20), (21): Xaa is A or G
  MOD_RES (22), (23), (24), (25): Xaa is A or G or is absent
RXGXEAVSMGERHKRLXXXXXXXXXYYLVSTASLKTPVXX

SEQ ID NO: 4498 - protein, 44 aa, Artificial Sequence
  Non-cyclic GFR-binding peptide
  MOD_RES (2), (4), (41): Xaa is C or S
  MOD_RES (17), (18), (19), (20), (21): Xaa is A or G
  MOD_RES (22), (23), (24), (25): Xaa is A or G or is absent
EXKXALHDELTYHYKLXXXXXXXXXKYLVSIPSLQVQTPRXQVN

SEQ ID NO: 4499 - protein, 39 aa, Artificial Sequence
  Non-cyclic GFR-binding peptide
  MOD_RES (2), (4), (36), (37): Xaa is C or S
RXGXGEVVMERYKKLVVKDYEDFYLMSIANLETPVXXAK

SEQ ID NO: 4500 - protein, 34 aa, Artificial Sequence
  Non-cyclic GFR-binding peptide
  MOD_RES (2), (34): Xaa is C or S
GXSRVVMNQYNKLIVNSSDDLYLVSIASLKTPAX

SEQ ID NO: 4501 - protein, 34 aa, Artificial Sequence
  Non-cyclic GFR-binding peptide
  MOD_RES (32), (33): Xaa is C or S
GEVVMEYHYKLVVKDYEDKYLMSIPSLETPVXXA

SEQ ID NO: 4502 - protein, 37 aa, Artificial Sequence
  Non-cyclic GFR-binding peptide
  MOD_RES (1), (3), (37): Xaa is C or S
  MOD_RES (15), (16), (17), (18), (19): Xaa is A or G
  MOD_RES (20), (21), (22), (23): Xaa is A or G or is absent
XGXAKVVMNYHYKLXXXXXXXXXKYLVSIPSLKTPAX

SEQ ID NO: 4503 - protein, 42 aa, Artificial Sequence
  Non-cyclic GFR-binding peptide
  MOD_RES (1), (3), (36), (37): Xaa is C or S
  MOD_RES (14), (15), (16), (17), (18): Xaa is A or G
  MOD_RES (19), (20), (21), (22): Xaa is A or G or is absent
XKXSKVIMQYNKLXXXXXXXXXLYLISIASLDQSVXXPSASA

SEQ ID NO: 4504 - protein, 41 aa, Artificial Sequence
  Non-cyclic GFR-binding peptide
  MOD_RES (1), (3), (36), (37): Xaa is C or S
  MOD_RES (14), (15), (16), (17), (18): Xaa is A or G
  MOD_RES (19), (20), (21), (22): Xaa is A or G or is absent
XKXSKVIMQYNKLXXXXXXXXXLYLISIASLDQSVXXPSAS

SEQ ID NO: 4505 - protein, 37 aa, Artificial Sequence
  Non-cyclic GFR-binding peptide
  MOD_RES (31), (32): Xaa is C or S
SKVIMRHKRLIKPTKGIYYLISTASLDQSVXXPSASA

SEQ ID NO: 4506 - protein, 41 aa, Artificial Sequence
  Non-cyclic GFR-binding peptide
  MOD_RES (1), (3), (37), (38): Xaa is C or S
  MOD_RES (15), (16), (17), (18), (19): Xaa is A or G
  MOD_RES (20), (21), (22), (23): Xaa is A or G or is absent
XGXARVVMNQYNKLXXXXXXXXXLYLVSIASLQTPAXXPKP

SEQ ID NO: 4507 - protein, 31 aa, Artificial Sequence
  Non-cyclic GFR-binding peptide
  MOD_RES (31), (31): Xaa is C or S
SKVIMYHYKLIKPTKGIKYLISIPSLDQSVX

SEQ ID NO: 4508 - protein, 37 aa, Artificial Sequence
  Non-cyclic GFR-binding peptide
  MOD_RES (1), (3), (34), (35): Xaa is C or S
XKXSKVIMRYKKLIKPTKGIFYLISIANLDQSVXXPS

SEQ ID NO: 4509 - protein, 34 aa, Artificial Sequence
  Non-cyclic GFR-binding peptide
  MOD_RES (1), (33), (34): Xaa is C or S
XGEVVMDRHKRLVVKENEDYYLMSTASLETPVXX

SEQ ID NO: 4510 - protein, 39 aa, Artificial Sequence
  Non-cyclic GFR-binding peptide
  MOD_RES (2), (4), (37), (38): Xaa is C or S
  MOD_RES (15), (16), (17), (18), (19): Xaa is A or G
  MOD_RES (20), (21), (22), (23): Xaa is A or G or is absent
SXKXSKVIMRYKKLXXXXXXXXXFYLISIANLDQSVXXP

SEQ ID NO: 4511 - protein, 43 aa, Artificial Sequence
  Non-cyclic GFR-binding peptide
  MOD_RES (1), (3), (38), (39): Xaa is C or S
  MOD_RES (16), (17), (18), (19), (20): Xaa is A or G
  MOD_RES (21), (22), (23), (24): Xaa is A or G or is absent
XGXEAVSMGEQYNKLXXXXXXXXXLYLVSIASLKTPVXXAKGV

SEQ ID NO: 4512 - protein, 35 aa, Artificial Sequence
  Non-cyclic GFR-binding peptide
  MOD_RES (2), (35): Xaa is C or S
  MOD_RES (13), (14), (15), (16), (17): Xaa is A or G
  MOD_RES (18), (19), (20), (21): Xaa is A or G or is absent
KXSKVVMRYKKLXXXXXXXXXFYLISIANLDQPVX

SEQ ID NO: 4513 - protein, 34 aa, Artificial Sequence
  Non-cyclic GFR-binding peptide
  MOD_RES (32), (33): Xaa is C or S
GEVVMDYHYKLVVKENEDKYLMSIPSLETPVXXA

SEQ ID NO: 4514 - protein, 34 aa, Artificial Sequence
  Non-cyclic GFR-binding peptide
  MOD_RES (1), (3): Xaa is C or S
XGXGEVVMEYHYKLVVKDYEDKYLMSIPSLETPV

SEQ ID NO: 4515 - protein, 37 aa, Artificial Sequence
  Non-cyclic GFR-binding peptide
  MOD_RES (2), (37): Xaa is C or S
  MOD_RES (15), (16), (17), (18), (19): Xaa is A or G
  MOD_RES (20), (21), (22), (23): Xaa is A or G or is absent
GXEAVSMGEQYNKLXXXXXXXXXLYLVSIASLKTPVX

SEQ ID NO: 4516 - protein, 38 aa, Artificial Sequence
  Non-cyclic GFR-binding peptide
  MOD_RES (32), (32): Xaa is C or S
SRVVMNYHYKLIVNSSDDKYLVSIPSLKTPAXTPKTVH

SEQ ID NO: 4517 - protein, 42 aa, Artificial Sequence
  Non-cyclic GFR-binding peptide
  MOD_RES (2), (36), (37): Xaa is C or S
  MOD_RES (14), (15), (16), (17), (18): Xaa is A or G
  MOD_RES (19), (20), (21), (22): Xaa is A or G or is absent
GXARVVMNYHYKLXXXXXXXXXKYLVSIPSLQTPAXXPKPVT

SEQ ID NO: 4518 - protein, 42 aa, Artificial Sequence
  Non-cyclic GFR-binding peptide
  MOD_RES (1), (3), (36), (37): Xaa is C or S
  MOD_RES (14), (15), (16), (17), (18): Xaa is A or G
  MOD_RES (19), (20), (21), (22): Xaa is A or G or is absent
XKXSRVIMQYNKLXXXXXXXXXLYLISIASLAQPVXXPAASA

SEQ ID NO: 4519 - protein, 38 aa, Artificial Sequence
  Non-cyclic GFR-binding peptide
  MOD_RES (2), (4), (38): Xaa is C or S
  MOD_RES (16), (17), (18), (19), (20): Xaa is A or G
  MOD_RES (21), (22), (23), (24): Xaa is A or G or is absent
RXGXGEVVMDYHYKLXXXXXXXXXKYLMSIPSLETPVX

SEQ ID NO: 4520 - protein, 40 aa, Artificial Sequence
  Non-cyclic GFR-binding peptide
  MOD_RES (2), (36), (37): Xaa is C or S
  MOD_RES (14), (15), (16), (17), (18): Xaa is A or G
  MOD_RES (19), (20), (21), (22): Xaa is A or G or is absent
GXARVVMNYHYKLXXXXXXXXXKYLVSIPSLQTPAXXPKP

SEQ ID NO: 4521 - protein, 40 aa, Artificial Sequence
  Non-cyclic GFR-binding peptide
  MOD_RES (1), (3), (40): Xaa is C or S
  MOD_RES (16), (17), (18), (19), (20): Xaa is A or G
  MOD_RES (21), (22), (23), (24): Xaa is A or G or is absent
XKXALHDELTQYNKLXXXXXXXXXLYLVSIASLQVQTPRX

SEQ ID NO: 4522 - protein, 36 aa, Artificial Sequence
  Non-cyclic GFR-binding peptide
  MOD_RES (1), (1): Xaa is C or S
XALHDELTRHKRLFIPKKRVIEYYLVSTASLQVQTP

SEQ ID NO: 4523 - protein, 33 aa, Artificial Sequence
  Non-cyclic GFR-binding peptide
  MOD_RES (1), (33): Xaa is C or S
XGEVVMERHKRLVVKDYEDYYLMSTASLETPVX

SEQ ID NO: 4524 - protein, 41 aa, Artificial Sequence
  Non-cyclic GFR-binding peptide
  MOD_RES (1), (3), (40): Xaa is C or S
  MOD_RES (16), (17), (18), (19), (20): Xaa is A or G
  MOD_RES (21), (22), (23), (24): Xaa is A or G or is absent
XKXALHDELTYHYKLXXXXXXXXXKYLVSIPSLQVQTPRXQ

SEQ ID NO: 4525 - protein, 34 aa, Artificial Sequence
  Non-cyclic GFR-binding peptide
  MOD_RES (1), (3), (34): Xaa is C or S
XKXSKVVMQYNKLVKPTRGVLYLISIASLDQPVX

SEQ ID NO: 4526 - protein, 42 aa, Artificial Sequence
  Non-cyclic GFR-binding peptide
  MOD_RES (1), (36), (37): Xaa is C or S
  MOD_RES (14), (15), (16), (17), (18): Xaa is A or G
  MOD_RES (19), (20), (21), (22): Xaa is A or G or is absent
XEAVSMGEQYNKLXXXXXXXXXLYLVSIASLKTPVXXAKGVK

SEQ ID NO: 4527 - protein, 39 aa, Artificial Sequence
  Non-cyclic GFR-binding peptide
  MOD_RES (2), (33), (34): Xaa is C or S
KXSKVVMRYKKLVKPTRGVFYLISIANLDQPVXXPSASA

SEQ ID NO: 4528 - protein, 41 aa, Artificial Sequence
  Non-cyclic GFR-binding peptide
  MOD_RES (2), (4), (35), (36): Xaa is C or S
SXKXSRVIMYHYKLVKPKRGVKYLISIPSLAQPVXXPAASA

SEQ ID NO: 4529 - protein, 39 aa, Artificial Sequence
  Non-cyclic GFR-binding peptide
  MOD_RES (1), (3): Xaa is C or S
XKXALHDELTRYKKLFIPKKRVIEFYLVSIANLQVQTPR

SEQ ID NO: 4530 - protein, 38 aa, Artificial Sequence
  Non-cyclic GFR-binding peptide
  MOD_RES (2), (35), (36): Xaa is C or S
  MOD_RES (13), (14), (15), (16), (17): Xaa is A or G
  MOD_RES (18), (19), (20), (21): Xaa is A or G or is absent
KXSKVIMRYKKLXXXXXXXXXFYLISIANLDQSVXXPS

SEQ ID NO: 4531 - protein, 36 aa, Artificial Sequence
  Non-cyclic GFR-binding peptide
  MOD_RES (36), (36): Xaa is C or S
  MOD_RES (12), (13), (14), (15), (16): Xaa is A or G
  MOD_RES (17), (18), (19), (20): Xaa is A or G or is absent
LHDELTYHYKLXXXXXXXXXKYLVSIPSLQVQTPRX

SEQ ID NO: 4532 - protein, 39 aa, Artificial Sequence
  Non-cyclic GFR-binding peptide
  MOD_RES (2), (4), (38), (39): Xaa is C or S
  MOD_RES (16), (17), (18), (19), (20): Xaa is A or G
  MOD_RES (21), (22), (23), (24): Xaa is A or G or is absent
RXGXGEVVMDRYKKLXXXXXXXXXFYLMSIANLETPVXX

SEQ ID NO: 4533 - protein, 38 aa, Artificial Sequence
  Non-cyclic GFR-binding peptide
  MOD_RES (1), (3), (37): Xaa is C or S
  MOD_RES (15), (16), (17), (18), (19): Xaa is A or G
  MOD_RES (20), (21), (22), (23): Xaa is A or G or is absent
XGXSRVVMNYHYKLXXXXXXXXXKYLVSIPSLKTPAXT

SEQ ID NO: 4534 - protein, 36 aa, Artificial Sequence
  Non-cyclic GFR-binding peptide
  MOD_RES (1), (33), (34): Xaa is C or S
XARVVMNRHKRLIVNSSDDYYLVSTASLQTPAXXPK

SEQ ID NO: 4535 - protein, 35 aa, Artificial Sequence
  Non-cyclic GFR-binding peptide
  MOD_RES (1), (35): Xaa is C or S
  MOD_RES (13), (14), (15), (16), (17): Xaa is A or G
  MOD_RES (18), (19), (20), (21): Xaa is A or G or is absent
XGEVVMDYHYKLXXXXXXXXXKYLMSIPSLETPVX

SEQ ID NO: 4536 - protein, 36 aa, Artificial Sequence
  Non-cyclic GFR-binding peptide
  MOD_RES (31), (32): Xaa is C or S
SRVIMYHYKLVKPKRGVKYLISIPSLAQPVXXPAAS

SEQ ID NO: 4537 - protein, 36 aa, Artificial Sequence
  Non-cyclic GFR-binding peptide
  MOD_RES (33), (34): Xaa is C or S
  MOD_RES (11), (12), (13), (14), (15): Xaa is A or G
  MOD_RES (16), (17), (18), (19): Xaa is A or G or is absent
SKVVMRHKRLXXXXXXXXXYYLISTASLDQPVXXPS

SEQ ID NO: 4538 - protein, 38 aa, Artificial Sequence
  Non-cyclic GFR-binding peptide
  MOD_RES (33), (34): Xaa is C or S
  MOD_RES (11), (12), (13), (14), (15): Xaa is A or G
  MOD_RES (16), (17), (18), (19): Xaa is A or G or is absent
EVVMEYHYKLXXXXXXXXXKYLMSIPSLETPVXXAKPI

SEQ ID NO: 4539 - protein, 40 aa, Artificial Sequence
  Non-cyclic GFR-binding peptide
  MOD_RES (1), (35), (36): Xaa is C or S
  MOD_RES (13), (14), (15), (16), (17): Xaa is A or G
  MOD_RES (18), (19), (20), (21): Xaa is A or G or is absent
XARVVMNYHYKLXXXXXXXXXKYLVSIPSLQTPAXXPKPV

SEQ ID NO: 4540 - protein, 33 aa, Artificial Sequence
  Non-cyclic GFR-binding peptide
  MOD_RES (32), (33): Xaa is C or S
GEVVMDRHKRLVVKENEDYYLMSTASLETPVXX

SEQ ID NO: 4541 - protein, 35 aa, Artificial Sequence
  Non-cyclic GFR-binding peptide
  MOD_RES (12), (13), (14), (15), (16): Xaa is A or G
  MOD_RES (17), (18), (19), (20): Xaa is A or G or is absent
LHDELTRHKRLXXXXXXXXXYYLVSTASLQVQTPR

SEQ ID NO: 4542 - protein, 45 aa, Artificial Sequence
  Non-cyclic GFR-binding peptide
  MOD_RES (2), (4), (39), (40): Xaa is C or S
  MOD_RES (17), (18), (19), (20), (21): Xaa is A or G
  MOD_RES (22), (23), (24), (25): Xaa is A or G or is absent
RXGXEAVSMGERHKRLXXXXXXXXXYYLVSTASLKTPVXXAKGVK

SEQ ID NO: 4543 - protein, 34 aa, Artificial Sequence
  Non-cyclic GFR-binding peptide
  MOD_RES (2), (33), (34): Xaa is C or S
KXSKVIMRHKRLIKPTKGIYYLISTASLDQSVXX

SEQ ID NO: 4544 - protein, 37 aa, Artificial Sequence
  Non-cyclic GFR-binding peptide
  MOD_RES (2), (2): Xaa is C or S
KXALHDELTRYKKLFIPKKRVIEFYLVSIANLQVQTP

SEQ ID NO: 4545 - protein, 38 aa, Artificial Sequence
  Non-cyclic GFR-binding peptide
  MOD_RES (1), (3), (38): Xaa is C or S
  MOD_RES (16), (17), (18), (19), (20): Xaa is A or G
  MOD_RES (21), (22), (23), (24): Xaa is A or G or is absent
XGXEAVSMGERYKKLXXXXXXXXXFYLVSIANLKTPVX

SEQ ID NO: 4546 - protein, 36 aa, Artificial Sequence
  Non-cyclic GFR-binding peptide
  MOD_RES (1), (3): Xaa is C or S
  MOD_RES (15), (16), (17), (18), (19): Xaa is A or G
  MOD_RES (20), (21), (22), (23): Xaa is A or G or is absent
XGXGEVVMDRYKKLXXXXXXXXXFYLMSIANLETPV

SEQ ID NO: 4547 - protein, 38 aa, Artificial Sequence
  Non-cyclic GFR-binding peptide
  MOD_RES (1), (3), (37), (38): Xaa is C or S
  MOD_RES (15), (16), (17), (18), (19): Xaa is A or G
  MOD_RES (20), (21), (22), (23): Xaa is A or G or is absent
XGXARVVMNYHYKLXXXXXXXXXKYLVSIPSLQTPAXX

SEQ ID NO: 4548 - protein, 37 aa, Artificial Sequence
  Non-cyclic GFR-binding peptide
  MOD_RES (2), (4), (37): Xaa is C or S
  MOD_RES (15), (16), (17), (18), (19): Xaa is A or G
  MOD_RES (20), (21), (22), (23): Xaa is A or G or is absent
SXKXSKVIMRYKKLXXXXXXXXXFYLISIANLDQSVX

SEQ ID NO: 4549 - protein, 36 aa, Artificial Sequence
  Non-cyclic GFR-binding peptide
  MOD_RES (1), (35): Xaa is C or S
  MOD_RES (13), (14), (15), (16), (17): Xaa is A or G
  MOD_RES (18), (19), (20), (21): Xaa is A or G or is absent
XSRVVMNRHKRLXXXXXXXXXYYLVSTASLKTPAXT

SEQ ID NO: 4550 - protein, 42 aa, Artificial Sequence
  Non-cyclic GFR-binding peptide
  MOD_RES (2), (4), (39), (40): Xaa is C or S
  MOD_RES (17), (18), (19), (20), (21): Xaa is A or G
  MOD_RES (22), (23), (24), (25): Xaa is A or G or is absent
RXGXEAVSMGEQYNKLXXXXXXXXXLYLVSIASLKTPVXXAK

SEQ ID NO: 4551 - protein, 35 aa, Artificial Sequence
  Non-cyclic GFR-binding peptide
  MOD_RES (35), (35): Xaa is C or S
HDELTYHYKLFIPKKRVIEKYLVSIPSLQVQTPRX

SEQ ID NO: 4552 - protein, 40 aa, Artificial Sequence
  Non-cyclic GFR-binding peptide
  MOD_RES (2), (36), (37): Xaa is C or S
  MOD_RES (14), (15), (16), (17), (18): Xaa is A or G
  MOD_RES (19), (20), (21), (22): Xaa is A or G or is absent
GXGEVVMEYHYKLXXXXXXXXXKYLMSIPSLETPVXXAKP

SEQ ID NO: 4553 - protein, 36 aa, Artificial Sequence
  Non-cyclic GFR-binding peptide
  MOD_RES (1), (33), (34): Xaa is C or S
XSRVVMNQYNKLIVNSSDDLYLVSIASLKTPAXXPK

SEQ ID NO: 4554 - protein, 35 aa, Artificial Sequence
  Non-cyclic GFR-binding peptide
  MOD_RES (1), (33), (34): Xaa is C or S
XSRVVMNYHYKLIVNSSDDKYLVSIPSLKTPAXXP

SEQ ID NO: 4555 - protein, 37 aa, Artificial Sequence
  Non-cyclic GFR-binding peptide
  MOD_RES (2), (4), (37): Xaa is C or S
  MOD_RES (15), (16), (17), (18), (19): Xaa is A or G
  MOD_RES (20), (21), (22), (23): Xaa is A or G or is absent
SXKXSRVIMRHKRLXXXXXXXXXYYLISTASLAQPVX

SEQ ID NO: 4556 - protein, 43 aa, Artificial Sequence
  Non-cyclic GFR-binding peptide
  MOD_RES (1), (3), (40): Xaa is C or S
XKXALHDELTYHYKLFIPKKRVIEKYLVSIPSLQVQTPRXQVN

SEQ ID NO: 4557 - protein, 31 aa, Artificial Sequence
  Non-cyclic GFR-binding peptide
ARVVMNRHKRLIVNSSDDYYLVSTASLQTPA

SEQ ID NO: 4558 - protein, 33 aa, Artificial Sequence
  Non-cyclic GFR-binding peptide
  MOD_RES (2), (33): Xaa is C or S
KXSKVIMRHKRLIKPTKGIYYLISTASLDQSVX

SEQ ID NO: 4559 - protein, 38 aa, Artificial Sequence
  Non-cyclic GFR-binding peptide
  MOD_RES (1), (3), (35): Xaa is C or S
XGXSRVVMNYHYKLIVNSSDDKYLVSIPSLKTPAXTPK

SEQ ID NO: 4560 - protein, 33 aa, Artificial Sequence
  Non-cyclic GFR-binding peptide
  MOD_RES (32), (33): Xaa is C or S
GEVVMERHKRLVVKDYEDYYLMSTASLETPVXX

SEQ ID NO: 4561 - protein, 35 aa, Artificial Sequence
  Non-cyclic GFR-binding peptide
  MOD_RES (1), (33): Xaa is C or S
XSRVVMNQYNKLIVNSSDDLYLVSIASLKTPAXTP

SEQ ID NO: 4562 - protein, 37 aa, Artificial Sequence
  Non-cyclic GFR-binding peptide
  MOD_RES (2), (34), (35): Xaa is C or S
GXAKVVMNRYKKLIVNNSSDFYLVSIANLKTPAXXAK

SEQ ID NO: 4563 - protein, 36 aa, Artificial Sequence
  Non-cyclic GFR-binding peptide
  MOD_RES (2), (34), (35): Xaa is C or S
GXSRVVMNYHYKLIVNSSDDKYLVSIPSLKTPAXXP

SEQ ID NO: 4564 - protein, 34 aa, Artificial Sequence
  Non-cyclic GFR-binding peptide
  MOD_RES (2), (4): Xaa is C or S
SXKXSRVIMYHYKLVKPKRGVKYLISIPSLAQPV

SEQ ID NO: 4565 - protein, 35 aa, Artificial Sequence
  Non-cyclic GFR-binding peptide
  MOD_RES (1), (32), (33): Xaa is C or S
XSKVVMQYNKLVKPTRGVLYLISIASLDQPVXXPS

SEQ ID NO: 4566 - protein, 39 aa, Artificial Sequence
  Non-cyclic GFR-binding peptide
  MOD_RES (33), (34): Xaa is C or S
  MOD_RES (11), (12), (13), (14), (15): Xaa is A or G
  MOD_RES (16), (17), (18), (19): Xaa is A or G or is absent
RVVMNQYNKLXXXXXXXXXLYLVSIASLQTPAXXPKPVT

SEQ ID NO: 4567 - protein, 36 aa, Artificial Sequence
  Non-cyclic GFR-binding peptide
  MOD_RES (33), (34): Xaa is C or S
  MOD_RES (11), (12), (13), (14), (15): Xaa is A or G
  MOD_RES (16), (17), (18), (19): Xaa is A or G or is absent
SKVVMYHYKLXXXXXXXXXKYLISIPSLDQPVXXPS

SEQ ID NO: 4568 - protein, 36 aa, Artificial Sequence
  Non-cyclic GFR-binding peptide
  MOD_RES (35), (35): Xaa is C or S
  MOD_RES (11), (12), (13), (14), (15): Xaa is A or G
  MOD_RES (16), (17), (18), (19): Xaa is A or G or is absent
HDELTRHKRLXXXXXXXXXYYLVSTASLQVQTPRXQ

SEQ ID NO: 4569 - protein, 32 aa, Artificial Sequence
  Non-cyclic GFR-binding peptide
  MOD_RES (11), (12), (13), (14), (15): Xaa is A or G
  MOD_RES (16), (17), (18), (19): Xaa is A or G or is absent
EVVMEYHYKLXXXXXXXXXKYLMSIPSLETPV

SEQ ID NO: 4570 - protein, 38 aa, Artificial Sequence
  Non-cyclic GFR-binding peptide
  MOD_RES (1), (32), (33): Xaa is C or S
XSKVVMRHKRLVKPTRGVYYLISTASLDQPVXXPSASA

SEQ ID NO: 4571 - protein, 33 aa, Artificial Sequence
  Non-cyclic GFR-binding peptide
  MOD_RES (1), (32), (33): Xaa is C or S
XSKVIMQYNKLIKPTKGILYLISIASLDQSVXX

SEQ ID NO: 4572 - protein, 40 aa, Artificial Sequence
  Non-cyclic GFR-binding peptide
  MOD_RES (2), (37), (38): Xaa is C or S
  MOD_RES (15), (16), (17), (18), (19): Xaa is A or G
  MOD_RES (20), (21), (22), (23): Xaa is A or G or is absent
GXEAVSMGEQYNKLXXXXXXXXXLYLVSIASLKTPVXXAK

SEQ ID NO: 4573 - protein, 37 aa, Artificial Sequence
  Non-cyclic GFR-binding peptide
  MOD_RES (36), (36): Xaa is C or S
  MOD_RES (12), (13), (14), (15), (16): Xaa is A or G
  MOD_RES (17), (18), (19), (20): Xaa is A or G or is absent
LHDELTQYNKLXXXXXXXXXLYLVSIASLQVQTPRXQ

SEQ ID NO: 4574 - protein, 36 aa, Artificial Sequence
  Non-cyclic GFR-binding peptide
  MOD_RES (2), (4), (35), (36): Xaa is C or S
SXKXSKVVMRHKRLVKPTRGVYYLISTASLDQPVXX

SEQ ID NO: 4575 - protein, 36 aa, Artificial Sequence
  Non-cyclic GFR-binding peptide
  MOD_RES (2), (4), (36): Xaa is C or S
HXGXSRVVMNYHYKLIVNSSDDKYLVSIPSLKTPAX

SEQ ID NO: 4576 - protein, 42 aa, Artificial Sequence
  Non-cyclic GFR-binding peptide
  MOD_RES (2), (4), (41): Xaa is C or S
EXKXALHDELTRHKRLFIPKKRVIEYYLVSTASLQVQTPRXQ

SEQ ID NO: 4577 - protein, 35 aa, Artificial Sequence
  Non-cyclic GFR-binding peptide
  MOD_RES (2), (2): Xaa is C or S
  MOD_RES (14), (15), (16), (17), (18): Xaa is A or G
  MOD_RES (19), (20), (21), (22): Xaa is A or G or is absent
GXGEVVMEYHYKLXXXXXXXXXKYLMSIPSLETPV

SEQ ID NO: 4578 - protein, 38 aa, Artificial Sequence
  Non-cyclic GFR-binding peptide
  MOD_RES (2), (36), (37): Xaa is C or S
  MOD_RES (14), (15), (16), (17), (18): Xaa is A or G
  MOD_RES (19), (20), (21), (22): Xaa is A or G or is absent
GXARVVMNQYNKLXXXXXXXXXLYLVSIASLQTPAXXP

SEQ ID NO: 4579 - protein, 32 aa, Artificial Sequence
  Non-cyclic GFR-binding peptide
  MOD_RES (11), (12), (13), (14), (15): Xaa is A or G
  MOD_RES (16), (17), (18), (19): Xaa is A or G or is absent
SRVIMYHYKLXXXXXXXXXKYLISIPSLAQPV

SEQ ID NO: 4580 - protein, 40 aa, Artificial Sequence
  Non-cyclic GFR-binding peptide
  MOD_RES (2), (4), (37), (38): Xaa is C or S
  MOD_RES (15), (16), (17), (18), (19): Xaa is A or G
  MOD_RES (20), (21), (22), (23): Xaa is A or G or is absent
SXKXSRVIMRHKRLXXXXXXXXXYYLISTASLAQPVXXPA

SEQ ID NO: 4581 - protein, 43 aa, Artificial Sequence
  Non-cyclic GFR-binding peptide
  MOD_RES (1), (3), (37), (38): Xaa is C or S
  MOD_RES (15), (16), (17), (18), (19): Xaa is A or G
  MOD_RES (20), (21), (22), (23): Xaa is A or G or is absent
XGXAKVVMNRYKKLXXXXXXXXXFYLVSIANLKTPAXXAKPVA

SEQ ID NO: 4582 - protein, 40 aa, Artificial Sequence
  Non-cyclic GFR-binding peptide
  MOD_RES (34), (34): Xaa is C or S
  MOD_RES (12), (13), (14), (15), (16): Xaa is A or G
  MOD_RES (17), (18), (19), (20): Xaa is A or G or is absent
SRVVMNYHYKLXXXXXXXXXKYLVSIPSLKTPAXTPKTVH

SEQ ID NO: 4583 - protein, 40 aa, Artificial Sequence
  Non-cyclic GFR-binding peptide
  MOD_RES (36), (36): Xaa is C or S
  MOD_RES (12), (13), (14), (15), (16): Xaa is A or G
  MOD_RES (17), (18), (19), (20): Xaa is A or G or is absent
LHDELTYHYKLXXXXXXXXXKYLVSIPSLQVQTPRXQVNR

SEQ ID NO: 4584 - protein, 38 aa, Artificial Sequence
  Non-cyclic GFR-binding peptide
  MOD_RES (2), (4), (35), (36): Xaa is C or S
SXKXSKVVMRYKKLVKPTRGVFYLISIANLDQPVXXPS

SEQ ID NO: 4585 - protein, 41 aa, Artificial Sequence
  Non-cyclic GFR-binding peptide
  MOD_RES (2), (39): Xaa is C or S
  MOD_RES (15), (16), (17), (18), (19): Xaa is A or G
  MOD_RES (20), (21), (22), (23): Xaa is A or G or is absent
KXALHDELTQYNKLXXXXXXXXXLYLVSIASLQVQTPRXQV

SEQ ID NO: 4586 - protein, 39 aa, Artificial Sequence
  Non-cyclic GFR-binding peptide
  MOD_RES (2), (36), (37): Xaa is C or S
  MOD_RES (14), (15), (16), (17), (18): Xaa is A or G
  MOD_RES (19), (20), (21), (22): Xaa is A or G or is absent
GXAKVVMNYHYKLXXXXXXXXXKYLVSIPSLKTPAXXAK

SEQ ID NO: 4587 - protein, 36 aa, Artificial Sequence
  Non-cyclic GFR-binding peptide
  MOD_RES (35), (36): Xaa is C or S
  MOD_RES (13), (14), (15), (16), (17): Xaa is A or G
  MOD_RES (18), (19), (20), (21): Xaa is A or G or is absent
EAVSMGERYKKLXXXXXXXXXFYLVSIANLKTPVXX

SEQ ID NO: 4588 - protein, 38 aa, Artificial Sequence
  Non-cyclic GFR-binding peptide
  MOD_RES (33), (34): Xaa is C or S
  MOD_RES (11), (12), (13), (14), (15): Xaa is A or G
  MOD_RES (16), (17), (18), (19): Xaa is A or G or is absent
EVVMERHKRLXXXXXXXXXYYLMSTASLETPVXXAKPI

SEQ ID NO: 4589 - protein, 44 aa, Artificial Sequence
  Non-cyclic GFR-binding peptide
  MOD_RES (2), (4), (38), (39): Xaa is C or S
  MOD_RES (16), (17), (18), (19), (20): Xaa is A or G
  MOD_RES (21), (22), (23), (24): Xaa is A or G or is absent
HXGXARVVMNRHKRLXXXXXXXXXYYLVSTASLQTPAXXPKPVT

SEQ ID NO: 4590 - protein, 38 aa, Artificial Sequence
  Non-cyclic GFR-binding peptide
  MOD_RES (2), (33), (34): Xaa is C or S
KXSKVVMRYKKLVKPTRGVFYLISIANLDQPVXXPSAS

SEQ ID NO: 4591 - protein, 42 aa, Artificial Sequence
  Non-cyclic GFR-binding peptide
  MOD_RES (1), (3), (36), (37): Xaa is C or S
  MOD_RES (14), (15), (16), (17), (18): Xaa is A or G
  MOD_RES (19), (20), (21), (22): Xaa is A or G or is absent
XKXSRVIMRHKRLXXXXXXXXXYYLISTASLAQPVXXPAASA

SEQ ID NO: 4592 - protein, 43 aa, Artificial Sequence
  Non-cyclic GFR-binding peptide
  MOD_RES (1), (3), (37), (38): Xaa is C or S
  MOD_RES (15), (16), (17), (18), (19): Xaa is A or G
  MOD_RES (20), (21), (22), (23): Xaa is A or G or is absent
XGXARVVMNYHYKLXXXXXXXXXKYLVSIPSLQTPAXXPKPVT

SEQ ID NO: 4593 - protein, 36 aa, Artificial Sequence
  Non-cyclic GFR-binding peptide
  MOD_RES (1), (3), (35), (36): Xaa is C or S
XGXGEVVMERHKRLVVKDYEDYYLMSTASLETPVXX

SEQ ID NO: 4594 - protein, 42 aa, Artificial Sequence
  Non-cyclic GFR-binding peptide
  MOD_RES (2), (39): Xaa is C or S
KXALHDELTQYNKLFIPKKRVIELYLVSIASLQVQTPRXQVN

SEQ ID NO: 4595 - protein, 34 aa, Artificial Sequence
  Non-cyclic GFR-binding peptide
ALHDELTYHYKLFIPKKRVIEKYLVSIPSLQVQT

SEQ ID NO: 4596 - protein, 34 aa, Artificial Sequence
  Non-cyclic GFR-binding peptide
  MOD_RES (11), (12), (13), (14), (15): Xaa is A or G
  MOD_RES (16), (17), (18), (19): Xaa is A or G or is absent
HDELTYHYKLXXXXXXXXXKYLVSIPSLQVQTPR

SEQ ID NO: 4597 - protein, 35 aa, Artificial Sequence
  Non-cyclic GFR-binding peptide
  MOD_RES (2), (34), (35): Xaa is C or S
GXGEVVMDRYKKLVVKENEDFYLMSIANLETPVXX

SEQ ID NO: 4598 - protein, 39 aa, Artificial Sequence
  Non-cyclic GFR-binding peptide
  MOD_RES (2), (4), (36), (37): Xaa is C or S
HXGXSRVVMNRHKRLIVNSSDDYYLVSTASLKTPAXXPK

SEQ ID NO: 4599 - protein, 31 aa, Artificial Sequence
  Non-cyclic GFR-binding peptide
  MOD_RES (31), (31): Xaa is C or S
SKVVMYHYKLVKPTRGVKYLISIPSLDQPVX

SEQ ID NO: 4600 - protein, 39 aa, Artificial Sequence
  Non-cyclic GFR-binding peptide
  MOD_RES (1), (3), (35), (36): Xaa is C or S
XGXAKVVMNRYKKLIVNNSSDFYLVSIANLKTPAXXAKP

SEQ ID NO: 4601 - protein, 33 aa, Artificial Sequence
  Non-cyclic GFR-binding peptide
  MOD_RES (31), (32): Xaa is C or S
SRVIMRHKRLVKPKRGVYYLISTASLAQPVXXP

SEQ ID NO: 4602 - protein, 37 aa, Artificial Sequence
  Non-cyclic GFR-binding peptide
  MOD_RES (1), (3), (34), (35): Xaa is C or S
XKXSKVVMRYKKLVKPTRGVFYLISIANLDQPVXXPS

SEQ ID NO: 4603 - protein, 39 aa, Artificial Sequence
  Non-cyclic GFR-binding peptide
  MOD_RES (1), (38): Xaa is C or S
XALHDELTYHYKLFIPKKRVIEKYLVSIPSLQVQTPRXQ

SEQ ID NO: 4604 - protein, 37 aa, Artificial Sequence
  Non-cyclic GFR-binding peptide
  MOD_RES (1), (3), (36), (37): Xaa is C or S
XGXEAVSMGEQYNKLTPVGMDDLYLVSIASLKTPVXX

SEQ ID NO: 4605 - protein, 37 aa, Artificial Sequence
  Non-cyclic GFR-binding peptide
  MOD_RES (1), (3), (36), (37): Xaa is C or S
  MOD_RES (14), (15), (16), (17), (18): Xaa is A or G
  MOD_RES (19), (20), (21), (22): Xaa is A or G or is absent
XKXSKVVMQYNKLXXXXXXXXXLYLISIASLDQPVXX

SEQ ID NO: 4606 - protein, 34 aa, Artificial Sequence
  Non-cyclic GFR-binding peptide
  MOD_RES (1), (34): Xaa is C or S
  MOD_RES (12), (13), (14), (15), (16): Xaa is A or G
  MOD_RES (17), (18), (19), (20): Xaa is A or G or is absent
XSKVVMQYNKLXXXXXXXXXLYLISIASLDQPVX

SEQ ID NO: 4607 - protein, 37 aa, Artificial Sequence
  Non-cyclic GFR-binding peptide
  MOD_RES (1), (32), (33): Xaa is C or S
XSKVIMYHYKLIKPTKGIKYLISIPSLDQSVXXPSAS

SEQ ID NO: 4608 - protein, 37 aa, Artificial Sequence
  Non-cyclic GFR-binding peptide
  MOD_RES (2), (4), (37): Xaa is C or S
RXGXEAVSMGEQYNKLTPVGMDDLYLVSIASLKTPVX

SEQ ID NO: 4609 - protein, 37 aa, Artificial Sequence
  Non-cyclic GFR-binding peptide
  MOD_RES (31), (32): Xaa is C or S
SRVIMYHYKLVKPKRGVKYLISIPSLAQPVXXPAASA

SEQ ID NO: 4610 - protein, 39 aa, Artificial Sequence
  Non-cyclic GFR-binding peptide
  MOD_RES (1), (3), (37), (38): Xaa is C or S
  MOD_RES (15), (16), (17), (18), (19): Xaa is A or G
  MOD_RES (20), (21), (22), (23): Xaa is A or G or is absent
XGXSRVVMNRHKRLXXXXXXXXXYYLVSTASLKTPAXXP

SEQ ID NO: 4611 - protein, 39 aa, Artificial Sequence
  Non-cyclic GFR-binding peptide
  MOD_RES (1), (35), (36): Xaa is C or S
  MOD_RES (13), (14), (15), (16), (17): Xaa is A or G
  MOD_RES (18), (19), (20), (21): Xaa is A or G or is absent
XAKVVMNRYKKLXXXXXXXXXFYLVSIANLKTPAXXAKP

SEQ ID NO: 4612 - protein, 36 aa, Artificial Sequence
  Non-cyclic GFR-binding peptide
  MOD_RES (2), (34), (35): Xaa is C or S
GXGEVVMERHKRLVVKDYEDYYLMSTASLETPVXXA

SEQ ID NO: 4613 - protein, 34 aa, Artificial Sequence
  Non-cyclic GFR-binding peptide
  MOD_RES (12), (13), (14), (15), (16): Xaa is A or G
  MOD_RES (17), (18), (19), (20): Xaa is A or G or is absent
LHDELTYHYKLXXXXXXXXXKYLVSIPSLQVQTP

SEQ ID NO: 4614 - protein, 40 aa, Artificial Sequence
  Non-cyclic GFR-binding peptide
  MOD_RES (2), (4): Xaa is C or S
EXKXALHDELTYHYKLFIPKKRVIEKYLVSIPSLQVQTPR

SEQ ID NO: 4615 - protein, 43 aa, Artificial Sequence
  Non-cyclic GFR-binding peptide
  MOD_RES (2), (4), (38), (39): Xaa is C or S
  MOD_RES (16), (17), (18), (19), (20): Xaa is A or G
  MOD_RES (21), (22), (23), (24): Xaa is A or G or is absent
HXGXARVVMNQYNKLXXXXXXXXXLYLVSIASLQTPAXXPKPV

SEQ ID NO: 4616 - protein, 40 aa, Artificial Sequence
  Non-cyclic GFR-binding peptide
  MOD_RES (2), (36), (37): Xaa is C or S
  MOD_RES (14), (15), (16), (17), (18): Xaa is A or G
  MOD_RES (19), (20), (21), (22): Xaa is A or G or is absent
GXAKVVMNYHYKLXXXXXXXXXKYLVSIPSLKTPAXXAKP

SEQ ID NO: 4617 - protein, 42 aa, Artificial Sequence
  Non-cyclic GFR-binding peptide
  MOD_RES (2), (4), (38), (39): Xaa is C or S
  MOD_RES (16), (17), (18), (19), (20): Xaa is A or G
  MOD_RES (21), (22), (23), (24): Xaa is A or G or is absent
RXGXGEVVMERHKRLXXXXXXXXXYYLMSTASLETPVXXAKP

SEQ ID NO: 4618 - protein, 39 aa, Artificial Sequence
  Non-cyclic GFR-binding peptide
  MOD_RES (36), (36): Xaa is C or S
  MOD_RES (12), (13), (14), (15), (16): Xaa is A or G
  MOD_RES (17), (18), (19), (20): Xaa is A or G or is absent
LHDELTRHKRLXXXXXXXXXYYLVSTASLQVQTPRXQVN

SEQ ID NO: 4619 - protein, 34 aa, Artificial Sequence
  Non-cyclic GFR-binding peptide
  MOD_RES (1), (33): Xaa is C or S
XSRVVMNRHKRLIVNSSDDYYLVSTASLKTPAXT

SEQ ID NO: 4620 - protein, 36 aa, Artificial Sequence
  Non-cyclic GFR-binding peptide
  MOD_RES (2), (35), (36): Xaa is C or S
  MOD_RES (13), (14), (15), (16), (17): Xaa is A or G
  MOD_RES (18), (19), (20), (21): Xaa is A or G or is absent
KXSRVIMRYKKLXXXXXXXXXFYLISIANLAQPVXX

SEQ ID NO: 4621 - protein, 33 aa, Artificial Sequence
  Non-cyclic GFR-binding peptide
  MOD_RES (32), (32): Xaa is C or S
SRVVMNYHYKLIVNSSDDKYLVSIPSLKTPAXT

SEQ ID NO: 4622 - protein, 33 aa, Artificial Sequence
  Non-cyclic GFR-binding peptide
  MOD_RES (31), (32): Xaa is C or S
RVVMNYHYKLIVNSSDDKYLVSIPSLKTPAXXP

SEQ ID NO: 4623 - protein, 40 aa, Artificial Sequence
  Non-cyclic GFR-binding peptide
  MOD_RES (2), (4), (37), (38): Xaa is C or S
RXGXEAVSMGERHKRLTPVGMDDYYLVSTASLKTPVXXAK

SEQ ID NO: 4624 - protein, 32 aa, Artificial Sequence
  Non-cyclic GFR-binding peptide
  MOD_RES (32), (32): Xaa is C or S
SRVVMNQYNKLIVNSSDDLYLVSIASLKTPAX

SEQ ID NO: 4625 - protein, 36 aa, Artificial Sequence
  Non-cyclic GFR-binding peptide
  MOD_RES (32), (32): Xaa is C or S
SRVVMNRHKRLIVNSSDDYYLVSTASLKTPAXTPKT

SEQ ID NO: 4626 - protein, 34 aa, Artificial Sequence
  Non-cyclic GFR-binding peptide
  MOD_RES (1), (34): Xaa is C or S
  MOD_RES (12), (13), (14), (15), (16): Xaa is A or G
  MOD_RES (17), (18), (19), (20): Xaa is A or G or is absent
XSKVVMRHKRLXXXXXXXXXYYLISTASLDQPVX

SEQ ID NO: 4627 - protein, 40 aa, Artificial Sequence
  Non-cyclic GFR-binding peptide
  MOD_RES (34), (35): Xaa is C or S
  MOD_RES (12), (13), (14), (15), (16): Xaa is A or G
  MOD_RES (17), (18), (19), (20): Xaa is A or G or is absent
AKVVMNQYNKLXXXXXXXXXLYLVSIASLKTPAXXAKPVA

SEQ ID NO: 4628 - protein, 37 aa, Artificial Sequence
  Non-cyclic GFR-binding peptide
  MOD_RES (31), (32): Xaa is C or S
SKVIMYHYKLIKPTKGIKYLISIPSLDQSVXXPSASA

SEQ ID NO: 4629 - protein, 35 aa, Artificial Sequence
  Non-cyclic GFR-binding peptide
  MOD_RES (1), (3), (35): Xaa is C or S
XGXSRVVMNYHYKLIVNSSDDKYLVSIPSLKTPAX

SEQ ID NO: 4630 - protein, 37 aa, Artificial Sequence
  Non-cyclic GFR-binding peptide
  MOD_RES (35), (35): Xaa is C or S
HDELTYHYKLFIPKKRVIEKYLVSIPSLQVQTPRXQV

SEQ ID NO: 4631 - protein, 38 aa, Artificial Sequence
  Non-cyclic GFR-binding peptide
  MOD_RES (2), (4), (37), (38): Xaa is C or S
RXGXEAVSMGERYKKLTPVGMDDFYLVSIANLKTPVXX

SEQ ID NO: 4632 - protein, 42 aa, Artificial Sequence
  Non-cyclic GFR-binding peptide
  MOD_RES (1), (3), (36), (37): Xaa is C or S
XGXEAVSMGEQYNKLTPVGMDDLYLVSIASLKTPVXXAKGVK

SEQ ID NO: 4633 - protein, 34 aa, Artificial Sequence
  Non-cyclic GFR-binding peptide
  MOD_RES (32), (33): Xaa is C or S
ARVVMNRHKRLIVNSSDDYYLVSTASLQTPAXXP

SEQ ID NO: 4634 - protein, 39 aa, Artificial Sequence
  Non-cyclic GFR-binding peptide
  MOD_RES (1), (3), (37), (38): Xaa is C or S
  MOD_RES (15), (16), (17), (18), (19): Xaa is A or G
  MOD_RES (20), (21), (22), (23): Xaa is A or G or is absent
XGXARVVMNYHYKLXXXXXXXXXKYLVSIPSLQTPAXXP

SEQ ID NO: 4635 - protein, 37 aa, Artificial Sequence
  Non-cyclic GFR-binding peptide
  MOD_RES (32), (33): Xaa is C or S
GEVVMERYKKLVVKDYEDFYLMSIANLETPVXXAKPI

SEQ ID NO: 4636 - protein, 43 aa, Artificial Sequence
  Non-cyclic GFR-binding peptide
  MOD_RES (1), (3), (40): Xaa is C or S
XKXALHDELTRHKRLFIPKKRVIEYYLVSTASLQVQTPRXQVN

SEQ ID NO: 4637 - protein, 39 aa, Artificial Sequence
  Non-cyclic GFR-binding peptide
  MOD_RES (34), (35): Xaa is C or S
  MOD_RES (12), (13), (14), (15), (16): Xaa is A or G
  MOD_RES (17), (18), (19), (20): Xaa is A or G or is absent
GEVVMEYHYKLXXXXXXXXXKYLMSIPSLETPVXXAKPI

SEQ ID NO: 4638 - protein, 38 aa, Artificial Sequence
  Non-cyclic GFR-binding peptide
  MOD_RES (2), (4), (38): Xaa is C or S
  MOD_RES (16), (17), (18), (19), (20): Xaa is A or G
  MOD_RES (21), (22), (23), (24): Xaa is A or G or is absent
RXGXGEVVMDRHKRLXXXXXXXXXYYLMSTASLETPVX

SEQ ID NO: 4639 - protein, 42 aa, Artificial Sequence
  Non-cyclic GFR-binding peptide
  MOD_RES (2), (4), (36), (37): Xaa is C or S
RXGXGEVVMERHKRLVVKDYEDYYLMSTASLETPVXXAKPIS

SEQ ID NO: 4640 - protein, 39 aa, Artificial Sequence
  Non-cyclic GFR-binding peptide
  MOD_RES (2), (39): Xaa is C or S
KXALHDELTQYNKLFIPKKRVIELYLVSIASLQVQTPRX

SEQ ID NO: 4641 - protein, 41 aa, Artificial Sequence
  Non-cyclic GFR-binding peptide
  MOD_RES (2), (4), (37), (38): Xaa is C or S
  MOD_RES (15), (16), (17), (18), (19): Xaa is A or G
  MOD_RES (20), (21), (22), (23): Xaa is A or G or is absent
SXKXSKVVMYHYKLXXXXXXXXXKYLISIPSLDQPVXXPSA

SEQ ID NO: 4642 - protein, 39 aa, Artificial Sequence
  Non-cyclic GFR-binding peptide
  MOD_RES (2), (4), (38), (39): Xaa is C or S
  MOD_RES (16), (17), (18), (19), (20): Xaa is A or G
  MOD_RES (21), (22), (23), (24): Xaa is A or G or is absent
RXGXGEVVMEYHYKLXXXXXXXXXKYLMSIPSLETPVXX

SEQ ID NO: 4643 - protein, 40 aa, Artificial Sequence
  Non-cyclic GFR-binding peptide
  MOD_RES (2), (34), (35): Xaa is C or S
GXSRVVMNQYNKLIVNSSDDLYLVSIASLKTPAXXPKPVY

SEQ ID NO: 4644 - protein, 38 aa, Artificial Sequence
  Non-cyclic GFR-binding peptide
  MOD_RES (33), (33): Xaa is C or S
  MOD_RES (11), (12), (13), (14), (15): Xaa is A or G
  MOD_RES (16), (17), (18), (19): Xaa is A or G or is absent
RVVMNRHKRLXXXXXXXXXYYLVSTASLKTPAXTPKTV

SEQ ID NO: 4645 - protein, 35 aa, Artificial Sequence
  Non-cyclic GFR-binding peptide
  MOD_RES (1), (3), (35): Xaa is C or S
XGXARVVMNQYNKLIVNSSDDLYLVSIASLQTPAX

SEQ ID NO: 4646 - protein, 39 aa, Artificial Sequence
  Non-cyclic GFR-binding peptide
  MOD_RES (34), (35): Xaa is C or S
  MOD_RES (12), (13), (14), (15), (16): Xaa is A or G
  MOD_RES (17), (18), (19), (20): Xaa is A or G or is absent
ARVVMNQYNKLXXXXXXXXXLYLVSIASLQTPAXXPKPV

SEQ ID NO: 4647 - protein, 39 aa, Artificial Sequence
  Non-cyclic GFR-binding peptide
  MOD_RES (2), (36), (37): Xaa is C or S
  MOD_RES (14), (15), (16), (17), (18): Xaa is A or G
  MOD_RES (19), (20), (21), (22): Xaa is A or G or is absent
GXARVVMNYHYKLXXXXXXXXXKYLVSIPSLQTPAXXPK

SEQ ID NO: 4648 - protein, 41 aa, Artificial Sequence
  Non-cyclic GFR-binding peptide
  MOD_RES (1), (3), (36), (37): Xaa is C or S
  MOD_RES (14), (15), (16), (17), (18): Xaa is A or G
  MOD_RES (19), (20), (21), (22): Xaa is A or G or is absent
XKXSRVIMQYNKLXXXXXXXXXLYLISIASLAQPVXXPAAS

SEQ ID NO: 4649 - protein, 36 aa, Artificial Sequence
  Non-cyclic GFR-binding peptide
  MOD_RES (31), (32): Xaa is C or S
EVVMERYKKLVVKDYEDFYLMSIANLETPVXXAKPI

SEQ ID NO: 4650 - protein, 40 aa, Artificial Sequence
  Non-cyclic GFR-binding peptide
  MOD_RES (1), (34), (35): Xaa is C or S
XEAVSMGERHKRLTPVGMDDYYLVSTASLKTPVXXAKGVK

SEQ ID NO: 4651 - protein, 33 aa, Artificial Sequence
  Non-cyclic GFR-binding peptide
  MOD_RES (12), (13), (14), (15), (16): Xaa is A or G
  MOD_RES (17), (18), (19), (20): Xaa is A or G or is absent
LHDELTRHKRLXXXXXXXXXYYLVSTASLQVQT

SEQ ID NO: 4652 - protein, 41 aa, Artificial Sequence
  Non-cyclic GFR-binding peptide
  MOD_RES (2), (36): Xaa is C or S
  MOD_RES (14), (15), (16), (17), (18): Xaa is A or G
  MOD_RES (19), (20), (21), (22): Xaa is A or G or is absent
GXSRVVMNRHKRLXXXXXXXXXYYLVSTASLKTPAXTPKTV

SEQ ID NO: 4653 - protein, 37 aa, Artificial Sequence
  Non-cyclic GFR-binding peptide
  MOD_RES (2), (37): Xaa is C or S
  MOD_RES (15), (16), (17), (18), (19): Xaa is A or G
  MOD_RES (20), (21), (22), (23): Xaa is A or G or is absent
GXEAVSMGERHKRLXXXXXXXXXYYLVSTASLKTPVX

SEQ ID NO: 4654 - protein, 36 aa, Artificial Sequence
  Non-cyclic GFR-binding peptide
  MOD_RES (31), (32): Xaa is C or S
SKVIMYHYKLIKPTKGIKYLISIPSLDQSVXXPSAS

SEQ ID NO: 4655 - protein, 42 aa, Artificial Sequence
  Non-cyclic GFR-binding peptide
  MOD_RES (2), (4), (36), (37): Xaa is C or S
HXGXAKVVMNQYNKLIVNNSSDLYLVSIASLKTPAXXAKPVA

SEQ ID NO: 4656 - protein, 36 aa, Artificial Sequence
  Non-cyclic GFR-binding peptide
  MOD_RES (1), (33), (34): Xaa is C or S
XAKVVMNRYKKLIVNNSSDFYLVSIANLKTPAXXAK

SEQ ID NO: 4657 - protein, 41 aa, Artificial Sequence
  Non-cyclic GFR-binding peptide
  MOD_RES (1), (36), (37): Xaa is C or S
  MOD_RES (14), (15), (16), (17), (18): Xaa is A or G
  MOD_RES (19), (20), (21), (22): Xaa is A or G or is absent
XEAVSMGERYKKLXXXXXXXXXFYLVSIANLKTPVXXAKGV

SEQ ID NO: 4658 - protein, 36 aa, Artificial Sequence
  Non-cyclic GFR-binding peptide
  MOD_RES (33), (34): Xaa is C or S
  MOD_RES (11), (12), (13), (14), (15): Xaa is A or G
  MOD_RES (16), (17), (18), (19): Xaa is A or G or is absent
RVVMNRHKRLXXXXXXXXXYYLVSTASLQTPAXXPK

SEQ ID NO: 4659 - protein, 35 aa, Artificial Sequence
  Non-cyclic GFR-binding peptide
  MOD_RES (31), (31): Xaa is C or S
RVVMNYHYKLIVNSSDDKYLVSIPSLKTPAXTPKT

SEQ ID NO: 4660 - protein, 31 aa, Artificial Sequence
  Non-cyclic GFR-binding peptide
  MOD_RES (31), (31): Xaa is C or S
EVVMDRHKRLVVKENEDYYLMSTASLETPVX

SEQ ID NO: 4661 - protein, 35 aa, Artificial Sequence
  Non-cyclic GFR-binding peptide
  MOD_RES (1), (3), (34), (35): Xaa is C or S
XKXSKVIMQYNKLIKPTKGILYLISIASLDQSVXX

SEQ ID NO: 4662 - protein, 37 aa, Artificial Sequence
  Non-cyclic GFR-binding peptide
  MOD_RES (2), (4), (36), (37): Xaa is C or S
HXGXARVVMNRHKRLIVNSSDDYYLVSTASLQTPAXX

SEQ ID NO: 4663 - protein, 36 aa, Artificial Sequence
  Non-cyclic GFR-binding peptide
  MOD_RES (2), (34), (35): Xaa is C or S
GXGEVVMDYHYKLVVKENEDKYLMSIPSLETPVXXA

SEQ ID NO: 4664 - protein, 41 aa, Artificial Sequence
  Non-cyclic GFR-binding peptide
  MOD_RES (1), (35), (36): Xaa is C or S
  MOD_RES (13), (14), (15), (16), (17): Xaa is A or G
  MOD_RES (18), (19), (20), (21): Xaa is A or G or is absent
XSRVVMNRHKRLXXXXXXXXXYYLVSTASLKTPAXXPKPVY

SEQ ID NO: 4665 - protein, 42 aa, Artificial Sequence
  Non-cyclic GFR-binding peptide
  MOD_RES (2), (36), (37): Xaa is C or S
  MOD_RES (14), (15), (16), (17), (18): Xaa is A or G
  MOD_RES (19), (20), (21), (22): Xaa is A or G or is absent
GXAKVVMNQYNKLXXXXXXXXXLYLVSIASLKTPAXXAKPVA

SEQ ID NO: 4666 - protein, 38 aa, Artificial Sequence
  Non-cyclic GFR-binding peptide
  MOD_RES (1), (3), (37), (38): Xaa is C or S
  MOD_RES (15), (16), (17), (18), (19): Xaa is A or G
  MOD_RES (20), (21), (22), (23): Xaa is A or G or is absent
XGXAKVVMNQYNKLXXXXXXXXXLYLVSIASLKTPAXX

SEQ ID NO: 4667 - protein, 38 aa, Artificial Sequence
  Non-cyclic GFR-binding peptide
  MOD_RES (32), (33): Xaa is C or S
AKVVMNRYKKLIVNNSSDFYLVSIANLKTPAXXAKPVA

SEQ ID NO: 4668 - protein, 32 aa, Artificial Sequence
  Non-cyclic GFR-binding peptide
  MOD_RES (1), (1): Xaa is C or S
XGEVVMDRHKRLVVKENEDYYLMSTASLETPV

SEQ ID NO: 4669 - protein, 37 aa, Artificial Sequence
  Non-cyclic GFR-binding peptide
  MOD_RES (31), (32): Xaa is C or S
SKVVMYHYKLVKPTRGVKYLISIPSLDQPVXXPSASA

SEQ ID NO: 4670 - protein, 38 aa, Artificial Sequence
  Non-cyclic GFR-binding peptide
  MOD_RES (2), (36): Xaa is C or S
  MOD_RES (14), (15), (16), (17), (18): Xaa is A or G
  MOD_RES (19), (20), (21), (22): Xaa is A or G or is absent
GXSRVVMNYHYKLXXXXXXXXXKYLVSIPSLKTPAXTP

SEQ ID NO: 4671 - protein, 35 aa, Artificial Sequence
  Non-cyclic GFR-binding peptide
  MOD_RES (1), (3), (35): Xaa is C or S
XGXAKVVMNYHYKLIVNNSSDKYLVSIPSLKTPAX

SEQ ID NO: 4672 - protein, 36 aa, Artificial Sequence
  Non-cyclic GFR-binding peptide
  MOD_RES (34), (35): Xaa is C or S
  MOD_RES (12), (13), (14), (15), (16): Xaa is A or G
  MOD_RES (17), (18), (19), (20): Xaa is A or G or is absent
AKVVMNQYNKLXXXXXXXXXLYLVSIASLKTPAXXA

SEQ ID NO: 4673 - protein, 41 aa, Artificial Sequence
  Non-cyclic GFR-binding peptide
  MOD_RES (1), (35), (36): Xaa is C or S
  MOD_RES (13), (14), (15), (16), (17): Xaa is A or G
  MOD_RES (18), (19), (20), (21): Xaa is A or G or is absent
XGEVVMDRHKRLXXXXXXXXXYYLMSTASLETPVXXAKPIK

SEQ ID NO: 4674 - protein, 39 aa, Artificial Sequence
  Non-cyclic GFR-binding peptide
  MOD_RES (2), (4), (36): Xaa is C or S
HXGXSRVVMNRHKRLIVNSSDDYYLVSTASLKTPAXTPK

SEQ ID NO: 4675 - protein, 41 aa, Artificial Sequence
  Non-cyclic GFR-binding peptide
  MOD_RES (2), (36), (37): Xaa is C or S
  MOD_RES (14), (15), (16), (17), (18): Xaa is A or G
  MOD_RES (19), (20), (21), (22): Xaa is A or G or is absent
GXGEVVMDYHYKLXXXXXXXXXKYLMSIPSLETPVXXAKPI

SEQ ID NO: 4676 - protein, 38 aa, Artificial Sequence
  Non-cyclic GFR-binding peptide
  MOD_RES (2), (4), (36), (37): Xaa is C or S
HXGXARVVMNQYNKLIVNSSDDLYLVSIASLQTPAXXP

SEQ ID NO: 4677 - protein, 37 aa, Artificial Sequence
  Non-cyclic GFR-binding peptide
  MOD_RES (36), (36): Xaa is C or S
LHDELTQYNKLFIPKKRVIELYLVSIASLQVQTPRXQ

SEQ ID NO: 4678 - protein, 38 aa, Artificial Sequence
  Non-cyclic GFR-binding peptide
  MOD_RES (36), (36): Xaa is C or S
LHDELTYHYKLFIPKKRVIEKYLVSIPSLQVQTPRXQV

SEQ ID NO: 4679 - protein, 38 aa, Artificial Sequence
  Non-cyclic GFR-binding peptide
  MOD_RES (33), (34): Xaa is C or S
  MOD_RES (11), (12), (13), (14), (15): Xaa is A or G
  MOD_RES (16), (17), (18), (19): Xaa is A or G or is absent
RVVMNYHYKLXXXXXXXXXKYLVSIPSLQTPAXXPKPV

SEQ ID NO: 4680 - protein, 41 aa, Artificial Sequence
  Non-cyclic GFR-binding peptide
  MOD_RES (2), (35), (36): Xaa is C or S
GXEAVSMGERHKRLTPVGMDDYYLVSTASLKTPVXXAKGVK

SEQ ID NO: 4681 - protein, 40 aa, Artificial Sequence
  Non-cyclic GFR-binding peptide
  MOD_RES (2), (35), (36): Xaa is C or S
  MOD_RES (13), (14), (15), (16), (17): Xaa is A or G
  MOD_RES (18), (19), (20), (21): Xaa is A or G or is absent
KXSKVVMRHKRLXXXXXXXXXYYLISTASLDQPVXXPSAS

SEQ ID NO: 4682 - protein, 36 aa, Artificial Sequence
  Non-cyclic GFR-binding peptide
  MOD_RES (1), (32), (33): Xaa is C or S
XSKVVMRYKKLVKPTRGVFYLISIANLDQPVXXPSA

SEQ ID NO: 4683 - protein, 31 aa, Artificial Sequence
  Non-cyclic GFR-binding peptide
SRVVMNRHKRLIVNSSDDYYLVSTASLKTPA

SEQ ID NO: 4684 - protein, 33 aa, Artificial Sequence
  Non-cyclic GFR-binding peptide
  MOD_RES (33), (33): Xaa is C or S
  MOD_RES (11), (12), (13), (14), (15): Xaa is A or G
  MOD_RES (16), (17), (18), (19): Xaa is A or G or is absent
RVVMNRHKRLXXXXXXXXXYYLVSTASLKTPAX

SEQ ID NO: 4685 - protein, 37 aa, Artificial Sequence
  Non-cyclic GFR-binding peptide
  MOD_RES (2), (4), (36), (37): Xaa is C or S
RXGXGEVVMEYHYKLVVKDYEDKYLMSIPSLETPVXX

SEQ ID NO: 4686 - protein, 38 aa, Artificial Sequence
  Non-cyclic GFR-binding peptide
  MOD_RES (1), (35), (36): Xaa is C or S
  MOD_RES (13), (14), (15), (16), (17): Xaa is A or G
  MOD_RES (18), (19), (20), (21): Xaa is A or G or is absent
XGEVVMDRYKKLXXXXXXXXXFYLMSIANLETPVXXAK

SEQ ID NO: 4687 - protein, 38 aa, Artificial Sequence
  Non-cyclic GFR-binding peptide
  MOD_RES (33), (34): Xaa is C or S
  MOD_RES (11), (12), (13), (14), (15): Xaa is A or G
  MOD_RES (16), (17), (18), (19): Xaa is A or G or is absent
SRVIMRYKKLXXXXXXXXXFYLISIANLAQPVXXPAAS

SEQ ID NO: 4688 - protein, 35 aa, Artificial Sequence
  Non-cyclic GFR-binding peptide
  MOD_RES (31), (31): Xaa is C or S
RVVMNQYNKLIVNSSDDLYLVSIASLKTPAXTPKT

SEQ ID NO: 4689 - protein, 30 aa, Artificial Sequence
  Non-cyclic GFR-binding peptide
EVVMERYKKLVVKDYEDFYLMSIANLETPV

SEQ ID NO: 4690 - protein, 35 aa, Artificial Sequence
  Non-cyclic GFR-binding peptide
  MOD_RES (1), (32), (33): Xaa is C or S
XSRVIMRHKRLVKPKRGVYYLISTASLAQPVXXPA

SEQ ID NO: 4691 - protein, 41 aa, Artificial Sequence
  Non-cyclic GFR-binding peptide
  MOD_RES (1), (35): Xaa is C or S
  MOD_RES (13), (14), (15), (16), (17): Xaa is A or G
  MOD_RES (18), (19), (20), (21): Xaa is A or G or is absent
XSRVVMNRHKRLXXXXXXXXXYYLVSTASLKTPAXTPKTVH

SEQ ID NO: 4692 - protein, 34 aa, Artificial Sequence
  Non-cyclic GFR-binding peptide
  MOD_RES (11), (12), (13), (14), (15): Xaa is A or G
  MOD_RES (16), (17), (18), (19): Xaa is A or G or is absent
HDELTQYNKLXXXXXXXXXLYLVSIASLQVQTPR

SEQ ID NO: 4693 - protein, 34 aa, Artificial Sequence
  Non-cyclic GFR-binding peptide
  MOD_RES (2), (34): Xaa is C or S
GXARVVMNYHYKLIVNSSDDKYLVSIPSLQTPAX

SEQ ID NO: 4694 - protein, 31 aa, Artificial Sequence
  Non-cyclic GFR-binding peptide
  MOD_RES (1), (1): Xaa is C or S
XSRVIMRHKRLVKPKRGVYYLISTASLAQPV

SEQ ID NO: 4695 - protein, 35 aa, Artificial Sequence
  Non-cyclic GFR-binding peptide
  MOD_RES (1), (3): Xaa is C or S
XGXEAVSMGERYKKLTPVGMDDFYLVSIANLKTPV

SEQ ID NO: 4696 - protein, 36 aa, Artificial Sequence
  Non-cyclic GFR-binding peptide
  MOD_RES (31), (32): Xaa is C or S
SKVIMQYNKLIKPTKGILYLISIASLDQSVXXPSAS

SEQ ID NO: 4697 - protein, 37 aa, Artificial Sequence
  Non-cyclic GFR-binding peptide
  MOD_RES (31), (31): Xaa is C or S
RVVMNRHKRLIVNSSDDYYLVSTASLKTPAXTPKTVH

SEQ ID NO: 4698 - protein, 32 aa, Artificial Sequence
  Non-cyclic GFR-binding peptide
  MOD_RES (31), (32): Xaa is C or S
SKVIMRYKKLIKPTKGIFYLISIANLDQSVXX

SEQ ID NO: 4699 - protein, 36 aa, Artificial Sequence
  Non-cyclic GFR-binding peptide
  MOD_RES (1), (3), (36): Xaa is C or S
XGXEAVSMGERHKRLTPVGMDDYYLVSTASLKTPVX

SEQ ID NO: 4700 - protein, 33 aa, Artificial Sequence
  Non-cyclic GFR-binding peptide
  MOD_RES (1), (3): Xaa is C or S
XKXSKVVMYHYKLVKPTRGVKYLISIPSLDQPV

SEQ ID NO: 4701 - protein, 41 aa, Artificial Sequence
  Non-cyclic GFR-binding peptide
  MOD_RES (2), (4), (36), (37): Xaa is C or S
HXGXSRVVMNYHYKLIVNSSDDKYLVSIPSLKTPAXXPKPV

SEQ ID NO: 4702 - protein, 37 aa, Artificial Sequence
  Non-cyclic GFR-binding peptide
  MOD_RES (2), (2): Xaa is C or S
  MOD_RES (15), (16), (17), (18), (19): Xaa is A or G
  MOD_RES (20), (21), (22), (23): Xaa is A or G or is absent
KXALHDELTYHYKLXXXXXXXXXKYLVSIPSLQVQTP

SEQ ID NO: 4703 - protein, 36 aa, Artificial Sequence
  Non-cyclic GFR-binding peptide
  MOD_RES (33), (34): Xaa is C or S
  MOD_RES (11), (12), (13), (14), (15): Xaa is A or G
  MOD_RES (16), (17), (18), (19): Xaa is A or G or is absent
EVVMDRYKKLXXXXXXXXXFYLMSIANLETPVXXAK

SEQ ID NO: 4704 - protein, 39 aa, Artificial Sequence
  Non-cyclic GFR-binding peptide
  MOD_RES (2), (36), (37): Xaa is C or S
  MOD_RES (14), (15), (16), (17), (18): Xaa is A or G
  MOD_RES (19), (20), (21), (22): Xaa is A or G or is absent
GXGEVVMERHKRLXXXXXXXXXYYLMSTASLETPVXXAK

SEQ ID NO: 4705 - protein, 34 aa, Artificial Sequence
  Non-cyclic GFR-binding peptide
  MOD_RES (33), (34): Xaa is C or S
  MOD_RES (11), (12), (13), (14), (15): Xaa is A or G
  MOD_RES (16), (17), (18), (19): Xaa is A or G or is absent
SRVIMRYKKLXXXXXXXXXFYLISIANLAQPVXX

SEQ ID NO: 4706 - protein, 37 aa, Artificial Sequence
  Non-cyclic GFR-binding peptide
  MOD_RES (2), (34), (35): Xaa is C or S
GXARVVMNRHKRLIVNSSDDYYLVSTASLQTPAXXPK

SEQ ID NO: 4707 - protein, 41 aa, Artificial Sequence
  Non-cyclic GFR-binding peptide
  MOD_RES (1), (35), (36): Xaa is C or S
  MOD_RES (13), (14), (15), (16), (17): Xaa is A or G
  MOD_RES (18), (19), (20), (21): Xaa is A or G or is absent
XARVVMNRHKRLXXXXXXXXXYYLVSTASLQTPAXXPKPVT

SEQ ID NO: 4708 - protein, 34 aa, Artificial Sequence
  Non-cyclic GFR-binding peptide
  MOD_RES (33), (34): Xaa is C or S
EAVSMGERHKRLTPVGMDDYYLVSTASLKTPVXX

SEQ ID NO: 4709 - protein, 37 aa, Artificial Sequence
  Non-cyclic GFR-binding peptide
  MOD_RES (34), (35): Xaa is C or S
  MOD_RES (12), (13), (14), (15), (16): Xaa is A or G
  MOD_RES (17), (18), (19), (20): Xaa is A or G or is absent
SRVVMNYHYKLXXXXXXXXXKYLVSIPSLKTPAXXPK

SEQ ID NO: 4710 - protein, 40 aa, Artificial Sequence
  Non-cyclic GFR-binding peptide
  MOD_RES (2), (4), (36): Xaa is C or S
HXGXSRVVMNRHKRLIVNSSDDYYLVSTASLKTPAXTPKT

SEQ ID NO: 4711 - protein, 44 aa, Artificial Sequence
  Non-cyclic GFR-binding peptide
  MOD_RES (2), (4), (38), (39): Xaa is C or S
  MOD_RES (16), (17), (18), (19), (20): Xaa is A or G
  MOD_RES (21), (22), (23), (24): Xaa is A or G or is absent
RXGXGEVVMDRYKKLXXXXXXXXXFYLMSIANLETPVXXAKPIK

SEQ ID NO: 4712 - protein, 42 aa, Artificial Sequence
  Non-cyclic GFR-binding peptide
  MOD_RES (2), (4), (37), (38): Xaa is C or S
  MOD_RES (15), (16), (17), (18), (19): Xaa is A or G
  MOD_RES (20), (21), (22), (23): Xaa is A or G or is absent
SXKXSKVIMRYKKLXXXXXXXXXFYLISIANLDQSVXXPSAS

SEQ ID NO: 4713 - protein, 37 aa, Artificial Sequence
  Non-cyclic GFR-binding peptide
  MOD_RES (32), (33): Xaa is C or S
ARVVMNQYNKLIVNSSDDLYLVSIASLQTPAXXPKPV

SEQ ID NO: 4714 - protein, 33 aa, Artificial Sequence
  Non-cyclic GFR-binding peptide
  MOD_RES (1), (1): Xaa is C or S
  MOD_RES (12), (13), (14), (15), (16): Xaa is A or G
  MOD_RES (17), (18), (19), (20): Xaa is A or G or is absent
XSKVIMYHYKLXXXXXXXXXKYLISIPSLDQSV

SEQ ID NO: 4715 - protein, 37 aa, Artificial Sequence
  Non-cyclic GFR-binding peptide
  MOD_RES (2), (36): Xaa is C or S
  MOD_RES (14), (15), (16), (17), (18): Xaa is A or G
  MOD_RES (19), (20), (21), (22): Xaa is A or G or is absent
GXSRVVMNRHKRLXXXXXXXXXYYLVSTASLKTPAXT

SEQ ID NO: 4716 - protein, 38 aa, Artificial Sequence
  Non-cyclic GFR-binding peptide
  MOD_RES (2), (34), (35): Xaa is C or S
GXGEVVMERYKKLVVKDYEDFYLMSIANLETPVXXAKP

SEQ ID NO: 4717 - protein, 32 aa, Artificial Sequence
  Non-cyclic GFR-binding peptide
  MOD_RES (1), (1): Xaa is C or S
XAKVVMNRYKKLIVNNSSDFYLVSIANLKTPA

SEQ ID NO: 4718 - protein, 40 aa, Artificial Sequence
  Non-cyclic GFR-binding peptide
  MOD_RES (2), (4), (38), (39): Xaa is C or S
  MOD_RES (16), (17), (18), (19), (20): Xaa is A or G
  MOD_RES (21), (22), (23), (24): Xaa is A or G or is absent
HXGXARVVMNQYNKLXXXXXXXXXLYLVSIASLQTPAXXP

SEQ ID NO: 4719 - protein, 37 aa, Artificial Sequence
  Non-cyclic GFR-binding peptide
  MOD_RES (31), (32): Xaa is C or S
SKVIMQYNKLIKPTKGILYLISIASLDQSVXXPSASA

SEQ ID NO: 4720 - protein, 32 aa, Artificial Sequence
  Non-cyclic GFR-binding peptide
  MOD_RES (1), (32): Xaa is C or S
XSRVIMYHYKLVKPKRGVKYLISIPSLAQPVX

SEQ ID NO: 4721 - protein, 42 aa, Artificial Sequence
  Non-cyclic GFR-binding peptide
  MOD_RES (2), (39): Xaa is C or S
KXALHDELTRHKRLFIPKKRVIEYYLVSTASLQVQTPRXQVN

SEQ ID NO: 4722 - protein, 39 aa, Artificial Sequence
  Non-cyclic GFR-binding peptide
  MOD_RES (1), (33), (34): Xaa is C or S
XGEVVMDRYKKLVVKENEDFYLMSIANLETPVXXAKPIK

SEQ ID NO: 4723 - protein, 36 aa, Artificial Sequence
  Non-cyclic GFR-binding peptide
  MOD_RES (2), (4), (35), (36): Xaa is C or S
SXKXSRVIMRYKKLVKPKRGVFYLISIANLAQPVXX

SEQ ID NO: 4724 - protein, 37 aa, Artificial Sequence
  Non-cyclic GFR-binding peptide
  MOD_RES (34), (35): Xaa is C or S
  MOD_RES (12), (13), (14), (15), (16): Xaa is A or G
  MOD_RES (17), (18), (19), (20): Xaa is A or G or is absent
ARVVMNQYNKLXXXXXXXXXLYLVSIASLQTPAXXPK

SEQ ID NO: 4725 - protein, 41 aa, Artificial Sequence
  Non-cyclic GFR-binding peptide
  MOD_RES (1), (3), (37), (38): Xaa is C or S
  MOD_RES (15), (16), (17), (18), (19): Xaa is A or G
  MOD_RES (20), (21), (22), (23): Xaa is A or G or is absent
XGXSRVVMNQYNKLXXXXXXXXXLYLVSIASLKTPAXXPKP

SEQ ID NO: 4726 - protein, 41 aa, Artificial Sequence
  Non-cyclic GFR-binding peptide
  MOD_RES (2), (36), (37): Xaa is C or S
  MOD_RES (14), (15), (16), (17), (18): Xaa is A or G
  MOD_RES (19), (20), (21), (22): Xaa is A or G or is absent
GXSRVVMNQYNKLXXXXXXXXXLYLVSIASLKTPAXXPKPV

SEQ ID NO: 4727 - protein, 31 aa, Artificial Sequence
  Non-cyclic GFR-binding peptide
  MOD_RES (31), (31): Xaa is C or S
SKVVMQYNKLVKPTRGVLYLISIASLDQPVX

SEQ ID NO: 4728 - protein, 38 aa, Artificial Sequence
  Non-cyclic GFR-binding peptide
  MOD_RES (32), (33): Xaa is C or S
AKVVMNQYNKLIVNNSSDLYLVSIASLKTPAXXAKPVA

SEQ ID NO: 4729 - protein, 36 aa, Artificial Sequence
  Non-cyclic GFR-binding peptide
  MOD_RES (2), (34), (35): Xaa is C or S
GXGEVVMDRYKKLVVKENEDFYLMSIANLETPVXXA

SEQ ID NO: 4730 - protein, 36 aa, Artificial Sequence
  Non-cyclic GFR-binding peptide
  MOD_RES (1), (33), (34): Xaa is C or S
XGEVVMERHKRLVVKDYEDYYLMSTASLETPVXXAK

SEQ ID NO: 4731 - protein, 35 aa, Artificial Sequence
  Non-cyclic GFR-binding peptide
  MOD_RES (1), (3), (35): Xaa is C or S
XGXARVVMNYHYKLIVNSSDDKYLVSIPSLQTPAX

SEQ ID NO: 4732 - protein, 42 aa, Artificial Sequence
  Non-cyclic GFR-binding peptide
  MOD_RES (2), (36): Xaa is C or S
  MOD_RES (14), (15), (16), (17), (18): Xaa is A or G
  MOD_RES (19), (20), (21), (22): Xaa is A or G or is absent
GXSRVVMNQYNKLXXXXXXXXXLYLVSIASLKTPAXTPKTVH

SEQ ID NO: 4733 - protein, 35 aa, Artificial Sequence
  Non-cyclic GFR-binding peptide
  MOD_RES (2), (4): Xaa is C or S
HXGXSRVVMNYHYKLIVNSSDDKYLVSIPSLKTPA

SEQ ID NO: 4734 - protein, 41 aa, Artificial Sequence
  Non-cyclic GFR-binding peptide
  MOD_RES (2), (4), (36): Xaa is C or S
HXGXSRVVMNYHYKLIVNSSDDKYLVSIPSLKTPAXTPKTV

SEQ ID NO: 4735 - protein, 40 aa, Artificial Sequence
  Non-cyclic GFR-binding peptide
  MOD_RES (2), (39): Xaa is C or S
KXALHDELTRYKKLFIPKKRVIEFYLVSIANLQVQTPRXQ

SEQ ID NO: 4736 - protein, 38 aa, Artificial Sequence
  Non-cyclic GFR-binding peptide
  MOD_RES (33), (34): Xaa is C or S
  MOD_RES (11), (12), (13), (14), (15): Xaa is A or G
  MOD_RES (16), (17), (18), (19): Xaa is A or G or is absent
RVVMNQYNKLXXXXXXXXXLYLVSIASLQTPAXXPKPV

SEQ ID NO: 4737 - protein, 43 aa, Artificial Sequence
  Non-cyclic GFR-binding peptide
  MOD_RES (2), (4), (38): Xaa is C or S
  MOD_RES (16), (17), (18), (19), (20): Xaa is A or G
  MOD_RES (21), (22), (23), (24): Xaa is A or G or is absent
HXGXSRVVMNQYNKLXXXXXXXXXLYLVSIASLKTPAXTPKTV

SEQ ID NO: 4738 - protein, 36 aa, Artificial Sequence
  Non-cyclic GFR-binding peptide
  MOD_RES (1), (33), (34): Xaa is C or S
XGEVVMDRHKRLVVKENEDYYLMSTASLETPVXXAK

SEQ ID NO: 4739 - protein, 37 aa, Artificial Sequence
  Non-cyclic GFR-binding peptide
  MOD_RES (34), (35): Xaa is C or S
  MOD_RES (12), (13), (14), (15), (16): Xaa is A or G
  MOD_RES (17), (18), (19), (20): Xaa is A or G or is absent
GEVVMDRYKKLXXXXXXXXXFYLMSIANLETPVXXAK

SEQ ID NO: 4740 - protein, 36 aa, Artificial Sequence
  Non-cyclic GFR-binding peptide
  MOD_RES (1), (35), (36): Xaa is C or S
  MOD_RES (13), (14), (15), (16), (17): Xaa is A or G
  MOD_RES (18), (19), (20), (21): Xaa is A or G or is absent
XGEVVMDYHYKLXXXXXXXXXKYLMSIPSLETPVXX

SEQ ID NO: 4741 - protein, 37 aa, Artificial Sequence
  Non-cyclic GFR-binding peptide
  MOD_RES (1), (32), (33): Xaa is C or S
XSKVIMRHKRLIKPTKGIYYLISTASLDQSVXXPSAS

SEQ ID NO: 4742 - protein, 32 aa, Artificial Sequence
  Non-cyclic GFR-binding peptide
  MOD_RES (31), (32): Xaa is C or S
SRVIMRYKKLVKPKRGVFYLISIANLAQPVXX

SEQ ID NO: 4743 - protein, 42 aa, Artificial Sequence
  Non-cyclic GFR-binding peptide
  MOD_RES (1), (3), (36), (37): Xaa is C or S
  MOD_RES (14), (15), (16), (17), (18): Xaa is A or G
  MOD_RES (19), (20), (21), (22): Xaa is A or G or is absent
XKXSKVIMRHKRLXXXXXXXXXYYLISTASLDQSVXXPSASA

SEQ ID NO: 4744 - protein, 30 aa, Artificial Sequence
  Non-cyclic GFR-binding peptide
RVVMNQYNKLIVNSSDDLYLVSIASLQTPA

SEQ ID NO: 4745 - protein, 35 aa, Artificial Sequence
  Non-cyclic GFR-binding peptide
  MOD_RES (2), (34), (35): Xaa is C or S
GXGEVVMDYHYKLVVKENEDKYLMSIPSLETPVXX

SEQ ID NO: 4746 - protein, 34 aa, Artificial Sequence
  Non-cyclic GFR-binding peptide
  MOD_RES (1), (3), (34): Xaa is C or S
XKXSKVVMYHYKLVKPTRGVKYLISIPSLDQPVX

SEQ ID NO: 4747 - protein, 38 aa, Artificial Sequence
  Non-cyclic GFR-binding peptide
  MOD_RES (1), (34), (35): Xaa is C or S
XEAVSMGERHKRLTPVGMDDYYLVSTASLKTPVXXAKG

SEQ ID NO: 4748 - protein, 34 aa, Artificial Sequence
  Non-cyclic GFR-binding peptide
  MOD_RES (33), (34): Xaa is C or S
  MOD_RES (11), (12), (13), (14), (15): Xaa is A or G
  MOD_RES (16), (17), (18), (19): Xaa is A or G or is absent
EVVMERYKKLXXXXXXXXXFYLMSIANLETPVXX

SEQ ID NO: 4749 - protein, 32 aa, Artificial Sequence
  Non-cyclic GFR-binding peptide
  MOD_RES (1), (1): Xaa is C or S
XGEVVMERHKRLVVKDYEDYYLMSTASLETPV

SEQ ID NO: 4750 - protein, 37 aa, Artificial Sequence
  Non-cyclic GFR-binding peptide
  MOD_RES (33), (34): Xaa is C or S
  MOD_RES (11), (12), (13), (14), (15): Xaa is A or G
  MOD_RES (16), (17), (18), (19): Xaa is A or G or is absent
SKVVMYHYKLXXXXXXXXXKYLISIPSLDQPVXXPSA

SEQ ID NO: 4751 - protein, 33 aa, Artificial Sequence
  Non-cyclic GFR-binding peptide
  MOD_RES (12), (13), (14), (15), (16): Xaa is A or G
  MOD_RES (17), (18), (19), (20): Xaa is A or G or is absent
GEVVMDRYKKLXXXXXXXXXFYLMSIANLETPV

SEQ ID NO: 4752 - protein, 40 aa, Artificial Sequence
  Non-cyclic GFR-binding peptide
  MOD_RES (2), (4): Xaa is C or S
EXKXALHDELTRYKKLFIPKKRVIEFYLVSIANLQVQTPR

SEQ ID NO: 4753 - protein, 38 aa, Artificial Sequence
  Non-cyclic GFR-binding peptide
  MOD_RES (1), (32), (33): Xaa is C or S
XSKVVMYHYKLVKPTRGVKYLISIPSLDQPVXXPSASA

SEQ ID NO: 4754 - protein, 36 aa, Artificial Sequence
  Non-cyclic GFR-binding peptide
  MOD_RES (2), (33), (34): Xaa is C or S
KXSKVVMRYKKLVKPTRGVFYLISIANLDQPVXXPS

SEQ ID NO: 4755 - protein, 38 aa, Artificial Sequence
  Non-cyclic GFR-binding peptide
  MOD_RES (1), (35), (36): Xaa is C or S
  MOD_RES (13), (14), (15), (16), (17): Xaa is A or G
  MOD_RES (18), (19), (20), (21): Xaa is A or G or is absent
XARVVMNYHYKLXXXXXXXXXKYLVSIPSLQTPAXXPK

SEQ ID NO: 4756 - protein, 37 aa, Artificial Sequence
  Non-cyclic GFR-binding peptide
  MOD_RES (1), (32), (33): Xaa is C or S
XSKVVMYHYKLVKPTRGVKYLISIPSLDQPVXXPSAS

SEQ ID NO: 4757 - protein, 32 aa, Artificial Sequence
  Non-cyclic GFR-binding peptide
EAVSMGEQYNKLTPVGMDDLYLVSIASLKTPV

SEQ ID NO: 4758 - protein, 44 aa, Artificial Sequence
  Non-cyclic GFR-binding peptide
  MOD_RES (2), (4), (38), (39): Xaa is C or S
  MOD_RES (16), (17), (18), (19), (20): Xaa is A or G
  MOD_RES (21), (22), (23), (24): Xaa is A or G or is absent
HXGXARVVMNYHYKLXXXXXXXXXKYLVSIPSLQTPAXXPKPVT

SEQ ID NO: 4759 - protein, 38 aa, Artificial Sequence
  Non-cyclic GFR-binding peptide
  MOD_RES (1), (38): Xaa is C or S
XALHDELTQYNKLFIPKKRVIELYLVSIASLQVQTPRX

SEQ ID NO: 4760 - protein, 35 aa, Artificial Sequence
  Non-cyclic GFR-binding peptide
  MOD_RES (1), (3), (35): Xaa is C or S
XGXAKVVMNQYNKLIVNNSSDLYLVSIASLKTPAX

SEQ ID NO: 4761 - protein, 33 aa, Artificial Sequence
  Non-cyclic GFR-binding peptide
  MOD_RES (33), (33): Xaa is C or S
  MOD_RES (11), (12), (13), (14), (15): Xaa is A or G
  MOD_RES (16), (17), (18), (19): Xaa is A or G or is absent
RVVMNQYNKLXXXXXXXXXLYLVSIASLQTPAX

SEQ ID NO: 4762 - protein, 42 aa, Artificial Sequence
  Non-cyclic GFR-binding peptide
  MOD_RES (2), (4), (38), (39): Xaa is C or S
  MOD_RES (16), (17), (18), (19), (20): Xaa is A or G
  MOD_RES (21), (22), (23), (24): Xaa is A or G or is absent
RXGXGEVVMEYHYKLXXXXXXXXXKYLMSIPSLETPVXXAKP

SEQ ID NO: 4763 - protein, 35 aa, Artificial Sequence
  Non-cyclic GFR-binding peptide
  MOD_RES (1), (32), (33): Xaa is C or S
XSKVVMRYKKLVKPTRGVFYLISIANLDQPVXXPS

SEQ ID NO: 4764 - protein, 38 aa, Artificial Sequence
  Non-cyclic GFR-binding peptide
  MOD_RES (1), (3), (35), (36): Xaa is C or S
XGXSRVVMNRHKRLIVNSSDDYYLVSTASLKTPAXXPK

SEQ ID NO: 4765 - protein, 39 aa, Artificial Sequence
  Non-cyclic GFR-binding peptide
  MOD_RES (1), (3), (37), (38): Xaa is C or S
  MOD_RES (15), (16), (17), (18), (19): Xaa is A or G
  MOD_RES (20), (21), (22), (23): Xaa is A or G or is absent
XGXAKVVMNRYKKLXXXXXXXXXFYLVSIANLKTPAXXA

SEQ ID NO: 4766 - protein, 36 aa, Artificial Sequence
  Non-cyclic GFR-binding peptide
  MOD_RES (32), (33): Xaa is C or S
SRVVMNYHYKLIVNSSDDKYLVSIPSLKTPAXXPKP

SEQ ID NO: 4767 - protein, 41 aa, Artificial Sequence
  Non-cyclic GFR-binding peptide
  MOD_RES (1), (3), (35): Xaa is C or S
XGXSRVVMNYHYKLIVNSSDDKYLVSIPSLKTPAXTPKTVH

SEQ ID NO: 4768 - protein, 38 aa, Artificial Sequence
  Non-cyclic GFR-binding peptide
  MOD_RES (1), (33), (34): Xaa is C or S
XGEVVMDYHYKLVVKENEDKYLMSIPSLETPVXXAKPI

SEQ ID NO: 4769 - protein, 36 aa, Artificial Sequence
  Non-cyclic GFR-binding peptide
  MOD_RES (33), (34): Xaa is C or S
EAVSMGERYKKLTPVGMDDFYLVSIANLKTPVXXAK

SEQ ID NO: 4770 - protein, 35 aa, Artificial Sequence
  Non-cyclic GFR-binding peptide
  MOD_RES (1), (35): Xaa is C or S
  MOD_RES (13), (14), (15), (16), (17): Xaa is A or G
  MOD_RES (18), (19), (20), (21): Xaa is A or G or is absent
XARVVMNQYNKLXXXXXXXXXLYLVSIASLQTPAX

SEQ ID NO: 4771 - protein, 36 aa, Artificial Sequence
  Non-cyclic GFR-binding peptide
  MOD_RES (1), (36): Xaa is C or S
  MOD_RES (14), (15), (16), (17), (18): Xaa is A or G
  MOD_RES (19), (20), (21), (22): Xaa is A or G or is absent
XEAVSMGERHKRLXXXXXXXXXYYLVSTASLKTPVX

SEQ ID NO: 4772 - protein, 44 aa, Artificial Sequence
  Non-cyclic GFR-binding peptide
  MOD_RES (1), (3), (40): Xaa is C or S
  MOD_RES (16), (17), (18), (19), (20): Xaa is A or G
  MOD_RES (21), (22), (23), (24): Xaa is A or G or is absent
XKXALHDELTRYKKLXXXXXXXXXFYLVSIANLQVQTPRXQVNR

SEQ ID NO: 4773 - protein, 37 aa, Artificial Sequence
  Non-cyclic GFR-binding peptide
  MOD_RES (2), (34), (35): Xaa is C or S
GXGEVVMDRHKRLVVKENEDYYLMSTASLETPVXXAK

SEQ ID NO: 4774 - protein, 39 aa, Artificial Sequence
  Non-cyclic GFR-binding peptide
  MOD_RES (33), (34): Xaa is C or S
  MOD_RES (11), (12), (13), (14), (15): Xaa is A or G
  MOD_RES (16), (17), (18), (19): Xaa is A or G or is absent
KVVMNQYNKLXXXXXXXXXLYLVSIASLKTPAXXAKPVA

SEQ ID NO: 4775 - protein, 31 aa, Artificial Sequence
  Non-cyclic GFR-binding peptide
  MOD_RES (1), (1): Xaa is C or S
XSKVIMYHYKLIKPTKGIKYLISIPSLDQSV

SEQ ID NO: 4776 - protein, 35 aa, Artificial Sequence
  Non-cyclic GFR-binding peptide
  MOD_RES (1), (34), (35): Xaa is C or S
  MOD_RES (12), (13), (14), (15), (16): Xaa is A or G
  MOD_RES (17), (18), (19), (20): Xaa is A or G or is absent
XSRVIMQYNKLXXXXXXXXXLYLISIASLAQPVXX

SEQ ID NO: 4777 - protein, 39 aa, Artificial Sequence
  Non-cyclic GFR-binding peptide
  MOD_RES (37), (37): Xaa is C or S
ALHDELTQYNKLFIPKKRVIELYLVSIASLQVQTPRXQV

SEQ ID NO: 4778 - protein, 39 aa, Artificial Sequence
  Non-cyclic GFR-binding peptide
  MOD_RES (37), (37): Xaa is C or S
ALHDELTRHKRLFIPKKRVIEYYLVSTASLQVQTPRXQV

SEQ ID NO: 4779 - protein, 39 aa, Artificial Sequence
  Non-cyclic GFR-binding peptide
  MOD_RES (36), (36): Xaa is C or S
LHDELTRHKRLFIPKKRVIEYYLVSTASLQVQTPRXQVN

SEQ ID NO: 4780 - protein, 40 aa, Artificial Sequence
  Non-cyclic GFR-binding peptide
  MOD_RES (34), (35): Xaa is C or S
  MOD_RES (12), (13), (14), (15), (16): Xaa is A or G
  MOD_RES (17), (18), (19), (20): Xaa is A or G or is absent
GEVVMDYHYKLXXXXXXXXXKYLMSIPSLETPVXXAKPIK

SEQ ID NO: 4781 - protein, 32 aa, Artificial Sequence
  Non-cyclic GFR-binding peptide
  MOD_RES (31), (32): Xaa is C or S
SRVIMQYNKLVKPKRGVLYLISIASLAQPVXX

SEQ ID NO: 4782 - protein, 35 aa, Artificial Sequence
  Non-cyclic GFR-binding peptide
  MOD_RES (34), (34): Xaa is C or S
  MOD_RES (12), (13), (14), (15), (16): Xaa is A or G
  MOD_RES (17), (18), (19), (20): Xaa is A or G or is absent
SRVVMNYHYKLXXXXXXXXXKYLVSIPSLKTPAXT

SEQ ID NO: 4783 - protein, 41 aa, Artificial Sequence
  Non-cyclic GFR-binding peptide
  MOD_RES (2), (37), (38): Xaa is C or S
  MOD_RES (15), (16), (17), (18), (19): Xaa is A or G
  MOD_RES (20), (21), (22), (23): Xaa is A or G or is absent
GXEAVSMGEQYNKLXXXXXXXXXLYLVSIASLKTPVXXAKG

SEQ ID NO: 4784 - protein, 37 aa, Artificial Sequence
  Non-cyclic GFR-binding peptide
  MOD_RES (1), (3), (36), (37): Xaa is C or S
  MOD_RES (14), (15), (16), (17), (18): Xaa is A or G
  MOD_RES (19), (20), (21), (22): Xaa is A or G or is absent
XKXSKVVMRYKKLXXXXXXXXXFYLISIANLDQPVXX

SEQ ID NO: 4785 - protein, 40 aa, Artificial Sequence
  Non-cyclic GFR-binding peptide
  MOD_RES (1), (3), (35), (36): Xaa is C or S
XGXAKVVMNQYNKLIVNNSSDLYLVSIASLKTPAXXAKPV

SEQ ID NO: 4786 - protein, 35 aa, Artificial Sequence
  Non-cyclic GFR-binding peptide
  MOD_RES (2), (34), (35): Xaa is C or S
GXAKVVMNRYKKLIVNNSSDFYLVSIANLKTPAXX

SEQ ID NO: 4787 - protein, 40 aa, Artificial Sequence
  Non-cyclic GFR-binding peptide
  MOD_RES (2), (4), (35), (36): Xaa is C or S
SXKXSRVIMQYNKLVKPKRGVLYLISIASLAQPVXXPAAS

SEQ ID NO: 4788 - protein, 37 aa, Artificial Sequence
  Non-cyclic GFR-binding peptide
  MOD_RES (2), (35), (36): Xaa is C or S
  MOD_RES (13), (14), (15), (16), (17): Xaa is A or G
  MOD_RES (18), (19), (20), (21): Xaa is A or G or is absent
KXSKVIMYHYKLXXXXXXXXXKYLISIPSLDQSVXXP

SEQ ID NO: 4789 - protein, 40 aa, Artificial Sequence
  Non-cyclic GFR-binding peptide
  MOD_RES (1), (35), (36): Xaa is C or S
  MOD_RES (13), (14), (15), (16), (17): Xaa is A or G
  MOD_RES (18), (19), (20), (21): Xaa is A or G or is absent
XARVVMNRHKRLXXXXXXXXXYYLVSTASLQTPAXXPKPV

SEQ ID NO: 4790 - protein, 37 aa, Artificial Sequence
  Non-cyclic GFR-binding peptide
  MOD_RES (31), (32): Xaa is C or S
SKVIMRYKKLIKPTKGIFYLISIANLDQSVXXPSASA

SEQ ID NO: 4791 - protein, 42 aa, Artificial Sequence
  Non-cyclic GFR-binding peptide
  MOD_RES (2), (37), (38): Xaa is C or S
  MOD_RES (15), (16), (17), (18), (19): Xaa is A or G
  MOD_RES (20), (21), (22), (23): Xaa is A or G or is absent
GXEAVSMGERYKKLXXXXXXXXXFYLVSIANLKTPVXXAKGV

SEQ ID NO: 4792 - protein, 41 aa, Artificial Sequence
  Non-cyclic GFR-binding peptide
  MOD_RES (2), (4), (35), (36): Xaa is C or S
SXKXSRVIMQYNKLVKPKRGVLYLISIASLAQPVXXPAASA

SEQ ID NO: 4793 - protein, 38 aa, Artificial Sequence
  Non-cyclic GFR-binding peptide
  MOD_RES (2), (37), (38): Xaa is C or S
  MOD_RES (15), (16), (17), (18), (19): Xaa is A or G
  MOD_RES (20), (21), (22), (23): Xaa is A or G or is absent
GXEAVSMGERHKRLXXXXXXXXXYYLVSTASLKTPVXX

SEQ ID NO: 4794 - protein, 35 aa, Artificial Sequence
  Non-cyclic GFR-binding peptide
  MOD_RES (33), (34): Xaa is C or S
  MOD_RES (11), (12), (13), (14), (15): Xaa is A or G
  MOD_RES (16), (17), (18), (19): Xaa is A or G or is absent
SRVIMQYNKLXXXXXXXXXLYLISIASLAQPVXXP

SEQ ID NO: 4795 - protein, 39 aa, Artificial Sequence
  Non-cyclic GFR-binding peptide
  MOD_RES (2), (4), (38), (39): Xaa is C or S
  MOD_RES (16), (17), (18), (19), (20): Xaa is A or G
  MOD_RES (21), (22), (23), (24): Xaa is A or G or is absent
HXGXARVVMNQYNKLXXXXXXXXXLYLVSIASLQTPAXX

SEQ ID NO: 4796 - protein, 34 aa, Artificial Sequence
  Non-cyclic GFR-binding peptide
  MOD_RES (1), (1): Xaa is C or S
  MOD_RES (13), (14), (15), (16), (17): Xaa is A or G
  MOD_RES (18), (19), (20), (21): Xaa is A or G or is absent
XARVVMNYHYKLXXXXXXXXXKYLVSIPSLQTPA

SEQ ID NO: 4797 - protein, 35 aa, Artificial Sequence
  Non-cyclic GFR-binding peptide
  MOD_RES (33), (34): Xaa is C or S
EAVSMGEQYNKLTPVGMDDLYLVSIASLKTPVXXA

SEQ ID NO: 4798 - protein, 36 aa, Artificial Sequence
  Non-cyclic GFR-binding peptide
  MOD_RES (1), (32), (33): Xaa is C or S
XSKVVMQYNKLVKPTRGVLYLISIASLDQPVXXPSA

SEQ ID NO: 4799 - protein, 35 aa, Artificial Sequence
  Non-cyclic GFR-binding peptide
  MOD_RES (2), (34), (35): Xaa is C or S
GXGEVVMERHKRLVVKDYEDYYLMSTASLETPVXX

SEQ ID NO: 4800 - protein, 35 aa, Artificial Sequence
  Non-cyclic GFR-binding peptide
  MOD_RES (2), (4), (35): Xaa is C or S
SXKXSKVVMYHYKLVKPTRGVKYLISIPSLDQPVX

SEQ ID NO: 4801 - protein, 31 aa, Artificial Sequence
  Non-cyclic GFR-binding peptide
  MOD_RES (31), (31): Xaa is C or S
RVVMNQYNKLIVNSSDDLYLVSIASLQTPAX

SEQ ID NO: 4802 - protein, 40 aa, Artificial Sequence
  Non-cyclic GFR-binding peptide
  MOD_RES (2), (39): Xaa is C or S
  MOD_RES (15), (16), (17), (18), (19): Xaa is A or G
  MOD_RES (20), (21), (22), (23): Xaa is A or G or is absent
KXALHDELTRHKRLXXXXXXXXXYYLVSTASLQVQTPRXQ

SEQ ID NO: 4803 - protein, 42 aa, Artificial Sequence
  Non-cyclic GFR-binding peptide
  MOD_RES (2), (4), (37), (38): Xaa is C or S
  MOD_RES (15), (16), (17), (18), (19): Xaa is A or G
  MOD_RES (20), (21), (22), (23): Xaa is A or G or is absent
SXKXSRVIMQYNKLXXXXXXXXXLYLISIASLAQPVXXPAAS

SEQ ID NO: 4804 - protein, 34 aa, Artificial Sequence
  Non-cyclic GFR-binding peptide
  MOD_RES (1), (3), (34): Xaa is C or S
XKXSRVIMYHYKLVKPKRGVKYLISIPSLAQPVX

SEQ ID NO: 4805 - protein, 41 aa, Artificial Sequence
  Non-cyclic GFR-binding peptide
  MOD_RES (2), (35), (36): Xaa is C or S
  MOD_RES (13), (14), (15), (16), (17): Xaa is A or G
  MOD_RES (18), (19), (20), (21): Xaa is A or G or is absent
KXSKVIMQYNKLXXXXXXXXXLYLISIASLDQSVXXPSASA

SEQ ID NO: 4806 - protein, 41 aa, Artificial Sequence
  Non-cyclic GFR-binding peptide
  MOD_RES (2), (35), (36): Xaa is C or S
  MOD_RES (13), (14), (15), (16), (17): Xaa is A or G
  MOD_RES (18), (19), (20), (21): Xaa is A or G or is absent
KXSKVIMRYKKLXXXXXXXXXFYLISIANLDQSVXXPSASA

SEQ ID NO: 4807 - protein, 38 aa, Artificial Sequence
  Non-cyclic GFR-binding peptide
  MOD_RES (33), (34): Xaa is C or S
  MOD_RES (11), (12), (13), (14), (15): Xaa is A or G
  MOD_RES (16), (17), (18), (19): Xaa is A or G or is absent
KVVMNYHYKLXXXXXXXXXKYLVSIPSLKTPAXXAKPV

SEQ ID NO: 4808 - protein, 39 aa, Artificial Sequence
  Non-cyclic GFR-binding peptide
  MOD_RES (1), (3), (37), (38): Xaa is C or S
  MOD_RES (15), (16), (17), (18), (19): Xaa is A or G
  MOD_RES (20), (21), (22), (23): Xaa is A or G or is absent
XGXSRVVMNQYNKLXXXXXXXXXLYLVSIASLKTPAXXP

SEQ ID NO: 4809 - protein, 35 aa, Artificial Sequence
  Non-cyclic GFR-binding peptide
  MOD_RES (2), (4): Xaa is C or S
HXGXSRVVMNQYNKLIVNSSDDLYLVSIASLKTPA

SEQ ID NO: 4810 - protein, 36 aa, Artificial Sequence
  Non-cyclic GFR-binding peptide
  MOD_RES (2), (33), (34): Xaa is C or S
KXSRVIMRHKRLVKPKRGVYYLISTASLAQPVXXPA

SEQ ID NO: 4811 - protein, 35 aa, Artificial Sequence
  Non-cyclic GFR-binding peptide
  MOD_RES (31), (32): Xaa is C or S
RVVMNRHKRLIVNSSDDYYLVSTASLKTPAXXPKP

SEQ ID NO: 4812 - protein, 39 aa, Artificial Sequence
  Non-cyclic GFR-binding peptide
  MOD_RES (2), (4), (37), (38): Xaa is C or S
RXGXEAVSMGERYKKLTPVGMDDFYLVSIANLKTPVXXA

SEQ ID NO: 4813 - protein, 38 aa, Artificial Sequence
  Non-cyclic GFR-binding peptide
  MOD_RES (1), (3), (35), (36): Xaa is C or S
XGXGEVVMDRYKKLVVKENEDFYLMSIANLETPVXXAK

SEQ ID NO: 4814 - protein, 35 aa, Artificial Sequence
  Non-cyclic GFR-binding peptide
  MOD_RES (1), (34), (35): Xaa is C or S
  MOD_RES (12), (13), (14), (15), (16): Xaa is A or G
  MOD_RES (17), (18), (19), (20): Xaa is A or G or is absent
XSRVIMRHKRLXXXXXXXXXYYLISTASLAQPVXX

SEQ ID NO: 4815 - protein, 45 aa, Artificial Sequence
  Non-cyclic GFR-binding peptide
  MOD_RES (2), (4), (39), (40): Xaa is C or S
  MOD_RES (17), (18), (19), (20), (21): Xaa is A or G
  MOD_RES (22), (23), (24), (25): Xaa is A or G or is absent
RXGXEAVSMGERYKKLXXXXXXXXXFYLVSIANLKTPVXXAKGVK

SEQ ID NO: 4816 - protein, 37 aa, Artificial Sequence
  Non-cyclic GFR-binding peptide
  MOD_RES (1), (34), (35): Xaa is C or S
XEAVSMGERYKKLTPVGMDDFYLVSIANLKTPVXXAK

SEQ ID NO: 4817 - protein, 36 aa, Artificial Sequence
  Non-cyclic GFR-binding peptide
  MOD_RES (2), (4), (36): Xaa is C or S
RXGXGEVVMEYHYKLVVKDYEDKYLMSIPSLETPVX

SEQ ID NO: 4818 - protein, 33 aa, Artificial Sequence
  Non-cyclic GFR-binding peptide
  MOD_RES (33), (33): Xaa is C or S
  MOD_RES (11), (12), (13), (14), (15): Xaa is A or G
  MOD_RES (16), (17), (18), (19): Xaa is A or G or is absent
EVVMDRYKKLXXXXXXXXXFYLMSIANLETPVX

SEQ ID NO: 4819 - protein, 40 aa, Artificial Sequence
  Non-cyclic GFR-binding peptide
  MOD_RES (1), (3), (35), (36): Xaa is C or S
XGXGEVVMERYKKLVVKDYEDFYLMSIANLETPVXXAKPI

SEQ ID NO: 4820 - protein, 39 aa, Artificial Sequence
  Non-cyclic GFR-binding peptide
  MOD_RES (2), (33), (34): Xaa is C or S
KXSKVIMQYNKLIKPTKGILYLISIASLDQSVXXPSASA

SEQ ID NO: 4821 - protein, 40 aa, Artificial Sequence
  Non-cyclic GFR-binding peptide
  MOD_RES (2), (36), (37): Xaa is C or S
  MOD_RES (14), (15), (16), (17), (18): Xaa is A or G
  MOD_RES (19), (20), (21), (22): Xaa is A or G or is absent
GXARVVMNQYNKLXXXXXXXXXLYLVSIASLQTPAXXPKP

SEQ ID NO: 4822 - protein, 39 aa, Artificial Sequence
  Non-cyclic GFR-binding peptide
  MOD_RES (1), (3), (37), (38): Xaa is C or S
  MOD_RES (15), (16), (17), (18), (19): Xaa is A or G
  MOD_RES (20), (21), (22), (23): Xaa is A or G or is absent
XGXARVVMNRHKRLXXXXXXXXXYYLVSTASLQTPAXXP

SEQ ID NO: 4823 - protein, 36 aa, Artificial Sequence
  Non-cyclic GFR-binding peptide
  MOD_RES (35), (35): Xaa is C or S
HDELTQYNKLFIPKKRVIELYLVSIASLQVQTPRXQ

SEQ ID NO: 4824 - protein, 32 aa, Artificial Sequence
  Non-cyclic GFR-binding peptide
  MOD_RES (11), (12), (13), (14), (15): Xaa is A or G
  MOD_RES (16), (17), (18), (19): Xaa is A or G or is absent
SKVVMYHYKLXXXXXXXXXKYLISIPSLDQPV

SEQ ID NO: 4825 - protein, 32 aa, Artificial Sequence
  Non-cyclic GFR-binding peptide
  MOD_RES (2), (2): Xaa is C or S
KXSKVVMYHYKLVKPTRGVKYLISIPSLDQPV

SEQ ID NO: 4826 - protein, 39 aa, Artificial Sequence
  Non-cyclic GFR-binding peptide
  MOD_RES (1), (3), (36), (37): Xaa is C or S
  MOD_RES (14), (15), (16), (17), (18): Xaa is A or G
  MOD_RES (19), (20), (21), (22): Xaa is A or G or is absent
XKXSRVIMRYKKLXXXXXXXXXFYLISIANLAQPVXXPA

SEQ ID NO: 4827 - protein, 39 aa, Artificial Sequence
  Non-cyclic GFR-binding peptide
  MOD_RES (36), (36): Xaa is C or S
  MOD_RES (12), (13), (14), (15), (16): Xaa is A or G
  MOD_RES (17), (18), (19), (20): Xaa is A or G or is absent
LHDELTQYNKLXXXXXXXXXLYLVSIASLQVQTPRXQVN

SEQ ID NO: 4828 - protein, 35 aa, Artificial Sequence
  Non-cyclic GFR-binding peptide
  MOD_RES (2), (4), (35): Xaa is C or S
SXKXSRVIMQYNKLVKPKRGVLYLISIASLAQPVX

SEQ ID NO: 4829 - protein, 37 aa, Artificial Sequence
  Non-cyclic GFR-binding peptide
  MOD_RES (35), (36): Xaa is C or S
  MOD_RES (13), (14), (15), (16), (17): Xaa is A or G
  MOD_RES (18), (19), (20), (21): Xaa is A or G or is absent
EAVSMGERYKKLXXXXXXXXXFYLVSIANLKTPVXXA

SEQ ID NO: 4830 - protein, 38 aa, Artificial Sequence
  Non-cyclic GFR-binding peptide
  MOD_RES (32), (33): Xaa is C or S
GEVVMDRHKRLVVKENEDYYLMSTASLETPVXXAKPIK

SEQ ID NO: 4831 - protein, 36 aa, Artificial Sequence
  Non-cyclic GFR-binding peptide
  MOD_RES (1), (32), (33): Xaa is C or S
XSKVIMRHKRLIKPTKGIYYLISTASLDQSVXXPSA

SEQ ID NO: 4832 - protein, 37 aa, Artificial Sequence
  Non-cyclic GFR-binding peptide
  MOD_RES (1), (35), (36): Xaa is C or S
  MOD_RES (13), (14), (15), (16), (17): Xaa is A or G
  MOD_RES (18), (19), (20), (21): Xaa is A or G or is absent
XGEVVMERHKRLXXXXXXXXXYYLMSTASLETPVXXA

SEQ ID NO: 4833 - protein, 37 aa, Artificial Sequence
  Non-cyclic GFR-binding peptide
  MOD_RES (35), (35): Xaa is C or S
  MOD_RES (11), (12), (13), (14), (15): Xaa is A or G
  MOD_RES (16), (17), (18), (19): Xaa is A or G or is absent
HDELTYHYKLXXXXXXXXXKYLVSIPSLQVQTPRXQV

SEQ ID NO: 4834 - protein, 39 aa, Artificial Sequence
  Non-cyclic GFR-binding peptide
  MOD_RES (1), (3): Xaa is C or S
  MOD_RES (16), (17), (18), (19), (20): Xaa is A or G
  MOD_RES (21), (22), (23), (24): Xaa is A or G or is absent
XKXALHDELTRHKRLXXXXXXXXXYYLVSTASLQVQTPR

SEQ ID NO: 4835 - protein, 43 aa, Artificial Sequence
  Non-cyclic GFR-binding peptide
  MOD_RES (2), (4), (41): Xaa is C or S
EXKXALHDELTQYNKLFIPKKRVIELYLVSIASLQVQTPRXQV

SEQ ID NO: 4836 - protein, 40 aa, Artificial Sequence
  Non-cyclic GFR-binding peptide
  MOD_RES (2), (34), (35): Xaa is C or S
GXGEVVMDRHKRLVVKENEDYYLMSTASLETPVXXAKPIK

SEQ ID NO: 4837 - protein, 38 aa, Artificial Sequence
  Non-cyclic GFR-binding peptide
  MOD_RES (1), (35), (36): Xaa is C or S
  MOD_RES (13), (14), (15), (16), (17): Xaa is A or G
  MOD_RES (18), (19), (20), (21): Xaa is A or G or is absent
XAKVVMNYHYKLXXXXXXXXXKYLVSIPSLKTPAXXAK

SEQ ID NO: 4838 - protein, 41 aa, Artificial Sequence
  Non-cyclic GFR-binding peptide
  MOD_RES (2), (4), (36), (37): Xaa is C or S
RXGXGEVVMERHKRLVVKDYEDYYLMSTASLETPVXXAKPI

SEQ ID NO: 4839 - protein, 36 aa, Artificial Sequence
  Non-cyclic GFR-binding peptide
  MOD_RES (34), (35): Xaa is C or S
  MOD_RES (12), (13), (14), (15), (16): Xaa is A or G
  MOD_RES (17), (18), (19), (20): Xaa is A or G or is absent
SRVVMNQYNKLXXXXXXXXXLYLVSIASLKTPAXXP

SEQ ID NO: 4840 - protein, 35 aa, Artificial Sequence
  Non-cyclic GFR-binding peptide
  MOD_RES (1), (33), (34): Xaa is C or S
XSRVVMNQYNKLIVNSSDDLYLVSIASLKTPAXXP

SEQ ID NO: 4841 - protein, 39 aa, Artificial Sequence
  Non-cyclic GFR-binding peptide
  MOD_RES (2), (34), (35): Xaa is C or S
GXSRVVMNYHYKLIVNSSDDKYLVSIPSLKTPAXXPKPV

SEQ ID NO: 4842 - protein, 42 aa, Artificial Sequence
  Non-cyclic GFR-binding peptide
  MOD_RES (1), (3), (40): Xaa is C or S
XKXALHDELTQYNKLFIPKKRVIELYLVSIASLQVQTPRXQV

SEQ ID NO: 4843 - protein, 41 aa, Artificial Sequence
  Non-cyclic GFR-binding peptide
  MOD_RES (2), (39): Xaa is C or S
  MOD_RES (15), (16), (17), (18), (19): Xaa is A or G
  MOD_RES (20), (21), (22), (23): Xaa is A or G or is absent
KXALHDELTRHKRLXXXXXXXXXYYLVSTASLQVQTPRXQV

SEQ ID NO: 4844 - protein, 42 aa, Artificial Sequence
  Non-cyclic GFR-binding peptide
  MOD_RES (2), (4), (36), (37): Xaa is C or S
HXGXARVVMNQYNKLIVNSSDDLYLVSIASLQTPAXXPKPVT

SEQ ID NO: 4845 - protein, 31 aa, Artificial Sequence
  Non-cyclic GFR-binding peptide
  MOD_RES (31), (31): Xaa is C or S
RVVMNRHKRLIVNSSDDYYLVSTASLKTPAX

SEQ ID NO: 4846 - protein, 35 aa, Artificial Sequence
  Non-cyclic GFR-binding peptide
  MOD_RES (1), (3), (35): Xaa is C or S
XGXGEVVMDRYKKLVVKENEDFYLMSIANLETPVX

SEQ ID NO: 4847 - protein, 33 aa, Artificial Sequence
  Non-cyclic GFR-binding peptide
  MOD_RES (31), (32): Xaa is C or S
EVVMEYHYKLVVKDYEDKYLMSIPSLETPVXXA

SEQ ID NO: 4848 - protein, 40 aa, Artificial Sequence
  Non-cyclic GFR-binding peptide
  MOD_RES (2), (4), (37), (38): Xaa is C or S
  MOD_RES (15), (16), (17), (18), (19): Xaa is A or G
  MOD_RES (20), (21), (22), (23): Xaa is A or G or is absent
SXKXSRVIMRYKKLXXXXXXXXXFYLISIANLAQPVXXPA

SEQ ID NO: 4849 - protein, 39 aa, Artificial Sequence
  Non-cyclic GFR-binding peptide
  MOD_RES (2), (33), (34): Xaa is C or S
KXSKVVMQYNKLVKPTRGVLYLISIASLDQPVXXPSASA

SEQ ID NO: 4850 - protein, 36 aa, Artificial Sequence
  Non-cyclic GFR-binding peptide
  MOD_RES (1), (3), (35): Xaa is C or S
XGXSRVVMNRHKRLIVNSSDDYYLVSTASLKTPAXT

SEQ ID NO: 4851 - protein, 32 aa, Artificial Sequence
  Non-cyclic GFR-binding peptide
  MOD_RES (31), (32): Xaa is C or S
SRVIMYHYKLVKPKRGVKYLISIPSLAQPVXX

SEQ ID NO: 4852 - protein, 35 aa, Artificial Sequence
  Non-cyclic GFR-binding peptide
  MOD_RES (34), (35): Xaa is C or S
  MOD_RES (12), (13), (14), (15), (16): Xaa is A or G
  MOD_RES (17), (18), (19), (20): Xaa is A or G or is absent
GEVVMEYHYKLXXXXXXXXXKYLMSIPSLETPVXX

SEQ ID NO: 4853 - protein, 34 aa, Artificial Sequence
  Non-cyclic GFR-binding peptide
  MOD_RES (1), (3): Xaa is C or S
XGXARVVMNQYNKLIVNSSDDLYLVSIASLQTPA

SEQ ID NO: 4854 - protein, 37 aa, Artificial Sequence
  Non-cyclic GFR-binding peptide
  MOD_RES (32), (33): Xaa is C or S
ARVVMNYHYKLIVNSSDDKYLVSIPSLQTPAXXPKPV

SEQ ID NO: 4855 - protein, 40 aa, Artificial Sequence
  Non-cyclic GFR-binding peptide
  MOD_RES (1), (3), (37), (38): Xaa is C or S
  MOD_RES (15), (16), (17), (18), (19): Xaa is A or G
  MOD_RES (20), (21), (22), (23): Xaa is A or G or is absent
XGXSRVVMNYHYKLXXXXXXXXXKYLVSIPSLKTPAXXPK

SEQ ID NO: 4856 - protein, 36 aa, Artificial Sequence
  Non-cyclic GFR-binding peptide
  MOD_RES (2), (2): Xaa is C or S
  MOD_RES (15), (16), (17), (18), (19): Xaa is A or G
  MOD_RES (20), (21), (22), (23): Xaa is A or G or is absent
KXALHDELTRHKRLXXXXXXXXXYYLVSTASLQVQT

SEQ ID NO: 4857 - protein, 35 aa, Artificial Sequence
  Non-cyclic GFR-binding peptide
  MOD_RES (2), (4): Xaa is C or S
RXGXGEVVMDRYKKLVVKENEDFYLMSIANLETPV

SEQ ID NO: 4858 - protein, 39 aa, Artificial Sequence
  Non-cyclic GFR-binding peptide
  MOD_RES (2), (4), (37), (38): Xaa is C or S
  MOD_RES (15), (16), (17), (18), (19): Xaa is A or G
  MOD_RES (20), (21), (22), (23): Xaa is A or G or is absent
SXKXSKVVMYHYKLXXXXXXXXXKYLISIPSLDQPVXXP

SEQ ID NO: 4859 - protein, 38 aa, Artificial Sequence
  Non-cyclic GFR-binding peptide
  MOD_RES (2), (4), (35), (36): Xaa is C or S
SXKXSKVIMRHKRLIKPTKGIYYLISTASLDQSVXXPS

SEQ ID NO: 4860 - protein, 36 aa, Artificial Sequence
  Non-cyclic GFR-binding peptide
  MOD_RES (31), (32): Xaa is C or S
SRVIMRYKKLVKPKRGVFYLISIANLAQPVXXPAAS

SEQ ID NO: 4861 - protein, 41 aa, Artificial Sequence
  Non-cyclic GFR-binding peptide
  MOD_RES (2), (4), (37), (38): Xaa is C or S
  MOD_RES (15), (16), (17), (18), (19): Xaa is A or G
  MOD_RES (20), (21), (22), (23): Xaa is A or G or is absent
SXKXSRVIMRYKKLXXXXXXXXXFYLISIANLAQPVXXPAA

SEQ ID NO: 4862 - protein, 38 aa, Artificial Sequence
  Non-cyclic GFR-binding peptide
  MOD_RES (2), (34), (35): Xaa is C or S
GXARVVMNRHKRLIVNSSDDYYLVSTASLQTPAXXPKP

SEQ ID NO: 4863 - protein, 33 aa, Artificial Sequence
  Non-cyclic GFR-binding peptide
  MOD_RES (32), (33): Xaa is C or S
ARVVMNYHYKLIVNSSDDKYLVSIPSLQTPAXX

SEQ ID NO: 4864 - protein, 31 aa, Artificial Sequence
  Non-cyclic GFR-binding peptide
  MOD_RES (31), (31): Xaa is C or S
RVVMNYHYKLIVNSSDDKYLVSIPSLQTPAX

SEQ ID NO: 4865 - protein, 44 aa, Artificial Sequence
  Non-cyclic GFR-binding peptide
  MOD_RES (2), (4), (39), (40): Xaa is C or S
  MOD_RES (17), (18), (19), (20), (21): Xaa is A or G
  MOD_RES (22), (23), (24), (25): Xaa is A or G or is absent
RXGXEAVSMGERYKKLXXXXXXXXXFYLVSIANLKTPVXXAKGV

SEQ ID NO: 4866 - protein, 39 aa, Artificial Sequence
  Non-cyclic GFR-binding peptide
  MOD_RES (2), (4), (36), (37): Xaa is C or S
HXGXAKVVMNRYKKLIVNNSSDFYLVSIANLKTPAXXAK

SEQ ID NO: 4867 - protein, 44 aa, Artificial Sequence
  Non-cyclic GFR-binding peptide
  MOD_RES (2), (4), (38), (39): Xaa is C or S
  MOD_RES (16), (17), (18), (19), (20): Xaa is A or G
  MOD_RES (21), (22), (23), (24): Xaa is A or G or is absent
HXGXAKVVMNYHYKLXXXXXXXXXKYLVSIPSLKTPAXXAKPVA

SEQ ID NO: 4868 - protein, 42 aa, Artificial Sequence
  Non-cyclic GFR-binding peptide
  MOD_RES (2), (36), (37): Xaa is C or S
  MOD_RES (14), (15), (16), (17), (18): Xaa is A or G
  MOD_RES (19), (20), (21), (22): Xaa is A or G or is absent
GXSRVVMNQYNKLXXXXXXXXXLYLVSIASLKTPAXXPKPVY

SEQ ID NO: 4869 - protein, 38 aa, Artificial Sequence
  Non-cyclic GFR-binding peptide
  MOD_RES (1), (33), (34): Xaa is C or S
XGEVVMDRYKKLVVKENEDFYLMSIANLETPVXXAKPI

SEQ ID NO: 4870 - protein, 32 aa, Artificial Sequence
  Non-cyclic GFR-binding peptide
  MOD_RES (2), (2): Xaa is C or S
KXSKVVMRYKKLVKPTRGVFYLISIANLDQPV

SEQ ID NO: 4871 - protein, 42 aa, Artificial Sequence
  Non-cyclic GFR-binding peptide
  MOD_RES (2), (39): Xaa is C or S
  MOD_RES (15), (16), (17), (18), (19): Xaa is A or G
  MOD_RES (20), (21), (22), (23): Xaa is A or G or is absent
KXALHDELTYHYKLXXXXXXXXXKYLVSIPSLQVQTPRXQVN

SEQ ID NO: 4872 - protein, 38 aa, Artificial Sequence
  Non-cyclic GFR-binding peptide
  MOD_RES (2), (33), (34): Xaa is C or S
KXSKVIMYHYKLIKPTKGIKYLISIPSLDQSVXXPSAS

SEQ ID NO: 4873 - protein, 42 aa, Artificial Sequence
  Non-cyclic GFR-binding peptide
  MOD_RES (2), (4), (38), (39): Xaa is C or S
  MOD_RES (16), (17), (18), (19), (20): Xaa is A or G
  MOD_RES (21), (22), (23), (24): Xaa is A or G or is absent
RXGXGEVVMDYHYKLXXXXXXXXXKYLMSIPSLETPVXXAKP

SEQ ID NO: 4874 - protein, 40 aa, Artificial Sequence
  Non-cyclic GFR-binding peptide
  MOD_RES (1), (35): Xaa is C or S
  MOD_RES (13), (14), (15), (16), (17): Xaa is A or G
  MOD_RES (18), (19), (20), (21): Xaa is A or G or is absent
XSRVVMNRHKRLXXXXXXXXXYYLVSTASLKTPAXTPKTV

SEQ ID NO: 4875 - protein, 39 aa, Artificial Sequence
  Non-cyclic GFR-binding peptide
  MOD_RES (2), (4): Xaa is C or S
EXKXALHDELTYHYKLFIPKKRVIEKYLVSIPSLQVQTP

SEQ ID NO: 4876 - protein, 35 aa, Artificial Sequence
  Non-cyclic GFR-binding peptide
  MOD_RES (33), (33): Xaa is C or S
  MOD_RES (11), (12), (13), (14), (15): Xaa is A or G
  MOD_RES (16), (17), (18), (19): Xaa is A or G or is absent
RVVMNQYNKLXXXXXXXXXLYLVSIASLKTPAXTP

SEQ ID NO: 4877 - protein, 35 aa, Artificial Sequence
  Non-cyclic GFR-binding peptide
  MOD_RES (1), (1): Xaa is C or S
XALHDELTRHKRLFIPKKRVIEYYLVSTASLQVQT

SEQ ID NO: 4878 - protein, 39 aa, Artificial Sequence
  Non-cyclic GFR-binding peptide
  MOD_RES (2), (4), (39): Xaa is C or S
  MOD_RES (17), (18), (19), (20), (21): Xaa is A or G
  MOD_RES (22), (23), (24), (25): Xaa is A or G or is absent
RXGXEAVSMGERYKKLXXXXXXXXXFYLVSIANLKTPVX

SEQ ID NO: 4879 - protein, 33 aa, Artificial Sequence
  Non-cyclic GFR-binding peptide
  MOD_RES (1), (33): Xaa is C or S
XAKVVMNYHYKLIVNNSSDKYLVSIPSLKTPAX

SEQ ID NO: 4880 - protein, 30 aa, Artificial Sequence
  Non-cyclic GFR-binding peptide
EVVMDRHKRLVVKENEDYYLMSTASLETPV

SEQ ID NO: 4881 - protein, 38 aa, Artificial Sequence
  Non-cyclic GFR-binding peptide
  MOD_RES (1), (3): Xaa is C or S
XKXALHDELTYHYKLFIPKKRVIEKYLVSIPSLQVQTP

SEQ ID NO: 4882 - protein, 35 aa, Artificial Sequence
  Non-cyclic GFR-binding peptide
  MOD_RES (2), (35): Xaa is C or S
  MOD_RES (13), (14), (15), (16), (17): Xaa is A or G
  MOD_RES (18), (19), (20), (21): Xaa is A or G or is absent
KXSRVIMQYNKLXXXXXXXXXLYLISIASLAQPVX

SEQ ID NO: 4883 - protein, 39 aa, Artificial Sequence
  Non-cyclic GFR-binding peptide
  MOD_RES (1), (35), (36): Xaa is C or S
  MOD_RES (13), (14), (15), (16), (17): Xaa is A or G
  MOD_RES (18), (19), (20), (21): Xaa is A or G or is absent
XARVVMNRHKRLXXXXXXXXXYYLVSTASLQTPAXXPKP

SEQ ID NO: 4884 - protein, 33 aa, Artificial Sequence
  Non-cyclic GFR-binding peptide
  MOD_RES (1), (33): Xaa is C or S
XGEVVMERYKKLVVKDYEDFYLMSIANLETPVX

SEQ ID NO: 4885 - protein, 41 aa, Artificial Sequence
  Non-cyclic GFR-binding peptide
  MOD_RES (1), (3), (37), (38): Xaa is C or S
  MOD_RES (15), (16), (17), (18), (19): Xaa is A or G
  MOD_RES (20), (21), (22), (23): Xaa is A or G or is absent
XGXAKVVMNYHYKLXXXXXXXXXKYLVSIPSLKTPAXXAKP

SEQ ID NO: 4886 - protein, 40 aa, Artificial Sequence
  Non-cyclic GFR-binding peptide
  MOD_RES (1), (3), (34), (35): Xaa is C or S
XKXSRVIMRHKRLVKPKRGVYYLISTASLAQPVXXPAASA

SEQ ID NO: 4887 - protein, 39 aa, Artificial Sequence
  Non-cyclic GFR-binding peptide
  MOD_RES (1), (33): Xaa is C or S
XSRVVMNRHKRLIVNSSDDYYLVSTASLKTPAXTPKTVH

SEQ ID NO: 4888 - protein, 39 aa, Artificial Sequence
  Non-cyclic GFR-binding peptide
  MOD_RES (2), (4): Xaa is C or S
EXKXALHDELTQYNKLFIPKKRVIELYLVSIASLQVQTP

SEQ ID NO: 4889 - protein, 31 aa, Artificial Sequence
  Non-cyclic GFR-binding peptide
  MOD_RES (31), (31): Xaa is C or S
SKVVMRYKKLVKPTRGVFYLISIANLDQPVX

SEQ ID NO: 4890 - protein, 40 aa, Artificial Sequence
  Non-cyclic GFR-binding peptide
  MOD_RES (2), (4): Xaa is C or S
EXKXALHDELTRHKRLFIPKKRVIEYYLVSTASLQVQTPR

SEQ ID NO: 4891 - protein, 38 aa, Artificial Sequence
  Non-cyclic GFR-binding peptide
  MOD_RES (1), (3), (35), (36): Xaa is C or S
XGXGEVVMERYKKLVVKDYEDFYLMSIANLETPVXXAK

SEQ ID NO: 4892 - protein, 42 aa, Artificial Sequence
  Non-cyclic GFR-binding peptide
  MOD_RES (1), (3), (37), (38): Xaa is C or S
  MOD_RES (15), (16), (17), (18), (19): Xaa is A or G
  MOD_RES (20), (21), (22), (23): Xaa is A or G or is absent
XGXSRVVMNQYNKLXXXXXXXXXLYLVSIASLKTPAXXPKPV

SEQ ID NO: 4893 - protein, 40 aa, Artificial Sequence
  Non-cyclic GFR-binding peptide
  MOD_RES (2), (39): Xaa is C or S
  MOD_RES (15), (16), (17), (18), (19): Xaa is A or G
  MOD_RES (20), (21), (22), (23): Xaa is A or G or is absent
KXALHDELTQYNKLXXXXXXXXXLYLVSIASLQVQTPRXQ

SEQ ID NO: 4894 - protein, 39 aa, Artificial Sequence
  Non-cyclic GFR-binding peptide
  MOD_RES (2), (4), (36): Xaa is C or S
HXGXSRVVMNYHYKLIVNSSDDKYLVSIPSLKTPAXTPK

SEQ ID NO: 4895 - protein, 32 aa, Artificial Sequence
  Non-cyclic GFR-binding peptide
  MOD_RES (31), (32): Xaa is C or S
RVVMNYHYKLIVNSSDDKYLVSIPSLKTPAXX

SEQ ID NO: 4896 - protein, 33 aa, Artificial Sequence
  Non-cyclic GFR-binding peptide
  MOD_RES (32), (33): Xaa is C or S
AKVVMNRYKKLIVNNSSDFYLVSIANLKTPAXX

SEQ ID NO: 4897 - protein, 32 aa, Artificial Sequence
  Non-cyclic GFR-binding peptide
  MOD_RES (31), (32): Xaa is C or S
SKVVMRYKKLVKPTRGVFYLISIANLDQPVXX

SEQ ID NO: 4898 - protein, 39 aa, Artificial Sequence
  Non-cyclic GFR-binding peptide
  MOD_RES (1), (3), (35), (36): Xaa is C or S
XGXGEVVMEYHYKLVVKDYEDKYLMSIPSLETPVXXAKP

SEQ ID NO: 4899 - protein, 34 aa, Artificial Sequence
  Non-cyclic GFR-binding peptide
  MOD_RES (1), (3), (34): Xaa is C or S
XKXSKVIMQYNKLIKPTKGILYLISIASLDQSVX

SEQ ID NO: 4900 - protein, 33 aa, Artificial Sequence
  Non-cyclic GFR-binding peptide
  MOD_RES (31), (32): Xaa is C or S
SKVIMYHYKLIKPTKGIKYLISIPSLDQSVXXP

SEQ ID NO: 4901 - protein, 39 aa, Artificial Sequence
  Non-cyclic GFR-binding peptide
  MOD_RES (33), (33): Xaa is C or S
  MOD_RES (11), (12), (13), (14), (15): Xaa is A or G
  MOD_RES (16), (17), (18), (19): Xaa is A or G or is absent
RVVMNQYNKLXXXXXXXXXLYLVSIASLKTPAXTPKTVH

SEQ ID NO: 4902 - protein, 45 aa, Artificial Sequence
  Non-cyclic GFR-binding peptide
  MOD_RES (2), (4), (39), (40): Xaa is C or S
  MOD_RES (17), (18), (19), (20), (21): Xaa is A or G
  MOD_RES (22), (23), (24), (25): Xaa is A or G or is absent
RXGXEAVSMGEQYNKLXXXXXXXXXLYLVSIASLKTPVXXAKGVK

SEQ ID NO: 4903 - protein, 37 aa, Artificial Sequence
  Non-cyclic GFR-binding peptide
  MOD_RES (31), (32): Xaa is C or S
SKVVMQYNKLVKPTRGVLYLISIASLDQPVXXPSASA

SEQ ID NO: 4904 - protein, 40 aa, Artificial Sequence
  Non-cyclic GFR-binding peptide
  MOD_RES (1), (35), (36): Xaa is C or S
  MOD_RES (13), (14), (15), (16), (17): Xaa is A or G
  MOD_RES (18), (19), (20), (21): Xaa is A or G or is absent
XGEVVMDRYKKLXXXXXXXXXFYLMSIANLETPVXXAKPI

SEQ ID NO: 4905 - protein, 41 aa, Artificial Sequence
  Non-cyclic GFR-binding peptide
  MOD_RES (2), (4), (38), (39): Xaa is C or S
  MOD_RES (16), (17), (18), (19), (20): Xaa is A or G
  MOD_RES (21), (22), (23), (24): Xaa is A or G or is absent
RXGXGEVVMERHKRLXXXXXXXXXYYLMSTASLETPVXXAK

SEQ ID NO: 4906 - protein, 34 aa, Artificial Sequence
  Non-cyclic GFR-binding peptide
  MOD_RES (33), (34): Xaa is C or S
  MOD_RES (11), (12), (13), (14), (15): Xaa is A or G
  MOD_RES (16), (17), (18), (19): Xaa is A or G or is absent
SKVIMRHKRLXXXXXXXXXYYLISTASLDQSVXX

SEQ ID NO: 4907 - protein, 36 aa, Artificial Sequence
  Non-cyclic GFR-binding peptide
  MOD_RES (33), (34): Xaa is C or S
  MOD_RES (11), (12), (13), (14), (15): Xaa is A or G
  MOD_RES (16), (17), (18), (19): Xaa is A or G or is absent
EVVMDYHYKLXXXXXXXXXKYLMSIPSLETPVXXAK

SEQ ID NO: 4908 - protein, 35 aa, Artificial Sequence
  Non-cyclic GFR-binding peptide
  MOD_RES (32), (33): Xaa is C or S
GEVVMDYHYKLVVKENEDKYLMSIPSLETPVXXAK

SEQ ID NO: 4909 - protein, 35 aa, Artificial Sequence
  Non-cyclic GFR-binding peptide
  MOD_RES (31), (32): Xaa is C or S
RVVMNYHYKLIVNSSDDKYLVSIPSLQTPAXXPKP

SEQ ID NO: 4910 - protein, 37 aa, Artificial Sequence
  Non-cyclic GFR-binding peptide
  MOD_RES (1), (3), (35), (36): Xaa is C or S
XGXARVVMNRHKRLIVNSSDDYYLVSTASLQTPAXXP

SEQ ID NO: 4911 - protein, 41 aa, Artificial Sequence
  Non-cyclic GFR-binding peptide
  MOD_RES (1), (35), (36): Xaa is C or S
  MOD_RES (13), (14), (15), (16), (17): Xaa is A or G
  MOD_RES (18), (19), (20), (21): Xaa is A or G or is absent
XAKVVMNRYKKLXXXXXXXXXFYLVSIANLKTPAXXAKPVA

SEQ ID NO: 4912 - protein, 37 aa, Artificial Sequence
  Non-cyclic GFR-binding peptide
  MOD_RES (1), (35): Xaa is C or S
  MOD_RES (13), (14), (15), (16), (17): Xaa is A or G
  MOD_RES (18), (19), (20), (21): Xaa is A or G or is absent
XSRVVMNRHKRLXXXXXXXXXYYLVSTASLKTPAXTP

SEQ ID NO: 4913 - protein, 34 aa, Artificial Sequence
  Non-cyclic GFR-binding peptide
  MOD_RES (33), (34): Xaa is C or S
  MOD_RES (11), (12), (13), (14), (15): Xaa is A or G
  MOD_RES (16), (17), (18), (19): Xaa is A or G or is absent
RVVMNRHKRLXXXXXXXXXYYLVSTASLKTPAXX

SEQ ID NO: 4914 - protein, 33 aa, Artificial Sequence
  Non-cyclic GFR-binding peptide
  MOD_RES (31), (32): Xaa is C or S
SKVIMQYNKLIKPTKGILYLISIASLDQSVXXP

SEQ ID NO: 4915 - protein, 35 aa, Artificial Sequence
  Non-cyclic GFR-binding peptide
  MOD_RES (33), (34): Xaa is C or S
EAVSMGERYKKLTPVGMDDFYLVSIANLKTPVXXA

SEQ ID NO: 4916 - protein, 33 aa, Artificial Sequence
  Non-cyclic GFR-binding peptide
  MOD_RES (1), (33): Xaa is C or S
XAKVVMNRYKKLIVNNSSDFYLVSIANLKTPAX

SEQ ID NO: 4917 - protein, 40 aa, Artificial Sequence
  Non-cyclic GFR-binding peptide
  MOD_RES (34), (35): Xaa is C or S
  MOD_RES (12), (13), (14), (15), (16): Xaa is A or G
  MOD_RES (17), (18), (19), (20): Xaa is A or G or is absent
AKVVMNRYKKLXXXXXXXXXFYLVSIANLKTPAXXAKPVA

SEQ ID NO: 4918 - protein, 36 aa, Artificial Sequence
  Non-cyclic GFR-binding peptide
  MOD_RES (1), (3), (35): Xaa is C or S
XGXSRVVMNQYNKLIVNSSDDLYLVSIASLKTPAXT

SEQ ID NO: 4919 - protein, 36 aa, Artificial Sequence
  Non-cyclic GFR-binding peptide
  MOD_RES (1), (3): Xaa is C or S
  MOD_RES (15), (16), (17), (18), (19): Xaa is A or G
  MOD_RES (20), (21), (22), (23): Xaa is A or G or is absent
XGXAKVVMNYHYKLXXXXXXXXXKYLVSIPSLKTPA

SEQ ID NO: 4920 - protein, 36 aa, Artificial Sequence
  Non-cyclic GFR-binding peptide
  MOD_RES (1), (3), (36): Xaa is C or S
  MOD_RES (14), (15), (16), (17), (18): Xaa is A or G
  MOD_RES (19), (20), (21), (22): Xaa is A or G or is absent
XKXSKVVMRYKKLXXXXXXXXXFYLISIANLDQPVX

SEQ ID NO: 4921 - protein, 37 aa, Artificial Sequence
  Non-cyclic GFR-binding peptide
  MOD_RES (1), (3): Xaa is C or S
  MOD_RES (16), (17), (18), (19), (20): Xaa is A or G
  MOD_RES (21), (22), (23), (24): Xaa is A or G or is absent
XKXALHDELTRYKKLXXXXXXXXXFYLVSIANLQVQT

SEQ ID NO: 4922 - protein, 36 aa, Artificial Sequence
  Non-cyclic GFR-binding peptide
  MOD_RES (2), (4): Xaa is C or S
  MOD_RES (15), (16), (17), (18), (19): Xaa is A or G
  MOD_RES (20), (21), (22), (23): Xaa is A or G or is absent
SXKXSKVIMRYKKLXXXXXXXXXFYLISIANLDQSV

SEQ ID NO: 4923 - protein, 39 aa, Artificial Sequence
  Non-cyclic GFR-binding peptide
  MOD_RES (1), (3), (36), (37): Xaa is C or S
  MOD_RES (14), (15), (16), (17), (18): Xaa is A or G
  MOD_RES (19), (20), (21), (22): Xaa is A or G or is absent
XKXSKVVMRYKKLXXXXXXXXXFYLISIANLDQPVXXPS

SEQ ID NO: 4924 - protein, 39 aa, Artificial Sequence
  Non-cyclic GFR-binding peptide
  MOD_RES (1), (3), (37): Xaa is C or S
  MOD_RES (15), (16), (17), (18), (19): Xaa is A or G
  MOD_RES (20), (21), (22), (23): Xaa is A or G or is absent
XGXSRVVMNQYNKLXXXXXXXXXLYLVSIASLKTPAXTP

SEQ ID NO: 4925 - protein, 41 aa, Artificial Sequence
  Non-cyclic GFR-binding peptide
  MOD_RES (2), (4), (36): Xaa is C or S
HXGXSRVVMNQYNKLIVNSSDDLYLVSIASLKTPAXTPKTV

SEQ ID NO: 4926 - protein, 39 aa, Artificial Sequence
  Non-cyclic GFR-binding peptide
  MOD_RES (2), (34), (35): Xaa is C or S
GXSRVVMNQYNKLIVNSSDDLYLVSIASLKTPAXXPKPV

SEQ ID NO: 4927 - protein, 34 aa, Artificial Sequence
  Non-cyclic GFR-binding peptide
  MOD_RES (1), (1): Xaa is C or S
  MOD_RES (13), (14), (15), (16), (17): Xaa is A or G
  MOD_RES (18), (19), (20), (21): Xaa is A or G or is absent
XGEVVMDYHYKLXXXXXXXXXKYLMSIPSLETPV

SEQ ID NO: 4928 - protein, 32 aa, Artificial Sequence
  Non-cyclic GFR-binding peptide
  MOD_RES (11), (12), (13), (14), (15): Xaa is A or G
  MOD_RES (16), (17), (18), (19): Xaa is A or G or is absent
SKVVMRHKRLXXXXXXXXXYYLISTASLDQPV

SEQ ID NO: 4929 - protein, 37 aa, Artificial Sequence
  Non-cyclic GFR-binding peptide
  MOD_RES (2), (4): Xaa is C or S
  MOD_RES (16), (17), (18), (19), (20): Xaa is A or G
  MOD_RES (21), (22), (23), (24): Xaa is A or G or is absent
HXGXAKVVMNQYNKLXXXXXXXXXLYLVSIASLKTPA

SEQ ID NO: 4930 - protein, 35 aa, Artificial Sequence
  Non-cyclic GFR-binding peptide
  MOD_RES (2), (35): Xaa is C or S
  MOD_RES (13), (14), (15), (16), (17): Xaa is A or G
  MOD_RES (18), (19), (20), (21): Xaa is A or G or is absent
KXSKVVMYHYKLXXXXXXXXXKYLISIPSLDQPVX

SEQ ID NO: 4931 - protein, 40 aa, Artificial Sequence
  Non-cyclic GFR-binding peptide
  MOD_RES (1), (3), (35), (36): Xaa is C or S
XGXSRVVMNRHKRLIVNSSDDYYLVSTASLKTPAXXPKPV

SEQ ID NO: 4932 - protein, 40 aa, Artificial Sequence
  Non-cyclic GFR-binding peptide
  MOD_RES (2), (4), (35), (36): Xaa is C or S
SXKXSKVIMQYNKLIKPTKGILYLISIASLDQSVXXPSAS

SEQ ID NO: 4933 - protein, 38 aa, Artificial Sequence
  Non-cyclic GFR-binding peptide
  MOD_RES (2), (4): Xaa is C or S
  MOD_RES (17), (18), (19), (20), (21): Xaa is A or G
  MOD_RES (22), (23), (24), (25): Xaa is A or G or is absent
EXKXALHDELTYHYKLXXXXXXXXXKYLVSIPSLQVQT

SEQ ID NO: 4934 - protein, 43 aa, Artificial Sequence
  Non-cyclic GFR-binding peptide
  MOD_RES (2), (4), (38), (39): Xaa is C or S
  MOD_RES (16), (17), (18), (19), (20): Xaa is A or G
  MOD_RES (21), (22), (23), (24): Xaa is A or G or is absent
RXGXGEVVMDRYKKLXXXXXXXXXFYLMSIANLETPVXXAKPI

SEQ ID NO: 4935 - protein, 40 aa, Artificial Sequence
  Non-cyclic GFR-binding peptide
  MOD_RES (34), (35): Xaa is C or S
  MOD_RES (12), (13), (14), (15), (16): Xaa is A or G
  MOD_RES (17), (18), (19), (20): Xaa is A or G or is absent
ARVVMNQYNKLXXXXXXXXXLYLVSIASLQTPAXXPKPVT

SEQ ID NO: 4936 - protein, 35 aa, Artificial Sequence
  Non-cyclic GFR-binding peptide
  MOD_RES (31), (32): Xaa is C or S
RVVMNQYNKLIVNSSDDLYLVSIASLQTPAXXPKP

SEQ ID NO: 4937 - protein, 42 aa, Artificial Sequence
  Non-cyclic GFR-binding peptide
  MOD_RES (2), (36), (37): Xaa is C or S
  MOD_RES (14), (15), (16), (17), (18): Xaa is A or G
  MOD_RES (19), (20), (21), (22): Xaa is A or G or is absent
GXGEVVMERYKKLXXXXXXXXXFYLMSIANLETPVXXAKPIS

SEQ ID NO: 4938 - protein, 43 aa, Artificial Sequence
  Non-cyclic GFR-binding peptide
  MOD_RES (1), (3), (37): Xaa is C or S
  MOD_RES (15), (16), (17), (18), (19): Xaa is A or G
  MOD_RES (20), (21), (22), (23): Xaa is A or G or is absent
XGXSRVVMNRHKRLXXXXXXXXXYYLVSTASLKTPAXTPKTVH

SEQ ID NO: 4939 - protein, 36 aa, Artificial Sequence
  Non-cyclic GFR-binding peptide
  MOD_RES (31), (32): Xaa is C or S
SRVIMRHKRLVKPKRGVYYLISTASLAQPVXXPAAS

SEQ ID NO: 4940 - protein, 41 aa, Artificial Sequence
  Non-cyclic GFR-binding peptide
  MOD_RES (2), (37), (38): Xaa is C or S
  MOD_RES (15), (16), (17), (18), (19): Xaa is A or G
  MOD_RES (20), (21), (22), (23): Xaa is A or G or is absent
GXEAVSMGERHKRLXXXXXXXXXYYLVSTASLKTPVXXAKG

SEQ ID NO: 4941 - protein, 40 aa, Artificial Sequence
  Non-cyclic GFR-binding peptide
  MOD_RES (1), (35), (36): Xaa is C or S
  MOD_RES (13), (14), (15), (16), (17): Xaa is A or G
  MOD_RES (18), (19), (20), (21): Xaa is A or G or is absent
XGEVVMEYHYKLXXXXXXXXXKYLMSIPSLETPVXXAKPI

SEQ ID NO: 4942 - protein, 32 aa, Artificial Sequence
  Non-cyclic GFR-binding peptide
  MOD_RES (11), (12), (13), (14), (15): Xaa is A or G
  MOD_RES (16), (17), (18), (19): Xaa is A or G or is absent
HDELTQYNKLXXXXXXXXXLYLVSIASLQVQT

SEQ ID NO: 4943 - protein, 40 aa, Artificial Sequence
  Non-cyclic GFR-binding peptide
  MOD_RES (1), (3), (40): Xaa is C or S
XKXALHDELTYHYKLFIPKKRVIEKYLVSIPSLQVQTPRX

SEQ ID NO: 4944 - protein, 37 aa, Artificial Sequence
  Non-cyclic GFR-binding peptide
  MOD_RES (2), (4), (35), (36): Xaa is C or S
SXKXSRVIMYHYKLVKPKRGVKYLISIPSLAQPVXXP

SEQ ID NO: 4945 - protein, 43 aa, Artificial Sequence
  Non-cyclic GFR-binding peptide
  MOD_RES (2), (4), (38), (39): Xaa is C or S
  MOD_RES (16), (17), (18), (19), (20): Xaa is A or G
  MOD_RES (21), (22), (23), (24): Xaa is A or G or is absent
HXGXARVVMNRHKRLXXXXXXXXXYYLVSTASLQTPAXXPKPV

SEQ ID NO: 4946 - protein, 41 aa, Artificial Sequence
  Non-cyclic GFR-binding peptide
  MOD_RES (2), (4), (38), (39): Xaa is C or S
  MOD_RES (16), (17), (18), (19), (20): Xaa is A or G
  MOD_RES (21), (22), (23), (24): Xaa is A or G or is absent
HXGXARVVMNRHKRLXXXXXXXXXYYLVSTASLQTPAXXPK

SEQ ID NO: 4947 - protein, 39 aa, Artificial Sequence
  Non-cyclic GFR-binding peptide
  MOD_RES (2), (4), (38), (39): Xaa is C or S
  MOD_RES (16), (17), (18), (19), (20): Xaa is A or G
  MOD_RES (21), (22), (23), (24): Xaa is A or G or is absent
RXGXGEVVMERHKRLXXXXXXXXXYYLMSTASLETPVXX

SEQ ID NO: 4948 - protein, 41 aa, Artificial Sequence
  Non-cyclic GFR-binding peptide
  MOD_RES (2), (36), (37): Xaa is C or S
  MOD_RES (14), (15), (16), (17), (18): Xaa is A or G
  MOD_RES (19), (20), (21), (22): Xaa is A or G or is absent
GXGEVVMERHKRLXXXXXXXXXYYLMSTASLETPVXXAKPI

SEQ ID NO: 4949 - protein, 35 aa, Artificial Sequence
  Non-cyclic GFR-binding peptide
  MOD_RES (32), (33): Xaa is C or S
AKVVMNYHYKLIVNNSSDKYLVSIPSLKTPAXXAK

SEQ ID NO: 4950 - protein, 44 aa, Artificial Sequence
  Non-cyclic GFR-binding peptide
  MOD_RES (1), (3), (40): Xaa is C or S
XKXALHDELTYHYKLFIPKKRVIEKYLVSIPSLQVQTPRXQVNR

SEQ ID NO: 4951 - protein, 39 aa, Artificial Sequence
  Non-cyclic GFR-binding peptide
  MOD_RES (1), (3), (36), (37): Xaa is C or S
  MOD_RES (14), (15), (16), (17), (18): Xaa is A or G
  MOD_RES (19), (20), (21), (22): Xaa is A or G or is absent
XKXSKVIMRYKKLXXXXXXXXXFYLISIANLDQSVXXPS

SEQ ID NO: 4952 - protein, 38 aa, Artificial Sequence
  Non-cyclic GFR-binding peptide
  MOD_RES (2), (35), (36): Xaa is C or S
  MOD_RES (13), (14), (15), (16), (17): Xaa is A or G
  MOD_RES (18), (19), (20), (21): Xaa is A or G or is absent
KXSRVIMRYKKLXXXXXXXXXFYLISIANLAQPVXXPA

SEQ ID NO: 4953 - protein, 35 aa, Artificial Sequence
  Non-cyclic GFR-binding peptide
  MOD_RES (1), (35): Xaa is C or S
  MOD_RES (13), (14), (15), (16), (17): Xaa is A or G
  MOD_RES (18), (19), (20), (21): Xaa is A or G or is absent
XGEVVMDRYKKLXXXXXXXXXFYLMSIANLETPVX

SEQ ID NO: 4954 - protein, 39 aa, Artificial Sequence
  Non-cyclic GFR-binding peptide
  MOD_RES (2), (4), (35), (36): Xaa is C or S
SXKXSKVVMYHYKLVKPTRGVKYLISIPSLDQPVXXPSA

SEQ ID NO: 4955 - protein, 38 aa, Artificial Sequence
  Non-cyclic GFR-binding peptide
  MOD_RES (2), (36), (37): Xaa is C or S
  MOD_RES (14), (15), (16), (17), (18): Xaa is A or G
  MOD_RES (19), (20), (21), (22): Xaa is A or G or is absent
GXSRVVMNYHYKLXXXXXXXXXKYLVSIPSLKTPAXXP

SEQ ID NO: 4956 - protein, 37 aa, Artificial Sequence
  Non-cyclic GFR-binding peptide
  MOD_RES (2), (4), (36), (37): Xaa is C or S
HXGXSRVVMNQYNKLIVNSSDDLYLVSIASLKTPAXX

SEQ ID NO: 4957 - protein, 36 aa, Artificial Sequence
  Non-cyclic GFR-binding peptide
  MOD_RES (1), (3), (36): Xaa is C or S
  MOD_RES (14), (15), (16), (17), (18): Xaa is A or G
  MOD_RES (19), (20), (21), (22): Xaa is A or G or is absent
XKXSKVIMYHYKLXXXXXXXXXKYLISIPSLDQSVX

SEQ ID NO: 4958 - protein, 39 aa, Artificial Sequence
  Non-cyclic GFR-binding peptide
  MOD_RES (33), (34): Xaa is C or S
  MOD_RES (11), (12), (13), (14), (15): Xaa is A or G
  MOD_RES (16), (17), (18), (19): Xaa is A or G or is absent
EVVMERHKRLXXXXXXXXXYYLMSTASLETPVXXAKPIS

SEQ ID NO: 4959 - protein, 41 aa, Artificial Sequence
  Non-cyclic GFR-binding peptide
  MOD_RES (1), (3), (40): Xaa is C or S
  MOD_RES (16), (17), (18), (19), (20): Xaa is A or G
  MOD_RES (21), (22), (23), (24): Xaa is A or G or is absent
XKXALHDELTQYNKLXXXXXXXXXLYLVSIASLQVQTPRXQ

SEQ ID NO: 4960 - protein, 36 aa, Artificial Sequence
  Non-cyclic GFR-binding peptide
  MOD_RES (2), (36): Xaa is C or S
  MOD_RES (14), (15), (16), (17), (18): Xaa is A or G
  MOD_RES (19), (20), (21), (22): Xaa is A or G or is absent
GXARVVMNQYNKLXXXXXXXXXLYLVSIASLQTPAX

SEQ ID NO: 4961 - protein, 31 aa, Artificial Sequence
  Non-cyclic GFR-binding peptide
  MOD_RES (31), (31): Xaa is C or S
KVVMNRYKKLIVNNSSDFYLVSIANLKTPAX

SEQ ID NO: 4962 - protein, 44 aa, Artificial Sequence
  Non-cyclic GFR-binding peptide
  MOD_RES (2), (4), (39), (40): Xaa is C or S
  MOD_RES (17), (18), (19), (20), (21): Xaa is A or G
  MOD_RES (22), (23), (24), (25): Xaa is A or G or is absent
RXGXEAVSMGEQYNKLXXXXXXXXXLYLVSIASLKTPVXXAKGV

SEQ ID NO: 4963 - protein, 38 aa, Artificial Sequence
  Non-cyclic GFR-binding peptide
  MOD_RES (2), (4), (37), (38): Xaa is C or S
RXGXEAVSMGERHKRLTPVGMDDYYLVSTASLKTPVXX

SEQ ID NO: 4964 - protein, 41 aa, Artificial Sequence
  Non-cyclic GFR-binding peptide
  MOD_RES (1), (3), (35), (36): Xaa is C or S
XGXAKVVMNQYNKLIVNNSSDLYLVSIASLKTPAXXAKPVA

SEQ ID NO: 4965 - protein, 34 aa, Artificial Sequence
  Non-cyclic GFR-binding peptide
  MOD_RES (2), (4): Xaa is C or S
SXKXSKVIMRHKRLIKPTKGIYYLISTASLDQSV

SEQ ID NO: 4966 - protein, 36 aa, Artificial Sequence
  Non-cyclic GFR-binding peptide
  MOD_RES (33), (34): Xaa is C or S
  MOD_RES (11), (12), (13), (14), (15): Xaa is A or G
  MOD_RES (16), (17), (18), (19): Xaa is A or G or is absent
SRVIMQYNKLXXXXXXXXXLYLISIASLAQPVXXPA

SEQ ID NO: 4967 - protein, 34 aa, Artificial Sequence
  Non-cyclic GFR-binding peptide
  MOD_RES (1), (32), (33): Xaa is C or S
XSKVVMRHKRLVKPTRGVYYLISTASLDQPVXXP

SEQ ID NO: 4968 - protein, 39 aa, Artificial Sequence
  Non-cyclic GFR-binding peptide
  MOD_RES (1), (3), (35), (36): Xaa is C or S
XGXGEVVMDYHYKLVVKENEDKYLMSIPSLETPVXXAKP

SEQ ID NO: 4969 - protein, 44 aa, Artificial Sequence
  Non-cyclic GFR-binding peptide
  MOD_RES (1), (3), (38), (39): Xaa is C or S
  MOD_RES (16), (17), (18), (19), (20): Xaa is A or G
  MOD_RES (21), (22), (23), (24): Xaa is A or G or is absent
XGXEAVSMGERHKRLXXXXXXXXXYYLVSTASLKTPVXXAKGVK

SEQ ID NO: 4970 - protein, 36 aa, Artificial Sequence
  Non-cyclic GFR-binding peptide
  MOD_RES (2), (2): Xaa is C or S
  MOD_RES (15), (16), (17), (18), (19): Xaa is A or G
  MOD_RES (20), (21), (22), (23): Xaa is A or G or is absent
GXEAVSMGERHKRLXXXXXXXXXYYLVSTASLKTPV

SEQ ID NO: 4971 - protein, 33 aa, Artificial Sequence
  Non-cyclic GFR-binding peptide
  MOD_RES (33), (33): Xaa is C or S
  MOD_RES (11), (12), (13), (14), (15): Xaa is A or G
  MOD_RES (16), (17), (18), (19): Xaa is A or G or is absent
KVVMNYHYKLXXXXXXXXXKYLVSIPSLKTPAX

SEQ ID NO: 4972 - protein, 33 aa, Artificial Sequence
  Non-cyclic GFR-binding peptide
  MOD_RES (1), (33): Xaa is C or S
XGEVVMDRHKRLVVKENEDYYLMSTASLETPVX

SEQ ID NO: 4973 - protein, 33 aa, Artificial Sequence
  Non-cyclic GFR-binding peptide
  MOD_RES (33), (33): Xaa is C or S
  MOD_RES (11), (12), (13), (14), (15): Xaa is A or G
  MOD_RES (16), (17), (18), (19): Xaa is A or G or is absent
RVVMNYHYKLXXXXXXXXXKYLVSIPSLKTPAX

SEQ ID NO: 4974 - protein, 33 aa, Artificial Sequence
  Non-cyclic GFR-binding peptide
  MOD_RES (33), (33): Xaa is C or S
  MOD_RES (11), (12), (13), (14), (15): Xaa is A or G
  MOD_RES (16), (17), (18), (19): Xaa is A or G or is absent
SKVVMRHKRLXXXXXXXXXYYLISTASLDQPVX

SEQ ID NO: 4975 - protein, 35 aa, Artificial Sequence
  Non-cyclic GFR-binding peptide
  MOD_RES (1), (1): Xaa is C or S
  MOD_RES (14), (15), (16), (17), (18): Xaa is A or G
  MOD_RES (19), (20), (21), (22): Xaa is A or G or is absent
XALHDELTQYNKLXXXXXXXXXLYLVSIASLQVQT

SEQ ID NO: 4976 - protein, 44 aa, Artificial Sequence
  Non-cyclic GFR-binding peptide
  MOD_RES (2), (4), (41): Xaa is C or S
EXKXALHDELTYHYKLFIPKKRVIEKYLVSIPSLQVQTPRXQVN

SEQ ID NO: 4977 - protein, 32 aa, Artificial Sequence
  Non-cyclic GFR-binding peptide
  MOD_RES (31), (32): Xaa is C or S
RVVMNQYNKLIVNSSDDLYLVSIASLKTPAXX

SEQ ID NO: 4978 - protein, 40 aa, Artificial Sequence
  Non-cyclic GFR-binding peptide
  MOD_RES (1), (34), (35): Xaa is C or S
  MOD_RES (12), (13), (14), (15), (16): Xaa is A or G
  MOD_RES (17), (18), (19), (20): Xaa is A or G or is absent
XSRVIMYHYKLXXXXXXXXXKYLISIPSLAQPVXXPAASA

SEQ ID NO: 4979 - protein, 39 aa, Artificial Sequence
  Non-cyclic GFR-binding peptide
  MOD_RES (2), (39): Xaa is C or S
KXALHDELTYHYKLFIPKKRVIEKYLVSIPSLQVQTPRX

SEQ ID NO: 4980 - protein, 35 aa, Artificial Sequence
  Non-cyclic GFR-binding peptide
  MOD_RES (1), (3): Xaa is C or S
  MOD_RES (14), (15), (16), (17), (18): Xaa is A or G
  MOD_RES (19), (20), (21), (22): Xaa is A or G or is absent
XKXSKVIMRYKKLXXXXXXXXXFYLISIANLDQSV

SEQ ID NO: 4981 - protein, 34 aa, Artificial Sequence
  Non-cyclic GFR-binding peptide
  MOD_RES (2), (34): Xaa is C or S
GXGEVVMEYHYKLVVKDYEDKYLMSIPSLETPVX

SEQ ID NO: 4982 - protein, 33 aa, Artificial Sequence
  Non-cyclic GFR-binding peptide
  MOD_RES (1), (32), (33): Xaa is C or S
XSKVVMRHKRLVKPTRGVYYLISTASLDQPVXX

SEQ ID NO: 4983 - protein, 33 aa, Artificial Sequence
  Non-cyclic GFR-binding peptide
  MOD_RES (12), (13), (14), (15), (16): Xaa is A or G
  MOD_RES (17), (18), (19), (20): Xaa is A or G or is absent
GEVVMERYKKLXXXXXXXXXFYLMSIANLETPV

SEQ ID NO: 4984 - protein, 34 aa, Artificial Sequence
  Non-cyclic GFR-binding peptide
  MOD_RES (2), (34): Xaa is C or S
GXAKVVMNQYNKLIVNNSSDLYLVSIASLKTPAX

SEQ ID NO: 4985 - protein, 39 aa, Artificial Sequence
  Non-cyclic GFR-binding peptide
  MOD_RES (2), (4), (38), (39): Xaa is C or S
  MOD_RES (16), (17), (18), (19), (20): Xaa is A or G
  MOD_RES (21), (22), (23), (24): Xaa is A or G or is absent
HXGXARVVMNRHKRLXXXXXXXXXYYLVSTASLQTPAXX

SEQ ID NO: 4986 - protein, 31 aa, Artificial Sequence
  Non-cyclic GFR-binding peptide
  MOD_RES (1), (1): Xaa is C or S
XSKVIMRYKKLIKPTKGIFYLISIANLDQSV

SEQ ID NO: 4987 - protein, 40 aa, Artificial Sequence
  Non-cyclic GFR-binding peptide
  MOD_RES (34), (35): Xaa is C or S
  MOD_RES (12), (13), (14), (15), (16): Xaa is A or G
  MOD_RES (17), (18), (19), (20): Xaa is A or G or is absent
GEVVMDRHKRLXXXXXXXXXYYLMSTASLETPVXXAKPIK

SEQ ID NO: 4988 - protein, 40 aa, Artificial Sequence
  Non-cyclic GFR-binding peptide
  MOD_RES (2), (35), (36): Xaa is C or S
  MOD_RES (13), (14), (15), (16), (17): Xaa is A or G
  MOD_RES (18), (19), (20), (21): Xaa is A or G or is absent
KXSRVIMQYNKLXXXXXXXXXLYLISIASLAQPVXXPAAS

SEQ ID NO: 4989 - protein, 41 aa, Artificial Sequence
  Non-cyclic GFR-binding peptide
  MOD_RES (2), (4), (37), (38): Xaa is C or S
RXGXEAVSMGEQYNKLTPVGMDDLYLVSIASLKTPVXXAKG

SEQ ID NO: 4990 - protein, 38 aa, Artificial Sequence
  Non-cyclic GFR-binding peptide
  MOD_RES (1), (3), (37): Xaa is C or S
  MOD_RES (15), (16), (17), (18), (19): Xaa is A or G
  MOD_RES (20), (21), (22), (23): Xaa is A or G or is absent
XGXSRVVMNRHKRLXXXXXXXXXYYLVSTASLKTPAXT

SEQ ID NO: 4991 - protein, 37 aa, Artificial Sequence
  Non-cyclic GFR-binding peptide
  MOD_RES (1), (34), (35): Xaa is C or S
  MOD_RES (12), (13), (14), (15), (16): Xaa is A or G
  MOD_RES (17), (18), (19), (20): Xaa is A or G or is absent
XSRVIMRHKRLXXXXXXXXXYYLISTASLAQPVXXPA

SEQ ID NO: 4992 - protein, 39 aa, Artificial Sequence
  Non-cyclic GFR-binding peptide
  MOD_RES (2), (4), (39): Xaa is C or S
  MOD_RES (17), (18), (19), (20), (21): Xaa is A or G
  MOD_RES (22), (23), (24), (25): Xaa is A or G or is absent
RXGXEAVSMGEQYNKLXXXXXXXXXLYLVSIASLKTPVX

SEQ ID NO: 4993 - protein, 38 aa, Artificial Sequence
  Non-cyclic GFR-binding peptide
  MOD_RES (1), (3), (38): Xaa is C or S
  MOD_RES (16), (17), (18), (19), (20): Xaa is A or G
  MOD_RES (21), (22), (23), (24): Xaa is A or G or is absent
XGXEAVSMGERHKRLXXXXXXXXXYYLVSTASLKTPVX

SEQ ID NO: 4994 - protein, 43 aa, Artificial Sequence
  Non-cyclic GFR-binding peptide
  MOD_RES (2), (4), (37), (38): Xaa is C or S
  MOD_RES (15), (16), (17), (18), (19): Xaa is A or G
  MOD_RES (20), (21), (22), (23): Xaa is A or G or is absent
SXKXSKVVMYHYKLXXXXXXXXXKYLISIPSLDQPVXXPSASA

SEQ ID NO: 4995 - protein, 41 aa, Artificial Sequence
  Non-cyclic GFR-binding peptide
  MOD_RES (2), (35), (36): Xaa is C or S
  MOD_RES (13), (14), (15), (16), (17): Xaa is A or G
  MOD_RES (18), (19), (20), (21): Xaa is A or G or is absent
KXSRVIMYHYKLXXXXXXXXXKYLISIPSLAQPVXXPAASA

SEQ ID NO: 4996 - protein, 31 aa, Artificial Sequence
  Non-cyclic GFR-binding peptide
  MOD_RES (31), (31): Xaa is C or S
SRVIMYHYKLVKPKRGVKYLISIPSLAQPVX

SEQ ID NO: 4997 - protein, 37 aa, Artificial Sequence
  Non-cyclic GFR-binding peptide
  MOD_RES (31), (32): Xaa is C or S
SKVVMRHKRLVKPTRGVYYLISTASLDQPVXXPSASA

SEQ ID NO: 4998 - protein, 38 aa, Artificial Sequence
  Non-cyclic GFR-binding peptide
  MOD_RES (33), (34): Xaa is C or S
  MOD_RES (11), (12), (13), (14), (15): Xaa is A or G
  MOD_RES (16), (17), (18), (19): Xaa is A or G or is absent
SRVIMRHKRLXXXXXXXXXYYLISTASLAQPVXXPAAS

SEQ ID NO: 4999 - protein, 39 aa, Artificial Sequence
  Non-cyclic GFR-binding peptide
  MOD_RES (1), (36), (37): Xaa is C or S
  MOD_RES (14), (15), (16), (17), (18): Xaa is A or G
  MOD_RES (19), (20), (21), (22): Xaa is A or G or is absent
XEAVSMGERYKKLXXXXXXXXXFYLVSIANLKTPVXXAK

SEQ ID NO: 5000 - protein, 43 aa, Artificial Sequence
  Non-cyclic GFR-binding peptide
  MOD_RES (1), (3), (37), (38): Xaa is C or S
  MOD_RES (15), (16), (17), (18), (19): Xaa is A or G
  MOD_RES (20), (21), (22), (23): Xaa is A or G or is absent
XGXGEVVMDRHKRLXXXXXXXXXYYLMSTASLETPVXXAKPIK

SEQ ID NO: 5001 - protein, 41 aa, Artificial Sequence
  Non-cyclic GFR-binding peptide
  MOD_RES (1), (3), (40): Xaa is C or S
  MOD_RES (16), (17), (18), (19), (20): Xaa is A or G
  MOD_RES (21), (22), (23), (24): Xaa is A or G or is absent
XKXALHDELTRHKRLXXXXXXXXXYYLVSTASLQVQTPRXQ

SEQ ID NO: 5002 - protein, 37 aa, Artificial Sequence
  Non-cyclic GFR-binding peptide
  MOD_RES (2), (33), (34): Xaa is C or S
KXSRVIMQYNKLVKPKRGVLYLISIASLAQPVXXPAA

SEQ ID NO: 5003 - protein, 36 aa, Artificial Sequence
  Non-cyclic GFR-binding peptide
  MOD_RES (1), (33): Xaa is C or S
XSRVVMNRHKRLIVNSSDDYYLVSTASLKTPAXTPK

SEQ ID NO: 5004 - protein, 32 aa, Artificial Sequence
  Non-cyclic GFR-binding peptide
  MOD_RES (31), (32): Xaa is C or S
RVVMNRHKRLIVNSSDDYYLVSTASLKTPAXX

SEQ ID NO: 5005 - protein, 44 aa, Artificial Sequence
  Non-cyclic GFR-binding peptide
  MOD_RES (2), (4), (38), (39): Xaa is C or S
  MOD_RES (16), (17), (18), (19), (20): Xaa is A or G
  MOD_RES (21), (22), (23), (24): Xaa is A or G or is absent
RXGXGEVVMERYKKLXXXXXXXXXFYLMSIANLETPVXXAKPIS

SEQ ID NO: 5006 - protein, 35 aa, Artificial Sequence
  Non-cyclic GFR-binding peptide
  MOD_RES (12), (13), (14), (15), (16): Xaa is A or G
  MOD_RES (17), (18), (19), (20): Xaa is A or G or is absent
LHDELTRYKKLXXXXXXXXXFYLVSIANLQVQTPR

SEQ ID NO: 5007 - protein, 38 aa, Artificial Sequence
  Non-cyclic GFR-binding peptide
  MOD_RES (1), (33), (34): Xaa is C or S
XSRVVMNQYNKLIVNSSDDLYLVSIASLKTPAXXPKPV

SEQ ID NO: 5008 - protein, 37 aa, Artificial Sequence
  Non-cyclic GFR-binding peptide
  MOD_RES (1), (34), (35): Xaa is C or S
  MOD_RES (12), (13), (14), (15), (16): Xaa is A or G
  MOD_RES (17), (18), (19), (20): Xaa is A or G or is absent
XSRVIMQYNKLXXXXXXXXXLYLISIASLAQPVXXPA

SEQ ID NO: 5009 - protein, 38 aa, Artificial Sequence
  Non-cyclic GFR-binding peptide
  MOD_RES (2), (4), (37), (38): Xaa is C or S
RXGXEAVSMGEQYNKLTPVGMDDLYLVSIASLKTPVXX

SEQ ID NO: 5010 - protein, 35 aa, Artificial Sequence
  Non-cyclic GFR-binding peptide
  MOD_RES (12), (13), (14), (15), (16): Xaa is A or G
  MOD_RES (17), (18), (19), (20): Xaa is A or G or is absent
LHDELTQYNKLXXXXXXXXXLYLVSIASLQVQTPR

SEQ ID NO: 5011 - protein, 34 aa, Artificial Sequence
  Non-cyclic GFR-binding peptide
  MOD_RES (2), (34): Xaa is C or S
GXAKVVMNYHYKLIVNNSSDKYLVSIPSLKTPAX

SEQ ID NO: 5012 - protein, 39 aa, Artificial Sequence
  Non-cyclic GFR-binding peptide
  MOD_RES (2), (35), (36): Xaa is C or S
  MOD_RES (13), (14), (15), (16), (17): Xaa is A or G
  MOD_RES (18), (19), (20), (21): Xaa is A or G or is absent
KXSRVIMRYKKLXXXXXXXXXFYLISIANLAQPVXXPAA

SEQ ID NO: 5013 - protein, 39 aa, Artificial Sequence
  Non-cyclic GFR-binding peptide
  MOD_RES (2), (37), (38): Xaa is C or S
  MOD_RES (15), (16), (17), (18), (19): Xaa is A or G
  MOD_RES (20), (21), (22), (23): Xaa is A or G or is absent
GXEAVSMGEQYNKLXXXXXXXXXLYLVSIASLKTPVXXA

SEQ ID NO: 5014 - protein, 36 aa, Artificial Sequence
  Non-cyclic GFR-binding peptide
  MOD_RES (2), (4), (35), (36): Xaa is C or S
SXKXSKVIMRHKRLIKPTKGIYYLISTASLDQSVXX

SEQ ID NO: 5015 - protein, 38 aa, Artificial Sequence
  Non-cyclic GFR-binding peptide
  MOD_RES (2), (34), (35): Xaa is C or S
GXGEVVMDRHKRLVVKENEDYYLMSTASLETPVXXAKP

SEQ ID NO: 5016 - protein, 36 aa, Artificial Sequence
  Non-cyclic GFR-binding peptide
  MOD_RES (31), (32): Xaa is C or S
EVVMDYHYKLVVKENEDKYLMSIPSLETPVXXAKPI

SEQ ID NO: 5017 - protein, 36 aa, Artificial Sequence
  Non-cyclic GFR-binding peptide
  MOD_RES (32), (33): Xaa is C or S
ARVVMNRHKRLIVNSSDDYYLVSTASLQTPAXXPKP

SEQ ID NO: 5018 - protein, 36 aa, Artificial Sequence
  Non-cyclic GFR-binding peptide
  MOD_RES (33), (34): Xaa is C or S
  MOD_RES (11), (12), (13), (14), (15): Xaa is A or G
  MOD_RES (16), (17), (18), (19): Xaa is A or G or is absent
EVVMDRHKRLXXXXXXXXXYYLMSTASLETPVXXAK

SEQ ID NO: 5019 - protein, 32 aa, Artificial Sequence
  Non-cyclic GFR-binding peptide
  MOD_RES (31), (32): Xaa is C or S
RVVMNQYNKLIVNSSDDLYLVSIASLQTPAXX

SEQ ID NO: 5020 - protein, 34 aa, Artificial Sequence
  Non-cyclic GFR-binding peptide
  MOD_RES (1), (3): Xaa is C or S
XGXAKVVMNYHYKLIVNNSSDKYLVSIPSLKTPA

SEQ ID NO: 5021 - protein, 40 aa, Artificial Sequence
  Non-cyclic GFR-binding peptide
  MOD_RES (2), (4), (38): Xaa is C or S
  MOD_RES (16), (17), (18), (19), (20): Xaa is A or G
  MOD_RES (21), (22), (23), (24): Xaa is A or G or is absent
HXGXSRVVMNQYNKLXXXXXXXXXLYLVSIASLKTPAXTP

SEQ ID NO: 5022 - protein, 42 aa, Artificial Sequence
  Non-cyclic GFR-binding peptide
  MOD_RES (2), (4), (38), (39): Xaa is C or S
  MOD_RES (16), (17), (18), (19), (20): Xaa is A or G
  MOD_RES (21), (22), (23), (24): Xaa is A or G or is absent
HXGXAKVVMNQYNKLXXXXXXXXXLYLVSIASLKTPAXXAKP

SEQ ID NO: 5023 - protein, 34 aa, Artificial Sequence
  Non-cyclic GFR-binding peptide
  MOD_RES (31), (32): Xaa is C or S
SRVIMRHKRLVKPKRGVYYLISTASLAQPVXXPA

SEQ ID NO: 5024 - protein, 38 aa, Artificial Sequence
  Non-cyclic GFR-binding peptide
  MOD_RES (2), (4): Xaa is C or S
EXKXALHDELTYHYKLFIPKKRVIEKYLVSIPSLQVQT

SEQ ID NO: 5025 - protein, 35 aa, Artificial Sequence
  Non-cyclic GFR-binding peptide
  MOD_RES (2), (2): Xaa is C or S
  MOD_RES (14), (15), (16), (17), (18): Xaa is A or G
  MOD_RES (19), (20), (21), (22): Xaa is A or G or is absent
GXSRVVMNQYNKLXXXXXXXXXLYLVSIASLKTPA

SEQ ID NO: 5026 - protein, 34 aa, Artificial Sequence
  Non-cyclic GFR-binding peptide
  MOD_RES (2), (2): Xaa is C or S
  MOD_RES (13), (14), (15), (16), (17): Xaa is A or G
  MOD_RES (18), (19), (20), (21): Xaa is A or G or is absent
KXSRVIMQYNKLXXXXXXXXXLYLISIASLAQPV

SEQ ID NO: 5027 - protein, 35 aa, Artificial Sequence
  Non-cyclic GFR-binding peptide
LHDELTRHKRLFIPKKRVIEYYLVSTASLQVQTPR

SEQ ID NO: 5028 - protein, 39 aa, Artificial Sequence
  Non-cyclic GFR-binding peptide
  MOD_RES (1), (35), (36): Xaa is C or S
  MOD_RES (13), (14), (15), (16), (17): Xaa is A or G
  MOD_RES (18), (19), (20), (21): Xaa is A or G or is absent
XGEVVMERYKKLXXXXXXXXXFYLMSIANLETPVXXAKP

SEQ ID NO: 5029 - protein, 40 aa, Artificial Sequence
  Non-cyclic GFR-binding peptide
  MOD_RES (1), (3), (38), (39): Xaa is C or S
  MOD_RES (16), (17), (18), (19), (20): Xaa is A or G
  MOD_RES (21), (22), (23), (24): Xaa is A or G or is absent
XGXEAVSMGERYKKLXXXXXXXXXFYLVSIANLKTPVXXA

SEQ ID NO: 5030 - protein, 35 aa, Artificial Sequence
  Non-cyclic GFR-binding peptide
  MOD_RES (2), (2): Xaa is C or S
  MOD_RES (14), (15), (16), (17), (18): Xaa is A or G
  MOD_RES (19), (20), (21), (22): Xaa is A or G or is absent
GXGEVVMDRYKKLXXXXXXXXXFYLMSIANLETPV

SEQ ID NO: 5031 - protein, 37 aa, Artificial Sequence
  Non-cyclic GFR-binding peptide
  MOD_RES (1), (33), (34): Xaa is C or S
XARVVMNYHYKLIVNSSDDKYLVSIPSLQTPAXXPKP

SEQ ID NO: 5032 - protein, 37 aa, Artificial Sequence
  Non-cyclic GFR-binding peptide
  MOD_RES (1), (1): Xaa is C or S
XALHDELTQYNKLFIPKKRVIELYLVSIASLQVQTPR

SEQ ID NO: 5033 - protein, 43 aa, Artificial Sequence
  Non-cyclic GFR-binding peptide
  MOD_RES (1), (3), (38), (39): Xaa is C or S
  MOD_RES (16), (17), (18), (19), (20): Xaa is A or G
  MOD_RES (21), (22), (23), (24): Xaa is A or G or is absent
XGXEAVSMGERHKRLXXXXXXXXXYYLVSTASLKTPVXXAKGV

SEQ ID NO: 5034 - protein, 40 aa, Artificial Sequence
  Non-cyclic GFR-binding peptide
  MOD_RES (1), (3), (36), (37): Xaa is C or S
  MOD_RES (14), (15), (16), (17), (18): Xaa is A or G
  MOD_RES (19), (20), (21), (22): Xaa is A or G or is absent
XKXSKVVMRYKKLXXXXXXXXXFYLISIANLDQPVXXPSA

SEQ ID NO: 5035 - protein, 41 aa, Artificial Sequence
  Non-cyclic GFR-binding peptide
  MOD_RES (1), (35), (36): Xaa is C or S
  MOD_RES (13), (14), (15), (16), (17): Xaa is A or G
  MOD_RES (18), (19), (20), (21): Xaa is A or G or is absent
XAKVVMNYHYKLXXXXXXXXXKYLVSIPSLKTPAXXAKPVA

SEQ ID NO: 5036 - protein, 34 aa, Artificial Sequence
  Non-cyclic GFR-binding peptide
  MOD_RES (32), (33): Xaa is C or S
SRVVMNYHYKLIVNSSDDKYLVSIPSLKTPAXXP

SEQ ID NO: 5037 - protein, 35 aa, Artificial Sequence
  Non-cyclic GFR-binding peptide
  MOD_RES (2), (4): Xaa is C or S
HXGXARVVMNYHYKLIVNSSDDKYLVSIPSLQTPA

SEQ ID NO: 5038 - protein, 38 aa, Artificial Sequence
  Non-cyclic GFR-binding peptide
  MOD_RES (33), (34): Xaa is C or S
  MOD_RES (11), (12), (13), (14), (15): Xaa is A or G
  MOD_RES (16), (17), (18), (19): Xaa is A or G or is absent
RVVMNRHKRLXXXXXXXXXYYLVSTASLQTPAXXPKPV

SEQ ID NO: 5039 - protein, 40 aa, Artificial Sequence
  Non-cyclic GFR-binding peptide
  MOD_RES (2), (4): Xaa is C or S
  MOD_RES (17), (18), (19), (20), (21): Xaa is A or G
  MOD_RES (22), (23), (24), (25): Xaa is A or G or is absent
EXKXALHDELTRYKKLXXXXXXXXXFYLVSIANLQVQTPR

SEQ ID NO: 5040 - protein, 34 aa, Artificial Sequence
  Non-cyclic GFR-binding peptide
  MOD_RES (32), (32): Xaa is C or S
SRVVMNRHKRLIVNSSDDYYLVSTASLKTPAXTP

SEQ ID NO: 5041 - protein, 42 aa, Artificial Sequence
  Non-cyclic GFR-binding peptide
  MOD_RES (2), (36), (37): Xaa is C or S
  MOD_RES (14), (15), (16), (17), (18): Xaa is A or G
  MOD_RES (19), (20), (21), (22): Xaa is A or G or is absent
GXGEVVMEYHYKLXXXXXXXXXKYLMSIPSLETPVXXAKPIS

SEQ ID NO: 5042 - protein, 32 aa, Artificial Sequence
  Non-cyclic GFR-binding peptide
  MOD_RES (31), (32): Xaa is C or S
KVVMNYHYKLIVNNSSDKYLVSIPSLKTPAXX

SEQ ID NO: 5043 - protein, 41 aa, Artificial Sequence
  Non-cyclic GFR-binding peptide
  MOD_RES (2), (4), (36), (37): Xaa is C or S
RXGXGEVVMDRHKRLVVKENEDYYLMSTASLETPVXXAKPI

SEQ ID NO: 5044 - protein, 39 aa, Artificial Sequence
  Non-cyclic GFR-binding peptide
  MOD_RES (1), (3), (36), (37): Xaa is C or S
XGXEAVSMGERYKKLTPVGMDDFYLVSIANLKTPVXXAK

SEQ ID NO: 5045 - protein, 35 aa, Artificial Sequence
  Non-cyclic GFR-binding peptide
  MOD_RES (2), (35): Xaa is C or S
  MOD_RES (13), (14), (15), (16), (17): Xaa is A or G
  MOD_RES (18), (19), (20), (21): Xaa is A or G or is absent
KXSRVIMRHKRLXXXXXXXXXYYLISTASLAQPVX

SEQ ID NO: 5046 - protein, 34 aa, Artificial Sequence
  Non-cyclic GFR-binding peptide
HDELTQYNKLFIPKKRVIELYLVSIASLQVQTPR

SEQ ID NO: 5047 - protein, 38 aa, Artificial Sequence
  Non-cyclic GFR-binding peptide
  MOD_RES (2), (2): Xaa is C or S
  MOD_RES (15), (16), (17), (18), (19): Xaa is A or G
  MOD_RES (20), (21), (22), (23): Xaa is A or G or is absent
KXALHDELTYHYKLXXXXXXXXXKYLVSIPSLQVQTPR

SEQ ID NO: 5048 - protein, 36 aa, Artificial Sequence
  Non-cyclic GFR-binding peptide
  MOD_RES (2), (2): Xaa is C or S
KXALHDELTRHKRLFIPKKRVIEYYLVSTASLQVQT

SEQ ID NO: 5049 - protein, 32 aa, Artificial Sequence
  Non-cyclic GFR-binding peptide
  MOD_RES (32), (32): Xaa is C or S
SRVVMNRHKRLIVNSSDDYYLVSTASLKTPAX

SEQ ID NO: 5050 - protein, 32 aa, Artificial Sequence
  Non-cyclic GFR-binding peptide
  MOD_RES (31), (32): Xaa is C or S
RVVMNYHYKLIVNSSDDKYLVSIPSLQTPAXX

SEQ ID NO: 5051 - protein, 35 aa, Artificial Sequence
  Non-cyclic GFR-binding peptide
  MOD_RES (33), (34): Xaa is C or S
  MOD_RES (11), (12), (13), (14), (15): Xaa is A or G
  MOD_RES (16), (17), (18), (19): Xaa is A or G or is absent
SKVIMRHKRLXXXXXXXXXYYLISTASLDQSVXXP

SEQ ID NO: 5052 - protein, 38 aa, Artificial Sequence
  Non-cyclic GFR-binding peptide
  MOD_RES (2), (36), (37): Xaa is C or S
  MOD_RES (14), (15), (16), (17), (18): Xaa is A or G
  MOD_RES (19), (20), (21), (22): Xaa is A or G or is absent
GXAKVVMNQYNKLXXXXXXXXXLYLVSIASLKTPAXXA

SEQ ID NO: 5053 - protein, 36 aa, Artificial Sequence
  Non-cyclic GFR-binding peptide
  MOD_RES (1), (35), (36): Xaa is C or S
  MOD_RES (13), (14), (15), (16), (17): Xaa is A or G
  MOD_RES (18), (19), (20), (21): Xaa is A or G or is absent
XGEVVMDRHKRLXXXXXXXXXYYLMSTASLETPVXX

SEQ ID NO: 5054 - protein, 32 aa, Artificial Sequence
  Non-cyclic GFR-binding peptide
  MOD_RES (1), (32): Xaa is C or S
XSKVIMYHYKLIKPTKGIKYLISIPSLDQSVX

SEQ ID NO: 5055 - protein, 39 aa, Artificial Sequence
  Non-cyclic GFR-binding peptide
  MOD_RES (34), (35): Xaa is C or S
  MOD_RES (12), (13), (14), (15), (16): Xaa is A or G
  MOD_RES (17), (18), (19), (20): Xaa is A or G or is absent
AKVVMNQYNKLXXXXXXXXXLYLVSIASLKTPAXXAKPV

SEQ ID NO: 5056 - protein, 38 aa, Artificial Sequence
  Non-cyclic GFR-binding peptide
  MOD_RES (2), (36), (37): Xaa is C or S
  MOD_RES (14), (15), (16), (17), (18): Xaa is A or G
  MOD_RES (19), (20), (21), (22): Xaa is A or G or is absent
GXGEVVMERHKRLXXXXXXXXXYYLMSTASLETPVXXA

SEQ ID NO: 5057 - protein, 42 aa, Artificial Sequence
  Non-cyclic GFR-binding peptide
  MOD_RES (1), (3), (37), (38): Xaa is C or S
  MOD_RES (15), (16), (17), (18), (19): Xaa is A or G
  MOD_RES (20), (21), (22), (23): Xaa is A or G or is absent
XGXGEVVMERHKRLXXXXXXXXXYYLMSTASLETPVXXAKPI

SEQ ID NO: 5058 - protein, 35 aa, Artificial Sequence
  Non-cyclic GFR-binding peptide
  MOD_RES (2), (2): Xaa is C or S
  MOD_RES (14), (15), (16), (17), (18): Xaa is A or G
  MOD_RES (19), (20), (21), (22): Xaa is A or G or is absent
GXAKVVMNRYKKLXXXXXXXXXFYLVSIANLKTPA

SEQ ID NO: 5059 - protein, 40 aa, Artificial Sequence
  Non-cyclic GFR-binding peptide
  MOD_RES (1), (35), (36): Xaa is C or S
  MOD_RES (13), (14), (15), (16), (17): Xaa is A or G
  MOD_RES (18), (19), (20), (21): Xaa is A or G or is absent
XAKVVMNQYNKLXXXXXXXXXLYLVSIASLKTPAXXAKPV

SEQ ID NO: 5060 - protein, 35 aa, Artificial Sequence
  Non-cyclic GFR-binding peptide
  MOD_RES (31), (32): Xaa is C or S
SKVIMYHYKLIKPTKGIKYLISIPSLDQSVXXPSA

SEQ ID NO: 5061 - protein, 40 aa, Artificial Sequence
  Non-cyclic GFR-binding peptide
  MOD_RES (2), (4): Xaa is C or S
  MOD_RES (17), (18), (19), (20), (21): Xaa is A or G
  MOD_RES (22), (23), (24), (25): Xaa is A or G or is absent
EXKXALHDELTRHKRLXXXXXXXXXYYLVSTASLQVQTPR

SEQ ID NO: 5062 - protein, 40 aa, Artificial Sequence
  Non-cyclic GFR-binding peptide
  MOD_RES (1), (3), (37), (38): Xaa is C or S
  MOD_RES (15), (16), (17), (18), (19): Xaa is A or G
  MOD_RES (20), (21), (22), (23): Xaa is A or G or is absent
XGXGEVVMERYKKLXXXXXXXXXFYLMSIANLETPVXXAK

SEQ ID NO: 5063 - protein, 35 aa, Artificial Sequence
  Non-cyclic GFR-binding peptide
  MOD_RES (33), (34): Xaa is C or S
  MOD_RES (11), (12), (13), (14), (15): Xaa is A or G
  MOD_RES (16), (17), (18), (19): Xaa is A or G or is absent
EVVMDYHYKLXXXXXXXXXKYLMSIPSLETPVXXA

SEQ ID NO: 5064 - protein, 31 aa, Artificial Sequence
  Non-cyclic GFR-binding peptide
ARVVMNQYNKLIVNSSDDLYLVSIASLQTPA

SEQ ID NO: 5065 - protein, 36 aa, Artificial Sequence
  Non-cyclic GFR-binding peptide
  MOD_RES (1), (3), (36): Xaa is C or S
  MOD_RES (14), (15), (16), (17), (18): Xaa is A or G
  MOD_RES (19), (20), (21), (22): Xaa is A or G or is absent
XKXSRVIMQYNKLXXXXXXXXXLYLISIASLAQPVX

SEQ ID NO: 5066 - protein, 33 aa, Artificial Sequence
  Non-cyclic GFR-binding peptide
  MOD_RES (1), (33): Xaa is C or S
XARVVMNRHKRLIVNSSDDYYLVSTASLQTPAX

SEQ ID NO: 5067 - protein, 39 aa, Artificial Sequence
  Non-cyclic GFR-binding peptide
  MOD_RES (33), (34): Xaa is C or S
  MOD_RES (11), (12), (13), (14), (15): Xaa is A or G
  MOD_RES (16), (17), (18), (19): Xaa is A or G or is absent
RVVMNYHYKLXXXXXXXXXKYLVSIPSLKTPAXXPKPVY

SEQ ID NO: 5068 - protein, 43 aa, Artificial Sequence
  Non-cyclic GFR-binding peptide
  MOD_RES (2), (4), (41): Xaa is C or S
  MOD_RES (17), (18), (19), (20), (21): Xaa is A or G
  MOD_RES (22), (23), (24), (25): Xaa is A or G or is absent
EXKXALHDELTRYKKLXXXXXXXXXFYLVSIANLQVQTPRXQV

SEQ ID NO: 5069 - protein, 34 aa, Artificial Sequence
  Non-cyclic GFR-binding peptide
  MOD_RES (2), (4): Xaa is C or S
SXKXSKVVMRYKKLVKPTRGVFYLISIANLDQPV

SEQ ID NO: 5070 - protein, 41 aa, Artificial Sequence
  Non-cyclic GFR-binding peptide
  MOD_RES (2), (4), (38): Xaa is C or S
  MOD_RES (16), (17), (18), (19), (20): Xaa is A or G
  MOD_RES (21), (22), (23), (24): Xaa is A or G or is absent
HXGXSRVVMNYHYKLXXXXXXXXXKYLVSIPSLKTPAXTPK

SEQ ID NO: 5071 - protein, 37 aa, Artificial Sequence
  Non-cyclic GFR-binding peptide
  MOD_RES (1), (3): Xaa is C or S
XKXALHDELTYHYKLFIPKKRVIEKYLVSIPSLQVQT

SEQ ID NO: 5072 - protein, 37 aa, Artificial Sequence
  Non-cyclic GFR-binding peptide
  MOD_RES (1), (3), (35), (36): Xaa is C or S
XGXSRVVMNYHYKLIVNSSDDKYLVSIPSLKTPAXXP

SEQ ID NO: 5073 - protein, 37 aa, Artificial Sequence
  Non-cyclic GFR-binding peptide
  MOD_RES (1), (33), (34): Xaa is C or S
XSRVVMNRHKRLIVNSSDDYYLVSTASLKTPAXXPKP

SEQ ID NO: 5074 - protein, 32 aa, Artificial Sequence
  Non-cyclic GFR-binding peptide
  MOD_RES (31), (32): Xaa is C or S
SKVVMRHKRLVKPTRGVYYLISTASLDQPVXX

SEQ ID NO: 5075 - protein, 35 aa, Artificial Sequence
  Non-cyclic GFR-binding peptide
  MOD_RES (1), (35): Xaa is C or S
  MOD_RES (13), (14), (15), (16), (17): Xaa is A or G
  MOD_RES (18), (19), (20), (21): Xaa is A or G or is absent
XGEVVMEYHYKLXXXXXXXXXKYLMSIPSLETPVX

SEQ ID NO: 5076 - protein, 42 aa, Artificial Sequence
  Non-cyclic GFR-binding peptide
  MOD_RES (2), (4), (39), (40): Xaa is C or S
  MOD_RES (17), (18), (19), (20), (21): Xaa is A or G
  MOD_RES (22), (23), (24), (25): Xaa is A or G or is absent
RXGXEAVSMGERYKKLXXXXXXXXXFYLVSIANLKTPVXXAK

SEQ ID NO: 5077 - protein, 42 aa, Artificial Sequence
  Non-cyclic GFR-binding peptide
  MOD_RES (1), (3), (37), (38): Xaa is C or S
  MOD_RES (15), (16), (17), (18), (19): Xaa is A or G
  MOD_RES (20), (21), (22), (23): Xaa is A or G or is absent
XGXARVVMNRHKRLXXXXXXXXXYYLVSTASLQTPAXXPKPV

SEQ ID NO: 5078 - protein, 40 aa, Artificial Sequence
  Non-cyclic GFR-binding peptide
  MOD_RES (1), (3), (35), (36): Xaa is C or S
XGXARVVMNYHYKLIVNSSDDKYLVSIPSLQTPAXXPKPV

SEQ ID NO: 5079 - protein, 40 aa, Artificial Sequence
  Non-cyclic GFR-binding peptide
  MOD_RES (1), (38): Xaa is C or S
XALHDELTYHYKLFIPKKRVIEKYLVSIPSLQVQTPRXQV

SEQ ID NO: 5080 - protein, 38 aa, Artificial Sequence
  Non-cyclic GFR-binding peptide
  MOD_RES (2), (37), (38): Xaa is C or S
  MOD_RES (15), (16), (17), (18), (19): Xaa is A or G
  MOD_RES (20), (21), (22), (23): Xaa is A or G or is absent
GXEAVSMGEQYNKLXXXXXXXXXLYLVSIASLKTPVXX

SEQ ID NO: 5081 - protein, 38 aa, Artificial Sequence
  Non-cyclic GFR-binding peptide
  MOD_RES (34), (35): Xaa is C or S
  MOD_RES (12), (13), (14), (15), (16): Xaa is A or G
  MOD_RES (17), (18), (19), (20): Xaa is A or G or is absent
GEVVMDRHKRLXXXXXXXXXYYLMSTASLETPVXXAKP

SEQ ID NO: 5082 - protein, 39 aa, Artificial Sequence
  Non-cyclic GFR-binding peptide
  MOD_RES (1), (3), (37), (38): Xaa is C or S
  MOD_RES (15), (16), (17), (18), (19): Xaa is A or G
  MOD_RES (20), (21), (22), (23): Xaa is A or G or is absent
XGXGEVVMEYHYKLXXXXXXXXXKYLMSIPSLETPVXXA

SEQ ID NO: 5083 - protein, 38 aa, Artificial Sequence
  Non-cyclic GFR-binding peptide
  MOD_RES (33), (33): Xaa is C or S
  MOD_RES (11), (12), (13), (14), (15): Xaa is A or G
  MOD_RES (16), (17), (18), (19): Xaa is A or G or is absent
RVVMNQYNKLXXXXXXXXXLYLVSIASLKTPAXTPKTV

SEQ ID NO: 5084 - protein, 33 aa, Artificial Sequence
  Non-cyclic GFR-binding peptide
  MOD_RES (12), (13), (14), (15), (16): Xaa is A or G
  MOD_RES (17), (18), (19), (20): Xaa is A or G or is absent
AKVVMNRYKKLXXXXXXXXXFYLVSIANLKTPA

SEQ ID NO: 5085 - protein, 35 aa, Artificial Sequence
  Non-cyclic GFR-binding peptide
  MOD_RES (2), (33), (34): Xaa is C or S
KXSKVVMQYNKLVKPTRGVLYLISIASLDQPVXXP

SEQ ID NO: 5086 - protein, 36 aa, Artificial Sequence
  Non-cyclic GFR-binding peptide
  MOD_RES (34), (35): Xaa is C or S
  MOD_RES (12), (13), (14), (15), (16): Xaa is A or G
  MOD_RES (17), (18), (19), (20): Xaa is A or G or is absent
GEVVMDRYKKLXXXXXXXXXFYLMSIANLETPVXXA

SEQ ID NO: 5087 - protein, 42 aa, Artificial Sequence
  Non-cyclic GFR-binding peptide
  MOD_RES (1), (3), (37), (38): Xaa is C or S
  MOD_RES (15), (16), (17), (18), (19): Xaa is A or G
  MOD_RES (20), (21), (22), (23): Xaa is A or G or is absent
XGXGEVVMERYKKLXXXXXXXXXFYLMSIANLETPVXXAKPI

SEQ ID NO: 5088 - protein, 34 aa, Artificial Sequence
  Non-cyclic GFR-binding peptide
  MOD_RES (11), (12), (13), (14), (15): Xaa is A or G
  MOD_RES (16), (17), (18), (19): Xaa is A or G or is absent
HDELTRHKRLXXXXXXXXXYYLVSTASLQVQTPR

SEQ ID NO: 5089 - protein, 34 aa, Artificial Sequence
  Non-cyclic GFR-binding peptide
  MOD_RES (33), (34): Xaa is C or S
  MOD_RES (11), (12), (13), (14), (15): Xaa is A or G
  MOD_RES (16), (17), (18), (19): Xaa is A or G or is absent
SRVIMYHYKLXXXXXXXXXKYLISIPSLAQPVXX

SEQ ID NO: 5090 - protein, 38 aa, Artificial Sequence
  Non-cyclic GFR-binding peptide
  MOD_RES (1), (3), (37), (38): Xaa is C or S
  MOD_RES (15), (16), (17), (18), (19): Xaa is A or G
  MOD_RES (20), (21), (22), (23): Xaa is A or G or is absent
XGXGEVVMDRYKKLXXXXXXXXXFYLMSIANLETPVXX

SEQ ID NO: 5091 - protein, 34 aa, Artificial Sequence
  Non-cyclic GFR-binding peptide
  MOD_RES (1), (32), (33): Xaa is C or S
XSKVIMYHYKLIKPTKGIKYLISIPSLDQSVXXP

SEQ ID NO: 5092 - protein, 40 aa, Artificial Sequence
  Non-cyclic GFR-binding peptide
  MOD_RES (2), (35), (36): Xaa is C or S
  MOD_RES (13), (14), (15), (16), (17): Xaa is A or G
  MOD_RES (18), (19), (20), (21): Xaa is A or G or is absent
KXSRVIMYHYKLXXXXXXXXXKYLISIPSLAQPVXXPAAS

SEQ ID NO: 5093 - protein, 39 aa, Artificial Sequence
  Non-cyclic GFR-binding peptide
  MOD_RES (2), (4), (38), (39): Xaa is C or S
  MOD_RES (16), (17), (18), (19), (20): Xaa is A or G
  MOD_RES (21), (22), (23), (24): Xaa is A or G or is absent
RXGXGEVVMDYHYKLXXXXXXXXXKYLMSIPSLETPVXX

SEQ ID NO: 5094 - protein, 32 aa, Artificial Sequence
  Non-cyclic GFR-binding peptide
  MOD_RES (31), (32): Xaa is C or S
KVVMNQYNKLIVNNSSDLYLVSIASLKTPAXX

SEQ ID NO: 5095 - protein, 35 aa, Artificial Sequence
  Non-cyclic GFR-binding peptide
  MOD_RES (33), (34): Xaa is C or S
  MOD_RES (11), (12), (13), (14), (15): Xaa is A or G
  MOD_RES (16), (17), (18), (19): Xaa is A or G or is absent
RVVMNQYNKLXXXXXXXXXLYLVSIASLKTPAXXP

SEQ ID NO: 5096 - protein, 39 aa, Artificial Sequence
  Non-cyclic GFR-binding peptide
  MOD_RES (1), (3): Xaa is C or S
  MOD_RES (16), (17), (18), (19), (20): Xaa is A or G
  MOD_RES (21), (22), (23), (24): Xaa is A or G or is absent
XKXALHDELTQYNKLXXXXXXXXXLYLVSIASLQVQTPR

SEQ ID NO: 5097 - protein, 37 aa, Artificial Sequence
  Non-cyclic GFR-binding peptide
  MOD_RES (2), (35), (36): Xaa is C or S
  MOD_RES (13), (14), (15), (16), (17): Xaa is A or G
  MOD_RES (18), (19), (20), (21): Xaa is A or G or is absent
KXSKVIMRYKKLXXXXXXXXXFYLISIANLDQSVXXP

SEQ ID NO: 5098 - protein, 37 aa, Artificial Sequence
  Non-cyclic GFR-binding peptide
  MOD_RES (33), (34): Xaa is C or S
EAVSMGEQYNKLTPVGMDDLYLVSIASLKTPVXXAKG

SEQ ID NO: 5099 - protein, 33 aa, Artificial Sequence
  Non-cyclic GFR-binding peptide
  MOD_RES (12), (13), (14), (15), (16): Xaa is A or G
  MOD_RES (17), (18), (19), (20): Xaa is A or G or is absent
AKVVMNQYNKLXXXXXXXXXLYLVSIASLKTPA

SEQ ID NO: 5100 - protein, 37 aa, Artificial Sequence
  Non-cyclic GFR-binding peptide
  MOD_RES (1), (3), (36), (37): Xaa is C or S
  MOD_RES (14), (15), (16), (17), (18): Xaa is A or G
  MOD_RES (19), (20), (21), (22): Xaa is A or G or is absent
XKXSKVIMRYKKLXXXXXXXXXFYLISIANLDQSVXX

SEQ ID NO: 5101 - protein, 33 aa, Artificial Sequence
  Non-cyclic GFR-binding peptide
  MOD_RES (1), (33): Xaa is C or S
XGEVVMEYHYKLVVKDYEDKYLMSIPSLETPVX

SEQ ID NO: 5102 - protein, 41 aa, Artificial Sequence
  Non-cyclic GFR-binding peptide
  MOD_RES (1), (3), (36), (37): Xaa is C or S
  MOD_RES (14), (15), (16), (17), (18): Xaa is A or G
  MOD_RES (19), (20), (21), (22): Xaa is A or G or is absent
XKXSKVIMYHYKLXXXXXXXXXKYLISIPSLDQSVXXPSAS

SEQ ID NO: 5103 - protein, 36 aa, Artificial Sequence
  Non-cyclic GFR-binding peptide
  MOD_RES (1), (3), (36): Xaa is C or S
  MOD_RES (14), (15), (16), (17), (18): Xaa is A or G
  MOD_RES (19), (20), (21), (22): Xaa is A or G or is absent
XKXSRVIMRHKRLXXXXXXXXXYYLISTASLAQPVX

SEQ ID NO: 5104 - protein, 45 aa, Artificial Sequence
  Non-cyclic GFR-binding peptide
  MOD_RES (2), (4), (41): Xaa is C or S
  MOD_RES (17), (18), (19), (20), (21): Xaa is A or G
  MOD_RES (22), (23), (24), (25): Xaa is A or G or is absent
EXKXALHDELTRHKRLXXXXXXXXXYYLVSTASLQVQTPRXQVNR

SEQ ID NO: 5105 - protein, 37 aa, Artificial Sequence
  Non-cyclic GFR-binding peptide
  MOD_RES (1), (34), (35): Xaa is C or S
  MOD_RES (12), (13), (14), (15), (16): Xaa is A or G
  MOD_RES (17), (18), (19), (20): Xaa is A or G or is absent
XSKVVMRYKKLXXXXXXXXXFYLISIANLDQPVXXPS

SEQ ID NO: 5106 - protein, 41 aa, Artificial Sequence
  Non-cyclic GFR-binding peptide
  MOD_RES (1), (3), (38), (39): Xaa is C or S
  MOD_RES (16), (17), (18), (19), (20): Xaa is A or G
  MOD_RES (21), (22), (23), (24): Xaa is A or G or is absent
XGXEAVSMGERYKKLXXXXXXXXXFYLVSIANLKTPVXXAK

SEQ ID NO: 5107 - protein, 40 aa, Artificial Sequence
  Non-cyclic GFR-binding peptide
  MOD_RES (2), (4), (36), (37): Xaa is C or S
HXGXARVVMNRHKRLIVNSSDDYYLVSTASLQTPAXXPKP

SEQ ID NO: 5108 - protein, 33 aa, Artificial Sequence
  Non-cyclic GFR-binding peptide
  MOD_RES (33), (33): Xaa is C or S
  MOD_RES (11), (12), (13), (14), (15): Xaa is A or G
  MOD_RES (16), (17), (18), (19): Xaa is A or G or is absent
SKVVMYHYKLXXXXXXXXXKYLISIPSLDQPVX

SEQ ID NO: 5109 - protein, 39 aa, Artificial Sequence
  Non-cyclic GFR-binding peptide
  MOD_RES (2), (4), (36), (37): Xaa is C or S
HXGXARVVMNYHYKLIVNSSDDKYLVSIPSLQTPAXXPK

SEQ ID NO: 5110 - protein, 34 aa, Artificial Sequence
  Non-cyclic GFR-binding peptide
  MOD_RES (1), (33), (34): Xaa is C or S
XARVVMNRHKRLIVNSSDDYYLVSTASLQTPAXX

SEQ ID NO: 5111 - protein, 43 aa, Artificial Sequence
  Non-cyclic GFR-binding peptide
  MOD_RES (1), (3), (37), (38): Xaa is C or S
  MOD_RES (15), (16), (17), (18), (19): Xaa is A or G
  MOD_RES (20), (21), (22), (23): Xaa is A or G or is absent
XGXSRVVMNYHYKLXXXXXXXXXKYLVSIPSLKTPAXXPKPVY

SEQ ID NO: 5112 - protein, 38 aa, Artificial Sequence
  Non-cyclic GFR-binding peptide
  MOD_RES (2), (2): Xaa is C or S
KXALHDELTYHYKLFIPKKRVIEKYLVSIPSLQVQTPR

SEQ ID NO: 5113 - protein, 39 aa, Artificial Sequence
  Non-cyclic GFR-binding peptide
  MOD_RES (33), (34): Xaa is C or S
  MOD_RES (11), (12), (13), (14), (15): Xaa is A or G
  MOD_RES (16), (17), (18), (19): Xaa is A or G or is absent
SKVIMQYNKLXXXXXXXXXLYLISIASLDQSVXXPSASA

SEQ ID NO: 5114 - protein, 36 aa, Artificial Sequence
  Non-cyclic GFR-binding peptide
  MOD_RES (1), (3), (36): Xaa is C or S
  MOD_RES (14), (15), (16), (17), (18): Xaa is A or G
  MOD_RES (19), (20), (21), (22): Xaa is A or G or is absent
XKXSRVIMRYKKLXXXXXXXXXFYLISIANLAQPVX

SEQ ID NO: 5115 - protein, 38 aa, Artificial Sequence
  Non-cyclic GFR-binding peptide
  MOD_RES (2), (33), (34): Xaa is C or S
KXSKVIMRYKKLIKPTKGIFYLISIANLDQSVXXPSAS

SEQ ID NO: 5116 - protein, 36 aa, Artificial Sequence
  Non-cyclic GFR-binding peptide
  MOD_RES (2), (4), (36): Xaa is C or S
RXGXGEVVMERYKKLVVKDYEDFYLMSIANLETPVX

SEQ ID NO: 5117 - protein, 37 aa, Artificial Sequence
  Non-cyclic GFR-binding peptide
  MOD_RES (2), (33), (34): Xaa is C or S
KXSRVIMRYKKLVKPKRGVFYLISIANLAQPVXXPAA

SEQ ID NO: 5118 - protein, 36 aa, Artificial Sequence
  Non-cyclic GFR-binding peptide
  MOD_RES (31), (31): Xaa is C or S
RVVMNRHKRLIVNSSDDYYLVSTASLKTPAXTPKTV

SEQ ID NO: 5119 - protein, 41 aa, Artificial Sequence
  Non-cyclic GFR-binding peptide
  MOD_RES (1), (35), (36): Xaa is C or S
  MOD_RES (13), (14), (15), (16), (17): Xaa is A or G
  MOD_RES (18), (19), (20), (21): Xaa is A or G or is absent
XGEVVMDYHYKLXXXXXXXXXKYLMSIPSLETPVXXAKPIK

SEQ ID NO: 5120 - protein, 34 aa, Artificial Sequence
  Non-cyclic GFR-binding peptide
  MOD_RES (31), (32): Xaa is C or S
SRVIMRYKKLVKPKRGVFYLISIANLAQPVXXPA

SEQ ID NO: 5121 - protein, 34 aa, Artificial Sequence
  Non-cyclic GFR-binding peptide
  MOD_RES (1), (1): Xaa is C or S
  MOD_RES (13), (14), (15), (16), (17): Xaa is A or G
  MOD_RES (18), (19), (20), (21): Xaa is A or G or is absent
XARVVMNQYNKLXXXXXXXXXLYLVSIASLQTPA

SEQ ID NO: 5122 - protein, 41 aa, Artificial Sequence
  Non-cyclic GFR-binding peptide
  MOD_RES (1), (35), (36): Xaa is C or S
  MOD_RES (13), (14), (15), (16), (17): Xaa is A or G
  MOD_RES (18), (19), (20), (21): Xaa is A or G or is absent
XAKVVMNQYNKLXXXXXXXXXLYLVSIASLKTPAXXAKPVA

SEQ ID NO: 5123 - protein, 40 aa, Artificial Sequence
  Non-cyclic GFR-binding peptide
  MOD_RES (2), (4), (36), (37): Xaa is C or S
HXGXARVVMNQYNKLIVNSSDDLYLVSIASLQTPAXXPKP

SEQ ID NO: 5124 - protein, 37 aa, Artificial Sequence
  Non-cyclic GFR-binding peptide
  MOD_RES (33), (34): Xaa is C or S
  MOD_RES (11), (12), (13), (14), (15): Xaa is A or G
  MOD_RES (16), (17), (18), (19): Xaa is A or G or is absent
SKVIMRYKKLXXXXXXXXXFYLISIANLDQSVXXPSA

SEQ ID NO: 5125 - protein, 32 aa, Artificial Sequence
  Non-cyclic GFR-binding peptide
  MOD_RES (1), (32): Xaa is C or S
XSKVVMRHKRLVKPTRGVYYLISTASLDQPVX

SEQ ID NO: 5126 - protein, 42 aa, Artificial Sequence
  Non-cyclic GFR-binding peptide
  MOD_RES (1), (3), (40): Xaa is C or S
  MOD_RES (16), (17), (18), (19), (20): Xaa is A or G
  MOD_RES (21), (22), (23), (24): Xaa is A or G or is absent
XKXALHDELTRHKRLXXXXXXXXXYYLVSTASLQVQTPRXQV

SEQ ID NO: 5127 - protein, 41 aa, Artificial Sequence
  Non-cyclic GFR-binding peptide
  MOD_RES (2), (35), (36): Xaa is C or S
  MOD_RES (13), (14), (15), (16), (17): Xaa is A or G
  MOD_RES (18), (19), (20), (21): Xaa is A or G or is absent
KXSKVIMYHYKLXXXXXXXXXKYLISIPSLDQSVXXPSASA

SEQ ID NO: 5128 - protein, 41 aa, Artificial Sequence
  Non-cyclic GFR-binding peptide
  MOD_RES (1), (3), (36), (37): Xaa is C or S
  MOD_RES (14), (15), (16), (17), (18): Xaa is A or G
  MOD_RES (19), (20), (21), (22): Xaa is A or G or is absent
XKXSRVIMYHYKLXXXXXXXXXKYLISIPSLAQPVXXPAAS

SEQ ID NO: 5129 - protein, 39 aa, Artificial Sequence
  Non-cyclic GFR-binding peptide
  MOD_RES (2), (39): Xaa is C or S
  MOD_RES (15), (16), (17), (18), (19): Xaa is A or G
  MOD_RES (20), (21), (22), (23): Xaa is A or G or is absent
KXALHDELTYHYKLXXXXXXXXXKYLVSIPSLQVQTPRX

SEQ ID NO: 5130 - protein, 40 aa, Artificial Sequence
  Non-cyclic GFR-binding peptide
  MOD_RES (1), (3), (37), (38): Xaa is C or S
  MOD_RES (15), (16), (17), (18), (19): Xaa is A or G
  MOD_RES (20), (21), (22), (23): Xaa is A or G or is absent
XGXGEVVMDRHKRLXXXXXXXXXYYLMSTASLETPVXXAK

SEQ ID NO: 5131 - protein, 38 aa, Artificial Sequence
  Non-cyclic GFR-binding peptide
  MOD_RES (2), (36), (37): Xaa is C or S
  MOD_RES (14), (15), (16), (17), (18): Xaa is A or G
  MOD_RES (19), (20), (21), (22): Xaa is A or G or is absent
GXARVVMNRHKRLXXXXXXXXXYYLVSTASLQTPAXXP

SEQ ID NO: 5132 - protein, 36 aa, Artificial Sequence
  Non-cyclic GFR-binding peptide
  MOD_RES (34), (35): Xaa is C or S
  MOD_RES (12), (13), (14), (15), (16): Xaa is A or G
  MOD_RES (17), (18), (19), (20): Xaa is A or G or is absent
ARVVMNQYNKLXXXXXXXXXLYLVSIASLQTPAXXP

SEQ ID NO: 5133 - protein, 40 aa, Artificial Sequence
  Non-cyclic GFR-binding peptide
  MOD_RES (2), (4), (38), (39): Xaa is C or S
  MOD_RES (16), (17), (18), (19), (20): Xaa is A or G
  MOD_RES (21), (22), (23), (24): Xaa is A or G or is absent
HXGXARVVMNYHYKLXXXXXXXXXKYLVSIPSLQTPAXXP

SEQ ID NO: 5134 - protein, 31 aa, Artificial Sequence
  Non-cyclic GFR-binding peptide
  MOD_RES (1), (1): Xaa is C or S
XSKVVMRHKRLVKPTRGVYYLISTASLDQPV

SEQ ID NO: 5135 - protein, 41 aa, Artificial Sequence
  Non-cyclic GFR-binding peptide
  MOD_RES (2), (4), (35), (36): Xaa is C or S
SXKXSKVIMRYKKLIKPTKGIFYLISIANLDQSVXXPSASA

SEQ ID NO: 5136 - protein, 35 aa, Artificial Sequence
  Non-cyclic GFR-binding peptide
  MOD_RES (33), (34): Xaa is C or S
  MOD_RES (11), (12), (13), (14), (15): Xaa is A or G
  MOD_RES (16), (17), (18), (19): Xaa is A or G or is absent
RVVMNYHYKLXXXXXXXXXKYLVSIPSLKTPAXXP

SEQ ID NO: 5137 - protein, 35 aa, Artificial Sequence
  Non-cyclic GFR-binding peptide
  MOD_RES (1), (1): Xaa is C or S
  MOD_RES (14), (15), (16), (17), (18): Xaa is A or G
  MOD_RES (19), (20), (21), (22): Xaa is A or G or is absent
XALHDELTYHYKLXXXXXXXXXKYLVSIPSLQVQT

SEQ ID NO: 5138 - protein, 39 aa, Artificial Sequence
  Non-cyclic GFR-binding peptide
  MOD_RES (2), (4), (35), (36): Xaa is C or S
SXKXSRVIMRYKKLVKPKRGVFYLISIANLAQPVXXPAA

SEQ ID NO: 5139 - protein, 36 aa, Artificial Sequence
  Non-cyclic GFR-binding peptide
  MOD_RES (1), (3), (35), (36): Xaa is C or S
XGXAKVVMNQYNKLIVNNSSDLYLVSIASLKTPAXX

SEQ ID NO: 5140 - protein, 34 aa, Artificial Sequence
  Non-cyclic GFR-binding peptide
  MOD_RES (1), (1): Xaa is C or S
  MOD_RES (13), (14), (15), (16), (17): Xaa is A or G
  MOD_RES (18), (19), (20), (21): Xaa is A or G or is absent
XAKVVMNYHYKLXXXXXXXXXKYLVSIPSLKTPA

SEQ ID NO: 5141 - protein, 33 aa, Artificial Sequence
  Non-cyclic GFR-binding peptide
  MOD_RES (2), (2): Xaa is C or S
GXARVVMNQYNKLIVNSSDDLYLVSIASLQTPA

SEQ ID NO: 5142 - protein, 37 aa, Artificial Sequence
  Non-cyclic GFR-binding peptide
  MOD_RES (33), (34): Xaa is C or S
  MOD_RES (11), (12), (13), (14), (15): Xaa is A or G
  MOD_RES (16), (17), (18), (19): Xaa is A or G or is absent
EVVMERYKKLXXXXXXXXXFYLMSIANLETPVXXAKP

SEQ ID NO: 5143 - protein, 40 aa, Artificial Sequence
  Non-cyclic GFR-binding peptide
  MOD_RES (1), (36), (37): Xaa is C or S
  MOD_RES (14), (15), (16), (17), (18): Xaa is A or G
  MOD_RES (19), (20), (21), (22): Xaa is A or G or is absent
XEAVSMGEQYNKLXXXXXXXXXLYLVSIASLKTPVXXAKG

SEQ ID NO: 5144 - protein, 40 aa, Artificial Sequence
  Non-cyclic GFR-binding peptide
  MOD_RES (1), (3), (35), (36): Xaa is C or S
XGXGEVVMDRYKKLVVKENEDFYLMSIANLETPVXXAKPI

SEQ ID NO: 5145 - protein, 39 aa, Artificial Sequence
  Non-cyclic GFR-binding peptide
  MOD_RES (1), (34), (35): Xaa is C or S
XEAVSMGERHKRLTPVGMDDYYLVSTASLKTPVXXAKGV

SEQ ID NO: 5146 - protein, 34 aa, Artificial Sequence
  Non-cyclic GFR-binding peptide
  MOD_RES (31), (32): Xaa is C or S
EVVMDYHYKLVVKENEDKYLMSIPSLETPVXXAK

SEQ ID NO: 5147 - protein, 39 aa, Artificial Sequence
  Non-cyclic GFR-binding peptide
  MOD_RES (2), (34), (35): Xaa is C or S
GXGEVVMERHKRLVVKDYEDYYLMSTASLETPVXXAKPI

SEQ ID NO: 5148 - protein, 39 aa, Artificial Sequence
  Non-cyclic GFR-binding peptide
  MOD_RES (33), (34): Xaa is C or S
  MOD_RES (11), (12), (13), (14), (15): Xaa is A or G
  MOD_RES (16), (17), (18), (19): Xaa is A or G or is absent
SKVVMRYKKLXXXXXXXXXFYLISIANLDQPVXXPSASA

SEQ ID NO: 5149 - protein, 34 aa, Artificial Sequence
  Non-cyclic GFR-binding peptide
  MOD_RES (33), (34): Xaa is C or S
  MOD_RES (11), (12), (13), (14), (15): Xaa is A or G
  MOD_RES (16), (17), (18), (19): Xaa is A or G or is absent
SKVIMYHYKLXXXXXXXXXKYLISIPSLDQSVXX

SEQ ID NO: 5150 - protein, 39 aa, Artificial Sequence
  Non-cyclic GFR-binding peptide
  MOD_RES (36), (36): Xaa is C or S
  MOD_RES (12), (13), (14), (15), (16): Xaa is A or G
  MOD_RES (17), (18), (19), (20): Xaa is A or G or is absent
LHDELTRYKKLXXXXXXXXXFYLVSIANLQVQTPRXQVN

SEQ ID NO: 5151 - protein, 36 aa, Artificial Sequence
  Non-cyclic GFR-binding peptide
  MOD_RES (2), (2): Xaa is C or S
  MOD_RES (15), (16), (17), (18), (19): Xaa is A or G
  MOD_RES (20), (21), (22), (23): Xaa is A or G or is absent
GXEAVSMGEQYNKLXXXXXXXXXLYLVSIASLKTPV

SEQ ID NO: 5152 - protein, 38 aa, Artificial Sequence
  Non-cyclic GFR-binding peptide
  MOD_RES (2), (4): Xaa is C or S
  MOD_RES (17), (18), (19), (20), (21): Xaa is A or G
  MOD_RES (22), (23), (24), (25): Xaa is A or G or is absent
EXKXALHDELTQYNKLXXXXXXXXXLYLVSIASLQVQT

SEQ ID NO: 5153 - protein, 39 aa, Artificial Sequence
  Non-cyclic GFR-binding peptide
  MOD_RES (1), (3), (38), (39): Xaa is C or S
  MOD_RES (16), (17), (18), (19), (20): Xaa is A or G
  MOD_RES (21), (22), (23), (24): Xaa is A or G or is absent
XGXEAVSMGERYKKLXXXXXXXXXFYLVSIANLKTPVXX

SEQ ID NO: 5154 - protein, 36 aa, Artificial Sequence
  Non-cyclic GFR-binding peptide
  MOD_RES (31), (32): Xaa is C or S
EVVMEYHYKLVVKDYEDKYLMSIPSLETPVXXAKPI

SEQ ID NO: 5155 - protein, 39 aa, Artificial Sequence
  Non-cyclic GFR-binding peptide
  MOD_RES (2), (37), (38): Xaa is C or S
  MOD_RES (15), (16), (17), (18), (19): Xaa is A or G
  MOD_RES (20), (21), (22), (23): Xaa is A or G or is absent
GXEAVSMGERHKRLXXXXXXXXXYYLVSTASLKTPVXXA

SEQ ID NO: 5156 - protein, 42 aa, Artificial Sequence
  Non-cyclic GFR-binding peptide
  MOD_RES (1), (3), (36), (37): Xaa is C or S
  MOD_RES (14), (15), (16), (17), (18): Xaa is A or G
  MOD_RES (19), (20), (21), (22): Xaa is A or G or is absent
XKXSKVVMRYKKLXXXXXXXXXFYLISIANLDQPVXXPSASA

SEQ ID NO: 5157 - protein, 43 aa, Artificial Sequence
  Non-cyclic GFR-binding peptide
  MOD_RES (2), (4), (37), (38): Xaa is C or S
  MOD_RES (15), (16), (17), (18), (19): Xaa is A or G
  MOD_RES (20), (21), (22), (23): Xaa is A or G or is absent
SXKXSKVVMRYKKLXXXXXXXXXFYLISIANLDQPVXXPSASA

SEQ ID NO: 5158 - protein, 33 aa, Artificial Sequence
  Non-cyclic GFR-binding peptide
  MOD_RES (1), (3): Xaa is C or S
XKXSKVVMRYKKLVKPTRGVFYLISIANLDQPV

SEQ ID NO: 5159 - protein, 40 aa, Artificial Sequence
  Non-cyclic GFR-binding peptide
  MOD_RES (1), (35): Xaa is C or S
  MOD_RES (13), (14), (15), (16), (17): Xaa is A or G
  MOD_RES (18), (19), (20), (21): Xaa is A or G or is absent
XSRVVMNQYNKLXXXXXXXXXLYLVSIASLKTPAXTPKTV

SEQ ID NO: 5160 - protein, 41 aa, Artificial Sequence
  Non-cyclic GFR-binding peptide
  MOD_RES (2), (4), (36), (37): Xaa is C or S
HXGXARVVMNYHYKLIVNSSDDKYLVSIPSLQTPAXXPKPV

SEQ ID NO: 5161 - protein, 35 aa, Artificial Sequence
  Non-cyclic GFR-binding peptide
  MOD_RES (2), (2): Xaa is C or S
  MOD_RES (14), (15), (16), (17), (18): Xaa is A or G
  MOD_RES (19), (20), (21), (22): Xaa is A or G or is absent
GXGEVVMDRHKRLXXXXXXXXXYYLMSTASLETPV

SEQ ID NO: 5162 - protein, 39 aa, Artificial Sequence
  Non-cyclic GFR-binding peptide
  MOD_RES (1), (36), (37): Xaa is C or S
  MOD_RES (14), (15), (16), (17), (18): Xaa is A or G
  MOD_RES (19), (20), (21), (22): Xaa is A or G or is absent
XEAVSMGERHKRLXXXXXXXXXYYLVSTASLKTPVXXAK

SEQ ID NO: 5163 - protein, 39 aa, Artificial Sequence
  Non-cyclic GFR-binding peptide
  MOD_RES (1), (3), (35): Xaa is C or S
XGXSRVVMNQYNKLIVNSSDDLYLVSIASLKTPAXTPKT

SEQ ID NO: 5164 - protein, 41 aa, Artificial Sequence
  Non-cyclic GFR-binding peptide
  MOD_RES (2), (4), (38), (39): Xaa is C or S
  MOD_RES (16), (17), (18), (19), (20): Xaa is A or G
  MOD_RES (21), (22), (23), (24): Xaa is A or G or is absent
RXGXGEVVMDYHYKLXXXXXXXXXKYLMSIPSLETPVXXAK

SEQ ID NO: 5165 - protein, 35 aa, Artificial Sequence
  Non-cyclic GFR-binding peptide
  MOD_RES (1), (35): Xaa is C or S
  MOD_RES (13), (14), (15), (16), (17): Xaa is A or G
  MOD_RES (18), (19), (20), (21): Xaa is A or G or is absent
XAKVVMNYHYKLXXXXXXXXXKYLVSIPSLKTPAX

SEQ ID NO: 5166 - protein, 33 aa, Artificial Sequence
  Non-cyclic GFR-binding peptide
  MOD_RES (2), (2): Xaa is C or S
GXSRVVMNQYNKLIVNSSDDLYLVSIASLKTPA

SEQ ID NO: 5167 - protein, 39 aa, Artificial Sequence
  Non-cyclic GFR-binding peptide
  MOD_RES (2), (4), (37), (38): Xaa is C or S
  MOD_RES (15), (16), (17), (18), (19): Xaa is A or G
  MOD_RES (20), (21), (22), (23): Xaa is A or G or is absent
SXKXSRVIMYHYKLXXXXXXXXXKYLISIPSLAQPVXXP

SEQ ID NO: 5168 - protein, 36 aa, Artificial Sequence
  Non-cyclic GFR-binding peptide
  MOD_RES (1), (3), (35), (36): Xaa is C or S
XGXARVVMNRHKRLIVNSSDDYYLVSTASLQTPAXX

SEQ ID NO: 5169 - protein, 36 aa, Artificial Sequence
  Non-cyclic GFR-binding peptide
  MOD_RES (33), (34): Xaa is C or S
  MOD_RES (11), (12), (13), (14), (15): Xaa is A or G
  MOD_RES (16), (17), (18), (19): Xaa is A or G or is absent
SKVVMRYKKLXXXXXXXXXFYLISIANLDQPVXXPS

SEQ ID NO: 5170 - protein, 37 aa, Artificial Sequence
  Non-cyclic GFR-binding peptide
  MOD_RES (1), (34), (35): Xaa is C or S
  MOD_RES (12), (13), (14), (15), (16): Xaa is A or G
  MOD_RES (17), (18), (19), (20): Xaa is A or G or is absent
XSKVIMRYKKLXXXXXXXXXFYLISIANLDQSVXXPS

SEQ ID NO: 5171 - protein, 38 aa, Artificial Sequence
  Non-cyclic GFR-binding peptide
  MOD_RES (1), (33), (34): Xaa is C or S
XGEVVMDRHKRLVVKENEDYYLMSTASLETPVXXAKPI

SEQ ID NO: 5172 - protein, 40 aa, Artificial Sequence
  Non-cyclic GFR-binding peptide
  MOD_RES (37), (37): Xaa is C or S
ALHDELTYHYKLFIPKKRVIEKYLVSIPSLQVQTPRXQVN

SEQ ID NO: 5173 - protein, 37 aa, Artificial Sequence
  Non-cyclic GFR-binding peptide
  MOD_RES (1), (3), (35): Xaa is C or S
XGXSRVVMNRHKRLIVNSSDDYYLVSTASLKTPAXTP

SEQ ID NO: 5174 - protein, 42 aa, Artificial Sequence
  Non-cyclic GFR-binding peptide
  MOD_RES (1), (3), (37): Xaa is C or S
  MOD_RES (15), (16), (17), (18), (19): Xaa is A or G
  MOD_RES (20), (21), (22), (23): Xaa is A or G or is absent
XGXSRVVMNRHKRLXXXXXXXXXYYLVSTASLKTPAXTPKTV

SEQ ID NO: 5175 - protein, 33 aa, Artificial Sequence
  Non-cyclic GFR-binding peptide
  MOD_RES (2), (33): Xaa is C or S
KXSKVIMQYNKLIKPTKGILYLISIASLDQSVX

SEQ ID NO: 5176 - protein, 40 aa, Artificial Sequence
  Non-cyclic GFR-binding peptide
  MOD_RES (1), (35), (36): Xaa is C or S
  MOD_RES (13), (14), (15), (16), (17): Xaa is A or G
  MOD_RES (18), (19), (20), (21): Xaa is A or G or is absent
XARVVMNQYNKLXXXXXXXXXLYLVSIASLQTPAXXPKPV

SEQ ID NO: 5177 - protein, 35 aa, Artificial Sequence
  Non-cyclic GFR-binding peptide
  MOD_RES (1), (3), (35): Xaa is C or S
XGXGEVVMERYKKLVVKDYEDFYLMSIANLETPVX

SEQ ID NO: 5178 - protein, 39 aa, Artificial Sequence
  Non-cyclic GFR-binding peptide
  MOD_RES (34), (35): Xaa is C or S
  MOD_RES (12), (13), (14), (15), (16): Xaa is A or G
  MOD_RES (17), (18), (19), (20): Xaa is A or G or is absent
AKVVMNRYKKLXXXXXXXXXFYLVSIANLKTPAXXAKPV

SEQ ID NO: 5179 - protein, 40 aa, Artificial Sequence
  Non-cyclic GFR-binding peptide
  MOD_RES (2), (36), (37): Xaa is C or S
  MOD_RES (14), (15), (16), (17), (18): Xaa is A or G
  MOD_RES (19), (20), (21), (22): Xaa is A or G or is absent
GXSRVVMNYHYKLXXXXXXXXXKYLVSIPSLKTPAXXPKP

SEQ ID NO: 5180 - protein, 37 aa, Artificial Sequence
  Non-cyclic GFR-binding peptide
  MOD_RES (1), (3), (36), (37): Xaa is C or S
  MOD_RES (14), (15), (16), (17), (18): Xaa is A or G
  MOD_RES (19), (20), (21), (22): Xaa is A or G or is absent
XKXSRVIMRYKKLXXXXXXXXXFYLISIANLAQPVXX

SEQ ID NO: 5181 - protein, 37 aa, Artificial Sequence
  Non-cyclic GFR-binding peptide
  MOD_RES (2), (34), (35): Xaa is C or S
GXGEVVMDRYKKLVVKENEDFYLMSIANLETPVXXAK

SEQ ID NO: 5182 - protein, 37 aa, Artificial Sequence
  Non-cyclic GFR-binding peptide
  MOD_RES (1), (35), (36): Xaa is C or S
  MOD_RES (13), (14), (15), (16), (17): Xaa is A or G
  MOD_RES (18), (19), (20), (21): Xaa is A or G or is absent
XSRVVMNRHKRLXXXXXXXXXYYLVSTASLKTPAXXP

SEQ ID NO: 5183 - protein, 33 aa, Artificial Sequence
  Non-cyclic GFR-binding peptide
  MOD_RES (12), (13), (14), (15), (16): Xaa is A or G
  MOD_RES (17), (18), (19), (20): Xaa is A or G or is absent
SRVVMNQYNKLXXXXXXXXXLYLVSIASLKTPA

SEQ ID NO: 5184 - protein, 35 aa, Artificial Sequence
  Non-cyclic GFR-binding peptide
  MOD_RES (1), (32), (33): Xaa is C or S
XSRVIMRYKKLVKPKRGVFYLISIANLAQPVXXPA

SEQ ID NO: 5185 - protein, 43 aa, Artificial Sequence
  Non-cyclic GFR-binding peptide
  MOD_RES (2), (4), (39), (40): Xaa is C or S
  MOD_RES (17), (18), (19), (20), (21): Xaa is A or G
  MOD_RES (22), (23), (24), (25): Xaa is A or G or is absent
RXGXEAVSMGERHKRLXXXXXXXXXYYLVSTASLKTPVXXAKG

SEQ ID NO: 5186 - protein, 43 aa, Artificial Sequence
  Non-cyclic GFR-binding peptide
  MOD_RES (1), (3), (37), (38): Xaa is C or S
  MOD_RES (15), (16), (17), (18), (19): Xaa is A or G
  MOD_RES (20), (21), (22), (23): Xaa is A or G or is absent
XGXSRVVMNQYNKLXXXXXXXXXLYLVSIASLKTPAXXPKPVY

SEQ ID NO: 5187 - protein, 35 aa, Artificial Sequence
  Non-cyclic GFR-binding peptide
  MOD_RES (2), (33), (34): Xaa is C or S
KXSKVVMRYKKLVKPTRGVFYLISIANLDQPVXXP

SEQ ID NO: 5188 - protein, 36 aa, Artificial Sequence
  Non-cyclic GFR-binding peptide
  MOD_RES (1), (33), (34): Xaa is C or S
XAKVVMNQYNKLIVNNSSDLYLVSIASLKTPAXXAK

SEQ ID NO: 5189 - protein, 33 aa, Artificial Sequence
  Non-cyclic GFR-binding peptide
  MOD_RES (12), (13), (14), (15), (16): Xaa is A or G
  MOD_RES (17), (18), (19), (20): Xaa is A or G or is absent
LHDELTRYKKLXXXXXXXXXFYLVSIANLQVQT

SEQ ID NO: 5190 - protein, 34 aa, Artificial Sequence
  Non-cyclic GFR-binding peptide
HDELTYHYKLFIPKKRVIEKYLVSIPSLQVQTPR

SEQ ID NO: 5191 - protein, 38 aa, Artificial Sequence
  Non-cyclic GFR-binding peptide
  MOD_RES (1), (3), (37), (38): Xaa is C or S
  MOD_RES (15), (16), (17), (18), (19): Xaa is A or G
  MOD_RES (20), (21), (22), (23): Xaa is A or G or is absent
XGXAKVVMNYHYKLXXXXXXXXXKYLVSIPSLKTPAXX

SEQ ID NO: 5192 - protein, 41 aa, Artificial Sequence
  Non-cyclic GFR-binding peptide
  MOD_RES (2), (4), (35), (36): Xaa is C or S
SXKXSKVVMRHKRLVKPTRGVYYLISTASLDQPVXXPSASA

SEQ ID NO: 5193 - protein, 31 aa, Artificial Sequence
  Non-cyclic GFR-binding peptide
GEVVMERYKKLVVKDYEDFYLMSIANLETPV

SEQ ID NO: 5194 - protein, 39 aa, Artificial Sequence
  Non-cyclic GFR-binding peptide
  MOD_RES (2), (36), (37): Xaa is C or S
  MOD_RES (14), (15), (16), (17), (18): Xaa is A or G
  MOD_RES (19), (20), (21), (22): Xaa is A or G or is absent
GXSRVVMNYHYKLXXXXXXXXXKYLVSIPSLKTPAXXPK

SEQ ID NO: 5195 - protein, 39 aa, Artificial Sequence
  Non-cyclic GFR-binding peptide
  MOD_RES (2), (4), (38), (39): Xaa is C or S
  MOD_RES (16), (17), (18), (19), (20): Xaa is A or G
  MOD_RES (21), (22), (23), (24): Xaa is A or G or is absent
HXGXAKVVMNQYNKLXXXXXXXXXLYLVSIASLKTPAXX

SEQ ID NO: 5196 - protein, 34 aa, Artificial Sequence
  Non-cyclic GFR-binding peptide
  MOD_RES (12), (13), (14), (15), (16): Xaa is A or G
  MOD_RES (17), (18), (19), (20): Xaa is A or G or is absent
LHDELTQYNKLXXXXXXXXXLYLVSIASLQVQTP

SEQ ID NO: 5197 - protein, 37 aa, Artificial Sequence
  Non-cyclic GFR-binding peptide
  MOD_RES (2), (4): Xaa is C or S
  MOD_RES (16), (17), (18), (19), (20): Xaa is A or G
  MOD_RES (21), (22), (23), (24): Xaa is A or G or is absent
HXGXARVVMNQYNKLXXXXXXXXXLYLVSIASLQTPA

SEQ ID NO: 5198 - protein, 41 aa, Artificial Sequence
  Non-cyclic GFR-binding peptide
  MOD_RES (2), (4), (37), (38): Xaa is C or S
  MOD_RES (15), (16), (17), (18), (19): Xaa is A or G
  MOD_RES (20), (21), (22), (23): Xaa is A or G or is absent
SXKXSRVIMYHYKLXXXXXXXXXKYLISIPSLAQPVXXPAA

SEQ ID NO: 5199 - protein, 38 aa, Artificial Sequence
  Non-cyclic GFR-binding peptide
  MOD_RES (2), (4), (35), (36): Xaa is C or S
SXKXSRVIMYHYKLVKPKRGVKYLISIPSLAQPVXXPA

SEQ ID NO: 5200 - protein, 37 aa, Artificial Sequence
  Non-cyclic GFR-binding peptide
  MOD_RES (32), (33): Xaa is C or S
SRVVMNRHKRLIVNSSDDYYLVSTASLKTPAXXPKPV

SEQ ID NO: 5201 - protein, 39 aa, Artificial Sequence
  Non-cyclic GFR-binding peptide
  MOD_RES (2), (34), (35): Xaa is C or S
GXGEVVMDRYKKLVVKENEDFYLMSIANLETPVXXAKPI

SEQ ID NO: 5202 - protein, 36 aa, Artificial Sequence
  Non-cyclic GFR-binding peptide
  MOD_RES (2), (4): Xaa is C or S
  MOD_RES (15), (16), (17), (18), (19): Xaa is A or G
  MOD_RES (20), (21), (22), (23): Xaa is A or G or is absent
SXKXSRVIMYHYKLXXXXXXXXXKYLISIPSLAQPV

SEQ ID NO: 5203 - protein, 36 aa, Artificial Sequence
  Non-cyclic GFR-binding peptide
  MOD_RES (33), (34): Xaa is C or S
  MOD_RES (11), (12), (13), (14), (15): Xaa is A or G
  MOD_RES (16), (17), (18), (19): Xaa is A or G or is absent
RVVMNQYNKLXXXXXXXXXLYLVSIASLKTPAXXPK

SEQ ID NO: 5204 - protein, 37 aa, Artificial Sequence
  Non-cyclic GFR-binding peptide
  MOD_RES (1), (33), (34): Xaa is C or S
XSRVVMNYHYKLIVNSSDDKYLVSIPSLKTPAXXPKP

SEQ ID NO: 5205 - protein, 36 aa, Artificial Sequence
  Non-cyclic GFR-binding peptide
  MOD_RES (1), (3), (35), (36): Xaa is C or S
XGXGEVVMDYHYKLVVKENEDKYLMSIPSLETPVXX

SEQ ID NO: 5206 - protein, 33 aa, Artificial Sequence
  Non-cyclic GFR-binding peptide
  MOD_RES (33), (33): Xaa is C or S
EAVSMGERHKRLTPVGMDDYYLVSTASLKTPVX

SEQ ID NO: 5207 - protein, 35 aa, Artificial Sequence
  Non-cyclic GFR-binding peptide
  MOD_RES (31), (32): Xaa is C or S
SKVVMRYKKLVKPTRGVFYLISIANLDQPVXXPSA

SEQ ID NO: 5208 - protein, 36 aa, Artificial Sequence
  Non-cyclic GFR-binding peptide
  MOD_RES (2), (4), (36): Xaa is C or S
HXGXARVVMNRHKRLIVNSSDDYYLVSTASLQTPAX

SEQ ID NO: 5209 - protein, 38 aa, Artificial Sequence
  Non-cyclic GFR-binding peptide
  MOD_RES (1), (35), (36): Xaa is C or S
  MOD_RES (13), (14), (15), (16), (17): Xaa is A or G
  MOD_RES (18), (19), (20), (21): Xaa is A or G or is absent
XGEVVMERYKKLXXXXXXXXXFYLMSIANLETPVXXAK

SEQ ID NO: 5210 - protein, 38 aa, Artificial Sequence
  Non-cyclic GFR-binding peptide
  MOD_RES (35), (35): Xaa is C or S
HDELTQYNKLFIPKKRVIELYLVSIASLQVQTPRXQVN

SEQ ID NO: 5211 - protein, 37 aa, Artificial Sequence
  Non-cyclic GFR-binding peptide
  MOD_RES (2), (4): Xaa is C or S
  MOD_RES (16), (17), (18), (19), (20): Xaa is A or G
  MOD_RES (21), (22), (23), (24): Xaa is A or G or is absent
RXGXGEVVMERHKRLXXXXXXXXXYYLMSTASLETPV

SEQ ID NO: 5212 - protein, 38 aa, Artificial Sequence
  Non-cyclic GFR-binding peptide
  MOD_RES (2), (33), (34): Xaa is C or S
KXSKVIMQYNKLIKPTKGILYLISIASLDQSVXXPSAS

SEQ ID NO: 5213 - protein, 39 aa, Artificial Sequence
  Non-cyclic GFR-binding peptide
  MOD_RES (35), (35): Xaa is C or S
  MOD_RES (11), (12), (13), (14), (15): Xaa is A or G
  MOD_RES (16), (17), (18), (19): Xaa is A or G or is absent
HDELTRYKKLXXXXXXXXXFYLVSIANLQVQTPRXQVNR

SEQ ID NO: 5214 - protein, 31 aa, Artificial Sequence
  Non-cyclic GFR-binding peptide
  MOD_RES (31), (31): Xaa is C or S
EVVMDYHYKLVVKENEDKYLMSIPSLETPVX

SEQ ID NO: 5215 - protein, 35 aa, Artificial Sequence
  Non-cyclic GFR-binding peptide
  MOD_RES (34), (35): Xaa is C or S
  MOD_RES (12), (13), (14), (15), (16): Xaa is A or G
  MOD_RES (17), (18), (19), (20): Xaa is A or G or is absent
ARVVMNYHYKLXXXXXXXXXKYLVSIPSLQTPAXX

SEQ ID NO: 5216 - protein, 34 aa, Artificial Sequence
  Non-cyclic GFR-binding peptide
  MOD_RES (1), (33), (34): Xaa is C or S
XGEVVMEYHYKLVVKDYEDKYLMSIPSLETPVXX

SEQ ID NO: 5217 - protein, 39 aa, Artificial Sequence
  Non-cyclic GFR-binding peptide
  MOD_RES (33), (34): Xaa is C or S
  MOD_RES (11), (12), (13), (14), (15): Xaa is A or G
  MOD_RES (16), (17), (18), (19): Xaa is A or G or is absent
SRVIMYHYKLXXXXXXXXXKYLISIPSLAQPVXXPAASA

SEQ ID NO: 5218 - protein, 43 aa, Artificial Sequence
  Non-cyclic GFR-binding peptide
  MOD_RES (2), (4), (37), (38): Xaa is C or S
RXGXEAVSMGERHKRLTPVGMDDYYLVSTASLKTPVXXAKGVK

SEQ ID NO: 5219 - protein, 41 aa, Artificial Sequence
  Non-cyclic GFR-binding peptide
  MOD_RES (1), (3), (35), (36): Xaa is C or S
XGXAKVVMNRYKKLIVNNSSDFYLVSIANLKTPAXXAKPVA

SEQ ID NO: 5220 - protein, 37 aa, Artificial Sequence
  Non-cyclic GFR-binding peptide
  MOD_RES (1), (34), (35): Xaa is C or S
  MOD_RES (12), (13), (14), (15), (16): Xaa is A or G
  MOD_RES (17), (18), (19), (20): Xaa is A or G or is absent
XSKVIMRHKRLXXXXXXXXXYYLISTASLDQSVXXPS

SEQ ID NO: 5221 - protein, 39 aa, Artificial Sequence
  Non-cyclic GFR-binding peptide
  MOD_RES (2), (4), (35), (36): Xaa is C or S
SXKXSKVIMRYKKLIKPTKGIFYLISIANLDQSVXXPSA

SEQ ID NO: 5222 - protein, 42 aa, Artificial Sequence
  Non-cyclic GFR-binding peptide
  MOD_RES (2), (4), (38), (39): Xaa is C or S
  MOD_RES (16), (17), (18), (19), (20): Xaa is A or G
  MOD_RES (21), (22), (23), (24): Xaa is A or G or is absent
HXGXARVVMNYHYKLXXXXXXXXXKYLVSIPSLQTPAXXPKP

SEQ ID NO: 5223 - protein, 33 aa, Artificial Sequence
  Non-cyclic GFR-binding peptide
  MOD_RES (2), (2): Xaa is C or S
GXSRVVMNYHYKLIVNSSDDKYLVSIPSLKTPA

SEQ ID NO: 5224 - protein, 37 aa, Artificial Sequence
  Non-cyclic GFR-binding peptide
  MOD_RES (32), (33): Xaa is C or S
AKVVMNQYNKLIVNNSSDLYLVSIASLKTPAXXAKPV

SEQ ID NO: 5225 - protein, 37 aa, Artificial Sequence
  Non-cyclic GFR-binding peptide
  MOD_RES (2), (4), (37): Xaa is C or S
  MOD_RES (15), (16), (17), (18), (19): Xaa is A or G
  MOD_RES (20), (21), (22), (23): Xaa is A or G or is absent
SXKXSRVIMQYNKLXXXXXXXXXLYLISIASLAQPVX

SEQ ID NO: 5226 - protein, 36 aa, Artificial Sequence
  Non-cyclic GFR-binding peptide
  MOD_RES (33), (33): Xaa is C or S
  MOD_RES (11), (12), (13), (14), (15): Xaa is A or G
  MOD_RES (16), (17), (18), (19): Xaa is A or G or is absent
RVVMNRHKRLXXXXXXXXXYYLVSTASLKTPAXTPK

SEQ ID NO: 5227 - protein, 36 aa, Artificial Sequence
  Non-cyclic GFR-binding peptide
  MOD_RES (31), (32): Xaa is C or S
EVVMDRHKRLVVKENEDYYLMSTASLETPVXXAKPI

SEQ ID NO: 5228 - protein, 37 aa, Artificial Sequence
  Non-cyclic GFR-binding peptide
  MOD_RES (1), (34), (35): Xaa is C or S
  MOD_RES (12), (13), (14), (15), (16): Xaa is A or G
  MOD_RES (17), (18), (19), (20): Xaa is A or G or is absent
XSKVIMQYNKLXXXXXXXXXLYLISIASLDQSVXXPS

SEQ ID NO: 5229 - protein, 35 aa, Artificial Sequence
  Non-cyclic GFR-binding peptide
  MOD_RES (33), (34): Xaa is C or S
  MOD_RES (11), (12), (13), (14), (15): Xaa is A or G
  MOD_RES (16), (17), (18), (19): Xaa is A or G or is absent
RVVMNRHKRLXXXXXXXXXYYLVSTASLKTPAXXP

SEQ ID NO: 5230 - protein, 42 aa, Artificial Sequence
  Non-cyclic GFR-binding peptide
  MOD_RES (2), (4), (37), (38): Xaa is C or S
  MOD_RES (15), (16), (17), (18), (19): Xaa is A or G
  MOD_RES (20), (21), (22), (23): Xaa is A or G or is absent
SXKXSKVIMQYNKLXXXXXXXXXLYLISIASLDQSVXXPSAS

SEQ ID NO: 5231 - protein, 42 aa, Artificial Sequence
  Non-cyclic GFR-binding peptide
  MOD_RES (2), (4), (36), (37): Xaa is C or S
HXGXARVVMNRHKRLIVNSSDDYYLVSTASLQTPAXXPKPVT

SEQ ID NO: 5232 - protein, 32 aa, Artificial Sequence
  Non-cyclic GFR-binding peptide
  MOD_RES (11), (12), (13), (14), (15): Xaa is A or G
  MOD_RES (16), (17), (18), (19): Xaa is A or G or is absent
SKVIMRYKKLXXXXXXXXXFYLISIANLDQSV

SEQ ID NO: 5233 - protein, 43 aa, Artificial Sequence
  Non-cyclic GFR-binding peptide
  MOD_RES (2), (37), (38): Xaa is C or S
  MOD_RES (15), (16), (17), (18), (19): Xaa is A or G
  MOD_RES (20), (21), (22), (23): Xaa is A or G or is absent
GXEAVSMGERHKRLXXXXXXXXXYYLVSTASLKTPVXXAKGVK

SEQ ID NO: 5234 - protein, 35 aa, Artificial Sequence
  Non-cyclic GFR-binding peptide
  MOD_RES (31), (32): Xaa is C or S
RVVMNRHKRLIVNSSDDYYLVSTASLQTPAXXPKP

SEQ ID NO: 5235 - protein, 37 aa, Artificial Sequence
  Non-cyclic GFR-binding peptide
  MOD_RES (1), (3), (35), (36): Xaa is C or S
XGXGEVVMEYHYKLVVKDYEDKYLMSIPSLETPVXXA

SEQ ID NO: 5236 - protein, 40 aa, Artificial Sequence
  Non-cyclic GFR-binding peptide
  MOD_RES (1), (3), (37), (38): Xaa is C or S
  MOD_RES (15), (16), (17), (18), (19): Xaa is A or G
  MOD_RES (20), (21), (22), (23): Xaa is A or G or is absent
XGXGEVVMERHKRLXXXXXXXXXYYLMSTASLETPVXXAK

SEQ ID NO: 5237 - protein, 38 aa, Artificial Sequence
  Non-cyclic GFR-binding peptide
  MOD_RES (2), (35), (36): Xaa is C or S
  MOD_RES (13), (14), (15), (16), (17): Xaa is A or G
  MOD_RES (18), (19), (20), (21): Xaa is A or G or is absent
KXSKVVMRHKRLXXXXXXXXXYYLISTASLDQPVXXPS

SEQ ID NO: 5238 - protein, 38 aa, Artificial Sequence
  Non-cyclic GFR-binding peptide
  MOD_RES (2), (4), (37), (38): Xaa is C or S
  MOD_RES (15), (16), (17), (18), (19): Xaa is A or G
  MOD_RES (20), (21), (22), (23): Xaa is A or G or is absent
SXKXSRVIMRYKKLXXXXXXXXXFYLISIANLAQPVXX

SEQ ID NO: 5239 - protein, 34 aa, Artificial Sequence
  Non-cyclic GFR-binding peptide
  MOD_RES (31), (32): Xaa is C or S
SRVIMYHYKLVKPKRGVKYLISIPSLAQPVXXPA

SEQ ID NO: 5240 - protein, 34 aa, Artificial Sequence
  Non-cyclic GFR-binding peptide
  MOD_RES (34), (34): Xaa is C or S
  MOD_RES (12), (13), (14), (15), (16): Xaa is A or G
  MOD_RES (17), (18), (19), (20): Xaa is A or G or is absent
GEVVMEYHYKLXXXXXXXXXKYLMSIPSLETPVX

SEQ ID NO: 5241 - protein, 34 aa, Artificial Sequence
  Non-cyclic GFR-binding peptide
LHDELTRHKRLFIPKKRVIEYYLVSTASLQVQTP

SEQ ID NO: 5242 - protein, 37 aa, Artificial Sequence
  Non-cyclic GFR-binding peptide
  MOD_RES (1), (3): Xaa is C or S
  MOD_RES (16), (17), (18), (19), (20): Xaa is A or G
  MOD_RES (21), (22), (23), (24): Xaa is A or G or is absent
XGXEAVSMGERYKKLXXXXXXXXXFYLVSIANLKTPV

SEQ ID NO: 5243 - protein, 38 aa, Artificial Sequence
  Non-cyclic GFR-binding peptide
  MOD_RES (1), (35), (36): Xaa is C or S
  MOD_RES (13), (14), (15), (16), (17): Xaa is A or G
  MOD_RES (18), (19), (20), (21): Xaa is A or G or is absent
XAKVVMNRYKKLXXXXXXXXXFYLVSIANLKTPAXXAK

SEQ ID NO: 5244 - protein, 42 aa, Artificial Sequence
  Non-cyclic GFR-binding peptide
  MOD_RES (1), (3), (37), (38): Xaa is C or S
  MOD_RES (15), (16), (17), (18), (19): Xaa is A or G
  MOD_RES (20), (21), (22), (23): Xaa is A or G or is absent
XGXSRVVMNYHYKLXXXXXXXXXKYLVSIPSLKTPAXXPKPV

SEQ ID NO: 5245 - protein, 38 aa, Artificial Sequence
  Non-cyclic GFR-binding peptide
  MOD_RES (33), (34): Xaa is C or S
  MOD_RES (11), (12), (13), (14), (15): Xaa is A or G
  MOD_RES (16), (17), (18), (19): Xaa is A or G or is absent
SKVIMQYNKLXXXXXXXXXLYLISIASLDQSVXXPSAS

SEQ ID NO: 5246 - protein, 34 aa, Artificial Sequence
  Non-cyclic GFR-binding peptide
  MOD_RES (33), (34): Xaa is C or S
  MOD_RES (11), (12), (13), (14), (15): Xaa is A or G
  MOD_RES (16), (17), (18), (19): Xaa is A or G or is absent
SRVIMQYNKLXXXXXXXXXLYLISIASLAQPVXX

SEQ ID NO: 5247 - protein, 38 aa, Artificial Sequence
  Non-cyclic GFR-binding peptide
  MOD_RES (1), (34), (35): Xaa is C or S
  MOD_RES (12), (13), (14), (15), (16): Xaa is A or G
  MOD_RES (17), (18), (19), (20): Xaa is A or G or is absent
XSRVIMRHKRLXXXXXXXXXYYLISTASLAQPVXXPAA

SEQ ID NO: 5248 - protein, 39 aa, Artificial Sequence
  Non-cyclic GFR-binding peptide
  MOD_RES (1), (35), (36): Xaa is C or S
  MOD_RES (13), (14), (15), (16), (17): Xaa is A or G
  MOD_RES (18), (19), (20), (21): Xaa is A or G or is absent
XARVVMNQYNKLXXXXXXXXXLYLVSIASLQTPAXXPKP

SEQ ID NO: 5249 - protein, 38 aa, Artificial Sequence
  Non-cyclic GFR-binding peptide
  MOD_RES (1), (34), (35): Xaa is C or S
  MOD_RES (12), (13), (14), (15), (16): Xaa is A or G
  MOD_RES (17), (18), (19), (20): Xaa is A or G or is absent
XSRVIMQYNKLXXXXXXXXXLYLISIASLAQPVXXPAA

SEQ ID NO: 5250 - protein, 40 aa, Artificial Sequence
  Non-cyclic GFR-binding peptide
  MOD_RES (34), (34): Xaa is C or S
  MOD_RES (12), (13), (14), (15), (16): Xaa is A or G
  MOD_RES (17), (18), (19), (20): Xaa is A or G or is absent
SRVVMNRHKRLXXXXXXXXXYYLVSTASLKTPAXTPKTVH

SEQ ID NO: 5251 - protein, 36 aa, Artificial Sequence
  Non-cyclic GFR-binding peptide
  MOD_RES (1), (32), (33): Xaa is C or S
XSKVVMYHYKLVKPTRGVKYLISIPSLDQPVXXPSA

SEQ ID NO: 5252 - protein, 34 aa, Artificial Sequence
  Non-cyclic GFR-binding peptide
  MOD_RES (1), (33), (34): Xaa is C or S
XGEVVMERYKKLVVKDYEDFYLMSIANLETPVXX

SEQ ID NO: 5253 - protein, 35 aa, Artificial Sequence
  Non-cyclic GFR-binding peptide
  MOD_RES (1), (1): Xaa is C or S
  MOD_RES (14), (15), (16), (17), (18): Xaa is A or G
  MOD_RES (19), (20), (21), (22): Xaa is A or G or is absent
XEAVSMGEQYNKLXXXXXXXXXLYLVSIASLKTPV

SEQ ID NO: 5254 - protein, 37 aa, Artificial Sequence
  Non-cyclic GFR-binding peptide
  MOD_RES (2), (33), (34): Xaa is C or S
KXSKVVMRYKKLVKPTRGVFYLISIANLDQPVXXPSA

SEQ ID NO: 5255 - protein, 38 aa, Artificial Sequence
  Non-cyclic GFR-binding peptide
  MOD_RES (1), (35), (36): Xaa is C or S
  MOD_RES (13), (14), (15), (16), (17): Xaa is A or G
  MOD_RES (18), (19), (20), (21): Xaa is A or G or is absent
XAKVVMNQYNKLXXXXXXXXXLYLVSIASLKTPAXXAK

SEQ ID NO: 5256 - protein, 36 aa, Artificial Sequence
  Non-cyclic GFR-binding peptide
  MOD_RES (2), (35), (36): Xaa is C or S
GXEAVSMGERYKKLTPVGMDDFYLVSIANLKTPVXX

SEQ ID NO: 5257 - protein, 34 aa, Artificial Sequence
  Non-cyclic GFR-binding peptide
  MOD_RES (2), (2): Xaa is C or S
  MOD_RES (13), (14), (15), (16), (17): Xaa is A or G
  MOD_RES (18), (19), (20), (21): Xaa is A or G or is absent
KXSRVIMRHKRLXXXXXXXXXYYLISTASLAQPV

SEQ ID NO: 5258 - protein, 41 aa, Artificial Sequence
  Non-cyclic GFR-binding peptide
  MOD_RES (2), (4), (37), (38): Xaa is C or S
RXGXEAVSMGERHKRLTPVGMDDYYLVSTASLKTPVXXAKG

SEQ ID NO: 5259 - protein, 43 aa, Artificial Sequence
  Non-cyclic GFR-binding peptide
  MOD_RES (2), (37), (38): Xaa is C or S
  MOD_RES (15), (16), (17), (18), (19): Xaa is A or G
  MOD_RES (20), (21), (22), (23): Xaa is A or G or is absent
GXEAVSMGEQYNKLXXXXXXXXXLYLVSIASLKTPVXXAKGVK

SEQ ID NO: 5260 - protein, 42 aa, Artificial Sequence
  Non-cyclic GFR-binding peptide
  MOD_RES (2), (4), (41): Xaa is C or S
EXKXALHDELTQYNKLFIPKKRVIELYLVSIASLQVQTPRXQ

SEQ ID NO: 5261 - protein, 35 aa, Artificial Sequence
  Non-cyclic GFR-binding peptide
  MOD_RES (2), (33), (34): Xaa is C or S
KXSKVVMYHYKLVKPTRGVKYLISIPSLDQPVXXP

SEQ ID NO: 5262 - protein, 36 aa, Artificial Sequence
  Non-cyclic GFR-binding peptide
  MOD_RES (2), (36): Xaa is C or S
  MOD_RES (14), (15), (16), (17), (18): Xaa is A or G
  MOD_RES (19), (20), (21), (22): Xaa is A or G or is absent
GXGEVVMEYHYKLXXXXXXXXXKYLMSIPSLETPVX

SEQ ID NO: 5263 - protein, 32 aa, Artificial Sequence
  Non-cyclic GFR-binding peptide
  MOD_RES (1), (32): Xaa is C or S
XSKVIMRYKKLIKPTKGIFYLISIANLDQSVX

SEQ ID NO: 5264 - protein, 36 aa, Artificial Sequence
  Non-cyclic GFR-binding peptide
  MOD_RES (2), (34), (35): Xaa is C or S
GXGEVVMDRHKRLVVKENEDYYLMSTASLETPVXXA

SEQ ID NO: 5265 - protein, 40 aa, Artificial Sequence
  Non-cyclic GFR-binding peptide
  MOD_RES (1), (3), (35): Xaa is C or S
XGXSRVVMNQYNKLIVNSSDDLYLVSIASLKTPAXTPKTV

SEQ ID NO: 5266 - protein, 36 aa, Artificial Sequence
  Non-cyclic GFR-binding peptide
  MOD_RES (34), (35): Xaa is C or S
  MOD_RES (12), (13), (14), (15), (16): Xaa is A or G
  MOD_RES (17), (18), (19), (20): Xaa is A or G or is absent
GEVVMERYKKLXXXXXXXXXFYLMSIANLETPVXXA

SEQ ID NO: 5267 - protein, 33 aa, Artificial Sequence
  Non-cyclic GFR-binding peptide
  MOD_RES (1), (1): Xaa is C or S
  MOD_RES (12), (13), (14), (15), (16): Xaa is A or G
  MOD_RES (17), (18), (19), (20): Xaa is A or G or is absent
XSKVVMRHKRLXXXXXXXXXYYLISTASLDQPV

SEQ ID NO: 5268 - protein, 37 aa, Artificial Sequence
  Non-cyclic GFR-binding peptide
  MOD_RES (33), (34): Xaa is C or S
EAVSMGERHKRLTPVGMDDYYLVSTASLKTPVXXAKG

SEQ ID NO: 5269 - protein, 40 aa, Artificial Sequence
  Non-cyclic GFR-binding peptide
  MOD_RES (2), (4): Xaa is C or S
EXKXALHDELTQYNKLFIPKKRVIELYLVSIASLQVQTPR

SEQ ID NO: 5270 - protein, 39 aa, Artificial Sequence
  Non-cyclic GFR-binding peptide
  MOD_RES (2), (4), (36), (37): Xaa is C or S
RXGXGEVVMDRHKRLVVKENEDYYLMSTASLETPVXXAK

SEQ ID NO: 5271 - protein, 39 aa, Artificial Sequence
  Non-cyclic GFR-binding peptide
  MOD_RES (1), (33), (34): Xaa is C or S
XSRVVMNRHKRLIVNSSDDYYLVSTASLKTPAXXPKPVY

SEQ ID NO: 5272 - protein, 38 aa, Artificial Sequence
  Non-cyclic GFR-binding peptide
  MOD_RES (2), (4): Xaa is C or S
EXKXALHDELTRHKRLFIPKKRVIEYYLVSTASLQVQT

SEQ ID NO: 5273 - protein, 34 aa, Artificial Sequence
  Non-cyclic GFR-binding peptide
  MOD_RES (33), (34): Xaa is C or S
  MOD_RES (11), (12), (13), (14), (15): Xaa is A or G
  MOD_RES (16), (17), (18), (19): Xaa is A or G or is absent
EVVMEYHYKLXXXXXXXXXKYLMSIPSLETPVXX

SEQ ID NO: 5274 - protein, 39 aa, Artificial Sequence
  Non-cyclic GFR-binding peptide
  MOD_RES (1), (3), (37), (38): Xaa is C or S
  MOD_RES (15), (16), (17), (18), (19): Xaa is A or G
  MOD_RES (20), (21), (22), (23): Xaa is A or G or is absent
XGXGEVVMDRHKRLXXXXXXXXXYYLMSTASLETPVXXA

SEQ ID NO: 5275 - protein, 32 aa, Artificial Sequence
  Non-cyclic GFR-binding peptide
  MOD_RES (1), (32): Xaa is C or S
XSKVVMQYNKLVKPTRGVLYLISIASLDQPVX

SEQ ID NO: 5276 - protein, 37 aa, Artificial Sequence
  Non-cyclic GFR-binding peptide
  MOD_RES (32), (33): Xaa is C or S
GEVVMDRHKRLVVKENEDYYLMSTASLETPVXXAKPI

SEQ ID NO: 5277 - protein, 38 aa, Artificial Sequence
  Non-cyclic GFR-binding peptide
  MOD_RES (2), (4), (38): Xaa is C or S
  MOD_RES (16), (17), (18), (19), (20): Xaa is A or G
  MOD_RES (21), (22), (23), (24): Xaa is A or G or is absent
HXGXSRVVMNQYNKLXXXXXXXXXLYLVSIASLKTPAX

SEQ ID NO: 5278 - protein, 39 aa, Artificial Sequence
  Non-cyclic GFR-binding peptide
  MOD_RES (1), (3), (36), (37): Xaa is C or S
XGXEAVSMGEQYNKLTPVGMDDLYLVSIASLKTPVXXAK

SEQ ID NO: 5279 - protein, 38 aa, Artificial Sequence
  Non-cyclic GFR-binding peptide
  MOD_RES (2), (4), (37), (38): Xaa is C or S
  MOD_RES (15), (16), (17), (18), (19): Xaa is A or G
  MOD_RES (20), (21), (22), (23): Xaa is A or G or is absent
SXKXSKVVMQYNKLXXXXXXXXXLYLISIASLDQPVXX

SEQ ID NO: 5280 - protein, 36 aa, Artificial Sequence
  Non-cyclic GFR-binding peptide
  MOD_RES (1), (35), (36): Xaa is C or S
  MOD_RES (13), (14), (15), (16), (17): Xaa is A or G
  MOD_RES (18), (19), (20), (21): Xaa is A or G or is absent
XSRVVMNQYNKLXXXXXXXXXLYLVSIASLKTPAXX

SEQ ID NO: 5281 - protein, 34 aa, Artificial Sequence
  Non-cyclic GFR-binding peptide
HDELTRHKRLFIPKKRVIEYYLVSTASLQVQTPR

SEQ ID NO: 5282 - protein, 34 aa, Artificial Sequence
  Non-cyclic GFR-binding peptide
  MOD_RES (1), (3): Xaa is C or S
XGXGEVVMERHKRLVVKDYEDYYLMSTASLETPV

SEQ ID NO: 5283 - protein, 40 aa, Artificial Sequence
  Non-cyclic GFR-binding peptide
  MOD_RES (1), (3), (37), (38): Xaa is C or S
  MOD_RES (15), (16), (17), (18), (19): Xaa is A or G
  MOD_RES (20), (21), (22), (23): Xaa is A or G or is absent
XGXARVVMNRHKRLXXXXXXXXXYYLVSTASLQTPAXXPK

SEQ ID NO: 5284 - protein, 38 aa, Artificial Sequence
  Non-cyclic GFR-binding peptide
  MOD_RES (1), (3), (36), (37): Xaa is C or S
  MOD_RES (14), (15), (16), (17), (18): Xaa is A or G
  MOD_RES (19), (20), (21), (22): Xaa is A or G or is absent
XKXSRVIMYHYKLXXXXXXXXXKYLISIPSLAQPVXXP

SEQ ID NO: 5285 - protein, 37 aa, Artificial Sequence
  Non-cyclic GFR-binding peptide
  MOD_RES (34), (34): Xaa is C or S
  MOD_RES (12), (13), (14), (15), (16): Xaa is A or G
  MOD_RES (17), (18), (19), (20): Xaa is A or G or is absent
SRVVMNYHYKLXXXXXXXXXKYLVSIPSLKTPAXTPK

SEQ ID NO: 5286 - protein, 31 aa, Artificial Sequence
  Non-cyclic GFR-binding peptide
  MOD_RES (1), (1): Xaa is C or S
XSKVIMQYNKLIKPTKGILYLISIASLDQSV

SEQ ID NO: 5287 - protein, 36 aa, Artificial Sequence
  Non-cyclic GFR-binding peptide
  MOD_RES (2), (34), (35): Xaa is C or S
GXAKVVMNQYNKLIVNNSSDLYLVSIASLKTPAXXA

SEQ ID NO: 5288 - protein, 39 aa, Artificial Sequence
  Non-cyclic GFR-binding peptide
  MOD_RES (1), (33), (34): Xaa is C or S
XGEVVMDRHKRLVVKENEDYYLMSTASLETPVXXAKPIK

SEQ ID NO: 5289 - protein, 34 aa, Artificial Sequence
  Non-cyclic GFR-binding peptide
  MOD_RES (2), (4): Xaa is C or S
SXKXSKVIMQYNKLIKPTKGILYLISIASLDQSV

SEQ ID NO: 5290 - protein, 30 aa, Artificial Sequence
  Non-cyclic GFR-binding peptide
SRVIMRYKKLVKPKRGVFYLISIANLAQPV

SEQ ID NO: 5291 - protein, 38 aa, Artificial Sequence
  Non-cyclic GFR-binding peptide
  MOD_RES (2), (33), (34): Xaa is C or S
KXSKVVMQYNKLVKPTRGVLYLISIASLDQPVXXPSAS

SEQ ID NO: 5292 - protein, 38 aa, Artificial Sequence
  Non-cyclic GFR-binding peptide
  MOD_RES (32), (33): Xaa is C or S
ARVVMNYHYKLIVNSSDDKYLVSIPSLQTPAXXPKPVT

SEQ ID NO: 5293 - protein, 38 aa, Artificial Sequence
  Non-cyclic GFR-binding peptide
  MOD_RES (1), (3), (34), (35): Xaa is C or S
XKXSKVIMQYNKLIKPTKGILYLISIASLDQSVXXPSA

SEQ ID NO: 5294 - protein, 31 aa, Artificial Sequence
  Non-cyclic GFR-binding peptide
SRVVMNYHYKLIVNSSDDKYLVSIPSLKTPA

SEQ ID NO: 5295 - protein, 41 aa, Artificial Sequence
  Non-cyclic GFR-binding peptide
  MOD_RES (1), (36), (37): Xaa is C or S
  MOD_RES (14), (15), (16), (17), (18): Xaa is A or G
  MOD_RES (19), (20), (21), (22): Xaa is A or G or is absent
XEAVSMGEQYNKLXXXXXXXXXLYLVSIASLKTPVXXAKGV

SEQ ID NO: 5296 - protein, 35 aa, Artificial Sequence
  Non-cyclic GFR-binding peptide
  MOD_RES (1), (32), (33): Xaa is C or S
XSRVIMQYNKLVKPKRGVLYLISIASLAQPVXXPA

SEQ ID NO: 5297 - protein, 39 aa, Artificial Sequence
  Non-cyclic GFR-binding peptide
  MOD_RES (34), (35): Xaa is C or S
  MOD_RES (12), (13), (14), (15), (16): Xaa is A or G
  MOD_RES (17), (18), (19), (20): Xaa is A or G or is absent
SRVVMNQYNKLXXXXXXXXXLYLVSIASLKTPAXXPKPV

SEQ ID NO: 5298 - protein, 37 aa, Artificial Sequence
  Non-cyclic GFR-binding peptide
  MOD_RES (1), (1): Xaa is C or S
  MOD_RES (14), (15), (16), (17), (18): Xaa is A or G
  MOD_RES (19), (20), (21), (22): Xaa is A or G or is absent
XALHDELTRYKKLXXXXXXXXXFYLVSIANLQVQTPR

SEQ ID NO: 5299 - protein, 40 aa, Artificial Sequence
  Non-cyclic GFR-binding peptide
  MOD_RES (2), (4), (36), (37): Xaa is C or S
RXGXGEVVMDYHYKLVVKENEDKYLMSIPSLETPVXXAKP

SEQ ID NO: 5300 - protein, 38 aa, Artificial Sequence
  Non-cyclic GFR-binding peptide
  MOD_RES (33), (34): Xaa is C or S
  MOD_RES (11), (12), (13), (14), (15): Xaa is A or G
  MOD_RES (16), (17), (18), (19): Xaa is A or G or is absent
EVVMDYHYKLXXXXXXXXXKYLMSIPSLETPVXXAKPI

SEQ ID NO: 5301 - protein, 40 aa, Artificial Sequence
  Non-cyclic GFR-binding peptide
  MOD_RES (1), (35): Xaa is C or S
  MOD_RES (13), (14), (15), (16), (17): Xaa is A or G
  MOD_RES (18), (19), (20), (21): Xaa is A or G or is absent
XSRVVMNYHYKLXXXXXXXXXKYLVSIPSLKTPAXTPKTV

SEQ ID NO: 5302 - protein, 36 aa, Artificial Sequence
  Non-cyclic GFR-binding peptide
  MOD_RES (2), (2): Xaa is C or S
KXALHDELTQYNKLFIPKKRVIELYLVSIASLQVQT

SEQ ID NO: 5303 - protein, 38 aa, Artificial Sequence
  Non-cyclic GFR-binding peptide
  MOD_RES (2), (4), (36), (37): Xaa is C or S
HXGXARVVMNYHYKLIVNSSDDKYLVSIPSLQTPAXXP

SEQ ID NO: 5304 - protein, 36 aa, Artificial Sequence
  Non-cyclic GFR-binding peptide
  MOD_RES (2), (2): Xaa is C or S
  MOD_RES (15), (16), (17), (18), (19): Xaa is A or G
  MOD_RES (20), (21), (22), (23): Xaa is A or G or is absent
GXEAVSMGERYKKLXXXXXXXXXFYLVSIANLKTPV

SEQ ID NO: 5305 - protein, 34 aa, Artificial Sequence
  Non-cyclic GFR-binding peptide
  MOD_RES (2), (34): Xaa is C or S
GXSRVVMNRHKRLIVNSSDDYYLVSTASLKTPAX

SEQ ID NO: 5306 - protein, 36 aa, Artificial Sequence
  Non-cyclic GFR-binding peptide
  MOD_RES (33), (34): Xaa is C or S
  MOD_RES (11), (12), (13), (14), (15): Xaa is A or G
  MOD_RES (16), (17), (18), (19): Xaa is A or G or is absent
RVVMNYHYKLXXXXXXXXXKYLVSIPSLKTPAXXPK

SEQ ID NO: 5307 - protein, 37 aa, Artificial Sequence
  Non-cyclic GFR-binding peptide
  MOD_RES (2), (35), (36): Xaa is C or S
  MOD_RES (13), (14), (15), (16), (17): Xaa is A or G
  MOD_RES (18), (19), (20), (21): Xaa is A or G or is absent
KXSKVIMQYNKLXXXXXXXXXLYLISIASLDQSVXXP

SEQ ID NO: 5308 - protein, 39 aa, Artificial Sequence
  Non-cyclic GFR-binding peptide
  MOD_RES (1), (33): Xaa is C or S
XSRVVMNYHYKLIVNSSDDKYLVSIPSLKTPAXTPKTVH

SEQ ID NO: 5309 - protein, 39 aa, Artificial Sequence
  Non-cyclic GFR-binding peptide
  MOD_RES (2), (4), (36), (37): Xaa is C or S
RXGXGEVVMEYHYKLVVKDYEDKYLMSIPSLETPVXXAK

SEQ ID NO: 5310 - protein, 45 aa, Artificial Sequence
  Non-cyclic GFR-binding peptide
  MOD_RES (2), (4), (41): Xaa is C or S
EXKXALHDELTYHYKLFIPKKRVIEKYLVSIPSLQVQTPRXQVNR

SEQ ID NO: 5311 - protein, 34 aa, Artificial Sequence
  Non-cyclic GFR-binding peptide
  MOD_RES (31), (32): Xaa is C or S
SRVIMQYNKLVKPKRGVLYLISIASLAQPVXXPA

SEQ ID NO: 5312 - protein, 41 aa, Artificial Sequence
  Non-cyclic GFR-binding peptide
  MOD_RES (1), (3), (36), (37): Xaa is C or S
  MOD_RES (14), (15), (16), (17), (18): Xaa is A or G
  MOD_RES (19), (20), (21), (22): Xaa is A or G or is absent
XKXSKVVMQYNKLXXXXXXXXXLYLISIASLDQPVXXPSAS

SEQ ID NO: 5313 - protein, 36 aa, Artificial Sequence
  Non-cyclic GFR-binding peptide
  MOD_RES (2), (33), (34): Xaa is C or S
KXSRVIMRYKKLVKPKRGVFYLISIANLAQPVXXPA

SEQ ID NO: 5314 - protein, 37 aa, Artificial Sequence
  Non-cyclic GFR-binding peptide
  MOD_RES (2), (4), (36), (37): Xaa is C or S
HXGXSRVVMNRHKRLIVNSSDDYYLVSTASLKTPAXX

SEQ ID NO: 5315 - protein, 36 aa, Artificial Sequence
  Non-cyclic GFR-binding peptide
  MOD_RES (1), (3), (35), (36): Xaa is C or S
XGXSRVVMNYHYKLIVNSSDDKYLVSIPSLKTPAXX

SEQ ID NO: 5316 - protein, 39 aa, Artificial Sequence
  Non-cyclic GFR-binding peptide
  MOD_RES (33), (34): Xaa is C or S
  MOD_RES (11), (12), (13), (14), (15): Xaa is A or G
  MOD_RES (16), (17), (18), (19): Xaa is A or G or is absent
SRVIMQYNKLXXXXXXXXXLYLISIASLAQPVXXPAASA

SEQ ID NO: 5317 - protein, 35 aa, Artificial Sequence
  Non-cyclic GFR-binding peptide
  MOD_RES (2), (33), (34): Xaa is C or S
KXSKVIMRYKKLIKPTKGIFYLISIANLDQSVXXP

SEQ ID NO: 5318 - protein, 39 aa, Artificial Sequence
  Non-cyclic GFR-binding peptide
  MOD_RES (2), (34), (35): Xaa is C or S
GXAKVVMNRYKKLIVNNSSDFYLVSIANLKTPAXXAKPV

SEQ ID NO: 5319 - protein, 36 aa, Artificial Sequence
  Non-cyclic GFR-binding peptide
  MOD_RES (36), (36): Xaa is C or S
  MOD_RES (12), (13), (14), (15), (16): Xaa is A or G
  MOD_RES (17), (18), (19), (20): Xaa is A or G or is absent
LHDELTRYKKLXXXXXXXXXFYLVSIANLQVQTPRX

SEQ ID NO: 5320 - protein, 34 aa, Artificial Sequence
  Non-cyclic GFR-binding peptide
  MOD_RES (34), (34): Xaa is C or S
  MOD_RES (12), (13), (14), (15), (16): Xaa is A or G
  MOD_RES (17), (18), (19), (20): Xaa is A or G or is absent
GEVVMDYHYKLXXXXXXXXXKYLMSIPSLETPVX

SEQ ID NO: 5321 - protein, 38 aa, Artificial Sequence
  Non-cyclic GFR-binding peptide
  MOD_RES (33), (34): Xaa is C or S
  MOD_RES (11), (12), (13), (14), (15): Xaa is A or G
  MOD_RES (16), (17), (18), (19): Xaa is A or G or is absent
SKVIMYHYKLXXXXXXXXXKYLISIPSLDQSVXXPSAS

SEQ ID NO: 5322 - protein, 37 aa, Artificial Sequence
  Non-cyclic GFR-binding peptide
  MOD_RES (32), (33): Xaa is C or S
AKVVMNRYKKLIVNNSSDFYLVSIANLKTPAXXAKPV

SEQ ID NO: 5323 - protein, 38 aa, Artificial Sequence
  Non-cyclic GFR-binding peptide
  MOD_RES (33), (34): Xaa is C or S
  MOD_RES (11), (12), (13), (14), (15): Xaa is A or G
  MOD_RES (16), (17), (18), (19): Xaa is A or G or is absent
SRVIMYHYKLXXXXXXXXXKYLISIPSLAQPVXXPAAS

SEQ ID NO: 5324 - protein, 36 aa, Artificial Sequence
  Non-cyclic GFR-binding peptide
  MOD_RES (2), (4): Xaa is C or S
  MOD_RES (15), (16), (17), (18), (19): Xaa is A or G
  MOD_RES (20), (21), (22), (23): Xaa is A or G or is absent
SXKXSKVIMRHKRLXXXXXXXXXYYLISTASLDQSV

SEQ ID NO: 5325 - protein, 39 aa, Artificial Sequence
  Non-cyclic GFR-binding peptide
  MOD_RES (2), (33), (34): Xaa is C or S
KXSKVIMYHYKLIKPTKGIKYLISIPSLDQSVXXPSASA

SEQ ID NO: 5326 - protein, 32 aa, Artificial Sequence
  Non-cyclic GFR-binding peptide
HDELTQYNKLFIPKKRVIELYLVSIASLQVQT

SEQ ID NO: 5327 - protein, 35 aa, Artificial Sequence
  Non-cyclic GFR-binding peptide
  MOD_RES (2), (34), (35): Xaa is C or S
GXARVVMNYHYKLIVNSSDDKYLVSIPSLQTPAXX

SEQ ID NO: 5328 - protein, 41 aa, Artificial Sequence
  Non-cyclic GFR-binding peptide
  MOD_RES (2), (4), (38), (39): Xaa is C or S
  MOD_RES (16), (17), (18), (19), (20): Xaa is A or G
  MOD_RES (21), (22), (23), (24): Xaa is A or G or is absent
RXGXGEVVMDRYKKLXXXXXXXXXFYLMSIANLETPVXXAK

SEQ ID NO: 5329 - protein, 37 aa, Artificial Sequence
  Non-cyclic GFR-binding peptide
  MOD_RES (31), (32): Xaa is C or S
KVVMNRYKKLIVNNSSDFYLVSIANLKTPAXXAKPVA

SEQ ID NO: 5330 - protein, 41 aa, Artificial Sequence
  Non-cyclic GFR-binding peptide
  MOD_RES (1), (3), (37), (38): Xaa is C or S
  MOD_RES (15), (16), (17), (18), (19): Xaa is A or G
  MOD_RES (20), (21), (22), (23): Xaa is A or G or is absent
XGXGEVVMERHKRLXXXXXXXXXYYLMSTASLETPVXXAKP

SEQ ID NO: 5331 - protein, 36 aa, Artificial Sequence
  Non-cyclic GFR-binding peptide
  MOD_RES (32), (32): Xaa is C or S
SRVVMNQYNKLIVNSSDDLYLVSIASLKTPAXTPKT

SEQ ID NO: 5332 - protein, 37 aa, Artificial Sequence
  Non-cyclic GFR-binding peptide
  MOD_RES (2), (4), (35), (36): Xaa is C or S
SXKXSKVIMRHKRLIKPTKGIYYLISTASLDQSVXXP

SEQ ID NO: 5333 - protein, 34 aa, Artificial Sequence
  Non-cyclic GFR-binding peptide
  MOD_RES (32), (33): Xaa is C or S
ARVVMNQYNKLIVNSSDDLYLVSIASLQTPAXXP

SEQ ID NO: 5334 - protein, 36 aa, Artificial Sequence
  Non-cyclic GFR-binding peptide
  MOD_RES (2), (35), (36): Xaa is C or S
  MOD_RES (13), (14), (15), (16), (17): Xaa is A or G
  MOD_RES (18), (19), (20), (21): Xaa is A or G or is absent
KXSKVIMYHYKLXXXXXXXXXKYLISIPSLDQSVXX

SEQ ID NO: 5335 - protein, 40 aa, Artificial Sequence
  Non-cyclic GFR-binding peptide
  MOD_RES (2), (4), (38), (39): Xaa is C or S
  MOD_RES (16), (17), (18), (19), (20): Xaa is A or G
  MOD_RES (21), (22), (23), (24): Xaa is A or G or is absent
RXGXGEVVMERYKKLXXXXXXXXXFYLMSIANLETPVXXA

SEQ ID NO: 5336 - protein, 40 aa, Artificial Sequence
  Non-cyclic GFR-binding peptide
  MOD_RES (1), (3), (37), (38): Xaa is C or S
  MOD_RES (15), (16), (17), (18), (19): Xaa is A or G
  MOD_RES (20), (21), (22), (23): Xaa is A or G or is absent
XGXSRVVMNQYNKLXXXXXXXXXLYLVSIASLKTPAXXPK

SEQ ID NO: 5337 - protein, 40 aa, Artificial Sequence
  Non-cyclic GFR-binding peptide
  MOD_RES (2), (34), (35): Xaa is C or S
GXAKVVMNYHYKLIVNNSSDKYLVSIPSLKTPAXXAKPVA

SEQ ID NO: 5338 - protein, 32 aa, Artificial Sequence
  Non-cyclic GFR-binding peptide
  MOD_RES (31), (32): Xaa is C or S
KVVMNRYKKLIVNNSSDFYLVSIANLKTPAXX

SEQ ID NO: 5339 - protein, 45 aa, Artificial Sequence
  Non-cyclic GFR-binding peptide
  MOD_RES (2), (4), (41): Xaa is C or S
  MOD_RES (17), (18), (19), (20), (21): Xaa is A or G
  MOD_RES (22), (23), (24), (25): Xaa is A or G or is absent
EXKXALHDELTYHYKLXXXXXXXXXKYLVSIPSLQVQTPRXQVNR

SEQ ID NO: 5340 - protein, 34 aa, Artificial Sequence
  Non-cyclic GFR-binding peptide
  MOD_RES (1), (1): Xaa is C or S
  MOD_RES (13), (14), (15), (16), (17): Xaa is A or G
  MOD_RES (18), (19), (20), (21): Xaa is A or G or is absent
XGEVVMDRYKKLXXXXXXXXXFYLMSIANLETPV

SEQ ID NO: 5341 - protein, 37 aa, Artificial Sequence
  Non-cyclic GFR-binding peptide
  MOD_RES (36), (36): Xaa is C or S
LHDELTYHYKLFIPKKRVIEKYLVSIPSLQVQTPRXQ

SEQ ID NO: 5342 - protein, 39 aa, Artificial Sequence
  Non-cyclic GFR-binding peptide
  MOD_RES (1), (34), (35): Xaa is C or S
  MOD_RES (12), (13), (14), (15), (16): Xaa is A or G
  MOD_RES (17), (18), (19), (20): Xaa is A or G or is absent
XSKVIMRHKRLXXXXXXXXXYYLISTASLDQSVXXPSAS

SEQ ID NO: 5343 - protein, 43 aa, Artificial Sequence
  Non-cyclic GFR-binding peptide
  MOD_RES (2), (4), (37), (38): Xaa is C or S
  MOD_RES (15), (16), (17), (18), (19): Xaa is A or G
  MOD_RES (20), (21), (22), (23): Xaa is A or G or is absent
SXKXSRVIMRYKKLXXXXXXXXXFYLISIANLAQPVXXPAASA

SEQ ID NO: 5344 - protein, 41 aa, Artificial Sequence
  Non-cyclic GFR-binding peptide
  MOD_RES (2), (4), (35), (36): Xaa is C or S
SXKXSRVIMRYKKLVKPKRGVFYLISIANLAQPVXXPAASA

SEQ ID NO: 5345 - protein, 35 aa, Artificial Sequence
  Non-cyclic GFR-binding peptide
  MOD_RES (31), (32): Xaa is C or S
SKVIMQYNKLIKPTKGILYLISIASLDQSVXXPSA

SEQ ID NO: 5346 - protein, 35 aa, Artificial Sequence
  Non-cyclic GFR-binding peptide
  MOD_RES (2), (34), (35): Xaa is C or S
GXGEVVMERYKKLVVKDYEDFYLMSIANLETPVXX

SEQ ID NO: 5347 - protein, 36 aa, Artificial Sequence
  Non-cyclic GFR-binding peptide
  MOD_RES (2), (4), (36): Xaa is C or S
HXGXAKVVMNRYKKLIVNNSSDFYLVSIANLKTPAX

SEQ ID NO: 5348 - protein, 42 aa, Artificial Sequence
  Non-cyclic GFR-binding peptide
  MOD_RES (2), (36): Xaa is C or S
  MOD_RES (14), (15), (16), (17), (18): Xaa is A or G
  MOD_RES (19), (20), (21), (22): Xaa is A or G or is absent
GXSRVVMNYHYKLXXXXXXXXXKYLVSIPSLKTPAXTPKTVH

SEQ ID NO: 5349 - protein, 39 aa, Artificial Sequence
  Non-cyclic GFR-binding peptide
  MOD_RES (1), (34), (35): Xaa is C or S
  MOD_RES (12), (13), (14), (15), (16): Xaa is A or G
  MOD_RES (17), (18), (19), (20): Xaa is A or G or is absent
XSKVIMQYNKLXXXXXXXXXLYLISIASLDQSVXXPSAS

SEQ ID NO: 5350 - protein, 38 aa, Artificial Sequence
  Non-cyclic GFR-binding peptide
  MOD_RES (1), (3): Xaa is C or S
  MOD_RES (16), (17), (18), (19), (20): Xaa is A or G
  MOD_RES (21), (22), (23), (24): Xaa is A or G or is absent
XKXALHDELTYHYKLXXXXXXXXXKYLVSIPSLQVQTP

SEQ ID NO: 5351 - protein, 38 aa, Artificial Sequence
  Non-cyclic GFR-binding peptide
  MOD_RES (1), (3), (35), (36): Xaa is C or S
XGXAKVVMNQYNKLIVNNSSDLYLVSIASLKTPAXXAK

SEQ ID NO: 5352 - protein, 35 aa, Artificial Sequence
  Non-cyclic GFR-binding peptide
  MOD_RES (1), (35): Xaa is C or S
  MOD_RES (13), (14), (15), (16), (17): Xaa is A or G
  MOD_RES (18), (19), (20), (21): Xaa is A or G or is absent
XAKVVMNQYNKLXXXXXXXXXLYLVSIASLKTPAX

SEQ ID NO: 5353 - protein, 37 aa, Artificial Sequence
  Non-cyclic GFR-binding peptide
  MOD_RES (2), (33), (34): Xaa is C or S
KXSKVIMRHKRLIKPTKGIYYLISTASLDQSVXXPSA

SEQ ID NO: 5354 - protein, 33 aa, Artificial Sequence
  Non-cyclic GFR-binding peptide
  MOD_RES (1), (32), (33): Xaa is C or S
XSKVIMRHKRLIKPTKGIYYLISTASLDQSVXX

SEQ ID NO: 5355 - protein, 33 aa, Artificial Sequence
  Non-cyclic GFR-binding peptide
  MOD_RES (1), (1): Xaa is C or S
  MOD_RES (12), (13), (14), (15), (16): Xaa is A or G
  MOD_RES (17), (18), (19), (20): Xaa is A or G or is absent
XSRVIMQYNKLXXXXXXXXXLYLISIASLAQPV

SEQ ID NO: 5356 - protein, 44 aa, Artificial Sequence
  Non-cyclic GFR-binding peptide
  MOD_RES (2), (4), (38), (39): Xaa is C or S
  MOD_RES (16), (17), (18), (19), (20): Xaa is A or G
  MOD_RES (21), (22), (23), (24): Xaa is A or G or is absent
RXGXGEVVMDYHYKLXXXXXXXXXKYLMSIPSLETPVXXAKPIK

SEQ ID NO: 5357 - protein, 38 aa, Artificial Sequence
  Non-cyclic GFR-binding peptide
  MOD_RES (2), (4), (38): Xaa is C or S
  MOD_RES (16), (17), (18), (19), (20): Xaa is A or G
  MOD_RES (21), (22), (23), (24): Xaa is A or G or is absent
HXGXSRVVMNRHKRLXXXXXXXXXYYLVSTASLKTPAX

SEQ ID NO: 5358 - protein, 34 aa, Artificial Sequence
  Non-cyclic GFR-binding peptide
  MOD_RES (2), (2): Xaa is C or S
  MOD_RES (13), (14), (15), (16), (17): Xaa is A or G
  MOD_RES (18), (19), (20), (21): Xaa is A or G or is absent
KXSKVVMYHYKLXXXXXXXXXKYLISIPSLDQPV

SEQ ID NO: 5359 - protein, 31 aa, Artificial Sequence
  Non-cyclic GFR-binding peptide
GEVVMDYHYKLVVKENEDKYLMSIPSLETPV

SEQ ID NO: 5360 - protein, 32 aa, Artificial Sequence
  Non-cyclic GFR-binding peptide
  MOD_RES (2), (2): Xaa is C or S
KXSKVVMQYNKLVKPTRGVLYLISIASLDQPV

SEQ ID NO: 5361 - protein, 39 aa, Artificial Sequence
  Non-cyclic GFR-binding peptide
  MOD_RES (2), (4), (37), (38): Xaa is C or S
  MOD_RES (15), (16), (17), (18), (19): Xaa is A or G
  MOD_RES (20), (21), (22), (23): Xaa is A or G or is absent
SXKXSKVIMRHKRLXXXXXXXXXYYLISTASLDQSVXXP

SEQ ID NO: 5362 - protein, 39 aa, Artificial Sequence
  Non-cyclic GFR-binding peptide
  MOD_RES (2), (4), (37), (38): Xaa is C or S
  MOD_RES (15), (16), (17), (18), (19): Xaa is A or G
  MOD_RES (20), (21), (22), (23): Xaa is A or G or is absent
SXKXSRVIMRYKKLXXXXXXXXXFYLISIANLAQPVXXP

SEQ ID NO: 5363 - protein, 33 aa, Artificial Sequence
  Non-cyclic GFR-binding peptide
  MOD_RES (1), (1): Xaa is C or S
  MOD_RES (12), (13), (14), (15), (16): Xaa is A or G
  MOD_RES (17), (18), (19), (20): Xaa is A or G or is absent
XSRVIMRHKRLXXXXXXXXXYYLISTASLAQPV

SEQ ID NO: 5364 - protein, 36 aa, Artificial Sequence
  Non-cyclic GFR-binding peptide
  MOD_RES (2), (33), (34): Xaa is C or S
KXSRVIMYHYKLVKPKRGVKYLISIPSLAQPVXXPA

SEQ ID NO: 5365 - protein, 38 aa, Artificial Sequence
  Non-cyclic GFR-binding peptide
  MOD_RES (2), (36): Xaa is C or S
  MOD_RES (14), (15), (16), (17), (18): Xaa is A or G
  MOD_RES (19), (20), (21), (22): Xaa is A or G or is absent
GXSRVVMNQYNKLXXXXXXXXXLYLVSIASLKTPAXTP

SEQ ID NO: 5366 - protein, 42 aa, Artificial Sequence
  Non-cyclic GFR-binding peptide
  MOD_RES (2), (4), (41): Xaa is C or S
EXKXALHDELTRYKKLFIPKKRVIEFYLVSIANLQVQTPRXQ

SEQ ID NO: 5367 - protein, 39 aa, Artificial Sequence
  Non-cyclic GFR-binding peptide
  MOD_RES (2), (4), (35), (36): Xaa is C or S
SXKXSKVVMRHKRLVKPTRGVYYLISTASLDQPVXXPSA

SEQ ID NO: 5368 - protein, 36 aa, Artificial Sequence
  Non-cyclic GFR-binding peptide
  MOD_RES (34), (35): Xaa is C or S
  MOD_RES (12), (13), (14), (15), (16): Xaa is A or G
  MOD_RES (17), (18), (19), (20): Xaa is A or G or is absent
ARVVMNYHYKLXXXXXXXXXKYLVSIPSLQTPAXXP

SEQ ID NO: 5369 - protein, 30 aa, Artificial Sequence
  Non-cyclic GFR-binding peptide
EVVMDYHYKLVVKENEDKYLMSIPSLETPV

SEQ ID NO: 5370 - protein, 39 aa, Artificial Sequence
  Non-cyclic GFR-binding peptide
  MOD_RES (2), (4): Xaa is C or S
  MOD_RES (17), (18), (19), (20), (21): Xaa is A or G
  MOD_RES (22), (23), (24), (25): Xaa is A or G or is absent
EXKXALHDELTQYNKLXXXXXXXXXLYLVSIASLQVQTP

SEQ ID NO: 5371 - protein, 38 aa, Artificial Sequence
  Non-cyclic GFR-binding peptide
  MOD_RES (32), (33): Xaa is C or S
GEVVMERYKKLVVKDYEDFYLMSIANLETPVXXAKPIS

SEQ ID NO: 5372 - protein, 40 aa, Artificial Sequence
  Non-cyclic GFR-binding peptide
  MOD_RES (2), (4), (35), (36): Xaa is C or S
SXKXSKVIMRYKKLIKPTKGIFYLISIANLDQSVXXPSAS

SEQ ID NO: 5373 - protein, 37 aa, Artificial Sequence
  Non-cyclic GFR-binding peptide
  MOD_RES (2), (34): Xaa is C or S
GXSRVVMNQYNKLIVNSSDDLYLVSIASLKTPAXTPK

SEQ ID NO: 5374 - protein, 41 aa, Artificial Sequence
  Non-cyclic GFR-binding peptide
  MOD_RES (2), (39): Xaa is C or S
KXALHDELTYHYKLFIPKKRVIEKYLVSIPSLQVQTPRXQV

SEQ ID NO: 5375 - protein, 36 aa, Artificial Sequence
  Non-cyclic GFR-binding peptide
  MOD_RES (1), (3), (36): Xaa is C or S
  MOD_RES (14), (15), (16), (17), (18): Xaa is A or G
  MOD_RES (19), (20), (21), (22): Xaa is A or G or is absent
XKXSKVVMRHKRLXXXXXXXXXYYLISTASLDQPVX

SEQ ID NO: 5376 - protein, 39 aa, Artificial Sequence
  Non-cyclic GFR-binding peptide
  MOD_RES (1), (38): Xaa is C or S
XALHDELTQYNKLFIPKKRVIELYLVSIASLQVQTPRXQ

SEQ ID NO: 5377 - protein, 33 aa, Artificial Sequence
  Non-cyclic GFR-binding peptide
  MOD_RES (31), (31): Xaa is C or S
RVVMNRHKRLIVNSSDDYYLVSTASLKTPAXTP

SEQ ID NO: 5378 - protein, 34 aa, Artificial Sequence
  Non-cyclic GFR-binding peptide
  MOD_RES (2), (34): Xaa is C or S
GXGEVVMDYHYKLVVKENEDKYLMSIPSLETPVX

SEQ ID NO: 5379 - protein, 39 aa, Artificial Sequence
  Non-cyclic GFR-binding peptide
  MOD_RES (2), (33), (34): Xaa is C or S
KXSKVIMRYKKLIKPTKGIFYLISIANLDQSVXXPSASA

SEQ ID NO: 5380 - protein, 38 aa, Artificial Sequence
  Non-cyclic GFR-binding peptide
  MOD_RES (2), (4): Xaa is C or S
  MOD_RES (17), (18), (19), (20), (21): Xaa is A or G
  MOD_RES (22), (23), (24), (25): Xaa is A or G or is absent
EXKXALHDELTRHKRLXXXXXXXXXYYLVSTASLQVQT

SEQ ID NO: 5381 - protein, 37 aa, Artificial Sequence
  Non-cyclic GFR-binding peptide
  MOD_RES (1), (3), (36), (37): Xaa is C or S
XGXEAVSMGERYKKLTPVGMDDFYLVSIANLKTPVXX

SEQ ID NO: 5382 - protein, 41 aa, Artificial Sequence
  Non-cyclic GFR-binding peptide
  MOD_RES (2), (4), (37), (38): Xaa is C or S
  MOD_RES (15), (16), (17), (18), (19): Xaa is A or G
  MOD_RES (20), (21), (22), (23): Xaa is A or G or is absent
SXKXSKVVMQYNKLXXXXXXXXXLYLISIASLDQPVXXPSA

SEQ ID NO: 5383 - protein, 34 aa, Artificial Sequence
  Non-cyclic GFR-binding peptide
  MOD_RES (1), (1): Xaa is C or S
  MOD_RES (13), (14), (15), (16), (17): Xaa is A or G
  MOD_RES (18), (19), (20), (21): Xaa is A or G or is absent
XGEVVMERHKRLXXXXXXXXXYYLMSTASLETPV

SEQ ID NO: 5384 - protein, 39 aa, Artificial Sequence
  Non-cyclic GFR-binding peptide
  MOD_RES (37), (37): Xaa is C or S
  MOD_RES (13), (14), (15), (16), (17): Xaa is A or G
  MOD_RES (18), (19), (20), (21): Xaa is A or G or is absent
ALHDELTRHKRLXXXXXXXXXYYLVSTASLQVQTPRXQV

SEQ ID NO: 5385 - protein, 40 aa, Artificial Sequence
  Non-cyclic GFR-binding peptide
  MOD_RES (1), (34), (35): Xaa is C or S
XEAVSMGERYKKLTPVGMDDFYLVSIANLKTPVXXAKGVK

SEQ ID NO: 5386 - protein, 40 aa, Artificial Sequence
  Non-cyclic GFR-binding peptide
  MOD_RES (1), (38): Xaa is C or S
XALHDELTRYKKLFIPKKRVIEFYLVSIANLQVQTPRXQV

SEQ ID NO: 5387 - protein, 37 aa, Artificial Sequence
  Non-cyclic GFR-binding peptide
  MOD_RES (1), (36), (37): Xaa is C or S
  MOD_RES (14), (15), (16), (17), (18): Xaa is A or G
  MOD_RES (19), (20), (21), (22): Xaa is A or G or is absent
XEAVSMGERYKKLXXXXXXXXXFYLVSIANLKTPVXX

SEQ ID NO: 5388 - protein, 32 aa, Artificial Sequence
  Non-cyclic GFR-binding peptide
  MOD_RES (32), (32): Xaa is C or S
AKVVMNRYKKLIVNNSSDFYLVSIANLKTPAX

SEQ ID NO: 5389 - protein, 39 aa, Artificial Sequence
  Non-cyclic GFR-binding peptide
  MOD_RES (33), (34): Xaa is C or S
  MOD_RES (11), (12), (13), (14), (15): Xaa is A or G
  MOD_RES (16), (17), (18), (19): Xaa is A or G or is absent
EVVMEYHYKLXXXXXXXXXKYLMSIPSLETPVXXAKPIS

SEQ ID NO: 5390 - protein, 38 aa, Artificial Sequence
  Non-cyclic GFR-binding peptide
  MOD_RES (37), (37): Xaa is C or S
ALHDELTYHYKLFIPKKRVIEKYLVSIPSLQVQTPRXQ

SEQ ID NO: 5391 - protein, 34 aa, Artificial Sequence
  Non-cyclic GFR-binding peptide
  MOD_RES (1), (3), (34): Xaa is C or S
XKXSRVIMRYKKLVKPKRGVFYLISIANLAQPVX

SEQ ID NO: 5392 - protein, 40 aa, Artificial Sequence
  Non-cyclic GFR-binding peptide
  MOD_RES (36), (36): Xaa is C or S
LHDELTRYKKLFIPKKRVIEFYLVSIANLQVQTPRXQVNR

SEQ ID NO: 5393 - protein, 40 aa, Artificial Sequence
  Non-cyclic GFR-binding peptide
  MOD_RES (2), (35), (36): Xaa is C or S
  MOD_RES (13), (14), (15), (16), (17): Xaa is A or G
  MOD_RES (18), (19), (20), (21): Xaa is A or G or is absent
KXSRVIMRYKKLXXXXXXXXXFYLISIANLAQPVXXPAAS

SEQ ID NO: 5394 - protein, 32 aa, Artificial Sequence
  Non-cyclic GFR-binding peptide
  MOD_RES (31), (31): Xaa is C or S
RVVMNRHKRLIVNSSDDYYLVSTASLKTPAXT

SEQ ID NO: 5395 - protein, 36 aa, Artificial Sequence
  Non-cyclic GFR-binding peptide
  MOD_RES (2), (4), (36): Xaa is C or S
HXGXAKVVMNYHYKLIVNNSSDKYLVSIPSLKTPAX

SEQ ID NO: 5396 - protein, 41 aa, Artificial Sequence
  Non-cyclic GFR-binding peptide
  MOD_RES (1), (3), (38), (39): Xaa is C or S
  MOD_RES (16), (17), (18), (19), (20): Xaa is A or G
  MOD_RES (21), (22), (23), (24): Xaa is A or G or is absent
XGXEAVSMGEQYNKLXXXXXXXXXLYLVSIASLKTPVXXAK

SEQ ID NO: 5397 - protein, 37 aa, Artificial Sequence
  Non-cyclic GFR-binding peptide
  MOD_RES (2), (34), (35): Xaa is C or S
GXGEVVMERHKRLVVKDYEDYYLMSTASLETPVXXAK

SEQ ID NO: 5398 - protein, 36 aa, Artificial Sequence
  Non-cyclic GFR-binding peptide
  MOD_RES (1), (32), (33): Xaa is C or S
XSKVVMRHKRLVKPTRGVYYLISTASLDQPVXXPSA

SEQ ID NO: 5399 - protein, 37 aa, Artificial Sequence
  Non-cyclic GFR-binding peptide
  MOD_RES (1), (35), (36): Xaa is C or S
  MOD_RES (13), (14), (15), (16), (17): Xaa is A or G
  MOD_RES (18), (19), (20), (21): Xaa is A or G or is absent
XGEVVMDYHYKLXXXXXXXXXKYLMSIPSLETPVXXA

SEQ ID NO: 5400 - protein, 36 aa, Artificial Sequence
  Non-cyclic GFR-binding peptide
  MOD_RES (2), (36): Xaa is C or S
  MOD_RES (14), (15), (16), (17), (18): Xaa is A or G
  MOD_RES (19), (20), (21), (22): Xaa is A or G or is absent
GXGEVVMDYHYKLXXXXXXXXXKYLMSIPSLETPVX

SEQ ID NO: 5401 - protein, 33 aa, Artificial Sequence
  Non-cyclic GFR-binding peptide
  MOD_RES (12), (13), (14), (15), (16): Xaa is A or G
  MOD_RES (17), (18), (19), (20): Xaa is A or G or is absent
GEVVMDYHYKLXXXXXXXXXKYLMSIPSLETPV

SEQ ID NO: 5402 - protein, 36 aa, Artificial Sequence
  Non-cyclic GFR-binding peptide
  MOD_RES (2), (4): Xaa is C or S
  MOD_RES (15), (16), (17), (18), (19): Xaa is A or G
  MOD_RES (20), (21), (22), (23): Xaa is A or G or is absent
SXKXSKVVMQYNKLXXXXXXXXXLYLISIASLDQPV

SEQ ID NO: 5403 - protein, 33 aa, Artificial Sequence
  Non-cyclic GFR-binding peptide
  MOD_RES (33), (33): Xaa is C or S
  MOD_RES (11), (12), (13), (14), (15): Xaa is A or G
  MOD_RES (16), (17), (18), (19): Xaa is A or G or is absent
SKVIMRYKKLXXXXXXXXXFYLISIANLDQSVX

SEQ ID NO: 5404 - protein, 42 aa, Artificial Sequence
  Non-cyclic GFR-binding peptide
  MOD_RES (2), (4), (37), (38): Xaa is C or S
RXGXEAVSMGERHKRLTPVGMDDYYLVSTASLKTPVXXAKGV

SEQ ID NO: 5405 - protein, 40 aa, Artificial Sequence
  Non-cyclic GFR-binding peptide
  MOD_RES (2), (39): Xaa is C or S
KXALHDELTQYNKLFIPKKRVIELYLVSIASLQVQTPRXQ

SEQ ID NO: 5406 - protein, 38 aa, Artificial Sequence
  Non-cyclic GFR-binding peptide
  MOD_RES (36), (36): Xaa is C or S
LHDELTRYKKLFIPKKRVIEFYLVSIANLQVQTPRXQV

SEQ ID NO: 5407 - protein, 41 aa, Artificial Sequence
  Non-cyclic GFR-binding peptide
  MOD_RES (2), (4), (38), (39): Xaa is C or S
  MOD_RES (16), (17), (18), (19), (20): Xaa is A or G
  MOD_RES (21), (22), (23), (24): Xaa is A or G or is absent
HXGXARVVMNQYNKLXXXXXXXXXLYLVSIASLQTPAXXPK

SEQ ID NO: 5408 - protein, 38 aa, Artificial Sequence
  Non-cyclic GFR-binding peptide
  MOD_RES (2), (34), (35): Xaa is C or S
GXGEVVMDRYKKLVVKENEDFYLMSIANLETPVXXAKP

SEQ ID NO: 5409 - protein, 38 aa, Artificial Sequence
  Non-cyclic GFR-binding peptide
  MOD_RES (1), (34), (35): Xaa is C or S
  MOD_RES (12), (13), (14), (15), (16): Xaa is A or G
  MOD_RES (17), (18), (19), (20): Xaa is A or G or is absent
XSKVVMYHYKLXXXXXXXXXKYLISIPSLDQPVXXPSA

SEQ ID NO: 5410 - protein, 34 aa, Artificial Sequence
  Non-cyclic GFR-binding peptide
  MOD_RES (31), (32): Xaa is C or S
KVVMNRYKKLIVNNSSDFYLVSIANLKTPAXXAK

SEQ ID NO: 5411 - protein, 41 aa, Artificial Sequence
  Non-cyclic GFR-binding peptide
  MOD_RES (1), (35), (36): Xaa is C or S
  MOD_RES (13), (14), (15), (16), (17): Xaa is A or G
  MOD_RES (18), (19), (20), (21): Xaa is A or G or is absent
XGEVVMDRYKKLXXXXXXXXXFYLMSIANLETPVXXAKPIK

SEQ ID NO: 5412 - protein, 40 aa, Artificial Sequence
  Non-cyclic GFR-binding peptide
  MOD_RES (1), (34), (35): Xaa is C or S
  MOD_RES (12), (13), (14), (15), (16): Xaa is A or G
  MOD_RES (17), (18), (19), (20): Xaa is A or G or is absent
XSKVVMRHKRLXXXXXXXXXYYLISTASLDQPVXXPSASA

SEQ ID NO: 5413 - protein, 38 aa, Artificial Sequence
  Non-cyclic GFR-binding peptide
  MOD_RES (32), (33): Xaa is C or S
AKVVMNYHYKLIVNNSSDKYLVSIPSLKTPAXXAKPVA

SEQ ID NO: 5414 - protein, 32 aa, Artificial Sequence
  Non-cyclic GFR-binding peptide
  MOD_RES (2), (2): Xaa is C or S
KXSKVIMYHYKLIKPTKGIKYLISIPSLDQSV

SEQ ID NO: 5415 - protein, 39 aa, Artificial Sequence
  Non-cyclic GFR-binding peptide
  MOD_RES (1), (34), (35): Xaa is C or S
XEAVSMGERYKKLTPVGMDDFYLVSIANLKTPVXXAKGV

SEQ ID NO: 5416 - protein, 35 aa, Artificial Sequence
  Non-cyclic GFR-binding peptide
  MOD_RES (2), (34), (35): Xaa is C or S
GXSRVVMNQYNKLIVNSSDDLYLVSIASLKTPAXX

SEQ ID NO: 5417 - protein, 34 aa, Artificial Sequence
  Non-cyclic GFR-binding peptide
  MOD_RES (1), (3): Xaa is C or S
XGXGEVVMDRHKRLVVKENEDYYLMSTASLETPV

SEQ ID NO: 5418 - protein, 30 aa, Artificial Sequence
  Non-cyclic GFR-binding peptide
SRVIMYHYKLVKPKRGVKYLISIPSLAQPV

SEQ ID NO: 5419 - protein, 37 aa, Artificial Sequence
  Non-cyclic GFR-binding peptide
  MOD_RES (1), (3), (35), (36): Xaa is C or S
XGXGEVVMDYHYKLVVKENEDKYLMSIPSLETPVXXA

SEQ ID NO: 5420 - protein, 36 aa, Artificial Sequence
  Non-cyclic GFR-binding peptide
  MOD_RES (1), (3), (36): Xaa is C or S
  MOD_RES (14), (15), (16), (17), (18): Xaa is A or G
  MOD_RES (19), (20), (21), (22): Xaa is A or G or is absent
XKXSKVVMQYNKLXXXXXXXXXLYLISIASLDQPVX

SEQ ID NO: 5421 - protein, 36 aa, Artificial Sequence
  Non-cyclic GFR-binding peptide
  MOD_RES (2), (36): Xaa is C or S
  MOD_RES (14), (15), (16), (17), (18): Xaa is A or G
  MOD_RES (19), (20), (21), (22): Xaa is A or G or is absent
GXARVVMNYHYKLXXXXXXXXXKYLVSIPSLQTPAX

SEQ ID NO: 5422 - protein, 40 aa, Artificial Sequence
  Non-cyclic GFR-binding peptide
  MOD_RES (1), (35), (36): Xaa is C or S
  MOD_RES (13), (14), (15), (16), (17): Xaa is A or G
  MOD_RES (18), (19), (20), (21): Xaa is A or G or is absent
XAKVVMNRYKKLXXXXXXXXXFYLVSIANLKTPAXXAKPV

SEQ ID NO: 5423 - protein, 32 aa, Artificial Sequence
  Non-cyclic GFR-binding peptide
  MOD_RES (11), (12), (13), (14), (15): Xaa is A or G
  MOD_RES (16), (17), (18), (19): Xaa is A or G or is absent
SRVIMRYKKLXXXXXXXXXFYLISIANLAQPV

SEQ ID NO: 5424 - protein, 36 aa, Artificial Sequence
  Non-cyclic GFR-binding peptide
  MOD_RES (31), (31): Xaa is C or S
RVVMNQYNKLIVNSSDDLYLVSIASLKTPAXTPKTV

SEQ ID NO: 5425 - protein, 39 aa, Artificial Sequence
  Non-cyclic GFR-binding peptide
  MOD_RES (37), (37): Xaa is C or S
  MOD_RES (13), (14), (15), (16), (17): Xaa is A or G
  MOD_RES (18), (19), (20), (21): Xaa is A or G or is absent
ALHDELTQYNKLXXXXXXXXXLYLVSIASLQVQTPRXQV

SEQ ID NO: 5426 - protein, 42 aa, Artificial Sequence
  Non-cyclic GFR-binding peptide
  MOD_RES (1), (3), (36), (37): Xaa is C or S
  MOD_RES (14), (15), (16), (17), (18): Xaa is A or G
  MOD_RES (19), (20), (21), (22): Xaa is A or G or is absent
XKXSKVIMRYKKLXXXXXXXXXFYLISIANLDQSVXXPSASA

SEQ ID NO: 5427 - protein, 40 aa, Artificial Sequence
  Non-cyclic GFR-binding peptide
  MOD_RES (1), (34), (35): Xaa is C or S
  MOD_RES (12), (13), (14), (15), (16): Xaa is A or G
  MOD_RES (17), (18), (19), (20): Xaa is A or G or is absent
XSKVVMQYNKLXXXXXXXXXLYLISIASLDQPVXXPSASA

SEQ ID NO: 5428 - protein, 40 aa, Artificial Sequence
  Non-cyclic GFR-binding peptide
  MOD_RES (36), (36): Xaa is C or S
LHDELTQYNKLFIPKKRVIELYLVSIASLQVQTPRXQVNR

SEQ ID NO: 5429 - protein, 37 aa, Artificial Sequence
  Non-cyclic GFR-binding peptide
  MOD_RES (1), (33), (34): Xaa is C or S
XGEVVMDYHYKLVVKENEDKYLMSIPSLETPVXXAKP

SEQ ID NO: 5430 - protein, 33 aa, Artificial Sequence
  Non-cyclic GFR-binding peptide
  MOD_RES (32), (33): Xaa is C or S
GEVVMEYHYKLVVKDYEDKYLMSIPSLETPVXX

SEQ ID NO: 5431 - protein, 39 aa, Artificial Sequence
  Non-cyclic GFR-binding peptide
  MOD_RES (1), (3), (35), (36): Xaa is C or S
XGXSRVVMNYHYKLIVNSSDDKYLVSIPSLKTPAXXPKP

SEQ ID NO: 5432 - protein, 40 aa, Artificial Sequence
  Non-cyclic GFR-binding peptide
  MOD_RES (2), (36): Xaa is C or S
  MOD_RES (14), (15), (16), (17), (18): Xaa is A or G
  MOD_RES (19), (20), (21), (22): Xaa is A or G or is absent
GXSRVVMNRHKRLXXXXXXXXXYYLVSTASLKTPAXTPKT

SEQ ID NO: 5433 - protein, 35 aa, Artificial Sequence
  Non-cyclic GFR-binding peptide
  MOD_RES (33), (34): Xaa is C or S
  MOD_RES (11), (12), (13), (14), (15): Xaa is A or G
  MOD_RES (16), (17), (18), (19): Xaa is A or G or is absent
SKVIMYHYKLXXXXXXXXXKYLISIPSLDQSVXXP

SEQ ID NO: 5434 - protein, 36 aa, Artificial Sequence
  Non-cyclic GFR-binding peptide
  MOD_RES (1), (33), (34): Xaa is C or S
XGEVVMDYHYKLVVKENEDKYLMSIPSLETPVXXAK

SEQ ID NO: 5435 - protein, 35 aa, Artificial Sequence
  Non-cyclic GFR-binding peptide
  MOD_RES (2), (4): Xaa is C or S
RXGXGEVVMERHKRLVVKDYEDYYLMSTASLETPV

SEQ ID NO: 5436 - protein, 36 aa, Artificial Sequence
  Non-cyclic GFR-binding peptide
  MOD_RES (2), (2): Xaa is C or S
  MOD_RES (15), (16), (17), (18), (19): Xaa is A or G
  MOD_RES (20), (21), (22), (23): Xaa is A or G or is absent
KXALHDELTQYNKLXXXXXXXXXLYLVSIASLQVQT

SEQ ID NO: 5437 - protein, 41 aa, Artificial Sequence
  Non-cyclic GFR-binding peptide
  MOD_RES (2), (36), (37): Xaa is C or S
  MOD_RES (14), (15), (16), (17), (18): Xaa is A or G
  MOD_RES (19), (20), (21), (22): Xaa is A or G or is absent
GXSRVVMNYHYKLXXXXXXXXXKYLVSIPSLKTPAXXPKPV

SEQ ID NO: 5438 - protein, 35 aa, Artificial Sequence
  Non-cyclic GFR-binding peptide
  MOD_RES (31), (32): Xaa is C or S
SKVIMRHKRLIKPTKGIYYLISTASLDQSVXXPSA

SEQ ID NO: 5439 - protein, 43 aa, Artificial Sequence
  Non-cyclic GFR-binding peptide
  MOD_RES (2), (4), (37), (38): Xaa is C or S
RXGXEAVSMGEQYNKLTPVGMDDLYLVSIASLKTPVXXAKGVK

SEQ ID NO: 5440 - protein, 39 aa, Artificial Sequence
  Non-cyclic GFR-binding peptide
  MOD_RES (1), (34), (35): Xaa is C or S
  MOD_RES (12), (13), (14), (15), (16): Xaa is A or G
  MOD_RES (17), (18), (19), (20): Xaa is A or G or is absent
XSKVVMYHYKLXXXXXXXXXKYLISIPSLDQPVXXPSAS

SEQ ID NO: 5441 - protein, 36 aa, Artificial Sequence
  Non-cyclic GFR-binding peptide
  MOD_RES (32), (33): Xaa is C or S
GEVVMERHKRLVVKDYEDYYLMSTASLETPVXXAKP

SEQ ID NO: 5442 - protein, 38 aa, Artificial Sequence
  Non-cyclic GFR-binding peptide
  MOD_RES (2), (4), (37), (38): Xaa is C or S
  MOD_RES (15), (16), (17), (18), (19): Xaa is A or G
  MOD_RES (20), (21), (22), (23): Xaa is A or G or is absent
SXKXSKVIMRHKRLXXXXXXXXXYYLISTASLDQSVXX

SEQ ID NO: 5443 - protein, 35 aa, Artificial Sequence
  Non-cyclic GFR-binding peptide
  MOD_RES (1), (35): Xaa is C or S
  MOD_RES (13), (14), (15), (16), (17): Xaa is A or G
  MOD_RES (18), (19), (20), (21): Xaa is A or G or is absent
XARVVMNRHKRLXXXXXXXXXYYLVSTASLQTPAX

SEQ ID NO: 5444 - protein, 36 aa, Artificial Sequence
  Non-cyclic GFR-binding peptide
  MOD_RES (2), (34), (35): Xaa is C or S
GXSRVVMNRHKRLIVNSSDDYYLVSTASLKTPAXXP

SEQ ID NO: 5445 - protein, 42 aa, Artificial Sequence
  Non-cyclic GFR-binding peptide
  MOD_RES (2), (36), (37): Xaa is C or S
  MOD_RES (14), (15), (16), (17), (18): Xaa is A or G
  MOD_RES (19), (20), (21), (22): Xaa is A or G or is absent
GXGEVVMDRHKRLXXXXXXXXXYYLMSTASLETPVXXAKPIK

SEQ ID NO: 5446 - protein, 37 aa, Artificial Sequence
  Non-cyclic GFR-binding peptide
  MOD_RES (34), (35): Xaa is C or S
  MOD_RES (12), (13), (14), (15), (16): Xaa is A or G
  MOD_RES (17), (18), (19), (20): Xaa is A or G or is absent
GEVVMERHKRLXXXXXXXXXYYLMSTASLETPVXXAK

SEQ ID NO: 5447 - protein, 35 aa, Artificial Sequence
  Non-cyclic GFR-binding peptide
  MOD_RES (34), (35): Xaa is C or S
  MOD_RES (12), (13), (14), (15), (16): Xaa is A or G
  MOD_RES (17), (18), (19), (20): Xaa is A or G or is absent
AKVVMNRYKKLXXXXXXXXXFYLVSIANLKTPAXX

SEQ ID NO: 5448 - protein, 40 aa, Artificial Sequence
  Non-cyclic GFR-binding peptide
  MOD_RES (1), (3), (36), (37): Xaa is C or S
  MOD_RES (14), (15), (16), (17), (18): Xaa is A or G
  MOD_RES (19), (20), (21), (22): Xaa is A or G or is absent
XKXSKVIMRYKKLXXXXXXXXXFYLISIANLDQSVXXPSA

SEQ ID NO: 5449 - protein, 39 aa, Artificial Sequence
  Non-cyclic GFR-binding peptide
  MOD_RES (2), (4): Xaa is C or S
EXKXALHDELTRHKRLFIPKKRVIEYYLVSTASLQVQTP

SEQ ID NO: 5450 - protein, 37 aa, Artificial Sequence
  Non-cyclic GFR-binding peptide
  MOD_RES (1), (35), (36): Xaa is C or S
  MOD_RES (13), (14), (15), (16), (17): Xaa is A or G
  MOD_RES (18), (19), (20), (21): Xaa is A or G or is absent
XSRVVMNQYNKLXXXXXXXXXLYLVSIASLKTPAXXP

SEQ ID NO: 5451 - protein, 36 aa, Artificial Sequence
  Non-cyclic GFR-binding peptide
  MOD_RES (2), (4), (35), (36): Xaa is C or S
SXKXSRVIMYHYKLVKPKRGVKYLISIPSLAQPVXX

SEQ ID NO: 5452 - protein, 39 aa, Artificial Sequence
  Non-cyclic GFR-binding peptide
  MOD_RES (1), (35), (36): Xaa is C or S
  MOD_RES (13), (14), (15), (16), (17): Xaa is A or G
  MOD_RES (18), (19), (20), (21): Xaa is A or G or is absent
XARVVMNYHYKLXXXXXXXXXKYLVSIPSLQTPAXXPKP

SEQ ID NO: 5453 - protein, 33 aa, Artificial Sequence
  Non-cyclic GFR-binding peptide
  MOD_RES (31), (32): Xaa is C or S
EVVMERHKRLVVKDYEDYYLMSTASLETPVXXA

SEQ ID NO: 5454 - protein, 41 aa, Artificial Sequence
  Non-cyclic GFR-binding peptide
  MOD_RES (1), (35), (36): Xaa is C or S
  MOD_RES (13), (14), (15), (16), (17): Xaa is A or G
  MOD_RES (18), (19), (20), (21): Xaa is A or G or is absent
XGEVVMERHKRLXXXXXXXXXYYLMSTASLETPVXXAKPIS

SEQ ID NO: 5455 - protein, 35 aa, Artificial Sequence
  Non-cyclic GFR-binding peptide
  MOD_RES (1), (34), (35): Xaa is C or S
  MOD_RES (12), (13), (14), (15), (16): Xaa is A or G
  MOD_RES (17), (18), (19), (20): Xaa is A or G or is absent
XSKVVMRHKRLXXXXXXXXXYYLISTASLDQPVXX

SEQ ID NO: 5456 - protein, 42 aa, Artificial Sequence
  Non-cyclic GFR-binding peptide
  MOD_RES (1), (38): Xaa is C or S
XALHDELTQYNKLFIPKKRVIELYLVSIASLQVQTPRXQVNR

SEQ ID NO: 5457 - protein, 42 aa, Artificial Sequence
  Non-cyclic GFR-binding peptide
  MOD_RES (2), (4), (37), (38): Xaa is C or S
  MOD_RES (15), (16), (17), (18), (19): Xaa is A or G
  MOD_RES (20), (21), (22), (23): Xaa is A or G or is absent
SXKXSKVVMRHKRLXXXXXXXXXYYLISTASLDQPVXXPSAS

SEQ ID NO: 5458 - protein, 36 aa, Artificial Sequence
  Non-cyclic GFR-binding peptide
  MOD_RES (32), (33): Xaa is C or S
AKVVMNYHYKLIVNNSSDKYLVSIPSLKTPAXXAKP

SEQ ID NO: 5459 - protein, 39 aa, Artificial Sequence
  Non-cyclic GFR-binding peptide
  MOD_RES (1), (3), (37): Xaa is C or S
  MOD_RES (15), (16), (17), (18), (19): Xaa is A or G
  MOD_RES (20), (21), (22), (23): Xaa is A or G or is absent
XGXSRVVMNYHYKLXXXXXXXXXKYLVSIPSLKTPAXTP

SEQ ID NO: 5460 - protein, 33 aa, Artificial Sequence
  Non-cyclic GFR-binding peptide
  MOD_RES (2), (2): Xaa is C or S
GXARVVMNYHYKLIVNSSDDKYLVSIPSLQTPA

SEQ ID NO: 5461 - protein, 32 aa, Artificial Sequence
  Non-cyclic GFR-binding peptide
  MOD_RES (1), (32): Xaa is C or S
XSKVIMQYNKLIKPTKGILYLISIASLDQSVX

SEQ ID NO: 5462 - protein, 40 aa, Artificial Sequence
  Non-cyclic GFR-binding peptide
  MOD_RES (2), (34), (35): Xaa is C or S
GXGEVVMERHKRLVVKDYEDYYLMSTASLETPVXXAKPIS

SEQ ID NO: 5463 - protein, 40 aa, Artificial Sequence
  Non-cyclic GFR-binding peptide
  MOD_RES (2), (34): Xaa is C or S
GXSRVVMNRHKRLIVNSSDDYYLVSTASLKTPAXTPKTVH

SEQ ID NO: 5464 - protein, 34 aa, Artificial Sequence
  Non-cyclic GFR-binding peptide
  MOD_RES (34), (34): Xaa is C or S
  MOD_RES (12), (13), (14), (15), (16): Xaa is A or G
  MOD_RES (17), (18), (19), (20): Xaa is A or G or is absent
SRVVMNQYNKLXXXXXXXXXLYLVSIASLKTPAX

SEQ ID NO: 5465 - protein, 43 aa, Artificial Sequence
  Non-cyclic GFR-binding peptide
  MOD_RES (1), (3), (37), (38): Xaa is C or S
  MOD_RES (15), (16), (17), (18), (19): Xaa is A or G
  MOD_RES (20), (21), (22), (23): Xaa is A or G or is absent
XGXGEVVMERHKRLXXXXXXXXXYYLMSTASLETPVXXAKPIS

SEQ ID NO: 5466 - protein, 40 aa, Artificial Sequence
  Non-cyclic GFR-binding peptide
  MOD_RES (2), (36), (37): Xaa is C or S
  MOD_RES (14), (15), (16), (17), (18): Xaa is A or G
  MOD_RES (19), (20), (21), (22): Xaa is A or G or is absent
GXAKVVMNQYNKLXXXXXXXXXLYLVSIASLKTPAXXAKP

SEQ ID NO: 5467 - protein, 36 aa, Artificial Sequence
  Non-cyclic GFR-binding peptide
  MOD_RES (32), (33): Xaa is C or S
SRVVMNQYNKLIVNSSDDLYLVSIASLKTPAXXPKP

SEQ ID NO: 5468 - protein, 34 aa, Artificial Sequence
  Non-cyclic GFR-binding peptide
  MOD_RES (34), (34): Xaa is C or S
  MOD_RES (12), (13), (14), (15), (16): Xaa is A or G
  MOD_RES (17), (18), (19), (20): Xaa is A or G or is absent
AKVVMNRYKKLXXXXXXXXXFYLVSIANLKTPAX

SEQ ID NO: 5469 - protein, 37 aa, Artificial Sequence
  Non-cyclic GFR-binding peptide
  MOD_RES (2), (4): Xaa is C or S
  MOD_RES (16), (17), (18), (19), (20): Xaa is A or G
  MOD_RES (21), (22), (23), (24): Xaa is A or G or is absent
RXGXGEVVMDYHYKLXXXXXXXXXKYLMSIPSLETPV

SEQ ID NO: 5470 - protein, 39 aa, Artificial Sequence
  Non-cyclic GFR-binding peptide
  MOD_RES (1), (3), (37), (38): Xaa is C or S
  MOD_RES (15), (16), (17), (18), (19): Xaa is A or G
  MOD_RES (20), (21), (22), (23): Xaa is A or G or is absent
XGXGEVVMERYKKLXXXXXXXXXFYLMSIANLETPVXXA

SEQ ID NO: 5471 - protein, 41 aa, Artificial Sequence
  Non-cyclic GFR-binding peptide
  MOD_RES (2), (4), (36), (37): Xaa is C or S
HXGXAKVVMNYHYKLIVNNSSDKYLVSIPSLKTPAXXAKPV

SEQ ID NO: 5472 - protein, 34 aa, Artificial Sequence
  Non-cyclic GFR-binding peptide
  MOD_RES (1), (1): Xaa is C or S
  MOD_RES (13), (14), (15), (16), (17): Xaa is A or G
  MOD_RES (18), (19), (20), (21): Xaa is A or G or is absent
XARVVMNRHKRLXXXXXXXXXYYLVSTASLQTPA

SEQ ID NO: 5473 - protein, 41 aa, Artificial Sequence
  Non-cyclic GFR-binding peptide
  MOD_RES (2), (4), (36), (37): Xaa is C or S
HXGXSRVVMNQYNKLIVNSSDDLYLVSIASLKTPAXXPKPV

SEQ ID NO: 5474 - protein, 32 aa, Artificial Sequence
  Non-cyclic GFR-binding peptide
  MOD_RES (2), (2): Xaa is C or S
KXSKVIMRYKKLIKPTKGIFYLISIANLDQSV

SEQ ID NO: 5475 - protein, 37 aa, Artificial Sequence
  Non-cyclic GFR-binding peptide
  MOD_RES (2), (4), (37): Xaa is C or S
  MOD_RES (15), (16), (17), (18), (19): Xaa is A or G
  MOD_RES (20), (21), (22), (23): Xaa is A or G or is absent
SXKXSKVVMRHKRLXXXXXXXXXYYLISTASLDQPVX

SEQ ID NO: 5476 - protein, 42 aa, Artificial Sequence
  Non-cyclic GFR-binding peptide
  MOD_RES (1), (3), (36), (37): Xaa is C or S
  MOD_RES (14), (15), (16), (17), (18): Xaa is A or G
  MOD_RES (19), (20), (21), (22): Xaa is A or G or is absent
XKXSRVIMRYKKLXXXXXXXXXFYLISIANLAQPVXXPAASA

SEQ ID NO: 5477 - protein, 38 aa, Artificial Sequence
  Non-cyclic GFR-binding peptide
  MOD_RES (36), (36): Xaa is C or S
LHDELTQYNKLFIPKKRVIELYLVSIASLQVQTPRXQV

SEQ ID NO: 5478 - protein, 41 aa, Artificial Sequence
  Non-cyclic GFR-binding peptide
  MOD_RES (1), (3), (37), (38): Xaa is C or S
  MOD_RES (15), (16), (17), (18), (19): Xaa is A or G
  MOD_RES (20), (21), (22), (23): Xaa is A or G or is absent
XGXAKVVMNQYNKLXXXXXXXXXLYLVSIASLKTPAXXAKP

SEQ ID NO: 5479 - protein, 37 aa, Artificial Sequence
  Non-cyclic GFR-binding peptide
  MOD_RES (2), (4), (36), (37): Xaa is C or S
HXGXARVVMNQYNKLIVNSSDDLYLVSIASLQTPAXX

SEQ ID NO: 5480 - protein, 39 aa, Artificial Sequence
  Non-cyclic GFR-binding peptide
  MOD_RES (35), (35): Xaa is C or S
HDELTRYKKLFIPKKRVIEFYLVSIANLQVQTPRXQVNR

SEQ ID NO: 5481 - protein, 38 aa, Artificial Sequence
  Non-cyclic GFR-binding peptide
  MOD_RES (33), (34): Xaa is C or S
  MOD_RES (11), (12), (13), (14), (15): Xaa is A or G
  MOD_RES (16), (17), (18), (19): Xaa is A or G or is absent
EVVMDRHKRLXXXXXXXXXYYLMSTASLETPVXXAKPI

SEQ ID NO: 5482 - protein, 44 aa, Artificial Sequence
  Non-cyclic GFR-binding peptide
  MOD_RES (1), (3), (38), (39): Xaa is C or S
  MOD_RES (16), (17), (18), (19), (20): Xaa is A or G
  MOD_RES (21), (22), (23), (24): Xaa is A or G or is absent
XGXEAVSMGEQYNKLXXXXXXXXXLYLVSIASLKTPVXXAKGVK

SEQ ID NO: 5483 - protein, 35 aa, Artificial Sequence
  Non-cyclic GFR-binding peptide
  MOD_RES (31), (32): Xaa is C or S
KVVMNYHYKLIVNNSSDKYLVSIPSLKTPAXXAKP

SEQ ID NO: 5484 - protein, 36 aa, Artificial Sequence
  Non-cyclic GFR-binding peptide
  MOD_RES (1), (33), (34): Xaa is C or S
XGEVVMDRYKKLVVKENEDFYLMSIANLETPVXXAK

SEQ ID NO: 5485 - protein, 43 aa, Artificial Sequence
  Non-cyclic GFR-binding peptide
  MOD_RES (2), (4), (38), (39): Xaa is C or S
  MOD_RES (16), (17), (18), (19), (20): Xaa is A or G
  MOD_RES (21), (22), (23), (24): Xaa is A or G or is absent
HXGXAKVVMNYHYKLXXXXXXXXXKYLVSIPSLKTPAXXAKPV

SEQ ID NO: 5486 - protein, 42 aa, Artificial Sequence
  Non-cyclic GFR-binding peptide
  MOD_RES (2), (39): Xaa is C or S
KXALHDELTYHYKLFIPKKRVIEKYLVSIPSLQVQTPRXQVN

SEQ ID NO: 5487 - protein, 37 aa, Artificial Sequence
  Non-cyclic GFR-binding peptide
  MOD_RES (1), (35), (36): Xaa is C or S
  MOD_RES (13), (14), (15), (16), (17): Xaa is A or G
  MOD_RES (18), (19), (20), (21): Xaa is A or G or is absent
XSRVVMNYHYKLXXXXXXXXXKYLVSIPSLKTPAXXP

SEQ ID NO: 5488 - protein, 39 aa, Artificial Sequence
  Non-cyclic GFR-binding peptide
  MOD_RES (1), (3), (35), (36): Xaa is C or S
XGXAKVVMNQYNKLIVNNSSDLYLVSIASLKTPAXXAKP

SEQ ID NO: 5489 - protein, 35 aa, Artificial Sequence
  Non-cyclic GFR-binding peptide
  MOD_RES (2), (33), (34): Xaa is C or S
KXSKVIMYHYKLIKPTKGIKYLISIPSLDQSVXXP

SEQ ID NO: 5490 - protein, 43 aa, Artificial Sequence
  Non-cyclic GFR-binding peptide
  MOD_RES (1), (3), (37), (38): Xaa is C or S
  MOD_RES (15), (16), (17), (18), (19): Xaa is A or G
  MOD_RES (20), (21), (22), (23): Xaa is A or G or is absent
XGXARVVMNQYNKLXXXXXXXXXLYLVSIASLQTPAXXPKPVT

SEQ ID NO: 5491 - protein, 43 aa, Artificial Sequence
  Non-cyclic GFR-binding peptide
  MOD_RES (2), (4), (38), (39): Xaa is C or S
  MOD_RES (16), (17), (18), (19), (20): Xaa is A or G
  MOD_RES (21), (22), (23), (24): Xaa is A or G or is absent
HXGXSRVVMNQYNKLXXXXXXXXXLYLVSIASLKTPAXXPKPV

SEQ ID NO: 5492 - protein, 35 aa, Artificial Sequence
  Non-cyclic GFR-binding peptide
  MOD_RES (31), (32): Xaa is C or S
KVVMNQYNKLIVNNSSDLYLVSIASLKTPAXXAKP

SEQ ID NO: 5493 - protein, 40 aa, Artificial Sequence
  Non-cyclic GFR-binding peptide
  MOD_RES (1), (38): Xaa is C or S
  MOD_RES (14), (15), (16), (17), (18): Xaa is A or G
  MOD_RES (19), (20), (21), (22): Xaa is A or G or is absent
XALHDELTRHKRLXXXXXXXXXYYLVSTASLQVQTPRXQV

SEQ ID NO: 5494 - protein, 38 aa, Artificial Sequence
  Non-cyclic GFR-binding peptide
  MOD_RES (1), (3), (35), (36): Xaa is C or S
XGXARVVMNYHYKLIVNSSDDKYLVSIPSLQTPAXXPK

SEQ ID NO: 5495 - protein, 40 aa, Artificial Sequence
  Non-cyclic GFR-binding peptide
  MOD_RES (2), (34), (35): Xaa is C or S
GXARVVMNRHKRLIVNSSDDYYLVSTASLQTPAXXPKPVT

SEQ ID NO: 5496 - protein, 33 aa, Artificial Sequence
  Non-cyclic GFR-binding peptide
  MOD_RES (1), (32), (33): Xaa is C or S
XSKVIMYHYKLIKPTKGIKYLISIPSLDQSVXX

SEQ ID NO: 5497 - protein, 31 aa, Artificial Sequence
  Non-cyclic GFR-binding peptide
  MOD_RES (31), (31): Xaa is C or S
RVVMNRHKRLIVNSSDDYYLVSTASLQTPAX

SEQ ID NO: 5498 - protein, 39 aa, Artificial Sequence
  Non-cyclic GFR-binding peptide
  MOD_RES (2), (4), (37), (38): Xaa is C or S
  MOD_RES (15), (16), (17), (18), (19): Xaa is A or G
  MOD_RES (20), (21), (22), (23): Xaa is A or G or is absent
SXKXSKVVMQYNKLXXXXXXXXXLYLISIASLDQPVXXP

SEQ ID NO: 5499 - protein, 36 aa, Artificial Sequence
  Non-cyclic GFR-binding peptide
  MOD_RES (2), (36): Xaa is C or S
  MOD_RES (14), (15), (16), (17), (18): Xaa is A or G
  MOD_RES (19), (20), (21), (22): Xaa is A or G or is absent
GXAKVVMNYHYKLXXXXXXXXXKYLVSIPSLKTPAX

SEQ ID NO: 5500 - protein, 35 aa, Artificial Sequence
  Non-cyclic GFR-binding peptide
  MOD_RES (33), (34): Xaa is C or S
  MOD_RES (11), (12), (13), (14), (15): Xaa is A or G
  MOD_RES (16), (17), (18), (19): Xaa is A or G or is absent
SKVIMQYNKLXXXXXXXXXLYLISIASLDQSVXXP

SEQ ID NO: 5501 - protein, 36 aa, Artificial Sequence
  Non-cyclic GFR-binding peptide
  MOD_RES (34), (34): Xaa is C or S
  MOD_RES (12), (13), (14), (15), (16): Xaa is A or G
  MOD_RES (17), (18), (19), (20): Xaa is A or G or is absent
SRVVMNQYNKLXXXXXXXXXLYLVSIASLKTPAXTP

SEQ ID NO: 5502 - protein, 39 aa, Artificial Sequence
  Non-cyclic GFR-binding peptide
  MOD_RES (33), (34): Xaa is C or S
  MOD_RES (11), (12), (13), (14), (15): Xaa is A or G
  MOD_RES (16), (17), (18), (19): Xaa is A or G or is absent
SKVIMRHKRLXXXXXXXXXYYLISTASLDQSVXXPSASA

SEQ ID NO: 5503 - protein, 36 aa, Artificial Sequence
  Non-cyclic GFR-binding peptide
  MOD_RES (1), (3), (35), (36): Xaa is C or S
XGXGEVVMEYHYKLVVKDYEDKYLMSIPSLETPVXX

SEQ ID NO: 5504 - protein, 36 aa, Artificial Sequence
  Non-cyclic GFR-binding peptide
  MOD_RES (31), (32): Xaa is C or S
EVVMDRYKKLVVKENEDFYLMSIANLETPVXXAKPI

SEQ ID NO: 5505 - protein, 34 aa, Artificial Sequence
  Non-cyclic GFR-binding peptide
  MOD_RES (2), (33), (34): Xaa is C or S
KXSKVVMQYNKLVKPTRGVLYLISIASLDQPVXX

SEQ ID NO: 5506 - protein, 38 aa, Artificial Sequence
  Non-cyclic GFR-binding peptide
  MOD_RES (1), (35), (36): Xaa is C or S
  MOD_RES (13), (14), (15), (16), (17): Xaa is A or G
  MOD_RES (18), (19), (20), (21): Xaa is A or G or is absent
XGEVVMEYHYKLXXXXXXXXXKYLMSIPSLETPVXXAK

SEQ ID NO: 5507 - protein, 40 aa, Artificial Sequence
  Non-cyclic GFR-binding peptide
  MOD_RES (2), (4), (36): Xaa is C or S
HXGXSRVVMNQYNKLIVNSSDDLYLVSIASLKTPAXTPKT

SEQ ID NO: 5508 - protein, 42 aa, Artificial Sequence
  Non-cyclic GFR-binding peptide
  MOD_RES (1), (3), (40): Xaa is C or S
XKXALHDELTRHKRLFIPKKRVIEYYLVSTASLQVQTPRXQV

SEQ ID NO: 5509 - protein, 37 aa, Artificial Sequence
  Non-cyclic GFR-binding peptide
  MOD_RES (31), (32): Xaa is C or S
KVVMNQYNKLIVNNSSDLYLVSIASLKTPAXXAKPVA

SEQ ID NO: 5510 - protein, 41 aa, Artificial Sequence
  Non-cyclic GFR-binding peptide
  MOD_RES (2), (35), (36): Xaa is C or S
  MOD_RES (13), (14), (15), (16), (17): Xaa is A or G
  MOD_RES (18), (19), (20), (21): Xaa is A or G or is absent
KXSRVIMRYKKLXXXXXXXXXFYLISIANLAQPVXXPAASA

SEQ ID NO: 5511 - protein, 37 aa, Artificial Sequence
  Non-cyclic GFR-binding peptide
  MOD_RES (33), (34): Xaa is C or S
  MOD_RES (11), (12), (13), (14), (15): Xaa is A or G
  MOD_RES (16), (17), (18), (19): Xaa is A or G or is absent
SRVIMRYKKLXXXXXXXXXFYLISIANLAQPVXXPAA

SEQ ID NO: 5512 - protein, 35 aa, Artificial Sequence
  Non-cyclic GFR-binding peptide
  MOD_RES (1), (34), (35): Xaa is C or S
  MOD_RES (12), (13), (14), (15), (16): Xaa is A or G
  MOD_RES (17), (18), (19), (20): Xaa is A or G or is absent
XSKVVMQYNKLXXXXXXXXXLYLISIASLDQPVXX

SEQ ID NO: 5513 - protein, 42 aa, Artificial Sequence
  Non-cyclic GFR-binding peptide
  MOD_RES (1), (3), (36), (37): Xaa is C or S
XGXEAVSMGERYKKLTPVGMDDFYLVSIANLKTPVXXAKGVK

SEQ ID NO: 5514 - protein, 40 aa, Artificial Sequence
  Non-cyclic GFR-binding peptide
  MOD_RES (1), (3), (40): Xaa is C or S
  MOD_RES (16), (17), (18), (19), (20): Xaa is A or G
  MOD_RES (21), (22), (23), (24): Xaa is A or G or is absent
XKXALHDELTRYKKLXXXXXXXXXFYLVSIANLQVQTPRX

SEQ ID NO: 5515 - protein, 40 aa, Artificial Sequence
  Non-cyclic GFR-binding peptide
  MOD_RES (2), (39): Xaa is C or S
KXALHDELTRHKRLFIPKKRVIEYYLVSTASLQVQTPRXQ

SEQ ID NO: 5516 - protein, 30 aa, Artificial Sequence
  Non-cyclic GFR-binding peptide
EVVMDRYKKLVVKENEDFYLMSIANLETPV

SEQ ID NO: 5517 - protein, 40 aa, Artificial Sequence
  Non-cyclic GFR-binding peptide
  MOD_RES (34), (35): Xaa is C or S
  MOD_RES (12), (13), (14), (15), (16): Xaa is A or G
  MOD_RES (17), (18), (19), (20): Xaa is A or G or is absent
SRVVMNYHYKLXXXXXXXXXKYLVSIPSLKTPAXXPKPVY

SEQ ID NO: 5518 - protein, 42 aa, Artificial Sequence
  Non-cyclic GFR-binding peptide
  MOD_RES (2), (4), (37), (38): Xaa is C or S
RXGXEAVSMGEQYNKLTPVGMDDLYLVSIASLKTPVXXAKGV

SEQ ID NO: 5519 - protein, 44 aa, Artificial Sequence
  Non-cyclic GFR-binding peptide
  MOD_RES (2), (4), (38), (39): Xaa is C or S
  MOD_RES (16), (17), (18), (19), (20): Xaa is A or G
  MOD_RES (21), (22), (23), (24): Xaa is A or G or is absent
HXGXAKVVMNRYKKLXXXXXXXXXFYLVSIANLKTPAXXAKPVA

SEQ ID NO: 5520 - protein, 35 aa, Artificial Sequence
  Non-cyclic GFR-binding peptide
  MOD_RES (33), (34): Xaa is C or S
  MOD_RES (11), (12), (13), (14), (15): Xaa is A or G
  MOD_RES (16), (17), (18), (19): Xaa is A or G or is absent
SRVIMYHYKLXXXXXXXXXKYLISIPSLAQPVXXP

SEQ ID NO: 5521 - protein, 39 aa, Artificial Sequence
  Non-cyclic GFR-binding peptide
  MOD_RES (34), (35): Xaa is C or S
  MOD_RES (12), (13), (14), (15), (16): Xaa is A or G
  MOD_RES (17), (18), (19), (20): Xaa is A or G or is absent
ARVVMNYHYKLXXXXXXXXXKYLVSIPSLQTPAXXPKPV

SEQ ID NO: 5522 - protein, 37 aa, Artificial Sequence
  Non-cyclic GFR-binding peptide
  MOD_RES (33), (34): Xaa is C or S
  MOD_RES (11), (12), (13), (14), (15): Xaa is A or G
  MOD_RES (16), (17), (18), (19): Xaa is A or G or is absent
KVVMNRYKKLXXXXXXXXXFYLVSIANLKTPAXXAKP

SEQ ID NO: 5523 - protein, 37 aa, Artificial Sequence
  Non-cyclic GFR-binding peptide
  MOD_RES (35), (36): Xaa is C or S
  MOD_RES (13), (14), (15), (16), (17): Xaa is A or G
  MOD_RES (18), (19), (20), (21): Xaa is A or G or is absent
EAVSMGERHKRLXXXXXXXXXYYLVSTASLKTPVXXA

SEQ ID NO: 5524 - protein, 38 aa, Artificial Sequence
  Non-cyclic GFR-binding peptide
  MOD_RES (1), (36), (37): Xaa is C or S
  MOD_RES (14), (15), (16), (17), (18): Xaa is A or G
  MOD_RES (19), (20), (21), (22): Xaa is A or G or is absent
XEAVSMGERYKKLXXXXXXXXXFYLVSIANLKTPVXXA

SEQ ID NO: 5525 - protein, 37 aa, Artificial Sequence
  Non-cyclic GFR-binding peptide
  MOD_RES (2), (34): Xaa is C or S
GXSRVVMNYHYKLIVNSSDDKYLVSIPSLKTPAXTPK

SEQ ID NO: 5526 - protein, 33 aa, Artificial Sequence
  Non-cyclic GFR-binding peptide
  MOD_RES (1), (3): Xaa is C or S
XKXSRVIMRYKKLVKPKRGVFYLISIANLAQPV

SEQ ID NO: 5527 - protein, 39 aa, Artificial Sequence
  Non-cyclic GFR-binding peptide
  MOD_RES (34), (35): Xaa is C or S
  MOD_RES (12), (13), (14), (15), (16): Xaa is A or G
  MOD_RES (17), (18), (19), (20): Xaa is A or G or is absent
GEVVMDRHKRLXXXXXXXXXYYLMSTASLETPVXXAKPI

SEQ ID NO: 5528 - protein, 39 aa, Artificial Sequence
  Non-cyclic GFR-binding peptide
  MOD_RES (33), (34): Xaa is C or S
  MOD_RES (11), (12), (13), (14), (15): Xaa is A or G
  MOD_RES (16), (17), (18), (19): Xaa is A or G or is absent
EVVMDRYKKLXXXXXXXXXFYLMSIANLETPVXXAKPIK

SEQ ID NO: 5529 - protein, 40 aa, Artificial Sequence
  Non-cyclic GFR-binding peptide
  MOD_RES (2), (35), (36): Xaa is C or S
  MOD_RES (13), (14), (15), (16), (17): Xaa is A or G
  MOD_RES (18), (19), (20), (21): Xaa is A or G or is absent
KXSKVIMRYKKLXXXXXXXXXFYLISIANLDQSVXXPSAS

SEQ ID NO: 5530 - protein, 37 aa, Artificial Sequence
  Non-cyclic GFR-binding peptide
  MOD_RES (2), (35), (36): Xaa is C or S
GXEAVSMGERHKRLTPVGMDDYYLVSTASLKTPVXXA

SEQ ID NO: 5531 - protein, 40 aa, Artificial Sequence
  Non-cyclic GFR-binding peptide
  MOD_RES (2), (4): Xaa is C or S
  MOD_RES (17), (18), (19), (20), (21): Xaa is A or G
  MOD_RES (22), (23), (24), (25): Xaa is A or G or is absent
EXKXALHDELTQYNKLXXXXXXXXXLYLVSIASLQVQTPR

SEQ ID NO: 5532 - protein, 35 aa, Artificial Sequence
  Non-cyclic GFR-binding peptide
  MOD_RES (1), (35): Xaa is C or S
  MOD_RES (13), (14), (15), (16), (17): Xaa is A or G
  MOD_RES (18), (19), (20), (21): Xaa is A or G or is absent
XGEVVMERHKRLXXXXXXXXXYYLMSTASLETPVX

SEQ ID NO: 5533 - protein, 35 aa, Artificial Sequence
  Non-cyclic GFR-binding peptide
  MOD_RES (31), (32): Xaa is C or S
SKVVMQYNKLVKPTRGVLYLISIASLDQPVXXPSA

SEQ ID NO: 5534 - protein, 35 aa, Artificial Sequence
  Non-cyclic GFR-binding peptide
  MOD_RES (33), (34): Xaa is C or S
  MOD_RES (11), (12), (13), (14), (15): Xaa is A or G
  MOD_RES (16), (17), (18), (19): Xaa is A or G or is absent
EVVMDRHKRLXXXXXXXXXYYLMSTASLETPVXXA

SEQ ID NO: 5535 - protein, 42 aa, Artificial Sequence
  Non-cyclic GFR-binding peptide
  MOD_RES (2), (36), (37): Xaa is C or S
  MOD_RES (14), (15), (16), (17), (18): Xaa is A or G
  MOD_RES (19), (20), (21), (22): Xaa is A or G or is absent
GXSRVVMNYHYKLXXXXXXXXXKYLVSIPSLKTPAXXPKPVY

SEQ ID NO: 5536 - protein, 37 aa, Artificial Sequence
  Non-cyclic GFR-binding peptide
  MOD_RES (35), (36): Xaa is C or S
  MOD_RES (13), (14), (15), (16), (17): Xaa is A or G
  MOD_RES (18), (19), (20), (21): Xaa is A or G or is absent
EAVSMGEQYNKLXXXXXXXXXLYLVSIASLKTPVXXA

SEQ ID NO: 5537 - protein, 34 aa, Artificial Sequence
  Non-cyclic GFR-binding peptide
  MOD_RES (32), (33): Xaa is C or S
GEVVMERYKKLVVKDYEDFYLMSIANLETPVXXA

SEQ ID NO: 5538 - protein, 34 aa, Artificial Sequence
  Non-cyclic GFR-binding peptide
  MOD_RES (33), (34): Xaa is C or S
  MOD_RES (11), (12), (13), (14), (15): Xaa is A or G
  MOD_RES (16), (17), (18), (19): Xaa is A or G or is absent
KVVMNYHYKLXXXXXXXXXKYLVSIPSLKTPAXX

SEQ ID NO: 5539 - protein, 35 aa, Artificial Sequence
  Non-cyclic GFR-binding peptide
  MOD_RES (2), (35): Xaa is C or S
  MOD_RES (13), (14), (15), (16), (17): Xaa is A or G
  MOD_RES (18), (19), (20), (21): Xaa is A or G or is absent
KXSKVVMQYNKLXXXXXXXXXLYLISIASLDQPVX

SEQ ID NO: 5540 - protein, 37 aa, Artificial Sequence
  Non-cyclic GFR-binding peptide
  MOD_RES (1), (33), (34): Xaa is C or S
XGEVVMDRYKKLVVKENEDFYLMSIANLETPVXXAKP

SEQ ID NO: 5541 - protein, 37 aa, Artificial Sequence
  Non-cyclic GFR-binding peptide
  MOD_RES (2), (36), (37): Xaa is C or S
  MOD_RES (14), (15), (16), (17), (18): Xaa is A or G
  MOD_RES (19), (20), (21), (22): Xaa is A or G or is absent
GXSRVVMNYHYKLXXXXXXXXXKYLVSIPSLKTPAXX

SEQ ID NO: 5542 - protein, 38 aa, Artificial Sequence
  Non-cyclic GFR-binding peptide
  MOD_RES (1), (3), (35), (36): Xaa is C or S
XGXSRVVMNYHYKLIVNSSDDKYLVSIPSLKTPAXXPK

SEQ ID NO: 5543 - protein, 34 aa, Artificial Sequence
  Non-cyclic GFR-binding peptide
  MOD_RES (33), (34): Xaa is C or S
  MOD_RES (11), (12), (13), (14), (15): Xaa is A or G
  MOD_RES (16), (17), (18), (19): Xaa is A or G or is absent
EVVMDRYKKLXXXXXXXXXFYLMSIANLETPVXX

SEQ ID NO: 5544 - protein, 38 aa, Artificial Sequence
  Non-cyclic GFR-binding peptide
  MOD_RES (2), (34): Xaa is C or S
GXSRVVMNYHYKLIVNSSDDKYLVSIPSLKTPAXTPKT

SEQ ID NO: 5545 - protein, 39 aa, Artificial Sequence
  Non-cyclic GFR-binding peptide
  MOD_RES (1), (3): Xaa is C or S
XKXALHDELTQYNKLFIPKKRVIELYLVSIASLQVQTPR

SEQ ID NO: 5546 - protein, 44 aa, Artificial Sequence
  Non-cyclic GFR-binding peptide
  MOD_RES (2), (4), (38): Xaa is C or S
  MOD_RES (16), (17), (18), (19), (20): Xaa is A or G
  MOD_RES (21), (22), (23), (24): Xaa is A or G or is absent
HXGXSRVVMNYHYKLXXXXXXXXXKYLVSIPSLKTPAXTPKTVH

SEQ ID NO: 5547 - protein, 37 aa, Artificial Sequence
  Non-cyclic GFR-binding peptide
  MOD_RES (2), (4): Xaa is C or S
  MOD_RES (16), (17), (18), (19), (20): Xaa is A or G
  MOD_RES (21), (22), (23), (24): Xaa is A or G or is absent
HXGXARVVMNRHKRLXXXXXXXXXYYLVSTASLQTPA

SEQ ID NO: 5548 - protein, 30 aa, Artificial Sequence
  Non-cyclic GFR-binding peptide
SRVIMQYNKLVKPKRGVLYLISIASLAQPV

SEQ ID NO: 5549 - protein, 39 aa, Artificial Sequence
  Non-cyclic GFR-binding peptide
  MOD_RES (33), (34): Xaa is C or S
  MOD_RES (11), (12), (13), (14), (15): Xaa is A or G
  MOD_RES (16), (17), (18), (19): Xaa is A or G or is absent
RVVMNRHKRLXXXXXXXXXYYLVSTASLKTPAXXPKPVY

SEQ ID NO: 5550 - protein, 40 aa, Artificial Sequence
  Non-cyclic GFR-binding peptide
  MOD_RES (2), (34), (35): Xaa is C or S
GXGEVVMDRYKKLVVKENEDFYLMSIANLETPVXXAKPIK

SEQ ID NO: 5551 - protein, 33 aa, Artificial Sequence
  Non-cyclic GFR-binding peptide
  MOD_RES (12), (13), (14), (15), (16): Xaa is A or G
  MOD_RES (17), (18), (19), (20): Xaa is A or G or is absent
ARVVMNYHYKLXXXXXXXXXKYLVSIPSLQTPA

SEQ ID NO: 5552 - protein, 37 aa, Artificial Sequence
  Non-cyclic GFR-binding peptide
  MOD_RES (1), (3), (34), (35): Xaa is C or S
XKXSKVIMQYNKLIKPTKGILYLISIASLDQSVXXPS

SEQ ID NO: 5553 - protein, 44 aa, Artificial Sequence
  Non-cyclic GFR-binding peptide
  MOD_RES (2), (4), (41): Xaa is C or S
  MOD_RES (17), (18), (19), (20), (21): Xaa is A or G
  MOD_RES (22), (23), (24), (25): Xaa is A or G or is absent
EXKXALHDELTRHKRLXXXXXXXXXYYLVSTASLQVQTPRXQVN

SEQ ID NO: 5554 - protein, 38 aa, Artificial Sequence
  Non-cyclic GFR-binding peptide
  MOD_RES (35), (35): Xaa is C or S
HDELTRHKRLFIPKKRVIEYYLVSTASLQVQTPRXQVN

SEQ ID NO: 5555 - protein, 43 aa, Artificial Sequence
  Non-cyclic GFR-binding peptide
  MOD_RES (2), (4), (41): Xaa is C or S
EXKXALHDELTRYKKLFIPKKRVIEFYLVSIANLQVQTPRXQV

SEQ ID NO: 5556 - protein, 37 aa, Artificial Sequence
  Non-cyclic GFR-binding peptide
  MOD_RES (1), (33), (34): Xaa is C or S
XAKVVMNQYNKLIVNNSSDLYLVSIASLKTPAXXAKP

SEQ ID NO: 5557 - protein, 42 aa, Artificial Sequence
  Non-cyclic GFR-binding peptide
  MOD_RES (2), (4), (36), (37): Xaa is C or S
HXGXSRVVMNRHKRLIVNSSDDYYLVSTASLKTPAXXPKPVY

SEQ ID NO: 5558 - protein, 32 aa, Artificial Sequence
  Non-cyclic GFR-binding peptide
  MOD_RES (31), (32): Xaa is C or S
RVVMNRHKRLIVNSSDDYYLVSTASLQTPAXX

SEQ ID NO: 5559 - protein, 35 aa, Artificial Sequence
  Non-cyclic GFR-binding peptide
  MOD_RES (13), (14), (15), (16), (17): Xaa is A or G
  MOD_RES (18), (19), (20), (21): Xaa is A or G or is absent
ALHDELTRYKKLXXXXXXXXXFYLVSIANLQVQTP

SEQ ID NO: 5560 - protein, 40 aa, Artificial Sequence
  Non-cyclic GFR-binding peptide
  MOD_RES (1), (3), (36), (37): Xaa is C or S
  MOD_RES (14), (15), (16), (17), (18): Xaa is A or G
  MOD_RES (19), (20), (21), (22): Xaa is A or G or is absent
XKXSRVIMRYKKLXXXXXXXXXFYLISIANLAQPVXXPAA

SEQ ID NO: 5561 - protein, 38 aa, Artificial Sequence
  Non-cyclic GFR-binding peptide
  MOD_RES (2), (4), (36), (37): Xaa is C or S
RXGXGEVVMDRHKRLVVKENEDYYLMSTASLETPVXXA

SEQ ID NO: 5562 - protein, 37 aa, Artificial Sequence
  Non-cyclic GFR-binding peptide
  MOD_RES (2), (33), (34): Xaa is C or S
KXSKVVMYHYKLVKPTRGVKYLISIPSLDQPVXXPSA

SEQ ID NO: 5563 - protein, 38 aa, Artificial Sequence
  Non-cyclic GFR-binding peptide
  MOD_RES (33), (34): Xaa is C or S
  MOD_RES (11), (12), (13), (14), (15): Xaa is A or G
  MOD_RES (16), (17), (18), (19): Xaa is A or G or is absent
SKVIMRHKRLXXXXXXXXXYYLISTASLDQSVXXPSAS

SEQ ID NO: 5564 - protein, 34 aa, Artificial Sequence
  Non-cyclic GFR-binding peptide
  MOD_RES (33), (34): Xaa is C or S
  MOD_RES (11), (12), (13), (14), (15): Xaa is A or G
  MOD_RES (16), (17), (18), (19): Xaa is A or G or is absent
RVVMNYHYKLXXXXXXXXXKYLVSIPSLKTPAXX

SEQ ID NO: 5565 - protein, 37 aa, Artificial Sequence
  Non-cyclic GFR-binding peptide
  MOD_RES (1), (34), (35): Xaa is C or S
  MOD_RES (12), (13), (14), (15), (16): Xaa is A or G
  MOD_RES (17), (18), (19), (20): Xaa is A or G or is absent
XSKVVMYHYKLXXXXXXXXXKYLISIPSLDQPVXXPS

SEQ ID NO: 5566 - protein, 38 aa, Artificial Sequence
  Non-cyclic GFR-binding peptide
  MOD_RES (1), (33): Xaa is C or S
XSRVVMNRHKRLIVNSSDDYYLVSTASLKTPAXTPKTV

SEQ ID NO: 5567 - protein, 36 aa, Artificial Sequence
  Non-cyclic GFR-binding peptide
  MOD_RES (1), (3): Xaa is C or S
  MOD_RES (15), (16), (17), (18), (19): Xaa is A or G
  MOD_RES (20), (21), (22), (23): Xaa is A or G or is absent
XGXGEVVMDYHYKLXXXXXXXXXKYLMSIPSLETPV

SEQ ID NO: 5568 - protein, 40 aa, Artificial Sequence
  Non-cyclic GFR-binding peptide
  MOD_RES (2), (34), (35): Xaa is C or S
GXAKVVMNQYNKLIVNNSSDLYLVSIASLKTPAXXAKPVA

SEQ ID NO: 5569 - protein, 36 aa, Artificial Sequence
  Non-cyclic GFR-binding peptide
  MOD_RES (1), (3), (36): Xaa is C or S
XGXEAVSMGEQYNKLTPVGMDDLYLVSIASLKTPVX

SEQ ID NO: 5570 - protein, 35 aa, Artificial Sequence
  Non-cyclic GFR-binding peptide
  MOD_RES (2), (34), (35): Xaa is C or S
GXARVVMNQYNKLIVNSSDDLYLVSIASLQTPAXX

SEQ ID NO: 5571 - protein, 39 aa, Artificial Sequence
  Non-cyclic GFR-binding peptide
  MOD_RES (2), (4), (36), (37): Xaa is C or S
HXGXSRVVMNQYNKLIVNSSDDLYLVSIASLKTPAXXPK

SEQ ID NO: 5572 - protein, 38 aa, Artificial Sequence
  Non-cyclic GFR-binding peptide
  MOD_RES (2), (4), (38): Xaa is C or S
  MOD_RES (16), (17), (18), (19), (20): Xaa is A or G
  MOD_RES (21), (22), (23), (24): Xaa is A or G or is absent
RXGXGEVVMDRYKKLXXXXXXXXXFYLMSIANLETPVX

SEQ ID NO: 5573 - protein, 37 aa, Artificial Sequence
  Non-cyclic GFR-binding peptide
  MOD_RES (2), (4), (37): Xaa is C or S
  MOD_RES (15), (16), (17), (18), (19): Xaa is A or G
  MOD_RES (20), (21), (22), (23): Xaa is A or G or is absent
SXKXSKVIMYHYKLXXXXXXXXXKYLISIPSLDQSVX

SEQ ID NO: 5574 - protein, 32 aa, Artificial Sequence
  Non-cyclic GFR-binding peptide
  MOD_RES (32), (32): Xaa is C or S
AKVVMNQYNKLIVNNSSDLYLVSIASLKTPAX

SEQ ID NO: 5575 - protein, 36 aa, Artificial Sequence
  Non-cyclic GFR-binding peptide
  MOD_RES (31), (31): Xaa is C or S
RVVMNYHYKLIVNSSDDKYLVSIPSLKTPAXTPKTV

SEQ ID NO: 5576 - protein, 40 aa, Artificial Sequence
  Non-cyclic GFR-binding peptide
  MOD_RES (2), (4), (36), (37): Xaa is C or S
HXGXSRVVMNRHKRLIVNSSDDYYLVSTASLKTPAXXPKP

SEQ ID NO: 5577 - protein, 41 aa, Artificial Sequence
  Non-cyclic GFR-binding peptide
  MOD_RES (1), (3), (36), (37): Xaa is C or S
  MOD_RES (14), (15), (16), (17), (18): Xaa is A or G
  MOD_RES (19), (20), (21), (22): Xaa is A or G or is absent
XKXSKVVMRHKRLXXXXXXXXXYYLISTASLDQPVXXPSAS

SEQ ID NO: 5578 - protein, 37 aa, Artificial Sequence
  Non-cyclic GFR-binding peptide
  MOD_RES (1), (3), (34), (35): Xaa is C or S
XKXSKVVMQYNKLVKPTRGVLYLISIASLDQPVXXPS

SEQ ID NO: 5579 - protein, 41 aa, Artificial Sequence
  Non-cyclic GFR-binding peptide
  MOD_RES (1), (3), (40): Xaa is C or S
XKXALHDELTRYKKLFIPKKRVIEFYLVSIANLQVQTPRXQ

SEQ ID NO: 5580 - protein, 38 aa, Artificial Sequence
  Non-cyclic GFR-binding peptide
  MOD_RES (1), (3), (38): Xaa is C or S
  MOD_RES (16), (17), (18), (19), (20): Xaa is A or G
  MOD_RES (21), (22), (23), (24): Xaa is A or G or is absent
XGXEAVSMGEQYNKLXXXXXXXXXLYLVSIASLKTPVX

SEQ ID NO: 5581 - protein, 36 aa, Artificial Sequence
  Non-cyclic GFR-binding peptide
  MOD_RES (2), (34), (35): Xaa is C or S
GXAKVVMNYHYKLIVNNSSDKYLVSIPSLKTPAXXA

SEQ ID NO: 5582 - protein, 39 aa, Artificial Sequence
  Non-cyclic GFR-binding peptide
  MOD_RES (2), (36), (37): Xaa is C or S
  MOD_RES (14), (15), (16), (17), (18): Xaa is A or G
  MOD_RES (19), (20), (21), (22): Xaa is A or G or is absent
GXAKVVMNQYNKLXXXXXXXXXLYLVSIASLKTPAXXAK

SEQ ID NO: 5583 - protein, 35 aa, Artificial Sequence
  Non-cyclic GFR-binding peptide
  MOD_RES (2), (4), (35): Xaa is C or S
SXKXSKVIMRYKKLIKPTKGIFYLISIANLDQSVX

SEQ ID NO: 5584 - protein, 36 aa, Artificial Sequence
  Non-cyclic GFR-binding peptide
  MOD_RES (1), (34), (35): Xaa is C or S
  MOD_RES (12), (13), (14), (15), (16): Xaa is A or G
  MOD_RES (17), (18), (19), (20): Xaa is A or G or is absent
XSKVIMYHYKLXXXXXXXXXKYLISIPSLDQSVXXP

SEQ ID NO: 5585 - protein, 36 aa, Artificial Sequence
  Non-cyclic GFR-binding peptide
  MOD_RES (1), (35), (36): Xaa is C or S
  MOD_RES (13), (14), (15), (16), (17): Xaa is A or G
  MOD_RES (18), (19), (20), (21): Xaa is A or G or is absent
XSRVVMNYHYKLXXXXXXXXXKYLVSIPSLKTPAXX

SEQ ID NO: 5586 - protein, 39 aa, Artificial Sequence
  Non-cyclic GFR-binding peptide
  MOD_RES (2), (4), (36), (37): Xaa is C or S
HXGXAKVVMNYHYKLIVNNSSDKYLVSIPSLKTPAXXAK

SEQ ID NO: 5587 - protein, 34 aa, Artificial Sequence
  Non-cyclic GFR-binding peptide
  MOD_RES (12), (13), (14), (15), (16): Xaa is A or G
  MOD_RES (17), (18), (19), (20): Xaa is A or G or is absent
LHDELTRYKKLXXXXXXXXXFYLVSIANLQVQTP

SEQ ID NO: 5588 - protein, 33 aa, Artificial Sequence
  Non-cyclic GFR-binding peptide
  MOD_RES (31), (32): Xaa is C or S
EVVMERYKKLVVKDYEDFYLMSIANLETPVXXA

SEQ ID NO: 5589 - protein, 33 aa, Artificial Sequence
  Non-cyclic GFR-binding peptide
  MOD_RES (2), (33): Xaa is C or S
KXSKVVMQYNKLVKPTRGVLYLISIASLDQPVX

SEQ ID NO: 5590 - protein, 38 aa, Artificial Sequence
  Non-cyclic GFR-binding peptide
  MOD_RES (6), (7): Xaa is C or S
KIPKAXXVPTELNAISMLYFDENEKVVLKKYRDMVVEG

SEQ ID NO: 5591 - protein, 35 aa, Artificial Sequence
  Non-cyclic GFR-binding peptide
  MOD_RES (32), (34): Xaa is C or S
APTQLSAISVLYLDDSSNVILKNYQNMVVRAXGXH

SEQ ID NO: 5592 - protein, 34 aa, Artificial Sequence
  Non-cyclic GFR-binding peptide
  MOD_RES (14), (15), (16), (17), (18): Xaa is A or G
  MOD_RES (19), (20), (21), (22): Xaa is A or G or is absent
VPTKLNAISVLYFXXXXXXXXXLKKYREGMSVAE

SEQ ID NO: 5593 - protein, 38 aa, Artificial Sequence
  Non-cyclic GFR-binding peptide
  MOD_RES (1), (38): Xaa is C or S
  MOD_RES (17), (18), (19), (20), (21): Xaa is A or G
  MOD_RES (22), (23), (24), (25): Xaa is A or G or is absent
XRPTQVQLSATSVLYYXXXXXXXXXLRKHRTLEDHLAX

SEQ ID NO: 5594 - protein, 42 aa, Artificial Sequence
  Non-cyclic GFR-binding peptide
  MOD_RES (4), (5), (40), (42): Xaa is C or S
  MOD_RES (19), (20), (21), (22), (23): Xaa is A or G
  MOD_RES (24), (25), (26), (27): Xaa is A or G or is absent
GKAXXVPTKLNAISVLYFXXXXXXXXXLKKYREGMSVAEXGX

SEQ ID NO: 5595 - protein, 40 aa, Artificial Sequence
  Non-cyclic GFR-binding peptide
  MOD_RES (4), (5), (38), (40): Xaa is C or S
  MOD_RES (19), (20), (21), (22), (23): Xaa is A or G
  MOD_RES (24), (25), (26), (27): Xaa is A or G or is absent
AAPXXVPQALSAISILYLXXXXXXXXXLKNYQMIVRSXKX

SEQ ID NO: 5596 - protein, 38 aa, Artificial Sequence
  Non-cyclic GFR-binding peptide
  MOD_RES (7), (7): Xaa is C or S
HVTKPTXAPTKLSATSVLYYDDSSNVILRKHRNMVVRS

SEQ ID NO: 5597 - protein, 33 aa, Artificial Sequence
  Non-cyclic GFR-binding peptide
  MOD_RES (32), (32): Xaa is C or S
VPTELNAISMLYFDENEKVVLKKYRDMVVEGXG

SEQ ID NO: 5598 - protein, 38 aa, Artificial Sequence
  Non-cyclic GFR-binding peptide
  MOD_RES (2), (3), (36), (38): Xaa is C or S
  MOD_RES (17), (18), (19), (20), (21): Xaa is A or G
  MOD_RES (22), (23), (24), (25): Xaa is A or G or is absent
PXXVSQDLSPISILYKXXXXXXXXXLKYHYMIVKSXKX

SEQ ID NO: 5599 - protein, 38 aa, Artificial Sequence
  Non-cyclic GFR-binding peptide
  MOD_RES (1), (2), (36), (38): Xaa is C or S
  MOD_RES (16), (17), (18), (19), (20): Xaa is A or G
  MOD_RES (21), (22), (23), (24): Xaa is A or G or is absent
XXAPTKLSAISVLYLXXXXXXXXXLKNYQNMVVRSXGX

SEQ ID NO: 5600 - protein, 36 aa, Artificial Sequence
  Non-cyclic GFR-binding peptide
  MOD_RES (3), (4), (36): Xaa is C or S
KPXXAPTKLSPISVLYKDDSSNVILKYHYNMVVRSX

SEQ ID NO: 5601 - protein, 32 aa, Artificial Sequence
  Non-cyclic GFR-binding peptide
  MOD_RES (1), (32): Xaa is C or S
XVPQDLSPISILYKVGRTPKVLKYHYMVVKSX

SEQ ID NO: 5602 - protein, 37 aa, Artificial Sequence
  Non-cyclic GFR-binding peptide
  MOD_RES (4), (5): Xaa is C or S
  MOD_RES (19), (20), (21), (22), (23): Xaa is A or G
  MOD_RES (24), (25), (26), (27): Xaa is A or G or is absent
PKPXXAPTKLSATSVLYYXXXXXXXXXLRKHRNMVVR

SEQ ID NO: 5603 - protein, 38 aa, Artificial Sequence
  Non-cyclic GFR-binding peptide
  MOD_RES (4), (5), (36), (38): Xaa is C or S
AAPXXVPQALSAISILYLVGRKPKVLKNYQMIVRSXKX

SEQ ID NO: 5604 - protein, 35 aa, Artificial Sequence
  Non-cyclic GFR-binding peptide
  MOD_RES (1), (35): Xaa is C or S
  MOD_RES (15), (16), (17), (18), (19): Xaa is A or G
  MOD_RES (20), (21), (22), (23): Xaa is A or G or is absent
XAPTKLSATSVLYYXXXXXXXXXLRKHRNMVVRSX

SEQ ID NO: 5605 - protein, 39 aa, Artificial Sequence
  Non-cyclic GFR-binding peptide
  MOD_RES (5), (6), (39): Xaa is C or S
  MOD_RES (20), (21), (22), (23), (24): Xaa is A or G
  MOD_RES (25), (26), (27), (28): Xaa is A or G or is absent
SAAPXXVPQALSATSILYYXXXXXXXXXLRKHRMIVRSX

SEQ ID NO: 5606 - protein, 38 aa, Artificial Sequence
  Non-cyclic GFR-binding peptide
  MOD_RES (6), (7): Xaa is C or S
YVPKPXXAPTKLSATSVLYYDDSSNVILRKHRNMVVRS

SEQ ID NO: 5607 - protein, 35 aa, Artificial Sequence
  Non-cyclic GFR-binding peptide
  MOD_RES (4), (5): Xaa is C or S
ASPXXVSQDLNAISILYFIGKTPKILKKYRMIVKS

SEQ ID NO: 5608 - protein, 42 aa, Artificial Sequence
  Non-cyclic GFR-binding peptide
  MOD_RES (5), (6), (40), (42): Xaa is C or S
  MOD_RES (20), (21), (22), (23), (24): Xaa is A or G
  MOD_RES (25), (26), (27), (28): Xaa is A or G or is absent
IPKAXXVPTELSPISMLYKXXXXXXXXXLKYHYEMVVEGXGX

SEQ ID NO: 5609 - protein, 39 aa, Artificial Sequence
  Non-cyclic GFR-binding peptide
  MOD_RES (3), (4), (38): Xaa is C or S
  MOD_RES (18), (19), (20), (21), (22): Xaa is A or G
  MOD_RES (23), (24), (25), (26): Xaa is A or G or is absent
KPXXAPTQLSATSVLYYXXXXXXXXXLRKHRNMVVRAXG

SEQ ID NO: 5610 - protein, 35 aa, Artificial Sequence
  Non-cyclic GFR-binding peptide
  MOD_RES (15), (16), (17), (18), (19): Xaa is A or G
  MOD_RES (20), (21), (22), (23): Xaa is A or G or is absent
PTQVQLSATSVLYYXXXXXXXXXLRKHRTLEDHLA

SEQ ID NO: 5611 - protein, 38 aa, Artificial Sequence
  Non-cyclic GFR-binding peptide
  MOD_RES (1), (2), (35), (37): Xaa is C or S
  MOD_RES (16), (17), (18), (19), (20): Xaa is A or G
  MOD_RES (21), (22), (23), (24): Xaa is A or G or is absent
XXVPQDLSPISILYKXXXXXXXXXLKYHYMVVKSXKXS

SEQ ID NO: 5612 - protein, 39 aa, Artificial Sequence
  Non-cyclic GFR-binding peptide
  MOD_RES (1), (2), (37), (39): Xaa is C or S
  MOD_RES (16), (17), (18), (19), (20): Xaa is A or G
  MOD_RES (21), (22), (23), (24): Xaa is A or G or is absent
XXVPTKLSAISVLYLXXXXXXXXXLKNYQEGMSVAEXGX

SEQ ID NO: 5613 - protein, 33 aa, Artificial Sequence
  Non-cyclic GFR-binding peptide
  MOD_RES (14), (15), (16), (17), (18): Xaa is A or G
  MOD_RES (19), (20), (21), (22): Xaa is A or G or is absent
VPTELSATSMLYYXXXXXXXXXLRKHRDMVVEG

SEQ ID NO: 5614 - protein, 39 aa, Artificial Sequence
  Non-cyclic GFR-binding peptide
  MOD_RES (4), (5), (37), (39): Xaa is C or S
PKAXXVPTELNAISMLYFDENEKVVLKKYRDMVVEGXGX

SEQ ID NO: 5615 - protein, 35 aa, Artificial Sequence
  Non-cyclic GFR-binding peptide
  MOD_RES (3), (4), (35): Xaa is C or S
SPXXVSQDLSAISILYLIGKTPKILKNYQMIVKSX

SEQ ID NO: 5616 - protein, 32 aa, Artificial Sequence
  Non-cyclic GFR-binding peptide
  MOD_RES (1), (2): Xaa is C or S
XXVSQDLSPISILYKIGKTPKILKYHYMIVKS

SEQ ID NO: 5617 - protein, 40 aa, Artificial Sequence
  Non-cyclic GFR-binding peptide
  MOD_RES (4), (5), (38), (40): Xaa is C or S
  MOD_RES (19), (20), (21), (22), (23): Xaa is A or G
  MOD_RES (24), (25), (26), (27): Xaa is A or G or is absent
ASPXXVSQDLSAISILYLXXXXXXXXXLKNYQMIVKSXKX

SEQ ID NO: 5618 - protein, 41 aa, Artificial Sequence
  Non-cyclic GFR-binding peptide
  MOD_RES (6), (7), (41): Xaa is C or S
  MOD_RES (21), (22), (23), (24), (25): Xaa is A or G
  MOD_RES (26), (27), (28), (29): Xaa is A or G or is absent
SIPKAXXVPTELSPISMLYKXXXXXXXXXLKYHYEMVVEGX

SEQ ID NO: 5619 - protein, 34 aa, Artificial Sequence
  Non-cyclic GFR-binding peptide
  MOD_RES (33), (33): Xaa is C or S
  MOD_RES (14), (15), (16), (17), (18): Xaa is A or G
  MOD_RES (19), (20), (21), (22): Xaa is A or G or is absent
VPQDLSAISILYLXXXXXXXXXLKNYQMVVKSXK

SEQ ID NO: 5620 - protein, 34 aa, Artificial Sequence
  Non-cyclic GFR-binding peptide
  MOD_RES (2), (3): Xaa is C or S
AXXVPTELSATSMLYYDENEKVVLRKHRDMVVEG

SEQ ID NO: 5621 - protein, 32 aa, Artificial Sequence
  Non-cyclic GFR-binding peptide
  MOD_RES (14), (15), (16), (17), (18): Xaa is A or G
  MOD_RES (19), (20), (21), (22): Xaa is A or G or is absent
TQVQLSATSVLYYXXXXXXXXXLRKHRTLEDH

SEQ ID NO: 5622 - protein, 30 aa, Artificial Sequence
  Non-cyclic GFR-binding peptide
VPTELSPISMLYKDEYDKVVLKYHYEMVVE

SEQ ID NO: 5623 - protein, 43 aa, Artificial Sequence
  Non-cyclic GFR-binding peptide
  MOD_RES (5), (6), (40), (42): Xaa is C or S
  MOD_RES (20), (21), (22), (23), (24): Xaa is A or G
  MOD_RES (25), (26), (27), (28): Xaa is A or G or is absent
IPKAXXVPTELSPISMLYKXXXXXXXXXLKYHYDMVVEGXGXR

SEQ ID NO: 5624 - protein, 37 aa, Artificial Sequence
  Non-cyclic GFR-binding peptide
  MOD_RES (6), (7): Xaa is C or S
TVPKPXXAPTQLSAISVLYLDDSSNVILKNYQNMVVR

SEQ ID NO: 5625 - protein, 32 aa, Artificial Sequence
  Non-cyclic GFR-binding peptide
  MOD_RES (1), (1): Xaa is C or S
XVPTELSPISMLYKDEYDKVVLKYHYEMVVEG

SEQ ID NO: 5626 - protein, 35 aa, Artificial Sequence
  Non-cyclic GFR-binding peptide
  MOD_RES (2), (3), (35): Xaa is C or S
AXXVPTELSATSMLYYDEYDKVVLRKHREMVVEGX

SEQ ID NO: 5627 - protein, 35 aa, Artificial Sequence
  Non-cyclic GFR-binding peptide
  MOD_RES (1), (34): Xaa is C or S
XVPTKLSATSVLYYDDMGVPTLRKHREGMSVAEXG

SEQ ID NO: 5628 - protein, 36 aa, Artificial Sequence
  Non-cyclic GFR-binding peptide
  MOD_RES (2), (2): Xaa is C or S
QXRPTQVQLSATSVLYYEIVRKKPIFLRKHRTLEDH

SEQ ID NO: 5629 - protein, 38 aa, Artificial Sequence
  Non-cyclic GFR-binding peptide
  MOD_RES (7), (7): Xaa is C or S
HVTKPTXAPTKLSAISVLYLDDSSNVILKNYQNMVVRS

SEQ ID NO: 5630 - protein, 32 aa, Artificial Sequence
  Non-cyclic GFR-binding peptide
  MOD_RES (32), (32): Xaa is C or S
VPTELSPISMLYKDEYDKVVLKYHYEMVVEGX

SEQ ID NO: 5631 - protein, 40 aa, Artificial Sequence
  Non-cyclic GFR-binding peptide
  MOD_RES (5), (6), (39): Xaa is C or S
VGKAXXVPTKLSAISVLYLDDMGVPTLKNYQEGMSVAEXG

SEQ ID NO: 5632 - protein, 38 aa, Artificial Sequence
  Non-cyclic GFR-binding peptide
  MOD_RES (3), (3): Xaa is C or S
  MOD_RES (19), (20), (21), (22), (23): Xaa is A or G
  MOD_RES (24), (25), (26), (27): Xaa is A or G or is absent
VQXRPTQVQLSAISVLYLXXXXXXXXXLKNYQTLEDHL

SEQ ID NO: 5633 - protein, 39 aa, Artificial Sequence
  Non-cyclic GFR-binding peptide
  MOD_RES (1), (38): Xaa is C or S
  MOD_RES (17), (18), (19), (20), (21): Xaa is A or G
  MOD_RES (22), (23), (24), (25): Xaa is A or G or is absent
XRPTQVQLSATSVLYYXXXXXXXXXLRKHRTLEDHLAXK

SEQ ID NO: 5634 - protein, 39 aa, Artificial Sequence
  Non-cyclic GFR-binding peptide
  MOD_RES (1), (2), (36), (38): Xaa is C or S
  MOD_RES (16), (17), (18), (19), (20): Xaa is A or G
  MOD_RES (21), (22), (23), (24): Xaa is A or G or is absent
XXAPTKLSATSVLYYXXXXXXXXXLRKHRNMVVRSXGXH

SEQ ID NO: 5635 - protein, 37 aa, Artificial Sequence
  Non-cyclic GFR-binding peptide
  MOD_RES (34), (36): Xaa is C or S
  MOD_RES (14), (15), (16), (17), (18): Xaa is A or G
  MOD_RES (19), (20), (21), (22): Xaa is A or G or is absent
APTKLNAISVLYFXXXXXXXXXLKKYRNMVVKAXGXH

SEQ ID NO: 5636 - protein, 36 aa, Artificial Sequence
  Non-cyclic GFR-binding peptide
  MOD_RES (16), (17), (18), (19), (20): Xaa is A or G
  MOD_RES (21), (22), (23), (24): Xaa is A or G or is absent
RPTQVQLNAISVLYFXXXXXXXXXLKKYRTLEDHLA

SEQ ID NO: 5637 - protein, 38 aa, Artificial Sequence
  Non-cyclic GFR-binding peptide
  MOD_RES (4), (5), (37): Xaa is C or S
PKAXXVPTELSATSMLYYDEYDKVVLRKHREMVVEGXG

SEQ ID NO: 5638 - protein, 34 aa, Artificial Sequence
  Non-cyclic GFR-binding peptide
  MOD_RES (1), (34): Xaa is C or S
  MOD_RES (15), (16), (17), (18), (19): Xaa is A or G
  MOD_RES (20), (21), (22), (23): Xaa is A or G or is absent
XVSQDLSPISILYKXXXXXXXXXLKYHYMIVKSX

SEQ ID NO: 5639 - protein, 42 aa, Artificial Sequence
  Non-cyclic GFR-binding peptide
  MOD_RES (5), (6), (39), (41): Xaa is C or S
  MOD_RES (20), (21), (22), (23), (24): Xaa is A or G
  MOD_RES (25), (26), (27), (28): Xaa is A or G or is absent
SASPXXVSQDLSPISILYKXXXXXXXXXLKYHYMIVKSXKXS

SEQ ID NO: 5640 - protein, 36 aa, Artificial Sequence
  Non-cyclic GFR-binding peptide
  MOD_RES (1), (2), (36): Xaa is C or S
  MOD_RES (16), (17), (18), (19), (20): Xaa is A or G
  MOD_RES (21), (22), (23), (24): Xaa is A or G or is absent
XXAPTKLSATSVLYYXXXXXXXXXLRKHRNMVVRSX

SEQ ID NO: 5641 - protein, 33 aa, Artificial Sequence
  Non-cyclic GFR-binding peptide
  MOD_RES (33), (33): Xaa is C or S
  MOD_RES (14), (15), (16), (17), (18): Xaa is A or G
  MOD_RES (19), (20), (21), (22): Xaa is A or G or is absent
VPQDLSPISILYKXXXXXXXXXLKYHYMVVKSX

SEQ ID NO: 5642 - protein, 37 aa, Artificial Sequence
  Non-cyclic GFR-binding peptide
  MOD_RES (35), (37): Xaa is C or S
  MOD_RES (14), (15), (16), (17), (18): Xaa is A or G
  MOD_RES (19), (20), (21), (22): Xaa is A or G or is absent
TQVQLSATSVLYYXXXXXXXXXLRKHRTLEDHLAXKX

SEQ ID NO: 5643 - protein, 35 aa, Artificial Sequence
  Non-cyclic GFR-binding peptide
  MOD_RES (1), (32), (34): Xaa is C or S
XVSQDLSAISILYLIGKTPKILKNYQMIVKSXKXS

SEQ ID NO: 5644 - protein, 40 aa, Artificial Sequence
  Non-cyclic GFR-binding peptide
  MOD_RES (4), (5), (38), (40): Xaa is C or S
GKAXXVPTKLNAISVLYFDDMGVPTLKKYREGMSVAEXGX

SEQ ID NO: 5645 - protein, 36 aa, Artificial Sequence
  Non-cyclic GFR-binding peptide
  MOD_RES (34), (36): Xaa is C or S
  MOD_RES (14), (15), (16), (17), (18): Xaa is A or G
  MOD_RES (19), (20), (21), (22): Xaa is A or G or is absent
APTKLSPISVLYKXXXXXXXXXLKYHYNMVVRSXGX

SEQ ID NO: 5646 - protein, 39 aa, Artificial Sequence
  Non-cyclic GFR-binding peptide
  MOD_RES (4), (5), (38): Xaa is C or S
  MOD_RES (19), (20), (21), (22), (23): Xaa is A or G
  MOD_RES (24), (25), (26), (27): Xaa is A or G or is absent
ASPXXVSQDLSAISILYLXXXXXXXXXLKNYQMIVKSXK

SEQ ID NO: 5647 - protein, 37 aa, Artificial Sequence
  Non-cyclic GFR-binding peptide
  MOD_RES (2), (3), (35), (37): Xaa is C or S
AXXAPTKLSAISVLYLDSSNNVILKNYQNMVVKAXGX

SEQ ID NO: 5648 - protein, 38 aa, Artificial Sequence
  Non-cyclic GFR-binding peptide
  MOD_RES (1), (38): Xaa is C or S
XRPTQVQLSATSVLYYEIVRKKPIFLRKHRTLEDHLAX

SEQ ID NO: 5649 - protein, 37 aa, Artificial Sequence
  Non-cyclic GFR-binding peptide
  MOD_RES (4), (5), (37): Xaa is C or S
PKPXXAPTQLSAISVLYLDDSSNVILKNYQNMVVRAX

SEQ ID NO: 5650 - protein, 39 aa, Artificial Sequence
  Non-cyclic GFR-binding peptide
  MOD_RES (6), (7): Xaa is C or S
  MOD_RES (21), (22), (23), (24), (25): Xaa is A or G
  MOD_RES (26), (27), (28), (29): Xaa is A or G or is absent
ASASPXXVPQDLSPISILYKXXXXXXXXXLKYHYMVVKS

SEQ ID NO: 5651 - protein, 30 aa, Artificial Sequence
  Non-cyclic GFR-binding peptide
VPQALSATSILYYVGRKPKVLRKHRMIVRS

SEQ ID NO: 5652 - protein, 41 aa, Artificial Sequence
  Non-cyclic GFR-binding peptide
  MOD_RES (5), (39), (41): Xaa is C or S
  MOD_RES (19), (20), (21), (22), (23): Xaa is A or G
  MOD_RES (24), (25), (26), (27): Xaa is A or G or is absent
TKPTXAPTKLSAISVLYLXXXXXXXXXLKNYQNMVVRSXGX

SEQ ID NO: 5653 - protein, 34 aa, Artificial Sequence
  Non-cyclic GFR-binding peptide
  MOD_RES (3), (4): Xaa is C or S
SPXXVSQDLSAISILYLIGKTPKILKNYQMIVKS

SEQ ID NO: 5654 - protein, 43 aa, Artificial Sequence
  Non-cyclic GFR-binding peptide
  MOD_RES (4), (41), (43): Xaa is C or S
  MOD_RES (20), (21), (22), (23), (24): Xaa is A or G
  MOD_RES (25), (26), (27), (28): Xaa is A or G or is absent
NVQXRPTQVQLSATSVLYYXXXXXXXXXLRKHRTLEDHLAXKX

SEQ ID NO: 5655 - protein, 35 aa, Artificial Sequence
  Non-cyclic GFR-binding peptide
  MOD_RES (34), (34): Xaa is C or S
  MOD_RES (14), (15), (16), (17), (18): Xaa is A or G
  MOD_RES (19), (20), (21), (22): Xaa is A or G or is absent
VPTELSATSMLYYXXXXXXXXXLRKHREMVVEGXG

SEQ ID NO: 5656 - protein, 43 aa, Artificial Sequence
  Non-cyclic GFR-binding peptide
  MOD_RES (5), (6), (40), (42): Xaa is C or S
  MOD_RES (20), (21), (22), (23), (24): Xaa is A or G
  MOD_RES (25), (26), (27), (28): Xaa is A or G or is absent
VPKPXXAPTKLSPISVLYKXXXXXXXXXLKYHYNMVVRSXGXH

SEQ ID NO: 5657 - protein, 38 aa, Artificial Sequence
  Non-cyclic GFR-binding peptide
  MOD_RES (4), (5): Xaa is C or S
  MOD_RES (19), (20), (21), (22), (23): Xaa is A or G
  MOD_RES (24), (25), (26), (27): Xaa is A or G or is absent
PKPXXAPTKLSAISVLYLXXXXXXXXXLKNYQNMVVRS

SEQ ID NO: 5658 - protein, 33 aa, Artificial Sequence
  Non-cyclic GFR-binding peptide
  MOD_RES (1), (32): Xaa is C or S
XVSQDLSPISILYKIGKTPKILKYHYMIVKSXK

SEQ ID NO: 5659 - protein, 42 aa, Artificial Sequence
  Non-cyclic GFR-binding peptide
  MOD_RES (5), (6), (40), (42): Xaa is C or S
  MOD_RES (20), (21), (22), (23), (24): Xaa is A or G
  MOD_RES (25), (26), (27), (28): Xaa is A or G or is absent
VPKAXXAPTKLSAISVLYLXXXXXXXXXLKNYQNMVVKAXGX

SEQ ID NO: 5660 - protein, 36 aa, Artificial Sequence
  Non-cyclic GFR-binding peptide
  MOD_RES (1), (1): Xaa is C or S
XRPTQVQLSPISVLYKEIVRKKPIFLKYHYTLEDHL

SEQ ID NO: 5661 - protein, 43 aa, Artificial Sequence
  Non-cyclic GFR-binding peptide
  MOD_RES (5), (6), (40), (42): Xaa is C or S
  MOD_RES (20), (21), (22), (23), (24): Xaa is A or G
  MOD_RES (25), (26), (27), (28): Xaa is A or G or is absent
IPKAXXVPTELSATSMLYYXXXXXXXXXLRKHRDMVVEGXGXR

SEQ ID NO: 5662 - protein, 34 aa, Artificial Sequence
  Non-cyclic GFR-binding peptide
  MOD_RES (1), (34): Xaa is C or S
  MOD_RES (15), (16), (17), (18), (19): Xaa is A or G
  MOD_RES (20), (21), (22), (23): Xaa is A or G or is absent
XVPQDLNAISILYFXXXXXXXXXLKKYRMVVKSX

SEQ ID NO: 5663 - protein, 33 aa, Artificial Sequence
  Non-cyclic GFR-binding peptide
  MOD_RES (1), (1): Xaa is C or S
  MOD_RES (15), (16), (17), (18), (19): Xaa is A or G
  MOD_RES (20), (21), (22), (23): Xaa is A or G or is absent
XVPQALNAISILYFXXXXXXXXXLKKYRMIVRS

SEQ ID NO: 5664 - protein, 38 aa, Artificial Sequence
  Non-cyclic GFR-binding peptide
  MOD_RES (4), (5), (38): Xaa is C or S
  MOD_RES (19), (20), (21), (22), (23): Xaa is A or G
  MOD_RES (24), (25), (26), (27): Xaa is A or G or is absent
ASPXXVPQDLNAISILYFXXXXXXXXXLKKYRMVVKSX

SEQ ID NO: 5665 - protein, 37 aa, Artificial Sequence
  Non-cyclic GFR-binding peptide
  MOD_RES (1), (35), (37): Xaa is C or S
  MOD_RES (15), (16), (17), (18), (19): Xaa is A or G
  MOD_RES (20), (21), (22), (23): Xaa is A or G or is absent
XVPTELNAISMLYFXXXXXXXXXLKKYREMVVEGXGX

SEQ ID NO: 5666 - protein, 34 aa, Artificial Sequence
  Non-cyclic GFR-binding peptide
  MOD_RES (1), (2), (34): Xaa is C or S
XXAPTKLSAISVLYLDDSSNVILKNYQNMVVRSX

SEQ ID NO: 5667 - protein, 39 aa, Artificial Sequence
  Non-cyclic GFR-binding peptide
  MOD_RES (6), (7): Xaa is C or S
  MOD_RES (21), (22), (23), (24), (25): Xaa is A or G
  MOD_RES (26), (27), (28), (29): Xaa is A or G or is absent
ASAAPXXVPQALNAISILYFXXXXXXXXXLKKYRMIVRS

SEQ ID NO: 5668 - protein, 41 aa, Artificial Sequence
  Non-cyclic GFR-binding peptide
  MOD_RES (4), (5), (38), (40): Xaa is C or S
  MOD_RES (19), (20), (21), (22), (23): Xaa is A or G
  MOD_RES (24), (25), (26), (27): Xaa is A or G or is absent
AAPXXVPQALSAISILYLXXXXXXXXXLKNYQMIVRSXKXS

SEQ ID NO: 5669 - protein, 42 aa, Artificial Sequence
  Non-cyclic GFR-binding peptide
  MOD_RES (3), (40), (42): Xaa is C or S
VQXRPTQVQLNAISVLYFEIVRKKPIFLKKYRTLEDHLAXKX

SEQ ID NO: 5670 - protein, 33 aa, Artificial Sequence
  Non-cyclic GFR-binding peptide
PTQVQLSATSVLYYEIVRKKPIFLRKHRTLEDH

SEQ ID NO: 5671 - protein, 35 aa, Artificial Sequence
  Non-cyclic GFR-binding peptide
  MOD_RES (1), (2): Xaa is C or S
  MOD_RES (16), (17), (18), (19), (20): Xaa is A or G
  MOD_RES (21), (22), (23), (24): Xaa is A or G or is absent
XXAPTKLSAISVLYLXXXXXXXXXLKNYQNMVVRS

SEQ ID NO: 5672 - protein, 33 aa, Artificial Sequence
  Non-cyclic GFR-binding peptide
  MOD_RES (32), (32): Xaa is C or S
APTQLSATSVLYYDDSSNVILRKHRNMVVRAXG

SEQ ID NO: 5673 - protein, 37 aa, Artificial Sequence
  Non-cyclic GFR-binding peptide
  MOD_RES (5), (6): Xaa is C or S
IPKAXXVPTELSPISMLYKDEYDKVVLKYHYEMVVEG

SEQ ID NO: 5674 - protein, 35 aa, Artificial Sequence
  Non-cyclic GFR-binding peptide
  MOD_RES (15), (16), (17), (18), (19): Xaa is A or G
  MOD_RES (20), (21), (22), (23): Xaa is A or G or is absent
PTQVQLSAISVLYLXXXXXXXXXLKNYQTLEDHLA

SEQ ID NO: 5675 - protein, 39 aa, Artificial Sequence
  Non-cyclic GFR-binding peptide
  MOD_RES (36), (38): Xaa is C or S
  MOD_RES (15), (16), (17), (18), (19): Xaa is A or G
  MOD_RES (20), (21), (22), (23): Xaa is A or G or is absent
PTQVQLSATSVLYYXXXXXXXXXLRKHRTLEDHLAXKXE

SEQ ID NO: 5676 - protein, 34 aa, Artificial Sequence
  Non-cyclic GFR-binding peptide
RPTQVQLNAISVLYFEIVRKKPIFLKKYRTLEDH

SEQ ID NO: 5677 - protein, 38 aa, Artificial Sequence
  Non-cyclic GFR-binding peptide
  MOD_RES (5), (6), (38): Xaa is C or S
VPKAXXAPTKLSPISVLYKDSSNNVILKYHYNMVVKAX

SEQ ID NO: 5678 - protein, 37 aa, Artificial Sequence
  Non-cyclic GFR-binding peptide
  MOD_RES (35), (37): Xaa is C or S
  MOD_RES (14), (15), (16), (17), (18): Xaa is A or G
  MOD_RES (19), (20), (21), (22): Xaa is A or G or is absent
TQVQLSPISVLYKXXXXXXXXXLKYHYTLEDHLAXKX

SEQ ID NO: 5679 - protein, 39 aa, Artificial Sequence
  Non-cyclic GFR-binding peptide
  MOD_RES (5), (6), (38): Xaa is C or S
VPKPXXAPTKLSATSVLYYDDSSNVILRKHRNMVVRSXG

SEQ ID NO: 5680 - protein, 37 aa, Artificial Sequence
  Non-cyclic GFR-binding peptide
  MOD_RES (1), (34), (36): Xaa is C or S
XVPTKLSATSVLYYDDMGVPTLRKHREGMSVAEXGXR

SEQ ID NO: 5681 - protein, 42 aa, Artificial Sequence
  Non-cyclic GFR-binding peptide
  MOD_RES (4), (5), (39), (41): Xaa is C or S
  MOD_RES (19), (20), (21), (22), (23): Xaa is A or G
  MOD_RES (24), (25), (26), (27): Xaa is A or G or is absent
PKPXXAPTKLSAISVLYLXXXXXXXXXLKNYQNMVVRSXGXH

SEQ ID NO: 5682 - protein, 38 aa, Artificial Sequence
  Non-cyclic GFR-binding peptide
  MOD_RES (1), (2), (36), (38): Xaa is C or S
  MOD_RES (16), (17), (18), (19), (20): Xaa is A or G
  MOD_RES (21), (22), (23), (24): Xaa is A or G or is absent
XXVPTELSPISMLYKXXXXXXXXXLKYHYDMVVEGXGX

SEQ ID NO: 5683 - protein, 39 aa, Artificial Sequence
  Non-cyclic GFR-binding peptide
  MOD_RES (3), (4), (38): Xaa is C or S
  MOD_RES (18), (19), (20), (21), (22): Xaa is A or G
  MOD_RES (23), (24), (25), (26): Xaa is A or G or is absent
KAXXAPTKLNAISVLYFXXXXXXXXXLKKYRNMVVKAXG

SEQ ID NO: 5684 - protein, 42 aa, Artificial Sequence
  Non-cyclic GFR-binding peptide
  MOD_RES (6), (7), (41): Xaa is C or S
  MOD_RES (21), (22), (23), (24), (25): Xaa is A or G
  MOD_RES (26), (27), (28), (29): Xaa is A or G or is absent
KIPKAXXVPTELSPISMLYKXXXXXXXXXLKYHYDMVVEGXG

SEQ ID NO: 5685 - protein, 37 aa, Artificial Sequence
  Non-cyclic GFR-binding peptide
  MOD_RES (6), (7): Xaa is C or S
TVPKPXXAPTQLSPISVLYKDDSSNVILKYHYNMVVR

SEQ ID NO: 5686 - protein, 36 aa, Artificial Sequence
  Non-cyclic GFR-binding peptide
  MOD_RES (2), (3), (34), (36): Xaa is C or S
PXXVPQDLSPISILYKVGRTPKVLKYHYMVVKSXKX

SEQ ID NO: 5687 - protein, 34 aa, Artificial Sequence
  Non-cyclic GFR-binding peptide
  MOD_RES (1), (2): Xaa is C or S
  MOD_RES (16), (17), (18), (19), (20): Xaa is A or G
  MOD_RES (21), (22), (23), (24): Xaa is A or G or is absent
XXVSQDLSAISILYLXXXXXXXXXLKNYQMIVKS

SEQ ID NO: 5688 - protein, 44 aa, Artificial Sequence
  Non-cyclic GFR-binding peptide
  MOD_RES (6), (7), (42), (44): Xaa is C or S
  MOD_RES (21), (22), (23), (24), (25): Xaa is A or G
  MOD_RES (26), (27), (28), (29): Xaa is A or G or is absent
KVGKAXXVPTKLNAISVLYFXXXXXXXXXLKKYREGMSVAEXGX

SEQ ID NO: 5689 - protein, 35 aa, Artificial Sequence
  Non-cyclic GFR-binding peptide
  MOD_RES (3), (4), (35): Xaa is C or S
SPXXVSQDLNAISILYFIGKTPKILKKYRMIVKSX

SEQ ID NO: 5690 - protein, 40 aa, Artificial Sequence
  Non-cyclic GFR-binding peptide
  MOD_RES (5), (5): Xaa is C or S
RNVQXRPTQVQLSPISVLYKEIVRKKPIFLKYHYTLEDHL

SEQ ID NO: 5691 - protein, 35 aa, Artificial Sequence
  Non-cyclic GFR-binding peptide
  MOD_RES (1), (33), (35): Xaa is C or S
XVPTELSPISMLYKDENEKVVLKYHYDMVVEGXGX

SEQ ID NO: 5692 - protein, 41 aa, Artificial Sequence
  Non-cyclic GFR-binding peptide
  MOD_RES (5), (6), (40): Xaa is C or S
  MOD_RES (20), (21), (22), (23), (24): Xaa is A or G
  MOD_RES (25), (26), (27), (28): Xaa is A or G or is absent
IPKAXXVPTELNAISMLYFXXXXXXXXXLKKYRDMVVEGXG

SEQ ID NO: 5693 - protein, 39 aa, Artificial Sequence
  Non-cyclic GFR-binding peptide
  MOD_RES (2), (3), (37), (39): Xaa is C or S
  MOD_RES (17), (18), (19), (20), (21): Xaa is A or G
  MOD_RES (22), (23), (24), (25): Xaa is A or G or is absent
AXXVPTELSATSMLYYXXXXXXXXXLRKHREMVVEGXGX

SEQ ID NO: 5694 - protein, 38 aa, Artificial Sequence
  Non-cyclic GFR-binding peptide
  MOD_RES (2), (2): Xaa is C or S
QXRPTQVQLNAISVLYFEIVRKKPIFLKKYRTLEDHLA

SEQ ID NO: 5695 - protein, 35 aa, Artificial Sequence
  Non-cyclic GFR-binding peptide
  MOD_RES (2), (3): Xaa is C or S
  MOD_RES (17), (18), (19), (20), (21): Xaa is A or G
  MOD_RES (22), (23), (24), (25): Xaa is A or G or is absent
PXXVPQALSATSILYYXXXXXXXXXLRKHRMIVRS

SEQ ID NO: 5696 - protein, 36 aa, Artificial Sequence
  Non-cyclic GFR-binding peptide
  MOD_RES (2), (3), (36): Xaa is C or S
  MOD_RES (17), (18), (19), (20), (21): Xaa is A or G
  MOD_RES (22), (23), (24), (25): Xaa is A or G or is absent
PXXVSQDLNAISILYFXXXXXXXXXLKKYRMIVKSX

SEQ ID NO: 5697 - protein, 34 aa, Artificial Sequence
  Non-cyclic GFR-binding peptide
  MOD_RES (2), (3), (34): Xaa is C or S
PXXVSQDLSATSILYYIGKTPKILRKHRMIVKSX

SEQ ID NO: 5698 - protein, 41 aa, Artificial Sequence
  Non-cyclic GFR-binding peptide
  MOD_RES (6), (7), (39), (41): Xaa is C or S
TVPKPXXAPTQLSPISVLYKDDSSNVILKYHYNMVVRAXGX

SEQ ID NO: 5699 - protein, 38 aa, Artificial Sequence
  Non-cyclic GFR-binding peptide
  MOD_RES (2), (3), (35), (37): Xaa is C or S
AXXAPTKLNAISVLYFDSSNNVILKKYRNMVVKAXGXH

SEQ ID NO: 5700 - protein, 34 aa, Artificial Sequence
  Non-cyclic GFR-binding peptide
  MOD_RES (1), (2): Xaa is C or S
  MOD_RES (16), (17), (18), (19), (20): Xaa is A or G
  MOD_RES (21), (22), (23), (24): Xaa is A or G or is absent
XXAPTKLSAISVLYLXXXXXXXXXLKNYQNMVVK

SEQ ID NO: 5701 - protein, 36 aa, Artificial Sequence
  Non-cyclic GFR-binding peptide
  MOD_RES (2), (3), (35): Xaa is C or S
PXXAPTQLSATSVLYYDDSSNVILRKHRNMVVRAXG

SEQ ID NO: 5702 - protein, 40 aa, Artificial Sequence
  Non-cyclic GFR-binding peptide
  MOD_RES (4), (5), (37), (39): Xaa is C or S
PKPXXAPTQLSPISVLYKDDSSNVILKYHYNMVVRAXGXH

SEQ ID NO: 5703 - protein, 38 aa, Artificial Sequence
  Non-cyclic GFR-binding peptide
  MOD_RES (5), (6): Xaa is C or S
  MOD_RES (20), (21), (22), (23), (24): Xaa is A or G
  MOD_RES (25), (26), (27), (28): Xaa is A or G or is absent
SASPXXVSQDLNAISILYFXXXXXXXXXLKKYRMIVKS

SEQ ID NO: 5704 - protein, 34 aa, Artificial Sequence
  Non-cyclic GFR-binding peptide
  MOD_RES (1), (2): Xaa is C or S
  MOD_RES (16), (17), (18), (19), (20): Xaa is A or G
  MOD_RES (21), (22), (23), (24): Xaa is A or G or is absent
XXAPTKLSAISVLYLXXXXXXXXXLKNYQNMVVR

SEQ ID NO: 5705 - protein, 32 aa, Artificial Sequence
  Non-cyclic GFR-binding peptide
  MOD_RES (2), (2): Xaa is C or S
TXAPTKLSAISVLYLDDSSNVILKNYQNMVVR

SEQ ID NO: 5706 - protein, 34 aa, Artificial Sequence
  Non-cyclic GFR-binding peptide
  MOD_RES (3), (4): Xaa is C or S
SPXXVSQDLSPISILYKIGKTPKILKYHYMIVKS

SEQ ID NO: 5707 - protein, 38 aa, Artificial Sequence
  Non-cyclic GFR-binding peptide
  MOD_RES (2), (3), (35), (37): Xaa is C or S
AXXVPTELSPISMLYKDENEKVVLKYHYDMVVEGXGXR

SEQ ID NO: 5708 - protein, 36 aa, Artificial Sequence
  Non-cyclic GFR-binding peptide
  MOD_RES (1), (2), (35): Xaa is C or S
  MOD_RES (16), (17), (18), (19), (20): Xaa is A or G
  MOD_RES (21), (22), (23), (24): Xaa is A or G or is absent
XXVSQDLSATSILYYXXXXXXXXXLRKHRMIVKSXK

SEQ ID NO: 5709 - protein, 41 aa, Artificial Sequence
  Non-cyclic GFR-binding peptide
  MOD_RES (5), (5): Xaa is C or S
RNVQXRPTQVQLSATSVLYYEIVRKKPIFLRKHRTLEDHLA

SEQ ID NO: 5710 - protein, 39 aa, Artificial Sequence
  Non-cyclic GFR-binding peptide
  MOD_RES (4), (5), (37), (39): Xaa is C or S
PKPXXAPTQLSPISVLYKDDSSNVILKYHYNMVVRAXGX

SEQ ID NO: 5711 - protein, 36 aa, Artificial Sequence
  Non-cyclic GFR-binding peptide
  MOD_RES (2), (2): Xaa is C or S
QXRPTQVQLSPISVLYKEIVRKKPIFLKYHYTLEDH

SEQ ID NO: 5712 - protein, 38 aa, Artificial Sequence
  Non-cyclic GFR-binding peptide
  MOD_RES (5), (6), (38): Xaa is C or S
VPKPXXAPTQLSPISVLYKDDSSNVILKYHYNMVVRAX

SEQ ID NO: 5713 - protein, 36 aa, Artificial Sequence
  Non-cyclic GFR-binding peptide
  MOD_RES (4), (5), (36): Xaa is C or S
ASPXXVSQDLNAISILYFIGKTPKILKKYRMIVKSX

SEQ ID NO: 5714 - protein, 37 aa, Artificial Sequence
  Non-cyclic GFR-binding peptide
  MOD_RES (3), (4), (35), (37): Xaa is C or S
SPXXVPQDLSATSILYYVGRTPKVLRKHRMVVKSXKX

SEQ ID NO: 5715 - protein, 40 aa, Artificial Sequence
  Non-cyclic GFR-binding peptide
  MOD_RES (4), (5), (37), (39): Xaa is C or S
PKAXXVPTELSPISMLYKDEYDKVVLKYHYEMVVEGXGXR

SEQ ID NO: 5716 - protein, 44 aa, Artificial Sequence
  Non-cyclic GFR-binding peptide
  MOD_RES (5), (42), (44): Xaa is C or S
  MOD_RES (21), (22), (23), (24), (25): Xaa is A or G
  MOD_RES (26), (27), (28), (29): Xaa is A or G or is absent
RNVQXRPTQVQLSAISVLYLXXXXXXXXXLKNYQTLEDHLAXKX

SEQ ID NO: 5717 - protein, 41 aa, Artificial Sequence
  Non-cyclic GFR-binding peptide
  MOD_RES (4), (41): Xaa is C or S
NVQXRPTQVQLNAISVLYFEIVRKKPIFLKKYRTLEDHLAX

SEQ ID NO: 5718 - protein, 35 aa, Artificial Sequence
  Non-cyclic GFR-binding peptide
  MOD_RES (1), (34): Xaa is C or S
  MOD_RES (15), (16), (17), (18), (19): Xaa is A or G
  MOD_RES (20), (21), (22), (23): Xaa is A or G or is absent
XVSQDLSAISILYLXXXXXXXXXLKNYQMIVKSXK

SEQ ID NO: 5719 - protein, 35 aa, Artificial Sequence
  Non-cyclic GFR-binding peptide
  MOD_RES (1), (34): Xaa is C or S
  MOD_RES (15), (16), (17), (18), (19): Xaa is A or G
  MOD_RES (20), (21), (22), (23): Xaa is A or G or is absent
XVPQDLSATSILYYXXXXXXXXXLRKHRMVVKSXK

SEQ ID NO: 5720 - protein, 35 aa, Artificial Sequence
  Non-cyclic GFR-binding peptide
  MOD_RES (34), (34): Xaa is C or S
  MOD_RES (14), (15), (16), (17), (18): Xaa is A or G
  MOD_RES (19), (20), (21), (22): Xaa is A or G or is absent
VPTELNAISMLYFXXXXXXXXXLKKYREMVVEGXG

SEQ ID NO: 5721 - protein, 36 aa, Artificial Sequence
  Non-cyclic GFR-binding peptide
  MOD_RES (3), (4), (36): Xaa is C or S
KAXXVPTELSPISMLYKDEYDKVVLKYHYEMVVEGX

SEQ ID NO: 5722 - protein, 32 aa, Artificial Sequence
  Non-cyclic GFR-binding peptide
  MOD_RES (1), (1): Xaa is C or S
XAPTKLSPISVLYKDSSNNVILKYHYNMVVKA

SEQ ID NO: 5723 - protein, 37 aa, Artificial Sequence
  Non-cyclic GFR-binding peptide
  MOD_RES (1), (2), (34), (36): Xaa is C or S
XXVPTELSATSMLYYDEYDKVVLRKHREMVVEGXGXR

SEQ ID NO: 5724 - protein, 41 aa, Artificial Sequence
  Non-cyclic GFR-binding peptide
  MOD_RES (5), (5): Xaa is C or S
RNVQXRPTQVQLSAISVLYLEIVRKKPIFLKNYQTLEDHLA

SEQ ID NO: 5725 - protein, 40 aa, Artificial Sequence
  Non-cyclic GFR-binding peptide
  MOD_RES (6), (7): Xaa is C or S
  MOD_RES (21), (22), (23), (24), (25): Xaa is A or G
  MOD_RES (26), (27), (28), (29): Xaa is A or G or is absent
SIPKAXXVPTELSATSMLYYXXXXXXXXXLRKHREMVVEG

SEQ ID NO: 5726 - protein, 35 aa, Artificial Sequence
  Non-cyclic GFR-binding peptide
  MOD_RES (2), (3), (35): Xaa is C or S
PXXAPTQLSATSVLYYDDSSNVILRKHRNMVVRAX

SEQ ID NO: 5727 - protein, 37 aa, Artificial Sequence
  Non-cyclic GFR-binding peptide
  MOD_RES (1), (2), (36): Xaa is C or S
  MOD_RES (16), (17), (18), (19), (20): Xaa is A or G
  MOD_RES (21), (22), (23), (24): Xaa is A or G or is absent
XXVPTELSPISMLYKXXXXXXXXXLKYHYEMVVEGXG

SEQ ID NO: 5728 - protein, 36 aa, Artificial Sequence
  Non-cyclic GFR-binding peptide
  MOD_RES (36), (36): Xaa is C or S
  MOD_RES (15), (16), (17), (18), (19): Xaa is A or G
  MOD_RES (20), (21), (22), (23): Xaa is A or G or is absent
PTQVQLSPISVLYKXXXXXXXXXLKYHYTLEDHLAX

SEQ ID NO: 5729 - protein, 42 aa, Artificial Sequence
  Non-cyclic GFR-binding peptide
  MOD_RES (4), (41): Xaa is C or S
  MOD_RES (20), (21), (22), (23), (24): Xaa is A or G
  MOD_RES (25), (26), (27), (28): Xaa is A or G or is absent
NVQXRPTQVQLSAISVLYLXXXXXXXXXLKNYQTLEDHLAXK

SEQ ID NO: 5730 - protein, 41 aa, Artificial Sequence
  Non-cyclic GFR-binding peptide
  MOD_RES (5), (6), (40): Xaa is C or S
  MOD_RES (20), (21), (22), (23), (24): Xaa is A or G
  MOD_RES (25), (26), (27), (28): Xaa is A or G or is absent
IPKAXXVPTELSATSMLYYXXXXXXXXXLRKHRDMVVEGXG

SEQ ID NO: 5731 - protein, 34 aa, Artificial Sequence
  Non-cyclic GFR-binding peptide
  MOD_RES (1), (32), (34): Xaa is C or S
XVPQALSAISILYLVGRKPKVLKNYQMIVRSXKX

SEQ ID NO: 5732 - protein, 33 aa, Artificial Sequence
  Non-cyclic GFR-binding peptide
  MOD_RES (2), (3): Xaa is C or S
AXXVPTELNAISMLYFDENEKVVLKKYRDMVVE

SEQ ID NO: 5733 - protein, 36 aa, Artificial Sequence
  Non-cyclic GFR-binding peptide
  MOD_RES (3), (4): Xaa is C or S
KAXXVPTKLSATSVLYYDDMGVPTLRKHREGMSVAE

SEQ ID NO: 5734 - protein, 32 aa, Artificial Sequence
  Non-cyclic GFR-binding peptide
  MOD_RES (14), (15), (16), (17), (18): Xaa is A or G
  MOD_RES (19), (20), (21), (22): Xaa is A or G or is absent
TQVQLSPISVLYKXXXXXXXXXLKYHYTLEDH

SEQ ID NO: 5735 - protein, 35 aa, Artificial Sequence
  Non-cyclic GFR-binding peptide
  MOD_RES (4), (5): Xaa is C or S
PKAXXVPTELSATSMLYYDEYDKVVLRKHREMVVE

SEQ ID NO: 5736 - protein, 43 aa, Artificial Sequence
  Non-cyclic GFR-binding peptide
  MOD_RES (6), (7), (40), (42): Xaa is C or S
  MOD_RES (21), (22), (23), (24), (25): Xaa is A or G
  MOD_RES (26), (27), (28), (29): Xaa is A or G or is absent
ASAAPXXVPQALSATSILYYXXXXXXXXXLRKHRMIVRSXKXS

SEQ ID NO: 5737 - protein, 37 aa, Artificial Sequence
  Non-cyclic GFR-binding peptide
  MOD_RES (36), (36): Xaa is C or S
PTQVQLSATSVLYYEIVRKKPIFLRKHRTLEDHLAXK

SEQ ID NO: 5738 - protein, 37 aa, Artificial Sequence
  Non-cyclic GFR-binding peptide
  MOD_RES (2), (36): Xaa is C or S
  MOD_RES (16), (17), (18), (19), (20): Xaa is A or G
  MOD_RES (21), (22), (23), (24): Xaa is A or G or is absent
TXAPTKLSPISVLYKXXXXXXXXXLKYHYNMVVRSXG

SEQ ID NO: 5739 - protein, 39 aa, Artificial Sequence
  Non-cyclic GFR-binding peptide
  MOD_RES (4), (5), (38): Xaa is C or S
  MOD_RES (19), (20), (21), (22), (23): Xaa is A or G
  MOD_RES (24), (25), (26), (27): Xaa is A or G or is absent
ASPXXVPQDLSATSILYYXXXXXXXXXLRKHRMVVKSXK

SEQ ID NO: 5740 - protein, 41 aa, Artificial Sequence
  Non-cyclic GFR-binding peptide
  MOD_RES (2), (39), (41): Xaa is C or S
QXRPTQVQLSPISVLYKEIVRKKPIFLKYHYTLEDHLAXKX

SEQ ID NO: 5741 - protein, 31 aa, Artificial Sequence
  Non-cyclic GFR-binding peptide
  MOD_RES (1), (1): Xaa is C or S
XVPTELNAISMLYFDENEKVVLKKYRDMVVE

SEQ ID NO: 5742 - protein, 33 aa, Artificial Sequence
  Non-cyclic GFR-binding peptide
  MOD_RES (2), (2): Xaa is C or S
TXAPTKLSATSVLYYDDSSNVILRKHRNMVVRS

SEQ ID NO: 5743 - protein, 41 aa, Artificial Sequence
  Non-cyclic GFR-binding peptide
  MOD_RES (4), (5), (39), (41): Xaa is C or S
  MOD_RES (19), (20), (21), (22), (23): Xaa is A or G
  MOD_RES (24), (25), (26), (27): Xaa is A or G or is absent
PKPXXAPTQLSATSVLYYXXXXXXXXXLRKHRNMVVRAXGX

SEQ ID NO: 5744 - protein, 35 aa, Artificial Sequence
  Non-cyclic GFR-binding peptide
  MOD_RES (34), (34): Xaa is C or S
  MOD_RES (14), (15), (16), (17), (18): Xaa is A or G
  MOD_RES (19), (20), (21), (22): Xaa is A or G or is absent
APTQLSPISVLYKXXXXXXXXXLKYHYNMVVRAXG

SEQ ID NO: 5745 - protein, 40 aa, Artificial Sequence
  Non-cyclic GFR-binding peptide
  MOD_RES (4), (5), (37), (39): Xaa is C or S
PKAXXVPTELNAISMLYFDENEKVVLKKYRDMVVEGXGXR

SEQ ID NO: 5746 - protein, 34 aa, Artificial Sequence
  Non-cyclic GFR-binding peptide
  MOD_RES (32), (34): Xaa is C or S
APTKLSATSVLYYDDSSNVILRKHRNMVVRSXGX

SEQ ID NO: 5747 - protein, 32 aa, Artificial Sequence
  Non-cyclic GFR-binding peptide
  MOD_RES (1), (2): Xaa is C or S
XXVSQDLSAISILYLIGKTPKILKNYQMIVKS

SEQ ID NO: 5748 - protein, 33 aa, Artificial Sequence
  Non-cyclic GFR-binding peptide
  MOD_RES (1), (1): Xaa is C or S
  MOD_RES (15), (16), (17), (18), (19): Xaa is A or G
  MOD_RES (20), (21), (22), (23): Xaa is A or G or is absent
XVPTELNAISMLYFXXXXXXXXXLKKYREMVVE

SEQ ID NO: 5749 - protein, 39 aa, Artificial Sequence
  Non-cyclic GFR-binding peptide
  MOD_RES (6), (7): Xaa is C or S
  MOD_RES (21), (22), (23), (24), (25): Xaa is A or G
  MOD_RES (26), (27), (28), (29): Xaa is A or G or is absent
AVPKAXXAPTKLSPISVLYKXXXXXXXXXLKYHYNMVVK

SEQ ID NO: 5750 - protein, 42 aa, Artificial Sequence
  Non-cyclic GFR-binding peptide
  MOD_RES (5), (42): Xaa is C or S
RNVQXRPTQVQLSPISVLYKEIVRKKPIFLKYHYTLEDHLAX

SEQ ID NO: 5751 - protein, 35 aa, Artificial Sequence
  Non-cyclic GFR-binding peptide
  MOD_RES (1), (1): Xaa is C or S
  MOD_RES (15), (16), (17), (18), (19): Xaa is A or G
  MOD_RES (20), (21), (22), (23): Xaa is A or G or is absent
XVPTKLSATSVLYYXXXXXXXXXLRKHREGMSVAE

SEQ ID NO: 5752 - protein, 38 aa, Artificial Sequence
  Non-cyclic GFR-binding peptide
  MOD_RES (6), (7), (38): Xaa is C or S
ASAAPXXVPQALSAISILYLVGRKPKVLKNYQMIVRSX

SEQ ID NO: 5753 - protein, 36 aa, Artificial Sequence
  Non-cyclic GFR-binding peptide
  MOD_RES (1), (35): Xaa is C or S
  MOD_RES (15), (16), (17), (18), (19): Xaa is A or G
  MOD_RES (20), (21), (22), (23): Xaa is A or G or is absent
XAPTKLSATSVLYYXXXXXXXXXLRKHRNMVVRSXG

SEQ ID NO: 5754 - protein, 33 aa, Artificial Sequence
  Non-cyclic GFR-binding peptide
  MOD_RES (1), (1): Xaa is C or S
  MOD_RES (15), (16), (17), (18), (19): Xaa is A or G
  MOD_RES (20), (21), (22), (23): Xaa is A or G or is absent
XVPQDLSAISILYLXXXXXXXXXLKNYQMVVKS

SEQ ID NO: 5755 - protein, 35 aa, Artificial Sequence
  Non-cyclic GFR-binding peptide
  MOD_RES (1), (1): Xaa is C or S
  MOD_RES (15), (16), (17), (18), (19): Xaa is A or G
  MOD_RES (20), (21), (22), (23): Xaa is A or G or is absent
XVPTKLSAISVLYLXXXXXXXXXLKNYQEGMSVAE

SEQ ID NO: 5756 - protein, 32 aa, Artificial Sequence
  Non-cyclic GFR-binding peptide
  MOD_RES (1), (32): Xaa is C or S
XVPQALSAISILYLVGRKPKVLKNYQMIVRSX

SEQ ID NO: 5757 - protein, 41 aa, Artificial Sequence
  Non-cyclic GFR-binding peptide
  MOD_RES (3), (40): Xaa is C or S
  MOD_RES (19), (20), (21), (22), (23): Xaa is A or G
  MOD_RES (24), (25), (26), (27): Xaa is A or G or is absent
VQXRPTQVQLSPISVLYKXXXXXXXXXLKYHYTLEDHLAXK

SEQ ID NO: 5758 - protein, 39 aa, Artificial Sequence
  Non-cyclic GFR-binding peptide
  MOD_RES (6), (7): Xaa is C or S
  MOD_RES (21), (22), (23), (24), (25): Xaa is A or G
  MOD_RES (26), (27), (28), (29): Xaa is A or G or is absent
TVPKPXXAPTQLSPISVLYKXXXXXXXXXLKYHYNMVVR

SEQ ID NO: 5759 - protein, 40 aa, Artificial Sequence
  Non-cyclic GFR-binding peptide
  MOD_RES (2), (3), (38), (40): Xaa is C or S
  MOD_RES (17), (18), (19), (20), (21): Xaa is A or G
  MOD_RES (22), (23), (24), (25): Xaa is A or G or is absent
AXXVPTKLSATSVLYYXXXXXXXXXLRKHREGMSVAEXGX

SEQ ID NO: 5760 - protein, 35 aa, Artificial Sequence
  Non-cyclic GFR-binding peptide
  MOD_RES (1), (2): Xaa is C or S
  MOD_RES (16), (17), (18), (19), (20): Xaa is A or G
  MOD_RES (21), (22), (23), (24): Xaa is A or G or is absent
XXAPTKLSAISVLYLXXXXXXXXXLKNYQNMVVKA

SEQ ID NO: 5761 - protein, 37 aa, Artificial Sequence
  Non-cyclic GFR-binding peptide
  MOD_RES (5), (6): Xaa is C or S
VPKPXXAPTKLSPISVLYKDDSSNVILKYHYNMVVRS

SEQ ID NO: 5762 - protein, 43 aa, Artificial Sequence
  Non-cyclic GFR-binding peptide
  MOD_RES (4), (5), (40), (42): Xaa is C or S
  MOD_RES (19), (20), (21), (22), (23): Xaa is A or G
  MOD_RES (24), (25), (26), (27): Xaa is A or G or is absent
GKAXXVPTKLNAISVLYFXXXXXXXXXLKKYREGMSVAEXGXR

SEQ ID NO: 5763 - protein, 31 aa, Artificial Sequence
  Non-cyclic GFR-binding peptide
  MOD_RES (31), (31): Xaa is C or S
VPQDLSAISILYLVGRTPKVLKNYQMVVKSX

SEQ ID NO: 5764 - protein, 40 aa, Artificial Sequence
  Non-cyclic GFR-binding peptide
  MOD_RES (6), (7), (38), (40): Xaa is C or S
ASAAPXXVPQALSPISILYKVGRKPKVLKYHYMIVRSXKX

SEQ ID NO: 5765 - protein, 38 aa, Artificial Sequence
  Non-cyclic GFR-binding peptide
  MOD_RES (35), (37): Xaa is C or S
  MOD_RES (14), (15), (16), (17), (18): Xaa is A or G
  MOD_RES (19), (20), (21), (22): Xaa is A or G or is absent
VPTKLNAISVLYFXXXXXXXXXLKKYREGMSVAEXGXR

SEQ ID NO: 5766 - protein, 35 aa, Artificial Sequence
  Non-cyclic GFR-binding peptide
  MOD_RES (4), (5): Xaa is C or S
PKAXXVPTELSPISMLYKDEYDKVVLKYHYEMVVE

SEQ ID NO: 5767 - protein, 36 aa, Artificial Sequence
  Non-cyclic GFR-binding peptide
  MOD_RES (3), (4): Xaa is C or S
  MOD_RES (18), (19), (20), (21), (22): Xaa is A or G
  MOD_RES (23), (24), (25), (26): Xaa is A or G or is absent
KAXXVPTELSPISMLYKXXXXXXXXXLKYHYEMVVE

SEQ ID NO: 5768 - protein, 37 aa, Artificial Sequence
  Non-cyclic GFR-binding peptide
  MOD_RES (2), (3), (35), (37): Xaa is C or S
PXXAPTQLSPISVLYKDDSSNVILKYHYNMVVRAXGX

SEQ ID NO: 5769 - protein, 35 aa, Artificial Sequence
  Non-cyclic GFR-binding peptide
  MOD_RES (35), (35): Xaa is C or S
  MOD_RES (14), (15), (16), (17), (18): Xaa is A or G
  MOD_RES (19), (20), (21), (22): Xaa is A or G or is absent
VPTKLNAISVLYFXXXXXXXXXLKKYREGMSVAEX

SEQ ID NO: 5770 - protein, 40 aa, Artificial Sequence
  Non-cyclic GFR-binding peptide
  MOD_RES (3), (4), (37), (39): Xaa is C or S
  MOD_RES (18), (19), (20), (21), (22): Xaa is A or G
  MOD_RES (23), (24), (25), (26): Xaa is A or G or is absent
APXXVPQALSAISILYLXXXXXXXXXLKNYQMIVRSXKXS

SEQ ID NO: 5771 - protein, 38 aa, Artificial Sequence
  Non-cyclic GFR-binding peptide
  MOD_RES (6), (7): Xaa is C or S
YVPKPXXAPTKLSAISVLYLDDSSNVILKNYQNMVVRS

SEQ ID NO: 5772 - protein, 39 aa, Artificial Sequence
  Non-cyclic GFR-binding peptide
  MOD_RES (4), (5), (36), (38): Xaa is C or S
ASPXXVPQDLNAISILYFVGRTPKVLKKYRMVVKSXKXS

SEQ ID NO: 5773 - protein, 39 aa, Artificial Sequence
  Non-cyclic GFR-binding peptide
  MOD_RES (5), (6): Xaa is C or S
  MOD_RES (20), (21), (22), (23), (24): Xaa is A or G
  MOD_RES (25), (26), (27), (28): Xaa is A or G or is absent
IPKAXXVPTELNAISMLYFXXXXXXXXXLKKYREMVVEG

SEQ ID NO: 5774 - protein, 35 aa, Artificial Sequence
  Non-cyclic GFR-binding peptide
  MOD_RES (33), (35): Xaa is C or S
  MOD_RES (14), (15), (16), (17), (18): Xaa is A or G
  MOD_RES (19), (20), (21), (22): Xaa is A or G or is absent
VSQDLSAISILYLXXXXXXXXXLKNYQMIVKSXKX

SEQ ID NO: 5775 - protein, 40 aa, Artificial Sequence
  Non-cyclic GFR-binding peptide
  MOD_RES (5), (6), (37), (39): Xaa is C or S
SASPXXVPQDLSPISILYKVGRTPKVLKYHYMVVKSXKXS

SEQ ID NO: 5776 - protein, 43 aa, Artificial Sequence
  Non-cyclic GFR-binding peptide
  MOD_RES (5), (6), (40), (42): Xaa is C or S
  MOD_RES (20), (21), (22), (23), (24): Xaa is A or G
  MOD_RES (25), (26), (27), (28): Xaa is A or G or is absent
IPKAXXVPTELSATSMLYYXXXXXXXXXLRKHREMVVEGXGXR

SEQ ID NO: 5777 - protein, 40 aa, Artificial Sequence
  Non-cyclic GFR-binding peptide
  MOD_RES (7), (39): Xaa is C or S
HVTKPTXAPTKLSAISVLYLDDSSNVILKNYQNMVVRSXG

SEQ ID NO: 5778 - protein, 33 aa, Artificial Sequence
  Non-cyclic GFR-binding peptide
TQVQLSAISVLYLEIVRKKPIFLKNYQTLEDHL

SEQ ID NO: 5779 - protein, 34 aa, Artificial Sequence
  Non-cyclic GFR-binding peptide
  MOD_RES (2), (3), (34): Xaa is C or S
PXXVPQALSATSILYYVGRKPKVLRKHRMIVRSX

SEQ ID NO: 5780 - protein, 38 aa, Artificial Sequence
  Non-cyclic GFR-binding peptide
  MOD_RES (4), (5): Xaa is C or S
  MOD_RES (19), (20), (21), (22), (23): Xaa is A or G
  MOD_RES (24), (25), (26), (27): Xaa is A or G or is absent
PKAXXVPTELSPISMLYKXXXXXXXXXLKYHYEMVVEG

SEQ ID NO: 5781 - protein, 38 aa, Artificial Sequence
  Non-cyclic GFR-binding peptide
  MOD_RES (4), (5), (37): Xaa is C or S
PKAXXVPTELSPISMLYKDENEKVVLKYHYDMVVEGXG

SEQ ID NO: 5782 - protein, 34 aa, Artificial Sequence
  Non-cyclic GFR-binding peptide
  MOD_RES (32), (34): Xaa is C or S
APTKLSAISVLYLDDSSNVILKNYQNMVVRSXGX

SEQ ID NO: 5783 - protein, 33 aa, Artificial Sequence
  Non-cyclic GFR-binding peptide
PTQVQLSPISVLYKEIVRKKPIFLKYHYTLEDH

SEQ ID NO: 5784 - protein, 38 aa, Artificial Sequence
  Non-cyclic GFR-binding peptide
  MOD_RES (3), (4), (35), (37): Xaa is C or S
SPXXVPQDLSAISILYLVGRTPKVLKNYQMVVKSXKXS

SEQ ID NO: 5785 - protein, 37 aa, Artificial Sequence
  Non-cyclic GFR-binding peptide
  MOD_RES (4), (5): Xaa is C or S
  MOD_RES (19), (20), (21), (22), (23): Xaa is A or G
  MOD_RES (24), (25), (26), (27): Xaa is A or G or is absent
PKAXXVPTELSATSMLYYXXXXXXXXXLRKHRDMVVE

SEQ ID NO: 5786 - protein, 34 aa, Artificial Sequence
  Non-cyclic GFR-binding peptide
  MOD_RES (31), (33): Xaa is C or S
VSQDLSPISILYKIGKTPKILKYHYMIVKSXKXS

SEQ ID NO: 5787 - protein, 34 aa, Artificial Sequence
  Non-cyclic GFR-binding peptide
  MOD_RES (1), (1): Xaa is C or S
  MOD_RES (15), (16), (17), (18), (19): Xaa is A or G
  MOD_RES (20), (21), (22), (23): Xaa is A or G or is absent
XAPTQLSATSVLYYXXXXXXXXXLRKHRNMVVRA

SEQ ID NO: 5788 - protein, 38 aa, Artificial Sequence
  Non-cyclic GFR-binding peptide
  MOD_RES (1), (35), (37): Xaa is C or S
  MOD_RES (15), (16), (17), (18), (19): Xaa is A or G
  MOD_RES (20), (21), (22), (23): Xaa is A or G or is absent
XAPTQLSPISVLYKXXXXXXXXXLKYHYNMVVRAXGXH

SEQ ID NO: 5789 - protein, 38 aa, Artificial Sequence
  Non-cyclic GFR-binding peptide
  MOD_RES (3), (4), (37): Xaa is C or S
  MOD_RES (18), (19), (20), (21), (22): Xaa is A or G
  MOD_RES (23), (24), (25), (26): Xaa is A or G or is absent
SPXXVSQDLSPISILYKXXXXXXXXXLKYHYMIVKSXK

SEQ ID NO: 5790 - protein, 32 aa, Artificial Sequence
  Non-cyclic GFR-binding peptide
  MOD_RES (2), (2): Xaa is C or S
TXAPTKLSPISVLYKDDSSNVILKYHYNMVVR

SEQ ID NO: 5791 - protein, 43 aa, Artificial Sequence
  Non-cyclic GFR-binding peptide
  MOD_RES (5), (42): Xaa is C or S
  MOD_RES (21), (22), (23), (24), (25): Xaa is A or G
  MOD_RES (26), (27), (28), (29): Xaa is A or G or is absent
RNVQXRPTQVQLSPISVLYKXXXXXXXXXLKYHYTLEDHLAXK

SEQ ID NO: 5792 - protein, 35 aa, Artificial Sequence
  Non-cyclic GFR-binding peptide
  MOD_RES (3), (3): Xaa is C or S
  MOD_RES (17), (18), (19), (20), (21): Xaa is A or G
  MOD_RES (22), (23), (24), (25): Xaa is A or G or is absent
PTXAPTKLSPISVLYKXXXXXXXXXLKYHYNMVVR

SEQ ID NO: 5793 - protein, 39 aa, Artificial Sequence
  Non-cyclic GFR-binding peptide
  MOD_RES (37), (39): Xaa is C or S
  MOD_RES (16), (17), (18), (19), (20): Xaa is A or G
  MOD_RES (21), (22), (23), (24): Xaa is A or G or is absent
RPTQVQLNAISVLYFXXXXXXXXXLKKYRTLEDHLAXKX

SEQ ID NO: 5794 - protein, 36 aa, Artificial Sequence
  Non-cyclic GFR-binding peptide
  MOD_RES (1), (35): Xaa is C or S
  MOD_RES (15), (16), (17), (18), (19): Xaa is A or G
  MOD_RES (20), (21), (22), (23): Xaa is A or G or is absent
XAPTKLSAISVLYLXXXXXXXXXLKNYQNMVVKAXG

SEQ ID NO: 5795 - protein, 38 aa, Artificial Sequence
  Non-cyclic GFR-binding peptide
  MOD_RES (3), (4), (37): Xaa is C or S
KAXXVPTKLSAISVLYLDDMGVPTLKNYQEGMSVAEXG

SEQ ID NO: 5796 - protein, 39 aa, Artificial Sequence
  Non-cyclic GFR-binding peptide
  MOD_RES (6), (7), (39): Xaa is C or S
TVPKPXXAPTQLSPISVLYKDDSSNVILKYHYNMVVRAX

SEQ ID NO: 5797 - protein, 38 aa, Artificial Sequence
  Non-cyclic GFR-binding peptide
  MOD_RES (3), (4), (36), (38): Xaa is C or S
KAXXVPTELSPISMLYKDEYDKVVLKYHYEMVVEGXGX

SEQ ID NO: 5798 - protein, 39 aa, Artificial Sequence
  Non-cyclic GFR-binding peptide
  MOD_RES (4), (5): Xaa is C or S
  MOD_RES (19), (20), (21), (22), (23): Xaa is A or G
  MOD_RES (24), (25), (26), (27): Xaa is A or G or is absent
GKAXXVPTKLNAISVLYFXXXXXXXXXLKKYREGMSVAE

SEQ ID NO: 5799 - protein, 33 aa, Artificial Sequence
  Non-cyclic GFR-binding peptide
  MOD_RES (2), (2): Xaa is C or S
TXAPTKLSAISVLYLDDSSNVILKNYQNMVVRS

SEQ ID NO: 5800 - protein, 42 aa, Artificial Sequence
  Non-cyclic GFR-binding peptide
  MOD_RES (6), (40), (42): Xaa is C or S
  MOD_RES (20), (21), (22), (23), (24): Xaa is A or G
  MOD_RES (25), (26), (27), (28): Xaa is A or G or is absent
VTKPTXAPTKLSPISVLYKXXXXXXXXXLKYHYNMVVRSXGX

SEQ ID NO: 5801 - protein, 38 aa, Artificial Sequence
  Non-cyclic GFR-binding peptide
  MOD_RES (4), (5): Xaa is C or S
  MOD_RES (19), (20), (21), (22), (23): Xaa is A or G
  MOD_RES (24), (25), (26), (27): Xaa is A or G or is absent
PKAXXVPTELSATSMLYYXXXXXXXXXLRKHREMVVEG

SEQ ID NO: 5802 - protein, 32 aa, Artificial Sequence
  Non-cyclic GFR-binding peptide
  MOD_RES (31), (31): Xaa is C or S
VPQALSATSILYYVGRKPKVLRKHRMIVRSXK

SEQ ID NO: 5803 - protein, 34 aa, Artificial Sequence
  Non-cyclic GFR-binding peptide
  MOD_RES (1), (1): Xaa is C or S
  MOD_RES (15), (16), (17), (18), (19): Xaa is A or G
  MOD_RES (20), (21), (22), (23): Xaa is A or G or is absent
XAPTQLSPISVLYKXXXXXXXXXLKYHYNMVVRA

SEQ ID NO: 5804 - protein, 34 aa, Artificial Sequence
  Non-cyclic GFR-binding peptide
  MOD_RES (1), (1): Xaa is C or S
  MOD_RES (15), (16), (17), (18), (19): Xaa is A or G
  MOD_RES (20), (21), (22), (23): Xaa is A or G or is absent
XAPTKLSAISVLYLXXXXXXXXXLKNYQNMVVKA

SEQ ID NO: 5805 - protein, 36 aa, Artificial Sequence
  Non-cyclic GFR-binding peptide
  MOD_RES (1), (35): Xaa is C or S
  MOD_RES (15), (16), (17), (18), (19): Xaa is A or G
  MOD_RES (20), (21), (22), (23): Xaa is A or G or is absent
XVPTELSATSMLYYXXXXXXXXXLRKHRDMVVEGXG

SEQ ID NO: 5806 - protein, 44 aa, Artificial Sequence
  Non-cyclic GFR-binding peptide
  MOD_RES (5), (42), (44): Xaa is C or S
  MOD_RES (21), (22), (23), (24), (25): Xaa is A or G
  MOD_RES (26), (27), (28), (29): Xaa is A or G or is absent
RNVQXRPTQVQLSPISVLYKXXXXXXXXXLKYHYTLEDHLAXKX

SEQ ID NO: 5807 - protein, 39 aa, Artificial Sequence
  Non-cyclic GFR-binding peptide
  MOD_RES (5), (6), (37), (39): Xaa is C or S
SASPXXVSQDLSAISILYLIGKTPKILKNYQMIVKSXKX

SEQ ID NO: 5808 - protein, 37 aa, Artificial Sequence
  Non-cyclic GFR-binding peptide
  MOD_RES (2), (36): Xaa is C or S
  MOD_RES (16), (17), (18), (19), (20): Xaa is A or G
  MOD_RES (21), (22), (23), (24): Xaa is A or G or is absent
TXAPTKLSAISVLYLXXXXXXXXXLKNYQNMVVRSXG

SEQ ID NO: 5809 - protein, 33 aa, Artificial Sequence
  Non-cyclic GFR-binding peptide
PTQVQLNAISVLYFEIVRKKPIFLKKYRTLEDH

SEQ ID NO: 5810 - protein, 35 aa, Artificial Sequence
  Non-cyclic GFR-binding peptide
  MOD_RES (2), (34): Xaa is C or S
TXAPTKLSATSVLYYDDSSNVILRKHRNMVVRSXG

SEQ ID NO: 5811 - protein, 36 aa, Artificial Sequence
  Non-cyclic GFR-binding peptide
  MOD_RES (3), (4), (36): Xaa is C or S
KPXXAPTQLSPISVLYKDDSSNVILKYHYNMVVRAX

SEQ ID NO: 5812 - protein, 39 aa, Artificial Sequence
  Non-cyclic GFR-binding peptide
  MOD_RES (2), (39): Xaa is C or S
  MOD_RES (18), (19), (20), (21), (22): Xaa is A or G
  MOD_RES (23), (24), (25), (26): Xaa is A or G or is absent
QXRPTQVQLNAISVLYFXXXXXXXXXLKKYRTLEDHLAX

SEQ ID NO: 5813 - protein, 39 aa, Artificial Sequence
  Non-cyclic GFR-binding peptide
  MOD_RES (2), (36), (38): Xaa is C or S
  MOD_RES (16), (17), (18), (19), (20): Xaa is A or G
  MOD_RES (21), (22), (23), (24): Xaa is A or G or is absent
TXAPTKLSAISVLYLXXXXXXXXXLKNYQNMVVRSXGXH

SEQ ID NO: 5814 - protein, 36 aa, Artificial Sequence
  Non-cyclic GFR-binding peptide
  MOD_RES (2), (3): Xaa is C or S
  MOD_RES (17), (18), (19), (20), (21): Xaa is A or G
  MOD_RES (22), (23), (24), (25): Xaa is A or G or is absent
PXXAPTKLSPISVLYKXXXXXXXXXLKYHYNMVVRS

SEQ ID NO: 5815 - protein, 34 aa, Artificial Sequence
  Non-cyclic GFR-binding peptide
  MOD_RES (2), (3): Xaa is C or S
AXXVPTELSATSMLYYDEYDKVVLRKHREMVVEG

SEQ ID NO: 5816 - protein, 38 aa, Artificial Sequence
  Non-cyclic GFR-binding peptide
  MOD_RES (37), (37): Xaa is C or S
  MOD_RES (16), (17), (18), (19), (20): Xaa is A or G
  MOD_RES (21), (22), (23), (24): Xaa is A or G or is absent
RPTQVQLSAISVLYLXXXXXXXXXLKNYQTLEDHLAXK

SEQ ID NO: 5817 - protein, 38 aa, Artificial Sequence
  Non-cyclic GFR-binding peptide
  MOD_RES (4), (5), (38): Xaa is C or S
  MOD_RES (19), (20), (21), (22), (23): Xaa is A or G
  MOD_RES (24), (25), (26), (27): Xaa is A or G or is absent
ASPXXVSQDLSAISILYLXXXXXXXXXLKNYQMIVKSX

SEQ ID NO: 5818 - protein, 39 aa, Artificial Sequence
  Non-cyclic GFR-binding peptide
  MOD_RES (5), (5): Xaa is C or S
RNVQXRPTQVQLSPISVLYKEIVRKKPIFLKYHYTLEDH

SEQ ID NO: 5819 - protein, 33 aa, Artificial Sequence
  Non-cyclic GFR-binding peptide
  MOD_RES (32), (32): Xaa is C or S
APTKLNAISVLYFDSSNNVILKKYRNMVVKAXG

SEQ ID NO: 5820 - protein, 36 aa, Artificial Sequence
  Non-cyclic GFR-binding peptide
  MOD_RES (1), (2), (34), (36): Xaa is C or S
XXAPTKLNAISVLYFDSSNNVILKKYRNMVVKAXGX

SEQ ID NO: 5821 - protein, 37 aa, Artificial Sequence
  Non-cyclic GFR-binding peptide
  MOD_RES (4), (5), (36): Xaa is C or S
ASPXXVSQDLNAISILYFIGKTPKILKKYRMIVKSXK

SEQ ID NO: 5822 - protein, 43 aa, Artificial Sequence
  Non-cyclic GFR-binding peptide
  MOD_RES (6), (7), (41), (43): Xaa is C or S
  MOD_RES (21), (22), (23), (24), (25): Xaa is A or G
  MOD_RES (26), (27), (28), (29): Xaa is A or G or is absent
AVPKAXXAPTKLSAISVLYLXXXXXXXXXLKNYQNMVVKAXGX

SEQ ID NO: 5823 - protein, 41 aa, Artificial Sequence
  Non-cyclic GFR-binding peptide
  MOD_RES (4), (5), (39), (41): Xaa is C or S
  MOD_RES (19), (20), (21), (22), (23): Xaa is A or G
  MOD_RES (24), (25), (26), (27): Xaa is A or G or is absent
PKAXXAPTKLNAISVLYFXXXXXXXXXLKKYRNMVVKAXGX

SEQ ID NO: 5824 - protein, 41 aa, Artificial Sequence
  Non-cyclic GFR-binding peptide
  MOD_RES (5), (6), (38), (40): Xaa is C or S
IPKAXXVPTELNAISMLYFDENEKVVLKKYRDMVVEGXGXR

SEQ ID NO: 5825 - protein, 41 aa, Artificial Sequence
  Non-cyclic GFR-binding peptide
  MOD_RES (3), (4), (38), (40): Xaa is C or S
  MOD_RES (18), (19), (20), (21), (22): Xaa is A or G
  MOD_RES (23), (24), (25), (26): Xaa is A or G or is absent
KAXXAPTKLSAISVLYLXXXXXXXXXLKNYQNMVVKAXGXH

SEQ ID NO: 5826 - protein, 35 aa, Artificial Sequence
  Non-cyclic GFR-binding peptide
  MOD_RES (1), (2), (34): Xaa is C or S
XXVPTELSATSMLYYDENEKVVLRKHRDMVVEGXG

SEQ ID NO: 5827 - protein, 35 aa, Artificial Sequence
  Non-cyclic GFR-binding peptide
  MOD_RES (3), (4): Xaa is C or S
KPXXAPTQLSATSVLYYDDSSNVILRKHRNMVVRA

SEQ ID NO: 5828 - protein, 38 aa, Artificial Sequence
  Non-cyclic GFR-binding peptide
  MOD_RES (3), (4), (37): Xaa is C or S
  MOD_RES (18), (19), (20), (21), (22): Xaa is A or G
  MOD_RES (23), (24), (25), (26): Xaa is A or G or is absent
SPXXVPQDLSAISILYLXXXXXXXXXLKNYQMVVKSXK

SEQ ID NO: 5829 - protein, 34 aa, Artificial Sequence
  Non-cyclic GFR-binding peptide
  MOD_RES (2), (34): Xaa is C or S
TXAPTKLSAISVLYLDDSSNVILKNYQNMVVRSX

SEQ ID NO: 5830 - protein, 41 aa, Artificial Sequence
  Non-cyclic GFR-binding peptide
  MOD_RES (3), (4), (38), (40): Xaa is C or S
  MOD_RES (18), (19), (20), (21), (22): Xaa is A or G
  MOD_RES (23), (24), (25), (26): Xaa is A or G or is absent
KAXXVPTELNAISMLYFXXXXXXXXXLKKYREMVVEGXGXR

SEQ ID NO: 5831 - protein, 35 aa, Artificial Sequence
  Non-cyclic GFR-binding peptide
  MOD_RES (1), (2), (34): Xaa is C or S
XXAPTKLSPISVLYKDDSSNVILKYHYNMVVRSXG

SEQ ID NO: 5832 - protein, 36 aa, Artificial Sequence
  Non-cyclic GFR-binding peptide
  MOD_RES (4), (5): Xaa is C or S
PKAXXVPTELNAISMLYFDEYDKVVLKKYREMVVEG

SEQ ID NO: 5833 - protein, 33 aa, Artificial Sequence
  Non-cyclic GFR-binding peptide
  MOD_RES (2), (3): Xaa is C or S
PXXAPTQLSPISVLYKDDSSNVILKYHYNMVVR

SEQ ID NO: 5834 - protein, 35 aa, Artificial Sequence
  Non-cyclic GFR-binding peptide
  MOD_RES (33), (35): Xaa is C or S
  MOD_RES (14), (15), (16), (17), (18): Xaa is A or G
  MOD_RES (19), (20), (21), (22): Xaa is A or G or is absent
VPQALSPISILYKXXXXXXXXXLKYHYMIVRSXKX

SEQ ID NO: 5835 - protein, 37 aa, Artificial Sequence
  Non-cyclic GFR-binding peptide
  MOD_RES (34), (36): Xaa is C or S
  MOD_RES (14), (15), (16), (17), (18): Xaa is A or G
  MOD_RES (19), (20), (21), (22): Xaa is A or G or is absent
APTKLSAISVLYLXXXXXXXXXLKNYQNMVVRSXGXH

SEQ ID NO: 5836 - protein, 34 aa, Artificial Sequence
  Non-cyclic GFR-binding peptide
  MOD_RES (31), (33): Xaa is C or S
VPQALNAISILYFVGRKPKVLKKYRMIVRSXKXS

SEQ ID NO: 5837 - protein, 38 aa, Artificial Sequence
  Non-cyclic GFR-binding peptide
  MOD_RES (5), (6): Xaa is C or S
VGKAXXVPTKLSAISVLYLDDMGVPTLKNYQEGMSVAE

SEQ ID NO: 5838 - protein, 36 aa, Artificial Sequence
  Non-cyclic GFR-binding peptide
  MOD_RES (1), (34), (36): Xaa is C or S
  MOD_RES (15), (16), (17), (18), (19): Xaa is A or G
  MOD_RES (20), (21), (22), (23): Xaa is A or G or is absent
XVSQDLSATSILYYXXXXXXXXXLRKHRMIVKSXKX

SEQ ID NO: 5839 - protein, 38 aa, Artificial Sequence
  Non-cyclic GFR-binding peptide
  MOD_RES (3), (4), (36), (38): Xaa is C or S
KAXXAPTKLSPISVLYKDSSNNVILKYHYNMVVKAXGX

SEQ ID NO: 5840 - protein, 36 aa, Artificial Sequence
  Non-cyclic GFR-binding peptide
  MOD_RES (1), (33), (35): Xaa is C or S
XVPTELSATSMLYYDEYDKVVLRKHREMVVEGXGXR

SEQ ID NO: 5841 - protein, 40 aa, Artificial Sequence
  Non-cyclic GFR-binding peptide
  MOD_RES (5), (6), (38), (40): Xaa is C or S
IPKAXXVPTELSPISMLYKDENEKVVLKYHYDMVVEGXGX

SEQ ID NO: 5842 - protein, 36 aa, Artificial Sequence
  Non-cyclic GFR-binding peptide
  MOD_RES (1), (34), (36): Xaa is C or S
  MOD_RES (15), (16), (17), (18), (19): Xaa is A or G
  MOD_RES (20), (21), (22), (23): Xaa is A or G or is absent
XVPQALSPISILYKXXXXXXXXXLKYHYMIVRSXKX

SEQ ID NO: 5843 - protein, 34 aa, Artificial Sequence
  Non-cyclic GFR-binding peptide
  MOD_RES (2), (3): Xaa is C or S
PXXAPTQLSPISVLYKDDSSNVILKYHYNMVVRA

SEQ ID NO: 5844 - protein, 39 aa, Artificial Sequence
  Non-cyclic GFR-binding peptide
  MOD_RES (4), (5), (38): Xaa is C or S
GKAXXVPTKLSATSVLYYDDMGVPTLRKHREGMSVAEXG

SEQ ID NO: 5845 - protein, 35 aa, Artificial Sequence
  Non-cyclic GFR-binding peptide
  MOD_RES (2), (3), (35): Xaa is C or S
AXXVPTELNAISMLYFDEYDKVVLKKYREMVVEGX

SEQ ID NO: 5846 - protein, 34 aa, Artificial Sequence
  Non-cyclic GFR-binding peptide
  MOD_RES (33), (33): Xaa is C or S
  MOD_RES (14), (15), (16), (17), (18): Xaa is A or G
  MOD_RES (19), (20), (21), (22): Xaa is A or G or is absent
VPQDLSATSILYYXXXXXXXXXLRKHRMVVKSXK

SEQ ID NO: 5847 - protein, 39 aa, Artificial Sequence
  Non-cyclic GFR-binding peptide
  MOD_RES (6), (7): Xaa is C or S
  MOD_RES (21), (22), (23), (24), (25): Xaa is A or G
  MOD_RES (26), (27), (28), (29): Xaa is A or G or is absent
TVPKPXXAPTQLSATSVLYYXXXXXXXXXLRKHRNMVVR

SEQ ID NO: 5848 - protein, 39 aa, Artificial Sequence
  Non-cyclic GFR-binding peptide
  MOD_RES (5), (6), (37), (39): Xaa is C or S
SASPXXVPQDLSAISILYLVGRTPKVLKNYQMVVKSXKX

SEQ ID NO: 5849 - protein, 35 aa, Artificial Sequence
  Non-cyclic GFR-binding peptide
  MOD_RES (33), (35): Xaa is C or S
  MOD_RES (14), (15), (16), (17), (18): Xaa is A or G
  MOD_RES (19), (20), (21), (22): Xaa is A or G or is absent
VSQDLSATSILYYXXXXXXXXXLRKHRMIVKSXKX

SEQ ID NO: 5850 - protein, 39 aa, Artificial Sequence
  Non-cyclic GFR-binding peptide
  MOD_RES (4), (5), (39): Xaa is C or S
  MOD_RES (19), (20), (21), (22), (23): Xaa is A or G
  MOD_RES (24), (25), (26), (27): Xaa is A or G or is absent
PKAXXAPTKLSPISVLYKXXXXXXXXXLKYHYNMVVKAX

SEQ ID NO: 5851 - protein, 36 aa, Artificial Sequence
  Non-cyclic GFR-binding peptide
  MOD_RES (33), (35): Xaa is C or S
  MOD_RES (14), (15), (16), (17), (18): Xaa is A or G
  MOD_RES (19), (20), (21), (22): Xaa is A or G or is absent
VPQALSATSILYYXXXXXXXXXLRKHRMIVRSXKXS

SEQ ID NO: 5852 - protein, 42 aa, Artificial Sequence
  Non-cyclic GFR-binding peptide
  MOD_RES (4), (5), (39), (41): Xaa is C or S
  MOD_RES (19), (20), (21), (22), (23): Xaa is A or G
  MOD_RES (24), (25), (26), (27): Xaa is A or G or is absent
PKPXXAPTKLSPISVLYKXXXXXXXXXLKYHYNMVVRSXGXH

SEQ ID NO: 5853 - protein, 38 aa, Artificial Sequence
  Non-cyclic GFR-binding peptide
  MOD_RES (2), (3), (36), (38): Xaa is C or S
  MOD_RES (17), (18), (19), (20), (21): Xaa is A or G
  MOD_RES (22), (23), (24), (25): Xaa is A or G or is absent
PXXVPQALNAISILYFXXXXXXXXXLKKYRMIVRSXKX

SEQ ID NO: 5854 - protein, 34 aa, Artificial Sequence
  Non-cyclic GFR-binding peptide
PTQVQLNAISVLYFEIVRKKPIFLKKYRTLEDHL

SEQ ID NO: 5855 - protein, 42 aa, Artificial Sequence
  Non-cyclic GFR-binding peptide
  MOD_RES (5), (6), (40), (42): Xaa is C or S
  MOD_RES (20), (21), (22), (23), (24): Xaa is A or G
  MOD_RES (25), (26), (27), (28): Xaa is A or G or is absent
IPKAXXVPTELSPISMLYKXXXXXXXXXLKYHYDMVVEGXGX

SEQ ID NO: 5856 - protein, 36 aa, Artificial Sequence
  Non-cyclic GFR-binding peptide
  MOD_RES (34), (36): Xaa is C or S
  MOD_RES (14), (15), (16), (17), (18): Xaa is A or G
  MOD_RES (19), (20), (21), (22): Xaa is A or G or is absent
APTKLNAISVLYFXXXXXXXXXLKKYRNMVVKAXGX

SEQ ID NO: 5857 - protein, 37 aa, Artificial Sequence
  Non-cyclic GFR-binding peptide
  MOD_RES (3), (3): Xaa is C or S
  MOD_RES (19), (20), (21), (22), (23): Xaa is A or G
  MOD_RES (24), (25), (26), (27): Xaa is A or G or is absent
VQXRPTQVQLSAISVLYLXXXXXXXXXLKNYQTLEDH

SEQ ID NO: 5858 - protein, 37 aa, Artificial Sequence
  Non-cyclic GFR-binding peptide
  MOD_RES (35), (37): Xaa is C or S
  MOD_RES (14), (15), (16), (17), (18): Xaa is A or G
  MOD_RES (19), (20), (21), (22): Xaa is A or G or is absent
TQVQLSAISVLYLXXXXXXXXXLKNYQTLEDHLAXKX

SEQ ID NO: 5859 - protein, 36 aa, Artificial Sequence
  Non-cyclic GFR-binding peptide
  MOD_RES (4), (5), (36): Xaa is C or S
ASPXXVSQDLSAISILYLIGKTPKILKNYQMIVKSX

SEQ ID NO: 5860 - protein, 38 aa, Artificial Sequence
  Non-cyclic GFR-binding peptide
  MOD_RES (4), (5), (38): Xaa is C or S
  MOD_RES (19), (20), (21), (22), (23): Xaa is A or G
  MOD_RES (24), (25), (26), (27): Xaa is A or G or is absent
ASPXXVSQDLSATSILYYXXXXXXXXXLRKHRMIVKSX

SEQ ID NO: 5861 - protein, 38 aa, Artificial Sequence
  Non-cyclic GFR-binding peptide
  MOD_RES (3), (4), (35), (37): Xaa is C or S
SPXXVSQDLSPISILYKIGKTPKILKYHYMIVKSXKXS

SEQ ID NO: 5862 - protein, 43 aa, Artificial Sequence
  Non-cyclic GFR-binding peptide
  MOD_RES (5), (42): Xaa is C or S
RNVQXRPTQVQLNAISVLYFEIVRKKPIFLKKYRTLEDHLAXK

SEQ ID NO: 5863 - protein, 37 aa, Artificial Sequence
  Non-cyclic GFR-binding peptide
  MOD_RES (1), (2), (35), (37): Xaa is C or S
  MOD_RES (16), (17), (18), (19), (20): Xaa is A or G
  MOD_RES (21), (22), (23), (24): Xaa is A or G or is absent
XXVSQDLSAISILYLXXXXXXXXXLKNYQMIVKSXKX

SEQ ID NO: 5864 - protein, 33 aa, Artificial Sequence
  Non-cyclic GFR-binding peptide
  MOD_RES (2), (3): Xaa is C or S
PXXAPTQLSAISVLYLDDSSNVILKNYQNMVVR

SEQ ID NO: 5865 - protein, 42 aa, Artificial Sequence
  Non-cyclic GFR-binding peptide
  MOD_RES (7), (39), (41): Xaa is C or S
HVTKPTXAPTKLSAISVLYLDDSSNVILKNYQNMVVRSXGXH

SEQ ID NO: 5866 - protein, 41 aa, Artificial Sequence
  Non-cyclic GFR-binding peptide
  MOD_RES (6), (40): Xaa is C or S
  MOD_RES (20), (21), (22), (23), (24): Xaa is A or G
  MOD_RES (25), (26), (27), (28): Xaa is A or G or is absent
VTKPTXAPTKLSAISVLYLXXXXXXXXXLKNYQNMVVRSXG

SEQ ID NO: 5867 - protein, 36 aa, Artificial Sequence
  Non-cyclic GFR-binding peptide
  MOD_RES (1), (1): Xaa is C or S
XRPTQVQLSATSVLYYEIVRKKPIFLRKHRTLEDHL

SEQ ID NO: 5868 - protein, 39 aa, Artificial Sequence
  Non-cyclic GFR-binding peptide
  MOD_RES (2), (39): Xaa is C or S
QXRPTQVQLNAISVLYFEIVRKKPIFLKKYRTLEDHLAX

SEQ ID NO: 5869 - protein, 34 aa, Artificial Sequence
  Non-cyclic GFR-binding peptide
  MOD_RES (31), (33): Xaa is C or S
VPQDLSATSILYYVGRTPKVLRKHRMVVKSXKXS

SEQ ID NO: 5870 - protein, 34 aa, Artificial Sequence
  Non-cyclic GFR-binding peptide
  MOD_RES (1), (2), (34): Xaa is C or S
XXAPTQLSAISVLYLDDSSNVILKNYQNMVVRAX

SEQ ID NO: 5871 - protein, 36 aa, Artificial Sequence
  Non-cyclic GFR-binding peptide
  MOD_RES (4), (5): Xaa is C or S
PKPXXAPTKLSATSVLYYDDSSNVILRKHRNMVVRS

SEQ ID NO: 5872 - protein, 36 aa, Artificial Sequence
  Non-cyclic GFR-binding peptide
  MOD_RES (2), (3), (36): Xaa is C or S
  MOD_RES (17), (18), (19), (20), (21): Xaa is A or G
  MOD_RES (22), (23), (24), (25): Xaa is A or G or is absent
PXXVPQDLSATSILYYXXXXXXXXXLRKHRMVVKSX

SEQ ID NO: 5873 - protein, 43 aa, Artificial Sequence
  Non-cyclic GFR-binding peptide
  MOD_RES (6), (7), (41), (43): Xaa is C or S
  MOD_RES (21), (22), (23), (24), (25): Xaa is A or G
  MOD_RES (26), (27), (28), (29): Xaa is A or G or is absent
AVPKAXXAPTKLSPISVLYKXXXXXXXXXLKYHYNMVVKAXGX

SEQ ID NO: 5874 - protein, 35 aa, Artificial Sequence
  Non-cyclic GFR-binding peptide
  MOD_RES (1), (32), (34): Xaa is C or S
XVPQDLSATSILYYVGRTPKVLRKHRMVVKSXKXS

SEQ ID NO: 5875 - protein, 36 aa, Artificial Sequence
  Non-cyclic GFR-binding peptide
  MOD_RES (3), (35): Xaa is C or S
PTXAPTKLSPISVLYKDDSSNVILKYHYNMVVRSXG

SEQ ID NO: 5876 - protein, 32 aa, Artificial Sequence
  Non-cyclic GFR-binding peptide
  MOD_RES (14), (15), (16), (17), (18): Xaa is A or G
  MOD_RES (19), (20), (21), (22): Xaa is A or G or is absent
APTKLNAISVLYFXXXXXXXXXLKKYRNMVVK

SEQ ID NO: 5877 - protein, 39 aa, Artificial Sequence
  Non-cyclic GFR-binding peptide
  MOD_RES (1), (2), (37), (39): Xaa is C or S
  MOD_RES (16), (17), (18), (19), (20): Xaa is A or G
  MOD_RES (21), (22), (23), (24): Xaa is A or G or is absent
XXVPTKLSATSVLYYXXXXXXXXXLRKHREGMSVAEXGX

SEQ ID NO: 5878 - protein, 33 aa, Artificial Sequence
  Non-cyclic GFR-binding peptide
  MOD_RES (33), (33): Xaa is C or S
  MOD_RES (14), (15), (16), (17), (18): Xaa is A or G
  MOD_RES (19), (20), (21), (22): Xaa is A or G or is absent
VSQDLNAISILYFXXXXXXXXXLKKYRMIVKSX

SEQ ID NO: 5879 - protein, 43 aa, Artificial Sequence
  Non-cyclic GFR-binding peptide
  MOD_RES (5), (6), (40), (42): Xaa is C or S
  MOD_RES (20), (21), (22), (23), (24): Xaa is A or G
  MOD_RES (25), (26), (27), (28): Xaa is A or G or is absent
VPKPXXAPTKLSATSVLYYXXXXXXXXXLRKHRNMVVRSXGXH

SEQ ID NO: 5880 - protein, 35 aa, Artificial Sequence
  Non-cyclic GFR-binding peptide
  MOD_RES (2), (3): Xaa is C or S
  MOD_RES (17), (18), (19), (20), (21): Xaa is A or G
  MOD_RES (22), (23), (24), (25): Xaa is A or G or is absent
PXXVPQALNAISILYFXXXXXXXXXLKKYRMIVRS

SEQ ID NO: 5881 - protein, 38 aa, Artificial Sequence
  Non-cyclic GFR-binding peptide
  MOD_RES (37), (37): Xaa is C or S
RPTQVQLNAISVLYFEIVRKKPIFLKKYRTLEDHLAXK

SEQ ID NO: 5882 - protein, 38 aa, Artificial Sequence
  Non-cyclic GFR-binding peptide
  MOD_RES (4), (4): Xaa is C or S
NVQXRPTQVQLSPISVLYKEIVRKKPIFLKYHYTLEDH

SEQ ID NO: 5883 - protein, 37 aa, Artificial Sequence
  Non-cyclic GFR-binding peptide
  MOD_RES (37), (37): Xaa is C or S
RPTQVQLSPISVLYKEIVRKKPIFLKYHYTLEDHLAX

SEQ ID NO: 5884 - protein, 40 aa, Artificial Sequence
  Non-cyclic GFR-binding peptide
  MOD_RES (5), (6), (37), (39): Xaa is C or S
SASPXXVPQDLSAISILYLVGRTPKVLKNYQMVVKSXKXS

SEQ ID NO: 5885 - protein, 39 aa, Artificial Sequence
  Non-cyclic GFR-binding peptide
  MOD_RES (4), (5), (37), (39): Xaa is C or S
PKAXXVPTELSATSMLYYDEYDKVVLRKHREMVVEGXGX

SEQ ID NO: 5886 - protein, 36 aa, Artificial Sequence
  Non-cyclic GFR-binding peptide
  MOD_RES (2), (3), (36): Xaa is C or S
  MOD_RES (17), (18), (19), (20), (21): Xaa is A or G
  MOD_RES (22), (23), (24), (25): Xaa is A or G or is absent
PXXVPQDLSAISILYLXXXXXXXXXLKNYQMVVKSX

SEQ ID NO: 5887 - protein, 41 aa, Artificial Sequence
  Non-cyclic GFR-binding peptide
  MOD_RES (6), (7), (39), (41): Xaa is C or S
TVPKPXXAPTQLSAISVLYLDDSSNVILKNYQNMVVRAXGX

SEQ ID NO: 5888 - protein, 33 aa, Artificial Sequence
  Non-cyclic GFR-binding peptide
  MOD_RES (1), (33): Xaa is C or S
XAPTQLSAISVLYLDDSSNVILKNYQNMVVRAX

SEQ ID NO: 5889 - protein, 42 aa, Artificial Sequence
  Non-cyclic GFR-binding peptide
  MOD_RES (5), (6), (39), (41): Xaa is C or S
  MOD_RES (20), (21), (22), (23), (24): Xaa is A or G
  MOD_RES (25), (26), (27), (28): Xaa is A or G or is absent
SAAPXXVPQALSATSILYYXXXXXXXXXLRKHRMIVRSXKXS

SEQ ID NO: 5890 - protein, 33 aa, Artificial Sequence
  Non-cyclic GFR-binding peptide
  MOD_RES (2), (3): Xaa is C or S
PXXVPQDLSATSILYYVGRTPKVLRKHRMVVKS

SEQ ID NO: 5891 - protein, 35 aa, Artificial Sequence
  Non-cyclic GFR-binding peptide
  MOD_RES (1), (2): Xaa is C or S
  MOD_RES (16), (17), (18), (19), (20): Xaa is A or G
  MOD_RES (21), (22), (23), (24): Xaa is A or G or is absent
XXVPTELSPISMLYKXXXXXXXXXLKYHYDMVVEG

SEQ ID NO: 5892 - protein, 41 aa, Artificial Sequence
  Non-cyclic GFR-binding peptide
  MOD_RES (6), (7), (38), (40): Xaa is C or S
ASASPXXVSQDLSPISILYKIGKTPKILKYHYMIVKSXKXS

SEQ ID NO: 5893 - protein, 31 aa, Artificial Sequence
  Non-cyclic GFR-binding peptide
  MOD_RES (1), (1): Xaa is C or S
XVPTELNAISMLYFDEYDKVVLKKYREMVVE

SEQ ID NO: 5894 - protein, 37 aa, Artificial Sequence
  Non-cyclic GFR-binding peptide
  MOD_RES (6), (6): Xaa is C or S
VTKPTXAPTKLSAISVLYLDDSSNVILKNYQNMVVRS

SEQ ID NO: 5895 - protein, 35 aa, Artificial Sequence
  Non-cyclic GFR-binding peptide
  MOD_RES (2), (2): Xaa is C or S
  MOD_RES (16), (17), (18), (19), (20): Xaa is A or G
  MOD_RES (21), (22), (23), (24): Xaa is A or G or is absent
TXAPTKLSAISVLYLXXXXXXXXXLKNYQNMVVRS

SEQ ID NO: 5896 - protein, 36 aa, Artificial Sequence
  Non-cyclic GFR-binding peptide
  MOD_RES (3), (4): Xaa is C or S
  MOD_RES (18), (19), (20), (21), (22): Xaa is A or G
  MOD_RES (23), (24), (25), (26): Xaa is A or G or is absent
KAXXVPTELSATSMLYYXXXXXXXXXLRKHREMVVE

SEQ ID NO: 5897 - protein, 35 aa, Artificial Sequence
  Non-cyclic GFR-binding peptide
PTQVQLSAISVLYLEIVRKKPIFLKNYQTLEDHLA

SEQ ID NO: 5898 - protein, 41 aa, Artificial Sequence
  Non-cyclic GFR-binding peptide
  MOD_RES (6), (7), (40): Xaa is C or S
  MOD_RES (21), (22), (23), (24), (25): Xaa is A or G
  MOD_RES (26), (27), (28), (29): Xaa is A or G or is absent
ASAAPXXVPQALSAISILYLXXXXXXXXXLKNYQMIVRSXK

SEQ ID NO: 5899 - protein, 37 aa, Artificial Sequence
  Non-cyclic GFR-binding peptide
  MOD_RES (36), (36): Xaa is C or S
PTQVQLSAISVLYLEIVRKKPIFLKNYQTLEDHLAXK

SEQ ID NO: 5900 - protein, 39 aa, Artificial Sequence
  Non-cyclic GFR-binding peptide
  MOD_RES (2), (3), (36), (38): Xaa is C or S
  MOD_RES (17), (18), (19), (20), (21): Xaa is A or G
  MOD_RES (22), (23), (24), (25): Xaa is A or G or is absent
PXXVPQDLNAISILYFXXXXXXXXXLKKYRMVVKSXKXS

SEQ ID NO: 5901 - protein, 37 aa, Artificial Sequence
  Non-cyclic GFR-binding peptide
  MOD_RES (4), (5), (37): Xaa is C or S
PKPXXAPTKLSAISVLYLDDSSNVILKNYQNMVVRSX

SEQ ID NO: 5902 - protein, 38 aa, Artificial Sequence
  Non-cyclic GFR-binding peptide
  MOD_RES (5), (5): Xaa is C or S
  MOD_RES (19), (20), (21), (22), (23): Xaa is A or G
  MOD_RES (24), (25), (26), (27): Xaa is A or G or is absent
TKPTXAPTKLSAISVLYLXXXXXXXXXLKNYQNMVVRS

SEQ ID NO: 5903 - protein, 39 aa, Artificial Sequence
  Non-cyclic GFR-binding peptide
  MOD_RES (4), (38): Xaa is C or S
  MOD_RES (18), (19), (20), (21), (22): Xaa is A or G
  MOD_RES (23), (24), (25), (26): Xaa is A or G or is absent
KPTXAPTKLSATSVLYYXXXXXXXXXLRKHRNMVVRSXG

SEQ ID NO: 5904 - protein, 37 aa, Artificial Sequence
  Non-cyclic GFR-binding peptide
  MOD_RES (5), (6): Xaa is C or S
IPKAXXVPTELSPISMLYKDENEKVVLKYHYDMVVEG

SEQ ID NO: 5905 - protein, 37 aa, Artificial Sequence
  Non-cyclic GFR-binding peptide
  MOD_RES (6), (7): Xaa is C or S
KIPKAXXVPTELNAISMLYFDENEKVVLKKYRDMVVE

SEQ ID NO: 5906 - protein, 43 aa, Artificial Sequence
  Non-cyclic GFR-binding peptide
  MOD_RES (6), (7), (40), (42): Xaa is C or S
  MOD_RES (21), (22), (23), (24), (25): Xaa is A or G
  MOD_RES (26), (27), (28), (29): Xaa is A or G or is absent
ASASPXXVSQDLSPISILYKXXXXXXXXXLKYHYMIVKSXKXS

SEQ ID NO: 5907 - protein, 35 aa, Artificial Sequence
  Non-cyclic GFR-binding peptide
PTQVQLSATSVLYYEIVRKKPIFLRKHRTLEDHLA

SEQ ID NO: 5908 - protein, 37 aa, Artificial Sequence
  Non-cyclic GFR-binding peptide
  MOD_RES (5), (37): Xaa is C or S
TKPTXAPTKLSAISVLYLDDSSNVILKNYQNMVVRSX

SEQ ID NO: 5909 - protein, 32 aa, Artificial Sequence
  Non-cyclic GFR-binding peptide
  MOD_RES (32), (32): Xaa is C or S
APTKLSAISVLYLDDSSNVILKNYQNMVVRSX

SEQ ID NO: 5910 - protein, 42 aa, Artificial Sequence
  Non-cyclic GFR-binding peptide
  MOD_RES (5), (42): Xaa is C or S
  MOD_RES (21), (22), (23), (24), (25): Xaa is A or G
  MOD_RES (26), (27), (28), (29): Xaa is A or G or is absent
RNVQXRPTQVQLSAISVLYLXXXXXXXXXLKNYQTLEDHLAX

SEQ ID NO: 5911 - protein, 39 aa, Artificial Sequence
  Non-cyclic GFR-binding peptide
  MOD_RES (5), (6), (38): Xaa is C or S
VPKPXXAPTQLSPISVLYKDDSSNVILKYHYNMVVRAXG

SEQ ID NO: 5912 - protein, 39 aa, Artificial Sequence
  Non-cyclic GFR-binding peptide
  MOD_RES (1), (2), (36), (38): Xaa is C or S
  MOD_RES (16), (17), (18), (19), (20): Xaa is A or G
  MOD_RES (21), (22), (23), (24): Xaa is A or G or is absent
XXAPTKLSPISVLYKXXXXXXXXXLKYHYNMVVRSXGXH

SEQ ID NO: 5913 - protein, 39 aa, Artificial Sequence
  Non-cyclic GFR-binding peptide
  MOD_RES (4), (5), (36), (38): Xaa is C or S
AAPXXVPQALSAISILYLVGRKPKVLKNYQMIVRSXKXS

SEQ ID NO: 5914 - protein, 39 aa, Artificial Sequence
  Non-cyclic GFR-binding peptide
  MOD_RES (6), (6): Xaa is C or S
  MOD_RES (20), (21), (22), (23), (24): Xaa is A or G
  MOD_RES (25), (26), (27), (28): Xaa is A or G or is absent
VTKPTXAPTKLSPISVLYKXXXXXXXXXLKYHYNMVVRS

SEQ ID NO: 5915 - protein, 39 aa, Artificial Sequence
  Non-cyclic GFR-binding peptide
  MOD_RES (4), (5), (38): Xaa is C or S
  MOD_RES (19), (20), (21), (22), (23): Xaa is A or G
  MOD_RES (24), (25), (26), (27): Xaa is A or G or is absent
ASPXXVSQDLSATSILYYXXXXXXXXXLRKHRMIVKSXK

SEQ ID NO: 5916 - protein, 42 aa, Artificial Sequence
  Non-cyclic GFR-binding peptide
  MOD_RES (5), (42): Xaa is C or S
  MOD_RES (21), (22), (23), (24), (25): Xaa is A or G
  MOD_RES (26), (27), (28), (29): Xaa is A or G or is absent
RNVQXRPTQVQLSPISVLYKXXXXXXXXXLKYHYTLEDHLAX

SEQ ID NO: 5917 - protein, 37 aa, Artificial Sequence
  Non-cyclic GFR-binding peptide
  MOD_RES (1), (2), (35), (37): Xaa is C or S
  MOD_RES (16), (17), (18), (19), (20): Xaa is A or G
  MOD_RES (21), (22), (23), (24): Xaa is A or G or is absent
XXVSQDLSATSILYYXXXXXXXXXLRKHRMIVKSXKX

SEQ ID NO: 5918 - protein, 36 aa, Artificial Sequence
  Non-cyclic GFR-binding peptide
  MOD_RES (34), (36): Xaa is C or S
  MOD_RES (14), (15), (16), (17), (18): Xaa is A or G
  MOD_RES (19), (20), (21), (22): Xaa is A or G or is absent
APTKLSAISVLYLXXXXXXXXXLKNYQNMVVRSXGX

SEQ ID NO: 5919 - protein, 35 aa, Artificial Sequence
  Non-cyclic GFR-binding peptide
  MOD_RES (1), (32), (34): Xaa is C or S
XVPQALNAISILYFVGRKPKVLKKYRMIVRSXKXS

SEQ ID NO: 5920 - protein, 37 aa, Artificial Sequence
  Non-cyclic GFR-binding peptide
  MOD_RES (4), (5), (36): Xaa is C or S
ASPXXVSQDLSAISILYLIGKTPKILKNYQMIVKSXK

SEQ ID NO: 5921 - protein, 35 aa, Artificial Sequence
  Non-cyclic GFR-binding peptide
  MOD_RES (1), (2), (33), (35): Xaa is C or S
XXVPQALSAISILYLVGRKPKVLKNYQMIVRSXKX

SEQ ID NO: 5922 - protein, 38 aa, Artificial Sequence
  Non-cyclic GFR-binding peptide
  MOD_RES (1), (2), (36), (38): Xaa is C or S
  MOD_RES (16), (17), (18), (19), (20): Xaa is A or G
  MOD_RES (21), (22), (23), (24): Xaa is A or G or is absent
XXAPTKLNAISVLYFXXXXXXXXXLKKYRNMVVKAXGX

SEQ ID NO: 5923 - protein, 37 aa, Artificial Sequence
  Non-cyclic GFR-binding peptide
  MOD_RES (4), (5): Xaa is C or S
  MOD_RES (19), (20), (21), (22), (23): Xaa is A or G
  MOD_RES (24), (25), (26), (27): Xaa is A or G or is absent
PKAXXVPTELNAISMLYFXXXXXXXXXLKKYRDMVVE

SEQ ID NO: 5924 - protein, 36 aa, Artificial Sequence
  Non-cyclic GFR-binding peptide
  MOD_RES (1), (35): Xaa is C or S
  MOD_RES (15), (16), (17), (18), (19): Xaa is A or G
  MOD_RES (20), (21), (22), (23): Xaa is A or G or is absent
XVPTELNAISMLYFXXXXXXXXXLKKYRDMVVEGXG

SEQ ID NO: 5925 - protein, 38 aa, Artificial Sequence
  Non-cyclic GFR-binding peptide
  MOD_RES (1), (38): Xaa is C or S
XRPTQVQLNAISVLYFEIVRKKPIFLKKYRTLEDHLAX

SEQ ID NO: 5926 - protein, 38 aa, Artificial Sequence
  Non-cyclic GFR-binding peptide
  MOD_RES (3), (4), (38): Xaa is C or S
  MOD_RES (18), (19), (20), (21), (22): Xaa is A or G
  MOD_RES (23), (24), (25), (26): Xaa is A or G or is absent
KPXXAPTQLSATSVLYYXXXXXXXXXLRKHRNMVVRAX

SEQ ID NO: 5927 - protein, 33 aa, Artificial Sequence
  Non-cyclic GFR-binding peptide
  MOD_RES (33), (33): Xaa is C or S
  MOD_RES (14), (15), (16), (17), (18): Xaa is A or G
  MOD_RES (19), (20), (21), (22): Xaa is A or G or is absent
VPQDLSAISILYLXXXXXXXXXLKNYQMVVKSX

SEQ ID NO: 5928 - protein, 34 aa, Artificial Sequence
  Non-cyclic GFR-binding peptide
  MOD_RES (4), (4): Xaa is C or S
KPTXAPTKLSAISVLYLDDSSNVILKNYQNMVVR

SEQ ID NO: 5929 - protein, 40 aa, Artificial Sequence
  Non-cyclic GFR-binding peptide
  MOD_RES (2), (3), (37), (39): Xaa is C or S
  MOD_RES (17), (18), (19), (20), (21): Xaa is A or G
  MOD_RES (22), (23), (24), (25): Xaa is A or G or is absent
AXXVPTELSATSMLYYXXXXXXXXXLRKHRDMVVEGXGXR

SEQ ID NO: 5930 - protein, 31 aa, Artificial Sequence
  Non-cyclic GFR-binding peptide
  MOD_RES (1), (1): Xaa is C or S
XAPTKLSPISVLYKDSSNNVILKYHYNMVVK

SEQ ID NO: 5931 - protein, 38 aa, Artificial Sequence
  Non-cyclic GFR-binding peptide
  MOD_RES (2), (3), (37): Xaa is C or S
  MOD_RES (17), (18), (19), (20), (21): Xaa is A or G
  MOD_RES (22), (23), (24), (25): Xaa is A or G or is absent
AXXVPTELSPISMLYKXXXXXXXXXLKYHYDMVVEGXG

SEQ ID NO: 5932 - protein, 38 aa, Artificial Sequence
  Non-cyclic GFR-binding peptide
  MOD_RES (1), (35), (37): Xaa is C or S
  MOD_RES (15), (16), (17), (18), (19): Xaa is A or G
  MOD_RES (20), (21), (22), (23): Xaa is A or G or is absent
XAPTKLNAISVLYFXXXXXXXXXLKKYRNMVVKAXGXH

SEQ ID NO: 5933 - protein, 37 aa, Artificial Sequence
  Non-cyclic GFR-binding peptide
  MOD_RES (6), (7): Xaa is C or S
TVPKPXXAPTQLSATSVLYYDDSSNVILRKHRNMVVR

SEQ ID NO: 5934 - protein, 36 aa, Artificial Sequence
  Non-cyclic GFR-binding peptide
  MOD_RES (1), (34), (36): Xaa is C or S
  MOD_RES (15), (16), (17), (18), (19): Xaa is A or G
  MOD_RES (20), (21), (22), (23): Xaa is A or G or is absent
XVSQDLSAISILYLXXXXXXXXXLKNYQMIVKSXKX

SEQ ID NO: 5935 - protein, 38 aa, Artificial Sequence
  Non-cyclic GFR-binding peptide
  MOD_RES (4), (5): Xaa is C or S
  MOD_RES (19), (20), (21), (22), (23): Xaa is A or G
  MOD_RES (24), (25), (26), (27): Xaa is A or G or is absent
PKPXXAPTQLSATSVLYYXXXXXXXXXLRKHRNMVVRA

SEQ ID NO: 5936 - protein, 35 aa, Artificial Sequence
  Non-cyclic GFR-binding peptide
  MOD_RES (35), (35): Xaa is C or S
  MOD_RES (14), (15), (16), (17), (18): Xaa is A or G
  MOD_RES (19), (20), (21), (22): Xaa is A or G or is absent
VPTKLSATSVLYYXXXXXXXXXLRKHREGMSVAEX

SEQ ID NO: 5937 - protein, 35 aa, Artificial Sequence
  Non-cyclic GFR-binding peptide
  MOD_RES (2), (3), (35): Xaa is C or S
AXXVPTELSATSMLYYDENEKVVLRKHRDMVVEGX

SEQ ID NO: 5938 - protein, 35 aa, Artificial Sequence
  Non-cyclic GFR-binding peptide
  MOD_RES (4), (4): Xaa is C or S
KPTXAPTKLSAISVLYLDDSSNVILKNYQNMVVRS

SEQ ID NO: 5939 - protein, 42 aa, Artificial Sequence
  Non-cyclic GFR-binding peptide
  MOD_RES (7), (41): Xaa is C or S
  MOD_RES (21), (22), (23), (24), (25): Xaa is A or G
  MOD_RES (26), (27), (28), (29): Xaa is A or G or is absent
HVTKPTXAPTKLSATSVLYYXXXXXXXXXLRKHRNMVVRSXG

SEQ ID NO: 5940 - protein, 36 aa, Artificial Sequence
  Non-cyclic GFR-binding peptide
  MOD_RES (2), (34), (36): Xaa is C or S
TXAPTKLSPISVLYKDDSSNVILKYHYNMVVRSXGX

SEQ ID NO: 5941 - protein, 36 aa, Artificial Sequence
  Non-cyclic GFR-binding peptide
  MOD_RES (36), (36): Xaa is C or S
PTQVQLSPISVLYKEIVRKKPIFLKYHYTLEDHLAX

SEQ ID NO: 5942 - protein, 38 aa, Artificial Sequence
  Non-cyclic GFR-binding peptide
  MOD_RES (4), (5): Xaa is C or S
  MOD_RES (19), (20), (21), (22), (23): Xaa is A or G
  MOD_RES (24), (25), (26), (27): Xaa is A or G or is absent
PKAXXAPTKLSPISVLYKXXXXXXXXXLKYHYNMVVKA

SEQ ID NO: 5943 - protein, 38 aa, Artificial Sequence
  Non-cyclic GFR-binding peptide
  MOD_RES (5), (6), (38): Xaa is C or S
VPKPXXAPTKLSPISVLYKDDSSNVILKYHYNMVVRSX

SEQ ID NO: 5944 - protein, 38 aa, Artificial Sequence
  Non-cyclic GFR-binding peptide
  MOD_RES (1), (2), (35), (37): Xaa is C or S
  MOD_RES (16), (17), (18), (19), (20): Xaa is A or G
  MOD_RES (21), (22), (23), (24): Xaa is A or G or is absent
XXVPQALSPISILYKXXXXXXXXXLKYHYMIVRSXKXS

SEQ ID NO: 5945 - protein, 36 aa, Artificial Sequence
  Non-cyclic GFR-binding peptide
  MOD_RES (33), (35): Xaa is C or S
  MOD_RES (14), (15), (16), (17), (18): Xaa is A or G
  MOD_RES (19), (20), (21), (22): Xaa is A or G or is absent
VPQDLSATSILYYXXXXXXXXXLRKHRMVVKSXKXS

SEQ ID NO: 5946 - protein, 32 aa, Artificial Sequence
  Non-cyclic GFR-binding peptide
  MOD_RES (1), (2): Xaa is C or S
XXVPTELSPISMLYKDENEKVVLKYHYDMVVE

SEQ ID NO: 5947 - protein, 36 aa, Artificial Sequence
  Non-cyclic GFR-binding peptide
  MOD_RES (4), (5): Xaa is C or S
PKAXXAPTKLNAISVLYFDSSNNVILKKYRNMVVKA

SEQ ID NO: 5948 - protein, 43 aa, Artificial Sequence
  Non-cyclic GFR-binding peptide
  MOD_RES (5), (6), (41), (43): Xaa is C or S
  MOD_RES (20), (21), (22), (23), (24): Xaa is A or G
  MOD_RES (25), (26), (27), (28): Xaa is A or G or is absent
VGKAXXVPTKLNAISVLYFXXXXXXXXXLKKYREGMSVAEXGX

SEQ ID NO: 5949 - protein, 34 aa, Artificial Sequence
  Non-cyclic GFR-binding peptide
  MOD_RES (31), (33): Xaa is C or S
VPQDLSAISILYLVGRTPKVLKNYQMVVKSXKXS

SEQ ID NO: 5950 - protein, 36 aa, Artificial Sequence
  Non-cyclic GFR-binding peptide
  MOD_RES (1), (2), (35): Xaa is C or S
  MOD_RES (16), (17), (18), (19), (20): Xaa is A or G
  MOD_RES (21), (22), (23), (24): Xaa is A or G or is absent
XXVPQDLSATSILYYXXXXXXXXXLRKHRMVVKSXK

SEQ ID NO: 5951 - protein, 35 aa, Artificial Sequence
  Non-cyclic GFR-binding peptide
  MOD_RES (2), (3): Xaa is C or S
  MOD_RES (17), (18), (19), (20), (21): Xaa is A or G
  MOD_RES (22), (23), (24), (25): Xaa is A or G or is absent
AXXVPTELSPISMLYKXXXXXXXXXLKYHYEMVVE

SEQ ID NO: 5952 - protein, 39 aa, Artificial Sequence
  Non-cyclic GFR-binding peptide
  MOD_RES (2), (39): Xaa is C or S
  MOD_RES (18), (19), (20), (21), (22): Xaa is A or G
  MOD_RES (23), (24), (25), (26): Xaa is A or G or is absent
QXRPTQVQLSATSVLYYXXXXXXXXXLRKHRTLEDHLAX

SEQ ID NO: 5953 - protein, 34 aa, Artificial Sequence
  Non-cyclic GFR-binding peptide
  MOD_RES (1), (2), (33): Xaa is C or S
XXVSQDLSPISILYKIGKTPKILKYHYMIVKSXK

SEQ ID NO: 5954 - protein, 30 aa, Artificial Sequence
  Non-cyclic GFR-binding peptide
VPQDLNAISILYFVGRTPKVLKKYRMVVKS

SEQ ID NO: 5955 - protein, 35 aa, Artificial Sequence
  Non-cyclic GFR-binding peptide
  MOD_RES (3), (3): Xaa is C or S
  MOD_RES (17), (18), (19), (20), (21): Xaa is A or G
  MOD_RES (22), (23), (24), (25): Xaa is A or G or is absent
PTXAPTKLSATSVLYYXXXXXXXXXLRKHRNMVVR

SEQ ID NO: 5956 - protein, 37 aa, Artificial Sequence
  Non-cyclic GFR-binding peptide
  MOD_RES (3), (4): Xaa is C or S
  MOD_RES (18), (19), (20), (21), (22): Xaa is A or G
  MOD_RES (23), (24), (25), (26): Xaa is A or G or is absent
KAXXVPTELSATSMLYYXXXXXXXXXLRKHRDMVVEG

SEQ ID NO: 5957 - protein, 37 aa, Artificial Sequence
  Non-cyclic GFR-binding peptide
  MOD_RES (4), (5): Xaa is C or S
  MOD_RES (19), (20), (21), (22), (23): Xaa is A or G
  MOD_RES (24), (25), (26), (27): Xaa is A or G or is absent
PKPXXAPTQLSATSVLYYXXXXXXXXXLRKHRNMVVR

SEQ ID NO: 5958 - protein, 37 aa, Artificial Sequence
  Non-cyclic GFR-binding peptide
  MOD_RES (1), (2), (35), (37): Xaa is C or S
  MOD_RES (16), (17), (18), (19), (20): Xaa is A or G
  MOD_RES (21), (22), (23), (24): Xaa is A or G or is absent
XXVPQALSPISILYKXXXXXXXXXLKYHYMIVRSXKX

SEQ ID NO: 5959 - protein, 33 aa, Artificial Sequence
  Non-cyclic GFR-binding peptide
  MOD_RES (1), (1): Xaa is C or S
  MOD_RES (15), (16), (17), (18), (19): Xaa is A or G
  MOD_RES (20), (21), (22), (23): Xaa is A or G or is absent
XVPQALSATSILYYXXXXXXXXXLRKHRMIVRS

SEQ ID NO: 5960 - protein, 32 aa, Artificial Sequence
  Non-cyclic GFR-binding peptide
  MOD_RES (14), (15), (16), (17), (18): Xaa is A or G
  MOD_RES (19), (20), (21), (22): Xaa is A or G or is absent
TQVQLNAISVLYFXXXXXXXXXLKKYRTLEDH

SEQ ID NO: 5961 - protein, 32 aa, Artificial Sequence
  Non-cyclic GFR-binding peptide
  MOD_RES (14), (15), (16), (17), (18): Xaa is A or G
  MOD_RES (19), (20), (21), (22): Xaa is A or G or is absent
APTQLSATSVLYYXXXXXXXXXLRKHRNMVVR

SEQ ID NO: 5962 - protein, 34 aa, Artificial Sequence
  Non-cyclic GFR-binding peptide
  MOD_RES (1), (34): Xaa is C or S
XVPTKLSAISVLYLDDMGVPTLKNYQEGMSVAEX

SEQ ID NO: 5963 - protein, 37 aa, Artificial Sequence
  Non-cyclic GFR-binding peptide
  MOD_RES (4), (5): Xaa is C or S
  MOD_RES (19), (20), (21), (22), (23): Xaa is A or G
  MOD_RES (24), (25), (26), (27): Xaa is A or G or is absent
PKAXXAPTKLSPISVLYKXXXXXXXXXLKYHYNMVVK

SEQ ID NO: 5964 - protein, 34 aa, Artificial Sequence
  Non-cyclic GFR-binding peptide
  MOD_RES (4), (4): Xaa is C or S
KPTXAPTKLSPISVLYKDDSSNVILKYHYNMVVR

SEQ ID NO: 5965 - protein, 39 aa, Artificial Sequence
  Non-cyclic GFR-binding peptide
  MOD_RES (2), (3), (37), (39): Xaa is C or S
  MOD_RES (17), (18), (19), (20), (21): Xaa is A or G
  MOD_RES (22), (23), (24), (25): Xaa is A or G or is absent
AXXAPTKLSAISVLYLXXXXXXXXXLKNYQNMVVKAXGX

SEQ ID NO: 5966 - protein, 40 aa, Artificial Sequence
  Non-cyclic GFR-binding peptide
  MOD_RES (2), (3), (37), (39): Xaa is C or S
  MOD_RES (17), (18), (19), (20), (21): Xaa is A or G
  MOD_RES (22), (23), (24), (25): Xaa is A or G or is absent
PXXAPTKLSATSVLYYXXXXXXXXXLRKHRNMVVRSXGXH

SEQ ID NO: 5967 - protein, 35 aa, Artificial Sequence
  Non-cyclic GFR-binding peptide
  MOD_RES (1), (34): Xaa is C or S
  MOD_RES (15), (16), (17), (18), (19): Xaa is A or G
  MOD_RES (20), (21), (22), (23): Xaa is A or G or is absent
XVSQDLSATSILYYXXXXXXXXXLRKHRMIVKSXK

SEQ ID NO: 5968 - protein, 37 aa, Artificial Sequence
  Non-cyclic GFR-binding peptide
  MOD_RES (2), (3), (37): Xaa is C or S
  MOD_RES (17), (18), (19), (20), (21): Xaa is A or G
  MOD_RES (22), (23), (24), (25): Xaa is A or G or is absent
AXXVPTELSATSMLYYXXXXXXXXXLRKHRDMVVEGX

SEQ ID NO: 5969 - protein, 44 aa, Artificial Sequence
  Non-cyclic GFR-binding peptide
  MOD_RES (5), (42), (44): Xaa is C or S
RNVQXRPTQVQLNAISVLYFEIVRKKPIFLKKYRTLEDHLAXKX

SEQ ID NO: 5970 - protein, 39 aa, Artificial Sequence
  Non-cyclic GFR-binding peptide
  MOD_RES (2), (3), (36), (38): Xaa is C or S
  MOD_RES (17), (18), (19), (20), (21): Xaa is A or G
  MOD_RES (22), (23), (24), (25): Xaa is A or G or is absent
PXXVSQDLSPISILYKXXXXXXXXXLKYHYMIVKSXKXS

SEQ ID NO: 5971 - protein, 42 aa, Artificial Sequence
  Non-cyclic GFR-binding peptide
  MOD_RES (4), (5), (39), (41): Xaa is C or S
  MOD_RES (19), (20), (21), (22), (23): Xaa is A or G
  MOD_RES (24), (25), (26), (27): Xaa is A or G or is absent
PKPXXAPTKLSATSVLYYXXXXXXXXXLRKHRNMVVRSXGXH

SEQ ID NO: 5972 - protein, 39 aa, Artificial Sequence
  Non-cyclic GFR-binding peptide
  MOD_RES (5), (37), (39): Xaa is C or S
TKPTXAPTKLSATSVLYYDDSSNVILRKHRNMVVRSXGX

SEQ ID NO: 5973 - protein, 36 aa, Artificial Sequence
  Non-cyclic GFR-binding peptide
  MOD_RES (1), (2), (35): Xaa is C or S
  MOD_RES (16), (17), (18), (19), (20): Xaa is A or G
  MOD_RES (21), (22), (23), (24): Xaa is A or G or is absent
XXVSQDLSAISILYLXXXXXXXXXLKNYQMIVKSXK

SEQ ID NO: 5974 - protein, 41 aa, Artificial Sequence
  Non-cyclic GFR-binding peptide
  MOD_RES (4), (41): Xaa is C or S
NVQXRPTQVQLSATSVLYYEIVRKKPIFLRKHRTLEDHLAX

SEQ ID NO: 5975 - protein, 34 aa, Artificial Sequence
  Non-cyclic GFR-binding peptide
  MOD_RES (1), (1): Xaa is C or S
  MOD_RES (15), (16), (17), (18), (19): Xaa is A or G
  MOD_RES (20), (21), (22), (23): Xaa is A or G or is absent
XAPTKLSATSVLYYXXXXXXXXXLRKHRNMVVRS

SEQ ID NO: 5976 - protein, 36 aa, Artificial Sequence
  Non-cyclic GFR-binding peptide
  MOD_RES (1), (2), (34), (36): Xaa is C or S
XXAPTQLSPISVLYKDDSSNVILKYHYNMVVRAXGX

SEQ ID NO: 5977 - protein, 38 aa, Artificial Sequence
  Non-cyclic GFR-binding peptide
  MOD_RES (37), (37): Xaa is C or S
  MOD_RES (16), (17), (18), (19), (20): Xaa is A or G
  MOD_RES (21), (22), (23), (24): Xaa is A or G or is absent
RPTQVQLSATSVLYYXXXXXXXXXLRKHRTLEDHLAXK

SEQ ID NO: 5978 - protein, 36 aa, Artificial Sequence
  Non-cyclic GFR-binding peptide
  MOD_RES (2), (3), (35): Xaa is C or S
PXXAPTKLSAISVLYLDDSSNVILKNYQNMVVRSXG

SEQ ID NO: 5979 - protein, 39 aa, Artificial Sequence
  Non-cyclic GFR-binding peptide
  MOD_RES (4), (5), (36), (38): Xaa is C or S
AAPXXVPQALSATSILYYVGRKPKVLRKHRMIVRSXKXS

SEQ ID NO: 5980 - protein, 30 aa, Artificial Sequence
  Non-cyclic GFR-binding peptide
APTKLSAISVLYLDDSSNVILKNYQNMVVR

SEQ ID NO: 5981 - protein, 33 aa, Artificial Sequence
  Non-cyclic GFR-binding peptide
  MOD_RES (1), (2): Xaa is C or S
XXAPTQLSAISVLYLDDSSNVILKNYQNMVVRA

SEQ ID NO: 5982 - protein, 38 aa, Artificial Sequence
  Non-cyclic GFR-binding peptide
  MOD_RES (5), (6), (38): Xaa is C or S
IPKAXXVPTELSATSMLYYDEYDKVVLRKHREMVVEGX

SEQ ID NO: 5983 - protein, 31 aa, Artificial Sequence
  Non-cyclic GFR-binding peptide
  MOD_RES (1), (1): Xaa is C or S
XAPTKLSAISVLYLDSSNNVILKNYQNMVVK

SEQ ID NO: 5984 - protein, 41 aa, Artificial Sequence
  Non-cyclic GFR-binding peptide
  MOD_RES (5), (6), (39), (41): Xaa is C or S
VGKAXXVPTKLSATSVLYYDDMGVPTLRKHREGMSVAEXGX

SEQ ID NO: 5985 - protein, 35 aa, Artificial Sequence
  Non-cyclic GFR-binding peptide
  MOD_RES (2), (3), (35): Xaa is C or S
AXXAPTKLNAISVLYFDSSNNVILKKYRNMVVKAX

SEQ ID NO: 5986 - protein, 31 aa, Artificial Sequence
  Non-cyclic GFR-binding peptide
  MOD_RES (31), (31): Xaa is C or S
VPQDLNAISILYFVGRTPKVLKKYRMVVKSX

SEQ ID NO: 5987 - protein, 39 aa, Artificial Sequence
  Non-cyclic GFR-binding peptide
  MOD_RES (5), (6), (39): Xaa is C or S
  MOD_RES (20), (21), (22), (23), (24): Xaa is A or G
  MOD_RES (25), (26), (27), (28): Xaa is A or G or is absent
SAAPXXVPQALSAISILYLXXXXXXXXXLKNYQMIVRSX

SEQ ID NO: 5988 - protein, 36 aa, Artificial Sequence
  Non-cyclic GFR-binding peptide
  MOD_RES (2), (3), (34), (36): Xaa is C or S
PXXVPQALSATSILYYVGRKPKVLRKHRMIVRSXKX

SEQ ID NO: 5989 - protein, 33 aa, Artificial Sequence
  Non-cyclic GFR-binding peptide
  MOD_RES (1), (1): Xaa is C or S
  MOD_RES (15), (16), (17), (18), (19): Xaa is A or G
  MOD_RES (20), (21), (22), (23): Xaa is A or G or is absent
XVPTELSATSMLYYXXXXXXXXXLRKHREMVVE

SEQ ID NO: 5990 - protein, 39 aa, Artificial Sequence
  Non-cyclic GFR-binding peptide
  MOD_RES (6), (7): Xaa is C or S
KVGKAXXVPTKLSATSVLYYDDMGVPTLRKHREGMSVAE

SEQ ID NO: 5991 - protein, 41 aa, Artificial Sequence
  Non-cyclic GFR-binding peptide
  MOD_RES (4), (5), (38), (40): Xaa is C or S
  MOD_RES (19), (20), (21), (22), (23): Xaa is A or G
  MOD_RES (24), (25), (26), (27): Xaa is A or G or is absent
ASPXXVSQDLNAISILYFXXXXXXXXXLKKYRMIVKSXKXS

SEQ ID NO: 5992 - protein, 39 aa, Artificial Sequence
  Non-cyclic GFR-binding peptide
  MOD_RES (4), (5), (36), (38): Xaa is C or S
AAPXXVPQALSPISILYKVGRKPKVLKYHYMIVRSXKXS

SEQ ID NO: 5993 - protein, 39 aa, Artificial Sequence
  Non-cyclic GFR-binding peptide
  MOD_RES (6), (7): Xaa is C or S
  MOD_RES (21), (22), (23), (24), (25): Xaa is A or G
  MOD_RES (26), (27), (28), (29): Xaa is A or G or is absent
YVPKPXXAPTKLSAISVLYLXXXXXXXXXLKNYQNMVVR

SEQ ID NO: 5994 - protein, 36 aa, Artificial Sequence
  Non-cyclic GFR-binding peptide
  MOD_RES (33), (35): Xaa is C or S
VPTKLSAISVLYLDDMGVPTLKNYQEGMSVAEXGXR

SEQ ID NO: 5995 - protein, 37 aa, Artificial Sequence
  Non-cyclic GFR-binding peptide
  MOD_RES (2), (3), (36): Xaa is C or S
AXXVPTKLNAISVLYFDDMGVPTLKKYREGMSVAEXG

SEQ ID NO: 5996 - protein, 40 aa, Artificial Sequence
  Non-cyclic GFR-binding peptide
  MOD_RES (3), (4), (38), (40): Xaa is C or S
  MOD_RES (18), (19), (20), (21), (22): Xaa is A or G
  MOD_RES (23), (24), (25), (26): Xaa is A or G or is absent
KAXXAPTKLSPISVLYKXXXXXXXXXLKYHYNMVVKAXGX

SEQ ID NO: 5997 - protein, 43 aa, Artificial Sequence
  Non-cyclic GFR-binding peptide
  MOD_RES (4), (41), (43): Xaa is C or S
  MOD_RES (20), (21), (22), (23), (24): Xaa is A or G
  MOD_RES (25), (26), (27), (28): Xaa is A or G or is absent
NVQXRPTQVQLSPISVLYKXXXXXXXXXLKYHYTLEDHLAXKX

SEQ ID NO: 5998 - protein, 37 aa, Artificial Sequence
  Non-cyclic GFR-binding peptide
  MOD_RES (2), (3), (37): Xaa is C or S
  MOD_RES (17), (18), (19), (20), (21): Xaa is A or G
  MOD_RES (22), (23), (24), (25): Xaa is A or G or is absent
AXXVPTELSPISMLYKXXXXXXXXXLKYHYEMVVEGX

SEQ ID NO: 5999 - protein, 36 aa, Artificial Sequence
  Non-cyclic GFR-binding peptide
  MOD_RES (35), (35): Xaa is C or S
  MOD_RES (14), (15), (16), (17), (18): Xaa is A or G
  MOD_RES (19), (20), (21), (22): Xaa is A or G or is absent
TQVQLSPISVLYKXXXXXXXXXLKYHYTLEDHLAXK

SEQ ID NO: 6000 - protein, 40 aa, Artificial Sequence
  Non-cyclic GFR-binding peptide
  MOD_RES (4), (38), (40): Xaa is C or S
  MOD_RES (18), (19), (20), (21), (22): Xaa is A or G
  MOD_RES (23), (24), (25), (26): Xaa is A or G or is absent
KPTXAPTKLSPISVLYKXXXXXXXXXLKYHYNMVVRSXGX

SEQ ID NO: 6001 - protein, 37 aa, Artificial Sequence
  Non-cyclic GFR-binding peptide
  MOD_RES (36), (36): Xaa is C or S
  MOD_RES (15), (16), (17), (18), (19): Xaa is A or G
  MOD_RES (20), (21), (22), (23): Xaa is A or G or is absent
PTQVQLNAISVLYFXXXXXXXXXLKKYRTLEDHLAXK

SEQ ID NO: 6002 - protein, 37 aa, Artificial Sequence
  Non-cyclic GFR-binding peptide
  MOD_RES (34), (36): Xaa is C or S
  MOD_RES (14), (15), (16), (17), (18): Xaa is A or G
  MOD_RES (19), (20), (21), (22): Xaa is A or G or is absent
APTKLSATSVLYYXXXXXXXXXLRKHRNMVVRSXGXH

SEQ ID NO: 6003 - protein, 41 aa, Artificial Sequence
  Non-cyclic GFR-binding peptide
  MOD_RES (6), (7), (39), (41): Xaa is C or S
AVPKAXXAPTKLSPISVLYKDSSNNVILKYHYNMVVKAXGX

SEQ ID NO: 6004 - protein, 40 aa, Artificial Sequence
  Non-cyclic GFR-binding peptide
  MOD_RES (6), (7), (40): Xaa is C or S
  MOD_RES (21), (22), (23), (24), (25): Xaa is A or G
  MOD_RES (26), (27), (28), (29): Xaa is A or G or is absent
ASASPXXVPQDLNAISILYFXXXXXXXXXLKKYRMVVKSX

SEQ ID NO: 6005 - protein, 36 aa, Artificial Sequence
  Non-cyclic GFR-binding peptide
  MOD_RES (36), (36): Xaa is C or S
PTQVQLSAISVLYLEIVRKKPIFLKNYQTLEDHLAX

SEQ ID NO: 6006 - protein, 32 aa, Artificial Sequence
  Non-cyclic GFR-binding peptide
  MOD_RES (14), (15), (16), (17), (18): Xaa is A or G
  MOD_RES (19), (20), (21), (22): Xaa is A or G or is absent
APTKLSAISVLYLXXXXXXXXXLKNYQNMVVR

SEQ ID NO: 6007 - protein, 37 aa, Artificial Sequence
  Non-cyclic GFR-binding peptide
  MOD_RES (4), (5), (37): Xaa is C or S
PKAXXVPTELSATSMLYYDENEKVVLRKHRDMVVEGX

SEQ ID NO: 6008 - protein, 44 aa, Artificial Sequence
  Non-cyclic GFR-binding peptide
  MOD_RES (6), (7), (41), (43): Xaa is C or S
  MOD_RES (21), (22), (23), (24), (25): Xaa is A or G
  MOD_RES (26), (27), (28), (29): Xaa is A or G or is absent
SIPKAXXVPTELSPISMLYKXXXXXXXXXLKYHYEMVVEGXGXR

SEQ ID NO: 6009 - protein, 33 aa, Artificial Sequence
  Non-cyclic GFR-binding peptide
  MOD_RES (31), (33): Xaa is C or S
VSQDLSATSILYYIGKTPKILRKHRMIVKSXKX

SEQ ID NO: 6010 - protein, 40 aa, Artificial Sequence
  Non-cyclic GFR-binding peptide
  MOD_RES (5), (6), (37), (39): Xaa is C or S
SASPXXVPQDLSATSILYYVGRTPKVLRKHRMVVKSXKXS

SEQ ID NO: 6011 - protein, 35 aa, Artificial Sequence
  Non-cyclic GFR-binding peptide
  MOD_RES (1), (34): Xaa is C or S
  MOD_RES (15), (16), (17), (18), (19): Xaa is A or G
  MOD_RES (20), (21), (22), (23): Xaa is A or G or is absent
XVPQALSPISILYKXXXXXXXXXLKYHYMIVRSXK

SEQ ID NO: 6012 - protein, 44 aa, Artificial Sequence
  Non-cyclic GFR-binding peptide
  MOD_RES (4), (41), (43): Xaa is C or S
  MOD_RES (20), (21), (22), (23), (24): Xaa is A or G
  MOD_RES (25), (26), (27), (28): Xaa is A or G or is absent
NVQXRPTQVQLSAISVLYLXXXXXXXXXLKNYQTLEDHLAXKXE

SEQ ID NO: 6013 - protein, 37 aa, Artificial Sequence
  Non-cyclic GFR-binding peptide
  MOD_RES (3), (4), (37): Xaa is C or S
  MOD_RES (18), (19), (20), (21), (22): Xaa is A or G
  MOD_RES (23), (24), (25), (26): Xaa is A or G or is absent
APXXVPQALNAISILYFXXXXXXXXXLKKYRMIVRSX

SEQ ID NO: 6014 - protein, 34 aa, Artificial Sequence
  Non-cyclic GFR-binding peptide
  MOD_RES (1), (2), (33): Xaa is C or S
XXVPQDLSPISILYKVGRTPKVLKYHYMVVKSXK

SEQ ID NO: 6015 - protein, 39 aa, Artificial Sequence
  Non-cyclic GFR-binding peptide
  MOD_RES (2), (39): Xaa is C or S
QXRPTQVQLSATSVLYYEIVRKKPIFLRKHRTLEDHLAX

SEQ ID NO: 6016 - protein, 42 aa, Artificial Sequence
  Non-cyclic GFR-binding peptide
  MOD_RES (5), (6), (41): Xaa is C or S
  MOD_RES (20), (21), (22), (23), (24): Xaa is A or G
  MOD_RES (25), (26), (27), (28): Xaa is A or G or is absent
VGKAXXVPTKLSATSVLYYXXXXXXXXXLRKHREGMSVAEXG

SEQ ID NO: 6017 - protein, 33 aa, Artificial Sequence
  Non-cyclic GFR-binding peptide
  MOD_RES (1), (2): Xaa is C or S
XXAPTKLSATSVLYYDDSSNVILRKHRNMVVRS

SEQ ID NO: 6018 - protein, 41 aa, Artificial Sequence
  Non-cyclic GFR-binding peptide
  MOD_RES (5), (5): Xaa is C or S
RNVQXRPTQVQLSPISVLYKEIVRKKPIFLKYHYTLEDHLA

SEQ ID NO: 6019 - protein, 35 aa, Artificial Sequence
  Non-cyclic GFR-binding peptide
  MOD_RES (2), (3): Xaa is C or S
  MOD_RES (17), (18), (19), (20), (21): Xaa is A or G
  MOD_RES (22), (23), (24), (25): Xaa is A or G or is absent
PXXVPQDLNAISILYFXXXXXXXXXLKKYRMVVKS

SEQ ID NO: 6020 - protein, 35 aa, Artificial Sequence
  Non-cyclic GFR-binding peptide
  MOD_RES (1), (32), (34): Xaa is C or S
XVSQDLSPISILYKIGKTPKILKYHYMIVKSXKXS

SEQ ID NO: 6021 - protein, 37 aa, Artificial Sequence
  Non-cyclic GFR-binding peptide
  MOD_RES (3), (4), (35), (37): Xaa is C or S
APXXVPQALSAISILYLVGRKPKVLKNYQMIVRSXKX

SEQ ID NO: 6022 - protein, 36 aa, Artificial Sequence
  Non-cyclic GFR-binding peptide
  MOD_RES (4), (5): Xaa is C or S
PKAXXVPTELNAISMLYFDENEKVVLKKYRDMVVEG

SEQ ID NO: 6023 - protein, 39 aa, Artificial Sequence
  Non-cyclic GFR-binding peptide
  MOD_RES (3), (3): Xaa is C or S
  MOD_RES (19), (20), (21), (22), (23): Xaa is A or G
  MOD_RES (24), (25), (26), (27): Xaa is A or G or is absent
VQXRPTQVQLNAISVLYFXXXXXXXXXLKKYRTLEDHLA

SEQ ID NO: 6024 - protein, 32 aa, Artificial Sequence
  Non-cyclic GFR-binding peptide
  MOD_RES (1), (2): Xaa is C or S
XXVPQDLSAISILYLVGRTPKVLKNYQMVVKS

SEQ ID NO: 6025 - protein, 43 aa, Artificial Sequence
  Non-cyclic GFR-binding peptide
  MOD_RES (5), (6), (40), (42): Xaa is C or S
  MOD_RES (20), (21), (22), (23), (24): Xaa is A or G
  MOD_RES (25), (26), (27), (28): Xaa is A or G or is absent
VPKAXXAPTKLNAISVLYFXXXXXXXXXLKKYRNMVVKAXGXH

SEQ ID NO: 6026 - protein, 34 aa, Artificial Sequence
  Non-cyclic GFR-binding peptide
  MOD_RES (3), (4): Xaa is C or S
KPXXAPTKLSATSVLYYDDSSNVILRKHRNMVVR

SEQ ID NO: 6027 - protein, 33 aa, Artificial Sequence
  Non-cyclic GFR-binding peptide
  MOD_RES (1), (33): Xaa is C or S
XAPTKLSATSVLYYDDSSNVILRKHRNMVVRSX

SEQ ID NO: 6028 - protein, 39 aa, Artificial Sequence
  Non-cyclic GFR-binding peptide
  MOD_RES (6), (7), (39): Xaa is C or S
AVPKAXXAPTKLSPISVLYKDSSNNVILKYHYNMVVKAX

SEQ ID NO: 6029 - protein, 42 aa, Artificial Sequence
  Non-cyclic GFR-binding peptide
  MOD_RES (5), (6), (40), (42): Xaa is C or S
  MOD_RES (20), (21), (22), (23), (24): Xaa is A or G
  MOD_RES (25), (26), (27), (28): Xaa is A or G or is absent
VPKAXXAPTKLSPISVLYKXXXXXXXXXLKYHYNMVVKAXGX

SEQ ID NO: 6030 - protein, 40 aa, Artificial Sequence
  Non-cyclic GFR-binding peptide
  MOD_RES (3), (4), (37), (39): Xaa is C or S
  MOD_RES (18), (19), (20), (21), (22): Xaa is A or G
  MOD_RES (23), (24), (25), (26): Xaa is A or G or is absent
APXXVPQALSPISILYKXXXXXXXXXLKYHYMIVRSXKXS

SEQ ID NO: 6031 - protein, 37 aa, Artificial Sequence
  Non-cyclic GFR-binding peptide
  MOD_RES (4), (5): Xaa is C or S
GKAXXVPTKLNAISVLYFDDMGVPTLKKYREGMSVAE

SEQ ID NO: 6032 - protein, 34 aa, Artificial Sequence
  Non-cyclic GFR-binding peptide
  MOD_RES (1), (2), (34): Xaa is C or S
XXAPTKLSPISVLYKDSSNNVILKYHYNMVVKAX

SEQ ID NO: 6033 - protein, 36 aa, Artificial Sequence
  Non-cyclic GFR-binding peptide
  MOD_RES (3), (4), (35): Xaa is C or S
SPXXVSQDLSPISILYKIGKTPKILKYHYMIVKSXK

SEQ ID NO: 6034 - protein, 41 aa, Artificial Sequence
  Non-cyclic GFR-binding peptide
  MOD_RES (5), (39), (41): Xaa is C or S
  MOD_RES (19), (20), (21), (22), (23): Xaa is A or G
  MOD_RES (24), (25), (26), (27): Xaa is A or G or is absent
TKPTXAPTKLSPISVLYKXXXXXXXXXLKYHYNMVVRSXGX

SEQ ID NO: 6035 - protein, 36 aa, Artificial Sequence
  Non-cyclic GFR-binding peptide
  MOD_RES (4), (36): Xaa is C or S
KPTXAPTKLSPISVLYKDDSSNVILKYHYNMVVRSX

SEQ ID NO: 6036 - protein, 40 aa, Artificial Sequence
  Non-cyclic GFR-binding peptide
  MOD_RES (5), (6), (40): Xaa is C or S
  MOD_RES (20), (21), (22), (23), (24): Xaa is A or G
  MOD_RES (25), (26), (27), (28): Xaa is A or G or is absent
IPKAXXVPTELNAISMLYFXXXXXXXXXLKKYREMVVEGX

SEQ ID NO: 6037 - protein, 35 aa, Artificial Sequence
  Non-cyclic GFR-binding peptide
  MOD_RES (3), (4): Xaa is C or S
KAXXVPTELNAISMLYFDENEKVVLKKYRDMVVEG

SEQ ID NO: 6038 - protein, 36 aa, Artificial Sequence
  Non-cyclic GFR-binding peptide
  MOD_RES (1), (35): Xaa is C or S
  MOD_RES (15), (16), (17), (18), (19): Xaa is A or G
  MOD_RES (20), (21), (22), (23): Xaa is A or G or is absent
XVPTELNAISMLYFXXXXXXXXXLKKYREMVVEGXG

SEQ ID NO: 6039 - protein, 33 aa, Artificial Sequence
  Non-cyclic GFR-binding peptide
  MOD_RES (33), (33): Xaa is C or S
  MOD_RES (14), (15), (16), (17), (18): Xaa is A or G
  MOD_RES (19), (20), (21), (22): Xaa is A or G or is absent
VPQALNAISILYFXXXXXXXXXLKKYRMIVRSX

SEQ ID NO: 6040 - protein, 34 aa, Artificial Sequence
  Non-cyclic GFR-binding peptide
  MOD_RES (1), (2): Xaa is C or S
  MOD_RES (16), (17), (18), (19), (20): Xaa is A or G
  MOD_RES (21), (22), (23), (24): Xaa is A or G or is absent
XXAPTQLSATSVLYYXXXXXXXXXLRKHRNMVVR

SEQ ID NO: 6041 - protein, 34 aa, Artificial Sequence
  Non-cyclic GFR-binding peptide
  MOD_RES (1), (1): Xaa is C or S
  MOD_RES (15), (16), (17), (18), (19): Xaa is A or G
  MOD_RES (20), (21), (22), (23): Xaa is A or G or is absent
XAPTQLSAISVLYLXXXXXXXXXLKNYQNMVVRA

SEQ ID NO: 6042 - protein, 39 aa, Artificial Sequence
  Non-cyclic GFR-binding peptide
  MOD_RES (2), (36), (38): Xaa is C or S
  MOD_RES (16), (17), (18), (19), (20): Xaa is A or G
  MOD_RES (21), (22), (23), (24): Xaa is A or G or is absent
TXAPTKLSATSVLYYXXXXXXXXXLRKHRNMVVRSXGXH

SEQ ID NO: 6043 - protein, 34 aa, Artificial Sequence
  Non-cyclic GFR-binding peptide
  MOD_RES (1), (32), (34): Xaa is C or S
XVPQDLSATSILYYVGRTPKVLRKHRMVVKSXKX

SEQ ID NO: 6044 - protein, 38 aa, Artificial Sequence
  Non-cyclic GFR-binding peptide
  MOD_RES (2), (3), (37): Xaa is C or S
  MOD_RES (17), (18), (19), (20), (21): Xaa is A or G
  MOD_RES (22), (23), (24), (25): Xaa is A or G or is absent
PXXAPTKLSAISVLYLXXXXXXXXXLKNYQNMVVRSXG

SEQ ID NO: 6045 - protein, 36 aa, Artificial Sequence
  Non-cyclic GFR-binding peptide
  MOD_RES (1), (33), (35): Xaa is C or S
XAPTKLSATSVLYYDDSSNVILRKHRNMVVRSXGXH

SEQ ID NO: 6046 - protein, 33 aa, Artificial Sequence
  Non-cyclic GFR-binding peptide
  MOD_RES (1), (2): Xaa is C or S
XXVPTELNAISMLYFDENEKVVLKKYRDMVVEG

SEQ ID NO: 6047 - protein, 32 aa, Artificial Sequence
  Non-cyclic GFR-binding peptide
  MOD_RES (14), (15), (16), (17), (18): Xaa is A or G
  MOD_RES (19), (20), (21), (22): Xaa is A or G or is absent
APTKLSATSVLYYXXXXXXXXXLRKHRNMVVR

SEQ ID NO: 6048 - protein, 36 aa, Artificial Sequence
  Non-cyclic GFR-binding peptide
  MOD_RES (2), (3), (34), (36): Xaa is C or S
PXXVSQDLSPISILYKIGKTPKILKYHYMIVKSXKX

SEQ ID NO: 6049 - protein, 39 aa, Artificial Sequence
  Non-cyclic GFR-binding peptide
  MOD_RES (6), (7): Xaa is C or S
  MOD_RES (21), (22), (23), (24), (25): Xaa is A or G
  MOD_RES (26), (27), (28), (29): Xaa is A or G or is absent
KIPKAXXVPTELSPISMLYKXXXXXXXXXLKYHYDMVVE

SEQ ID NO: 6050 - protein, 33 aa, Artificial Sequence
  Non-cyclic GFR-binding peptide
  MOD_RES (2), (3): Xaa is C or S
PXXVPQDLSPISILYKVGRTPKVLKYHYMVVKS

SEQ ID NO: 6051 - protein, 40 aa, Artificial Sequence
  Non-cyclic GFR-binding peptide
  MOD_RES (5), (6), (40): Xaa is C or S
  MOD_RES (20), (21), (22), (23), (24): Xaa is A or G
  MOD_RES (25), (26), (27), (28): Xaa is A or G or is absent
IPKAXXVPTELSPISMLYKXXXXXXXXXLKYHYDMVVEGX

SEQ ID NO: 6052 - protein, 32 aa, Artificial Sequence
  Non-cyclic GFR-binding peptide
  MOD_RES (1), (32): Xaa is C or S
XVSQDLSATSILYYIGKTPKILRKHRMIVKSX

SEQ ID NO: 6053 - protein, 32 aa, Artificial Sequence
  Non-cyclic GFR-binding peptide
  MOD_RES (1), (2): Xaa is C or S
XXVPQDLSPISILYKVGRTPKVLKYHYMVVKS

SEQ ID NO: 6054 - protein, 39 aa, Artificial Sequence
  Non-cyclic GFR-binding peptide
  MOD_RES (2), (3), (36), (38): Xaa is C or S
  MOD_RES (17), (18), (19), (20), (21): Xaa is A or G
  MOD_RES (22), (23), (24), (25): Xaa is A or G or is absent
PXXVPQALSAISILYLXXXXXXXXXLKNYQMIVRSXKXS

SEQ ID NO: 6055 - protein, 40 aa, Artificial Sequence
  Non-cyclic GFR-binding peptide
  MOD_RES (3), (4), (38), (40): Xaa is C or S
  MOD_RES (18), (19), (20), (21), (22): Xaa is A or G
  MOD_RES (23), (24), (25), (26): Xaa is A or G or is absent
KAXXAPTKLSAISVLYLXXXXXXXXXLKNYQNMVVKAXGX

SEQ ID NO: 6056 - protein, 39 aa, Artificial Sequence
  Non-cyclic GFR-binding peptide
  MOD_RES (5), (6), (37), (39): Xaa is C or S
SAAPXXVPQALSATSILYYVGRKPKVLRKHRMIVRSXKX

SEQ ID NO: 6057 - protein, 38 aa, Artificial Sequence
  Non-cyclic GFR-binding peptide
  MOD_RES (3), (4), (38): Xaa is C or S
  MOD_RES (18), (19), (20), (21), (22): Xaa is A or G
  MOD_RES (23), (24), (25), (26): Xaa is A or G or is absent
KAXXVPTELSPISMLYKXXXXXXXXXLKYHYDMVVEGX

SEQ ID NO: 6058 - protein, 37 aa, Artificial Sequence
  Non-cyclic GFR-binding peptide
  MOD_RES (1), (2), (37): Xaa is C or S
  MOD_RES (16), (17), (18), (19), (20): Xaa is A or G
  MOD_RES (21), (22), (23), (24): Xaa is A or G or is absent
XXVPTKLSAISVLYLXXXXXXXXXLKNYQEGMSVAEX

SEQ ID NO: 6059 - protein, 39 aa, Artificial Sequence
  Non-cyclic GFR-binding peptide
  MOD_RES (3), (4), (36), (38): Xaa is C or S
KPXXAPTKLSPISVLYKDDSSNVILKYHYNMVVRSXGXH

SEQ ID NO: 6060 - protein, 33 aa, Artificial Sequence
  Non-cyclic GFR-binding peptide
TQVQLSATSVLYYEIVRKKPIFLRKHRTLEDHL

SEQ ID NO: 6061 - protein, 42 aa, Artificial Sequence
  Non-cyclic GFR-binding peptide
  MOD_RES (5), (6), (40), (42): Xaa is C or S
  MOD_RES (20), (21), (22), (23), (24): Xaa is A or G
  MOD_RES (25), (26), (27), (28): Xaa is A or G or is absent
IPKAXXVPTELSATSMLYYXXXXXXXXXLRKHRDMVVEGXGX

SEQ ID NO: 6062 - protein, 36 aa, Artificial Sequence
  Non-cyclic GFR-binding peptide
  MOD_RES (3), (4): Xaa is C or S
  MOD_RES (18), (19), (20), (21), (22): Xaa is A or G
  MOD_RES (23), (24), (25), (26): Xaa is A or G or is absent
SPXXVSQDLSATSILYYXXXXXXXXXLRKHRMIVKS

SEQ ID NO: 6063 - protein, 39 aa, Artificial Sequence
  Non-cyclic GFR-binding peptide
  MOD_RES (1), (36), (38): Xaa is C or S
  MOD_RES (15), (16), (17), (18), (19): Xaa is A or G
  MOD_RES (20), (21), (22), (23): Xaa is A or G or is absent
XVPTKLSATSVLYYXXXXXXXXXLRKHREGMSVAEXGXR

SEQ ID NO: 6064 - protein, 39 aa, Artificial Sequence
  Non-cyclic GFR-binding peptide
  MOD_RES (5), (6), (37), (39): Xaa is C or S
SAAPXXVPQALSPISILYKVGRKPKVLKYHYMIVRSXKX

SEQ ID NO: 6065 - protein, 35 aa, Artificial Sequence
  Non-cyclic GFR-binding peptide
  MOD_RES (1), (2): Xaa is C or S
  MOD_RES (16), (17), (18), (19), (20): Xaa is A or G
  MOD_RES (21), (22), (23), (24): Xaa is A or G or is absent
XXVPTELSATSMLYYXXXXXXXXXLRKHRDMVVEG

SEQ ID NO: 6066 - protein, 34 aa, Artificial Sequence
  Non-cyclic GFR-binding peptide
  MOD_RES (1), (2): Xaa is C or S
  MOD_RES (16), (17), (18), (19), (20): Xaa is A or G
  MOD_RES (21), (22), (23), (24): Xaa is A or G or is absent
XXVPQDLSPISILYKXXXXXXXXXLKYHYMVVKS

SEQ ID NO: 6067 - protein, 34 aa, Artificial Sequence
  Non-cyclic GFR-binding peptide
  MOD_RES (1), (1): Xaa is C or S
  MOD_RES (15), (16), (17), (18), (19): Xaa is A or G
  MOD_RES (20), (21), (22), (23): Xaa is A or G or is absent
XAPTKLSPISVLYKXXXXXXXXXLKYHYNMVVKA

SEQ ID NO: 6068 - protein, 38 aa, Artificial Sequence
  Non-cyclic GFR-binding peptide
  MOD_RES (3), (35), (37): Xaa is C or S
PTXAPTKLSPISVLYKDDSSNVILKYHYNMVVRSXGXH

SEQ ID NO: 6069 - protein, 37 aa, Artificial Sequence
  Non-cyclic GFR-binding peptide
  MOD_RES (5), (6), (37): Xaa is C or S
SASPXXVPQDLSATSILYYVGRTPKVLRKHRMVVKSX

SEQ ID NO: 6070 - protein, 33 aa, Artificial Sequence
  Non-cyclic GFR-binding peptide
  MOD_RES (31), (33): Xaa is C or S
VPQALSAISILYLVGRKPKVLKNYQMIVRSXKX

SEQ ID NO: 6071 - protein, 34 aa, Artificial Sequence
  Non-cyclic GFR-binding peptide
  MOD_RES (34), (34): Xaa is C or S
  MOD_RES (14), (15), (16), (17), (18): Xaa is A or G
  MOD_RES (19), (20), (21), (22): Xaa is A or G or is absent
VPTELSPISMLYKXXXXXXXXXLKYHYEMVVEGX

SEQ ID NO: 6072 - protein, 39 aa, Artificial Sequence
  Non-cyclic GFR-binding peptide
  MOD_RES (4), (5), (39): Xaa is C or S
  MOD_RES (19), (20), (21), (22), (23): Xaa is A or G
  MOD_RES (24), (25), (26), (27): Xaa is A or G or is absent
PKPXXAPTKLSATSVLYYXXXXXXXXXLRKHRNMVVRSX

SEQ ID NO: 6073 - protein, 38 aa, Artificial Sequence
  Non-cyclic GFR-binding peptide
  MOD_RES (6), (7): Xaa is C or S
SIPKAXXVPTELSATSMLYYDEYDKVVLRKHREMVVEG

SEQ ID NO: 6074 - protein, 43 aa, Artificial Sequence
  Non-cyclic GFR-binding peptide
  MOD_RES (6), (7), (41), (43): Xaa is C or S
  MOD_RES (21), (22), (23), (24), (25): Xaa is A or G
  MOD_RES (26), (27), (28), (29): Xaa is A or G or is absent
SIPKAXXVPTELNAISMLYFXXXXXXXXXLKKYREMVVEGXGX

SEQ ID NO: 6075 - protein, 37 aa, Artificial Sequence
  Non-cyclic GFR-binding peptide
  MOD_RES (35), (37): Xaa is C or S
TQVQLNAISVLYFEIVRKKPIFLKKYRTLEDHLAXKX

SEQ ID NO: 6076 - protein, 38 aa, Artificial Sequence
  Non-cyclic GFR-binding peptide
  MOD_RES (2), (3), (35), (37): Xaa is C or S
AXXVPTELNAISMLYFDEYDKVVLKKYREMVVEGXGXR

SEQ ID NO: 6077 - protein, 35 aa, Artificial Sequence
  Non-cyclic GFR-binding peptide
  MOD_RES (1), (33), (35): Xaa is C or S
XVPTELSATSMLYYDENEKVVLRKHRDMVVEGXGX

SEQ ID NO: 6078 - protein, 40 aa, Artificial Sequence
  Non-cyclic GFR-binding peptide
  MOD_RES (5), (6), (39): Xaa is C or S
  MOD_RES (20), (21), (22), (23), (24): Xaa is A or G
  MOD_RES (25), (26), (27), (28): Xaa is A or G or is absent
SAAPXXVPQALSATSILYYXXXXXXXXXLRKHRMIVRSXK

SEQ ID NO: 6079 - protein, 36 aa, Artificial Sequence
  Non-cyclic GFR-binding peptide
  MOD_RES (36), (36): Xaa is C or S
  MOD_RES (15), (16), (17), (18), (19): Xaa is A or G
  MOD_RES (20), (21), (22), (23): Xaa is A or G or is absent
PTQVQLSAISVLYLXXXXXXXXXLKNYQTLEDHLAX

SEQ ID NO: 6080 - protein, 35 aa, Artificial Sequence
  Non-cyclic GFR-binding peptide
  MOD_RES (15), (16), (17), (18), (19): Xaa is A or G
  MOD_RES (20), (21), (22), (23): Xaa is A or G or is absent
PTQVQLSPISVLYKXXXXXXXXXLKYHYTLEDHLA

SEQ ID NO: 6081 - protein, 35 aa, Artificial Sequence
  Non-cyclic GFR-binding peptide
  MOD_RES (1), (32), (34): Xaa is C or S
XVPQDLSAISILYLVGRTPKVLKNYQMVVKSXKXS

SEQ ID NO: 6082 - protein, 36 aa, Artificial Sequence
  Non-cyclic GFR-binding peptide
  MOD_RES (1), (2), (35): Xaa is C or S
  MOD_RES (16), (17), (18), (19), (20): Xaa is A or G
  MOD_RES (21), (22), (23), (24): Xaa is A or G or is absent
XXVPQALSPISILYKXXXXXXXXXLKYHYMIVRSXK

SEQ ID NO: 6083 - protein, 37 aa, Artificial Sequence
  Non-cyclic GFR-binding peptide
  MOD_RES (35), (37): Xaa is C or S
  MOD_RES (14), (15), (16), (17), (18): Xaa is A or G
  MOD_RES (19), (20), (21), (22): Xaa is A or G or is absent
VPTKLSAISVLYLXXXXXXXXXLKNYQEGMSVAEXGX

SEQ ID NO: 6084 - protein, 42 aa, Artificial Sequence
  Non-cyclic GFR-binding peptide
  MOD_RES (6), (7), (42): Xaa is C or S
  MOD_RES (21), (22), (23), (24), (25): Xaa is A or G
  MOD_RES (26), (27), (28), (29): Xaa is A or G or is absent
KVGKAXXVPTKLSATSVLYYXXXXXXXXXLRKHREGMSVAEX

SEQ ID NO: 6085 - protein, 39 aa, Artificial Sequence
  Non-cyclic GFR-binding peptide
  MOD_RES (6), (7): Xaa is C or S
  MOD_RES (21), (22), (23), (24), (25): Xaa is A or G
  MOD_RES (26), (27), (28), (29): Xaa is A or G or is absent
ASAAPXXVPQALSATSILYYXXXXXXXXXLRKHRMIVRS

SEQ ID NO: 6086 - protein, 38 aa, Artificial Sequence
  Non-cyclic GFR-binding peptide
  MOD_RES (2), (3), (38): Xaa is C or S
  MOD_RES (17), (18), (19), (20), (21): Xaa is A or G
  MOD_RES (22), (23), (24), (25): Xaa is A or G or is absent
AXXVPTKLSATSVLYYXXXXXXXXXLRKHREGMSVAEX

SEQ ID NO: 6087 - protein, 39 aa, Artificial Sequence
  Non-cyclic GFR-binding peptide
  MOD_RES (5), (6), (39): Xaa is C or S
  MOD_RES (20), (21), (22), (23), (24): Xaa is A or G
  MOD_RES (25), (26), (27), (28): Xaa is A or G or is absent
SASPXXVSQDLNAISILYFXXXXXXXXXLKKYRMIVKSX

SEQ ID NO: 6088 - protein, 35 aa, Artificial Sequence
  Non-cyclic GFR-binding peptide
  MOD_RES (1), (2), (35): Xaa is C or S
  MOD_RES (16), (17), (18), (19), (20): Xaa is A or G
  MOD_RES (21), (22), (23), (24): Xaa is A or G or is absent
XXVPQDLNAISILYFXXXXXXXXXLKKYRMVVKSX

SEQ ID NO: 6089 - protein, 33 aa, Artificial Sequence
  Non-cyclic GFR-binding peptide
  MOD_RES (1), (1): Xaa is C or S
  MOD_RES (15), (16), (17), (18), (19): Xaa is A or G
  MOD_RES (20), (21), (22), (23): Xaa is A or G or is absent
XVPTELSPISMLYKXXXXXXXXXLKYHYEMVVE

SEQ ID NO: 6090 - protein, 39 aa, Artificial Sequence
  Non-cyclic GFR-binding peptide
  MOD_RES (36), (38): Xaa is C or S
  MOD_RES (15), (16), (17), (18), (19): Xaa is A or G
  MOD_RES (20), (21), (22), (23): Xaa is A or G or is absent
PTQVQLNAISVLYFXXXXXXXXXLKKYRTLEDHLAXKXE

SEQ ID NO: 6091 - protein, 39 aa, Artificial Sequence
  Non-cyclic GFR-binding peptide
  MOD_RES (5), (6), (39): Xaa is C or S
  MOD_RES (20), (21), (22), (23), (24): Xaa is A or G
  MOD_RES (25), (26), (27), (28): Xaa is A or G or is absent
SASPXXVPQDLSATSILYYXXXXXXXXXLRKHRMVVKSX

SEQ ID NO: 6092 - protein, 34 aa, Artificial Sequence
  Non-cyclic GFR-binding peptide
  MOD_RES (2), (3), (34): Xaa is C or S
PXXVPQDLSPISILYKVGRTPKVLKYHYMVVKSX

SEQ ID NO: 6093 - protein, 34 aa, Artificial Sequence
  Non-cyclic GFR-binding peptide
  MOD_RES (2), (3): Xaa is C or S
AXXAPTKLNAISVLYFDSSNNVILKKYRNMVVKA

SEQ ID NO: 6094 - protein, 33 aa, Artificial Sequence
  Non-cyclic GFR-binding peptide
  MOD_RES (1), (2): Xaa is C or S
XXAPTKLSAISVLYLDDSSNVILKNYQNMVVRS

SEQ ID NO: 6095 - protein, 33 aa, Artificial Sequence
  Non-cyclic GFR-binding peptide
  MOD_RES (32), (32): Xaa is C or S
APTKLSATSVLYYDDSSNVILRKHRNMVVRSXG

SEQ ID NO: 6096 - protein, 33 aa, Artificial Sequence
  Non-cyclic GFR-binding peptide
  MOD_RES (1), (33): Xaa is C or S
XAPTKLSAISVLYLDDSSNVILKNYQNMVVRSX

SEQ ID NO: 6097 - protein, 31 aa, Artificial Sequence
  Non-cyclic GFR-binding peptide
VPTELSATSMLYYDEYDKVVLRKHREMVVEG

SEQ ID NO: 6098 - protein, 37 aa, Artificial Sequence
  Non-cyclic GFR-binding peptide
  MOD_RES (4), (5), (36): Xaa is C or S
AAPXXVPQALSPISILYKVGRKPKVLKYHYMIVRSXK

SEQ ID NO: 6099 - protein, 43 aa, Artificial Sequence
  Non-cyclic GFR-binding peptide
  MOD_RES (6), (7), (40), (42): Xaa is C or S
  MOD_RES (21), (22), (23), (24), (25): Xaa is A or G
  MOD_RES (26), (27), (28), (29): Xaa is A or G or is absent
ASASPXXVSQDLSATSILYYXXXXXXXXXLRKHRMIVKSXKXS

SEQ ID NO: 6100 - protein, 41 aa, Artificial Sequence
  Non-cyclic GFR-binding peptide
  MOD_RES (5), (5): Xaa is C or S
  MOD_RES (21), (22), (23), (24), (25): Xaa is A or G
  MOD_RES (26), (27), (28), (29): Xaa is A or G or is absent
RNVQXRPTQVQLSAISVLYLXXXXXXXXXLKNYQTLEDHLA

SEQ ID NO: 6101 - protein, 40 aa, Artificial Sequence
  Non-cyclic GFR-binding peptide
  MOD_RES (2), (3), (37), (39): Xaa is C or S
  MOD_RES (17), (18), (19), (20), (21): Xaa is A or G
  MOD_RES (22), (23), (24), (25): Xaa is A or G or is absent
AXXVPTELSPISMLYKXXXXXXXXXLKYHYDMVVEGXGXR

SEQ ID NO: 6102 - protein, 34 aa, Artificial Sequence
  Non-cyclic GFR-binding peptide
  MOD_RES (32), (34): Xaa is C or S
VPTELSPISMLYKDENEKVVLKYHYDMVVEGXGX

SEQ ID NO: 6103 - protein, 41 aa, Artificial Sequence
  Non-cyclic GFR-binding peptide
  MOD_RES (3), (4), (38), (40): Xaa is C or S
  MOD_RES (18), (19), (20), (21), (22): Xaa is A or G
  MOD_RES (23), (24), (25), (26): Xaa is A or G or is absent
KAXXAPTKLSPISVLYKXXXXXXXXXLKYHYNMVVKAXGXH

SEQ ID NO: 6104 - protein, 32 aa, Artificial Sequence
  Non-cyclic GFR-binding peptide
  MOD_RES (14), (15), (16), (17), (18): Xaa is A or G
  MOD_RES (19), (20), (21), (22): Xaa is A or G or is absent
APTKLSAISVLYLXXXXXXXXXLKNYQNMVVK

SEQ ID NO: 6105 - protein, 39 aa, Artificial Sequence
  Non-cyclic GFR-binding peptide
  MOD_RES (5), (6), (39): Xaa is C or S
  MOD_RES (20), (21), (22), (23), (24): Xaa is A or G
  MOD_RES (25), (26), (27), (28): Xaa is A or G or is absent
SASPXXVPQDLSAISILYLXXXXXXXXXLKNYQMVVKSX

SEQ ID NO: 6106 - protein, 39 aa, Artificial Sequence
  Non-cyclic GFR-binding peptide
  MOD_RES (4), (5), (38): Xaa is C or S
  MOD_RES (19), (20), (21), (22), (23): Xaa is A or G
  MOD_RES (24), (25), (26), (27): Xaa is A or G or is absent
ASPXXVPQDLSPISILYKXXXXXXXXXLKYHYMVVKSXK

SEQ ID NO: 6107 - protein, 37 aa, Artificial Sequence
  Non-cyclic GFR-binding peptide
  MOD_RES (2), (3), (36): Xaa is C or S
  MOD_RES (17), (18), (19), (20), (21): Xaa is A or G
  MOD_RES (22), (23), (24), (25): Xaa is A or G or is absent
PXXVPQALNAISILYFXXXXXXXXXLKKYRMIVRSXK

SEQ ID NO: 6108 - protein, 37 aa, Artificial Sequence
  Non-cyclic GFR-binding peptide
  MOD_RES (2), (3), (34), (36): Xaa is C or S
PXXVPQDLNAISILYFVGRTPKVLKKYRMVVKSXKXS

SEQ ID NO: 6109 - protein, 36 aa, Artificial Sequence
  Non-cyclic GFR-binding peptide
  MOD_RES (1), (2), (36): Xaa is C or S
  MOD_RES (16), (17), (18), (19), (20): Xaa is A or G
  MOD_RES (21), (22), (23), (24): Xaa is A or G or is absent
XXAPTKLNAISVLYFXXXXXXXXXLKKYRNMVVKAX

SEQ ID NO: 6110 - protein, 34 aa, Artificial Sequence
  Non-cyclic GFR-binding peptide
  MOD_RES (34), (34): Xaa is C or S
  MOD_RES (14), (15), (16), (17), (18): Xaa is A or G
  MOD_RES (19), (20), (21), (22): Xaa is A or G or is absent
VPTELSATSMLYYXXXXXXXXXLRKHRDMVVEGX

SEQ ID NO: 6111 - protein, 35 aa, Artificial Sequence
  Non-cyclic GFR-binding peptide
  MOD_RES (1), (35): Xaa is C or S
  MOD_RES (15), (16), (17), (18), (19): Xaa is A or G
  MOD_RES (20), (21), (22), (23): Xaa is A or G or is absent
XAPTQLSPISVLYKXXXXXXXXXLKYHYNMVVRAX

SEQ ID NO: 6112 - protein, 41 aa, Artificial Sequence
  Non-cyclic GFR-binding peptide
  MOD_RES (5), (5): Xaa is C or S
  MOD_RES (21), (22), (23), (24), (25): Xaa is A or G
  MOD_RES (26), (27), (28), (29): Xaa is A or G or is absent
RNVQXRPTQVQLSATSVLYYXXXXXXXXXLRKHRTLEDHLA

SEQ ID NO: 6113 - protein, 32 aa, Artificial Sequence
  Non-cyclic GFR-binding peptide
  MOD_RES (1), (1): Xaa is C or S
XAPTQLSAISVLYLDDSSNVILKNYQNMVVRA

SEQ ID NO: 6114 - protein, 44 aa, Artificial Sequence
  Non-cyclic GFR-binding peptide
  MOD_RES (6), (7), (41), (43): Xaa is C or S
  MOD_RES (21), (22), (23), (24), (25): Xaa is A or G
  MOD_RES (26), (27), (28), (29): Xaa is A or G or is absent
SIPKAXXVPTELSATSMLYYXXXXXXXXXLRKHREMVVEGXGXR

SEQ ID NO: 6115 - protein, 31 aa, Artificial Sequence
  Non-cyclic GFR-binding peptide
  MOD_RES (1), (1): Xaa is C or S
XAPTKLSPISVLYKDDSSNVILKYHYNMVVR

SEQ ID NO: 6116 - protein, 38 aa, Artificial Sequence
  Non-cyclic GFR-binding peptide
  MOD_RES (2), (3), (35), (37): Xaa is C or S
PXXAPTKLSPISVLYKDDSSNVILKYHYNMVVRSXGXH

SEQ ID NO: 6117 - protein, 38 aa, Artificial Sequence
  Non-cyclic GFR-binding peptide
  MOD_RES (1), (2), (35), (37): Xaa is C or S
  MOD_RES (16), (17), (18), (19), (20): Xaa is A or G
  MOD_RES (21), (22), (23), (24): Xaa is A or G or is absent
XXVPQALSATSILYYXXXXXXXXXLRKHRMIVRSXKXS

SEQ ID NO: 6118 - protein, 36 aa, Artificial Sequence
  Non-cyclic GFR-binding peptide
  MOD_RES (33), (35): Xaa is C or S
  MOD_RES (14), (15), (16), (17), (18): Xaa is A or G
  MOD_RES (19), (20), (21), (22): Xaa is A or G or is absent
VPQDLSPISILYKXXXXXXXXXLKYHYMVVKSXKXS

SEQ ID NO: 6119 - protein, 35 aa, Artificial Sequence
  Non-cyclic GFR-binding peptide
  MOD_RES (4), (5): Xaa is C or S
PKPXXAPTKLSAISVLYLDDSSNVILKNYQNMVVR

SEQ ID NO: 6120 - protein, 42 aa, Artificial Sequence
  Non-cyclic GFR-binding peptide
  MOD_RES (5), (6), (39), (41): Xaa is C or S
  MOD_RES (20), (21), (22), (23), (24): Xaa is A or G
  MOD_RES (25), (26), (27), (28): Xaa is A or G or is absent
SASPXXVPQDLNAISILYFXXXXXXXXXLKKYRMVVKSXKXS

SEQ ID NO: 6121 - protein, 38 aa, Artificial Sequence
  Non-cyclic GFR-binding peptide
  MOD_RES (2), (2): Xaa is C or S
  MOD_RES (18), (19), (20), (21), (22): Xaa is A or G
  MOD_RES (23), (24), (25), (26): Xaa is A or G or is absent
QXRPTQVQLNAISVLYFXXXXXXXXXLKKYRTLEDHLA

SEQ ID NO: 6122 - protein, 40 aa, Artificial Sequence
  Non-cyclic GFR-binding peptide
  MOD_RES (4), (5), (38), (40): Xaa is C or S
GKAXXVPTKLSAISVLYLDDMGVPTLKNYQEGMSVAEXGX

SEQ ID NO: 6123 - protein, 33 aa, Artificial Sequence
  Non-cyclic GFR-binding peptide
  MOD_RES (1), (1): Xaa is C or S
XVPTKLNAISVLYFDDMGVPTLKKYREGMSVAE

SEQ ID NO: 6124 - protein, 35 aa, Artificial Sequence
  Non-cyclic GFR-binding peptide
  MOD_RES (2), (3): Xaa is C or S
  MOD_RES (17), (18), (19), (20), (21): Xaa is A or G
  MOD_RES (22), (23), (24), (25): Xaa is A or G or is absent
AXXVPTELNAISMLYFXXXXXXXXXLKKYREMVVE

SEQ ID NO: 6125 - protein, 41 aa, Artificial Sequence
  Non-cyclic GFR-binding peptide
  MOD_RES (6), (7), (40): Xaa is C or S
KVGKAXXVPTKLSAISVLYLDDMGVPTLKNYQEGMSVAEXG

SEQ ID NO: 6126 - protein, 39 aa, Artificial Sequence
  Non-cyclic GFR-binding peptide
  MOD_RES (1), (2), (36), (38): Xaa is C or S
  MOD_RES (16), (17), (18), (19), (20): Xaa is A or G
  MOD_RES (21), (22), (23), (24): Xaa is A or G or is absent
XXAPTKLNAISVLYFXXXXXXXXXLKKYRNMVVKAXGXH

SEQ ID NO: 6127 - protein, 41 aa, Artificial Sequence
  Non-cyclic GFR-binding peptide
  MOD_RES (2), (3), (38), (40): Xaa is C or S
  MOD_RES (17), (18), (19), (20), (21): Xaa is A or G
  MOD_RES (22), (23), (24), (25): Xaa is A or G or is absent
AXXVPTKLSAISVLYLXXXXXXXXXLKNYQEGMSVAEXGXR

SEQ ID NO: 6128 - protein, 40 aa, Artificial Sequence
  Non-cyclic GFR-binding peptide
  MOD_RES (3), (4), (37), (39): Xaa is C or S
  MOD_RES (18), (19), (20), (21), (22): Xaa is A or G
  MOD_RES (23), (24), (25), (26): Xaa is A or G or is absent
SPXXVSQDLNAISILYFXXXXXXXXXLKKYRMIVKSXKXS

SEQ ID NO: 6129 - protein, 37 aa, Artificial Sequence
  Non-cyclic GFR-binding peptide
  MOD_RES (35), (37): Xaa is C or S
  MOD_RES (14), (15), (16), (17), (18): Xaa is A or G
  MOD_RES (19), (20), (21), (22): Xaa is A or G or is absent
VPTKLSATSVLYYXXXXXXXXXLRKHREGMSVAEXGX

SEQ ID NO: 6130 - protein, 39 aa, Artificial Sequence
  Non-cyclic GFR-binding peptide
  MOD_RES (3), (4), (38): Xaa is C or S
  MOD_RES (18), (19), (20), (21), (22): Xaa is A or G
  MOD_RES (23), (24), (25), (26): Xaa is A or G or is absent
KAXXVPTELSPISMLYKXXXXXXXXXLKYHYEMVVEGXG

SEQ ID NO: 6131 - protein, 42 aa, Artificial Sequence
  Non-cyclic GFR-binding peptide
  MOD_RES (5), (6), (41): Xaa is C or S
  MOD_RES (20), (21), (22), (23), (24): Xaa is A or G
  MOD_RES (25), (26), (27), (28): Xaa is A or G or is absent
VGKAXXVPTKLSAISVLYLXXXXXXXXXLKNYQEGMSVAEXG

SEQ ID NO: 6132 - protein, 40 aa, Artificial Sequence
  Non-cyclic GFR-binding peptide
  MOD_RES (5), (6), (37), (39): Xaa is C or S
SASPXXVSQDLSPISILYKIGKTPKILKYHYMIVKSXKXS

SEQ ID NO: 6133 - protein, 40 aa, Artificial Sequence
  Non-cyclic GFR-binding peptide
  MOD_RES (6), (7), (38), (40): Xaa is C or S
ASASPXXVPQDLSAISILYLVGRTPKVLKNYQMVVKSXKX

SEQ ID NO: 6134 - protein, 40 aa, Artificial Sequence
  Non-cyclic GFR-binding peptide
  MOD_RES (2), (3), (38), (40): Xaa is C or S
  MOD_RES (17), (18), (19), (20), (21): Xaa is A or G
  MOD_RES (22), (23), (24), (25): Xaa is A or G or is absent
AXXVPTKLSAISVLYLXXXXXXXXXLKNYQEGMSVAEXGX

SEQ ID NO: 6135 - protein, 35 aa, Artificial Sequence
  Non-cyclic GFR-binding peptide
  MOD_RES (1), (2), (35): Xaa is C or S
XXVPTKLSAISVLYLDDMGVPTLKNYQEGMSVAEX

SEQ ID NO: 6136 - protein, 36 aa, Artificial Sequence
  Non-cyclic GFR-binding peptide
  MOD_RES (35), (35): Xaa is C or S
TQVQLNAISVLYFEIVRKKPIFLKKYRTLEDHLAXK

SEQ ID NO: 6137 - protein, 38 aa, Artificial Sequence
  Non-cyclic GFR-binding peptide
  MOD_RES (4), (5), (37): Xaa is C or S
PKPXXAPTKLSATSVLYYDDSSNVILRKHRNMVVRSXG

SEQ ID NO: 6138 - protein, 37 aa, Artificial Sequence
  Non-cyclic GFR-binding peptide
  MOD_RES (1), (34), (36): Xaa is C or S
  MOD_RES (15), (16), (17), (18), (19): Xaa is A or G
  MOD_RES (20), (21), (22), (23): Xaa is A or G or is absent
XVSQDLSAISILYLXXXXXXXXXLKNYQMIVKSXKXS

SEQ ID NO: 6139 - protein, 36 aa, Artificial Sequence
  Non-cyclic GFR-binding peptide
  MOD_RES (2), (3): Xaa is C or S
  MOD_RES (17), (18), (19), (20), (21): Xaa is A or G
  MOD_RES (22), (23), (24), (25): Xaa is A or G or is absent
AXXAPTKLNAISVLYFXXXXXXXXXLKKYRNMVVKA

SEQ ID NO: 6140 - protein, 41 aa, Artificial Sequence
  Non-cyclic GFR-binding peptide
  MOD_RES (6), (7), (39), (41): Xaa is C or S
SIPKAXXVPTELSATSMLYYDEYDKVVLRKHREMVVEGXGX

SEQ ID NO: 6141 - protein, 37 aa, Artificial Sequence
  Non-cyclic GFR-binding peptide
  MOD_RES (4), (5), (37): Xaa is C or S
PKAXXAPTKLNAISVLYFDSSNNVILKKYRNMVVKAX

SEQ ID NO: 6142 - protein, 35 aa, Artificial Sequence
  Non-cyclic GFR-binding peptide
  MOD_RES (1), (2), (33), (35): Xaa is C or S
XXVPQDLSATSILYYVGRTPKVLRKHRMVVKSXKX

SEQ ID NO: 6143 - protein, 38 aa, Artificial Sequence
  Non-cyclic GFR-binding peptide
  MOD_RES (4), (5), (37): Xaa is C or S
PKAXXAPTKLSPISVLYKDSSNNVILKYHYNMVVKAXG

SEQ ID NO: 6144 - protein, 38 aa, Artificial Sequence
  Non-cyclic GFR-binding peptide
  MOD_RES (4), (5): Xaa is C or S
  MOD_RES (19), (20), (21), (22), (23): Xaa is A or G
  MOD_RES (24), (25), (26), (27): Xaa is A or G or is absent
PKPXXAPTKLSPISVLYKXXXXXXXXXLKYHYNMVVRS

SEQ ID NO: 6145 - protein, 40 aa, Artificial Sequence
  Non-cyclic GFR-binding peptide
  MOD_RES (2), (3), (37), (39): Xaa is C or S
  MOD_RES (17), (18), (19), (20), (21): Xaa is A or G
  MOD_RES (22), (23), (24), (25): Xaa is A or G or is absent
PXXAPTKLSPISVLYKXXXXXXXXXLKYHYNMVVRSXGXH

SEQ ID NO: 6146 - protein, 35 aa, Artificial Sequence
  Non-cyclic GFR-binding peptide
  MOD_RES (3), (4): Xaa is C or S
KPXXAPTKLSAISVLYLDDSSNVILKNYQNMVVRS

SEQ ID NO: 6147 - protein, 38 aa, Artificial Sequence
  Non-cyclic GFR-binding peptide
  MOD_RES (4), (5): Xaa is C or S
  MOD_RES (19), (20), (21), (22), (23): Xaa is A or G
  MOD_RES (24), (25), (26), (27): Xaa is A or G or is absent
PKPXXAPTKLSATSVLYYXXXXXXXXXLRKHRNMVVRS

SEQ ID NO: 6148 - protein, 34 aa, Artificial Sequence
  Non-cyclic GFR-binding peptide
  MOD_RES (31), (33): Xaa is C or S
VPQDLSPISILYKVGRTPKVLKYHYMVVKSXKXS

SEQ ID NO: 6149 - protein, 38 aa, Artificial Sequence
  Non-cyclic GFR-binding peptide
  MOD_RES (3), (4), (35), (37): Xaa is C or S
SPXXVPQDLSATSILYYVGRTPKVLRKHRMVVKSXKXS

SEQ ID NO: 6150 - protein, 38 aa, Artificial Sequence
  Non-cyclic GFR-binding peptide
  MOD_RES (4), (5), (38): Xaa is C or S
  MOD_RES (19), (20), (21), (22), (23): Xaa is A or G
  MOD_RES (24), (25), (26), (27): Xaa is A or G or is absent
AAPXXVPQALNAISILYFXXXXXXXXXLKKYRMIVRSX

SEQ ID NO: 6151 - protein, 32 aa, Artificial Sequence
  Non-cyclic GFR-binding peptide
  MOD_RES (14), (15), (16), (17), (18): Xaa is A or G
  MOD_RES (19), (20), (21), (22): Xaa is A or G or is absent
APTKLSPISVLYKXXXXXXXXXLKYHYNMVVK

SEQ ID NO: 6152 - protein, 41 aa, Artificial Sequence
  Non-cyclic GFR-binding peptide
  MOD_RES (7), (39), (41): Xaa is C or S
HVTKPTXAPTKLSATSVLYYDDSSNVILRKHRNMVVRSXGX

SEQ ID NO: 6153 - protein, 40 aa, Artificial Sequence
  Non-cyclic GFR-binding peptide
  MOD_RES (6), (7), (40): Xaa is C or S
  MOD_RES (21), (22), (23), (24), (25): Xaa is A or G
  MOD_RES (26), (27), (28), (29): Xaa is A or G or is absent
ASASPXXVSQDLSPISILYKXXXXXXXXXLKYHYMIVKSX

SEQ ID NO: 6154 - protein, 31 aa, Artificial Sequence
  Non-cyclic GFR-binding peptide
  MOD_RES (1), (1): Xaa is C or S
XVPQALSAISILYLVGRKPKVLKNYQMIVRS

SEQ ID NO: 6155 - protein, 41 aa, Artificial Sequence
  Non-cyclic GFR-binding peptide
  MOD_RES (6), (7), (39), (41): Xaa is C or S
TVPKPXXAPTQLSATSVLYYDDSSNVILRKHRNMVVRAXGX

SEQ ID NO: 6156 - protein, 39 aa, Artificial Sequence
  Non-cyclic GFR-binding peptide
  MOD_RES (6), (38): Xaa is C or S
VTKPTXAPTKLSATSVLYYDDSSNVILRKHRNMVVRSXG

SEQ ID NO: 6157 - protein, 31 aa, Artificial Sequence
  Non-cyclic GFR-binding peptide
  MOD_RES (1), (1): Xaa is C or S
XAPTKLSAISVLYLDDSSNVILKNYQNMVVR

SEQ ID NO: 6158 - protein, 41 aa, Artificial Sequence
  Non-cyclic GFR-binding peptide
  MOD_RES (6), (38), (40): Xaa is C or S
VTKPTXAPTKLSATSVLYYDDSSNVILRKHRNMVVRSXGXH

SEQ ID NO: 6159 - protein, 35 aa, Artificial Sequence
  Non-cyclic GFR-binding peptide
  MOD_RES (4), (5): Xaa is C or S
PKPXXAPTKLSPISVLYKDDSSNVILKYHYNMVVR

SEQ ID NO: 6160 - protein, 39 aa, Artificial Sequence
  Non-cyclic GFR-binding peptide
  MOD_RES (3), (4), (37), (39): Xaa is C or S
  MOD_RES (18), (19), (20), (21), (22): Xaa is A or G
  MOD_RES (23), (24), (25), (26): Xaa is A or G or is absent
APXXVPQALSATSILYYXXXXXXXXXLRKHRMIVRSXKX

SEQ ID NO: 6161 - protein, 37 aa, Artificial Sequence
  Non-cyclic GFR-binding peptide
  MOD_RES (3), (37): Xaa is C or S
  MOD_RES (17), (18), (19), (20), (21): Xaa is A or G
  MOD_RES (22), (23), (24), (25): Xaa is A or G or is absent
PTXAPTKLSPISVLYKXXXXXXXXXLKYHYNMVVRSX

SEQ ID NO: 6162 - protein, 35 aa, Artificial Sequence
  Non-cyclic GFR-binding peptide
  MOD_RES (32), (34): Xaa is C or S
APTKLSATSVLYYDDSSNVILRKHRNMVVRSXGXH

SEQ ID NO: 6163 - protein, 36 aa, Artificial Sequence
  Non-cyclic GFR-binding peptide
  MOD_RES (34), (36): Xaa is C or S
  MOD_RES (14), (15), (16), (17), (18): Xaa is A or G
  MOD_RES (19), (20), (21), (22): Xaa is A or G or is absent
VPTELSATSMLYYXXXXXXXXXLRKHREMVVEGXGX

SEQ ID NO: 6164 - protein, 34 aa, Artificial Sequence
  Non-cyclic GFR-binding peptide
  MOD_RES (2), (3): Xaa is C or S
AXXAPTKLSAISVLYLDSSNNVILKNYQNMVVKA

SEQ ID NO: 6165 - protein, 36 aa, Artificial Sequence
  Non-cyclic GFR-binding peptide
  MOD_RES (3), (4): Xaa is C or S
  MOD_RES (18), (19), (20), (21), (22): Xaa is A or G
  MOD_RES (23), (24), (25), (26): Xaa is A or G or is absent
SPXXVPQDLSAISILYLXXXXXXXXXLKNYQMVVKS

SEQ ID NO: 6166 - protein, 41 aa, Artificial Sequence
  Non-cyclic GFR-binding peptide
  MOD_RES (5), (6), (38), (40): Xaa is C or S
VPKPXXAPTQLSAISVLYLDDSSNVILKNYQNMVVRAXGXH

SEQ ID NO: 6167 - protein, 32 aa, Artificial Sequence
  Non-cyclic GFR-binding peptide
  MOD_RES (14), (15), (16), (17), (18): Xaa is A or G
  MOD_RES (19), (20), (21), (22): Xaa is A or G or is absent
APTKLSPISVLYKXXXXXXXXXLKYHYNMVVR

SEQ ID NO: 6168 - protein, 37 aa, Artificial Sequence
  Non-cyclic GFR-binding peptide
  MOD_RES (1), (2), (36): Xaa is C or S
  MOD_RES (16), (17), (18), (19), (20): Xaa is A or G
  MOD_RES (21), (22), (23), (24): Xaa is A or G or is absent
XXAPTQLSATSVLYYXXXXXXXXXLRKHRNMVVRAXG

SEQ ID NO: 6169 - protein, 37 aa, Artificial Sequence
  Non-cyclic GFR-binding peptide
  MOD_RES (3), (4), (37): Xaa is C or S
KAXXVPTKLSATSVLYYDDMGVPTLRKHREGMSVAEX

SEQ ID NO: 6170 - protein, 37 aa, Artificial Sequence
  Non-cyclic GFR-binding peptide
  MOD_RES (3), (3): Xaa is C or S
  MOD_RES (19), (20), (21), (22), (23): Xaa is A or G
  MOD_RES (24), (25), (26), (27): Xaa is A or G or is absent
VQXRPTQVQLNAISVLYFXXXXXXXXXLKKYRTLEDH

SEQ ID NO: 6171 - protein, 32 aa, Artificial Sequence
  Non-cyclic GFR-binding peptide
  MOD_RES (1), (2): Xaa is C or S
XXVPTELSPISMLYKDEYDKVVLKYHYEMVVE

SEQ ID NO: 6172 - protein, 40 aa, Artificial Sequence
  Non-cyclic GFR-binding peptide
  MOD_RES (6), (7), (39): Xaa is C or S
TVPKPXXAPTQLSPISVLYKDDSSNVILKYHYNMVVRAXG

SEQ ID NO: 6173 - protein, 33 aa, Artificial Sequence
  Non-cyclic GFR-binding peptide
  MOD_RES (1), (1): Xaa is C or S
  MOD_RES (15), (16), (17), (18), (19): Xaa is A or G
  MOD_RES (20), (21), (22), (23): Xaa is A or G or is absent
XVPQALSPISILYKXXXXXXXXXLKYHYMIVRS

SEQ ID NO: 6174 - protein, 38 aa, Artificial Sequence
  Non-cyclic GFR-binding peptide
  MOD_RES (1), (2), (35), (37): Xaa is C or S
  MOD_RES (16), (17), (18), (19), (20): Xaa is A or G
  MOD_RES (21), (22), (23), (24): Xaa is A or G or is absent
XXVPQALSAISILYLXXXXXXXXXLKNYQMIVRSXKXS

SEQ ID NO: 6175 - protein, 36 aa, Artificial Sequence
  Non-cyclic GFR-binding peptide
  MOD_RES (3), (4): Xaa is C or S
  MOD_RES (18), (19), (20), (21), (22): Xaa is A or G
  MOD_RES (23), (24), (25), (26): Xaa is A or G or is absent
SPXXVSQDLSPISILYKXXXXXXXXXLKYHYMIVKS

SEQ ID NO: 6176 - protein, 38 aa, Artificial Sequence
  Non-cyclic GFR-binding peptide
  MOD_RES (3), (3): Xaa is C or S
  MOD_RES (19), (20), (21), (22), (23): Xaa is A or G
  MOD_RES (24), (25), (26), (27): Xaa is A or G or is absent
VQXRPTQVQLSATSVLYYXXXXXXXXXLRKHRTLEDHL

SEQ ID NO: 6177 - protein, 40 aa, Artificial Sequence
  Non-cyclic GFR-binding peptide
  MOD_RES (6), (7): Xaa is C or S
  MOD_RES (21), (22), (23), (24), (25): Xaa is A or G
  MOD_RES (26), (27), (28), (29): Xaa is A or G or is absent
SIPKAXXVPTELSPISMLYKXXXXXXXXXLKYHYEMVVEG

SEQ ID NO: 6178 - protein, 38 aa, Artificial Sequence
  Non-cyclic GFR-binding peptide
  MOD_RES (3), (3): Xaa is C or S
  MOD_RES (19), (20), (21), (22), (23): Xaa is A or G
  MOD_RES (24), (25), (26), (27): Xaa is A or G or is absent
VQXRPTQVQLSPISVLYKXXXXXXXXXLKYHYTLEDHL

SEQ ID NO: 6179 - protein, 39 aa, Artificial Sequence
  Non-cyclic GFR-binding peptide
  MOD_RES (3), (4), (37), (39): Xaa is C or S
  MOD_RES (18), (19), (20), (21), (22): Xaa is A or G
  MOD_RES (23), (24), (25), (26): Xaa is A or G or is absent
SPXXVSQDLSATSILYYXXXXXXXXXLRKHRMIVKSXKX

SEQ ID NO: 6180 - protein, 40 aa, Artificial Sequence
  Non-cyclic GFR-binding peptide
  MOD_RES (6), (7), (38), (40): Xaa is C or S
ASAAPXXVPQALNAISILYFVGRKPKVLKKYRMIVRSXKX

SEQ ID NO: 6181 - protein, 39 aa, Artificial Sequence
  Non-cyclic GFR-binding peptide
  MOD_RES (6), (6): Xaa is C or S
  MOD_RES (20), (21), (22), (23), (24): Xaa is A or G
  MOD_RES (25), (26), (27), (28): Xaa is A or G or is absent
VTKPTXAPTKLSAISVLYLXXXXXXXXXLKNYQNMVVRS

SEQ ID NO: 6182 - protein, 36 aa, Artificial Sequence
  Non-cyclic GFR-binding peptide
  MOD_RES (4), (5), (36): Xaa is C or S
AAPXXVPQALSPISILYKVGRKPKVLKYHYMIVRSX

SEQ ID NO: 6183 - protein, 37 aa, Artificial Sequence
  Non-cyclic GFR-binding peptide
  MOD_RES (34), (36): Xaa is C or S
  MOD_RES (14), (15), (16), (17), (18): Xaa is A or G
  MOD_RES (19), (20), (21), (22): Xaa is A or G or is absent
APTKLSPISVLYKXXXXXXXXXLKYHYNMVVRSXGXH

SEQ ID NO: 6184 - protein, 41 aa, Artificial Sequence
  Non-cyclic GFR-binding peptide
  MOD_RES (2), (39), (41): Xaa is C or S
QXRPTQVQLSAISVLYLEIVRKKPIFLKNYQTLEDHLAXKX

SEQ ID NO: 6185 - protein, 32 aa, Artificial Sequence
  Non-cyclic GFR-binding peptide
  MOD_RES (1), (1): Xaa is C or S
XAPTQLSATSVLYYDDSSNVILRKHRNMVVRA

SEQ ID NO: 6186 - protein, 33 aa, Artificial Sequence
  Non-cyclic GFR-binding peptide
  MOD_RES (1), (2), (33): Xaa is C or S
XXVPQDLNAISILYFVGRTPKVLKKYRMVVKSX

SEQ ID NO: 6187 - protein, 38 aa, Artificial Sequence
  Non-cyclic GFR-binding peptide
  MOD_RES (5), (6): Xaa is C or S
  MOD_RES (20), (21), (22), (23), (24): Xaa is A or G
  MOD_RES (25), (26), (27), (28): Xaa is A or G or is absent
VPKPXXAPTKLSPISVLYKXXXXXXXXXLKYHYNMVVR

SEQ ID NO: 6188 - protein, 37 aa, Artificial Sequence
  Non-cyclic GFR-binding peptide
  MOD_RES (2), (2): Xaa is C or S
QXRPTQVQLSATSVLYYEIVRKKPIFLRKHRTLEDHL

SEQ ID NO: 6189 - protein, 30 aa, Artificial Sequence
  Non-cyclic GFR-binding peptide
APTKLSAISVLYLDSSNNVILKNYQNMVVK

SEQ ID NO: 6190 - protein, 38 aa, Artificial Sequence
  Non-cyclic GFR-binding peptide
  MOD_RES (1), (35), (37): Xaa is C or S
  MOD_RES (15), (16), (17), (18), (19): Xaa is A or G
  MOD_RES (20), (21), (22), (23): Xaa is A or G or is absent
XAPTQLSAISVLYLXXXXXXXXXLKNYQNMVVRAXGXH

SEQ ID NO: 6191 - protein, 38 aa, Artificial Sequence
  Non-cyclic GFR-binding peptide
  MOD_RES (3), (4), (38): Xaa is C or S
  MOD_RES (18), (19), (20), (21), (22): Xaa is A or G
  MOD_RES (23), (24), (25), (26): Xaa is A or G or is absent
KPXXAPTQLSAISVLYLXXXXXXXXXLKNYQNMVVRAX

SEQ ID NO: 6192 - protein, 37 aa, Artificial Sequence
  Non-cyclic GFR-binding peptide
  MOD_RES (2), (3), (34), (36): Xaa is C or S
PXXVPQALSATSILYYVGRKPKVLRKHRMIVRSXKXS

SEQ ID NO: 6193 - protein, 37 aa, Artificial Sequence
  Non-cyclic GFR-binding peptide
  MOD_RES (3), (4), (36): Xaa is C or S
KAXXVPTELSPISMLYKDEYDKVVLKYHYEMVVEGXG

SEQ ID NO: 6194 - protein, 39 aa, Artificial Sequence
  Non-cyclic GFR-binding peptide
  MOD_RES (5), (6), (38): Xaa is C or S
IPKAXXVPTELSPISMLYKDEYDKVVLKYHYEMVVEGXG

SEQ ID NO: 6195 - protein, 35 aa, Artificial Sequence
  Non-cyclic GFR-binding peptide
  MOD_RES (1), (2), (35): Xaa is C or S
  MOD_RES (16), (17), (18), (19), (20): Xaa is A or G
  MOD_RES (21), (22), (23), (24): Xaa is A or G or is absent
XXVPQALNAISILYFXXXXXXXXXLKKYRMIVRSX

SEQ ID NO: 6196 - protein, 36 aa, Artificial Sequence
  Non-cyclic GFR-binding peptide
  MOD_RES (4), (4): Xaa is C or S
  MOD_RES (18), (19), (20), (21), (22): Xaa is A or G
  MOD_RES (23), (24), (25), (26): Xaa is A or G or is absent
KPTXAPTKLSAISVLYLXXXXXXXXXLKNYQNMVVR

SEQ ID NO: 6197 - protein, 36 aa, Artificial Sequence
  Non-cyclic GFR-binding peptide
  MOD_RES (1), (33), (35): Xaa is C or S
XVPTELSPISMLYKDENEKVVLKYHYDMVVEGXGXR

SEQ ID NO: 6198 - protein, 39 aa, Artificial Sequence
  Non-cyclic GFR-binding peptide
  MOD_RES (4), (5), (37), (39): Xaa is C or S
PKPXXAPTQLSATSVLYYDDSSNVILRKHRNMVVRAXGX

SEQ ID NO: 6199 - protein, 41 aa, Artificial Sequence
  Non-cyclic GFR-binding peptide
  MOD_RES (4), (5), (39), (41): Xaa is C or S
  MOD_RES (19), (20), (21), (22), (23): Xaa is A or G
  MOD_RES (24), (25), (26), (27): Xaa is A or G or is absent
PKAXXVPTELSATSMLYYXXXXXXXXXLRKHRDMVVEGXGX

SEQ ID NO: 6200 - protein, 34 aa, Artificial Sequence
  Non-cyclic GFR-binding peptide
  MOD_RES (33), (33): Xaa is C or S
VPTKLSATSVLYYDDMGVPTLRKHREGMSVAEXG

SEQ ID NO: 6201 - protein, 39 aa, Artificial Sequence
  Non-cyclic GFR-binding peptide
  MOD_RES (3), (4), (38): Xaa is C or S
  MOD_RES (18), (19), (20), (21), (22): Xaa is A or G
  MOD_RES (23), (24), (25), (26): Xaa is A or G or is absent
KAXXVPTELSPISMLYKXXXXXXXXXLKYHYDMVVEGXG

SEQ ID NO: 6202 - protein, 33 aa, Artificial Sequence
  Non-cyclic GFR-binding peptide
  MOD_RES (32), (32): Xaa is C or S
VPTELNAISMLYFDEYDKVVLKKYREMVVEGXG

SEQ ID NO: 6203 - protein, 36 aa, Artificial Sequence
  Non-cyclic GFR-binding peptide
RPTQVQLNAISVLYFEIVRKKPIFLKKYRTLEDHLA

SEQ ID NO: 6204 - protein, 35 aa, Artificial Sequence
  Non-cyclic GFR-binding peptide
  MOD_RES (3), (4), (35): Xaa is C or S
APXXVPQALSPISILYKVGRKPKVLKYHYMIVRSX

SEQ ID NO: 6205 - protein, 34 aa, Artificial Sequence
  Non-cyclic GFR-binding peptide
  MOD_RES (2), (3): Xaa is C or S
PXXAPTKLSATSVLYYDDSSNVILRKHRNMVVRS

SEQ ID NO: 6206 - protein, 38 aa, Artificial Sequence
  Non-cyclic GFR-binding peptide
  MOD_RES (4), (5): Xaa is C or S
  MOD_RES (19), (20), (21), (22), (23): Xaa is A or G
  MOD_RES (24), (25), (26), (27): Xaa is A or G or is absent
PKPXXAPTQLSAISVLYLXXXXXXXXXLKNYQNMVVRA

SEQ ID NO: 6207 - protein, 37 aa, Artificial Sequence
  Non-cyclic GFR-binding peptide
  MOD_RES (4), (5): Xaa is C or S
  MOD_RES (19), (20), (21), (22), (23): Xaa is A or G
  MOD_RES (24), (25), (26), (27): Xaa is A or G or is absent
PKPXXAPTQLSPISVLYKXXXXXXXXXLKYHYNMVVR

SEQ ID NO: 6208 - protein, 43 aa, Artificial Sequence
  Non-cyclic GFR-binding peptide
  MOD_RES (6), (7), (40), (42): Xaa is C or S
  MOD_RES (21), (22), (23), (24), (25): Xaa is A or G
  MOD_RES (26), (27), (28), (29): Xaa is A or G or is absent
ASASPXXVSQDLSAISILYLXXXXXXXXXLKNYQMIVKSXKXS

SEQ ID NO: 6209 - protein, 35 aa, Artificial Sequence
  Non-cyclic GFR-binding peptide
  MOD_RES (1), (2), (35): Xaa is C or S
  MOD_RES (16), (17), (18), (19), (20): Xaa is A or G
  MOD_RES (21), (22), (23), (24): Xaa is A or G or is absent
XXVSQDLSATSILYYXXXXXXXXXLRKHRMIVKSX

SEQ ID NO: 6210 - protein, 38 aa, Artificial Sequence
  Non-cyclic GFR-binding peptide
  MOD_RES (5), (37): Xaa is C or S
TKPTXAPTKLSATSVLYYDDSSNVILRKHRNMVVRSXG

SEQ ID NO: 6211 - protein, 33 aa, Artificial Sequence
  Non-cyclic GFR-binding peptide
  MOD_RES (2), (3): Xaa is C or S
PXXVSQDLSATSILYYIGKTPKILRKHRMIVKS

SEQ ID NO: 6212 - protein, 37 aa, Artificial Sequence
  Non-cyclic GFR-binding peptide
  MOD_RES (6), (6): Xaa is C or S
VTKPTXAPTKLSATSVLYYDDSSNVILRKHRNMVVRS

SEQ ID NO: 6213 - protein, 40 aa, Artificial Sequence
  Non-cyclic GFR-binding peptide
  MOD_RES (3), (4), (37), (39): Xaa is C or S
  MOD_RES (18), (19), (20), (21), (22): Xaa is A or G
  MOD_RES (23), (24), (25), (26): Xaa is A or G or is absent
SPXXVPQDLNAISILYFXXXXXXXXXLKKYRMVVKSXKXS

SEQ ID NO: 6214 - protein, 35 aa, Artificial Sequence
  Non-cyclic GFR-binding peptide
  MOD_RES (1), (33), (35): Xaa is C or S
XAPTKLSAISVLYLDDSSNVILKNYQNMVVRSXGX

SEQ ID NO: 6215 - protein, 35 aa, Artificial Sequence
  Non-cyclic GFR-binding peptide
  MOD_RES (1), (2): Xaa is C or S
  MOD_RES (16), (17), (18), (19), (20): Xaa is A or G
  MOD_RES (21), (22), (23), (24): Xaa is A or G or is absent
XXAPTQLSATSVLYYXXXXXXXXXLRKHRNMVVRA

SEQ ID NO: 6216 - protein, 35 aa, Artificial Sequence
  Non-cyclic GFR-binding peptide
  MOD_RES (3), (4): Xaa is C or S
KPXXAPTQLSAISVLYLDDSSNVILKNYQNMVVRA

SEQ ID NO: 6217 - protein, 38 aa, Artificial Sequence
  Non-cyclic GFR-binding peptide
  MOD_RES (3), (4): Xaa is C or S
  MOD_RES (18), (19), (20), (21), (22): Xaa is A or G
  MOD_RES (23), (24), (25), (26): Xaa is A or G or is absent
KAXXVPTKLSAISVLYLXXXXXXXXXLKNYQEGMSVAE

SEQ ID NO: 6218 - protein, 39 aa, Artificial Sequence
  Non-cyclic GFR-binding peptide
  MOD_RES (4), (4): Xaa is C or S
NVQXRPTQVQLSPISVLYKEIVRKKPIFLKYHYTLEDHL

SEQ ID NO: 6219 - protein, 35 aa, Artificial Sequence
  Non-cyclic GFR-binding peptide
  MOD_RES (1), (2), (35): Xaa is C or S
  MOD_RES (16), (17), (18), (19), (20): Xaa is A or G
  MOD_RES (21), (22), (23), (24): Xaa is A or G or is absent
XXVSQDLSAISILYLXXXXXXXXXLKNYQMIVKSX

SEQ ID NO: 6220 - protein, 40 aa, Artificial Sequence
  Non-cyclic GFR-binding peptide
  MOD_RES (5), (6), (37), (39): Xaa is C or S
SAAPXXVPQALSATSILYYVGRKPKVLRKHRMIVRSXKXS

SEQ ID NO: 6221 - protein, 35 aa, Artificial Sequence
  Non-cyclic GFR-binding peptide
  MOD_RES (2), (3), (34): Xaa is C or S
PXXVSQDLSAISILYLIGKTPKILKNYQMIVKSXK

SEQ ID NO: 6222 - protein, 38 aa, Artificial Sequence
  Non-cyclic GFR-binding peptide
  MOD_RES (3), (4): Xaa is C or S
  MOD_RES (18), (19), (20), (21), (22): Xaa is A or G
  MOD_RES (23), (24), (25), (26): Xaa is A or G or is absent
KAXXVPTKLSATSVLYYXXXXXXXXXLRKHREGMSVAE

SEQ ID NO: 6223 - protein, 45 aa, Artificial Sequence
  Non-cyclic GFR-binding peptide
  MOD_RES (5), (42), (44): Xaa is C or S
RNVQXRPTQVQLSATSVLYYEIVRKKPIFLRKHRTLEDHLAXKXE

SEQ ID NO: 6224 - protein, 41 aa, Artificial Sequence
  Non-cyclic GFR-binding peptide
  MOD_RES (5), (6), (38), (40): Xaa is C or S
IPKAXXVPTELSPISMLYKDEYDKVVLKYHYEMVVEGXGXR

SEQ ID NO: 6225 - protein, 42 aa, Artificial Sequence
  Non-cyclic GFR-binding peptide
  MOD_RES (6), (7), (39), (41): Xaa is C or S
KIPKAXXVPTELSATSMLYYDENEKVVLRKHRDMVVEGXGXR

SEQ ID NO: 6226 - protein, 36 aa, Artificial Sequence
  Non-cyclic GFR-binding peptide
  MOD_RES (2), (3), (36): Xaa is C or S
  MOD_RES (17), (18), (19), (20), (21): Xaa is A or G
  MOD_RES (22), (23), (24), (25): Xaa is A or G or is absent
PXXVPQDLSPISILYKXXXXXXXXXLKYHYMVVKSX

SEQ ID NO: 6227 - protein, 39 aa, Artificial Sequence
  Non-cyclic GFR-binding peptide
  MOD_RES (4), (5), (38): Xaa is C or S
  MOD_RES (19), (20), (21), (22), (23): Xaa is A or G
  MOD_RES (24), (25), (26), (27): Xaa is A or G or is absent
ASPXXVPQDLSAISILYLXXXXXXXXXLKNYQMVVKSXK

SEQ ID NO: 6228 - protein, 40 aa, Artificial Sequence
  Non-cyclic GFR-binding peptide
  MOD_RES (2), (39): Xaa is C or S
QXRPTQVQLSPISVLYKEIVRKKPIFLKYHYTLEDHLAXK

SEQ ID NO: 6229 - protein, 38 aa, Artificial Sequence
  Non-cyclic GFR-binding peptide
  MOD_RES (4), (36), (38): Xaa is C or S
KPTXAPTKLSAISVLYLDDSSNVILKNYQNMVVRSXGX

SEQ ID NO: 6230 - protein, 35 aa, Artificial Sequence
  Non-cyclic GFR-binding peptide
  MOD_RES (3), (4): Xaa is C or S
KAXXVPTELNAISMLYFDEYDKVVLKKYREMVVEG

SEQ ID NO: 6231 - protein, 37 aa, Artificial Sequence
  Non-cyclic GFR-binding peptide
  MOD_RES (36), (36): Xaa is C or S
PTQVQLSPISVLYKEIVRKKPIFLKYHYTLEDHLAXK

SEQ ID NO: 6232 - protein, 37 aa, Artificial Sequence
  Non-cyclic GFR-binding peptide
  MOD_RES (4), (5), (36): Xaa is C or S
ASPXXVPQDLSATSILYYVGRTPKVLRKHRMVVKSXK

SEQ ID NO: 6233 - protein, 37 aa, Artificial Sequence
  Non-cyclic GFR-binding peptide
  MOD_RES (37), (37): Xaa is C or S
  MOD_RES (16), (17), (18), (19), (20): Xaa is A or G
  MOD_RES (21), (22), (23), (24): Xaa is A or G or is absent
RPTQVQLSPISVLYKXXXXXXXXXLKYHYTLEDHLAX

SEQ ID NO: 6234 - protein, 37 aa, Artificial Sequence
  Non-cyclic GFR-binding peptide
  MOD_RES (4), (5), (36): Xaa is C or S
ASPXXVPQDLSAISILYLVGRTPKVLKNYQMVVKSXK

SEQ ID NO: 6235 - protein, 35 aa, Artificial Sequence
  Non-cyclic GFR-binding peptide
  MOD_RES (1), (2): Xaa is C or S
  MOD_RES (16), (17), (18), (19), (20): Xaa is A or G
  MOD_RES (21), (22), (23), (24): Xaa is A or G or is absent
XXAPTKLSPISVLYKXXXXXXXXXLKYHYNMVVRS

SEQ ID NO: 6236 - protein, 41 aa, Artificial Sequence
  Non-cyclic GFR-binding peptide
  MOD_RES (6), (7), (38), (40): Xaa is C or S
ASASPXXVPQDLSAISILYLVGRTPKVLKNYQMVVKSXKXS

SEQ ID NO: 6237 - protein, 41 aa, Artificial Sequence
  Non-cyclic GFR-binding peptide
  MOD_RES (5), (5): Xaa is C or S
  MOD_RES (21), (22), (23), (24), (25): Xaa is A or G
  MOD_RES (26), (27), (28), (29): Xaa is A or G or is absent
RNVQXRPTQVQLSPISVLYKXXXXXXXXXLKYHYTLEDHLA

SEQ ID NO: 6238 - protein, 44 aa, Artificial Sequence
  Non-cyclic GFR-binding peptide
  MOD_RES (6), (7), (41), (43): Xaa is C or S
  MOD_RES (21), (22), (23), (24), (25): Xaa is A or G
  MOD_RES (26), (27), (28), (29): Xaa is A or G or is absent
AVPKAXXAPTKLSAISVLYLXXXXXXXXXLKNYQNMVVKAXGXH

SEQ ID NO: 6239 - protein, 39 aa, Artificial Sequence
  Non-cyclic GFR-binding peptide
  MOD_RES (4), (5), (39): Xaa is C or S
  MOD_RES (19), (20), (21), (22), (23): Xaa is A or G
  MOD_RES (24), (25), (26), (27): Xaa is A or G or is absent
PKPXXAPTKLSAISVLYLXXXXXXXXXLKNYQNMVVRSX

SEQ ID NO: 6240 - protein, 38 aa, Artificial Sequence
  Non-cyclic GFR-binding peptide
  MOD_RES (2), (3), (36), (38): Xaa is C or S
  MOD_RES (17), (18), (19), (20), (21): Xaa is A or G
  MOD_RES (22), (23), (24), (25): Xaa is A or G or is absent
PXXVPQDLNAISILYFXXXXXXXXXLKKYRMVVKSXKX

SEQ ID NO: 6241 - protein, 33 aa, Artificial Sequence
  Non-cyclic GFR-binding peptide
  MOD_RES (1), (2): Xaa is C or S
XXAPTKLSPISVLYKDSSNNVILKYHYNMVVKA

SEQ ID NO: 6242 - protein, 38 aa, Artificial Sequence
  Non-cyclic GFR-binding peptide
  MOD_RES (1), (2), (36), (38): Xaa is C or S
  MOD_RES (16), (17), (18), (19), (20): Xaa is A or G
  MOD_RES (21), (22), (23), (24): Xaa is A or G or is absent
XXVPTELSPISMLYKXXXXXXXXXLKYHYEMVVEGXGX

SEQ ID NO: 6243 - protein, 40 aa, Artificial Sequence
  Non-cyclic GFR-binding peptide
  MOD_RES (2), (3), (37), (39): Xaa is C or S
  MOD_RES (17), (18), (19), (20), (21): Xaa is A or G
  MOD_RES (22), (23), (24), (25): Xaa is A or G or is absent
AXXAPTKLNAISVLYFXXXXXXXXXLKKYRNMVVKAXGXH

SEQ ID NO: 6244 - protein, 40 aa, Artificial Sequence
  Non-cyclic GFR-binding peptide
  MOD_RES (4), (38), (40): Xaa is C or S
  MOD_RES (18), (19), (20), (21), (22): Xaa is A or G
  MOD_RES (23), (24), (25), (26): Xaa is A or G or is absent
KPTXAPTKLSAISVLYLXXXXXXXXXLKNYQNMVVRSXGX

SEQ ID NO: 6245 - protein, 36 aa, Artificial Sequence
  Non-cyclic GFR-binding peptide
  MOD_RES (3), (35): Xaa is C or S
PTXAPTKLSATSVLYYDDSSNVILRKHRNMVVRSXG

SEQ ID NO: 6246 - protein, 32 aa, Artificial Sequence
  Non-cyclic GFR-binding peptide
  MOD_RES (14), (15), (16), (17), (18): Xaa is A or G
  MOD_RES (19), (20), (21), (22): Xaa is A or G or is absent
VPTELNAISMLYFXXXXXXXXXLKKYRDMVVE

SEQ ID NO: 6247 - protein, 37 aa, Artificial Sequence
  Non-cyclic GFR-binding peptide
  MOD_RES (4), (5): Xaa is C or S
  MOD_RES (19), (20), (21), (22), (23): Xaa is A or G
  MOD_RES (24), (25), (26), (27): Xaa is A or G or is absent
ASPXXVSQDLSPISILYKXXXXXXXXXLKYHYMIVKS

SEQ ID NO: 6248 - protein, 41 aa, Artificial Sequence
  Non-cyclic GFR-binding peptide
  MOD_RES (4), (41): Xaa is C or S
  MOD_RES (20), (21), (22), (23), (24): Xaa is A or G
  MOD_RES (25), (26), (27), (28): Xaa is A or G or is absent
NVQXRPTQVQLSATSVLYYXXXXXXXXXLRKHRTLEDHLAX

SEQ ID NO: 6249 - protein, 40 aa, Artificial Sequence
  Non-cyclic GFR-binding peptide
  MOD_RES (6), (7), (39): Xaa is C or S
YVPKPXXAPTKLSPISVLYKDDSSNVILKYHYNMVVRSXG

SEQ ID NO: 6250 - protein, 39 aa, Artificial Sequence
  Non-cyclic GFR-binding peptide
  MOD_RES (6), (7), (38): Xaa is C or S
ASASPXXVPQDLSPISILYKVGRTPKVLKYHYMVVKSXK

SEQ ID NO: 6251 - protein, 42 aa, Artificial Sequence
  Non-cyclic GFR-binding peptide
  MOD_RES (2), (39), (41): Xaa is C or S
  MOD_RES (18), (19), (20), (21), (22): Xaa is A or G
  MOD_RES (23), (24), (25), (26): Xaa is A or G or is absent
QXRPTQVQLSAISVLYLXXXXXXXXXLKNYQTLEDHLAXKXE

SEQ ID NO: 6252 - protein, 45 aa, Artificial Sequence
  Non-cyclic GFR-binding peptide
  MOD_RES (5), (42), (44): Xaa is C or S
  MOD_RES (21), (22), (23), (24), (25): Xaa is A or G
  MOD_RES (26), (27), (28), (29): Xaa is A or G or is absent
RNVQXRPTQVQLSAISVLYLXXXXXXXXXLKNYQTLEDHLAXKXE

SEQ ID NO: 6253 - protein, 36 aa, Artificial Sequence
  Non-cyclic GFR-binding peptide
  MOD_RES (34), (36): Xaa is C or S
  MOD_RES (14), (15), (16), (17), (18): Xaa is A or G
  MOD_RES (19), (20), (21), (22): Xaa is A or G or is absent
APTKLSATSVLYYXXXXXXXXXLRKHRNMVVRSXGX

SEQ ID NO: 6254 - protein, 38 aa, Artificial Sequence
  Non-cyclic GFR-binding peptide
  MOD_RES (5), (5): Xaa is C or S
  MOD_RES (19), (20), (21), (22), (23): Xaa is A or G
  MOD_RES (24), (25), (26), (27): Xaa is A or G or is absent
TKPTXAPTKLSATSVLYYXXXXXXXXXLRKHRNMVVRS

SEQ ID NO: 6255 - protein, 39 aa, Artificial Sequence
  Non-cyclic GFR-binding peptide
  MOD_RES (6), (7), (39): Xaa is C or S
YVPKPXXAPTKLSPISVLYKDDSSNVILKYHYNMVVRSX

SEQ ID NO: 6256 - protein, 35 aa, Artificial Sequence
  Non-cyclic GFR-binding peptide
  MOD_RES (34), (34): Xaa is C or S
  MOD_RES (14), (15), (16), (17), (18): Xaa is A or G
  MOD_RES (19), (20), (21), (22): Xaa is A or G or is absent
APTKLSPISVLYKXXXXXXXXXLKYHYNMVVKAXG

SEQ ID NO: 6257 - protein, 31 aa, Artificial Sequence
  Non-cyclic GFR-binding peptide
  MOD_RES (1), (1): Xaa is C or S
XVSQDLNAISILYFIGKTPKILKKYRMIVKS

SEQ ID NO: 6258 - protein, 41 aa, Artificial Sequence
  Non-cyclic GFR-binding peptide
  MOD_RES (4), (5), (40): Xaa is C or S
  MOD_RES (19), (20), (21), (22), (23): Xaa is A or G
  MOD_RES (24), (25), (26), (27): Xaa is A or G or is absent
GKAXXVPTKLNAISVLYFXXXXXXXXXLKKYREGMSVAEXG

SEQ ID NO: 6259 - protein, 40 aa, Artificial Sequence
  Non-cyclic GFR-binding peptide
  MOD_RES (4), (5), (38), (40): Xaa is C or S
  MOD_RES (19), (20), (21), (22), (23): Xaa is A or G
  MOD_RES (24), (25), (26), (27): Xaa is A or G or is absent
ASPXXVSQDLSATSILYYXXXXXXXXXLRKHRMIVKSXKX

SEQ ID NO: 6260 - protein, 32 aa, Artificial Sequence
  Non-cyclic GFR-binding peptide
  MOD_RES (1), (2): Xaa is C or S
XXVSQDLSATSILYYIGKTPKILRKHRMIVKS

SEQ ID NO: 6261 - protein, 34 aa, Artificial Sequence
  Non-cyclic GFR-binding peptide
  MOD_RES (1), (2): Xaa is C or S
  MOD_RES (16), (17), (18), (19), (20): Xaa is A or G
  MOD_RES (21), (22), (23), (24): Xaa is A or G or is absent
XXVSQDLNAISILYFXXXXXXXXXLKKYRMIVKS

SEQ ID NO: 6262 - protein, 41 aa, Artificial Sequence
  Non-cyclic GFR-binding peptide
  MOD_RES (5), (6), (40): Xaa is C or S
  MOD_RES (20), (21), (22), (23), (24): Xaa is A or G
  MOD_RES (25), (26), (27), (28): Xaa is A or G or is absent
VPKPXXAPTQLSATSVLYYXXXXXXXXXLRKHRNMVVRAXG

SEQ ID NO: 6263 - protein, 38 aa, Artificial Sequence
  Non-cyclic GFR-binding peptide
  MOD_RES (35), (37): Xaa is C or S
  MOD_RES (14), (15), (16), (17), (18): Xaa is A or G
  MOD_RES (19), (20), (21), (22): Xaa is A or G or is absent
TQVQLNAISVLYFXXXXXXXXXLKKYRTLEDHLAXKXE

SEQ ID NO: 6264 - protein, 41 aa, Artificial Sequence
  Non-cyclic GFR-binding peptide
  MOD_RES (2), (39), (41): Xaa is C or S
QXRPTQVQLSATSVLYYEIVRKKPIFLRKHRTLEDHLAXKX

SEQ ID NO: 6265 - protein, 35 aa, Artificial Sequence
  Non-cyclic GFR-binding peptide
  MOD_RES (2), (3), (35): Xaa is C or S
PXXAPTQLSAISVLYLDDSSNVILKNYQNMVVRAX

SEQ ID NO: 6266 - protein, 40 aa, Artificial Sequence
  Non-cyclic GFR-binding peptide
  MOD_RES (2), (3), (37), (39): Xaa is C or S
  MOD_RES (17), (18), (19), (20), (21): Xaa is A or G
  MOD_RES (22), (23), (24), (25): Xaa is A or G or is absent
AXXVPTELSATSMLYYXXXXXXXXXLRKHREMVVEGXGXR

SEQ ID NO: 6267 - protein, 35 aa, Artificial Sequence
  Non-cyclic GFR-binding peptide
  MOD_RES (35), (35): Xaa is C or S
  MOD_RES (14), (15), (16), (17), (18): Xaa is A or G
  MOD_RES (19), (20), (21), (22): Xaa is A or G or is absent
TQVQLNAISVLYFXXXXXXXXXLKKYRTLEDHLAX

SEQ ID NO: 6268 - protein, 35 aa, Artificial Sequence
  Non-cyclic GFR-binding peptide
  MOD_RES (4), (5): Xaa is C or S
PKAXXVPTELSPISMLYKDENEKVVLKYHYDMVVE

SEQ ID NO: 6269 - protein, 34 aa, Artificial Sequence
  Non-cyclic GFR-binding peptide
  MOD_RES (32), (34): Xaa is C or S
APTQLSATSVLYYDDSSNVILRKHRNMVVRAXGX

SEQ ID NO: 6270 - protein, 34 aa, Artificial Sequence
  Non-cyclic GFR-binding peptide
  MOD_RES (2), (3), (34): Xaa is C or S
PXXVPQALNAISILYFVGRKPKVLKKYRMIVRSX

SEQ ID NO: 6271 - protein, 38 aa, Artificial Sequence
  Non-cyclic GFR-binding peptide
  MOD_RES (6), (7), (38): Xaa is C or S
ASAAPXXVPQALNAISILYFVGRKPKVLKKYRMIVRSX

SEQ ID NO: 6272 - protein, 38 aa, Artificial Sequence
  Non-cyclic GFR-binding peptide
  MOD_RES (4), (4): Xaa is C or S
  MOD_RES (20), (21), (22), (23), (24): Xaa is A or G
  MOD_RES (25), (26), (27), (28): Xaa is A or G or is absent
NVQXRPTQVQLSAISVLYLXXXXXXXXXLKNYQTLEDH

SEQ ID NO: 6273 - protein, 38 aa, Artificial Sequence
  Non-cyclic GFR-binding peptide
  MOD_RES (1), (35), (37): Xaa is C or S
  MOD_RES (15), (16), (17), (18), (19): Xaa is A or G
  MOD_RES (20), (21), (22), (23): Xaa is A or G or is absent
XAPTQLSATSVLYYXXXXXXXXXLRKHRNMVVRAXGXH

SEQ ID NO: 6274 - protein, 40 aa, Artificial Sequence
  Non-cyclic GFR-binding peptide
  MOD_RES (4), (5), (38), (40): Xaa is C or S
  MOD_RES (19), (20), (21), (22), (23): Xaa is A or G
  MOD_RES (24), (25), (26), (27): Xaa is A or G or is absent
AAPXXVPQALSATSILYYXXXXXXXXXLRKHRMIVRSXKX

SEQ ID NO: 6275 - protein, 33 aa, Artificial Sequence
  Non-cyclic GFR-binding peptide
  MOD_RES (14), (15), (16), (17), (18): Xaa is A or G
  MOD_RES (19), (20), (21), (22): Xaa is A or G or is absent
APTQLSAISVLYLXXXXXXXXXLKNYQNMVVRA

SEQ ID NO: 6276 - protein, 39 aa, Artificial Sequence
  Non-cyclic GFR-binding peptide
  MOD_RES (1), (2), (36), (38): Xaa is C or S
  MOD_RES (16), (17), (18), (19), (20): Xaa is A or G
  MOD_RES (21), (22), (23), (24): Xaa is A or G or is absent
XXAPTKLSAISVLYLXXXXXXXXXLKNYQNMVVRSXGXH

SEQ ID NO: 6277 - protein, 38 aa, Artificial Sequence
  Non-cyclic GFR-binding peptide
  MOD_RES (1), (38): Xaa is C or S
  MOD_RES (17), (18), (19), (20), (21): Xaa is A or G
  MOD_RES (22), (23), (24), (25): Xaa is A or G or is absent
XRPTQVQLNAISVLYFXXXXXXXXXLKKYRTLEDHLAX

SEQ ID NO: 6278 - protein, 40 aa, Artificial Sequence
  Non-cyclic GFR-binding peptide
  MOD_RES (4), (5), (39): Xaa is C or S
  MOD_RES (19), (20), (21), (22), (23): Xaa is A or G
  MOD_RES (24), (25), (26), (27): Xaa is A or G or is absent
PKAXXVPTELSPISMLYKXXXXXXXXXLKYHYDMVVEGXG

SEQ ID NO: 6279 - protein, 32 aa, Artificial Sequence
  Non-cyclic GFR-binding peptide
  MOD_RES (14), (15), (16), (17), (18): Xaa is A or G
  MOD_RES (19), (20), (21), (22): Xaa is A or G or is absent
APTQLSPISVLYKXXXXXXXXXLKYHYNMVVR

SEQ ID NO: 6280 - protein, 39 aa, Artificial Sequence
  Non-cyclic GFR-binding peptide
  MOD_RES (4), (5), (38): Xaa is C or S
  MOD_RES (19), (20), (21), (22), (23): Xaa is A or G
  MOD_RES (24), (25), (26), (27): Xaa is A or G or is absent
AAPXXVPQALSPISILYKXXXXXXXXXLKYHYMIVRSXK

SEQ ID NO: 6281 - protein, 41 aa, Artificial Sequence
  Non-cyclic GFR-binding peptide
  MOD_RES (3), (40): Xaa is C or S
VQXRPTQVQLSATSVLYYEIVRKKPIFLRKHRTLEDHLAXK

SEQ ID NO: 6282 - protein, 37 aa, Artificial Sequence
  Non-cyclic GFR-binding peptide
  MOD_RES (2), (3), (35), (37): Xaa is C or S
AXXVPTELNAISMLYFDENEKVVLKKYRDMVVEGXGX

SEQ ID NO: 6283 - protein, 40 aa, Artificial Sequence
  Non-cyclic GFR-binding peptide
  MOD_RES (6), (7): Xaa is C or S
  MOD_RES (21), (22), (23), (24), (25): Xaa is A or G
  MOD_RES (26), (27), (28), (29): Xaa is A or G or is absent
YVPKPXXAPTKLSAISVLYLXXXXXXXXXLKNYQNMVVRS

SEQ ID NO: 6284 - protein, 40 aa, Artificial Sequence
  Non-cyclic GFR-binding peptide
  MOD_RES (3), (40): Xaa is C or S
  MOD_RES (19), (20), (21), (22), (23): Xaa is A or G
  MOD_RES (24), (25), (26), (27): Xaa is A or G or is absent
VQXRPTQVQLNAISVLYFXXXXXXXXXLKKYRTLEDHLAX

SEQ ID NO: 6285 - protein, 37 aa, Artificial Sequence
  Non-cyclic GFR-binding peptide
  MOD_RES (4), (5): Xaa is C or S
  MOD_RES (19), (20), (21), (22), (23): Xaa is A or G
  MOD_RES (24), (25), (26), (27): Xaa is A or G or is absent
ASPXXVSQDLSATSILYYXXXXXXXXXLRKHRMIVKS

SEQ ID NO: 6286 - protein, 36 aa, Artificial Sequence
  Non-cyclic GFR-binding peptide
  MOD_RES (1), (2), (34), (36): Xaa is C or S
XXVPTELSATSMLYYDENEKVVLRKHRDMVVEGXGX

SEQ ID NO: 6287 - protein, 40 aa, Artificial Sequence
  Non-cyclic GFR-binding peptide
  MOD_RES (6), (7), (38), (40): Xaa is C or S
ASASPXXVSQDLSAISILYLIGKTPKILKNYQMIVKSXKX

SEQ ID NO: 6288 - protein, 40 aa, Artificial Sequence
  Non-cyclic GFR-binding peptide
  MOD_RES (6), (7), (40): Xaa is C or S
  MOD_RES (21), (22), (23), (24), (25): Xaa is A or G
  MOD_RES (26), (27), (28), (29): Xaa is A or G or is absent
ASASPXXVSQDLSATSILYYXXXXXXXXXLRKHRMIVKSX

SEQ ID NO: 6289 - protein, 36 aa, Artificial Sequence
  Non-cyclic GFR-binding peptide
  MOD_RES (4), (5): Xaa is C or S
PKPXXAPTQLSPISVLYKDDSSNVILKYHYNMVVRA

SEQ ID NO: 6290 - protein, 35 aa, Artificial Sequence
  Non-cyclic GFR-binding peptide
  MOD_RES (33), (35): Xaa is C or S
  MOD_RES (14), (15), (16), (17), (18): Xaa is A or G
  MOD_RES (19), (20), (21), (22): Xaa is A or G or is absent
VPQDLSPISILYKXXXXXXXXXLKYHYMVVKSXKX

SEQ ID NO: 6291 - protein, 38 aa, Artificial Sequence
  Non-cyclic GFR-binding peptide
  MOD_RES (3), (37): Xaa is C or S
  MOD_RES (17), (18), (19), (20), (21): Xaa is A or G
  MOD_RES (22), (23), (24), (25): Xaa is A or G or is absent
PTXAPTKLSATSVLYYXXXXXXXXXLRKHRNMVVRSXG

SEQ ID NO: 6292 - protein, 35 aa, Artificial Sequence
  Non-cyclic GFR-binding peptide
  MOD_RES (2), (3): Xaa is C or S
AXXVPTKLSATSVLYYDDMGVPTLRKHREGMSVAE

SEQ ID NO: 6293 - protein, 40 aa, Artificial Sequence
  Non-cyclic GFR-binding peptide
  MOD_RES (4), (5), (39): Xaa is C or S
  MOD_RES (19), (20), (21), (22), (23): Xaa is A or G
  MOD_RES (24), (25), (26), (27): Xaa is A or G or is absent
PKPXXAPTKLSAISVLYLXXXXXXXXXLKNYQNMVVRSXG

SEQ ID NO: 6294 - protein, 37 aa, Artificial Sequence
  Non-cyclic GFR-binding peptide
  MOD_RES (4), (5): Xaa is C or S
  MOD_RES (19), (20), (21), (22), (23): Xaa is A or G
  MOD_RES (24), (25), (26), (27): Xaa is A or G or is absent
ASPXXVPQDLSAISILYLXXXXXXXXXLKNYQMVVKS

SEQ ID NO: 6295 - protein, 34 aa, Artificial Sequence
  Non-cyclic GFR-binding peptide
  MOD_RES (3), (4): Xaa is C or S
KPXXAPTKLSPISVLYKDDSSNVILKYHYNMVVR

SEQ ID NO: 6296 - protein, 37 aa, Artificial Sequence
  Non-cyclic GFR-binding peptide
  MOD_RES (4), (5): Xaa is C or S
  MOD_RES (19), (20), (21), (22), (23): Xaa is A or G
  MOD_RES (24), (25), (26), (27): Xaa is A or G or is absent
PKPXXAPTKLSPISVLYKXXXXXXXXXLKYHYNMVVR

SEQ ID NO: 6297 - protein, 39 aa, Artificial Sequence
  Non-cyclic GFR-binding peptide
  MOD_RES (4), (5), (38): Xaa is C or S
  MOD_RES (19), (20), (21), (22), (23): Xaa is A or G
  MOD_RES (24), (25), (26), (27): Xaa is A or G or is absent
AAPXXVPQALSAISILYLXXXXXXXXXLKNYQMIVRSXK

SEQ ID NO: 6298 - protein, 34 aa, Artificial Sequence
  Non-cyclic GFR-binding peptide
  MOD_RES (3), (3): Xaa is C or S
PTXAPTKLSPISVLYKDDSSNVILKYHYNMVVRS

SEQ ID NO: 6299 - protein, 33 aa, Artificial Sequence
  Non-cyclic GFR-binding peptide
  MOD_RES (32), (32): Xaa is C or S
APTKLSAISVLYLDSSNNVILKNYQNMVVKAXG

SEQ ID NO: 6300 - protein, 37 aa, Artificial Sequence
  Non-cyclic GFR-binding peptide
  MOD_RES (1), (34), (36): Xaa is C or S
  MOD_RES (15), (16), (17), (18), (19): Xaa is A or G
  MOD_RES (20), (21), (22), (23): Xaa is A or G or is absent
XVPQDLNAISILYFXXXXXXXXXLKKYRMVVKSXKXS

SEQ ID NO: 6301 - protein, 40 aa, Artificial Sequence
  Non-cyclic GFR-binding peptide
  MOD_RES (6), (7), (40): Xaa is C or S
  MOD_RES (21), (22), (23), (24), (25): Xaa is A or G
  MOD_RES (26), (27), (28), (29): Xaa is A or G or is absent
ASASPXXVSQDLSAISILYLXXXXXXXXXLKNYQMIVKSX

SEQ ID NO: 6302 - protein, 38 aa, Artificial Sequence
  Non-cyclic GFR-binding peptide
  MOD_RES (4), (5), (38): Xaa is C or S
  MOD_RES (19), (20), (21), (22), (23): Xaa is A or G
  MOD_RES (24), (25), (26), (27): Xaa is A or G or is absent
ASPXXVSQDLSPISILYKXXXXXXXXXLKYHYMIVKSX

SEQ ID NO: 6303 - protein, 41 aa, Artificial Sequence
  Non-cyclic GFR-binding peptide
  MOD_RES (6), (40): Xaa is C or S
  MOD_RES (20), (21), (22), (23), (24): Xaa is A or G
  MOD_RES (25), (26), (27), (28): Xaa is A or G or is absent
VTKPTXAPTKLSPISVLYKXXXXXXXXXLKYHYNMVVRSXG

SEQ ID NO: 6304 - protein, 37 aa, Artificial Sequence
  Non-cyclic GFR-binding peptide
  MOD_RES (1), (2), (36): Xaa is C or S
  MOD_RES (16), (17), (18), (19), (20): Xaa is A or G
  MOD_RES (21), (22), (23), (24): Xaa is A or G or is absent
XXAPTKLSAISVLYLXXXXXXXXXLKNYQNMVVRSXG

SEQ ID NO: 6305 - protein, 35 aa, Artificial Sequence
  Non-cyclic GFR-binding peptide
  MOD_RES (2), (3): Xaa is C or S
  MOD_RES (17), (18), (19), (20), (21): Xaa is A or G
  MOD_RES (22), (23), (24), (25): Xaa is A or G or is absent
AXXVPTELSATSMLYYXXXXXXXXXLRKHREMVVE

SEQ ID NO: 6306 - protein, 40 aa, Artificial Sequence
  Non-cyclic GFR-binding peptide
  MOD_RES (4), (5), (38), (40): Xaa is C or S
  MOD_RES (19), (20), (21), (22), (23): Xaa is A or G
  MOD_RES (24), (25), (26), (27): Xaa is A or G or is absent
ASPXXVPQDLSPISILYKXXXXXXXXXLKYHYMVVKSXKX

SEQ ID NO: 6307 - protein, 37 aa, Artificial Sequence
  Non-cyclic GFR-binding peptide
  MOD_RES (3), (4), (36): Xaa is C or S
KAXXAPTKLSPISVLYKDSSNNVILKYHYNMVVKAXG

SEQ ID NO: 6308 - protein, 35 aa, Artificial Sequence
  Non-cyclic GFR-binding peptide
  MOD_RES (1), (2): Xaa is C or S
  MOD_RES (16), (17), (18), (19), (20): Xaa is A or G
  MOD_RES (21), (22), (23), (24): Xaa is A or G or is absent
XXAPTQLSAISVLYLXXXXXXXXXLKNYQNMVVRA

SEQ ID NO: 6309 - protein, 39 aa, Artificial Sequence
  Non-cyclic GFR-binding peptide
  MOD_RES (1), (38): Xaa is C or S
  MOD_RES (17), (18), (19), (20), (21): Xaa is A or G
  MOD_RES (22), (23), (24), (25): Xaa is A or G or is absent
XRPTQVQLSAISVLYLXXXXXXXXXLKNYQTLEDHLAXK

SEQ ID NO: 6310 - protein, 32 aa, Artificial Sequence
  Non-cyclic GFR-binding peptide
  MOD_RES (1), (2): Xaa is C or S
XXVPTELSATSMLYYDENEKVVLRKHRDMVVE

SEQ ID NO: 6311 - protein, 36 aa, Artificial Sequence
  Non-cyclic GFR-binding peptide
  MOD_RES (34), (36): Xaa is C or S
  MOD_RES (14), (15), (16), (17), (18): Xaa is A or G
  MOD_RES (19), (20), (21), (22): Xaa is A or G or is absent
APTKLSAISVLYLXXXXXXXXXLKNYQNMVVKAXGX

SEQ ID NO: 6312 - protein, 37 aa, Artificial Sequence
  Non-cyclic GFR-binding peptide
  MOD_RES (2), (3), (35), (37): Xaa is C or S
PXXAPTQLSAISVLYLDDSSNVILKNYQNMVVRAXGX

SEQ ID NO: 6313 - protein, 38 aa, Artificial Sequence
  Non-cyclic GFR-binding peptide
  MOD_RES (4), (5): Xaa is C or S
  MOD_RES (19), (20), (21), (22), (23): Xaa is A or G
  MOD_RES (24), (25), (26), (27): Xaa is A or G or is absent
PKAXXVPTELNAISMLYFXXXXXXXXXLKKYRDMVVEG

SEQ ID NO: 6314 - protein, 32 aa, Artificial Sequence
  Non-cyclic GFR-binding peptide
  MOD_RES (14), (15), (16), (17), (18): Xaa is A or G
  MOD_RES (19), (20), (21), (22): Xaa is A or G or is absent
VSQDLSAISILYLXXXXXXXXXLKNYQMIVKS

SEQ ID NO: 6315 - protein, 38 aa, Artificial Sequence
  Non-cyclic GFR-binding peptide
  MOD_RES (5), (6), (37): Xaa is C or S
SASPXXVPQDLSPISILYKVGRTPKVLKYHYMVVKSXK

SEQ ID NO: 6316 - protein, 37 aa, Artificial Sequence
  Non-cyclic GFR-binding peptide
  MOD_RES (2), (2): Xaa is C or S
  MOD_RES (18), (19), (20), (21), (22): Xaa is A or G
  MOD_RES (23), (24), (25), (26): Xaa is A or G or is absent
QXRPTQVQLNAISVLYFXXXXXXXXXLKKYRTLEDHL

SEQ ID NO: 6317 - protein, 41 aa, Artificial Sequence
  Non-cyclic GFR-binding peptide
  MOD_RES (3), (40): Xaa is C or S
VQXRPTQVQLSAISVLYLEIVRKKPIFLKNYQTLEDHLAXK

SEQ ID NO: 6318 - protein, 35 aa, Artificial Sequence
  Non-cyclic GFR-binding peptide
  MOD_RES (1), (1): Xaa is C or S
  MOD_RES (17), (18), (19), (20), (21): Xaa is A or G
  MOD_RES (22), (23), (24), (25): Xaa is A or G or is absent
XRPTQVQLNAISVLYFXXXXXXXXXLKKYRTLEDH

SEQ ID NO: 6319 - protein, 33 aa, Artificial Sequence
  Non-cyclic GFR-binding peptide
  MOD_RES (1), (1): Xaa is C or S
  MOD_RES (15), (16), (17), (18), (19): Xaa is A or G
  MOD_RES (20), (21), (22), (23): Xaa is A or G or is absent
XVPQALSAISILYLXXXXXXXXXLKNYQMIVRS

SEQ ID NO: 6320 - protein, 32 aa, Artificial Sequence
  Non-cyclic GFR-binding peptide
  MOD_RES (1), (32): Xaa is C or S
XVPQALSATSILYYVGRKPKVLRKHRMIVRSX

SEQ ID NO: 6321 - protein, 32 aa, Artificial Sequence
  Non-cyclic GFR-binding peptide
  MOD_RES (1), (2): Xaa is C or S
XXVPQALSATSILYYVGRKPKVLRKHRMIVRS

SEQ ID NO: 6322 - protein, 34 aa, Artificial Sequence
  Non-cyclic GFR-binding peptide
  MOD_RES (3), (4): Xaa is C or S
KPXXAPTKLSAISVLYLDDSSNVILKNYQNMVVR

SEQ ID NO: 6323 - protein, 33 aa, Artificial Sequence
  Non-cyclic GFR-binding peptide
  MOD_RES (31), (33): Xaa is C or S
VPQDLSATSILYYVGRTPKVLRKHRMVVKSXKX

SEQ ID NO: 6324 - protein, 31 aa, Artificial Sequence
  Non-cyclic GFR-binding peptide
  MOD_RES (1), (1): Xaa is C or S
XVPQALNAISILYFVGRKPKVLKKYRMIVRS

SEQ ID NO: 6325 - protein, 36 aa, Artificial Sequence
  Non-cyclic GFR-binding peptide
  MOD_RES (1), (2), (33), (35): Xaa is C or S
XXVPQALSATSILYYVGRKPKVLRKHRMIVRSXKXS

SEQ ID NO: 6326 - protein, 38 aa, Artificial Sequence
  Non-cyclic GFR-binding peptide
  MOD_RES (1), (35), (37): Xaa is C or S
  MOD_RES (15), (16), (17), (18), (19): Xaa is A or G
  MOD_RES (20), (21), (22), (23): Xaa is A or G or is absent
XAPTKLSPISVLYKXXXXXXXXXLKYHYNMVVKAXGXH

SEQ ID NO: 6327 - protein, 38 aa, Artificial Sequence
  Non-cyclic GFR-binding peptide
  MOD_RES (4), (5), (37): Xaa is C or S
PKAXXVPTELSPISMLYKDEYDKVVLKYHYEMVVEGXG

SEQ ID NO: 6328 - protein, 38 aa, Artificial Sequence
  Non-cyclic GFR-binding peptide
  MOD_RES (1), (2), (36), (38): Xaa is C or S
  MOD_RES (16), (17), (18), (19), (20): Xaa is A or G
  MOD_RES (21), (22), (23), (24): Xaa is A or G or is absent
XXAPTKLSPISVLYKXXXXXXXXXLKYHYNMVVRSXGX

SEQ ID NO: 6329 - protein, 34 aa, Artificial Sequence
  Non-cyclic GFR-binding peptide
  MOD_RES (3), (4): Xaa is C or S
KAXXVPTELSATSMLYYDENEKVVLRKHRDMVVE

SEQ ID NO: 6330 - protein, 38 aa, Artificial Sequence
  Non-cyclic GFR-binding peptide
  MOD_RES (6), (7), (38): Xaa is C or S
ASASPXXVSQDLSPISILYKIGKTPKILKYHYMIVKSX

SEQ ID NO: 6331 - protein, 38 aa, Artificial Sequence
  Non-cyclic GFR-binding peptide
  MOD_RES (6), (7): Xaa is C or S
TVPKPXXAPTQLSAISVLYLDDSSNVILKNYQNMVVRA

SEQ ID NO: 6332 - protein, 38 aa, Artificial Sequence
  Non-cyclic GFR-binding peptide
  MOD_RES (3), (4), (37): Xaa is C or S
  MOD_RES (18), (19), (20), (21), (22): Xaa is A or G
  MOD_RES (23), (24), (25), (26): Xaa is A or G or is absent
SPXXVPQDLSPISILYKXXXXXXXXXLKYHYMVVKSXK

SEQ ID NO: 6333 - protein, 38 aa, Artificial Sequence
  Non-cyclic GFR-binding peptide
  MOD_RES (35), (37): Xaa is C or S
TQVQLSAISVLYLEIVRKKPIFLKNYQTLEDHLAXKXE

SEQ ID NO: 6334 - protein, 36 aa, Artificial Sequence
  Non-cyclic GFR-binding peptide
  MOD_RES (34), (36): Xaa is C or S
  MOD_RES (14), (15), (16), (17), (18): Xaa is A or G
  MOD_RES (19), (20), (21), (22): Xaa is A or G or is absent
APTQLSPISVLYKXXXXXXXXXLKYHYNMVVRAXGX

SEQ ID NO: 6335 - protein, 44 aa, Artificial Sequence
  Non-cyclic GFR-binding peptide
  MOD_RES (4), (41), (43): Xaa is C or S
NVQXRPTQVQLSAISVLYLEIVRKKPIFLKNYQTLEDHLAXKXE

SEQ ID NO: 6336 - protein, 37 aa, Artificial Sequence
  Non-cyclic GFR-binding peptide
  MOD_RES (4), (5): Xaa is C or S
  MOD_RES (19), (20), (21), (22), (23): Xaa is A or G
  MOD_RES (24), (25), (26), (27): Xaa is A or G or is absent
PKAXXVPTELSPISMLYKXXXXXXXXXLKYHYDMVVE

SEQ ID NO: 6337 - protein, 38 aa, Artificial Sequence
  Non-cyclic GFR-binding peptide
  MOD_RES (2), (3), (35), (37): Xaa is C or S
AXXVPTELSATSMLYYDEYDKVVLRKHREMVVEGXGXR

SEQ ID NO: 6338 - protein, 34 aa, Artificial Sequence
  Non-cyclic GFR-binding peptide
  MOD_RES (1), (32), (34): Xaa is C or S
XVSQDLSATSILYYIGKTPKILRKHRMIVKSXKX

SEQ ID NO: 6339 - protein, 40 aa, Artificial Sequence
  Non-cyclic GFR-binding peptide
  MOD_RES (4), (5), (39): Xaa is C or S
  MOD_RES (19), (20), (21), (22), (23): Xaa is A or G
  MOD_RES (24), (25), (26), (27): Xaa is A or G or is absent
PKAXXVPTELSATSMLYYXXXXXXXXXLRKHREMVVEGXG

SEQ ID NO: 6340 - protein, 37 aa, Artificial Sequence
  Non-cyclic GFR-binding peptide
  MOD_RES (3), (4), (36): Xaa is C or S
KPXXAPTKLSATSVLYYDDSSNVILRKHRNMVVRSXG

SEQ ID NO: 6341 - protein, 38 aa, Artificial Sequence
  Non-cyclic GFR-binding peptide
  MOD_RES (5), (6): Xaa is C or S
  MOD_RES (20), (21), (22), (23), (24): Xaa is A or G
  MOD_RES (25), (26), (27), (28): Xaa is A or G or is absent
VPKPXXAPTKLSATSVLYYXXXXXXXXXLRKHRNMVVR

SEQ ID NO: 6342 - protein, 37 aa, Artificial Sequence
  Non-cyclic GFR-binding peptide
  MOD_RES (2), (34), (36): Xaa is C or S
TXAPTKLSPISVLYKDDSSNVILKYHYNMVVRSXGXH

SEQ ID NO: 6343 - protein, 35 aa, Artificial Sequence
  Non-cyclic GFR-binding peptide
  MOD_RES (33), (35): Xaa is C or S
  MOD_RES (14), (15), (16), (17), (18): Xaa is A or G
  MOD_RES (19), (20), (21), (22): Xaa is A or G or is absent
VPQDLNAISILYFXXXXXXXXXLKKYRMVVKSXKX

SEQ ID NO: 6344 - protein, 36 aa, Artificial Sequence
  Non-cyclic GFR-binding peptide
  MOD_RES (1), (2), (33), (35): Xaa is C or S
XXVPQDLNAISILYFVGRTPKVLKKYRMVVKSXKXS

SEQ ID NO: 6345 - protein, 40 aa, Artificial Sequence
  Non-cyclic GFR-binding peptide
  MOD_RES (3), (4), (37), (39): Xaa is C or S
KAXXVPTKLNAISVLYFDDMGVPTLKKYREGMSVAEXGXR

SEQ ID NO: 6346 - protein, 33 aa, Artificial Sequence
  Non-cyclic GFR-binding peptide
  MOD_RES (1), (32): Xaa is C or S
XVPQDLSPISILYKVGRTPKVLKYHYMVVKSXK

SEQ ID NO: 6347 - protein, 34 aa, Artificial Sequence
  Non-cyclic GFR-binding peptide
  MOD_RES (2), (3), (34): Xaa is C or S
PXXVPQALSAISILYLVGRKPKVLKNYQMIVRSX

SEQ ID NO: 6348 - protein, 38 aa, Artificial Sequence
  Non-cyclic GFR-binding peptide
  MOD_RES (3), (4), (35), (37): Xaa is C or S
APXXVPQALSATSILYYVGRKPKVLRKHRMIVRSXKXS

SEQ ID NO: 6349 - protein, 34 aa, Artificial Sequence
  Non-cyclic GFR-binding peptide
  MOD_RES (1), (33): Xaa is C or S
XVPTELSATSMLYYDENEKVVLRKHRDMVVEGXG

SEQ ID NO: 6350 - protein, 34 aa, Artificial Sequence
  Non-cyclic GFR-binding peptide
  MOD_RES (1), (34): Xaa is C or S
  MOD_RES (15), (16), (17), (18), (19): Xaa is A or G
  MOD_RES (20), (21), (22), (23): Xaa is A or G or is absent
XVPQALSATSILYYXXXXXXXXXLRKHRMIVRSX

SEQ ID NO: 6351 - protein, 39 aa, Artificial Sequence
  Non-cyclic GFR-binding peptide
  MOD_RES (3), (4), (37), (39): Xaa is C or S
  MOD_RES (18), (19), (20), (21), (22): Xaa is A or G
  MOD_RES (23), (24), (25), (26): Xaa is A or G or is absent
SPXXVSQDLSAISILYLXXXXXXXXXLKNYQMIVKSXKX

SEQ ID NO: 6352 - protein, 34 aa, Artificial Sequence
  Non-cyclic GFR-binding peptide
  MOD_RES (1), (33): Xaa is C or S
XAPTKLSPISVLYKDDSSNVILKYHYNMVVRSXG

SEQ ID NO: 6353 - protein, 37 aa, Artificial Sequence
  Non-cyclic GFR-binding peptide
  MOD_RES (1), (2), (34), (36): Xaa is C or S
XXAPTKLNAISVLYFDSSNNVILKKYRNMVVKAXGXH

SEQ ID NO: 6354 - protein, 36 aa, Artificial Sequence
  Non-cyclic GFR-binding peptide
  MOD_RES (2), (3), (36): Xaa is C or S
AXXVPTKLNAISVLYFDDMGVPTLKKYREGMSVAEX

SEQ ID NO: 6355 - protein, 42 aa, Artificial Sequence
  Non-cyclic GFR-binding peptide
  MOD_RES (3), (40), (42): Xaa is C or S
  MOD_RES (19), (20), (21), (22), (23): Xaa is A or G
  MOD_RES (24), (25), (26), (27): Xaa is A or G or is absent
VQXRPTQVQLSAISVLYLXXXXXXXXXLKNYQTLEDHLAXKX

SEQ ID NO: 6356 - protein, 34 aa, Artificial Sequence
  Non-cyclic GFR-binding peptide
  MOD_RES (34), (34): Xaa is C or S
  MOD_RES (14), (15), (16), (17), (18): Xaa is A or G
  MOD_RES (19), (20), (21), (22): Xaa is A or G or is absent
APTKLNAISVLYFXXXXXXXXXLKKYRNMVVKAX

SEQ ID NO: 6357 - protein, 41 aa, Artificial Sequence
  Non-cyclic GFR-binding peptide
  MOD_RES (4), (38), (40): Xaa is C or S
  MOD_RES (18), (19), (20), (21), (22): Xaa is A or G
  MOD_RES (23), (24), (25), (26): Xaa is A or G or is absent
KPTXAPTKLSAISVLYLXXXXXXXXXLKNYQNMVVRSXGXH

SEQ ID NO: 6358 - protein, 36 aa, Artificial Sequence
  Non-cyclic GFR-binding peptide
  MOD_RES (34), (36): Xaa is C or S
  MOD_RES (14), (15), (16), (17), (18): Xaa is A or G
  MOD_RES (19), (20), (21), (22): Xaa is A or G or is absent
VPTELSPISMLYKXXXXXXXXXLKYHYEMVVEGXGX

SEQ ID NO: 6359 - protein, 36 aa, Artificial Sequence
  Non-cyclic GFR-binding peptide
  MOD_RES (2), (3): Xaa is C or S
  MOD_RES (17), (18), (19), (20), (21): Xaa is A or G
  MOD_RES (22), (23), (24), (25): Xaa is A or G or is absent
AXXVPTELSPISMLYKXXXXXXXXXLKYHYEMVVEG

SEQ ID NO: 6360 - protein, 36 aa, Artificial Sequence
  Non-cyclic GFR-binding peptide
  MOD_RES (1), (2), (34), (36): Xaa is C or S
XXVPTELNAISMLYFDEYDKVVLKKYREMVVEGXGX

SEQ ID NO: 6361 - protein, 42 aa, Artificial Sequence
  Non-cyclic GFR-binding peptide
  MOD_RES (4), (5), (39), (41): Xaa is C or S
  MOD_RES (19), (20), (21), (22), (23): Xaa is A or G
  MOD_RES (24), (25), (26), (27): Xaa is A or G or is absent
PKAXXAPTKLNAISVLYFXXXXXXXXXLKKYRNMVVKAXGXH

SEQ ID NO: 6362 - protein, 39 aa, Artificial Sequence
  Non-cyclic GFR-binding peptide
  MOD_RES (6), (6): Xaa is C or S
  MOD_RES (20), (21), (22), (23), (24): Xaa is A or G
  MOD_RES (25), (26), (27), (28): Xaa is A or G or is absent
VTKPTXAPTKLSATSVLYYXXXXXXXXXLRKHRNMVVRS

SEQ ID NO: 6363 - protein, 34 aa, Artificial Sequence
  Non-cyclic GFR-binding peptide
  MOD_RES (1), (34): Xaa is C or S
  MOD_RES (15), (16), (17), (18), (19): Xaa is A or G
  MOD_RES (20), (21), (22), (23): Xaa is A or G or is absent
XVPQALSAISILYLXXXXXXXXXLKNYQMIVRSX

SEQ ID NO: 6364 - protein, 35 aa, Artificial Sequence
  Non-cyclic GFR-binding peptide
PTQVQLSPISVLYKEIVRKKPIFLKYHYTLEDHLA

SEQ ID NO: 6365 - protein, 41 aa, Artificial Sequence
  Non-cyclic GFR-binding peptide
  MOD_RES (5), (6), (39), (41): Xaa is C or S
  MOD_RES (20), (21), (22), (23), (24): Xaa is A or G
  MOD_RES (25), (26), (27), (28): Xaa is A or G or is absent
SASPXXVPQDLNAISILYFXXXXXXXXXLKKYRMVVKSXKX

SEQ ID NO: 6366 - protein, 38 aa, Artificial Sequence
  Non-cyclic GFR-binding peptide
  MOD_RES (36), (38): Xaa is C or S
  MOD_RES (15), (16), (17), (18), (19): Xaa is A or G
  MOD_RES (20), (21), (22), (23): Xaa is A or G or is absent
PTQVQLNAISVLYFXXXXXXXXXLKKYRTLEDHLAXKX

SEQ ID NO: 6367 - protein, 39 aa, Artificial Sequence
  Non-cyclic GFR-binding peptide
  MOD_RES (36), (38): Xaa is C or S
  MOD_RES (15), (16), (17), (18), (19): Xaa is A or G
  MOD_RES (20), (21), (22), (23): Xaa is A or G or is absent
PTQVQLSPISVLYKXXXXXXXXXLKYHYTLEDHLAXKXE

SEQ ID NO: 6368 - protein, 37 aa, Artificial Sequence
  Non-cyclic GFR-binding peptide
  MOD_RES (2), (3), (35), (37): Xaa is C or S
AXXVPTELSATSMLYYDEYDKVVLRKHREMVVEGXGX

SEQ ID NO: 6369 - protein, 34 aa, Artificial Sequence
  Non-cyclic GFR-binding peptide
  MOD_RES (33), (33): Xaa is C or S
  MOD_RES (14), (15), (16), (17), (18): Xaa is A or G
  MOD_RES (19), (20), (21), (22): Xaa is A or G or is absent
VPQALSPISILYKXXXXXXXXXLKYHYMIVRSXK

SEQ ID NO: 6370 - protein, 42 aa, Artificial Sequence
  Non-cyclic GFR-binding peptide
  MOD_RES (6), (40), (42): Xaa is C or S
  MOD_RES (20), (21), (22), (23), (24): Xaa is A or G
  MOD_RES (25), (26), (27), (28): Xaa is A or G or is absent
VTKPTXAPTKLSAISVLYLXXXXXXXXXLKNYQNMVVRSXGX

SEQ ID NO: 6371 - protein, 36 aa, Artificial Sequence
  Non-cyclic GFR-binding peptide
  MOD_RES (3), (4), (35): Xaa is C or S
SPXXVPQDLSPISILYKVGRTPKVLKYHYMVVKSXK

SEQ ID NO: 6372 - protein, 38 aa, Artificial Sequence
  Non-cyclic GFR-binding peptide
  MOD_RES (5), (6): Xaa is C or S
VGKAXXVPTKLNAISVLYFDDMGVPTLKKYREGMSVAE

SEQ ID NO: 6373 - protein, 33 aa, Artificial Sequence
  Non-cyclic GFR-binding peptide
TQVQLSPISVLYKEIVRKKPIFLKYHYTLEDHL

SEQ ID NO: 6374 - protein, 40 aa, Artificial Sequence
  Non-cyclic GFR-binding peptide
  MOD_RES (4), (5), (37), (39): Xaa is C or S
PKAXXAPTKLSPISVLYKDSSNNVILKYHYNMVVKAXGXH

SEQ ID NO: 6375 - protein, 33 aa, Artificial Sequence
  Non-cyclic GFR-binding peptide
  MOD_RES (1), (32): Xaa is C or S
XVPQALSATSILYYVGRKPKVLRKHRMIVRSXK

SEQ ID NO: 6376 - protein, 40 aa, Artificial Sequence
  Non-cyclic GFR-binding peptide
  MOD_RES (4), (5), (37), (39): Xaa is C or S
PKPXXAPTKLSAISVLYLDDSSNVILKNYQNMVVRSXGXH

SEQ ID NO: 6377 - protein, 37 aa, Artificial Sequence
  Non-cyclic GFR-binding peptide
  MOD_RES (3), (37): Xaa is C or S
  MOD_RES (17), (18), (19), (20), (21): Xaa is A or G
  MOD_RES (22), (23), (24), (25): Xaa is A or G or is absent
PTXAPTKLSAISVLYLXXXXXXXXXLKNYQNMVVRSX

SEQ ID NO: 6378 - protein, 40 aa, Artificial Sequence
  Non-cyclic GFR-binding peptide
  MOD_RES (2), (39): Xaa is C or S
  MOD_RES (18), (19), (20), (21), (22): Xaa is A or G
  MOD_RES (23), (24), (25), (26): Xaa is A or G or is absent
QXRPTQVQLNAISVLYFXXXXXXXXXLKKYRTLEDHLAXK

SEQ ID NO: 6379 - protein, 43 aa, Artificial Sequence
  Non-cyclic GFR-binding peptide
  MOD_RES (6), (7), (40), (42): Xaa is C or S
  MOD_RES (21), (22), (23), (24), (25): Xaa is A or G
  MOD_RES (26), (27), (28), (29): Xaa is A or G or is absent
ASAAPXXVPQALSPISILYKXXXXXXXXXLKYHYMIVRSXKXS

SEQ ID NO: 6380 - protein, 34 aa, Artificial Sequence
  Non-cyclic GFR-binding peptide
  MOD_RES (1), (1): Xaa is C or S
  MOD_RES (15), (16), (17), (18), (19): Xaa is A or G
  MOD_RES (20), (21), (22), (23): Xaa is A or G or is absent
XAPTKLSPISVLYKXXXXXXXXXLKYHYNMVVRS

SEQ ID NO: 6381 - protein, 41 aa, Artificial Sequence
  Non-cyclic GFR-binding peptide
  MOD_RES (6), (7), (40): Xaa is C or S
  MOD_RES (21), (22), (23), (24), (25): Xaa is A or G
  MOD_RES (26), (27), (28), (29): Xaa is A or G or is absent
ASASPXXVSQDLSATSILYYXXXXXXXXXLRKHRMIVKSXK

SEQ ID NO: 6382 - protein, 35 aa, Artificial Sequence
  Non-cyclic GFR-binding peptide
  MOD_RES (1), (2), (35): Xaa is C or S
XXVPTKLNAISVLYFDDMGVPTLKKYREGMSVAEX

SEQ ID NO: 6383 - protein, 40 aa, Artificial Sequence
  Non-cyclic GFR-binding peptide
  MOD_RES (5), (6), (38), (40): Xaa is C or S
VPKAXXAPTKLNAISVLYFDSSNNVILKKYRNMVVKAXGX

SEQ ID NO: 6384 - protein, 39 aa, Artificial Sequence
  Non-cyclic GFR-binding peptide
  MOD_RES (5), (5): Xaa is C or S
  MOD_RES (21), (22), (23), (24), (25): Xaa is A or G
  MOD_RES (26), (27), (28), (29): Xaa is A or G or is absent
RNVQXRPTQVQLSAISVLYLXXXXXXXXXLKNYQTLEDH

SEQ ID NO: 6385 - protein, 35 aa, Artificial Sequence
  Non-cyclic GFR-binding peptide
RPTQVQLSPISVLYKEIVRKKPIFLKYHYTLEDHL

SEQ ID NO: 6386 - protein, 39 aa, Artificial Sequence
  Non-cyclic GFR-binding peptide
  MOD_RES (4), (5), (38): Xaa is C or S
  MOD_RES (19), (20), (21), (22), (23): Xaa is A or G
  MOD_RES (24), (25), (26), (27): Xaa is A or G or is absent
ASPXXVSQDLSPISILYKXXXXXXXXXLKYHYMIVKSXK

SEQ ID NO: 6387 - protein, 35 aa, Artificial Sequence
  Non-cyclic GFR-binding peptide
  MOD_RES (34), (34): Xaa is C or S
  MOD_RES (14), (15), (16), (17), (18): Xaa is A or G
  MOD_RES (19), (20), (21), (22): Xaa is A or G or is absent
APTKLSATSVLYYXXXXXXXXXLRKHRNMVVRSXG

SEQ ID NO: 6388 - protein, 41 aa, Artificial Sequence
  Non-cyclic GFR-binding peptide
  MOD_RES (6), (7), (38), (40): Xaa is C or S
ASASPXXVPQDLSPISILYKVGRTPKVLKYHYMVVKSXKXS

SEQ ID NO: 6389 - protein, 36 aa, Artificial Sequence
  Non-cyclic GFR-binding peptide
  MOD_RES (1), (2), (35): Xaa is C or S
XXVPTKLSATSVLYYDDMGVPTLRKHREGMSVAEXG

SEQ ID NO: 6390 - protein, 43 aa, Artificial Sequence
  Non-cyclic GFR-binding peptide
  MOD_RES (6), (7), (40), (42): Xaa is C or S
  MOD_RES (21), (22), (23), (24), (25): Xaa is A or G
  MOD_RES (26), (27), (28), (29): Xaa is A or G or is absent
ASASPXXVPQDLSAISILYLXXXXXXXXXLKNYQMVVKSXKXS

SEQ ID NO: 6391 - protein, 36 aa, Artificial Sequence
  Non-cyclic GFR-binding peptide
  MOD_RES (5), (6): Xaa is C or S
IPKAXXVPTELSATSMLYYDEYDKVVLRKHREMVVE

SEQ ID NO: 6392 - protein, 42 aa, Artificial Sequence
  Non-cyclic GFR-binding peptide
  MOD_RES (6), (7), (39), (41): Xaa is C or S
KIPKAXXVPTELNAISMLYFDENEKVVLKKYRDMVVEGXGXR

SEQ ID NO: 6393 - protein, 39 aa, Artificial Sequence
  Non-cyclic GFR-binding peptide
  MOD_RES (6), (7), (39): Xaa is C or S
KIPKAXXVPTELSPISMLYKDENEKVVLKYHYDMVVEGX

SEQ ID NO: 6394 - protein, 34 aa, Artificial Sequence
  Non-cyclic GFR-binding peptide
  MOD_RES (1), (2): Xaa is C or S
  MOD_RES (16), (17), (18), (19), (20): Xaa is A or G
  MOD_RES (21), (22), (23), (24): Xaa is A or G or is absent
XXVPQDLSATSILYYXXXXXXXXXLRKHRMVVKS

SEQ ID NO: 6395 - protein, 39 aa, Artificial Sequence
  Non-cyclic GFR-binding peptide
  MOD_RES (3), (4), (37), (39): Xaa is C or S
  MOD_RES (18), (19), (20), (21), (22): Xaa is A or G
  MOD_RES (23), (24), (25), (26): Xaa is A or G or is absent
SPXXVPQDLSPISILYKXXXXXXXXXLKYHYMVVKSXKX

SEQ ID NO: 6396 - protein, 39 aa, Artificial Sequence
  Non-cyclic GFR-binding peptide
  MOD_RES (2), (36), (38): Xaa is C or S
  MOD_RES (16), (17), (18), (19), (20): Xaa is A or G
  MOD_RES (21), (22), (23), (24): Xaa is A or G or is absent
TXAPTKLSPISVLYKXXXXXXXXXLKYHYNMVVRSXGXH

SEQ ID NO: 6397 - protein, 33 aa, Artificial Sequence
  Non-cyclic GFR-binding peptide
  MOD_RES (1), (2): Xaa is C or S
XXAPTQLSATSVLYYDDSSNVILRKHRNMVVRA

SEQ ID NO: 6398 - protein, 42 aa, Artificial Sequence
  Non-cyclic GFR-binding peptide
  MOD_RES (4), (5), (39), (41): Xaa is C or S
  MOD_RES (19), (20), (21), (22), (23): Xaa is A or G
  MOD_RES (24), (25), (26), (27): Xaa is A or G or is absent
PKPXXAPTQLSAISVLYLXXXXXXXXXLKNYQNMVVRAXGXH

SEQ ID NO: 6399 - protein, 42 aa, Artificial Sequence
  Non-cyclic GFR-binding peptide
  MOD_RES (4), (41): Xaa is C or S
  MOD_RES (20), (21), (22), (23), (24): Xaa is A or G
  MOD_RES (25), (26), (27), (28): Xaa is A or G or is absent
NVQXRPTQVQLSATSVLYYXXXXXXXXXLRKHRTLEDHLAXK

SEQ ID NO: 6400 - protein, 35 aa, Artificial Sequence
  Non-cyclic GFR-binding peptide
  MOD_RES (1), (2): Xaa is C or S
  MOD_RES (16), (17), (18), (19), (20): Xaa is A or G
  MOD_RES (21), (22), (23), (24): Xaa is A or G or is absent
XXAPTKLSPISVLYKXXXXXXXXXLKYHYNMVVKA

SEQ ID NO: 6401 - protein, 33 aa, Artificial Sequence
  Non-cyclic GFR-binding peptide
  MOD_RES (1), (2), (33): Xaa is C or S
XXVPQDLSAISILYLVGRTPKVLKNYQMVVKSX

SEQ ID NO: 6402 - protein, 31 aa, Artificial Sequence
  Non-cyclic GFR-binding peptide
  MOD_RES (31), (31): Xaa is C or S
VPQALSPISILYKVGRKPKVLKYHYMIVRSX

SEQ ID NO: 6403 - protein, 38 aa, Artificial Sequence
  Non-cyclic GFR-binding peptide
  MOD_RES (6), (7), (38): Xaa is C or S
ASASPXXVSQDLSATSILYYIGKTPKILRKHRMIVKSX

SEQ ID NO: 6404 - protein, 33 aa, Artificial Sequence
  Non-cyclic GFR-binding peptide
  MOD_RES (1), (1): Xaa is C or S
XVPTKLSAISVLYLDDMGVPTLKNYQEGMSVAE

SEQ ID NO: 6405 - protein, 36 aa, Artificial Sequence
  Non-cyclic GFR-binding peptide
  MOD_RES (2), (3), (34), (36): Xaa is C or S
PXXVSQDLSATSILYYIGKTPKILRKHRMIVKSXKX

SEQ ID NO: 6406 - protein, 41 aa, Artificial Sequence
  Non-cyclic GFR-binding peptide
  MOD_RES (6), (7), (40): Xaa is C or S
  MOD_RES (21), (22), (23), (24), (25): Xaa is A or G
  MOD_RES (26), (27), (28), (29): Xaa is A or G or is absent
ASAAPXXVPQALSATSILYYXXXXXXXXXLRKHRMIVRSXK

SEQ ID NO: 6407 - protein, 40 aa, Artificial Sequence
  Non-cyclic GFR-binding peptide
  MOD_RES (2), (3), (37), (39): Xaa is C or S
  MOD_RES (17), (18), (19), (20), (21): Xaa is A or G
  MOD_RES (22), (23), (24), (25): Xaa is A or G or is absent
AXXVPTELSPISMLYKXXXXXXXXXLKYHYEMVVEGXGXR

SEQ ID NO: 6408 - protein, 33 aa, Artificial Sequence
  Non-cyclic GFR-binding peptide
  MOD_RES (2), (3): Xaa is C or S
PXXVPQDLSAISILYLVGRTPKVLKNYQMVVKS

SEQ ID NO: 6409 - protein, 34 aa, Artificial Sequence
  Non-cyclic GFR-binding peptide
  MOD_RES (1), (2), (33): Xaa is C or S
XXVPQALSATSILYYVGRKPKVLRKHRMIVRSXK

SEQ ID NO: 6410 - protein, 33 aa, Artificial Sequence
  Non-cyclic GFR-binding peptide
  MOD_RES (2), (3): Xaa is C or S
PXXVPQALNAISILYFVGRKPKVLKKYRMIVRS

SEQ ID NO: 6411 - protein, 36 aa, Artificial Sequence
  Non-cyclic GFR-binding peptide
  MOD_RES (2), (3): Xaa is C or S
  MOD_RES (17), (18), (19), (20), (21): Xaa is A or G
  MOD_RES (22), (23), (24), (25): Xaa is A or G or is absent
PXXAPTKLSATSVLYYXXXXXXXXXLRKHRNMVVRS

SEQ ID NO: 6412 - protein, 43 aa, Artificial Sequence
  Non-cyclic GFR-binding peptide
  MOD_RES (3), (40), (42): Xaa is C or S
  MOD_RES (19), (20), (21), (22), (23): Xaa is A or G
  MOD_RES (24), (25), (26), (27): Xaa is A or G or is absent
VQXRPTQVQLSAISVLYLXXXXXXXXXLKNYQTLEDHLAXKXE

SEQ ID NO: 6413 - protein, 32 aa, Artificial Sequence
  Non-cyclic GFR-binding peptide
  MOD_RES (32), (32): Xaa is C or S
APTKLSPISVLYKDSSNNVILKYHYNMVVKAX

SEQ ID NO: 6414 - protein, 41 aa, Artificial Sequence
  Non-cyclic GFR-binding peptide
  MOD_RES (4), (5), (39), (41): Xaa is C or S
  MOD_RES (19), (20), (21), (22), (23): Xaa is A or G
  MOD_RES (24), (25), (26), (27): Xaa is A or G or is absent
PKAXXVPTELSPISMLYKXXXXXXXXXLKYHYDMVVEGXGX

SEQ ID NO: 6415 - protein, 32 aa, Artificial Sequence
  Non-cyclic GFR-binding peptide
  MOD_RES (31), (31): Xaa is C or S
VPQALSAISILYLVGRKPKVLKNYQMIVRSXK

SEQ ID NO: 6416 - protein, 35 aa, Artificial Sequence
  Non-cyclic GFR-binding peptide
  MOD_RES (1), (35): Xaa is C or S
  MOD_RES (15), (16), (17), (18), (19): Xaa is A or G
  MOD_RES (20), (21), (22), (23): Xaa is A or G or is absent
XAPTKLNAISVLYFXXXXXXXXXLKKYRNMVVKAX

SEQ ID NO: 6417 - protein, 37 aa, Artificial Sequence
  Non-cyclic GFR-binding peptide
  MOD_RES (1), (34), (36): Xaa is C or S
  MOD_RES (15), (16), (17), (18), (19): Xaa is A or G
  MOD_RES (20), (21), (22), (23): Xaa is A or G or is absent
XVPQALSPISILYKXXXXXXXXXLKYHYMIVRSXKXS

SEQ ID NO: 6418 - protein, 39 aa, Artificial Sequence
  Non-cyclic GFR-binding peptide
  MOD_RES (3), (4), (37), (39): Xaa is C or S
  MOD_RES (18), (19), (20), (21), (22): Xaa is A or G
  MOD_RES (23), (24), (25), (26): Xaa is A or G or is absent
APXXVPQALSAISILYLXXXXXXXXXLKNYQMIVRSXKX

SEQ ID NO: 6419 - protein, 36 aa, Artificial Sequence
  Non-cyclic GFR-binding peptide
  MOD_RES (1), (33), (35): Xaa is C or S
XAPTQLSAISVLYLDDSSNVILKNYQNMVVRAXGXH

SEQ ID NO: 6420 - protein, 32 aa, Artificial Sequence
  Non-cyclic GFR-binding peptide
  MOD_RES (31), (31): Xaa is C or S
VSQDLSATSILYYIGKTPKILRKHRMIVKSXK

SEQ ID NO: 6421 - protein, 36 aa, Artificial Sequence
  Non-cyclic GFR-binding peptide
  MOD_RES (3), (4), (36): Xaa is C or S
KAXXAPTKLSPISVLYKDSSNNVILKYHYNMVVKAX

SEQ ID NO: 6422 - protein, 32 aa, Artificial Sequence
  Non-cyclic GFR-binding peptide
  MOD_RES (14), (15), (16), (17), (18): Xaa is A or G
  MOD_RES (19), (20), (21), (22): Xaa is A or G or is absent
APTQLSAISVLYLXXXXXXXXXLKNYQNMVVR

SEQ ID NO: 6423 - protein, 37 aa, Artificial Sequence
  Non-cyclic GFR-binding peptide
  MOD_RES (3), (3): Xaa is C or S
  MOD_RES (19), (20), (21), (22), (23): Xaa is A or G
  MOD_RES (24), (25), (26), (27): Xaa is A or G or is absent
VQXRPTQVQLSATSVLYYXXXXXXXXXLRKHRTLEDH

SEQ ID NO: 6424 - protein, 30 aa, Artificial Sequence
  Non-cyclic GFR-binding peptide
VPTELSATSMLYYDEYDKVVLRKHREMVVE

SEQ ID NO: 6425 - protein, 42 aa, Artificial Sequence
  Non-cyclic GFR-binding peptide
  MOD_RES (6), (7), (39), (41): Xaa is C or S
YVPKPXXAPTKLSAISVLYLDDSSNVILKNYQNMVVRSXGXH

SEQ ID NO: 6426 - protein, 35 aa, Artificial Sequence
  Non-cyclic GFR-binding peptide
  MOD_RES (32), (34): Xaa is C or S
VPTELSPISMLYKDENEKVVLKYHYDMVVEGXGXR

SEQ ID NO: 6427 - protein, 42 aa, Artificial Sequence
  Non-cyclic GFR-binding peptide
  MOD_RES (6), (7), (39), (41): Xaa is C or S
SIPKAXXVPTELNAISMLYFDEYDKVVLKKYREMVVEGXGXR

SEQ ID NO: 6428 - protein, 37 aa, Artificial Sequence
  Non-cyclic GFR-binding peptide
  MOD_RES (5), (5): Xaa is C or S
  MOD_RES (19), (20), (21), (22), (23): Xaa is A or G
  MOD_RES (24), (25), (26), (27): Xaa is A or G or is absent
TKPTXAPTKLSPISVLYKXXXXXXXXXLKYHYNMVVR

SEQ ID NO: 6429 - protein, 35 aa, Artificial Sequence
  Non-cyclic GFR-binding peptide
  MOD_RES (2), (3): Xaa is C or S
  MOD_RES (17), (18), (19), (20), (21): Xaa is A or G
  MOD_RES (22), (23), (24), (25): Xaa is A or G or is absent
PXXAPTQLSAISVLYLXXXXXXXXXLKNYQNMVVR

SEQ ID NO: 6430 - protein, 39 aa, Artificial Sequence
  Non-cyclic GFR-binding peptide
  MOD_RES (6), (7), (39): Xaa is C or S
SIPKAXXVPTELSPISMLYKDEYDKVVLKYHYEMVVEGX

SEQ ID NO: 6431 - protein, 41 aa, Artificial Sequence
  Non-cyclic GFR-binding peptide
  MOD_RES (6), (7), (40): Xaa is C or S
KVGKAXXVPTKLNAISVLYFDDMGVPTLKKYREGMSVAEXG

SEQ ID NO: 6432 - protein, 40 aa, Artificial Sequence
  Non-cyclic GFR-binding peptide
  MOD_RES (4), (5), (39): Xaa is C or S
  MOD_RES (19), (20), (21), (22), (23): Xaa is A or G
  MOD_RES (24), (25), (26), (27): Xaa is A or G or is absent
PKPXXAPTQLSATSVLYYXXXXXXXXXLRKHRNMVVRAXG

SEQ ID NO: 6433 - protein, 33 aa, Artificial Sequence
  Non-cyclic GFR-binding peptide
  MOD_RES (1), (32): Xaa is C or S
XVPQALNAISILYFVGRKPKVLKKYRMIVRSXK

SEQ ID NO: 6434 - protein, 41 aa, Artificial Sequence
  Non-cyclic GFR-binding peptide
  MOD_RES (6), (7), (40): Xaa is C or S
  MOD_RES (21), (22), (23), (24), (25): Xaa is A or G
  MOD_RES (26), (27), (28), (29): Xaa is A or G or is absent
ASASPXXVPQDLSATSILYYXXXXXXXXXLRKHRMVVKSXK

SEQ ID NO: 6435 - protein, 34 aa, Artificial Sequence
  Non-cyclic GFR-binding peptide
  MOD_RES (3), (4): Xaa is C or S
SPXXVPQDLSATSILYYVGRTPKVLRKHRMVVKS

SEQ ID NO: 6436 - protein, 37 aa, Artificial Sequence
  Non-cyclic GFR-binding peptide
  MOD_RES (1), (2), (35), (37): Xaa is C or S
  MOD_RES (16), (17), (18), (19), (20): Xaa is A or G
  MOD_RES (21), (22), (23), (24): Xaa is A or G or is absent
XXVPQALSATSILYYXXXXXXXXXLRKHRMIVRSXKX

SEQ ID NO: 6437 - protein, 35 aa, Artificial Sequence
  Non-cyclic GFR-binding peptide
  MOD_RES (1), (2), (33), (35): Xaa is C or S
XXVPQALSPISILYKVGRKPKVLKYHYMIVRSXKX

SEQ ID NO: 6438 - protein, 36 aa, Artificial Sequence
  Non-cyclic GFR-binding peptide
  MOD_RES (1), (33), (35): Xaa is C or S
XAPTKLSAISVLYLDDSSNVILKNYQNMVVRSXGXH

SEQ ID NO: 6439 - protein, 37 aa, Artificial Sequence
  Non-cyclic GFR-binding peptide
  MOD_RES (4), (5), (37): Xaa is C or S
PKPXXAPTQLSATSVLYYDDSSNVILRKHRNMVVRAX

SEQ ID NO: 6440 - protein, 42 aa, Artificial Sequence
  Non-cyclic GFR-binding peptide
  MOD_RES (6), (7), (41): Xaa is C or S
  MOD_RES (21), (22), (23), (24), (25): Xaa is A or G
  MOD_RES (26), (27), (28), (29): Xaa is A or G or is absent
TVPKPXXAPTQLSATSVLYYXXXXXXXXXLRKHRNMVVRAXG

SEQ ID NO: 6441 - protein, 32 aa, Artificial Sequence
  Non-cyclic GFR-binding peptide
  MOD_RES (32), (32): Xaa is C or S
APTKLSPISVLYKDDSSNVILKYHYNMVVRSX

SEQ ID NO: 6442 - protein, 41 aa, Artificial Sequence
  Non-cyclic GFR-binding peptide
  MOD_RES (5), (6), (39), (41): Xaa is C or S
  MOD_RES (20), (21), (22), (23), (24): Xaa is A or G
  MOD_RES (25), (26), (27), (28): Xaa is A or G or is absent
SASPXXVSQDLNAISILYFXXXXXXXXXLKKYRMIVKSXKX

SEQ ID NO: 6443 - protein, 42 aa, Artificial Sequence
  Non-cyclic GFR-binding peptide
  MOD_RES (4), (5), (39), (41): Xaa is C or S
  MOD_RES (19), (20), (21), (22), (23): Xaa is A or G
  MOD_RES (24), (25), (26), (27): Xaa is A or G or is absent
PKAXXVPTELSATSMLYYXXXXXXXXXLRKHRDMVVEGXGXR

SEQ ID NO: 6444 - protein, 33 aa, Artificial Sequence
  Non-cyclic GFR-binding peptide
  MOD_RES (1), (32): Xaa is C or S
XVPQALSPISILYKVGRKPKVLKYHYMIVRSXK

SEQ ID NO: 6445 - protein, 35 aa, Artificial Sequence
  Non-cyclic GFR-binding peptide
  MOD_RES (35), (35): Xaa is C or S
TQVQLSAISVLYLEIVRKKPIFLKNYQTLEDHLAX

SEQ ID NO: 6446 - protein, 36 aa, Artificial Sequence
  Non-cyclic GFR-binding peptide
  MOD_RES (1), (2), (36): Xaa is C or S
  MOD_RES (16), (17), (18), (19), (20): Xaa is A or G
  MOD_RES (21), (22), (23), (24): Xaa is A or G or is absent
XXAPTKLSPISVLYKXXXXXXXXXLKYHYNMVVKAX

SEQ ID NO: 6447 - protein, 39 aa, Artificial Sequence
  Non-cyclic GFR-binding peptide
  MOD_RES (3), (4), (39): Xaa is C or S
  MOD_RES (18), (19), (20), (21), (22): Xaa is A or G
  MOD_RES (23), (24), (25), (26): Xaa is A or G or is absent
KAXXVPTKLSAISVLYLXXXXXXXXXLKNYQEGMSVAEX

SEQ ID NO: 6448 - protein, 41 aa, Artificial Sequence
  Non-cyclic GFR-binding peptide
  MOD_RES (4), (5), (39), (41): Xaa is C or S
  MOD_RES (19), (20), (21), (22), (23): Xaa is A or G
  MOD_RES (24), (25), (26), (27): Xaa is A or G or is absent
PKPXXAPTKLSATSVLYYXXXXXXXXXLRKHRNMVVRSXGX

SEQ ID NO: 6449 - protein, 36 aa, Artificial Sequence
  Non-cyclic GFR-binding peptide
  MOD_RES (2), (3), (35): Xaa is C or S
PXXAPTQLSAISVLYLDDSSNVILKNYQNMVVRAXG

SEQ ID NO: 6450 - protein, 37 aa, Artificial Sequence
  Non-cyclic GFR-binding peptide
  MOD_RES (7), (7): Xaa is C or S
HVTKPTXAPTKLSAISVLYLDDSSNVILKNYQNMVVR

SEQ ID NO: 6451 - protein, 43 aa, Artificial Sequence
  Non-cyclic GFR-binding peptide
  MOD_RES (5), (42): Xaa is C or S
RNVQXRPTQVQLSAISVLYLEIVRKKPIFLKNYQTLEDHLAXK

SEQ ID NO: 6452 - protein, 32 aa, Artificial Sequence
  Non-cyclic GFR-binding peptide
  MOD_RES (14), (15), (16), (17), (18): Xaa is A or G
  MOD_RES (19), (20), (21), (22): Xaa is A or G or is absent
VPTELSATSMLYYXXXXXXXXXLRKHRDMVVE

SEQ ID NO: 6453 - protein, 31 aa, Artificial Sequence
  Non-cyclic GFR-binding peptide
  MOD_RES (1), (1): Xaa is C or S
XVPTELSPISMLYKDEYDKVVLKYHYEMVVE

SEQ ID NO: 6454 - protein, 36 aa, Artificial Sequence
  Non-cyclic GFR-binding peptide
  MOD_RES (2), (3), (34), (36): Xaa is C or S
PXXVPQDLSATSILYYVGRTPKVLRKHRMVVKSXKX

SEQ ID NO: 6455 - protein, 41 aa, Artificial Sequence
  Non-cyclic GFR-binding peptide
  MOD_RES (6), (7): Xaa is C or S
  MOD_RES (21), (22), (23), (24), (25): Xaa is A or G
  MOD_RES (26), (27), (28), (29): Xaa is A or G or is absent
KVGKAXXVPTKLSAISVLYLXXXXXXXXXLKNYQEGMSVAE

SEQ ID NO: 6456 - protein, 41 aa, Artificial Sequence
  Non-cyclic GFR-binding peptide
  MOD_RES (3), (4), (38), (40): Xaa is C or S
  MOD_RES (18), (19), (20), (21), (22): Xaa is A or G
  MOD_RES (23), (24), (25), (26): Xaa is A or G or is absent
KPXXAPTQLSPISVLYKXXXXXXXXXLKYHYNMVVRAXGXH

SEQ ID NO: 6457 - protein, 34 aa, Artificial Sequence
  Non-cyclic GFR-binding peptide
  MOD_RES (1), (34): Xaa is C or S
XVPTKLSATSVLYYDDMGVPTLRKHREGMSVAEX

SEQ ID NO: 6458 - protein, 38 aa, Artificial Sequence
  Non-cyclic GFR-binding peptide
  MOD_RES (36), (38): Xaa is C or S
PTQVQLSATSVLYYEIVRKKPIFLRKHRTLEDHLAXKX

SEQ ID NO: 6459 - protein, 37 aa, Artificial Sequence
  Non-cyclic GFR-binding peptide
  MOD_RES (6), (7): Xaa is C or S
YVPKPXXAPTKLSATSVLYYDDSSNVILRKHRNMVVR

SEQ ID NO: 6460 - protein, 40 aa, Artificial Sequence
  Non-cyclic GFR-binding peptide
  MOD_RES (5), (6), (40): Xaa is C or S
  MOD_RES (20), (21), (22), (23), (24): Xaa is A or G
  MOD_RES (25), (26), (27), (28): Xaa is A or G or is absent
VPKPXXAPTKLSPISVLYKXXXXXXXXXLKYHYNMVVRSX

SEQ ID NO: 6461 - protein, 38 aa, Artificial Sequence
  Non-cyclic GFR-binding peptide
  MOD_RES (35), (37): Xaa is C or S
TQVQLNAISVLYFEIVRKKPIFLKKYRTLEDHLAXKXE

SEQ ID NO: 6462 - protein, 43 aa, Artificial Sequence
  Non-cyclic GFR-binding peptide
  MOD_RES (6), (7), (41), (43): Xaa is C or S
  MOD_RES (21), (22), (23), (24), (25): Xaa is A or G
  MOD_RES (26), (27), (28), (29): Xaa is A or G or is absent
TVPKPXXAPTQLSATSVLYYXXXXXXXXXLRKHRNMVVRAXGX

SEQ ID NO: 6463 - protein, 37 aa, Artificial Sequence
  Non-cyclic GFR-binding peptide
  MOD_RES (5), (6): Xaa is C or S
VPKAXXAPTKLSPISVLYKDSSNNVILKYHYNMVVKA

SEQ ID NO: 6464 - protein, 34 aa, Artificial Sequence
  Non-cyclic GFR-binding peptide
  MOD_RES (33), (33): Xaa is C or S
VPTKLNAISVLYFDDMGVPTLKKYREGMSVAEXG

SEQ ID NO: 6465 - protein, 42 aa, Artificial Sequence
  Non-cyclic GFR-binding peptide
  MOD_RES (7), (39), (41): Xaa is C or S
HVTKPTXAPTKLSPISVLYKDDSSNVILKYHYNMVVRSXGXH

SEQ ID NO: 6466 - protein, 43 aa, Artificial Sequence
  Non-cyclic GFR-binding peptide
  MOD_RES (4), (41), (43): Xaa is C or S
  MOD_RES (20), (21), (22), (23), (24): Xaa is A or G
  MOD_RES (25), (26), (27), (28): Xaa is A or G or is absent
NVQXRPTQVQLNAISVLYFXXXXXXXXXLKKYRTLEDHLAXKX

SEQ ID NO: 6467 - protein, 33 aa, Artificial Sequence
  Non-cyclic GFR-binding peptide
  MOD_RES (33), (33): Xaa is C or S
VPTKLSATSVLYYDDMGVPTLRKHREGMSVAEX

SEQ ID NO: 6468 - protein, 30 aa, Artificial Sequence
  Non-cyclic GFR-binding peptide
VSQDLSATSILYYIGKTPKILRKHRMIVKS

SEQ ID NO: 6469 - protein, 40 aa, Artificial Sequence
  Non-cyclic GFR-binding peptide
  MOD_RES (3), (4), (38), (40): Xaa is C or S
  MOD_RES (18), (19), (20), (21), (22): Xaa is A or G
  MOD_RES (23), (24), (25), (26): Xaa is A or G or is absent
KAXXVPTELNAISMLYFXXXXXXXXXLKKYRDMVVEGXGX

SEQ ID NO: 6470 - protein, 37 aa, Artificial Sequence
  Non-cyclic GFR-binding peptide
  MOD_RES (1), (35), (37): Xaa is C or S
  MOD_RES (15), (16), (17), (18), (19): Xaa is A or G
  MOD_RES (20), (21), (22), (23): Xaa is A or G or is absent
XAPTKLSAISVLYLXXXXXXXXXLKNYQNMVVRSXGX

SEQ ID NO: 6471 - protein, 36 aa, Artificial Sequence
  Non-cyclic GFR-binding peptide
  MOD_RES (1), (33), (35): Xaa is C or S
XAPTKLSAISVLYLDSSNNVILKNYQNMVVKAXGXH

SEQ ID NO: 6472 - protein, 38 aa, Artificial Sequence
  Non-cyclic GFR-binding peptide
  MOD_RES (2), (3), (37): Xaa is C or S
  MOD_RES (17), (18), (19), (20), (21): Xaa is A or G
  MOD_RES (22), (23), (24), (25): Xaa is A or G or is absent
AXXVPTELSPISMLYKXXXXXXXXXLKYHYEMVVEGXG

SEQ ID NO: 6473 - protein, 40 aa, Artificial Sequence
  Non-cyclic GFR-binding peptide
  MOD_RES (3), (40): Xaa is C or S
VQXRPTQVQLSAISVLYLEIVRKKPIFLKNYQTLEDHLAX

SEQ ID NO: 6474 - protein, 39 aa, Artificial Sequence
  Non-cyclic GFR-binding peptide
  MOD_RES (6), (7): Xaa is C or S
KVGKAXXVPTKLSAISVLYLDDMGVPTLKNYQEGMSVAE

SEQ ID NO: 6475 - protein, 40 aa, Artificial Sequence
  Non-cyclic GFR-binding peptide
  MOD_RES (4), (5), (38), (40): Xaa is C or S
  MOD_RES (19), (20), (21), (22), (23): Xaa is A or G
  MOD_RES (24), (25), (26), (27): Xaa is A or G or is absent
AAPXXVPQALSPISILYKXXXXXXXXXLKYHYMIVRSXKX

SEQ ID NO: 6476 - protein, 38 aa, Artificial Sequence
  Non-cyclic GFR-binding peptide
  MOD_RES (5), (5): Xaa is C or S
  MOD_RES (19), (20), (21), (22), (23): Xaa is A or G
  MOD_RES (24), (25), (26), (27): Xaa is A or G or is absent
TKPTXAPTKLSPISVLYKXXXXXXXXXLKYHYNMVVRS

SEQ ID NO: 6477 - protein, 35 aa, Artificial Sequence
  Non-cyclic GFR-binding peptide
  MOD_RES (32), (34): Xaa is C or S
VPTELSPISMLYKDEYDKVVLKYHYEMVVEGXGXR

SEQ ID NO: 6478 - protein, 39 aa, Artificial Sequence
  Non-cyclic GFR-binding peptide
  MOD_RES (6), (7), (39): Xaa is C or S
SIPKAXXVPTELNAISMLYFDEYDKVVLKKYREMVVEGX

SEQ ID NO: 6479 - protein, 40 aa, Artificial Sequence
  Non-cyclic GFR-binding peptide
  MOD_RES (3), (4), (37), (39): Xaa is C or S
  MOD_RES (18), (19), (20), (21), (22): Xaa is A or G
  MOD_RES (23), (24), (25), (26): Xaa is A or G or is absent
SPXXVSQDLSPISILYKXXXXXXXXXLKYHYMIVKSXKXS

SEQ ID NO: 6480 - protein, 38 aa, Artificial Sequence
  Non-cyclic GFR-binding peptide
  MOD_RES (2), (3), (36), (38): Xaa is C or S
  MOD_RES (17), (18), (19), (20), (21): Xaa is A or G
  MOD_RES (22), (23), (24), (25): Xaa is A or G or is absent
PXXVPQDLSAISILYLXXXXXXXXXLKNYQMVVKSXKX

SEQ ID NO: 6481 - protein, 41 aa, Artificial Sequence
  Non-cyclic GFR-binding peptide
  MOD_RES (6), (7), (38), (40): Xaa is C or S
ASASPXXVSQDLSATSILYYIGKTPKILRKHRMIVKSXKXS

SEQ ID NO: 6482 - protein, 39 aa, Artificial Sequence
  Non-cyclic GFR-binding peptide
  MOD_RES (6), (7), (38): Xaa is C or S
ASAAPXXVPQALSATSILYYVGRKPKVLRKHRMIVRSXK

SEQ ID NO: 6483 - protein, 43 aa, Artificial Sequence
  Non-cyclic GFR-binding peptide
  MOD_RES (3), (40), (42): Xaa is C or S
  MOD_RES (19), (20), (21), (22), (23): Xaa is A or G
  MOD_RES (24), (25), (26), (27): Xaa is A or G or is absent
VQXRPTQVQLSPISVLYKXXXXXXXXXLKYHYTLEDHLAXKXE

SEQ ID NO: 6484 - protein, 41 aa, Artificial Sequence
  Non-cyclic GFR-binding peptide
  MOD_RES (6), (7): Xaa is C or S
  MOD_RES (21), (22), (23), (24), (25): Xaa is A or G
  MOD_RES (26), (27), (28), (29): Xaa is A or G or is absent
KVGKAXXVPTKLSATSVLYYXXXXXXXXXLRKHREGMSVAE

SEQ ID NO: 6485 - protein, 36 aa, Artificial Sequence
  Non-cyclic GFR-binding peptide
  MOD_RES (1), (35): Xaa is C or S
  MOD_RES (15), (16), (17), (18), (19): Xaa is A or G
  MOD_RES (20), (21), (22), (23): Xaa is A or G or is absent
XAPTQLSATSVLYYXXXXXXXXXLRKHRNMVVRAXG

SEQ ID NO: 6486 - protein, 41 aa, Artificial Sequence
  Non-cyclic GFR-binding peptide
  MOD_RES (4), (38), (40): Xaa is C or S
  MOD_RES (18), (19), (20), (21), (22): Xaa is A or G
  MOD_RES (23), (24), (25), (26): Xaa is A or G or is absent
KPTXAPTKLSATSVLYYXXXXXXXXXLRKHRNMVVRSXGXH

SEQ ID NO: 6487 - protein, 37 aa, Artificial Sequence
  Non-cyclic GFR-binding peptide
  MOD_RES (5), (6), (37): Xaa is C or S
SASPXXVSQDLSAISILYLIGKTPKILKNYQMIVKSX

SEQ ID NO: 6488 - protein, 37 aa, Artificial Sequence
  Non-cyclic GFR-binding peptide
  MOD_RES (1), (34), (36): Xaa is C or S
  MOD_RES (15), (16), (17), (18), (19): Xaa is A or G
  MOD_RES (20), (21), (22), (23): Xaa is A or G or is absent
XVPQDLSPISILYKXXXXXXXXXLKYHYMVVKSXKXS

SEQ ID NO: 6489 - protein, 37 aa, Artificial Sequence
  Non-cyclic GFR-binding peptide
  MOD_RES (2), (3), (36): Xaa is C or S
  MOD_RES (17), (18), (19), (20), (21): Xaa is A or G
  MOD_RES (22), (23), (24), (25): Xaa is A or G or is absent
PXXVPQDLNAISILYFXXXXXXXXXLKKYRMVVKSXK

SEQ ID NO: 6490 - protein, 37 aa, Artificial Sequence
  Non-cyclic GFR-binding peptide
  MOD_RES (5), (6), (37): Xaa is C or S
SASPXXVSQDLNAISILYFIGKTPKILKKYRMIVKSX

SEQ ID NO: 6491 - protein, 40 aa, Artificial Sequence
  Non-cyclic GFR-binding peptide
  MOD_RES (4), (5), (37), (39): Xaa is C or S
PKAXXVPTELSATSMLYYDENEKVVLRKHRDMVVEGXGXR

SEQ ID NO: 6492 - protein, 41 aa, Artificial Sequence
  Non-cyclic GFR-binding peptide
  MOD_RES (6), (7), (41): Xaa is C or S
  MOD_RES (21), (22), (23), (24), (25): Xaa is A or G
  MOD_RES (26), (27), (28), (29): Xaa is A or G or is absent
YVPKPXXAPTKLSAISVLYLXXXXXXXXXLKNYQNMVVRSX

SEQ ID NO: 6493 - protein, 40 aa, Artificial Sequence
  Non-cyclic GFR-binding peptide
  MOD_RES (4), (4): Xaa is C or S
  MOD_RES (20), (21), (22), (23), (24): Xaa is A or G
  MOD_RES (25), (26), (27), (28): Xaa is A or G or is absent
NVQXRPTQVQLSATSVLYYXXXXXXXXXLRKHRTLEDHLA

SEQ ID NO: 6494 - protein, 40 aa, Artificial Sequence
  Non-cyclic GFR-binding peptide
  MOD_RES (3), (40): Xaa is C or S
VQXRPTQVQLSATSVLYYEIVRKKPIFLRKHRTLEDHLAX

SEQ ID NO: 6495 - protein, 36 aa, Artificial Sequence
  Non-cyclic GFR-binding peptide
  MOD_RES (33), (35): Xaa is C or S
  MOD_RES (14), (15), (16), (17), (18): Xaa is A or G
  MOD_RES (19), (20), (21), (22): Xaa is A or G or is absent
VPQALSAISILYLXXXXXXXXXLKNYQMIVRSXKXS

SEQ ID NO: 6496 - protein, 35 aa, Artificial Sequence
  Non-cyclic GFR-binding peptide
  MOD_RES (1), (2), (33), (35): Xaa is C or S
XXVSQDLSATSILYYIGKTPKILRKHRMIVKSXKX

SEQ ID NO: 6497 - protein, 37 aa, Artificial Sequence
  Non-cyclic GFR-binding peptide
  MOD_RES (2), (3), (36): Xaa is C or S
  MOD_RES (17), (18), (19), (20), (21): Xaa is A or G
  MOD_RES (22), (23), (24), (25): Xaa is A or G or is absent
PXXVPQDLSAISILYLXXXXXXXXXLKNYQMVVKSXK

SEQ ID NO: 6498 - protein, 40 aa, Artificial Sequence
  Non-cyclic GFR-binding peptide
  MOD_RES (6), (7): Xaa is C or S
  MOD_RES (21), (22), (23), (24), (25): Xaa is A or G
  MOD_RES (26), (27), (28), (29): Xaa is A or G or is absent
YVPKPXXAPTKLSATSVLYYXXXXXXXXXLRKHRNMVVRS

SEQ ID NO: 6499 - protein, 33 aa, Artificial Sequence
  Non-cyclic GFR-binding peptide
  MOD_RES (1), (1): Xaa is C or S
  MOD_RES (15), (16), (17), (18), (19): Xaa is A or G
  MOD_RES (20), (21), (22), (23): Xaa is A or G or is absent
XVSQDLSATSILYYXXXXXXXXXLRKHRMIVKS

SEQ ID NO: 6500 - protein, 36 aa, Artificial Sequence
  Non-cyclic GFR-binding peptide
  MOD_RES (2), (3), (35): Xaa is C or S
PXXAPTQLSPISVLYKDDSSNVILKYHYNMVVRAXG

SEQ ID NO: 6501 - protein, 35 aa, Artificial Sequence
  Non-cyclic GFR-binding peptide
  MOD_RES (32), (34): Xaa is C or S
APTKLSAISVLYLDSSNNVILKNYQNMVVKAXGXH

SEQ ID NO: 6502 - protein, 38 aa, Artificial Sequence
  Non-cyclic GFR-binding peptide
  MOD_RES (1), (2), (35), (37): Xaa is C or S
  MOD_RES (16), (17), (18), (19), (20): Xaa is A or G
  MOD_RES (21), (22), (23), (24): Xaa is A or G or is absent
XXVSQDLSPISILYKXXXXXXXXXLKYHYMIVKSXKXS

SEQ ID NO: 6503 - protein, 43 aa, Artificial Sequence
  Non-cyclic GFR-binding peptide
  MOD_RES (6), (7), (41), (43): Xaa is C or S
  MOD_RES (21), (22), (23), (24), (25): Xaa is A or G
  MOD_RES (26), (27), (28), (29): Xaa is A or G or is absent
KIPKAXXVPTELNAISMLYFXXXXXXXXXLKKYRDMVVEGXGX

SEQ ID NO: 6504 - protein, 31 aa, Artificial Sequence
  Non-cyclic GFR-binding peptide
  MOD_RES (1), (1): Xaa is C or S
XVPQALSATSILYYVGRKPKVLRKHRMIVRS

SEQ ID NO: 6505 - protein, 36 aa, Artificial Sequence
  Non-cyclic GFR-binding peptide
  MOD_RES (1), (2), (36): Xaa is C or S
  MOD_RES (16), (17), (18), (19), (20): Xaa is A or G
  MOD_RES (21), (22), (23), (24): Xaa is A or G or is absent
XXAPTQLSAISVLYLXXXXXXXXXLKNYQNMVVRAX

SEQ ID NO: 6506 - protein, 34 aa, Artificial Sequence
  Non-cyclic GFR-binding peptide
  MOD_RES (2), (3), (34): Xaa is C or S
PXXVPQALSPISILYKVGRKPKVLKYHYMIVRSX

SEQ ID NO: 6507 - protein, 40 aa, Artificial Sequence
  Non-cyclic GFR-binding peptide
  MOD_RES (4), (4): Xaa is C or S
  MOD_RES (20), (21), (22), (23), (24): Xaa is A or G
  MOD_RES (25), (26), (27), (28): Xaa is A or G or is absent
NVQXRPTQVQLSAISVLYLXXXXXXXXXLKNYQTLEDHLA

SEQ ID NO: 6508 - protein, 42 aa, Artificial Sequence
  Non-cyclic GFR-binding peptide
  MOD_RES (5), (6), (39), (41): Xaa is C or S
  MOD_RES (20), (21), (22), (23), (24): Xaa is A or G
  MOD_RES (25), (26), (27), (28): Xaa is A or G or is absent
SASPXXVPQDLSPISILYKXXXXXXXXXLKYHYMVVKSXKXS

SEQ ID NO: 6509 - protein, 31 aa, Artificial Sequence
  Non-cyclic GFR-binding peptide
APTKLSPISVLYKDSSNNVILKYHYNMVVKA

SEQ ID NO: 6510 - protein, 33 aa, Artificial Sequence
  Non-cyclic GFR-binding peptide
  MOD_RES (2), (3): Xaa is C or S
AXXAPTKLNAISVLYFDSSNNVILKKYRNMVVK

SEQ ID NO: 6511 - protein, 33 aa, Artificial Sequence
  Non-cyclic GFR-binding peptide
PTQVQLSAISVLYLEIVRKKPIFLKNYQTLEDH

SEQ ID NO: 6512 - protein, 37 aa, Artificial Sequence
  Non-cyclic GFR-binding peptide
  MOD_RES (1), (2), (34), (36): Xaa is C or S
XXVPTELNAISMLYFDEYDKVVLKKYREMVVEGXGXR

SEQ ID NO: 6513 - protein, 37 aa, Artificial Sequence
  Non-cyclic GFR-binding peptide
  MOD_RES (1), (2), (34), (36): Xaa is C or S
XXAPTQLSPISVLYKDDSSNVILKYHYNMVVRAXGXH

SEQ ID NO: 6514 - protein, 37 aa, Artificial Sequence
  Non-cyclic GFR-binding peptide
  MOD_RES (3), (4), (35), (37): Xaa is C or S
APXXVPQALNAISILYFVGRKPKVLKKYRMIVRSXKX

SEQ ID NO: 6515 - protein, 37 aa, Artificial Sequence
  Non-cyclic GFR-binding peptide
  MOD_RES (1), (35), (37): Xaa is C or S
  MOD_RES (15), (16), (17), (18), (19): Xaa is A or G
  MOD_RES (20), (21), (22), (23): Xaa is A or G or is absent
XAPTQLSATSVLYYXXXXXXXXXLRKHRNMVVRAXGX

SEQ ID NO: 6516 - protein, 34 aa, Artificial Sequence
  Non-cyclic GFR-binding peptide
  MOD_RES (14), (15), (16), (17), (18): Xaa is A or G
  MOD_RES (19), (20), (21), (22): Xaa is A or G or is absent
TQVQLSATSVLYYXXXXXXXXXLRKHRTLEDHLA

SEQ ID NO: 6517 - protein, 36 aa, Artificial Sequence
  Non-cyclic GFR-binding peptide
  MOD_RES (3), (4), (35): Xaa is C or S
SPXXVPQDLSAISILYLVGRTPKVLKNYQMVVKSXK

SEQ ID NO: 6518 - protein, 40 aa, Artificial Sequence
  Non-cyclic GFR-binding peptide
  MOD_RES (6), (7), (39): Xaa is C or S
SIPKAXXVPTELSPISMLYKDEYDKVVLKYHYEMVVEGXG

SEQ ID NO: 6519 - protein, 37 aa, Artificial Sequence
  Non-cyclic GFR-binding peptide
  MOD_RES (4), (5), (37): Xaa is C or S
PKAXXVPTELSATSMLYYDEYDKVVLRKHREMVVEGX

SEQ ID NO: 6520 - protein, 36 aa, Artificial Sequence
  Non-cyclic GFR-binding peptide
  MOD_RES (2), (3), (34), (36): Xaa is C or S
PXXVPQDLSAISILYLVGRTPKVLKNYQMVVKSXKX

SEQ ID NO: 6521 - protein, 36 aa, Artificial Sequence
  Non-cyclic GFR-binding peptide
  MOD_RES (1), (2), (36): Xaa is C or S
  MOD_RES (16), (17), (18), (19), (20): Xaa is A or G
  MOD_RES (21), (22), (23), (24): Xaa is A or G or is absent
XXVPTELSPISMLYKXXXXXXXXXLKYHYEMVVEGX

SEQ ID NO: 6522 - protein, 38 aa, Artificial Sequence
  Non-cyclic GFR-binding peptide
  MOD_RES (1), (35), (37): Xaa is C or S
  MOD_RES (15), (16), (17), (18), (19): Xaa is A or G
  MOD_RES (20), (21), (22), (23): Xaa is A or G or is absent
XAPTKLSAISVLYLXXXXXXXXXLKNYQNMVVKAXGXH

SEQ ID NO: 6523 - protein, 34 aa, Artificial Sequence
  Non-cyclic GFR-binding peptide
  MOD_RES (14), (15), (16), (17), (18): Xaa is A or G
  MOD_RES (19), (20), (21), (22): Xaa is A or G or is absent
TQVQLSAISVLYLXXXXXXXXXLKNYQTLEDHLA

SEQ ID NO: 6524 - protein, 40 aa, Artificial Sequence
  Non-cyclic GFR-binding peptide
  MOD_RES (1), (38), (40): Xaa is C or S
XRPTQVQLSATSVLYYEIVRKKPIFLRKHRTLEDHLAXKX

SEQ ID NO: 6525 - protein, 37 aa, Artificial Sequence
  Non-cyclic GFR-binding peptide
  MOD_RES (6), (7): Xaa is C or S
ASAAPXXVPQALSATSILYYVGRKPKVLRKHRMIVRS

SEQ ID NO: 6526 - protein, 36 aa, Artificial Sequence
  Non-cyclic GFR-binding peptide
  MOD_RES (1), (33), (35): Xaa is C or S
XVPTELNAISMLYFDENEKVVLKKYRDMVVEGXGXR

SEQ ID NO: 6527 - protein, 32 aa, Artificial Sequence
  Non-cyclic GFR-binding peptide
  MOD_RES (14), (15), (16), (17), (18): Xaa is A or G
  MOD_RES (19), (20), (21), (22): Xaa is A or G or is absent
VPQALSAISILYLXXXXXXXXXLKNYQMIVRS

SEQ ID NO: 6528 - protein, 36 aa, Artificial Sequence
  Non-cyclic GFR-binding peptide
  MOD_RES (5), (6): Xaa is C or S
SASPXXVPQDLSATSILYYVGRTPKVLRKHRMVVKS

SEQ ID NO: 6529 - protein, 35 aa, Artificial Sequence
  Non-cyclic GFR-binding peptide
RPTQVQLSAISVLYLEIVRKKPIFLKNYQTLEDHL

SEQ ID NO: 6530 - protein, 36 aa, Artificial Sequence
  Non-cyclic GFR-binding peptide
  MOD_RES (3), (4): Xaa is C or S
KAXXVPTKLSAISVLYLDDMGVPTLKNYQEGMSVAE

SEQ ID NO: 6531 - protein, 41 aa, Artificial Sequence
  Non-cyclic GFR-binding peptide
  MOD_RES (4), (5), (38), (40): Xaa is C or S
  MOD_RES (19), (20), (21), (22), (23): Xaa is A or G
  MOD_RES (24), (25), (26), (27): Xaa is A or G or is absent
ASPXXVPQDLSATSILYYXXXXXXXXXLRKHRMVVKSXKXS

SEQ ID NO: 6532 - protein, 41 aa, Artificial Sequence
  Non-cyclic GFR-binding peptide
  MOD_RES (3), (4), (38), (40): Xaa is C or S
  MOD_RES (18), (19), (20), (21), (22): Xaa is A or G
  MOD_RES (23), (24), (25), (26): Xaa is A or G or is absent
KAXXVPTELSPISMLYKXXXXXXXXXLKYHYEMVVEGXGXR

SEQ ID NO: 6533 - protein, 34 aa, Artificial Sequence
  Non-cyclic GFR-binding peptide
  MOD_RES (1), (2), (34): Xaa is C or S
XXAPTKLSATSVLYYDDSSNVILRKHRNMVVRSX

SEQ ID NO: 6534 - protein, 40 aa, Artificial Sequence
  Non-cyclic GFR-binding peptide
  MOD_RES (4), (5), (39): Xaa is C or S
  MOD_RES (19), (20), (21), (22), (23): Xaa is A or G
  MOD_RES (24), (25), (26), (27): Xaa is A or G or is absent
PKAXXVPTELSATSMLYYXXXXXXXXXLRKHRDMVVEGXG

SEQ ID NO: 6535 - protein, 34 aa, Artificial Sequence
  Non-cyclic GFR-binding peptide
  MOD_RES (1), (2), (34): Xaa is C or S
XXAPTKLSAISVLYLDSSNNVILKNYQNMVVKAX

SEQ ID NO: 6536 - protein, 37 aa, Artificial Sequence
  Non-cyclic GFR-binding peptide
  MOD_RES (3), (4), (37): Xaa is C or S
  MOD_RES (18), (19), (20), (21), (22): Xaa is A or G
  MOD_RES (23), (24), (25), (26): Xaa is A or G or is absent
SPXXVSQDLSPISILYKXXXXXXXXXLKYHYMIVKSX

SEQ ID NO: 6537 - protein, 36 aa, Artificial Sequence
  Non-cyclic GFR-binding peptide
  MOD_RES (1), (36): Xaa is C or S
  MOD_RES (15), (16), (17), (18), (19): Xaa is A or G
  MOD_RES (20), (21), (22), (23): Xaa is A or G or is absent
XVPTKLSAISVLYLXXXXXXXXXLKNYQEGMSVAEX

SEQ ID NO: 6538 - protein, 40 aa, Artificial Sequence
  Non-cyclic GFR-binding peptide
  MOD_RES (5), (6), (39): Xaa is C or S
  MOD_RES (20), (21), (22), (23), (24): Xaa is A or G
  MOD_RES (25), (26), (27), (28): Xaa is A or G or is absent
SASPXXVSQDLSATSILYYXXXXXXXXXLRKHRMIVKSXK

SEQ ID NO: 6539 - protein, 40 aa, Artificial Sequence
  Non-cyclic GFR-binding peptide
  MOD_RES (4), (4): Xaa is C or S
NVQXRPTQVQLNAISVLYFEIVRKKPIFLKKYRTLEDHLA

SEQ ID NO: 6540 - protein, 35 aa, Artificial Sequence
  Non-cyclic GFR-binding peptide
  MOD_RES (35), (35): Xaa is C or S
  MOD_RES (14), (15), (16), (17), (18): Xaa is A or G
  MOD_RES (19), (20), (21), (22): Xaa is A or G or is absent
TQVQLSATSVLYYXXXXXXXXXLRKHRTLEDHLAX

SEQ ID NO: 6541 - protein, 39 aa, Artificial Sequence
  Non-cyclic GFR-binding peptide
  MOD_RES (5), (6), (38): Xaa is C or S
VPKAXXAPTKLSPISVLYKDSSNNVILKYHYNMVVKAXG

SEQ ID NO: 6542 - protein, 41 aa, Artificial Sequence
  Non-cyclic GFR-binding peptide
  MOD_RES (5), (6), (38), (40): Xaa is C or S
VPKPXXAPTKLSATSVLYYDDSSNVILRKHRNMVVRSXGXH

SEQ ID NO: 6543 - protein, 37 aa, Artificial Sequence
  Non-cyclic GFR-binding peptide
  MOD_RES (6), (7): Xaa is C or S
SIPKAXXVPTELSPISMLYKDEYDKVVLKYHYEMVVE

SEQ ID NO: 6544 - protein, 34 aa, Artificial Sequence
  Non-cyclic GFR-binding peptide
  MOD_RES (2), (34): Xaa is C or S
TXAPTKLSPISVLYKDDSSNVILKYHYNMVVRSX

SEQ ID NO: 6545 - protein, 35 aa, Artificial Sequence
  Non-cyclic GFR-binding peptide
  MOD_RES (34), (34): Xaa is C or S
  MOD_RES (14), (15), (16), (17), (18): Xaa is A or G
  MOD_RES (19), (20), (21), (22): Xaa is A or G or is absent
APTKLSPISVLYKXXXXXXXXXLKYHYNMVVRSXG

SEQ ID NO: 6546 - protein, 40 aa, Artificial Sequence
  Non-cyclic GFR-binding peptide
  MOD_RES (6), (7), (40): Xaa is C or S
  MOD_RES (21), (22), (23), (24), (25): Xaa is A or G
  MOD_RES (26), (27), (28), (29): Xaa is A or G or is absent
ASAAPXXVPQALNAISILYFXXXXXXXXXLKKYRMIVRSX

SEQ ID NO: 6547 - protein, 42 aa, Artificial Sequence
  Non-cyclic GFR-binding peptide
  MOD_RES (6), (7), (41): Xaa is C or S
  MOD_RES (21), (22), (23), (24), (25): Xaa is A or G
  MOD_RES (26), (27), (28), (29): Xaa is A or G or is absent
YVPKPXXAPTKLSATSVLYYXXXXXXXXXLRKHRNMVVRSXG

SEQ ID NO: 6548 - protein, 36 aa, Artificial Sequence
  Non-cyclic GFR-binding peptide
  MOD_RES (3), (4), (35): Xaa is C or S
SPXXVSQDLSAISILYLIGKTPKILKNYQMIVKSXK

SEQ ID NO: 6549 - protein, 31 aa, Artificial Sequence
  Non-cyclic GFR-binding peptide
VPTELSATSMLYYDENEKVVLRKHRDMVVEG

SEQ ID NO: 6550 - protein, 36 aa, Artificial Sequence
  Non-cyclic GFR-binding peptide
  MOD_RES (3), (4): Xaa is C or S
  MOD_RES (18), (19), (20), (21), (22): Xaa is A or G
  MOD_RES (23), (24), (25), (26): Xaa is A or G or is absent
SPXXVSQDLNAISILYFXXXXXXXXXLKKYRMIVKS

SEQ ID NO: 6551 - protein, 39 aa, Artificial Sequence
  Non-cyclic GFR-binding peptide
  MOD_RES (4), (5), (39): Xaa is C or S
  MOD_RES (19), (20), (21), (22), (23): Xaa is A or G
  MOD_RES (24), (25), (26), (27): Xaa is A or G or is absent
PKAXXVPTELSATSMLYYXXXXXXXXXLRKHREMVVEGX

SEQ ID NO: 6552 - protein, 35 aa, Artificial Sequence
  Non-cyclic GFR-binding peptide
  MOD_RES (3), (4): Xaa is C or S
KAXXVPTELSPISMLYKDEYDKVVLKYHYEMVVEG

SEQ ID NO: 6553 - protein, 31 aa, Artificial Sequence
  Non-cyclic GFR-binding peptide
VPTELSPISMLYKDEYDKVVLKYHYEMVVEG

SEQ ID NO: 6554 - protein, 35 aa, Artificial Sequence
  Non-cyclic GFR-binding peptide
  MOD_RES (1), (1): Xaa is C or S
  MOD_RES (17), (18), (19), (20), (21): Xaa is A or G
  MOD_RES (22), (23), (24), (25): Xaa is A or G or is absent
XRPTQVQLSPISVLYKXXXXXXXXXLKYHYTLEDH

SEQ ID NO: 6555 - protein, 36 aa, Artificial Sequence
  Non-cyclic GFR-binding peptide
  MOD_RES (2), (3), (36): Xaa is C or S
  MOD_RES (17), (18), (19), (20), (21): Xaa is A or G
  MOD_RES (22), (23), (24), (25): Xaa is A or G or is absent
PXXVPQALSPISILYKXXXXXXXXXLKYHYMIVRSX

SEQ ID NO: 6556 - protein, 33 aa, Artificial Sequence
  Non-cyclic GFR-binding peptide
  MOD_RES (14), (15), (16), (17), (18): Xaa is A or G
  MOD_RES (19), (20), (21), (22): Xaa is A or G or is absent
APTKLSPISVLYKXXXXXXXXXLKYHYNMVVRS

SEQ ID NO: 6557 - protein, 34 aa, Artificial Sequence
  Non-cyclic GFR-binding peptide
TQVQLNAISVLYFEIVRKKPIFLKKYRTLEDHLA

SEQ ID NO: 6558 - protein, 40 aa, Artificial Sequence
  Non-cyclic GFR-binding peptide
  MOD_RES (5), (37), (39): Xaa is C or S
TKPTXAPTKLSPISVLYKDDSSNVILKYHYNMVVRSXGXH

SEQ ID NO: 6559 - protein, 43 aa, Artificial Sequence
  Non-cyclic GFR-binding peptide
  MOD_RES (5), (6), (40), (42): Xaa is C or S
  MOD_RES (20), (21), (22), (23), (24): Xaa is A or G
  MOD_RES (25), (26), (27), (28): Xaa is A or G or is absent
IPKAXXVPTELNAISMLYFXXXXXXXXXLKKYREMVVEGXGXR

SEQ ID NO: 6560 - protein, 34 aa, Artificial Sequence
  Non-cyclic GFR-binding peptide
  MOD_RES (1), (1): Xaa is C or S
  MOD_RES (15), (16), (17), (18), (19): Xaa is A or G
  MOD_RES (20), (21), (22), (23): Xaa is A or G or is absent
XVPTELSATSMLYYXXXXXXXXXLRKHRDMVVEG

SEQ ID NO: 6561 - protein, 37 aa, Artificial Sequence
  Non-cyclic GFR-binding peptide
  MOD_RES (5), (37): Xaa is C or S
TKPTXAPTKLSPISVLYKDDSSNVILKYHYNMVVRSX

SEQ ID NO: 6562 - protein, 38 aa, Artificial Sequence
  Non-cyclic GFR-binding peptide
  MOD_RES (3), (4), (37): Xaa is C or S
  MOD_RES (18), (19), (20), (21), (22): Xaa is A or G
  MOD_RES (23), (24), (25), (26): Xaa is A or G or is absent
SPXXVSQDLSATSILYYXXXXXXXXXLRKHRMIVKSXK

SEQ ID NO: 6563 - protein, 35 aa, Artificial Sequence
  Non-cyclic GFR-binding peptide
  MOD_RES (2), (3), (35): Xaa is C or S
AXXAPTKLSAISVLYLDSSNNVILKNYQNMVVKAX

SEQ ID NO: 6564 - protein, 38 aa, Artificial Sequence
  Non-cyclic GFR-binding peptide
  MOD_RES (1), (2), (36), (38): Xaa is C or S
  MOD_RES (16), (17), (18), (19), (20): Xaa is A or G
  MOD_RES (21), (22), (23), (24): Xaa is A or G or is absent
XXAPTKLSATSVLYYXXXXXXXXXLRKHRNMVVRSXGX

SEQ ID NO: 6565 - protein, 40 aa, Artificial Sequence
  Non-cyclic GFR-binding peptide
  MOD_RES (5), (6), (37), (39): Xaa is C or S
SASPXXVPQDLNAISILYFVGRTPKVLKKYRMVVKSXKXS

SEQ ID NO: 6566 - protein, 30 aa, Artificial Sequence
  Non-cyclic GFR-binding peptide
VPQDLSAISILYLVGRTPKVLKNYQMVVKS

SEQ ID NO: 6567 - protein, 42 aa, Artificial Sequence
  Non-cyclic GFR-binding peptide
  MOD_RES (4), (5), (40), (42): Xaa is C or S
  MOD_RES (19), (20), (21), (22), (23): Xaa is A or G
  MOD_RES (24), (25), (26), (27): Xaa is A or G or is absent
GKAXXVPTKLSATSVLYYXXXXXXXXXLRKHREGMSVAEXGX

SEQ ID NO: 6568 - protein, 32 aa, Artificial Sequence
  Non-cyclic GFR-binding peptide
  MOD_RES (14), (15), (16), (17), (18): Xaa is A or G
  MOD_RES (19), (20), (21), (22): Xaa is A or G or is absent
VPTELSPISMLYKXXXXXXXXXLKYHYDMVVE

SEQ ID NO: 6569 - protein, 42 aa, Artificial Sequence
  Non-cyclic GFR-binding peptide
  MOD_RES (4), (5), (40), (42): Xaa is C or S
  MOD_RES (19), (20), (21), (22), (23): Xaa is A or G
  MOD_RES (24), (25), (26), (27): Xaa is A or G or is absent
GKAXXVPTKLSAISVLYLXXXXXXXXXLKNYQEGMSVAEXGX

SEQ ID NO: 6570 - protein, 40 aa, Artificial Sequence
  Non-cyclic GFR-binding peptide
  MOD_RES (3), (4), (37), (39): Xaa is C or S
KAXXVPTKLSAISVLYLDDMGVPTLKNYQEGMSVAEXGXR

SEQ ID NO: 6571 - protein, 40 aa, Artificial Sequence
  Non-cyclic GFR-binding peptide
  MOD_RES (4), (5), (38), (40): Xaa is C or S
GKAXXVPTKLSATSVLYYDDMGVPTLRKHREGMSVAEXGX

SEQ ID NO: 6572 - protein, 33 aa, Artificial Sequence
  Non-cyclic GFR-binding peptide
  MOD_RES (1), (2): Xaa is C or S
XXVPTELSPISMLYKDENEKVVLKYHYDMVVEG

SEQ ID NO: 6573 - protein, 38 aa, Artificial Sequence
  Non-cyclic GFR-binding peptide
  MOD_RES (2), (3), (36), (38): Xaa is C or S
  MOD_RES (17), (18), (19), (20), (21): Xaa is A or G
  MOD_RES (22), (23), (24), (25): Xaa is A or G or is absent
PXXVSQDLSATSILYYXXXXXXXXXLRKHRMIVKSXKX

SEQ ID NO: 6574 - protein, 45 aa, Artificial Sequence
  Non-cyclic GFR-binding peptide
  MOD_RES (5), (42), (44): Xaa is C or S
  MOD_RES (21), (22), (23), (24), (25): Xaa is A or G
  MOD_RES (26), (27), (28), (29): Xaa is A or G or is absent
RNVQXRPTQVQLNAISVLYFXXXXXXXXXLKKYRTLEDHLAXKXE

SEQ ID NO: 6575 - protein, 37 aa, Artificial Sequence
  Non-cyclic GFR-binding peptide
  MOD_RES (2), (2): Xaa is C or S
QXRPTQVQLNAISVLYFEIVRKKPIFLKKYRTLEDHL

SEQ ID NO: 6576 - protein, 33 aa, Artificial Sequence
  Non-cyclic GFR-binding peptide
  MOD_RES (14), (15), (16), (17), (18): Xaa is A or G
  MOD_RES (19), (20), (21), (22): Xaa is A or G or is absent
APTKLSATSVLYYXXXXXXXXXLRKHRNMVVRS

SEQ ID NO: 6577 - protein, 36 aa, Artificial Sequence
  Non-cyclic GFR-binding peptide
  MOD_RES (3), (4): Xaa is C or S
  MOD_RES (18), (19), (20), (21), (22): Xaa is A or G
  MOD_RES (23), (24), (25), (26): Xaa is A or G or is absent
KAXXAPTKLSAISVLYLXXXXXXXXXLKNYQNMVVK

SEQ ID NO: 6578 - protein, 40 aa, Artificial Sequence
  Non-cyclic GFR-binding peptide
  MOD_RES (4), (38), (40): Xaa is C or S
  MOD_RES (18), (19), (20), (21), (22): Xaa is A or G
  MOD_RES (23), (24), (25), (26): Xaa is A or G or is absent
KPTXAPTKLSATSVLYYXXXXXXXXXLRKHRNMVVRSXGX

SEQ ID NO: 6579 - protein, 38 aa, Artificial Sequence
  Non-cyclic GFR-binding peptide
  MOD_RES (6), (7), (38): Xaa is C or S
ASASPXXVPQDLSAISILYLVGRTPKVLKNYQMVVKSX

SEQ ID NO: 6580 - protein, 38 aa, Artificial Sequence
  Non-cyclic GFR-binding peptide
  MOD_RES (3), (4), (37): Xaa is C or S
  MOD_RES (18), (19), (20), (21), (22): Xaa is A or G
  MOD_RES (23), (24), (25), (26): Xaa is A or G or is absent
APXXVPQALSPISILYKXXXXXXXXXLKYHYMIVRSXK

SEQ ID NO: 6581 - protein, 38 aa, Artificial Sequence
  Non-cyclic GFR-binding peptide
  MOD_RES (36), (38): Xaa is C or S
PTQVQLSAISVLYLEIVRKKPIFLKNYQTLEDHLAXKX

SEQ ID NO: 6582 - protein, 41 aa, Artificial Sequence
  Non-cyclic GFR-binding peptide
  MOD_RES (4), (5), (38), (40): Xaa is C or S
  MOD_RES (19), (20), (21), (22), (23): Xaa is A or G
  MOD_RES (24), (25), (26), (27): Xaa is A or G or is absent
ASPXXVSQDLSPISILYKXXXXXXXXXLKYHYMIVKSXKXS

SEQ ID NO: 6583 - protein, 34 aa, Artificial Sequence
  Non-cyclic GFR-binding peptide
  MOD_RES (3), (4): Xaa is C or S
KAXXVPTELNAISMLYFDEYDKVVLKKYREMVVE

SEQ ID NO: 6584 - protein, 36 aa, Artificial Sequence
  Non-cyclic GFR-binding peptide
  MOD_RES (1), (33), (35): Xaa is C or S
XAPTQLSPISVLYKDDSSNVILKYHYNMVVRAXGXH

SEQ ID NO: 6585 - protein, 39 aa, Artificial Sequence
  Non-cyclic GFR-binding peptide
  MOD_RES (5), (6), (38): Xaa is C or S
IPKAXXVPTELNAISMLYFDEYDKVVLKKYREMVVEGXG

SEQ ID NO: 6586 - protein, 36 aa, Artificial Sequence
  Non-cyclic GFR-binding peptide
  MOD_RES (2), (3), (36): Xaa is C or S
AXXVPTKLSAISVLYLDDMGVPTLKNYQEGMSVAEX

SEQ ID NO: 6587 - protein, 33 aa, Artificial Sequence
  Non-cyclic GFR-binding peptide
  MOD_RES (32), (32): Xaa is C or S
VPTELSPISMLYKDEYDKVVLKYHYEMVVEGXG

SEQ ID NO: 6588 - protein, 38 aa, Artificial Sequence
  Non-cyclic GFR-binding peptide
  MOD_RES (3), (4), (36), (38): Xaa is C or S
KAXXVPTELSATSMLYYDEYDKVVLRKHREMVVEGXGX

SEQ ID NO: 6589 - protein, 34 aa, Artificial Sequence
  Non-cyclic GFR-binding peptide
  MOD_RES (1), (2), (33): Xaa is C or S
XXVPQDLSATSILYYVGRTPKVLRKHRMVVKSXK

SEQ ID NO: 6590 - protein, 37 aa, Artificial Sequence
  Non-cyclic GFR-binding peptide
  MOD_RES (3), (4): Xaa is C or S
  MOD_RES (18), (19), (20), (21), (22): Xaa is A or G
  MOD_RES (23), (24), (25), (26): Xaa is A or G or is absent
KAXXVPTELNAISMLYFXXXXXXXXXLKKYREMVVEG

SEQ ID NO: 6591 - protein, 42 aa, Artificial Sequence
  Non-cyclic GFR-binding peptide
  MOD_RES (5), (6), (40), (42): Xaa is C or S
  MOD_RES (20), (21), (22), (23), (24): Xaa is A or G
  MOD_RES (25), (26), (27), (28): Xaa is A or G or is absent
VPKAXXAPTKLNAISVLYFXXXXXXXXXLKKYRNMVVKAXGX

SEQ ID NO: 6592 - protein, 34 aa, Artificial Sequence
  Non-cyclic GFR-binding peptide
  MOD_RES (31), (33): Xaa is C or S
VSQDLNAISILYFIGKTPKILKKYRMIVKSXKXS

SEQ ID NO: 6593 - protein, 39 aa, Artificial Sequence
  Non-cyclic GFR-binding peptide
  MOD_RES (4), (5), (37), (39): Xaa is C or S
PKAXXAPTKLSPISVLYKDSSNNVILKYHYNMVVKAXGX

SEQ ID NO: 6594 - protein, 37 aa, Artificial Sequence
  Non-cyclic GFR-binding peptide
  MOD_RES (6), (7): Xaa is C or S
SIPKAXXVPTELSATSMLYYDEYDKVVLRKHREMVVE

SEQ ID NO: 6595 - protein, 35 aa, Artificial Sequence
  Non-cyclic GFR-binding peptide
  MOD_RES (2), (3): Xaa is C or S
  MOD_RES (17), (18), (19), (20), (21): Xaa is A or G
  MOD_RES (22), (23), (24), (25): Xaa is A or G or is absent
PXXVPQDLSPISILYKXXXXXXXXXLKYHYMVVKS

SEQ ID NO: 6596 - protein, 35 aa, Artificial Sequence
  Non-cyclic GFR-binding peptide
  MOD_RES (4), (5): Xaa is C or S
PKAXXVPTELNAISMLYFDENEKVVLKKYRDMVVE

SEQ ID NO: 6597 - protein, 35 aa, Artificial Sequence
  Non-cyclic GFR-binding peptide
  MOD_RES (33), (35): Xaa is C or S
VPTKLSAISVLYLDDMGVPTLKNYQEGMSVAEXGX

SEQ ID NO: 6598 - protein, 41 aa, Artificial Sequence
  Non-cyclic GFR-binding peptide
  MOD_RES (1), (38), (40): Xaa is C or S
XRPTQVQLSPISVLYKEIVRKKPIFLKYHYTLEDHLAXKXE

SEQ ID NO: 6599 - protein, 35 aa, Artificial Sequence
  Non-cyclic GFR-binding peptide
  MOD_RES (2), (34): Xaa is C or S
TXAPTKLSPISVLYKDDSSNVILKYHYNMVVRSXG

SEQ ID NO: 6600 - protein, 35 aa, Artificial Sequence
  Non-cyclic GFR-binding peptide
  MOD_RES (1), (2): Xaa is C or S
  MOD_RES (16), (17), (18), (19), (20): Xaa is A or G
  MOD_RES (21), (22), (23), (24): Xaa is A or G or is absent
XXVPTELNAISMLYFXXXXXXXXXLKKYRDMVVEG

SEQ ID NO: 6601 - protein, 40 aa, Artificial Sequence
  Non-cyclic GFR-binding peptide
  MOD_RES (4), (5), (38), (40): Xaa is C or S
  MOD_RES (19), (20), (21), (22), (23): Xaa is A or G
  MOD_RES (24), (25), (26), (27): Xaa is A or G or is absent
ASPXXVSQDLSPISILYKXXXXXXXXXLKYHYMIVKSXKX

SEQ ID NO: 6602 - protein, 40 aa, Artificial Sequence
  Non-cyclic GFR-binding peptide
  MOD_RES (5), (6), (40): Xaa is C or S
  MOD_RES (20), (21), (22), (23), (24): Xaa is A or G
  MOD_RES (25), (26), (27), (28): Xaa is A or G or is absent
IPKAXXVPTELSATSMLYYXXXXXXXXXLRKHRDMVVEGX

SEQ ID NO: 6603 - protein, 38 aa, Artificial Sequence
  Non-cyclic GFR-binding peptide
  MOD_RES (1), (2), (35), (37): Xaa is C or S
  MOD_RES (16), (17), (18), (19), (20): Xaa is A or G
  MOD_RES (21), (22), (23), (24): Xaa is A or G or is absent
XXVPQDLSATSILYYXXXXXXXXXLRKHRMVVKSXKXS

SEQ ID NO: 6604 - protein, 38 aa, Artificial Sequence
  Non-cyclic GFR-binding peptide
  MOD_RES (2), (3), (36), (38): Xaa is C or S
  MOD_RES (17), (18), (19), (20), (21): Xaa is A or G
  MOD_RES (22), (23), (24), (25): Xaa is A or G or is absent
PXXVPQDLSATSILYYXXXXXXXXXLRKHRMVVKSXKX

SEQ ID NO: 6605 - protein, 41 aa, Artificial Sequence
  Non-cyclic GFR-binding peptide
  MOD_RES (5), (6), (39), (41): Xaa is C or S
  MOD_RES (20), (21), (22), (23), (24): Xaa is A or G
  MOD_RES (25), (26), (27), (28): Xaa is A or G or is absent
SAAPXXVPQALNAISILYFXXXXXXXXXLKKYRMIVRSXKX

SEQ ID NO: 6606 - protein, 37 aa, Artificial Sequence
  Non-cyclic GFR-binding peptide
  MOD_RES (4), (5): Xaa is C or S
  MOD_RES (19), (20), (21), (22), (23): Xaa is A or G
  MOD_RES (24), (25), (26), (27): Xaa is A or G or is absent
PKPXXAPTKLSAISVLYLXXXXXXXXXLKNYQNMVVR

SEQ ID NO: 6607 - protein, 30 aa, Artificial Sequence
  Non-cyclic GFR-binding peptide
VPQDLSPISILYKVGRTPKVLKYHYMVVKS

SEQ ID NO: 6608 - protein, 34 aa, Artificial Sequence
  Non-cyclic GFR-binding peptide
  MOD_RES (1), (2): Xaa is C or S
  MOD_RES (16), (17), (18), (19), (20): Xaa is A or G
  MOD_RES (21), (22), (23), (24): Xaa is A or G or is absent
XXVPQDLNAISILYFXXXXXXXXXLKKYRMVVKS

SEQ ID NO: 6609 - protein, 32 aa, Artificial Sequence
  Non-cyclic GFR-binding peptide
  MOD_RES (14), (15), (16), (17), (18): Xaa is A or G
  MOD_RES (19), (20), (21), (22): Xaa is A or G or is absent
VSQDLSPISILYKXXXXXXXXXLKYHYMIVKS

SEQ ID NO: 6610 - protein, 33 aa, Artificial Sequence
  Non-cyclic GFR-binding peptide
  MOD_RES (1), (1): Xaa is C or S
  MOD_RES (15), (16), (17), (18), (19): Xaa is A or G
  MOD_RES (20), (21), (22), (23): Xaa is A or G or is absent
XVSQDLSPISILYKXXXXXXXXXLKYHYMIVKS

SEQ ID NO: 6611 - protein, 39 aa, Artificial Sequence
  Non-cyclic GFR-binding peptide
  MOD_RES (3), (4), (38): Xaa is C or S
  MOD_RES (18), (19), (20), (21), (22): Xaa is A or G
  MOD_RES (23), (24), (25), (26): Xaa is A or G or is absent
KPXXAPTKLSAISVLYLXXXXXXXXXLKNYQNMVVRSXG

SEQ ID NO: 6612 - protein, 36 aa, Artificial Sequence
  Non-cyclic GFR-binding peptide
  MOD_RES (2), (3): Xaa is C or S
  MOD_RES (17), (18), (19), (20), (21): Xaa is A or G
  MOD_RES (22), (23), (24), (25): Xaa is A or G or is absent
AXXAPTKLSPISVLYKXXXXXXXXXLKYHYNMVVKA

SEQ ID NO: 6613 - protein, 37 aa, Artificial Sequence
  Non-cyclic GFR-binding peptide
  MOD_RES (3), (4), (35), (37): Xaa is C or S
SPXXVPQDLSPISILYKVGRTPKVLKYHYMVVKSXKX

SEQ ID NO: 6614 - protein, 40 aa, Artificial Sequence
  Non-cyclic GFR-binding peptide
  MOD_RES (5), (6), (37), (39): Xaa is C or S
SASPXXVSQDLSATSILYYIGKTPKILRKHRMIVKSXKXS

SEQ ID NO: 6615 - protein, 38 aa, Artificial Sequence
  Non-cyclic GFR-binding peptide
  MOD_RES (4), (5), (36), (38): Xaa is C or S
AAPXXVPQALSPISILYKVGRKPKVLKYHYMIVRSXKX

SEQ ID NO: 6616 - protein, 40 aa, Artificial Sequence
  Non-cyclic GFR-binding peptide
  MOD_RES (4), (5), (37), (39): Xaa is C or S
PKPXXAPTKLSPISVLYKDDSSNVILKYHYNMVVRSXGXH

SEQ ID NO: 6617 - protein, 42 aa, Artificial Sequence
  Non-cyclic GFR-binding peptide
  MOD_RES (4), (5), (39), (41): Xaa is C or S
  MOD_RES (19), (20), (21), (22), (23): Xaa is A or G
  MOD_RES (24), (25), (26), (27): Xaa is A or G or is absent
PKAXXAPTKLSPISVLYKXXXXXXXXXLKYHYNMVVKAXGXH

SEQ ID NO: 6618 - protein, 35 aa, Artificial Sequence
  Non-cyclic GFR-binding peptide
  MOD_RES (34), (34): Xaa is C or S
  MOD_RES (14), (15), (16), (17), (18): Xaa is A or G
  MOD_RES (19), (20), (21), (22): Xaa is A or G or is absent
VPTELSPISMLYKXXXXXXXXXLKYHYDMVVEGXG

SEQ ID NO: 6619 - protein, 39 aa, Artificial Sequence
  Non-cyclic GFR-binding peptide
  MOD_RES (5), (39): Xaa is C or S
  MOD_RES (19), (20), (21), (22), (23): Xaa is A or G
  MOD_RES (24), (25), (26), (27): Xaa is A or G or is absent
TKPTXAPTKLSPISVLYKXXXXXXXXXLKYHYNMVVRSX

SEQ ID NO: 6620 - protein, 34 aa, Artificial Sequence
  Non-cyclic GFR-binding peptide
  MOD_RES (3), (3): Xaa is C or S
PTXAPTKLSAISVLYLDDSSNVILKNYQNMVVRS

SEQ ID NO: 6621 - protein, 40 aa, Artificial Sequence
  Non-cyclic GFR-binding peptide
  MOD_RES (1), (38), (40): Xaa is C or S
XRPTQVQLSAISVLYLEIVRKKPIFLKNYQTLEDHLAXKX

SEQ ID NO: 6622 - protein, 34 aa, Artificial Sequence
  Non-cyclic GFR-binding peptide
  MOD_RES (1), (1): Xaa is C or S
  MOD_RES (15), (16), (17), (18), (19): Xaa is A or G
  MOD_RES (20), (21), (22), (23): Xaa is A or G or is absent
XVPTELNAISMLYFXXXXXXXXXLKKYRDMVVEG

SEQ ID NO: 6623 - protein, 37 aa, Artificial Sequence
  Non-cyclic GFR-binding peptide
  MOD_RES (2), (3), (34), (36): Xaa is C or S
PXXVSQDLNAISILYFIGKTPKILKKYRMIVKSXKXS

SEQ ID NO: 6624 - protein, 37 aa, Artificial Sequence
  Non-cyclic GFR-binding peptide
  MOD_RES (1), (2), (35), (37): Xaa is C or S
  MOD_RES (16), (17), (18), (19), (20): Xaa is A or G
  MOD_RES (21), (22), (23), (24): Xaa is A or G or is absent
XXVPQALSAISILYLXXXXXXXXXLKNYQMIVRSXKX

SEQ ID NO: 6625 - protein, 34 aa, Artificial Sequence
  Non-cyclic GFR-binding peptide
  MOD_RES (1), (33): Xaa is C or S
XAPTQLSAISVLYLDDSSNVILKNYQNMVVRAXG

SEQ ID NO: 6626 - protein, 38 aa, Artificial Sequence
  Non-cyclic GFR-binding peptide
  MOD_RES (4), (4): Xaa is C or S
NVQXRPTQVQLNAISVLYFEIVRKKPIFLKKYRTLEDH

SEQ ID NO: 6627 - protein, 41 aa, Artificial Sequence
  Non-cyclic GFR-binding peptide
  MOD_RES (4), (5), (38), (40): Xaa is C or S
  MOD_RES (19), (20), (21), (22), (23): Xaa is A or G
  MOD_RES (24), (25), (26), (27): Xaa is A or G or is absent
ASPXXVPQDLNAISILYFXXXXXXXXXLKKYRMVVKSXKXS

SEQ ID NO: 6628 - protein, 40 aa, Artificial Sequence
  Non-cyclic GFR-binding peptide
  MOD_RES (6), (7), (39): Xaa is C or S
AVPKAXXAPTKLNAISVLYFDSSNNVILKKYRNMVVKAXG

SEQ ID NO: 6629 - protein, 34 aa, Artificial Sequence
  Non-cyclic GFR-binding peptide
  MOD_RES (2), (3), (34): Xaa is C or S
PXXVSQDLSAISILYLIGKTPKILKNYQMIVKSX

SEQ ID NO: 6630 - protein, 35 aa, Artificial Sequence
  Non-cyclic GFR-binding peptide
  MOD_RES (35), (35): Xaa is C or S
TQVQLNAISVLYFEIVRKKPIFLKKYRTLEDHLAX

SEQ ID NO: 6631 - protein, 32 aa, Artificial Sequence
  Non-cyclic GFR-binding peptide
  MOD_RES (32), (32): Xaa is C or S
APTQLSPISVLYKDDSSNVILKYHYNMVVRAX

SEQ ID NO: 6632 - protein, 36 aa, Artificial Sequence
  Non-cyclic GFR-binding peptide
  MOD_RES (2), (3), (34), (36): Xaa is C or S
PXXVSQDLNAISILYFIGKTPKILKKYRMIVKSXKX

SEQ ID NO: 6633 - protein, 38 aa, Artificial Sequence
  Non-cyclic GFR-binding peptide
  MOD_RES (3), (4), (35), (37): Xaa is C or S
SPXXVSQDLSAISILYLIGKTPKILKNYQMIVKSXKXS

SEQ ID NO: 6634 - protein, 38 aa, Artificial Sequence
  Non-cyclic GFR-binding peptide
  MOD_RES (4), (5): Xaa is C or S
  MOD_RES (19), (20), (21), (22), (23): Xaa is A or G
  MOD_RES (24), (25), (26), (27): Xaa is A or G or is absent
PKAXXAPTKLSAISVLYLXXXXXXXXXLKNYQNMVVKA

SEQ ID NO: 6635 - protein, 36 aa, Artificial Sequence
  Non-cyclic GFR-binding peptide
  MOD_RES (4), (5): Xaa is C or S
PKAXXAPTKLSAISVLYLDSSNNVILKNYQNMVVKA

SEQ ID NO: 6636 - protein, 43 aa, Artificial Sequence
  Non-cyclic GFR-binding peptide
  MOD_RES (6), (7), (40), (42): Xaa is C or S
KVGKAXXVPTKLNAISVLYFDDMGVPTLKKYREGMSVAEXGXR

SEQ ID NO: 6637 - protein, 38 aa, Artificial Sequence
  Non-cyclic GFR-binding peptide
  MOD_RES (4), (5): Xaa is C or S
  MOD_RES (19), (20), (21), (22), (23): Xaa is A or G
  MOD_RES (24), (25), (26), (27): Xaa is A or G or is absent
PKAXXAPTKLNAISVLYFXXXXXXXXXLKKYRNMVVKA

SEQ ID NO: 6638 - protein, 39 aa, Artificial Sequence
  Non-cyclic GFR-binding peptide
  MOD_RES (3), (3): Xaa is C or S
VQXRPTQVQLNAISVLYFEIVRKKPIFLKKYRTLEDHLA

SEQ ID NO: 6639 - protein, 35 aa, Artificial Sequence
  Non-cyclic GFR-binding peptide
  MOD_RES (1), (2), (35): Xaa is C or S
  MOD_RES (16), (17), (18), (19), (20): Xaa is A or G
  MOD_RES (21), (22), (23), (24): Xaa is A or G or is absent
XXVPQDLSPISILYKXXXXXXXXXLKYHYMVVKSX

SEQ ID NO: 6640 - protein, 36 aa, Artificial Sequence
  Non-cyclic GFR-binding peptide
  MOD_RES (1), (34), (36): Xaa is C or S
  MOD_RES (15), (16), (17), (18), (19): Xaa is A or G
  MOD_RES (20), (21), (22), (23): Xaa is A or G or is absent
XVPQDLSPISILYKXXXXXXXXXLKYHYMVVKSXKX

SEQ ID NO: 6641 - protein, 34 aa, Artificial Sequence
  Non-cyclic GFR-binding peptide
  MOD_RES (1), (34): Xaa is C or S
  MOD_RES (15), (16), (17), (18), (19): Xaa is A or G
  MOD_RES (20), (21), (22), (23): Xaa is A or G or is absent
XVPQALSPISILYKXXXXXXXXXLKYHYMIVRSX

SEQ ID NO: 6642 - protein, 36 aa, Artificial Sequence
  Non-cyclic GFR-binding peptide
  MOD_RES (4), (5): Xaa is C or S
PKPXXAPTQLSAISVLYLDDSSNVILKNYQNMVVRA

SEQ ID NO: 6643 - protein, 35 aa, Artificial Sequence
  Non-cyclic GFR-binding peptide
  MOD_RES (2), (3), (34): Xaa is C or S
PXXVPQALSATSILYYVGRKPKVLRKHRMIVRSXK

SEQ ID NO: 6644 - protein, 37 aa, Artificial Sequence
  Non-cyclic GFR-binding peptide
  MOD_RES (2), (3), (36): Xaa is C or S
AXXVPTKLSAISVLYLDDMGVPTLKNYQEGMSVAEXG

SEQ ID NO: 6645 - protein, 41 aa, Artificial Sequence
  Non-cyclic GFR-binding peptide
  MOD_RES (5), (39), (41): Xaa is C or S
  MOD_RES (19), (20), (21), (22), (23): Xaa is A or G
  MOD_RES (24), (25), (26), (27): Xaa is A or G or is absent
TKPTXAPTKLSATSVLYYXXXXXXXXXLRKHRNMVVRSXGX

SEQ ID NO: 6646 - protein, 39 aa, Artificial Sequence
  Non-cyclic GFR-binding peptide
  MOD_RES (36), (38): Xaa is C or S
PTQVQLNAISVLYFEIVRKKPIFLKKYRTLEDHLAXKXE

SEQ ID NO: 6647 - protein, 38 aa, Artificial Sequence
  Non-cyclic GFR-binding peptide
  MOD_RES (3), (4), (36), (38): Xaa is C or S
KAXXAPTKLNAISVLYFDSSNNVILKKYRNMVVKAXGX

SEQ ID NO: 6648 - protein, 37 aa, Artificial Sequence
  Non-cyclic GFR-binding peptide
  MOD_RES (1), (2), (36): Xaa is C or S
  MOD_RES (16), (17), (18), (19), (20): Xaa is A or G
  MOD_RES (21), (22), (23), (24): Xaa is A or G or is absent
XXAPTKLSATSVLYYXXXXXXXXXLRKHRNMVVRSXG

SEQ ID NO: 6649 - protein, 35 aa, Artificial Sequence
  Non-cyclic GFR-binding peptide
  MOD_RES (1), (35): Xaa is C or S
  MOD_RES (15), (16), (17), (18), (19): Xaa is A or G
  MOD_RES (20), (21), (22), (23): Xaa is A or G or is absent
XVPTELSATSMLYYXXXXXXXXXLRKHRDMVVEGX

SEQ ID NO: 6650 - protein, 34 aa, Artificial Sequence
  Non-cyclic GFR-binding peptide
  MOD_RES (1), (2), (33): Xaa is C or S
XXVPQALSAISILYLVGRKPKVLKNYQMIVRSXK

SEQ ID NO: 6651 - protein, 34 aa, Artificial Sequence
  Non-cyclic GFR-binding peptide
  MOD_RES (33), (33): Xaa is C or S
  MOD_RES (14), (15), (16), (17), (18): Xaa is A or G
  MOD_RES (19), (20), (21), (22): Xaa is A or G or is absent
VPQALNAISILYFXXXXXXXXXLKKYRMIVRSXK

SEQ ID NO: 6652 - protein, 40 aa, Artificial Sequence
  Non-cyclic GFR-binding peptide
  MOD_RES (2), (3), (37), (39): Xaa is C or S
  MOD_RES (17), (18), (19), (20), (21): Xaa is A or G
  MOD_RES (22), (23), (24), (25): Xaa is A or G or is absent
AXXVPTELNAISMLYFXXXXXXXXXLKKYRDMVVEGXGXR

SEQ ID NO: 6653 - protein, 34 aa, Artificial Sequence
  Non-cyclic GFR-binding peptide
  MOD_RES (2), (3): Xaa is C or S
PXXAPTKLSAISVLYLDDSSNVILKNYQNMVVRS

SEQ ID NO: 6654 - protein, 37 aa, Artificial Sequence
  Non-cyclic GFR-binding peptide
  MOD_RES (1), (34), (36): Xaa is C or S
XVPTKLNAISVLYFDDMGVPTLKKYREGMSVAEXGXR

SEQ ID NO: 6655 - protein, 33 aa, Artificial Sequence
  Non-cyclic GFR-binding peptide
  MOD_RES (32), (32): Xaa is C or S
APTKLSPISVLYKDSSNNVILKYHYNMVVKAXG

SEQ ID NO: 6656 - protein, 39 aa, Artificial Sequence
  Non-cyclic GFR-binding peptide
  MOD_RES (6), (7), (39): Xaa is C or S
SIPKAXXVPTELSATSMLYYDEYDKVVLRKHREMVVEGX

SEQ ID NO: 6657 - protein, 41 aa, Artificial Sequence
  Non-cyclic GFR-binding peptide
  MOD_RES (5), (6), (39), (41): Xaa is C or S
VGKAXXVPTKLSAISVLYLDDMGVPTLKNYQEGMSVAEXGX

SEQ ID NO: 6658 - protein, 39 aa, Artificial Sequence
  Non-cyclic GFR-binding peptide
  MOD_RES (6), (7), (38): Xaa is C or S
ASAAPXXVPQALNAISILYFVGRKPKVLKKYRMIVRSXK

SEQ ID NO: 6659 - protein, 35 aa, Artificial Sequence
  Non-cyclic GFR-binding peptide
  MOD_RES (3), (4): Xaa is C or S
KPXXAPTQLSPISVLYKDDSSNVILKYHYNMVVRA

SEQ ID NO: 6660 - protein, 33 aa, Artificial Sequence
  Non-cyclic GFR-binding peptide
  MOD_RES (14), (15), (16), (17), (18): Xaa is A or G
  MOD_RES (19), (20), (21), (22): Xaa is A or G or is absent
APTKLSPISVLYKXXXXXXXXXLKYHYNMVVKA

SEQ ID NO: 6661 - protein, 39 aa, Artificial Sequence
  Non-cyclic GFR-binding peptide
  MOD_RES (3), (4), (36), (38): Xaa is C or S
KAXXVPTELSATSMLYYDEYDKVVLRKHREMVVEGXGXR

SEQ ID NO: 6662 - protein, 33 aa, Artificial Sequence
  Non-cyclic GFR-binding peptide
  MOD_RES (1), (33): Xaa is C or S
XVPTELSPISMLYKDENEKVVLKYHYDMVVEGX

SEQ ID NO: 6663 - protein, 35 aa, Artificial Sequence
  Non-cyclic GFR-binding peptide
  MOD_RES (32), (34): Xaa is C or S
VPTELNAISMLYFDEYDKVVLKKYREMVVEGXGXR

SEQ ID NO: 6664 - protein, 36 aa, Artificial Sequence
  Non-cyclic GFR-binding peptide
  MOD_RES (5), (6): Xaa is C or S
SASPXXVSQDLNAISILYFIGKTPKILKKYRMIVKS

SEQ ID NO: 6665 - protein, 32 aa, Artificial Sequence
  Non-cyclic GFR-binding peptide
  MOD_RES (14), (15), (16), (17), (18): Xaa is A or G
  MOD_RES (19), (20), (21), (22): Xaa is A or G or is absent
VSQDLSATSILYYXXXXXXXXXLRKHRMIVKS

SEQ ID NO: 6666 - protein, 35 aa, Artificial Sequence
  Non-cyclic GFR-binding peptide
  MOD_RES (3), (35): Xaa is C or S
PTXAPTKLSATSVLYYDDSSNVILRKHRNMVVRSX

SEQ ID NO: 6667 - protein, 37 aa, Artificial Sequence
  Non-cyclic GFR-binding peptide
  MOD_RES (4), (5): Xaa is C or S
  MOD_RES (19), (20), (21), (22), (23): Xaa is A or G
  MOD_RES (24), (25), (26), (27): Xaa is A or G or is absent
PKAXXAPTKLSAISVLYLXXXXXXXXXLKNYQNMVVK

SEQ ID NO: 6668 - protein, 34 aa, Artificial Sequence
  Non-cyclic GFR-binding peptide
  MOD_RES (2), (2): Xaa is C or S
  MOD_RES (16), (17), (18), (19), (20): Xaa is A or G
  MOD_RES (21), (22), (23), (24): Xaa is A or G or is absent
TXAPTKLSATSVLYYXXXXXXXXXLRKHRNMVVR

SEQ ID NO: 6669 - protein, 35 aa, Artificial Sequence
  Non-cyclic GFR-binding peptide
  MOD_RES (1), (2), (34): Xaa is C or S
XXAPTKLSATSVLYYDDSSNVILRKHRNMVVRSXG

SEQ ID NO: 6670 - protein, 30 aa, Artificial Sequence
  Non-cyclic GFR-binding peptide
VSQDLNAISILYFIGKTPKILKKYRMIVKS

SEQ ID NO: 6671 - protein, 38 aa, Artificial Sequence
  Non-cyclic GFR-binding peptide
  MOD_RES (1), (35), (37): Xaa is C or S
  MOD_RES (15), (16), (17), (18), (19): Xaa is A or G
  MOD_RES (20), (21), (22), (23): Xaa is A or G or is absent
XAPTKLSPISVLYKXXXXXXXXXLKYHYNMVVRSXGXH

SEQ ID NO: 6672 - protein, 38 aa, Artificial Sequence
  Non-cyclic GFR-binding peptide
  MOD_RES (3), (4), (35), (37): Xaa is C or S
SPXXVSQDLNAISILYFIGKTPKILKKYRMIVKSXKXS

SEQ ID NO: 6673 - protein, 43 aa, Artificial Sequence
  Non-cyclic GFR-binding peptide
  MOD_RES (5), (42): Xaa is C or S
  MOD_RES (21), (22), (23), (24), (25): Xaa is A or G
  MOD_RES (26), (27), (28), (29): Xaa is A or G or is absent
RNVQXRPTQVQLSAISVLYLXXXXXXXXXLKNYQTLEDHLAXK

SEQ ID NO: 6674 - protein, 36 aa, Artificial Sequence
  Non-cyclic GFR-binding peptide
  MOD_RES (1), (2), (35): Xaa is C or S
  MOD_RES (16), (17), (18), (19), (20): Xaa is A or G
  MOD_RES (21), (22), (23), (24): Xaa is A or G or is absent
XXVPQALSAISILYLXXXXXXXXXLKNYQMIVRSXK

SEQ ID NO: 6675 - protein, 40 aa, Artificial Sequence
  Non-cyclic GFR-binding peptide
  MOD_RES (4), (5), (39): Xaa is C or S
  MOD_RES (19), (20), (21), (22), (23): Xaa is A or G
  MOD_RES (24), (25), (26), (27): Xaa is A or G or is absent
PKAXXVPTELNAISMLYFXXXXXXXXXLKKYRDMVVEGXG

SEQ ID NO: 6676 - protein, 32 aa, Artificial Sequence
  Non-cyclic GFR-binding peptide
  MOD_RES (32), (32): Xaa is C or S
APTKLSATSVLYYDDSSNVILRKHRNMVVRSX

SEQ ID NO: 6677 - protein, 44 aa, Artificial Sequence
  Non-cyclic GFR-binding peptide
  MOD_RES (5), (42), (44): Xaa is C or S
RNVQXRPTQVQLSATSVLYYEIVRKKPIFLRKHRTLEDHLAXKX

SEQ ID NO: 6678 - protein, 37 aa, Artificial Sequence
  Non-cyclic GFR-binding peptide
  MOD_RES (1), (2), (36): Xaa is C or S
  MOD_RES (16), (17), (18), (19), (20): Xaa is A or G
  MOD_RES (21), (22), (23), (24): Xaa is A or G or is absent
XXVPTELSPISMLYKXXXXXXXXXLKYHYDMVVEGXG

SEQ ID NO: 6679 - protein, 37 aa, Artificial Sequence
  Non-cyclic GFR-binding peptide
  MOD_RES (3), (4): Xaa is C or S
  MOD_RES (18), (19), (20), (21), (22): Xaa is A or G
  MOD_RES (23), (24), (25), (26): Xaa is A or G or is absent
KAXXAPTKLNAISVLYFXXXXXXXXXLKKYRNMVVKA

SEQ ID NO: 6680 - protein, 38 aa, Artificial Sequence
  Non-cyclic GFR-binding peptide
  MOD_RES (6), (7): Xaa is C or S
TVPKPXXAPTQLSATSVLYYDDSSNVILRKHRNMVVRA

SEQ ID NO: 6681 - protein, 36 aa, Artificial Sequence
  Non-cyclic GFR-binding peptide
  MOD_RES (2), (2): Xaa is C or S
  MOD_RES (18), (19), (20), (21), (22): Xaa is A or G
  MOD_RES (23), (24), (25), (26): Xaa is A or G or is absent
QXRPTQVQLSAISVLYLXXXXXXXXXLKNYQTLEDH

SEQ ID NO: 6682 - protein, 34 aa, Artificial Sequence
  Non-cyclic GFR-binding peptide
  MOD_RES (1), (2), (34): Xaa is C or S
XXAPTQLSPISVLYKDDSSNVILKYHYNMVVRAX

SEQ ID NO: 6683 - protein, 39 aa, Artificial Sequence
  Non-cyclic GFR-binding peptide
  MOD_RES (3), (4), (36), (38): Xaa is C or S
KPXXAPTQLSATSVLYYDDSSNVILRKHRNMVVRAXGXH

SEQ ID NO: 6684 - protein, 38 aa, Artificial Sequence
  Non-cyclic GFR-binding peptide
  MOD_RES (1), (2), (36), (38): Xaa is C or S
  MOD_RES (16), (17), (18), (19), (20): Xaa is A or G
  MOD_RES (21), (22), (23), (24): Xaa is A or G or is absent
XXVPTELSATSMLYYXXXXXXXXXLRKHRDMVVEGXGX

SEQ ID NO: 6685 - protein, 42 aa, Artificial Sequence
  Non-cyclic GFR-binding peptide
  MOD_RES (3), (40), (42): Xaa is C or S
  MOD_RES (19), (20), (21), (22), (23): Xaa is A or G
  MOD_RES (24), (25), (26), (27): Xaa is A or G or is absent
VQXRPTQVQLSPISVLYKXXXXXXXXXLKYHYTLEDHLAXKX

SEQ ID NO: 6686 - protein, 36 aa, Artificial Sequence
  Non-cyclic GFR-binding peptide
  MOD_RES (1), (34), (36): Xaa is C or S
  MOD_RES (15), (16), (17), (18), (19): Xaa is A or G
  MOD_RES (20), (21), (22), (23): Xaa is A or G or is absent
XVSQDLNAISILYFXXXXXXXXXLKKYRMIVKSXKX

SEQ ID NO: 6687 - protein, 39 aa, Artificial Sequence
  Non-cyclic GFR-binding peptide
  MOD_RES (5), (6), (38): Xaa is C or S
VPKAXXAPTKLSAISVLYLDSSNNVILKNYQNMVVKAXG

SEQ ID NO: 6688 - protein, 40 aa, Artificial Sequence
  Non-cyclic GFR-binding peptide
  MOD_RES (3), (4), (38), (40): Xaa is C or S
  MOD_RES (18), (19), (20), (21), (22): Xaa is A or G
  MOD_RES (23), (24), (25), (26): Xaa is A or G or is absent
KAXXVPTELSPISMLYKXXXXXXXXXLKYHYEMVVEGXGX

SEQ ID NO: 6689 - protein, 40 aa, Artificial Sequence
  Non-cyclic GFR-binding peptide
  MOD_RES (6), (7), (38), (40): Xaa is C or S
ASASPXXVSQDLSPISILYKIGKTPKILKYHYMIVKSXKX

SEQ ID NO: 6690 - protein, 41 aa, Artificial Sequence
  Non-cyclic GFR-binding peptide
  MOD_RES (5), (6), (39), (41): Xaa is C or S
VGKAXXVPTKLNAISVLYFDDMGVPTLKKYREGMSVAEXGX

SEQ ID NO: 6691 - protein, 40 aa, Artificial Sequence
  Non-cyclic GFR-binding peptide
  MOD_RES (4), (4): Xaa is C or S
  MOD_RES (20), (21), (22), (23), (24): Xaa is A or G
  MOD_RES (25), (26), (27), (28): Xaa is A or G or is absent
NVQXRPTQVQLNAISVLYFXXXXXXXXXLKKYRTLEDHLA

SEQ ID NO: 6692 - protein, 42 aa, Artificial Sequence
  Non-cyclic GFR-binding peptide
  MOD_RES (6), (7), (40), (42): Xaa is C or S
  MOD_RES (21), (22), (23), (24), (25): Xaa is A or G
  MOD_RES (26), (27), (28), (29): Xaa is A or G or is absent
ASASPXXVPQDLSATSILYYXXXXXXXXXLRKHRMVVKSXKX

SEQ ID NO: 6693 - protein, 38 aa, Artificial Sequence
  Non-cyclic GFR-binding peptide
  MOD_RES (3), (35), (37): Xaa is C or S
PTXAPTKLSAISVLYLDDSSNVILKNYQNMVVRSXGXH

SEQ ID NO: 6694 - protein, 36 aa, Artificial Sequence
  Non-cyclic GFR-binding peptide
  MOD_RES (1), (2), (34), (36): Xaa is C or S
XXAPTKLSPISVLYKDSSNNVILKYHYNMVVKAXGX

SEQ ID NO: 6695 - protein, 34 aa, Artificial Sequence
  Non-cyclic GFR-binding peptide
PTQVQLSPISVLYKEIVRKKPIFLKYHYTLEDHL

SEQ ID NO: 6696 - protein, 38 aa, Artificial Sequence
  Non-cyclic GFR-binding peptide
  MOD_RES (2), (3), (36), (38): Xaa is C or S
AXXVPTKLSATSVLYYDDMGVPTLRKHREGMSVAEXGX

SEQ ID NO: 6697 - protein, 42 aa, Artificial Sequence
  Non-cyclic GFR-binding peptide
  MOD_RES (6), (7), (40), (42): Xaa is C or S
  MOD_RES (21), (22), (23), (24), (25): Xaa is A or G
  MOD_RES (26), (27), (28), (29): Xaa is A or G or is absent
ASASPXXVPQDLSAISILYLXXXXXXXXXLKNYQMVVKSXKX

SEQ ID NO: 6698 - protein, 43 aa, Artificial Sequence
  Non-cyclic GFR-binding peptide
  MOD_RES (5), (42): Xaa is C or S
  MOD_RES (21), (22), (23), (24), (25): Xaa is A or G
  MOD_RES (26), (27), (28), (29): Xaa is A or G or is absent
RNVQXRPTQVQLSATSVLYYXXXXXXXXXLRKHRTLEDHLAXK

SEQ ID NO: 6699 - protein, 35 aa, Artificial Sequence
  Non-cyclic GFR-binding peptide
  MOD_RES (33), (35): Xaa is C or S
  MOD_RES (14), (15), (16), (17), (18): Xaa is A or G
  MOD_RES (19), (20), (21), (22): Xaa is A or G or is absent
VPQALSATSILYYXXXXXXXXXLRKHRMIVRSXKX

SEQ ID NO: 6700 - protein, 39 aa, Artificial Sequence
  Non-cyclic GFR-binding peptide
  MOD_RES (3), (4), (38): Xaa is C or S
  MOD_RES (18), (19), (20), (21), (22): Xaa is A or G
  MOD_RES (23), (24), (25), (26): Xaa is A or G or is absent
KPXXAPTKLSATSVLYYXXXXXXXXXLRKHRNMVVRSXG

SEQ ID NO: 6701 - protein, 39 aa, Artificial Sequence
  Non-cyclic GFR-binding peptide
  MOD_RES (1), (2), (36), (38): Xaa is C or S
  MOD_RES (16), (17), (18), (19), (20): Xaa is A or G
  MOD_RES (21), (22), (23), (24): Xaa is A or G or is absent
XXVPTELSATSMLYYXXXXXXXXXLRKHRDMVVEGXGXR

SEQ ID NO: 6702 - protein, 37 aa, Artificial Sequence
  Non-cyclic GFR-binding peptide
  MOD_RES (1), (35), (37): Xaa is C or S
  MOD_RES (15), (16), (17), (18), (19): Xaa is A or G
  MOD_RES (20), (21), (22), (23): Xaa is A or G or is absent
XVPTELSPISMLYKXXXXXXXXXLKYHYEMVVEGXGX

SEQ ID NO: 6703 - protein, 38 aa, Artificial Sequence
  Non-cyclic GFR-binding peptide
  MOD_RES (4), (5), (38): Xaa is C or S
GKAXXVPTKLNAISVLYFDDMGVPTLKKYREGMSVAEX

SEQ ID NO: 6704 - protein, 39 aa, Artificial Sequence
  Non-cyclic GFR-binding peptide
  MOD_RES (5), (6), (37), (39): Xaa is C or S
SAAPXXVPQALNAISILYFVGRKPKVLKKYRMIVRSXKX

SEQ ID NO: 6705 - protein, 36 aa, Artificial Sequence
  Non-cyclic GFR-binding peptide
  MOD_RES (5), (6): Xaa is C or S
VPKPXXAPTKLSPISVLYKDDSSNVILKYHYNMVVR

SEQ ID NO: 6706 - protein, 35 aa, Artificial Sequence
  Non-cyclic GFR-binding peptide
  MOD_RES (4), (5): Xaa is C or S
PKAXXVPTELSATSMLYYDENEKVVLRKHRDMVVE

SEQ ID NO: 6707 - protein, 40 aa, Artificial Sequence
  Non-cyclic GFR-binding peptide
  MOD_RES (2), (3), (37), (39): Xaa is C or S
  MOD_RES (17), (18), (19), (20), (21): Xaa is A or G
  MOD_RES (22), (23), (24), (25): Xaa is A or G or is absent
PXXAPTQLSATSVLYYXXXXXXXXXLRKHRNMVVRAXGXH

SEQ ID NO: 6708 - protein, 34 aa, Artificial Sequence
  Non-cyclic GFR-binding peptide
TQVQLSAISVLYLEIVRKKPIFLKNYQTLEDHLA

SEQ ID NO: 6709 - protein, 34 aa, Artificial Sequence
  Non-cyclic GFR-binding peptide
  MOD_RES (3), (4): Xaa is C or S
SPXXVPQDLNAISILYFVGRTPKVLKKYRMVVKS

SEQ ID NO: 6710 - protein, 34 aa, Artificial Sequence
  Non-cyclic GFR-binding peptide
TQVQLSATSVLYYEIVRKKPIFLRKHRTLEDHLA

SEQ ID NO: 6711 - protein, 42 aa, Artificial Sequence
  Non-cyclic GFR-binding peptide
  MOD_RES (6), (7), (39), (41): Xaa is C or S
SIPKAXXVPTELSPISMLYKDEYDKVVLKYHYEMVVEGXGXR

SEQ ID NO: 6712 - protein, 35 aa, Artificial Sequence
  Non-cyclic GFR-binding peptide
  MOD_RES (1), (1): Xaa is C or S
  MOD_RES (17), (18), (19), (20), (21): Xaa is A or G
  MOD_RES (22), (23), (24), (25): Xaa is A or G or is absent
XRPTQVQLSATSVLYYXXXXXXXXXLRKHRTLEDH

SEQ ID NO: 6713 - protein, 39 aa, Artificial Sequence
  Non-cyclic GFR-binding peptide
  MOD_RES (3), (4), (36), (38): Xaa is C or S
KAXXVPTELSPISMLYKDENEKVVLKYHYDMVVEGXGXR

SEQ ID NO: 6714 - protein, 40 aa, Artificial Sequence
  Non-cyclic GFR-binding peptide
  MOD_RES (3), (4), (37), (39): Xaa is C or S
  MOD_RES (18), (19), (20), (21), (22): Xaa is A or G
  MOD_RES (23), (24), (25), (26): Xaa is A or G or is absent
SPXXVSQDLSAISILYLXXXXXXXXXLKNYQMIVKSXKXS

SEQ ID NO: 6715 - protein, 35 aa, Artificial Sequence
  Non-cyclic GFR-binding peptide
  MOD_RES (1), (34): Xaa is C or S
XVPTKLNAISVLYFDDMGVPTLKKYREGMSVAEXG

SEQ ID NO: 6716 - protein, 43 aa, Artificial Sequence
  Non-cyclic GFR-binding peptide
  MOD_RES (5), (42): Xaa is C or S
RNVQXRPTQVQLSATSVLYYEIVRKKPIFLRKHRTLEDHLAXK

SEQ ID NO: 6717 - protein, 33 aa, Artificial Sequence
  Non-cyclic GFR-binding peptide
  MOD_RES (14), (15), (16), (17), (18): Xaa is A or G
  MOD_RES (19), (20), (21), (22): Xaa is A or G or is absent
TQVQLSPISVLYKXXXXXXXXXLKYHYTLEDHL

SEQ ID NO: 6718 - protein, 33 aa, Artificial Sequence
  Non-cyclic GFR-binding peptide
  MOD_RES (1), (33): Xaa is C or S
XVPTELNAISMLYFDENEKVVLKKYRDMVVEGX

SEQ ID NO: 6719 - protein, 37 aa, Artificial Sequence
  Non-cyclic GFR-binding peptide
  MOD_RES (1), (2), (35), (37): Xaa is C or S
  MOD_RES (16), (17), (18), (19), (20): Xaa is A or G
  MOD_RES (21), (22), (23), (24): Xaa is A or G or is absent
XXVSQDLSPISILYKXXXXXXXXXLKYHYMIVKSXKX

SEQ ID NO: 6720 - protein, 37 aa, Artificial Sequence
  Non-cyclic GFR-binding peptide
  MOD_RES (3), (4), (37): Xaa is C or S
  MOD_RES (18), (19), (20), (21), (22): Xaa is A or G
  MOD_RES (23), (24), (25), (26): Xaa is A or G or is absent
SPXXVPQDLSATSILYYXXXXXXXXXLRKHRMVVKSX

SEQ ID NO: 6721 - protein, 38 aa, Artificial Sequence
  Non-cyclic GFR-binding peptide
  MOD_RES (5), (6): Xaa is C or S
  MOD_RES (20), (21), (22), (23), (24): Xaa is A or G
  MOD_RES (25), (26), (27), (28): Xaa is A or G or is absent
IPKAXXVPTELNAISMLYFXXXXXXXXXLKKYRDMVVE

SEQ ID NO: 6722 - protein, 34 aa, Artificial Sequence
  Non-cyclic GFR-binding peptide
  MOD_RES (1), (2), (34): Xaa is C or S
XXVPTELNAISMLYFDENEKVVLKKYRDMVVEGX

SEQ ID NO: 6723 - protein, 39 aa, Artificial Sequence
  Non-cyclic GFR-binding peptide
  MOD_RES (6), (7): Xaa is C or S
KVGKAXXVPTKLNAISVLYFDDMGVPTLKKYREGMSVAE

SEQ ID NO: 6724 - protein, 35 aa, Artificial Sequence
  Non-cyclic GFR-binding peptide
  MOD_RES (1), (2), (34): Xaa is C or S
XXAPTQLSATSVLYYDDSSNVILRKHRNMVVRAXG

SEQ ID NO: 6725 - protein, 37 aa, Artificial Sequence
  Non-cyclic GFR-binding peptide
  MOD_RES (3), (4), (35), (37): Xaa is C or S
APXXVPQALSPISILYKVGRKPKVLKYHYMIVRSXKX

SEQ ID NO: 6726 - protein, 37 aa, Artificial Sequence
  Non-cyclic GFR-binding peptide
  MOD_RES (2), (3), (36): Xaa is C or S
  MOD_RES (17), (18), (19), (20), (21): Xaa is A or G
  MOD_RES (22), (23), (24), (25): Xaa is A or G or is absent
PXXVPQDLSATSILYYXXXXXXXXXLRKHRMVVKSXK

SEQ ID NO: 6727 - protein, 40 aa, Artificial Sequence
  Non-cyclic GFR-binding peptide
  MOD_RES (6), (7), (40): Xaa is C or S
  MOD_RES (21), (22), (23), (24), (25): Xaa is A or G
  MOD_RES (26), (27), (28), (29): Xaa is A or G or is absent
ASASPXXVPQDLSPISILYKXXXXXXXXXLKYHYMVVKSX

SEQ ID NO: 6728 - protein, 35 aa, Artificial Sequence
  Non-cyclic GFR-binding peptide
  MOD_RES (1), (34): Xaa is C or S
  MOD_RES (15), (16), (17), (18), (19): Xaa is A or G
  MOD_RES (20), (21), (22), (23): Xaa is A or G or is absent
XVPQALNAISILYFXXXXXXXXXLKKYRMIVRSXK

SEQ ID NO: 6729 - protein, 34 aa, Artificial Sequence
  Non-cyclic GFR-binding peptide
  MOD_RES (1), (2), (34): Xaa is C or S
XXVPTELSPISMLYKDENEKVVLKYHYDMVVEGX

SEQ ID NO: 6730 - protein, 36 aa, Artificial Sequence
  Non-cyclic GFR-binding peptide
  MOD_RES (1), (2), (33), (35): Xaa is C or S
XXVSQDLNAISILYFIGKTPKILKKYRMIVKSXKXS

SEQ ID NO: 6731 - protein, 36 aa, Artificial Sequence
  Non-cyclic GFR-binding peptide
  MOD_RES (1), (2), (36): Xaa is C or S
  MOD_RES (16), (17), (18), (19), (20): Xaa is A or G
  MOD_RES (21), (22), (23), (24): Xaa is A or G or is absent
XXVPTELNAISMLYFXXXXXXXXXLKKYRDMVVEGX

SEQ ID NO: 6732 - protein, 42 aa, Artificial Sequence
  Non-cyclic GFR-binding peptide
  MOD_RES (4), (5), (39), (41): Xaa is C or S
  MOD_RES (19), (20), (21), (22), (23): Xaa is A or G
  MOD_RES (24), (25), (26), (27): Xaa is A or G or is absent
PKPXXAPTQLSATSVLYYXXXXXXXXXLRKHRNMVVRAXGXH

SEQ ID NO: 6733 - protein, 32 aa, Artificial Sequence
  Non-cyclic GFR-binding peptide
  MOD_RES (32), (32): Xaa is C or S
APTQLSAISVLYLDDSSNVILKNYQNMVVRAX

SEQ ID NO: 6734 - protein, 38 aa, Artificial Sequence
  Non-cyclic GFR-binding peptide
  MOD_RES (5), (6), (38): Xaa is C or S
IPKAXXVPTELNAISMLYFDEYDKVVLKKYREMVVEGX

SEQ ID NO: 6735 - protein, 37 aa, Artificial Sequence
  Non-cyclic GFR-binding peptide
  MOD_RES (6), (7): Xaa is C or S
YVPKPXXAPTKLSAISVLYLDDSSNVILKNYQNMVVR

SEQ ID NO: 6736 - protein, 42 aa, Artificial Sequence
  Non-cyclic GFR-binding peptide
  MOD_RES (6), (7), (41): Xaa is C or S
  MOD_RES (21), (22), (23), (24), (25): Xaa is A or G
  MOD_RES (26), (27), (28), (29): Xaa is A or G or is absent
SIPKAXXVPTELSATSMLYYXXXXXXXXXLRKHREMVVEGXG

SEQ ID NO: 6737 - protein, 43 aa, Artificial Sequence
  Non-cyclic GFR-binding peptide
  MOD_RES (5), (6), (40), (42): Xaa is C or S
  MOD_RES (20), (21), (22), (23), (24): Xaa is A or G
  MOD_RES (25), (26), (27), (28): Xaa is A or G or is absent
VPKPXXAPTQLSPISVLYKXXXXXXXXXLKYHYNMVVRAXGXH

SEQ ID NO: 6738 - protein, 38 aa, Artificial Sequence
  Non-cyclic GFR-binding peptide
  MOD_RES (2), (3), (37): Xaa is C or S
  MOD_RES (17), (18), (19), (20), (21): Xaa is A or G
  MOD_RES (22), (23), (24), (25): Xaa is A or G or is absent
AXXVPTELNAISMLYFXXXXXXXXXLKKYREMVVEGXG

SEQ ID NO: 6739 - protein, 37 aa, Artificial Sequence
  Non-cyclic GFR-binding peptide
  MOD_RES (3), (4), (37): Xaa is C or S
  MOD_RES (18), (19), (20), (21), (22): Xaa is A or G
  MOD_RES (23), (24), (25), (26): Xaa is A or G or is absent
SPXXVPQDLSAISILYLXXXXXXXXXLKNYQMVVKSX

SEQ ID NO: 6740 - protein, 39 aa, Artificial Sequence
  Non-cyclic GFR-binding peptide
  MOD_RES (5), (37), (39): Xaa is C or S
TKPTXAPTKLSPISVLYKDDSSNVILKYHYNMVVRSXGX

SEQ ID NO: 6741 - protein, 35 aa, Artificial Sequence
  Non-cyclic GFR-binding peptide
  MOD_RES (33), (35): Xaa is C or S
  MOD_RES (14), (15), (16), (17), (18): Xaa is A or G
  MOD_RES (19), (20), (21), (22): Xaa is A or G or is absent
VSQDLSPISILYKXXXXXXXXXLKYHYMIVKSXKX

SEQ ID NO: 6742 - protein, 35 aa, Artificial Sequence
  Non-cyclic GFR-binding peptide
  MOD_RES (3), (4): Xaa is C or S
KAXXVPTELSATSMLYYDENEKVVLRKHRDMVVEG

SEQ ID NO: 6743 - protein, 40 aa, Artificial Sequence
  Non-cyclic GFR-binding peptide
  MOD_RES (6), (7), (38), (40): Xaa is C or S
ASASPXXVPQDLSATSILYYVGRTPKVLRKHRMVVKSXKX

SEQ ID NO: 6744 - protein, 39 aa, Artificial Sequence
  Non-cyclic GFR-binding peptide
  MOD_RES (5), (6), (37), (39): Xaa is C or S
SASPXXVPQDLSPISILYKVGRTPKVLKYHYMVVKSXKX

SEQ ID NO: 6745 - protein, 32 aa, Artificial Sequence
  Non-cyclic GFR-binding peptide
  MOD_RES (1), (1): Xaa is C or S
XVPTELSATSMLYYDEYDKVVLRKHREMVVEG

SEQ ID NO: 6746 - protein, 36 aa, Artificial Sequence
  Non-cyclic GFR-binding peptide
  MOD_RES (1), (2), (34), (36): Xaa is C or S
XXAPTQLSAISVLYLDDSSNVILKNYQNMVVRAXGX

SEQ ID NO: 6747 - protein, 34 aa, Artificial Sequence
  Non-cyclic GFR-binding peptide
  MOD_RES (1), (2): Xaa is C or S
  MOD_RES (16), (17), (18), (19), (20): Xaa is A or G
  MOD_RES (21), (22), (23), (24): Xaa is A or G or is absent
XXAPTKLNAISVLYFXXXXXXXXXLKKYRNMVVK

SEQ ID NO: 6748 - protein, 37 aa, Artificial Sequence
  Non-cyclic GFR-binding peptide
  MOD_RES (1), (34), (36): Xaa is C or S
  MOD_RES (15), (16), (17), (18), (19): Xaa is A or G
  MOD_RES (20), (21), (22), (23): Xaa is A or G or is absent
XVPQDLSAISILYLXXXXXXXXXLKNYQMVVKSXKXS

SEQ ID NO: 6749 - protein, 37 aa, Artificial Sequence
  Non-cyclic GFR-binding peptide
  MOD_RES (1), (1): Xaa is C or S
  MOD_RES (17), (18), (19), (20), (21): Xaa is A or G
  MOD_RES (22), (23), (24), (25): Xaa is A or G or is absent
XRPTQVQLNAISVLYFXXXXXXXXXLKKYRTLEDHLA

SEQ ID NO: 6750 - protein, 35 aa, Artificial Sequence
  Non-cyclic GFR-binding peptide
  MOD_RES (1), (2), (35): Xaa is C or S
  MOD_RES (16), (17), (18), (19), (20): Xaa is A or G
  MOD_RES (21), (22), (23), (24): Xaa is A or G or is absent
XXVSQDLSPISILYKXXXXXXXXXLKYHYMIVKSX

SEQ ID NO: 6751 - protein, 36 aa, Artificial Sequence
  Non-cyclic GFR-binding peptide
  MOD_RES (5), (5): Xaa is C or S
TKPTXAPTKLSPISVLYKDDSSNVILKYHYNMVVRS

SEQ ID NO: 6752 - protein, 39 aa, Artificial Sequence
  Non-cyclic GFR-binding peptide
  MOD_RES (5), (6): Xaa is C or S
  MOD_RES (20), (21), (22), (23), (24): Xaa is A or G
  MOD_RES (25), (26), (27), (28): Xaa is A or G or is absent
VPKAXXAPTKLSPISVLYKXXXXXXXXXLKYHYNMVVKA

SEQ ID NO: 6753 - protein, 41 aa, Artificial Sequence
  Non-cyclic GFR-binding peptide
  MOD_RES (6), (7), (39), (41): Xaa is C or S
KIPKAXXVPTELNAISMLYFDENEKVVLKKYRDMVVEGXGX

SEQ ID NO: 6754 - protein, 34 aa, Artificial Sequence
  Non-cyclic GFR-binding peptide
  MOD_RES (15), (16), (17), (18), (19): Xaa is A or G
  MOD_RES (20), (21), (22), (23): Xaa is A or G or is absent
PTQVQLSATSVLYYXXXXXXXXXLRKHRTLEDHL

SEQ ID NO: 6755 - protein, 35 aa, Artificial Sequence
  Non-cyclic GFR-binding peptide
  MOD_RES (1), (2), (34): Xaa is C or S
XXAPTKLSAISVLYLDSSNNVILKNYQNMVVKAXG

SEQ ID NO: 6756 - protein, 37 aa, Artificial Sequence
  Non-cyclic GFR-binding peptide
  MOD_RES (1), (35), (37): Xaa is C or S
  MOD_RES (15), (16), (17), (18), (19): Xaa is A or G
  MOD_RES (20), (21), (22), (23): Xaa is A or G or is absent
XVPTELSPISMLYKXXXXXXXXXLKYHYDMVVEGXGX

SEQ ID NO: 6757 - protein, 39 aa, Artificial Sequence
  Non-cyclic GFR-binding peptide
  MOD_RES (4), (5), (39): Xaa is C or S
  MOD_RES (19), (20), (21), (22), (23): Xaa is A or G
  MOD_RES (24), (25), (26), (27): Xaa is A or G or is absent
PKAXXAPTKLSAISVLYLXXXXXXXXXLKNYQNMVVKAX

SEQ ID NO: 6758 - protein, 40 aa, Artificial Sequence
  Non-cyclic GFR-binding peptide
  MOD_RES (5), (6), (38), (40): Xaa is C or S
IPKAXXVPTELSATSMLYYDEYDKVVLRKHREMVVEGXGX

SEQ ID NO: 6759 - protein, 39 aa, Artificial Sequence
  Non-cyclic GFR-binding peptide
  MOD_RES (2), (3), (37), (39): Xaa is C or S
  MOD_RES (17), (18), (19), (20), (21): Xaa is A or G
  MOD_RES (22), (23), (24), (25): Xaa is A or G or is absent
AXXVPTELSPISMLYKXXXXXXXXXLKYHYDMVVEGXGX

SEQ ID NO: 6760 - protein, 41 aa, Artificial Sequence
  Non-cyclic GFR-binding peptide
  MOD_RES (4), (5), (39), (41): Xaa is C or S
  MOD_RES (19), (20), (21), (22), (23): Xaa is A or G
  MOD_RES (24), (25), (26), (27): Xaa is A or G or is absent
PKPXXAPTQLSPISVLYKXXXXXXXXXLKYHYNMVVRAXGX

SEQ ID NO: 6761 - protein, 41 aa, Artificial Sequence
  Non-cyclic GFR-binding peptide
  MOD_RES (1), (38), (40): Xaa is C or S
XRPTQVQLSAISVLYLEIVRKKPIFLKNYQTLEDHLAXKXE

SEQ ID NO: 6762 - protein, 36 aa, Artificial Sequence
  Non-cyclic GFR-binding peptide
  MOD_RES (2), (3): Xaa is C or S
  MOD_RES (17), (18), (19), (20), (21): Xaa is A or G
  MOD_RES (22), (23), (24), (25): Xaa is A or G or is absent
AXXVPTELSATSMLYYXXXXXXXXXLRKHREMVVEG

SEQ ID NO: 6763 - protein, 39 aa, Artificial Sequence
  Non-cyclic GFR-binding peptide
  MOD_RES (4), (5), (39): Xaa is C or S
  MOD_RES (19), (20), (21), (22), (23): Xaa is A or G
  MOD_RES (24), (25), (26), (27): Xaa is A or G or is absent
PKPXXAPTKLSPISVLYKXXXXXXXXXLKYHYNMVVRSX

SEQ ID NO: 6764 - protein, 34 aa, Artificial Sequence
  Non-cyclic GFR-binding peptide
  MOD_RES (2), (3), (34): Xaa is C or S
PXXVSQDLNAISILYFIGKTPKILKKYRMIVKSX

SEQ ID NO: 6765 - protein, 35 aa, Artificial Sequence
  Non-cyclic GFR-binding peptide
  MOD_RES (2), (3): Xaa is C or S
  MOD_RES (17), (18), (19), (20), (21): Xaa is A or G
  MOD_RES (22), (23), (24), (25): Xaa is A or G or is absent
PXXVPQDLSATSILYYXXXXXXXXXLRKHRMVVKS

SEQ ID NO: 6766 - protein, 38 aa, Artificial Sequence
  Non-cyclic GFR-binding peptide
  MOD_RES (5), (6), (37): Xaa is C or S
SASPXXVSQDLSATSILYYIGKTPKILRKHRMIVKSXK

SEQ ID NO: 6767 - protein, 37 aa, Artificial Sequence
  Non-cyclic GFR-binding peptide
  MOD_RES (4), (5): Xaa is C or S
  MOD_RES (19), (20), (21), (22), (23): Xaa is A or G
  MOD_RES (24), (25), (26), (27): Xaa is A or G or is absent
AAPXXVPQALSPISILYKXXXXXXXXXLKYHYMIVRS

SEQ ID NO: 6768 - protein, 38 aa, Artificial Sequence
  Non-cyclic GFR-binding peptide
  MOD_RES (1), (2), (36), (38): Xaa is C or S
  MOD_RES (16), (17), (18), (19), (20): Xaa is A or G
  MOD_RES (21), (22), (23), (24): Xaa is A or G or is absent
XXVPTELNAISMLYFXXXXXXXXXLKKYREMVVEGXGX

SEQ ID NO: 6769 - protein, 38 aa, Artificial Sequence
  Non-cyclic GFR-binding peptide
  MOD_RES (3), (4), (37): Xaa is C or S
  MOD_RES (18), (19), (20), (21), (22): Xaa is A or G
  MOD_RES (23), (24), (25), (26): Xaa is A or G or is absent
APXXVPQALSAISILYLXXXXXXXXXLKNYQMIVRSXK

SEQ ID NO: 6770 - protein, 41 aa, Artificial Sequence
  Non-cyclic GFR-binding peptide
  MOD_RES (6), (7), (38), (40): Xaa is C or S
ASASPXXVSQDLSAISILYLIGKTPKILKNYQMIVKSXKXS

SEQ ID NO: 6771 - protein, 41 aa, Artificial Sequence
  Non-cyclic GFR-binding peptide
  MOD_RES (6), (7), (41): Xaa is C or S
  MOD_RES (21), (22), (23), (24), (25): Xaa is A or G
  MOD_RES (26), (27), (28), (29): Xaa is A or G or is absent
YVPKPXXAPTKLSPISVLYKXXXXXXXXXLKYHYNMVVRSX

SEQ ID NO: 6772 - protein, 40 aa, Artificial Sequence
  Non-cyclic GFR-binding peptide
  MOD_RES (6), (7), (38), (40): Xaa is C or S
ASAAPXXVPQALSAISILYLVGRKPKVLKNYQMIVRSXKX

SEQ ID NO: 6773 - protein, 34 aa, Artificial Sequence
  Non-cyclic GFR-binding peptide
  MOD_RES (1), (33): Xaa is C or S
XVPTELNAISMLYFDEYDKVVLKKYREMVVEGXG

SEQ ID NO: 6774 - protein, 38 aa, Artificial Sequence
  Non-cyclic GFR-binding peptide
  MOD_RES (1), (2), (36), (38): Xaa is C or S
  MOD_RES (16), (17), (18), (19), (20): Xaa is A or G
  MOD_RES (21), (22), (23), (24): Xaa is A or G or is absent
XXVPTELSATSMLYYXXXXXXXXXLRKHREMVVEGXGX

SEQ ID NO: 6775 - protein, 33 aa, Artificial Sequence
  Non-cyclic GFR-binding peptide
  MOD_RES (14), (15), (16), (17), (18): Xaa is A or G
  MOD_RES (19), (20), (21), (22): Xaa is A or G or is absent
APTQLSATSVLYYXXXXXXXXXLRKHRNMVVRA

SEQ ID NO: 6776 - protein, 41 aa, Artificial Sequence
  Non-cyclic GFR-binding peptide
  MOD_RES (6), (7), (40): Xaa is C or S
  MOD_RES (21), (22), (23), (24), (25): Xaa is A or G
  MOD_RES (26), (27), (28), (29): Xaa is A or G or is absent
ASASPXXVPQDLSAISILYLXXXXXXXXXLKNYQMVVKSXK

SEQ ID NO: 6777 - protein, 37 aa, Artificial Sequence
  Non-cyclic GFR-binding peptide
  MOD_RES (6), (7): Xaa is C or S
ASAAPXXVPQALNAISILYFVGRKPKVLKKYRMIVRS

SEQ ID NO: 6778 - protein, 36 aa, Artificial Sequence
  Non-cyclic GFR-binding peptide
  MOD_RES (1), (36): Xaa is C or S
  MOD_RES (15), (16), (17), (18), (19): Xaa is A or G
  MOD_RES (20), (21), (22), (23): Xaa is A or G or is absent
XVPTKLNAISVLYFXXXXXXXXXLKKYREGMSVAEX

SEQ ID NO: 6779 - protein, 41 aa, Artificial Sequence
  Non-cyclic GFR-binding peptide
  MOD_RES (4), (5), (38), (40): Xaa is C or S
GKAXXVPTKLNAISVLYFDDMGVPTLKKYREGMSVAEXGXR

SEQ ID NO: 6780 - protein, 42 aa, Artificial Sequence
  Non-cyclic GFR-binding peptide
  MOD_RES (6), (7), (41): Xaa is C or S
  MOD_RES (21), (22), (23), (24), (25): Xaa is A or G
  MOD_RES (26), (27), (28), (29): Xaa is A or G or is absent
TVPKPXXAPTQLSAISVLYLXXXXXXXXXLKNYQNMVVRAXG

SEQ ID NO: 6781 - protein, 40 aa, Artificial Sequence
  Non-cyclic GFR-binding peptide
  MOD_RES (3), (40): Xaa is C or S
  MOD_RES (19), (20), (21), (22), (23): Xaa is A or G
  MOD_RES (24), (25), (26), (27): Xaa is A or G or is absent
VQXRPTQVQLSAISVLYLXXXXXXXXXLKNYQTLEDHLAX

SEQ ID NO: 6782 - protein, 36 aa, Artificial Sequence
  Non-cyclic GFR-binding peptide
  MOD_RES (1), (2), (33), (35): Xaa is C or S
XXVSQDLSAISILYLIGKTPKILKNYQMIVKSXKXS

SEQ ID NO: 6783 - protein, 31 aa, Artificial Sequence
  Non-cyclic GFR-binding peptide
APTQLSPISVLYKDDSSNVILKYHYNMVVRA

SEQ ID NO: 6784 - protein, 36 aa, Artificial Sequence
  Non-cyclic GFR-binding peptide
  MOD_RES (5), (6): Xaa is C or S
VPKPXXAPTKLSAISVLYLDDSSNVILKNYQNMVVR

SEQ ID NO: 6785 - protein, 33 aa, Artificial Sequence
  Non-cyclic GFR-binding peptide
  MOD_RES (1), (2): Xaa is C or S
XXVPTELNAISMLYFDEYDKVVLKKYREMVVEG

SEQ ID NO: 6786 - protein, 36 aa, Artificial Sequence
  Non-cyclic GFR-binding peptide
  MOD_RES (3), (4): Xaa is C or S
  MOD_RES (18), (19), (20), (21), (22): Xaa is A or G
  MOD_RES (23), (24), (25), (26): Xaa is A or G or is absent
KPXXAPTQLSAISVLYLXXXXXXXXXLKNYQNMVVR

SEQ ID NO: 6787 - protein, 33 aa, Artificial Sequence
  Non-cyclic GFR-binding peptide
  MOD_RES (1), (1): Xaa is C or S
  MOD_RES (15), (16), (17), (18), (19): Xaa is A or G
  MOD_RES (20), (21), (22), (23): Xaa is A or G or is absent
XVPTELSATSMLYYXXXXXXXXXLRKHRDMVVE

SEQ ID NO: 6788 - protein, 37 aa, Artificial Sequence
  Non-cyclic GFR-binding peptide
  MOD_RES (1), (2), (34), (36): Xaa is C or S
XXVPTELNAISMLYFDENEKVVLKKYRDMVVEGXGXR

SEQ ID NO: 6789 - protein, 38 aa, Artificial Sequence
  Non-cyclic GFR-binding peptide
  MOD_RES (2), (3), (36), (38): Xaa is C or S
  MOD_RES (17), (18), (19), (20), (21): Xaa is A or G
  MOD_RES (22), (23), (24), (25): Xaa is A or G or is absent
PXXVSQDLSAISILYLXXXXXXXXXLKNYQMIVKSXKX

SEQ ID NO: 6790 - protein, 38 aa, Artificial Sequence
  Non-cyclic GFR-binding peptide
  MOD_RES (2), (3), (35), (37): Xaa is C or S
PXXAPTKLSATSVLYYDDSSNVILRKHRNMVVRSXGXH

SEQ ID NO: 6791 - protein, 37 aa, Artificial Sequence
  Non-cyclic GFR-binding peptide
  MOD_RES (35), (37): Xaa is C or S
TQVQLSATSVLYYEIVRKKPIFLRKHRTLEDHLAXKX

SEQ ID NO: 6792 - protein, 36 aa, Artificial Sequence
  Non-cyclic GFR-binding peptide
  MOD_RES (5), (6): Xaa is C or S
SASPXXVPQDLNAISILYFVGRTPKVLKKYRMVVKS

SEQ ID NO: 6793 - protein, 35 aa, Artificial Sequence
  Non-cyclic GFR-binding peptide
  MOD_RES (1), (32), (34): Xaa is C or S
XVPQALSATSILYYVGRKPKVLRKHRMIVRSXKXS

SEQ ID NO: 6794 - protein, 35 aa, Artificial Sequence
  Non-cyclic GFR-binding peptide
  MOD_RES (1), (33), (35): Xaa is C or S
XVPTELSATSMLYYDEYDKVVLRKHREMVVEGXGX

SEQ ID NO: 6795 - protein, 35 aa, Artificial Sequence
  Non-cyclic GFR-binding peptide
  MOD_RES (1), (32), (34): Xaa is C or S
XVPQALSPISILYKVGRKPKVLKYHYMIVRSXKXS

SEQ ID NO: 6796 - protein, 39 aa, Artificial Sequence
  Non-cyclic GFR-binding peptide
  MOD_RES (1), (2), (36), (38): Xaa is C or S
  MOD_RES (16), (17), (18), (19), (20): Xaa is A or G
  MOD_RES (21), (22), (23), (24): Xaa is A or G or is absent
XXAPTQLSPISVLYKXXXXXXXXXLKYHYNMVVRAXGXH

SEQ ID NO: 6797 - protein, 39 aa, Artificial Sequence
  Non-cyclic GFR-binding peptide
  MOD_RES (5), (6), (37), (39): Xaa is C or S
SASPXXVSQDLSPISILYKIGKTPKILKYHYMIVKSXKX

SEQ ID NO: 6798 - protein, 39 aa, Artificial Sequence
  Non-cyclic GFR-binding peptide
  MOD_RES (5), (6), (38): Xaa is C or S
IPKAXXVPTELSPISMLYKDENEKVVLKYHYDMVVEGXG

SEQ ID NO: 6799 - protein, 38 aa, Artificial Sequence
  Non-cyclic GFR-binding peptide
  MOD_RES (3), (4), (37): Xaa is C or S
  MOD_RES (18), (19), (20), (21), (22): Xaa is A or G
  MOD_RES (23), (24), (25), (26): Xaa is A or G or is absent
SPXXVSQDLSAISILYLXXXXXXXXXLKNYQMIVKSXK

SEQ ID NO: 6800 - protein, 39 aa, Artificial Sequence
  Non-cyclic GFR-binding peptide
  MOD_RES (6), (7), (38): Xaa is C or S
ASAAPXXVPQALSPISILYKVGRKPKVLKYHYMIVRSXK

SEQ ID NO: 6801 - protein, 39 aa, Artificial Sequence
  Non-cyclic GFR-binding peptide
  MOD_RES (4), (5), (38): Xaa is C or S
  MOD_RES (19), (20), (21), (22), (23): Xaa is A or G
  MOD_RES (24), (25), (26), (27): Xaa is A or G or is absent
AAPXXVPQALSATSILYYXXXXXXXXXLRKHRMIVRSXK

SEQ ID NO: 6802 - protein, 34 aa, Artificial Sequence
  Non-cyclic GFR-binding peptide
  MOD_RES (33), (33): Xaa is C or S
  MOD_RES (14), (15), (16), (17), (18): Xaa is A or G
  MOD_RES (19), (20), (21), (22): Xaa is A or G or is absent
VSQDLSATSILYYXXXXXXXXXLRKHRMIVKSXK

SEQ ID NO: 6803 - protein, 40 aa, Artificial Sequence
  Non-cyclic GFR-binding peptide
  MOD_RES (6), (38), (40): Xaa is C or S
VTKPTXAPTKLSPISVLYKDDSSNVILKYHYNMVVRSXGX

SEQ ID NO: 6804 - protein, 40 aa, Artificial Sequence
  Non-cyclic GFR-binding peptide
  MOD_RES (4), (5), (37), (39): Xaa is C or S
PKAXXVPTELSATSMLYYDEYDKVVLRKHREMVVEGXGXR

SEQ ID NO: 6805 - protein, 39 aa, Artificial Sequence
  Non-cyclic GFR-binding peptide
  MOD_RES (6), (7): Xaa is C or S
  MOD_RES (21), (22), (23), (24), (25): Xaa is A or G
  MOD_RES (26), (27), (28), (29): Xaa is A or G or is absent
SIPKAXXVPTELNAISMLYFXXXXXXXXXLKKYREMVVE

SEQ ID NO: 6806 - protein, 37 aa, Artificial Sequence
  Non-cyclic GFR-binding peptide
  MOD_RES (1), (2), (36): Xaa is C or S
  MOD_RES (16), (17), (18), (19), (20): Xaa is A or G
  MOD_RES (21), (22), (23), (24): Xaa is A or G or is absent
XXAPTKLSPISVLYKXXXXXXXXXLKYHYNMVVKAXG

SEQ ID NO: 6807 - protein, 40 aa, Artificial Sequence
  Non-cyclic GFR-binding peptide
  MOD_RES (4), (5), (39): Xaa is C or S
  MOD_RES (19), (20), (21), (22), (23): Xaa is A or G
  MOD_RES (24), (25), (26), (27): Xaa is A or G or is absent
PKAXXAPTKLNAISVLYFXXXXXXXXXLKKYRNMVVKAXG

SEQ ID NO: 6808 - protein, 37 aa, Artificial Sequence
  Non-cyclic GFR-binding peptide
  MOD_RES (7), (7): Xaa is C or S
HVTKPTXAPTKLSPISVLYKDDSSNVILKYHYNMVVR

SEQ ID NO: 6809 - protein, 33 aa, Artificial Sequence
  Non-cyclic GFR-binding peptide
  MOD_RES (33), (33): Xaa is C or S
VPTKLNAISVLYFDDMGVPTLKKYREGMSVAEX

SEQ ID NO: 6810 - protein, 39 aa, Artificial Sequence
  Non-cyclic GFR-binding peptide
  MOD_RES (5), (6): Xaa is C or S
  MOD_RES (20), (21), (22), (23), (24): Xaa is A or G
  MOD_RES (25), (26), (27), (28): Xaa is A or G or is absent
IPKAXXVPTELNAISMLYFXXXXXXXXXLKKYRDMVVEG

SEQ ID NO: 6811 - protein, 40 aa, Artificial Sequence
  Non-cyclic GFR-binding peptide
  MOD_RES (6), (7), (40): Xaa is C or S
KVGKAXXVPTKLSAISVLYLDDMGVPTLKNYQEGMSVAEX

SEQ ID NO: 6812 - protein, 37 aa, Artificial Sequence
  Non-cyclic GFR-binding peptide
  MOD_RES (3), (4): Xaa is C or S
  MOD_RES (18), (19), (20), (21), (22): Xaa is A or G
  MOD_RES (23), (24), (25), (26): Xaa is A or G or is absent
KAXXAPTKLSAISVLYLXXXXXXXXXLKNYQNMVVKA

SEQ ID NO: 6813 - protein, 45 aa, Artificial Sequence
  Non-cyclic GFR-binding peptide
  MOD_RES (5), (42), (44): Xaa is C or S
RNVQXRPTQVQLSAISVLYLEIVRKKPIFLKNYQTLEDHLAXKXE

SEQ ID NO: 6814 - protein, 37 aa, Artificial Sequence
  Non-cyclic GFR-binding peptide
  MOD_RES (6), (7): Xaa is C or S
YVPKPXXAPTKLSPISVLYKDDSSNVILKYHYNMVVR

SEQ ID NO: 6815 - protein, 32 aa, Artificial Sequence
  Non-cyclic GFR-binding peptide
  MOD_RES (31), (31): Xaa is C or S
VPQDLSATSILYYVGRTPKVLRKHRMVVKSXK

SEQ ID NO: 6816 - protein, 38 aa, Artificial Sequence
  Non-cyclic GFR-binding peptide
  MOD_RES (6), (7): Xaa is C or S
SIPKAXXVPTELSPISMLYKDEYDKVVLKYHYEMVVEG

SEQ ID NO: 6817 - protein, 36 aa, Artificial Sequence
  Non-cyclic GFR-binding peptide
  MOD_RES (34), (36): Xaa is C or S
  MOD_RES (14), (15), (16), (17), (18): Xaa is A or G
  MOD_RES (19), (20), (21), (22): Xaa is A or G or is absent
APTQLSAISVLYLXXXXXXXXXLKNYQNMVVRAXGX

SEQ ID NO: 6818 - protein, 38 aa, Artificial Sequence
  Non-cyclic GFR-binding peptide
  MOD_RES (3), (4): Xaa is C or S
  MOD_RES (18), (19), (20), (21), (22): Xaa is A or G
  MOD_RES (23), (24), (25), (26): Xaa is A or G or is absent
KAXXVPTKLNAISVLYFXXXXXXXXXLKKYREGMSVAE

SEQ ID NO: 6819 - protein, 37 aa, Artificial Sequence
  Non-cyclic GFR-binding peptide
  MOD_RES (1), (34), (36): Xaa is C or S
  MOD_RES (15), (16), (17), (18), (19): Xaa is A or G
  MOD_RES (20), (21), (22), (23): Xaa is A or G or is absent
XVPQALNAISILYFXXXXXXXXXLKKYRMIVRSXKXS

SEQ ID NO: 6820 - protein, 39 aa, Artificial Sequence
  Non-cyclic GFR-binding peptide
  MOD_RES (5), (6), (37), (39): Xaa is C or S
SASPXXVSQDLNAISILYFIGKTPKILKKYRMIVKSXKX

SEQ ID NO: 6821 - protein, 36 aa, Artificial Sequence
  Non-cyclic GFR-binding peptide
RPTQVQLSAISVLYLEIVRKKPIFLKNYQTLEDHLA

SEQ ID NO: 6822 - protein, 37 aa, Artificial Sequence
  Non-cyclic GFR-binding peptide
  MOD_RES (2), (3), (37): Xaa is C or S
  MOD_RES (17), (18), (19), (20), (21): Xaa is A or G
  MOD_RES (22), (23), (24), (25): Xaa is A or G or is absent
PXXAPTQLSAISVLYLXXXXXXXXXLKNYQNMVVRAX

SEQ ID NO: 6823 - protein, 34 aa, Artificial Sequence
  Non-cyclic GFR-binding peptide
  MOD_RES (32), (34): Xaa is C or S
APTQLSPISVLYKDDSSNVILKYHYNMVVRAXGX

SEQ ID NO: 6824 - protein, 33 aa, Artificial Sequence
  Non-cyclic GFR-binding peptide
  MOD_RES (15), (16), (17), (18), (19): Xaa is A or G
  MOD_RES (20), (21), (22), (23): Xaa is A or G or is absent
PTQVQLSPISVLYKXXXXXXXXXLKYHYTLEDH

SEQ ID NO: 6825 - protein, 37 aa, Artificial Sequence
  Non-cyclic GFR-binding peptide
  MOD_RES (3), (4): Xaa is C or S
  MOD_RES (18), (19), (20), (21), (22): Xaa is A or G
  MOD_RES (23), (24), (25), (26): Xaa is A or G or is absent
KPXXAPTKLSAISVLYLXXXXXXXXXLKNYQNMVVRS

SEQ ID NO: 6826 - protein, 40 aa, Artificial Sequence
  Non-cyclic GFR-binding peptide
  MOD_RES (3), (4), (38), (40): Xaa is C or S
  MOD_RES (18), (19), (20), (21), (22): Xaa is A or G
  MOD_RES (23), (24), (25), (26): Xaa is A or G or is absent
KAXXAPTKLNAISVLYFXXXXXXXXXLKKYRNMVVKAXGX

SEQ ID NO: 6827 - protein, 38 aa, Artificial Sequence
  Non-cyclic GFR-binding peptide
  MOD_RES (1), (35), (37): Xaa is C or S
  MOD_RES (15), (16), (17), (18), (19): Xaa is A or G
  MOD_RES (20), (21), (22), (23): Xaa is A or G or is absent
XVPTELNAISMLYFXXXXXXXXXLKKYREMVVEGXGXR

SEQ ID NO: 6828 - protein, 41 aa, Artificial Sequence
  Non-cyclic GFR-binding peptide
  MOD_RES (1), (38), (40): Xaa is C or S
  MOD_RES (17), (18), (19), (20), (21): Xaa is A or G
  MOD_RES (22), (23), (24), (25): Xaa is A or G or is absent
XRPTQVQLSAISVLYLXXXXXXXXXLKNYQTLEDHLAXKXE

SEQ ID NO: 6829 - protein, 36 aa, Artificial Sequence
  Non-cyclic GFR-binding peptide
  MOD_RES (1), (2), (35): Xaa is C or S
  MOD_RES (16), (17), (18), (19), (20): Xaa is A or G
  MOD_RES (21), (22), (23), (24): Xaa is A or G or is absent
XXVPQDLSAISILYLXXXXXXXXXLKNYQMVVKSXK

SEQ ID NO: 6830 - protein, 37 aa, Artificial Sequence
  Non-cyclic GFR-binding peptide
  MOD_RES (6), (7): Xaa is C or S
SIPKAXXVPTELNAISMLYFDEYDKVVLKKYREMVVE

SEQ ID NO: 6831 - protein, 35 aa, Artificial Sequence
  Non-cyclic GFR-binding peptide
  MOD_RES (32), (34): Xaa is C or S
APTKLNAISVLYFDSSNNVILKKYRNMVVKAXGXH

SEQ ID NO: 6832 - protein, 38 aa, Artificial Sequence
  Non-cyclic GFR-binding peptide
  MOD_RES (4), (4): Xaa is C or S
  MOD_RES (20), (21), (22), (23), (24): Xaa is A or G
  MOD_RES (25), (26), (27), (28): Xaa is A or G or is absent
NVQXRPTQVQLNAISVLYFXXXXXXXXXLKKYRTLEDH

SEQ ID NO: 6833 - protein, 38 aa, Artificial Sequence
  Non-cyclic GFR-binding peptide
  MOD_RES (35), (37): Xaa is C or S
  MOD_RES (14), (15), (16), (17), (18): Xaa is A or G
  MOD_RES (19), (20), (21), (22): Xaa is A or G or is absent
VPTKLSATSVLYYXXXXXXXXXLRKHREGMSVAEXGXR

SEQ ID NO: 6834 - protein, 35 aa, Artificial Sequence
  Non-cyclic GFR-binding peptide
  MOD_RES (1), (34): Xaa is C or S
  MOD_RES (15), (16), (17), (18), (19): Xaa is A or G
  MOD_RES (20), (21), (22), (23): Xaa is A or G or is absent
XVSQDLSPISILYKXXXXXXXXXLKYHYMIVKSXK

SEQ ID NO: 6835 - protein, 37 aa, Artificial Sequence
  Non-cyclic GFR-binding peptide
  MOD_RES (4), (5): Xaa is C or S
  MOD_RES (19), (20), (21), (22), (23): Xaa is A or G
  MOD_RES (24), (25), (26), (27): Xaa is A or G or is absent
ASPXXVPQDLNAISILYFXXXXXXXXXLKKYRMVVKS

SEQ ID NO: 6836 - protein, 38 aa, Artificial Sequence
  Non-cyclic GFR-binding peptide
  MOD_RES (4), (5), (37): Xaa is C or S
PKPXXAPTKLSAISVLYLDDSSNVILKNYQNMVVRSXG

SEQ ID NO: 6837 - protein, 34 aa, Artificial Sequence
  Non-cyclic GFR-binding peptide
  MOD_RES (1), (2): Xaa is C or S
  MOD_RES (16), (17), (18), (19), (20): Xaa is A or G
  MOD_RES (21), (22), (23), (24): Xaa is A or G or is absent
XXAPTQLSAISVLYLXXXXXXXXXLKNYQNMVVR

SEQ ID NO: 6838 - protein, 38 aa, Artificial Sequence
  Non-cyclic GFR-binding peptide
  MOD_RES (3), (4), (37): Xaa is C or S
  MOD_RES (18), (19), (20), (21), (22): Xaa is A or G
  MOD_RES (23), (24), (25), (26): Xaa is A or G or is absent
APXXVPQALSATSILYYXXXXXXXXXLRKHRMIVRSXK

SEQ ID NO: 6839 - protein, 38 aa, Artificial Sequence
  Non-cyclic GFR-binding peptide
  MOD_RES (4), (5), (37): Xaa is C or S
PKPXXAPTKLSPISVLYKDDSSNVILKYHYNMVVRSXG

SEQ ID NO: 6840 - protein, 36 aa, Artificial Sequence
  Non-cyclic GFR-binding peptide
RPTQVQLSATSVLYYEIVRKKPIFLRKHRTLEDHLA

SEQ ID NO: 6841 - protein, 40 aa, Artificial Sequence
  Non-cyclic GFR-binding peptide
  MOD_RES (5), (6), (38), (40): Xaa is C or S
IPKAXXVPTELSATSMLYYDENEKVVLRKHRDMVVEGXGX

SEQ ID NO: 6842 - protein, 31 aa, Artificial Sequence
  Non-cyclic GFR-binding peptide
  MOD_RES (31), (31): Xaa is C or S
VPQALSAISILYLVGRKPKVLKNYQMIVRSX

SEQ ID NO: 6843 - protein, 44 aa, Artificial Sequence
  Non-cyclic GFR-binding peptide
  MOD_RES (4), (41), (43): Xaa is C or S
NVQXRPTQVQLNAISVLYFEIVRKKPIFLKKYRTLEDHLAXKXE

SEQ ID NO: 6844 - protein, 39 aa, Artificial Sequence
  Non-cyclic GFR-binding peptide
  MOD_RES (3), (4), (37), (39): Xaa is C or S
  MOD_RES (18), (19), (20), (21), (22): Xaa is A or G
  MOD_RES (23), (24), (25), (26): Xaa is A or G or is absent
SPXXVPQDLSAISILYLXXXXXXXXXLKNYQMVVKSXKX

SEQ ID NO: 6845 - protein, 42 aa, Artificial Sequence
  Non-cyclic GFR-binding peptide
  MOD_RES (6), (7), (41): Xaa is C or S
  MOD_RES (21), (22), (23), (24), (25): Xaa is A or G
  MOD_RES (26), (27), (28), (29): Xaa is A or G or is absent
AVPKAXXAPTKLSPISVLYKXXXXXXXXXLKYHYNMVVKAXG

SEQ ID NO: 6846 - protein, 34 aa, Artificial Sequence
  Non-cyclic GFR-binding peptide
  MOD_RES (1), (34): Xaa is C or S
XVPTKLNAISVLYFDDMGVPTLKKYREGMSVAEX

SEQ ID NO: 6847 - protein, 41 aa, Artificial Sequence
  Non-cyclic GFR-binding peptide
  MOD_RES (5), (6), (38), (40): Xaa is C or S
IPKAXXVPTELSPISMLYKDENEKVVLKYHYDMVVEGXGXR

SEQ ID NO: 6848 - protein, 35 aa, Artificial Sequence
  Non-cyclic GFR-binding peptide
  MOD_RES (1), (33), (35): Xaa is C or S
XAPTQLSATSVLYYDDSSNVILRKHRNMVVRAXGX

SEQ ID NO: 6849 - protein, 36 aa, Artificial Sequence
  Non-cyclic GFR-binding peptide
  MOD_RES (34), (36): Xaa is C or S
  MOD_RES (14), (15), (16), (17), (18): Xaa is A or G
  MOD_RES (19), (20), (21), (22): Xaa is A or G or is absent
VPTELNAISMLYFXXXXXXXXXLKKYREMVVEGXGX

SEQ ID NO: 6850 - protein, 35 aa, Artificial Sequence
  Non-cyclic GFR-binding peptide
  MOD_RES (1), (33), (35): Xaa is C or S
XAPTKLSATSVLYYDDSSNVILRKHRNMVVRSXGX

SEQ ID NO: 6851 - protein, 37 aa, Artificial Sequence
  Non-cyclic GFR-binding peptide
  MOD_RES (2), (3), (35), (37): Xaa is C or S
AXXAPTKLSPISVLYKDSSNNVILKYHYNMVVKAXGX

SEQ ID NO: 6852 - protein, 33 aa, Artificial Sequence
  Non-cyclic GFR-binding peptide
  MOD_RES (1), (33): Xaa is C or S
XAPTKLSAISVLYLDSSNNVILKNYQNMVVKAX

SEQ ID NO: 6853 - protein, 38 aa, Artificial Sequence
  Non-cyclic GFR-binding peptide
  MOD_RES (5), (6): Xaa is C or S
  MOD_RES (20), (21), (22), (23), (24): Xaa is A or G
  MOD_RES (25), (26), (27), (28): Xaa is A or G or is absent
VPKAXXAPTKLNAISVLYFXXXXXXXXXLKKYRNMVVK

SEQ ID NO: 6854 - protein, 31 aa, Artificial Sequence
  Non-cyclic GFR-binding peptide
APTKLSAISVLYLDSSNNVILKNYQNMVVKA

SEQ ID NO: 6855 - protein, 40 aa, Artificial Sequence
  Non-cyclic GFR-binding peptide
  MOD_RES (4), (5), (39): Xaa is C or S
  MOD_RES (19), (20), (21), (22), (23): Xaa is A or G
  MOD_RES (24), (25), (26), (27): Xaa is A or G or is absent
PKAXXVPTELNAISMLYFXXXXXXXXXLKKYREMVVEGXG

SEQ ID NO: 6856 - protein, 43 aa, Artificial Sequence
  Non-cyclic GFR-binding peptide
  MOD_RES (6), (7), (41), (43): Xaa is C or S
  MOD_RES (21), (22), (23), (24), (25): Xaa is A or G
  MOD_RES (26), (27), (28), (29): Xaa is A or G or is absent
KIPKAXXVPTELSPISMLYKXXXXXXXXXLKYHYDMVVEGXGX

SEQ ID NO: 6857 - protein, 40 aa, Artificial Sequence
  Non-cyclic GFR-binding peptide
  MOD_RES (5), (6), (37), (39): Xaa is C or S
SAAPXXVPQALSPISILYKVGRKPKVLKYHYMIVRSXKXS

SEQ ID NO: 6858 - protein, 33 aa, Artificial Sequence
  Non-cyclic GFR-binding peptide
  MOD_RES (1), (1): Xaa is C or S
  MOD_RES (15), (16), (17), (18), (19): Xaa is A or G
  MOD_RES (20), (21), (22), (23): Xaa is A or G or is absent
XVPTELSPISMLYKXXXXXXXXXLKYHYDMVVE

SEQ ID NO: 6859 - protein, 34 aa, Artificial Sequence
  Non-cyclic GFR-binding peptide
  MOD_RES (2), (2): Xaa is C or S
  MOD_RES (16), (17), (18), (19), (20): Xaa is A or G
  MOD_RES (21), (22), (23), (24): Xaa is A or G or is absent
TXAPTKLSPISVLYKXXXXXXXXXLKYHYNMVVR

SEQ ID NO: 6860 - protein, 35 aa, Artificial Sequence
  Non-cyclic GFR-binding peptide
  MOD_RES (32), (34): Xaa is C or S
APTQLSATSVLYYDDSSNVILRKHRNMVVRAXGXH

SEQ ID NO: 6861 - protein, 42 aa, Artificial Sequence
  Non-cyclic GFR-binding peptide
  MOD_RES (2), (39), (41): Xaa is C or S
QXRPTQVQLSPISVLYKEIVRKKPIFLKYHYTLEDHLAXKXE

SEQ ID NO: 6862 - protein, 39 aa, Artificial Sequence
  Non-cyclic GFR-binding peptide
  MOD_RES (2), (3), (36), (38): Xaa is C or S
  MOD_RES (17), (18), (19), (20), (21): Xaa is A or G
  MOD_RES (22), (23), (24), (25): Xaa is A or G or is absent
PXXVSQDLSAISILYLXXXXXXXXXLKNYQMIVKSXKXS

SEQ ID NO: 6863 - protein, 38 aa, Artificial Sequence
  Non-cyclic GFR-binding peptide
  MOD_RES (36), (38): Xaa is C or S
  MOD_RES (15), (16), (17), (18), (19): Xaa is A or G
  MOD_RES (20), (21), (22), (23): Xaa is A or G or is absent
PTQVQLSATSVLYYXXXXXXXXXLRKHRTLEDHLAXKX

SEQ ID NO: 6864 - protein, 35 aa, Artificial Sequence
  Non-cyclic GFR-binding peptide
  MOD_RES (3), (4), (35): Xaa is C or S
SPXXVPQDLSATSILYYVGRTPKVLRKHRMVVKSX

SEQ ID NO: 6865 - protein, 36 aa, Artificial Sequence
  Non-cyclic GFR-binding peptide
  MOD_RES (2), (3), (34), (36): Xaa is C or S
PXXVPQALSPISILYKVGRKPKVLKYHYMIVRSXKX

SEQ ID NO: 6866 - protein, 35 aa, Artificial Sequence
  Non-cyclic GFR-binding peptide
  MOD_RES (1), (2), (35): Xaa is C or S
  MOD_RES (16), (17), (18), (19), (20): Xaa is A or G
  MOD_RES (21), (22), (23), (24): Xaa is A or G or is absent
XXVSQDLNAISILYFXXXXXXXXXLKKYRMIVKSX

SEQ ID NO: 6867 - protein, 33 aa, Artificial Sequence
  Non-cyclic GFR-binding peptide
  MOD_RES (32), (32): Xaa is C or S
VPTELSATSMLYYDENEKVVLRKHRDMVVEGXG

SEQ ID NO: 6868 - protein, 42 aa, Artificial Sequence
  Non-cyclic GFR-binding peptide
  MOD_RES (3), (40), (42): Xaa is C or S
  MOD_RES (19), (20), (21), (22), (23): Xaa is A or G
  MOD_RES (24), (25), (26), (27): Xaa is A or G or is absent
VQXRPTQVQLNAISVLYFXXXXXXXXXLKKYRTLEDHLAXKX

SEQ ID NO: 6869 - protein, 39 aa, Artificial Sequence
  Non-cyclic GFR-binding peptide
  MOD_RES (5), (39): Xaa is C or S
  MOD_RES (19), (20), (21), (22), (23): Xaa is A or G
  MOD_RES (24), (25), (26), (27): Xaa is A or G or is absent
TKPTXAPTKLSATSVLYYXXXXXXXXXLRKHRNMVVRSX

SEQ ID NO: 6870 - protein, 38 aa, Artificial Sequence
  Non-cyclic GFR-binding peptide
  MOD_RES (5), (6), (37): Xaa is C or S
SASPXXVPQDLSATSILYYVGRTPKVLRKHRMVVKSXK

SEQ ID NO: 6871 - protein, 40 aa, Artificial Sequence
  Non-cyclic GFR-binding peptide
  MOD_RES (5), (6), (38), (40): Xaa is C or S
VPKAXXAPTKLSPISVLYKDSSNNVILKYHYNMVVKAXGX

SEQ ID NO: 6872 - protein, 37 aa, Artificial Sequence
  Non-cyclic GFR-binding peptide
  MOD_RES (3), (4): Xaa is C or S
  MOD_RES (18), (19), (20), (21), (22): Xaa is A or G
  MOD_RES (23), (24), (25), (26): Xaa is A or G or is absent
KAXXVPTELSPISMLYKXXXXXXXXXLKYHYDMVVEG

SEQ ID NO: 6873 - protein, 38 aa, Artificial Sequence
  Non-cyclic GFR-binding peptide
  MOD_RES (2), (3), (35), (37): Xaa is C or S
AXXAPTKLSAISVLYLDSSNNVILKNYQNMVVKAXGXH

SEQ ID NO: 6874 - protein, 38 aa, Artificial Sequence
  Non-cyclic GFR-binding peptide
  MOD_RES (2), (3), (36), (38): Xaa is C or S
  MOD_RES (17), (18), (19), (20), (21): Xaa is A or G
  MOD_RES (22), (23), (24), (25): Xaa is A or G or is absent
PXXVPQALSAISILYLXXXXXXXXXLKNYQMIVRSXKX

SEQ ID NO: 6875 - protein, 39 aa, Artificial Sequence
  Non-cyclic GFR-binding peptide
  MOD_RES (6), (7), (39): Xaa is C or S
YVPKPXXAPTKLSAISVLYLDDSSNVILKNYQNMVVRSX

SEQ ID NO: 6876 - protein, 40 aa, Artificial Sequence
  Non-cyclic GFR-binding peptide
  MOD_RES (5), (5): Xaa is C or S
  MOD_RES (21), (22), (23), (24), (25): Xaa is A or G
  MOD_RES (26), (27), (28), (29): Xaa is A or G or is absent
RNVQXRPTQVQLSAISVLYLXXXXXXXXXLKNYQTLEDHL

SEQ ID NO: 6877 - protein, 35 aa, Artificial Sequence
  Non-cyclic GFR-binding peptide
  MOD_RES (2), (3), (34): Xaa is C or S
PXXVPQALNAISILYFVGRKPKVLKKYRMIVRSXK

SEQ ID NO: 6878 - protein, 31 aa, Artificial Sequence
  Non-cyclic GFR-binding peptide
APTKLNAISVLYFDSSNNVILKKYRNMVVKA

SEQ ID NO: 6879 - protein, 38 aa, Artificial Sequence
  Non-cyclic GFR-binding peptide
  MOD_RES (6), (7), (38): Xaa is C or S
ASAAPXXVPQALSPISILYKVGRKPKVLKYHYMIVRSX

SEQ ID NO: 6880 - protein, 34 aa, Artificial Sequence
  Non-cyclic GFR-binding peptide
  MOD_RES (32), (34): Xaa is C or S
APTKLSPISVLYKDDSSNVILKYHYNMVVRSXGX

SEQ ID NO: 6881 - protein, 35 aa, Artificial Sequence
  Non-cyclic GFR-binding peptide
  MOD_RES (4), (5): Xaa is C or S
PKAXXVPTELNAISMLYFDEYDKVVLKKYREMVVE

SEQ ID NO: 6882 - protein, 35 aa, Artificial Sequence
  Non-cyclic GFR-binding peptide
  MOD_RES (2), (3), (34): Xaa is C or S
PXXVPQALSPISILYKVGRKPKVLKYHYMIVRSXK

SEQ ID NO: 6883 - protein, 40 aa, Artificial Sequence
  Non-cyclic GFR-binding peptide
  MOD_RES (3), (40): Xaa is C or S
  MOD_RES (19), (20), (21), (22), (23): Xaa is A or G
  MOD_RES (24), (25), (26), (27): Xaa is A or G or is absent
VQXRPTQVQLSPISVLYKXXXXXXXXXLKYHYTLEDHLAX

SEQ ID NO: 6884 - protein, 37 aa, Artificial Sequence
  Non-cyclic GFR-binding peptide
  MOD_RES (4), (5): Xaa is C or S
  MOD_RES (19), (20), (21), (22), (23): Xaa is A or G
  MOD_RES (24), (25), (26), (27): Xaa is A or G or is absent
PKAXXVPTELSPISMLYKXXXXXXXXXLKYHYEMVVE

SEQ ID NO: 6885 - protein, 32 aa, Artificial Sequence
  Non-cyclic GFR-binding peptide
  MOD_RES (32), (32): Xaa is C or S
VPTELNAISMLYFDENEKVVLKKYRDMVVEGX

SEQ ID NO: 6886 - protein, 35 aa, Artificial Sequence
  Non-cyclic GFR-binding peptide
  MOD_RES (1), (2): Xaa is C or S
  MOD_RES (16), (17), (18), (19), (20): Xaa is A or G
  MOD_RES (21), (22), (23), (24): Xaa is A or G or is absent
XXAPTKLSATSVLYYXXXXXXXXXLRKHRNMVVRS

SEQ ID NO: 6887 - protein, 35 aa, Artificial Sequence
  Non-cyclic GFR-binding peptide
  MOD_RES (1), (2), (34): Xaa is C or S
XXAPTKLSPISVLYKDSSNNVILKYHYNMVVKAXG

SEQ ID NO: 6888 - protein, 36 aa, Artificial Sequence
  Non-cyclic GFR-binding peptide
  MOD_RES (1), (2), (36): Xaa is C or S
  MOD_RES (16), (17), (18), (19), (20): Xaa is A or G
  MOD_RES (21), (22), (23), (24): Xaa is A or G or is absent
XXAPTQLSPISVLYKXXXXXXXXXLKYHYNMVVRAX

SEQ ID NO: 6889 - protein, 39 aa, Artificial Sequence
  Non-cyclic GFR-binding peptide
  MOD_RES (6), (7): Xaa is C or S
  MOD_RES (21), (22), (23), (24), (25): Xaa is A or G
  MOD_RES (26), (27), (28), (29): Xaa is A or G or is absent
KIPKAXXVPTELSATSMLYYXXXXXXXXXLRKHRDMVVE

SEQ ID NO: 6890 - protein, 41 aa, Artificial Sequence
  Non-cyclic GFR-binding peptide
  MOD_RES (3), (40): Xaa is C or S
  MOD_RES (19), (20), (21), (22), (23): Xaa is A or G
  MOD_RES (24), (25), (26), (27): Xaa is A or G or is absent
VQXRPTQVQLNAISVLYFXXXXXXXXXLKKYRTLEDHLAXK

SEQ ID NO: 6891 - protein, 36 aa, Artificial Sequence
  Non-cyclic GFR-binding peptide
  MOD_RES (4), (5): Xaa is C or S
PKAXXVPTELSATSMLYYDENEKVVLRKHRDMVVEG

SEQ ID NO: 6892 - protein, 38 aa, Artificial Sequence
  Non-cyclic GFR-binding peptide
  MOD_RES (5), (6), (38): Xaa is C or S
IPKAXXVPTELSPISMLYKDEYDKVVLKYHYEMVVEGX

SEQ ID NO: 6893 - protein, 39 aa, Artificial Sequence
  Non-cyclic GFR-binding peptide
  MOD_RES (6), (38): Xaa is C or S
VTKPTXAPTKLSAISVLYLDDSSNVILKNYQNMVVRSXG

SEQ ID NO: 6894 - protein, 39 aa, Artificial Sequence
  Non-cyclic GFR-binding peptide
  MOD_RES (5), (5): Xaa is C or S
RNVQXRPTQVQLSATSVLYYEIVRKKPIFLRKHRTLEDH

SEQ ID NO: 6895 - protein, 39 aa, Artificial Sequence
  Non-cyclic GFR-binding peptide
  MOD_RES (3), (3): Xaa is C or S
VQXRPTQVQLSPISVLYKEIVRKKPIFLKYHYTLEDHLA

SEQ ID NO: 6896 - protein, 42 aa, Artificial Sequence
  Non-cyclic GFR-binding peptide
  MOD_RES (6), (7), (40), (42): Xaa is C or S
  MOD_RES (21), (22), (23), (24), (25): Xaa is A or G
  MOD_RES (26), (27), (28), (29): Xaa is A or G or is absent
ASASPXXVSQDLSPISILYKXXXXXXXXXLKYHYMIVKSXKX

SEQ ID NO: 6897 - protein, 35 aa, Artificial Sequence
  Non-cyclic GFR-binding peptide
  MOD_RES (3), (35): Xaa is C or S
PTXAPTKLSPISVLYKDDSSNVILKYHYNMVVRSX

SEQ ID NO: 6898 - protein, 40 aa, Artificial Sequence
  Non-cyclic GFR-binding peptide
  MOD_RES (6), (7), (39): Xaa is C or S
TVPKPXXAPTQLSAISVLYLDDSSNVILKNYQNMVVRAXG

SEQ ID NO: 6899 - protein, 34 aa, Artificial Sequence
  Non-cyclic GFR-binding peptide
  MOD_RES (1), (2), (33): Xaa is C or S
XXVPQALNAISILYFVGRKPKVLKKYRMIVRSXK

SEQ ID NO: 6900 - protein, 39 aa, Artificial Sequence
  Non-cyclic GFR-binding peptide
  MOD_RES (3), (4), (37), (39): Xaa is C or S
  MOD_RES (18), (19), (20), (21), (22): Xaa is A or G
  MOD_RES (23), (24), (25), (26): Xaa is A or G or is absent
SPXXVSQDLSPISILYKXXXXXXXXXLKYHYMIVKSXKX

SEQ ID NO: 6901 - protein, 42 aa, Artificial Sequence
  Non-cyclic GFR-binding peptide
  MOD_RES (5), (6), (40), (42): Xaa is C or S
  MOD_RES (20), (21), (22), (23), (24): Xaa is A or G
  MOD_RES (25), (26), (27), (28): Xaa is A or G or is absent
VPKPXXAPTQLSPISVLYKXXXXXXXXXLKYHYNMVVRAXGX

SEQ ID NO: 6902 - protein, 36 aa, Artificial Sequence
  Non-cyclic GFR-binding peptide
  MOD_RES (3), (4): Xaa is C or S
  MOD_RES (18), (19), (20), (21), (22): Xaa is A or G
  MOD_RES (23), (24), (25), (26): Xaa is A or G or is absent
KAXXVPTELNAISMLYFXXXXXXXXXLKKYREMVVE

SEQ ID NO: 6903 - protein, 41 aa, Artificial Sequence
  Non-cyclic GFR-binding peptide
  MOD_RES (5), (6), (40): Xaa is C or S
  MOD_RES (20), (21), (22), (23), (24): Xaa is A or G
  MOD_RES (25), (26), (27), (28): Xaa is A or G or is absent
VPKPXXAPTKLSATSVLYYXXXXXXXXXLRKHRNMVVRSXG

SEQ ID NO: 6904 - protein, 40 aa, Artificial Sequence
  Non-cyclic GFR-binding peptide
  MOD_RES (5), (5): Xaa is C or S
RNVQXRPTQVQLSATSVLYYEIVRKKPIFLRKHRTLEDHL

SEQ ID NO: 6905 - protein, 37 aa, Artificial Sequence
  Non-cyclic GFR-binding peptide
  MOD_RES (1), (1): Xaa is C or S
XRPTQVQLSPISVLYKEIVRKKPIFLKYHYTLEDHLA

SEQ ID NO: 6906 - protein, 31 aa, Artificial Sequence
  Non-cyclic GFR-binding peptide
  MOD_RES (1), (1): Xaa is C or S
XVPTELSATSMLYYDEYDKVVLRKHREMVVE

SEQ ID NO: 6907 - protein, 37 aa, Artificial Sequence
  Non-cyclic GFR-binding peptide
  MOD_RES (2), (3), (37): Xaa is C or S
  MOD_RES (17), (18), (19), (20), (21): Xaa is A or G
  MOD_RES (22), (23), (24), (25): Xaa is A or G or is absent
AXXAPTKLNAISVLYFXXXXXXXXXLKKYRNMVVKAX

SEQ ID NO: 6908 - protein, 36 aa, Artificial Sequence
  Non-cyclic GFR-binding peptide
  MOD_RES (2), (3), (34), (36): Xaa is C or S
PXXVPQDLNAISILYFVGRTPKVLKKYRMVVKSXKX

SEQ ID NO: 6909 - protein, 37 aa, Artificial Sequence
  Non-cyclic GFR-binding peptide
  MOD_RES (3), (4), (36): Xaa is C or S
KPXXAPTQLSPISVLYKDDSSNVILKYHYNMVVRAXG

SEQ ID NO: 6910 - protein, 38 aa, Artificial Sequence
  Non-cyclic GFR-binding peptide
  MOD_RES (2), (3), (37): Xaa is C or S
  MOD_RES (17), (18), (19), (20), (21): Xaa is A or G
  MOD_RES (22), (23), (24), (25): Xaa is A or G or is absent
PXXAPTQLSPISVLYKXXXXXXXXXLKYHYNMVVRAXG

SEQ ID NO: 6911 - protein, 39 aa, Artificial Sequence
  Non-cyclic GFR-binding peptide
  MOD_RES (1), (38): Xaa is C or S
XRPTQVQLNAISVLYFEIVRKKPIFLKKYRTLEDHLAXK

SEQ ID NO: 6912 - protein, 38 aa, Artificial Sequence
  Non-cyclic GFR-binding peptide
  MOD_RES (4), (5): Xaa is C or S
  MOD_RES (19), (20), (21), (22), (23): Xaa is A or G
  MOD_RES (24), (25), (26), (27): Xaa is A or G or is absent
PKAXXVPTELNAISMLYFXXXXXXXXXLKKYREMVVEG

SEQ ID NO: 6913 - protein, 41 aa, Artificial Sequence
  Non-cyclic GFR-binding peptide
  MOD_RES (3), (4), (38), (40): Xaa is C or S
  MOD_RES (18), (19), (20), (21), (22): Xaa is A or G
  MOD_RES (23), (24), (25), (26): Xaa is A or G or is absent
KAXXAPTKLNAISVLYFXXXXXXXXXLKKYRNMVVKAXGXH

SEQ ID NO: 6914 - protein, 40 aa, Artificial Sequence
  Non-cyclic GFR-binding peptide
  MOD_RES (6), (7): Xaa is C or S
  MOD_RES (21), (22), (23), (24), (25): Xaa is A or G
  MOD_RES (26), (27), (28), (29): Xaa is A or G or is absent
KIPKAXXVPTELNAISMLYFXXXXXXXXXLKKYRDMVVEG

SEQ ID NO: 6915 - protein, 34 aa, Artificial Sequence
  Non-cyclic GFR-binding peptide
  MOD_RES (3), (4): Xaa is C or S
KAXXVPTELSATSMLYYDEYDKVVLRKHREMVVE

SEQ ID NO: 6916 - protein, 42 aa, Artificial Sequence
  Non-cyclic GFR-binding peptide
  MOD_RES (6), (7), (41): Xaa is C or S
  MOD_RES (21), (22), (23), (24), (25): Xaa is A or G
  MOD_RES (26), (27), (28), (29): Xaa is A or G or is absent
AVPKAXXAPTKLNAISVLYFXXXXXXXXXLKKYRNMVVKAXG

SEQ ID NO: 6917 - protein, 38 aa, Artificial Sequence
  Non-cyclic GFR-binding peptide
  MOD_RES (5), (6): Xaa is C or S
  MOD_RES (20), (21), (22), (23), (24): Xaa is A or G
  MOD_RES (25), (26), (27), (28): Xaa is A or G or is absent
SASPXXVPQDLSATSILYYXXXXXXXXXLRKHRMVVKS

SEQ ID NO: 6918 - protein, 42 aa, Artificial Sequence
  Non-cyclic GFR-binding peptide
  MOD_RES (5), (6), (39), (41): Xaa is C or S
  MOD_RES (20), (21), (22), (23), (24): Xaa is A or G
  MOD_RES (25), (26), (27), (28): Xaa is A or G or is absent
SAAPXXVPQALSPISILYKXXXXXXXXXLKYHYMIVRSXKXS

SEQ ID NO: 6919 - protein, 37 aa, Artificial Sequence
  Non-cyclic GFR-binding peptide
  MOD_RES (37), (37): Xaa is C or S
  MOD_RES (16), (17), (18), (19), (20): Xaa is A or G
  MOD_RES (21), (22), (23), (24): Xaa is A or G or is absent
RPTQVQLSAISVLYLXXXXXXXXXLKNYQTLEDHLAX

SEQ ID NO: 6920 - protein, 38 aa, Artificial Sequence
  Non-cyclic GFR-binding peptide
  MOD_RES (3), (4), (36), (38): Xaa is C or S
KPXXAPTQLSAISVLYLDDSSNVILKNYQNMVVRAXGX

SEQ ID NO: 6921 - protein, 33 aa, Artificial Sequence
  Non-cyclic GFR-binding peptide
  MOD_RES (1), (32): Xaa is C or S
XVPQDLSATSILYYVGRTPKVLRKHRMVVKSXK

SEQ ID NO: 6922 - protein, 39 aa, Artificial Sequence
  Non-cyclic GFR-binding peptide
  MOD_RES (4), (5), (37), (39): Xaa is C or S
PKAXXVPTELSATSMLYYDENEKVVLRKHRDMVVEGXGX

SEQ ID NO: 6923 - protein, 37 aa, Artificial Sequence
  Non-cyclic GFR-binding peptide
  MOD_RES (37), (37): Xaa is C or S
RPTQVQLSATSVLYYEIVRKKPIFLRKHRTLEDHLAX

SEQ ID NO: 6924 - protein, 41 aa, Artificial Sequence
  Non-cyclic GFR-binding peptide
  MOD_RES (5), (6), (40): Xaa is C or S
  MOD_RES (20), (21), (22), (23), (24): Xaa is A or G
  MOD_RES (25), (26), (27), (28): Xaa is A or G or is absent
VPKAXXAPTKLNAISVLYFXXXXXXXXXLKKYRNMVVKAXG

SEQ ID NO: 6925 - protein, 35 aa, Artificial Sequence
  Non-cyclic GFR-binding peptide
  MOD_RES (35), (35): Xaa is C or S
TQVQLSPISVLYKEIVRKKPIFLKYHYTLEDHLAX

SEQ ID NO: 6926 - protein, 37 aa, Artificial Sequence
  Non-cyclic GFR-binding peptide
  MOD_RES (1), (2), (35), (37): Xaa is C or S
  MOD_RES (16), (17), (18), (19), (20): Xaa is A or G
  MOD_RES (21), (22), (23), (24): Xaa is A or G or is absent
XXVPQDLSPISILYKXXXXXXXXXLKYHYMVVKSXKX

SEQ ID NO: 6927 - protein, 42 aa, Artificial Sequence
  Non-cyclic GFR-binding peptide
  MOD_RES (5), (6), (39), (41): Xaa is C or S
  MOD_RES (20), (21), (22), (23), (24): Xaa is A or G
  MOD_RES (25), (26), (27), (28): Xaa is A or G or is absent
SASPXXVPQDLSAISILYLXXXXXXXXXLKNYQMVVKSXKXS

SEQ ID NO: 6928 - protein, 39 aa, Artificial Sequence
  Non-cyclic GFR-binding peptide
  MOD_RES (4), (4): Xaa is C or S
NVQXRPTQVQLNAISVLYFEIVRKKPIFLKKYRTLEDHL

SEQ ID NO: 6929 - protein, 37 aa, Artificial Sequence
  Non-cyclic GFR-binding peptide
  MOD_RES (3), (4), (37): Xaa is C or S
KAXXVPTKLSAISVLYLDDMGVPTLKNYQEGMSVAEX

SEQ ID NO: 6930 - protein, 36 aa, Artificial Sequence
  Non-cyclic GFR-binding peptide
  MOD_RES (2), (2): Xaa is C or S
QXRPTQVQLNAISVLYFEIVRKKPIFLKKYRTLEDH

SEQ ID NO: 6931 - protein, 36 aa, Artificial Sequence
  Non-cyclic GFR-binding peptide
  MOD_RES (5), (6): Xaa is C or S
VPKAXXAPTKLNAISVLYFDSSNNVILKKYRNMVVK

SEQ ID NO: 6932 - protein, 39 aa, Artificial Sequence
  Non-cyclic GFR-binding peptide
  MOD_RES (4), (5), (37), (39): Xaa is C or S
PKPXXAPTQLSAISVLYLDDSSNVILKNYQNMVVRAXGX

SEQ ID NO: 6933 - protein, 40 aa, Artificial Sequence
  Non-cyclic GFR-binding peptide
  MOD_RES (3), (4), (38), (40): Xaa is C or S
  MOD_RES (18), (19), (20), (21), (22): Xaa is A or G
  MOD_RES (23), (24), (25), (26): Xaa is A or G or is absent
KAXXVPTELSPISMLYKXXXXXXXXXLKYHYDMVVEGXGX

SEQ ID NO: 6934 - protein, 38 aa, Artificial Sequence
  Non-cyclic GFR-binding peptide
  MOD_RES (3), (4), (36), (38): Xaa is C or S
KAXXVPTELSATSMLYYDENEKVVLRKHRDMVVEGXGX

SEQ ID NO: 6935 - protein, 40 aa, Artificial Sequence
  Non-cyclic GFR-binding peptide
  MOD_RES (5), (6): Xaa is C or S
  MOD_RES (20), (21), (22), (23), (24): Xaa is A or G
  MOD_RES (25), (26), (27), (28): Xaa is A or G or is absent
VGKAXXVPTKLNAISVLYFXXXXXXXXXLKKYREGMSVAE

SEQ ID NO: 6936 - protein, 38 aa, Artificial Sequence
  Non-cyclic GFR-binding peptide
  MOD_RES (4), (5), (36), (38): Xaa is C or S
AAPXXVPQALNAISILYFVGRKPKVLKKYRMIVRSXKX

SEQ ID NO: 6937 - protein, 34 aa, Artificial Sequence
  Non-cyclic GFR-binding peptide
  MOD_RES (34), (34): Xaa is C or S
  MOD_RES (14), (15), (16), (17), (18): Xaa is A or G
  MOD_RES (19), (20), (21), (22): Xaa is A or G or is absent
APTKLSATSVLYYXXXXXXXXXLRKHRNMVVRSX

SEQ ID NO: 6938 - protein, 38 aa, Artificial Sequence
  Non-cyclic GFR-binding peptide
  MOD_RES (4), (38): Xaa is C or S
  MOD_RES (18), (19), (20), (21), (22): Xaa is A or G
  MOD_RES (23), (24), (25), (26): Xaa is A or G or is absent
KPTXAPTKLSATSVLYYXXXXXXXXXLRKHRNMVVRSX

SEQ ID NO: 6939 - protein, 37 aa, Artificial Sequence
  Non-cyclic GFR-binding peptide
  MOD_RES (2), (3), (34), (36): Xaa is C or S
PXXVPQDLSPISILYKVGRTPKVLKYHYMVVKSXKXS

SEQ ID NO: 6940 - protein, 41 aa, Artificial Sequence
  Non-cyclic GFR-binding peptide
  MOD_RES (5), (5): Xaa is C or S
  MOD_RES (21), (22), (23), (24), (25): Xaa is A or G
  MOD_RES (26), (27), (28), (29): Xaa is A or G or is absent
RNVQXRPTQVQLNAISVLYFXXXXXXXXXLKKYRTLEDHLA

SEQ ID NO: 6941 - protein, 42 aa, Artificial Sequence
  Non-cyclic GFR-binding peptide
  MOD_RES (3), (4), (39), (41): Xaa is C or S
  MOD_RES (18), (19), (20), (21), (22): Xaa is A or G
  MOD_RES (23), (24), (25), (26): Xaa is A or G or is absent
KAXXVPTKLSATSVLYYXXXXXXXXXLRKHREGMSVAEXGXR

SEQ ID NO: 6942 - protein, 34 aa, Artificial Sequence
  Non-cyclic GFR-binding peptide
  MOD_RES (1), (2): Xaa is C or S
  MOD_RES (16), (17), (18), (19), (20): Xaa is A or G
  MOD_RES (21), (22), (23), (24): Xaa is A or G or is absent
XXAPTQLSPISVLYKXXXXXXXXXLKYHYNMVVR

SEQ ID NO: 6943 - protein, 40 aa, Artificial Sequence
  Non-cyclic GFR-binding peptide
  MOD_RES (5), (6), (38), (40): Xaa is C or S
VPKPXXAPTKLSAISVLYLDDSSNVILKNYQNMVVRSXGX

SEQ ID NO: 6944 - protein, 42 aa, Artificial Sequence
  Non-cyclic GFR-binding peptide
  MOD_RES (6), (7), (39), (41): Xaa is C or S
AVPKAXXAPTKLSPISVLYKDSSNNVILKYHYNMVVKAXGXH

SEQ ID NO: 6945 - protein, 34 aa, Artificial Sequence
  Non-cyclic GFR-binding peptide
  MOD_RES (32), (34): Xaa is C or S
VPTELNAISMLYFDENEKVVLKKYRDMVVEGXGX

SEQ ID NO: 6946 - protein, 37 aa, Artificial Sequence
  Non-cyclic GFR-binding peptide
  MOD_RES (5), (6): Xaa is C or S
IPKAXXVPTELSATSMLYYDEYDKVVLRKHREMVVEG

SEQ ID NO: 6947 - protein, 36 aa, Artificial Sequence
  Non-cyclic GFR-binding peptide
  MOD_RES (2), (3), (35): Xaa is C or S
AXXVPTELNAISMLYFDEYDKVVLKKYREMVVEGXG

SEQ ID NO: 6948 - protein, 35 aa, Artificial Sequence
  Non-cyclic GFR-binding peptide
  MOD_RES (1), (1): Xaa is C or S
  MOD_RES (17), (18), (19), (20), (21): Xaa is A or G
  MOD_RES (22), (23), (24), (25): Xaa is A or G or is absent
XRPTQVQLSAISVLYLXXXXXXXXXLKNYQTLEDH

SEQ ID NO: 6949 - protein, 37 aa, Artificial Sequence
  Non-cyclic GFR-binding peptide
  MOD_RES (2), (3), (34), (36): Xaa is C or S
PXXVPQALSAISILYLVGRKPKVLKNYQMIVRSXKXS

SEQ ID NO: 6950 - protein, 36 aa, Artificial Sequence
  Non-cyclic GFR-binding peptide
  MOD_RES (5), (6): Xaa is C or S
VPKPXXAPTQLSPISVLYKDDSSNVILKYHYNMVVR

SEQ ID NO: 6951 - protein, 34 aa, Artificial Sequence
  Non-cyclic GFR-binding peptide
  MOD_RES (1), (2), (34): Xaa is C or S
XXAPTKLSPISVLYKDDSSNVILKYHYNMVVRSX

SEQ ID NO: 6952 - protein, 32 aa, Artificial Sequence
  Non-cyclic GFR-binding peptide
  MOD_RES (32), (32): Xaa is C or S
VPTELSPISMLYKDENEKVVLKYHYDMVVEGX

SEQ ID NO: 6953 - protein, 39 aa, Artificial Sequence
  Non-cyclic GFR-binding peptide
  MOD_RES (3), (4), (37), (39): Xaa is C or S
  MOD_RES (18), (19), (20), (21), (22): Xaa is A or G
  MOD_RES (23), (24), (25), (26): Xaa is A or G or is absent
APXXVPQALSPISILYKXXXXXXXXXLKYHYMIVRSXKX

SEQ ID NO: 6954 - protein, 37 aa, Artificial Sequence
  Non-cyclic GFR-binding peptide
  MOD_RES (1), (35), (37): Xaa is C or S
  MOD_RES (15), (16), (17), (18), (19): Xaa is A or G
  MOD_RES (20), (21), (22), (23): Xaa is A or G or is absent
XVPTELNAISMLYFXXXXXXXXXLKKYRDMVVEGXGX

SEQ ID NO: 6955 - protein, 37 aa, Artificial Sequence
  Non-cyclic GFR-binding peptide
  MOD_RES (2), (3), (36): Xaa is C or S
  MOD_RES (17), (18), (19), (20), (21): Xaa is A or G
  MOD_RES (22), (23), (24), (25): Xaa is A or G or is absent
PXXVPQALSATSILYYXXXXXXXXXLRKHRMIVRSXK

SEQ ID NO: 6956 - protein, 35 aa, Artificial Sequence
  Non-cyclic GFR-binding peptide
  MOD_RES (4), (5): Xaa is C or S
AAPXXVPQALNAISILYFVGRKPKVLKKYRMIVRS

SEQ ID NO: 6957 - protein, 41 aa, Artificial Sequence
  Non-cyclic GFR-binding peptide
  MOD_RES (6), (7), (40): Xaa is C or S
  MOD_RES (21), (22), (23), (24), (25): Xaa is A or G
  MOD_RES (26), (27), (28), (29): Xaa is A or G or is absent
ASASPXXVPQDLNAISILYFXXXXXXXXXLKKYRMVVKSXK

SEQ ID NO: 6958 - protein, 41 aa, Artificial Sequence
  Non-cyclic GFR-binding peptide
  MOD_RES (6), (7), (40): Xaa is C or S
  MOD_RES (21), (22), (23), (24), (25): Xaa is A or G
  MOD_RES (26), (27), (28), (29): Xaa is A or G or is absent
ASASPXXVPQDLSPISILYKXXXXXXXXXLKYHYMVVKSXK

SEQ ID NO: 6959 - protein, 33 aa, Artificial Sequence
  Non-cyclic GFR-binding peptide
  MOD_RES (2), (3): Xaa is C or S
AXXAPTKLSPISVLYKDSSNNVILKYHYNMVVK

SEQ ID NO: 6960 - protein, 40 aa, Artificial Sequence
  Non-cyclic GFR-binding peptide
  MOD_RES (5), (6), (39): Xaa is C or S
VGKAXXVPTKLNAISVLYFDDMGVPTLKKYREGMSVAEXG

SEQ ID NO: 6961 - protein, 40 aa, Artificial Sequence
  Non-cyclic GFR-binding peptide
  MOD_RES (5), (5): Xaa is C or S
  MOD_RES (21), (22), (23), (24), (25): Xaa is A or G
  MOD_RES (26), (27), (28), (29): Xaa is A or G or is absent
RNVQXRPTQVQLNAISVLYFXXXXXXXXXLKKYRTLEDHL

SEQ ID NO: 6962 - protein, 35 aa, Artificial Sequence
  Non-cyclic GFR-binding peptide
  MOD_RES (1), (2), (35): Xaa is C or S
XXVPTKLSATSVLYYDDMGVPTLRKHREGMSVAEX

SEQ ID NO: 6963 - protein, 37 aa, Artificial Sequence
  Non-cyclic GFR-binding peptide
  MOD_RES (4), (5): Xaa is C or S
  MOD_RES (19), (20), (21), (22), (23): Xaa is A or G
  MOD_RES (24), (25), (26), (27): Xaa is A or G or is absent
AAPXXVPQALSATSILYYXXXXXXXXXLRKHRMIVRS

SEQ ID NO: 6964 - protein, 39 aa, Artificial Sequence
  Non-cyclic GFR-binding peptide
  MOD_RES (6), (7): Xaa is C or S
  MOD_RES (21), (22), (23), (24), (25): Xaa is A or G
  MOD_RES (26), (27), (28), (29): Xaa is A or G or is absent
ASASPXXVSQDLNAISILYFXXXXXXXXXLKKYRMIVKS

SEQ ID NO: 6965 - protein, 34 aa, Artificial Sequence
  Non-cyclic GFR-binding peptide
  MOD_RES (1), (2), (33): Xaa is C or S
XXVPQALSPISILYKVGRKPKVLKYHYMIVRSXK

SEQ ID NO: 6966 - protein, 41 aa, Artificial Sequence
  Non-cyclic GFR-binding peptide
  MOD_RES (5), (6), (41): Xaa is C or S
  MOD_RES (20), (21), (22), (23), (24): Xaa is A or G
  MOD_RES (25), (26), (27), (28): Xaa is A or G or is absent
VGKAXXVPTKLSATSVLYYXXXXXXXXXLRKHREGMSVAEX

SEQ ID NO: 6967 - protein, 37 aa, Artificial Sequence
  Non-cyclic GFR-binding peptide
  MOD_RES (2), (34), (36): Xaa is C or S
TXAPTKLSAISVLYLDDSSNVILKNYQNMVVRSXGXH

SEQ ID NO: 6968 - protein, 36 aa, Artificial Sequence
  Non-cyclic GFR-binding peptide
  MOD_RES (5), (6): Xaa is C or S
VPKPXXAPTKLSATSVLYYDDSSNVILRKHRNMVVR

SEQ ID NO: 6969 - protein, 40 aa, Artificial Sequence
  Non-cyclic GFR-binding peptide
  MOD_RES (2), (3), (37), (39): Xaa is C or S
  MOD_RES (17), (18), (19), (20), (21): Xaa is A or G
  MOD_RES (22), (23), (24), (25): Xaa is A or G or is absent
AXXAPTKLSPISVLYKXXXXXXXXXLKYHYNMVVKAXGXH

SEQ ID NO: 6970 - protein, 42 aa, Artificial Sequence
  Non-cyclic GFR-binding peptide
  MOD_RES (5), (39), (41): Xaa is C or S
  MOD_RES (19), (20), (21), (22), (23): Xaa is A or G
  MOD_RES (24), (25), (26), (27): Xaa is A or G or is absent
TKPTXAPTKLSPISVLYKXXXXXXXXXLKYHYNMVVRSXGXH

SEQ ID NO: 6971 - protein, 35 aa, Artificial Sequence
  Non-cyclic GFR-binding peptide
  MOD_RES (2), (3), (35): Xaa is C or S
AXXVPTELNAISMLYFDENEKVVLKKYRDMVVEGX

SEQ ID NO: 6972 - protein, 35 aa, Artificial Sequence
  Non-cyclic GFR-binding peptide
  MOD_RES (2), (3): Xaa is C or S
  MOD_RES (17), (18), (19), (20), (21): Xaa is A or G
  MOD_RES (22), (23), (24), (25): Xaa is A or G or is absent
AXXVPTELNAISMLYFXXXXXXXXXLKKYRDMVVE

SEQ ID NO: 6973 - protein, 35 aa, Artificial Sequence
  Non-cyclic GFR-binding peptide
  MOD_RES (2), (3), (35): Xaa is C or S
AXXVPTELSPISMLYKDENEKVVLKYHYDMVVEGX

SEQ ID NO: 6974 - protein, 35 aa, Artificial Sequence
  Non-cyclic GFR-binding peptide
  MOD_RES (1), (2), (33), (35): Xaa is C or S
XXVSQDLNAISILYFIGKTPKILKKYRMIVKSXKX

SEQ ID NO: 6975 - protein, 34 aa, Artificial Sequence
  Non-cyclic GFR-binding peptide
  MOD_RES (34), (34): Xaa is C or S
  MOD_RES (14), (15), (16), (17), (18): Xaa is A or G
  MOD_RES (19), (20), (21), (22): Xaa is A or G or is absent
APTKLSPISVLYKXXXXXXXXXLKYHYNMVVRSX

SEQ ID NO: 6976 - protein, 44 aa, Artificial Sequence
  Non-cyclic GFR-binding peptide
  MOD_RES (7), (41), (43): Xaa is C or S
  MOD_RES (21), (22), (23), (24), (25): Xaa is A or G
  MOD_RES (26), (27), (28), (29): Xaa is A or G or is absent
HVTKPTXAPTKLSATSVLYYXXXXXXXXXLRKHRNMVVRSXGXH

SEQ ID NO: 6977 - protein, 32 aa, Artificial Sequence
  Non-cyclic GFR-binding peptide
  MOD_RES (1), (2): Xaa is C or S
XXVPTELSATSMLYYDEYDKVVLRKHREMVVE

SEQ ID NO: 6978 - protein, 39 aa, Artificial Sequence
  Non-cyclic GFR-binding peptide
  MOD_RES (1), (38): Xaa is C or S
  MOD_RES (17), (18), (19), (20), (21): Xaa is A or G
  MOD_RES (22), (23), (24), (25): Xaa is A or G or is absent
XRPTQVQLNAISVLYFXXXXXXXXXLKKYRTLEDHLAXK

SEQ ID NO: 6979 - protein, 34 aa, Artificial Sequence
  Non-cyclic GFR-binding peptide
  MOD_RES (1), (2): Xaa is C or S
  MOD_RES (16), (17), (18), (19), (20): Xaa is A or G
  MOD_RES (21), (22), (23), (24): Xaa is A or G or is absent
XXVPTELSATSMLYYXXXXXXXXXLRKHRDMVVE

SEQ ID NO: 6980 - protein, 43 aa, Artificial Sequence
  Non-cyclic GFR-binding peptide
  MOD_RES (4), (41), (43): Xaa is C or S
NVQXRPTQVQLNAISVLYFEIVRKKPIFLKKYRTLEDHLAXKX

SEQ ID NO: 6981 - protein, 33 aa, Artificial Sequence
  Non-cyclic GFR-binding peptide
  MOD_RES (1), (2), (33): Xaa is C or S
XXVPQALSPISILYKVGRKPKVLKYHYMIVRSX

SEQ ID NO: 6982 - protein, 38 aa, Artificial Sequence
  Non-cyclic GFR-binding peptide
  MOD_RES (6), (38): Xaa is C or S
VTKPTXAPTKLSAISVLYLDDSSNVILKNYQNMVVRSX

SEQ ID NO: 6983 - protein, 38 aa, Artificial Sequence
  Non-cyclic GFR-binding peptide
  MOD_RES (1), (2), (35), (37): Xaa is C or S
  MOD_RES (16), (17), (18), (19), (20): Xaa is A or G
  MOD_RES (21), (22), (23), (24): Xaa is A or G or is absent
XXVSQDLSAISILYLXXXXXXXXXLKNYQMIVKSXKXS

SEQ ID NO: 6984 - protein, 35 aa, Artificial Sequence
  Non-cyclic GFR-binding peptide
  MOD_RES (1), (2), (33), (35): Xaa is C or S
XXVPQALNAISILYFVGRKPKVLKKYRMIVRSXKX

SEQ ID NO: 6985 - protein, 40 aa, Artificial Sequence
  Non-cyclic GFR-binding peptide
  MOD_RES (5), (6), (40): Xaa is C or S
  MOD_RES (20), (21), (22), (23), (24): Xaa is A or G
  MOD_RES (25), (26), (27), (28): Xaa is A or G or is absent
VPKPXXAPTKLSATSVLYYXXXXXXXXXLRKHRNMVVRSX

SEQ ID NO: 6986 - protein, 44 aa, Artificial Sequence
  Non-cyclic GFR-binding peptide
  MOD_RES (5), (42), (44): Xaa is C or S
RNVQXRPTQVQLSAISVLYLEIVRKKPIFLKNYQTLEDHLAXKX

SEQ ID NO: 6987 - protein, 40 aa, Artificial Sequence
  Non-cyclic GFR-binding peptide
  MOD_RES (4), (5), (38), (40): Xaa is C or S
  MOD_RES (19), (20), (21), (22), (23): Xaa is A or G
  MOD_RES (24), (25), (26), (27): Xaa is A or G or is absent
ASPXXVPQDLSATSILYYXXXXXXXXXLRKHRMVVKSXKX

SEQ ID NO: 6988 - protein, 41 aa, Artificial Sequence
  Non-cyclic GFR-binding peptide
  MOD_RES (7), (39), (41): Xaa is C or S
HVTKPTXAPTKLSAISVLYLDDSSNVILKNYQNMVVRSXGX

SEQ ID NO: 6989 - protein, 39 aa, Artificial Sequence
  Non-cyclic GFR-binding peptide
  MOD_RES (3), (4), (38): Xaa is C or S
  MOD_RES (18), (19), (20), (21), (22): Xaa is A or G
  MOD_RES (23), (24), (25), (26): Xaa is A or G or is absent
KAXXVPTELNAISMLYFXXXXXXXXXLKKYREMVVEGXG

SEQ ID NO: 6990 - protein, 34 aa, Artificial Sequence
  Non-cyclic GFR-binding peptide
  MOD_RES (32), (34): Xaa is C or S
VPTELNAISMLYFDEYDKVVLKKYREMVVEGXGX

SEQ ID NO: 6991 - protein, 36 aa, Artificial Sequence
  Non-cyclic GFR-binding peptide
  MOD_RES (2), (3): Xaa is C or S
  MOD_RES (17), (18), (19), (20), (21): Xaa is A or G
  MOD_RES (22), (23), (24), (25): Xaa is A or G or is absent
PXXAPTQLSATSVLYYXXXXXXXXXLRKHRNMVVRA

SEQ ID NO: 6992 - protein, 34 aa, Artificial Sequence
  Non-cyclic GFR-binding peptide
  MOD_RES (3), (4): Xaa is C or S
SPXXVSQDLSATSILYYIGKTPKILRKHRMIVKS

SEQ ID NO: 6993 - protein, 38 aa, Artificial Sequence
  Non-cyclic GFR-binding peptide
  MOD_RES (37), (37): Xaa is C or S
RPTQVQLSAISVLYLEIVRKKPIFLKNYQTLEDHLAXK

SEQ ID NO: 6994 - protein, 39 aa, Artificial Sequence
  Non-cyclic GFR-binding peptide
  MOD_RES (3), (4), (36), (38): Xaa is C or S
KAXXVPTELNAISMLYFDENEKVVLKKYRDMVVEGXGXR

SEQ ID NO: 6995 - protein, 43 aa, Artificial Sequence
  Non-cyclic GFR-binding peptide
  MOD_RES (6), (7), (40), (42): Xaa is C or S
  MOD_RES (21), (22), (23), (24), (25): Xaa is A or G
  MOD_RES (26), (27), (28), (29): Xaa is A or G or is absent
ASAAPXXVPQALSAISILYLXXXXXXXXXLKNYQMIVRSXKXS

SEQ ID NO: 6996 - protein, 37 aa, Artificial Sequence
  Non-cyclic GFR-binding peptide
  MOD_RES (34), (36): Xaa is C or S
  MOD_RES (14), (15), (16), (17), (18): Xaa is A or G
  MOD_RES (19), (20), (21), (22): Xaa is A or G or is absent
APTKLSPISVLYKXXXXXXXXXLKYHYNMVVKAXGXH

SEQ ID NO: 6997 - protein, 41 aa, Artificial Sequence
  Non-cyclic GFR-binding peptide
  MOD_RES (6), (7), (39), (41): Xaa is C or S
SIPKAXXVPTELSPISMLYKDEYDKVVLKYHYEMVVEGXGX

SEQ ID NO: 6998 - protein, 38 aa, Artificial Sequence
  Non-cyclic GFR-binding peptide
  MOD_RES (5), (6): Xaa is C or S
  MOD_RES (20), (21), (22), (23), (24): Xaa is A or G
  MOD_RES (25), (26), (27), (28): Xaa is A or G or is absent
SASPXXVPQDLSAISILYLXXXXXXXXXLKNYQMVVKS

SEQ ID NO: 6999 - protein, 37 aa, Artificial Sequence
  Non-cyclic GFR-binding peptide
  MOD_RES (1), (1): Xaa is C or S
XRPTQVQLNAISVLYFEIVRKKPIFLKKYRTLEDHLA

SEQ ID NO: 7000 - protein, 36 aa, Artificial Sequence
  Non-cyclic GFR-binding peptide
  MOD_RES (34), (36): Xaa is C or S
  MOD_RES (14), (15), (16), (17), (18): Xaa is A or G
  MOD_RES (19), (20), (21), (22): Xaa is A or G or is absent
VPTELSATSMLYYXXXXXXXXXLRKHRDMVVEGXGX

SEQ ID NO: 7001 - protein, 37 aa, Artificial Sequence
  Non-cyclic GFR-binding peptide
  MOD_RES (3), (4), (36): Xaa is C or S
KPXXAPTKLSPISVLYKDDSSNVILKYHYNMVVRSXG

SEQ ID NO: 7002 - protein, 39 aa, Artificial Sequence
  Non-cyclic GFR-binding peptide
  MOD_RES (4), (4): Xaa is C or S
NVQXRPTQVQLSAISVLYLEIVRKKPIFLKNYQTLEDHL

SEQ ID NO: 7003 - protein, 34 aa, Artificial Sequence
  Non-cyclic GFR-binding peptide
  MOD_RES (1), (34): Xaa is C or S
  MOD_RES (15), (16), (17), (18), (19): Xaa is A or G
  MOD_RES (20), (21), (22), (23): Xaa is A or G or is absent
XVSQDLSATSILYYXXXXXXXXXLRKHRMIVKSX

SEQ ID NO: 7004 - protein, 35 aa, Artificial Sequence
  Non-cyclic GFR-binding peptide
  MOD_RES (1), (35): Xaa is C or S
  MOD_RES (15), (16), (17), (18), (19): Xaa is A or G
  MOD_RES (20), (21), (22), (23): Xaa is A or G or is absent
XAPTKLSPISVLYKXXXXXXXXXLKYHYNMVVRSX

SEQ ID NO: 7005 - protein, 34 aa, Artificial Sequence
  Non-cyclic GFR-binding peptide
  MOD_RES (1), (34): Xaa is C or S
  MOD_RES (15), (16), (17), (18), (19): Xaa is A or G
  MOD_RES (20), (21), (22), (23): Xaa is A or G or is absent
XVSQDLSAISILYLXXXXXXXXXLKNYQMIVKSX

SEQ ID NO: 7006 - protein, 39 aa, Artificial Sequence
  Non-cyclic GFR-binding peptide
  MOD_RES (2), (3), (37), (39): Xaa is C or S
  MOD_RES (17), (18), (19), (20), (21): Xaa is A or G
  MOD_RES (22), (23), (24), (25): Xaa is A or G or is absent
AXXAPTKLSPISVLYKXXXXXXXXXLKYHYNMVVKAXGX

SEQ ID NO: 7007 - protein, 41 aa, Artificial Sequence
  Non-cyclic GFR-binding peptide
  MOD_RES (4), (5), (38), (40): Xaa is C or S
  MOD_RES (19), (20), (21), (22), (23): Xaa is A or G
  MOD_RES (24), (25), (26), (27): Xaa is A or G or is absent
AAPXXVPQALSATSILYYXXXXXXXXXLRKHRMIVRSXKXS

SEQ ID NO: 7008 - protein, 39 aa, Artificial Sequence
  Non-cyclic GFR-binding peptide
  MOD_RES (6), (7): Xaa is C or S
  MOD_RES (21), (22), (23), (24), (25): Xaa is A or G
  MOD_RES (26), (27), (28), (29): Xaa is A or G or is absent
ASASPXXVPQDLSAISILYLXXXXXXXXXLKNYQMVVKS

SEQ ID NO: 7009 - protein, 36 aa, Artificial Sequence
  Non-cyclic GFR-binding peptide
  MOD_RES (16), (17), (18), (19), (20): Xaa is A or G
  MOD_RES (21), (22), (23), (24): Xaa is A or G or is absent
RPTQVQLSATSVLYYXXXXXXXXXLRKHRTLEDHLA

SEQ ID NO: 7010 - protein, 37 aa, Artificial Sequence
  Non-cyclic GFR-binding peptide
  MOD_RES (1), (34), (36): Xaa is C or S
  MOD_RES (15), (16), (17), (18), (19): Xaa is A or G
  MOD_RES (20), (21), (22), (23): Xaa is A or G or is absent
XVSQDLSATSILYYXXXXXXXXXLRKHRMIVKSXKXS

SEQ ID NO: 7011 - protein, 34 aa, Artificial Sequence
  Non-cyclic GFR-binding peptide
  MOD_RES (3), (4): Xaa is C or S
SPXXVSQDLNAISILYFIGKTPKILKKYRMIVKS

SEQ ID NO: 7012 - protein, 42 aa, Artificial Sequence
  Non-cyclic GFR-binding peptide
  MOD_RES (3), (40), (42): Xaa is C or S
VQXRPTQVQLSPISVLYKEIVRKKPIFLKYHYTLEDHLAXKX

SEQ ID NO: 7013 - protein, 36 aa, Artificial Sequence
  Non-cyclic GFR-binding peptide
  MOD_RES (2), (3), (34), (36): Xaa is C or S
PXXVPQALNAISILYFVGRKPKVLKKYRMIVRSXKX

SEQ ID NO: 7014 - protein, 34 aa, Artificial Sequence
  Non-cyclic GFR-binding peptide
  MOD_RES (32), (34): Xaa is C or S
APTKLSAISVLYLDSSNNVILKNYQNMVVKAXGX

SEQ ID NO: 7015 - protein, 36 aa, Artificial Sequence
  Non-cyclic GFR-binding peptide
  MOD_RES (16), (17), (18), (19), (20): Xaa is A or G
  MOD_RES (21), (22), (23), (24): Xaa is A or G or is absent
RPTQVQLSAISVLYLXXXXXXXXXLKNYQTLEDHLA

SEQ ID NO: 7016 - protein, 41 aa, Artificial Sequence
  Non-cyclic GFR-binding peptide
  MOD_RES (4), (5), (39), (41): Xaa is C or S
  MOD_RES (19), (20), (21), (22), (23): Xaa is A or G
  MOD_RES (24), (25), (26), (27): Xaa is A or G or is absent
PKAXXVPTELNAISMLYFXXXXXXXXXLKKYRDMVVEGXGX

SEQ ID NO: 7017 - protein, 39 aa, Artificial Sequence
  Non-cyclic GFR-binding peptide
  MOD_RES (4), (5), (38): Xaa is C or S
  MOD_RES (19), (20), (21), (22), (23): Xaa is A or G
  MOD_RES (24), (25), (26), (27): Xaa is A or G or is absent
ASPXXVPQDLNAISILYFXXXXXXXXXLKKYRMVVKSXK

SEQ ID NO: 7018 - protein, 38 aa, Artificial Sequence
  Non-cyclic GFR-binding peptide
  MOD_RES (4), (38): Xaa is C or S
  MOD_RES (18), (19), (20), (21), (22): Xaa is A or G
  MOD_RES (23), (24), (25), (26): Xaa is A or G or is absent
KPTXAPTKLSAISVLYLXXXXXXXXXLKNYQNMVVRSX

SEQ ID NO: 7019 - protein, 38 aa, Artificial Sequence
  Non-cyclic GFR-binding peptide
  MOD_RES (5), (6): Xaa is C or S
  MOD_RES (20), (21), (22), (23), (24): Xaa is A or G
  MOD_RES (25), (26), (27), (28): Xaa is A or G or is absent
SASPXXVPQDLSPISILYKXXXXXXXXXLKYHYMVVKS

SEQ ID NO: 7020 - protein, 36 aa, Artificial Sequence
  Non-cyclic GFR-binding peptide
  MOD_RES (2), (3), (36): Xaa is C or S
  MOD_RES (17), (18), (19), (20), (21): Xaa is A or G
  MOD_RES (22), (23), (24), (25): Xaa is A or G or is absent
PXXVPQALNAISILYFXXXXXXXXXLKKYRMIVRSX

SEQ ID NO: 7021 - protein, 32 aa, Artificial Sequence
  Non-cyclic GFR-binding peptide
  MOD_RES (1), (1): Xaa is C or S
XVPTELSPISMLYKDENEKVVLKYHYDMVVEG

SEQ ID NO: 7022 - protein, 40 aa, Artificial Sequence
  Non-cyclic GFR-binding peptide
  MOD_RES (3), (4), (38), (40): Xaa is C or S
  MOD_RES (18), (19), (20), (21), (22): Xaa is A or G
  MOD_RES (23), (24), (25), (26): Xaa is A or G or is absent
KPXXAPTKLSATSVLYYXXXXXXXXXLRKHRNMVVRSXGX

SEQ ID NO: 7023 - protein, 33 aa, Artificial Sequence
  Non-cyclic GFR-binding peptide
  MOD_RES (2), (3): Xaa is C or S
AXXAPTKLSAISVLYLDSSNNVILKNYQNMVVK

SEQ ID NO: 7024 - protein, 39 aa, Artificial Sequence
  Non-cyclic GFR-binding peptide
  MOD_RES (5), (39): Xaa is C or S
  MOD_RES (19), (20), (21), (22), (23): Xaa is A or G
  MOD_RES (24), (25), (26), (27): Xaa is A or G or is absent
TKPTXAPTKLSAISVLYLXXXXXXXXXLKNYQNMVVRSX

SEQ ID NO: 7025 - protein, 38 aa, Artificial Sequence
  Non-cyclic GFR-binding peptide
  MOD_RES (3), (4), (35), (37): Xaa is C or S
SPXXVPQDLSPISILYKVGRTPKVLKYHYMVVKSXKXS

SEQ ID NO: 7026 - protein, 36 aa, Artificial Sequence
  Non-cyclic GFR-binding peptide
  MOD_RES (36), (36): Xaa is C or S
PTQVQLNAISVLYFEIVRKKPIFLKKYRTLEDHLAX

SEQ ID NO: 7027 - protein, 39 aa, Artificial Sequence
  Non-cyclic GFR-binding peptide
  MOD_RES (2), (3), (36), (38): Xaa is C or S
AXXVPTKLSATSVLYYDDMGVPTLRKHREGMSVAEXGXR

SEQ ID NO: 7028 - protein, 32 aa, Artificial Sequence
  Non-cyclic GFR-binding peptide
  MOD_RES (1), (1): Xaa is C or S
XAPTKLSPISVLYKDDSSNVILKYHYNMVVRS

SEQ ID NO: 7029 - protein, 35 aa, Artificial Sequence
  Non-cyclic GFR-binding peptide
  MOD_RES (2), (2): Xaa is C or S
  MOD_RES (16), (17), (18), (19), (20): Xaa is A or G
  MOD_RES (21), (22), (23), (24): Xaa is A or G or is absent
TXAPTKLSATSVLYYXXXXXXXXXLRKHRNMVVRS

SEQ ID NO: 7030 - protein, 36 aa, Artificial Sequence
  Non-cyclic GFR-binding peptide
  MOD_RES (2), (3): Xaa is C or S
  MOD_RES (17), (18), (19), (20), (21): Xaa is A or G
  MOD_RES (22), (23), (24), (25): Xaa is A or G or is absent
AXXVPTELSATSMLYYXXXXXXXXXLRKHRDMVVEG

SEQ ID NO: 7031 - protein, 38 aa, Artificial Sequence
  Non-cyclic GFR-binding peptide
  MOD_RES (4), (5), (36), (38): Xaa is C or S
ASPXXVSQDLSPISILYKIGKTPKILKYHYMIVKSXKX

SEQ ID NO: 7032 - protein, 41 aa, Artificial Sequence
  Non-cyclic GFR-binding peptide
  MOD_RES (6), (7), (38), (40): Xaa is C or S
ASAAPXXVPQALSATSILYYVGRKPKVLRKHRMIVRSXKXS

SEQ ID NO: 7033 - protein, 37 aa, Artificial Sequence
  Non-cyclic GFR-binding peptide
  MOD_RES (34), (36): Xaa is C or S
  MOD_RES (14), (15), (16), (17), (18): Xaa is A or G
  MOD_RES (19), (20), (21), (22): Xaa is A or G or is absent
VPTELSATSMLYYXXXXXXXXXLRKHRDMVVEGXGXR

SEQ ID NO: 7034 - protein, 39 aa, Artificial Sequence
  Non-cyclic GFR-binding peptide
  MOD_RES (4), (5), (37), (39): Xaa is C or S
PKPXXAPTKLSAISVLYLDDSSNVILKNYQNMVVRSXGX

SEQ ID NO: 7035 - protein, 37 aa, Artificial Sequence
  Non-cyclic GFR-binding peptide
  MOD_RES (4), (5): Xaa is C or S
  MOD_RES (19), (20), (21), (22), (23): Xaa is A or G
  MOD_RES (24), (25), (26), (27): Xaa is A or G or is absent
PKAXXVPTELSATSMLYYXXXXXXXXXLRKHREMVVE

SEQ ID NO: 7036 - protein, 37 aa, Artificial Sequence
  Non-cyclic GFR-binding peptide
  MOD_RES (3), (4), (35), (37): Xaa is C or S
SPXXVSQDLSPISILYKIGKTPKILKYHYMIVKSXKX

SEQ ID NO: 7037 - protein, 36 aa, Artificial Sequence
  Non-cyclic GFR-binding peptide
  MOD_RES (4), (5), (36): Xaa is C or S
AAPXXVPQALNAISILYFVGRKPKVLKKYRMIVRSX

SEQ ID NO: 7038 - protein, 42 aa, Artificial Sequence
  Non-cyclic GFR-binding peptide
  MOD_RES (6), (7), (40), (42): Xaa is C or S
KVGKAXXVPTKLSATSVLYYDDMGVPTLRKHREGMSVAEXGX

SEQ ID NO: 7039 - protein, 36 aa, Artificial Sequence
  Non-cyclic GFR-binding peptide
  MOD_RES (1), (2), (36): Xaa is C or S
  MOD_RES (16), (17), (18), (19), (20): Xaa is A or G
  MOD_RES (21), (22), (23), (24): Xaa is A or G or is absent
XXAPTQLSATSVLYYXXXXXXXXXLRKHRNMVVRAX

SEQ ID NO: 7040 - protein, 41 aa, Artificial Sequence
  Non-cyclic GFR-binding peptide
  MOD_RES (2), (3), (38), (40): Xaa is C or S
  MOD_RES (17), (18), (19), (20), (21): Xaa is A or G
  MOD_RES (22), (23), (24), (25): Xaa is A or G or is absent
AXXVPTKLNAISVLYFXXXXXXXXXLKKYREGMSVAEXGXR

SEQ ID NO: 7041 - protein, 36 aa, Artificial Sequence
  Non-cyclic GFR-binding peptide
  MOD_RES (2), (3), (35): Xaa is C or S
AXXAPTKLNAISVLYFDSSNNVILKKYRNMVVKAXG

SEQ ID NO: 7042 - protein, 38 aa, Artificial Sequence
  Non-cyclic GFR-binding peptide
  MOD_RES (5), (6), (37): Xaa is C or S
SAAPXXVPQALSPISILYKVGRKPKVLKYHYMIVRSXK

SEQ ID NO: 7043 - protein, 34 aa, Artificial Sequence
  Non-cyclic GFR-binding peptide
  MOD_RES (33), (33): Xaa is C or S
  MOD_RES (14), (15), (16), (17), (18): Xaa is A or G
  MOD_RES (19), (20), (21), (22): Xaa is A or G or is absent
VSQDLSAISILYLXXXXXXXXXLKNYQMIVKSXK

SEQ ID NO: 7044 - protein, 38 aa, Artificial Sequence
  Non-cyclic GFR-binding peptide
  MOD_RES (3), (4), (36), (38): Xaa is C or S
KPXXAPTKLSAISVLYLDDSSNVILKNYQNMVVRSXGX

SEQ ID NO: 7045 - protein, 39 aa, Artificial Sequence
  Non-cyclic GFR-binding peptide
  MOD_RES (6), (7): Xaa is C or S
  MOD_RES (21), (22), (23), (24), (25): Xaa is A or G
  MOD_RES (26), (27), (28), (29): Xaa is A or G or is absent
ASASPXXVPQDLSATSILYYXXXXXXXXXLRKHRMVVKS

SEQ ID NO: 7046 - protein, 37 aa, Artificial Sequence
  Non-cyclic GFR-binding peptide
  MOD_RES (5), (6), (37): Xaa is C or S
SASPXXVPQDLSAISILYLVGRTPKVLKNYQMVVKSX

SEQ ID NO: 7047 - protein, 42 aa, Artificial Sequence
  Non-cyclic GFR-binding peptide
  MOD_RES (5), (6), (39), (41): Xaa is C or S
  MOD_RES (20), (21), (22), (23), (24): Xaa is A or G
  MOD_RES (25), (26), (27), (28): Xaa is A or G or is absent
SASPXXVSQDLSATSILYYXXXXXXXXXLRKHRMIVKSXKXS

SEQ ID NO: 7048 - protein, 38 aa, Artificial Sequence
  Non-cyclic GFR-binding peptide
  MOD_RES (1), (38): Xaa is C or S
XRPTQVQLSPISVLYKEIVRKKPIFLKYHYTLEDHLAX

SEQ ID NO: 7049 - protein, 34 aa, Artificial Sequence
  Non-cyclic GFR-binding peptide
  MOD_RES (2), (2): Xaa is C or S
  MOD_RES (16), (17), (18), (19), (20): Xaa is A or G
  MOD_RES (21), (22), (23), (24): Xaa is A or G or is absent
TXAPTKLSAISVLYLXXXXXXXXXLKNYQNMVVR

SEQ ID NO: 7050 - protein, 37 aa, Artificial Sequence
  Non-cyclic GFR-binding peptide
  MOD_RES (3), (4), (35), (37): Xaa is C or S
SPXXVSQDLSATSILYYIGKTPKILRKHRMIVKSXKX

SEQ ID NO: 7051 - protein, 36 aa, Artificial Sequence
  Non-cyclic GFR-binding peptide
  MOD_RES (1), (2), (36): Xaa is C or S
  MOD_RES (16), (17), (18), (19), (20): Xaa is A or G
  MOD_RES (21), (22), (23), (24): Xaa is A or G or is absent
XXVPTELSATSMLYYXXXXXXXXXLRKHREMVVEGX

SEQ ID NO: 7052 - protein, 40 aa, Artificial Sequence
  Non-cyclic GFR-binding peptide
  MOD_RES (4), (4): Xaa is C or S
NVQXRPTQVQLSATSVLYYEIVRKKPIFLRKHRTLEDHLA

SEQ ID NO: 7053 - protein, 33 aa, Artificial Sequence
  Non-cyclic GFR-binding peptide
  MOD_RES (15), (16), (17), (18), (19): Xaa is A or G
  MOD_RES (20), (21), (22), (23): Xaa is A or G or is absent
PTQVQLSAISVLYLXXXXXXXXXLKNYQTLEDH

SEQ ID NO: 7054 - protein, 32 aa, Artificial Sequence
  Non-cyclic GFR-binding peptide
  MOD_RES (32), (32): Xaa is C or S
APTKLSAISVLYLDSSNNVILKNYQNMVVKAX

SEQ ID NO: 7055 - protein, 34 aa, Artificial Sequence
  Non-cyclic GFR-binding peptide
  MOD_RES (1), (33): Xaa is C or S
XVPTELSATSMLYYDEYDKVVLRKHREMVVEGXG

SEQ ID NO: 7056 - protein, 33 aa, Artificial Sequence
  Non-cyclic GFR-binding peptide
  MOD_RES (33), (33): Xaa is C or S
  MOD_RES (14), (15), (16), (17), (18): Xaa is A or G
  MOD_RES (19), (20), (21), (22): Xaa is A or G or is absent
VPQALSPISILYKXXXXXXXXXLKYHYMIVRSX

SEQ ID NO: 7057 - protein, 35 aa, Artificial Sequence
  Non-cyclic GFR-binding peptide
  MOD_RES (2), (3): Xaa is C or S
  MOD_RES (17), (18), (19), (20), (21): Xaa is A or G
  MOD_RES (22), (23), (24), (25): Xaa is A or G or is absent
PXXAPTQLSPISVLYKXXXXXXXXXLKYHYNMVVR

SEQ ID NO: 7058 - protein, 37 aa, Artificial Sequence
  Non-cyclic GFR-binding peptide
  MOD_RES (2), (3), (36): Xaa is C or S
  MOD_RES (17), (18), (19), (20), (21): Xaa is A or G
  MOD_RES (22), (23), (24), (25): Xaa is A or G or is absent
PXXVPQDLSPISILYKXXXXXXXXXLKYHYMVVKSXK

SEQ ID NO: 7059 - protein, 44 aa, Artificial Sequence
  Non-cyclic GFR-binding peptide
  MOD_RES (6), (7), (41), (43): Xaa is C or S
  MOD_RES (21), (22), (23), (24), (25): Xaa is A or G
  MOD_RES (26), (27), (28), (29): Xaa is A or G or is absent
KIPKAXXVPTELSATSMLYYXXXXXXXXXLRKHRDMVVEGXGXR

SEQ ID NO: 7060 - protein, 39 aa, Artificial Sequence
  Non-cyclic GFR-binding peptide
  MOD_RES (5), (6), (39): Xaa is C or S
VGKAXXVPTKLSAISVLYLDDMGVPTLKNYQEGMSVAEX

SEQ ID NO: 7061 - protein, 43 aa, Artificial Sequence
  Non-cyclic GFR-binding peptide
  MOD_RES (6), (7), (41), (43): Xaa is C or S
  MOD_RES (21), (22), (23), (24), (25): Xaa is A or G
  MOD_RES (26), (27), (28), (29): Xaa is A or G or is absent
YVPKPXXAPTKLSATSVLYYXXXXXXXXXLRKHRNMVVRSXGX

SEQ ID NO: 7062 - protein, 38 aa, Artificial Sequence
  Non-cyclic GFR-binding peptide
  MOD_RES (4), (5), (38): Xaa is C or S
  MOD_RES (19), (20), (21), (22), (23): Xaa is A or G
  MOD_RES (24), (25), (26), (27): Xaa is A or G or is absent
AAPXXVPQALSPISILYKXXXXXXXXXLKYHYMIVRSX

SEQ ID NO: 7063 - protein, 36 aa, Artificial Sequence
  Non-cyclic GFR-binding peptide
  MOD_RES (1), (1): Xaa is C or S
XRPTQVQLSAISVLYLEIVRKKPIFLKNYQTLEDHL

SEQ ID NO: 7064 - protein, 33 aa, Artificial Sequence
  Non-cyclic GFR-binding peptide
  MOD_RES (1), (2), (33): Xaa is C or S
XXVPQALSATSILYYVGRKPKVLRKHRMIVRSX

SEQ ID NO: 7065 - protein, 37 aa, Artificial Sequence
  Non-cyclic GFR-binding peptide
  MOD_RES (1), (2), (35), (37): Xaa is C or S
XXVPTKLSATSVLYYDDMGVPTLRKHREGMSVAEXGX

SEQ ID NO: 7066 - protein, 37 aa, Artificial Sequence
  Non-cyclic GFR-binding peptide
  MOD_RES (1), (1): Xaa is C or S
  MOD_RES (17), (18), (19), (20), (21): Xaa is A or G
  MOD_RES (22), (23), (24), (25): Xaa is A or G or is absent
XRPTQVQLSPISVLYKXXXXXXXXXLKYHYTLEDHLA

SEQ ID NO: 7067 - protein, 40 aa, Artificial Sequence
  Non-cyclic GFR-binding peptide
  MOD_RES (5), (6), (40): Xaa is C or S
  MOD_RES (20), (21), (22), (23), (24): Xaa is A or G
  MOD_RES (25), (26), (27), (28): Xaa is A or G or is absent
VPKPXXAPTKLSAISVLYLXXXXXXXXXLKNYQNMVVRSX

SEQ ID NO: 7068 - protein, 40 aa, Artificial Sequence
  Non-cyclic GFR-binding peptide
  MOD_RES (5), (6), (39): Xaa is C or S
  MOD_RES (20), (21), (22), (23), (24): Xaa is A or G
  MOD_RES (25), (26), (27), (28): Xaa is A or G or is absent
SASPXXVPQDLNAISILYFXXXXXXXXXLKKYRMVVKSXK

SEQ ID NO: 7069 - protein, 41 aa, Artificial Sequence
  Non-cyclic GFR-binding peptide
  MOD_RES (3), (40): Xaa is C or S
VQXRPTQVQLNAISVLYFEIVRKKPIFLKKYRTLEDHLAXK

SEQ ID NO: 7070 - protein, 35 aa, Artificial Sequence
  Non-cyclic GFR-binding peptide
  MOD_RES (1), (2): Xaa is C or S
  MOD_RES (16), (17), (18), (19), (20): Xaa is A or G
  MOD_RES (21), (22), (23), (24): Xaa is A or G or is absent
XXVPTELSATSMLYYXXXXXXXXXLRKHREMVVEG

SEQ ID NO: 7071 - protein, 36 aa, Artificial Sequence
  Non-cyclic GFR-binding peptide
  MOD_RES (1), (35): Xaa is C or S
  MOD_RES (15), (16), (17), (18), (19): Xaa is A or G
  MOD_RES (20), (21), (22), (23): Xaa is A or G or is absent
XVPTELSATSMLYYXXXXXXXXXLRKHREMVVEGXG

SEQ ID NO: 7072 - protein, 39 aa, Artificial Sequence
  Non-cyclic GFR-binding peptide
  MOD_RES (6), (7): Xaa is C or S
  MOD_RES (21), (22), (23), (24), (25): Xaa is A or G
  MOD_RES (26), (27), (28), (29): Xaa is A or G or is absent
AVPKAXXAPTKLNAISVLYFXXXXXXXXXLKKYRNMVVK

SEQ ID NO: 7073 - protein, 42 aa, Artificial Sequence
  Non-cyclic GFR-binding peptide
  MOD_RES (6), (7), (42): Xaa is C or S
  MOD_RES (21), (22), (23), (24), (25): Xaa is A or G
  MOD_RES (26), (27), (28), (29): Xaa is A or G or is absent
KVGKAXXVPTKLNAISVLYFXXXXXXXXXLKKYREGMSVAEX

SEQ ID NO: 7074 - protein, 40 aa, Artificial Sequence
  Non-cyclic GFR-binding peptide
  MOD_RES (6), (7), (40): Xaa is C or S
  MOD_RES (21), (22), (23), (24), (25): Xaa is A or G
  MOD_RES (26), (27), (28), (29): Xaa is A or G or is absent
ASAAPXXVPQALSATSILYYXXXXXXXXXLRKHRMIVRSX

SEQ ID NO: 7075 - protein, 35 aa, Artificial Sequence
  Non-cyclic GFR-binding peptide
  MOD_RES (33), (35): Xaa is C or S
  MOD_RES (14), (15), (16), (17), (18): Xaa is A or G
  MOD_RES (19), (20), (21), (22): Xaa is A or G or is absent
VPQALSAISILYLXXXXXXXXXLKNYQMIVRSXKX

SEQ ID NO: 7076 - protein, 38 aa, Artificial Sequence
  Non-cyclic GFR-binding peptide
  MOD_RES (2), (3), (35), (37): Xaa is C or S
AXXVPTELNAISMLYFDENEKVVLKKYRDMVVEGXGXR

SEQ ID NO: 7077 - protein, 36 aa, Artificial Sequence
  Non-cyclic GFR-binding peptide
  MOD_RES (33), (35): Xaa is C or S
  MOD_RES (14), (15), (16), (17), (18): Xaa is A or G
  MOD_RES (19), (20), (21), (22): Xaa is A or G or is absent
VSQDLSAISILYLXXXXXXXXXLKNYQMIVKSXKXS

SEQ ID NO: 7078 - protein, 35 aa, Artificial Sequence
  Non-cyclic GFR-binding peptide
  MOD_RES (2), (34): Xaa is C or S
TXAPTKLSAISVLYLDDSSNVILKNYQNMVVRSXG

SEQ ID NO: 7079 - protein, 34 aa, Artificial Sequence
  Non-cyclic GFR-binding peptide
  MOD_RES (4), (4): Xaa is C or S
KPTXAPTKLSATSVLYYDDSSNVILRKHRNMVVR

SEQ ID NO: 7080 - protein, 40 aa, Artificial Sequence
  Non-cyclic GFR-binding peptide
  MOD_RES (3), (4), (38), (40): Xaa is C or S
  MOD_RES (18), (19), (20), (21), (22): Xaa is A or G
  MOD_RES (23), (24), (25), (26): Xaa is A or G or is absent
KPXXAPTQLSPISVLYKXXXXXXXXXLKYHYNMVVRAXGX

SEQ ID NO: 7081 - protein, 37 aa, Artificial Sequence
  Non-cyclic GFR-binding peptide
  MOD_RES (3), (4), (37): Xaa is C or S
  MOD_RES (18), (19), (20), (21), (22): Xaa is A or G
  MOD_RES (23), (24), (25), (26): Xaa is A or G or is absent
APXXVPQALSPISILYKXXXXXXXXXLKYHYMIVRSX

SEQ ID NO: 7082 - protein, 32 aa, Artificial Sequence
  Non-cyclic GFR-binding peptide
  MOD_RES (31), (31): Xaa is C or S
VPQALNAISILYFVGRKPKVLKKYRMIVRSXK

SEQ ID NO: 7083 - protein, 45 aa, Artificial Sequence
  Non-cyclic GFR-binding peptide
  MOD_RES (5), (42), (44): Xaa is C or S
RNVQXRPTQVQLNAISVLYFEIVRKKPIFLKKYRTLEDHLAXKXE

SEQ ID NO: 7084 - protein, 35 aa, Artificial Sequence
  Non-cyclic GFR-binding peptide
  MOD_RES (3), (4), (35): Xaa is C or S
SPXXVSQDLSPISILYKIGKTPKILKYHYMIVKSX

SEQ ID NO: 7085 - protein, 35 aa, Artificial Sequence
  Non-cyclic GFR-binding peptide
  MOD_RES (3), (4): Xaa is C or S
KAXXAPTKLSAISVLYLDSSNNVILKNYQNMVVKA

SEQ ID NO: 7086 - protein, 34 aa, Artificial Sequence
  Non-cyclic GFR-binding peptide
  MOD_RES (1), (1): Xaa is C or S
  MOD_RES (15), (16), (17), (18), (19): Xaa is A or G
  MOD_RES (20), (21), (22), (23): Xaa is A or G or is absent
XVPTELSATSMLYYXXXXXXXXXLRKHREMVVEG

SEQ ID NO: 7087 - protein, 35 aa, Artificial Sequence
  Non-cyclic GFR-binding peptide
  MOD_RES (2), (3): Xaa is C or S
  MOD_RES (17), (18), (19), (20), (21): Xaa is A or G
  MOD_RES (22), (23), (24), (25): Xaa is A or G or is absent
AXXAPTKLSPISVLYKXXXXXXXXXLKYHYNMVVK

SEQ ID NO: 7088 - protein, 40 aa, Artificial Sequence
  Non-cyclic GFR-binding peptide
  MOD_RES (2), (3), (37), (39): Xaa is C or S
  MOD_RES (17), (18), (19), (20), (21): Xaa is A or G
  MOD_RES (22), (23), (24), (25): Xaa is A or G or is absent
PXXAPTKLSAISVLYLXXXXXXXXXLKNYQNMVVRSXGXH

SEQ ID NO: 7089 - protein, 35 aa, Artificial Sequence
  Non-cyclic GFR-binding peptide
  MOD_RES (3), (4): Xaa is C or S
KPXXAPTKLSATSVLYYDDSSNVILRKHRNMVVRS

SEQ ID NO: 7090 - protein, 33 aa, Artificial Sequence
  Non-cyclic GFR-binding peptide
TQVQLNAISVLYFEIVRKKPIFLKKYRTLEDHL

SEQ ID NO: 7091 - protein, 39 aa, Artificial Sequence
  Non-cyclic GFR-binding peptide
  MOD_RES (4), (5), (39): Xaa is C or S
  MOD_RES (19), (20), (21), (22), (23): Xaa is A or G
  MOD_RES (24), (25), (26), (27): Xaa is A or G or is absent
PKAXXVPTELNAISMLYFXXXXXXXXXLKKYRDMVVEGX

SEQ ID NO: 7092 - protein, 38 aa, Artificial Sequence
  Non-cyclic GFR-binding peptide
  MOD_RES (35), (37): Xaa is C or S
  MOD_RES (14), (15), (16), (17), (18): Xaa is A or G
  MOD_RES (19), (20), (21), (22): Xaa is A or G or is absent
VPTKLSAISVLYLXXXXXXXXXLKNYQEGMSVAEXGXR

SEQ ID NO: 7093 - protein, 43 aa, Artificial Sequence
  Non-cyclic GFR-binding peptide
  MOD_RES (3), (40), (42): Xaa is C or S
VQXRPTQVQLSPISVLYKEIVRKKPIFLKYHYTLEDHLAXKXE

SEQ ID NO: 7094 - protein, 37 aa, Artificial Sequence
  Non-cyclic GFR-binding peptide
  MOD_RES (5), (6), (37): Xaa is C or S
SAAPXXVPQALSPISILYKVGRKPKVLKYHYMIVRSX

SEQ ID NO: 7095 - protein, 39 aa, Artificial Sequence
  Non-cyclic GFR-binding peptide
  MOD_RES (3), (4), (37), (39): Xaa is C or S
  MOD_RES (18), (19), (20), (21), (22): Xaa is A or G
  MOD_RES (23), (24), (25), (26): Xaa is A or G or is absent
SPXXVPQDLSATSILYYXXXXXXXXXLRKHRMVVKSXKX

SEQ ID NO: 7096 - protein, 39 aa, Artificial Sequence
  Non-cyclic GFR-binding peptide
  MOD_RES (1), (2), (36), (38): Xaa is C or S
  MOD_RES (16), (17), (18), (19), (20): Xaa is A or G
  MOD_RES (21), (22), (23), (24): Xaa is A or G or is absent
XXAPTKLSPISVLYKXXXXXXXXXLKYHYNMVVKAXGXH

SEQ ID NO: 7097 - protein, 41 aa, Artificial Sequence
  Non-cyclic GFR-binding peptide
  MOD_RES (6), (7): Xaa is C or S
  MOD_RES (21), (22), (23), (24), (25): Xaa is A or G
  MOD_RES (26), (27), (28), (29): Xaa is A or G or is absent
KVGKAXXVPTKLNAISVLYFXXXXXXXXXLKKYREGMSVAE

SEQ ID NO: 7098 - protein, 35 aa, Artificial Sequence
  Non-cyclic GFR-binding peptide
  MOD_RES (2), (3): Xaa is C or S
  MOD_RES (17), (18), (19), (20), (21): Xaa is A or G
  MOD_RES (22), (23), (24), (25): Xaa is A or G or is absent
PXXVPQDLSAISILYLXXXXXXXXXLKNYQMVVKS

SEQ ID NO: 7099 - protein, 38 aa, Artificial Sequence
  Non-cyclic GFR-binding peptide
  MOD_RES (4), (5), (36), (38): Xaa is C or S
ASPXXVSQDLSATSILYYIGKTPKILRKHRMIVKSXKX

SEQ ID NO: 7100 - protein, 37 aa, Artificial Sequence
  Non-cyclic GFR-binding peptide
  MOD_RES (34), (36): Xaa is C or S
  MOD_RES (14), (15), (16), (17), (18): Xaa is A or G
  MOD_RES (19), (20), (21), (22): Xaa is A or G or is absent
APTQLSPISVLYKXXXXXXXXXLKYHYNMVVRAXGXH

SEQ ID NO: 7101 - protein, 33 aa, Artificial Sequence
  Non-cyclic GFR-binding peptide
  MOD_RES (14), (15), (16), (17), (18): Xaa is A or G
  MOD_RES (19), (20), (21), (22): Xaa is A or G or is absent
VPTELSATSMLYYXXXXXXXXXLRKHREMVVEG

SEQ ID NO: 7102 - protein, 30 aa, Artificial Sequence
  Non-cyclic GFR-binding peptide
VSQDLSAISILYLIGKTPKILKNYQMIVKS

SEQ ID NO: 7103 - protein, 38 aa, Artificial Sequence
  Non-cyclic GFR-binding peptide
  MOD_RES (1), (2), (36), (38): Xaa is C or S
  MOD_RES (16), (17), (18), (19), (20): Xaa is A or G
  MOD_RES (21), (22), (23), (24): Xaa is A or G or is absent
XXAPTQLSAISVLYLXXXXXXXXXLKNYQNMVVRAXGX

SEQ ID NO: 7104 - protein, 36 aa, Artificial Sequence
  Non-cyclic GFR-binding peptide
  MOD_RES (3), (4): Xaa is C or S
  MOD_RES (18), (19), (20), (21), (22): Xaa is A or G
  MOD_RES (23), (24), (25), (26): Xaa is A or G or is absent
APXXVPQALNAISILYFXXXXXXXXXLKKYRMIVRS

SEQ ID NO: 7105 - protein, 39 aa, Artificial Sequence
  Non-cyclic GFR-binding peptide
  MOD_RES (6), (38): Xaa is C or S
VTKPTXAPTKLSPISVLYKDDSSNVILKYHYNMVVRSXG

SEQ ID NO: 7106 - protein, 35 aa, Artificial Sequence
  Non-cyclic GFR-binding peptide
  MOD_RES (4), (4): Xaa is C or S
KPTXAPTKLSATSVLYYDDSSNVILRKHRNMVVRS

SEQ ID NO: 7107 - protein, 38 aa, Artificial Sequence
  Non-cyclic GFR-binding peptide
  MOD_RES (2), (3), (35), (37): Xaa is C or S
PXXAPTQLSATSVLYYDDSSNVILRKHRNMVVRAXGXH

SEQ ID NO: 7108 - protein, 41 aa, Artificial Sequence
  Non-cyclic GFR-binding peptide
  MOD_RES (4), (41): Xaa is C or S
NVQXRPTQVQLSAISVLYLEIVRKKPIFLKNYQTLEDHLAX

SEQ ID NO: 7109 - protein, 40 aa, Artificial Sequence
  Non-cyclic GFR-binding peptide
  MOD_RES (4), (5), (40): Xaa is C or S
  MOD_RES (19), (20), (21), (22), (23): Xaa is A or G
  MOD_RES (24), (25), (26), (27): Xaa is A or G or is absent
GKAXXVPTKLSATSVLYYXXXXXXXXXLRKHREGMSVAEX

SEQ ID NO: 7110 - protein, 42 aa, Artificial Sequence
  Non-cyclic GFR-binding peptide
  MOD_RES (2), (39), (41): Xaa is C or S
  MOD_RES (18), (19), (20), (21), (22): Xaa is A or G
  MOD_RES (23), (24), (25), (26): Xaa is A or G or is absent
QXRPTQVQLSPISVLYKXXXXXXXXXLKYHYTLEDHLAXKXE

SEQ ID NO: 7111 - protein, 40 aa, Artificial Sequence
  Non-cyclic GFR-binding peptide
  MOD_RES (6), (7), (38), (40): Xaa is C or S
ASASPXXVSQDLNAISILYFIGKTPKILKKYRMIVKSXKX

SEQ ID NO: 7112 - protein, 38 aa, Artificial Sequence
  Non-cyclic GFR-binding peptide
  MOD_RES (5), (6), (38): Xaa is C or S
VPKAXXAPTKLSAISVLYLDSSNNVILKNYQNMVVKAX

SEQ ID NO: 7113 - protein, 34 aa, Artificial Sequence
  Non-cyclic GFR-binding peptide
  MOD_RES (1), (34): Xaa is C or S
  MOD_RES (15), (16), (17), (18), (19): Xaa is A or G
  MOD_RES (20), (21), (22), (23): Xaa is A or G or is absent
XVPQALNAISILYFXXXXXXXXXLKKYRMIVRSX

SEQ ID NO: 7114 - protein, 38 aa, Artificial Sequence
  Non-cyclic GFR-binding peptide
  MOD_RES (6), (7), (38): Xaa is C or S
ASASPXXVSQDLNAISILYFIGKTPKILKKYRMIVKSX

SEQ ID NO: 7115 - protein, 37 aa, Artificial Sequence
  Non-cyclic GFR-binding peptide
  MOD_RES (1), (36): Xaa is C or S
  MOD_RES (15), (16), (17), (18), (19): Xaa is A or G
  MOD_RES (20), (21), (22), (23): Xaa is A or G or is absent
XVPTKLNAISVLYFXXXXXXXXXLKKYREGMSVAEXG

SEQ ID NO: 7116 - protein, 36 aa, Artificial Sequence
  Non-cyclic GFR-binding peptide
  MOD_RES (1), (2), (36): Xaa is C or S
  MOD_RES (16), (17), (18), (19), (20): Xaa is A or G
  MOD_RES (21), (22), (23), (24): Xaa is A or G or is absent
XXAPTKLSAISVLYLXXXXXXXXXLKNYQNMVVKAX

SEQ ID NO: 7117 - protein, 39 aa, Artificial Sequence
  Non-cyclic GFR-binding peptide
  MOD_RES (5), (6), (37), (39): Xaa is C or S
SASPXXVPQDLNAISILYFVGRTPKVLKKYRMVVKSXKX

SEQ ID NO: 7118 - protein, 38 aa, Artificial Sequence
  Non-cyclic GFR-binding peptide
  MOD_RES (3), (4), (37): Xaa is C or S
KAXXVPTKLNAISVLYFDDMGVPTLKKYREGMSVAEXG

SEQ ID NO: 7119 - protein, 37 aa, Artificial Sequence
  Non-cyclic GFR-binding peptide
  MOD_RES (2), (2): Xaa is C or S
  MOD_RES (18), (19), (20), (21), (22): Xaa is A or G
  MOD_RES (23), (24), (25), (26): Xaa is A or G or is absent
QXRPTQVQLSPISVLYKXXXXXXXXXLKYHYTLEDHL

SEQ ID NO: 7120 - protein, 34 aa, Artificial Sequence
  Non-cyclic GFR-binding peptide
  MOD_RES (3), (4): Xaa is C or S
SPXXVPQDLSAISILYLVGRTPKVLKNYQMVVKS

SEQ ID NO: 7121 - protein, 38 aa, Artificial Sequence
  Non-cyclic GFR-binding peptide
  MOD_RES (2), (2): Xaa is C or S
  MOD_RES (18), (19), (20), (21), (22): Xaa is A or G
  MOD_RES (23), (24), (25), (26): Xaa is A or G or is absent
QXRPTQVQLSAISVLYLXXXXXXXXXLKNYQTLEDHLA

SEQ ID NO: 7122 - protein, 41 aa, Artificial Sequence
  Non-cyclic GFR-binding peptide
  MOD_RES (5), (6), (40): Xaa is C or S
  MOD_RES (20), (21), (22), (23), (24): Xaa is A or G
  MOD_RES (25), (26), (27), (28): Xaa is A or G or is absent
IPKAXXVPTELNAISMLYFXXXXXXXXXLKKYREMVVEGXG

SEQ ID NO: 7123 - protein, 38 aa, Artificial Sequence
  Non-cyclic GFR-binding peptide
  MOD_RES (4), (5), (36), (38): Xaa is C or S
ASPXXVPQDLSPISILYKVGRTPKVLKYHYMVVKSXKX

SEQ ID NO: 7124 - protein, 35 aa, Artificial Sequence
  Non-cyclic GFR-binding peptide
  MOD_RES (2), (3): Xaa is C or S
  MOD_RES (17), (18), (19), (20), (21): Xaa is A or G
  MOD_RES (22), (23), (24), (25): Xaa is A or G or is absent
AXXAPTKLSAISVLYLXXXXXXXXXLKNYQNMVVK

SEQ ID NO: 7125 - protein, 44 aa, Artificial Sequence
  Non-cyclic GFR-binding peptide
  MOD_RES (5), (42), (44): Xaa is C or S
  MOD_RES (21), (22), (23), (24), (25): Xaa is A or G
  MOD_RES (26), (27), (28), (29): Xaa is A or G or is absent
RNVQXRPTQVQLSATSVLYYXXXXXXXXXLRKHRTLEDHLAXKX

SEQ ID NO: 7126 - protein, 37 aa, Artificial Sequence
  Non-cyclic GFR-binding peptide
  MOD_RES (4), (5), (37): Xaa is C or S
PKAXXVPTELSPISMLYKDEYDKVVLKYHYEMVVEGX

SEQ ID NO: 7127 - protein, 38 aa, Artificial Sequence
  Non-cyclic GFR-binding peptide
  MOD_RES (2), (2): Xaa is C or S
  MOD_RES (18), (19), (20), (21), (22): Xaa is A or G
  MOD_RES (23), (24), (25), (26): Xaa is A or G or is absent
QXRPTQVQLSATSVLYYXXXXXXXXXLRKHRTLEDHLA

SEQ ID NO: 7128 - protein, 37 aa, Artificial Sequence
  Non-cyclic GFR-binding peptide
  MOD_RES (5), (5): Xaa is C or S
  MOD_RES (19), (20), (21), (22), (23): Xaa is A or G
  MOD_RES (24), (25), (26), (27): Xaa is A or G or is absent
TKPTXAPTKLSATSVLYYXXXXXXXXXLRKHRNMVVR

SEQ ID NO: 7129 - protein, 37 aa, Artificial Sequence
  Non-cyclic GFR-binding peptide
  MOD_RES (5), (37): Xaa is C or S
TKPTXAPTKLSATSVLYYDDSSNVILRKHRNMVVRSX

SEQ ID NO: 7130 - protein, 36 aa, Artificial Sequence
  Non-cyclic GFR-binding peptide
  MOD_RES (1), (2), (33), (35): Xaa is C or S
XXVPQALSAISILYLVGRKPKVLKNYQMIVRSXKXS

SEQ ID NO: 7131 - protein, 36 aa, Artificial Sequence
  Non-cyclic GFR-binding peptide
  MOD_RES (3), (4), (36): Xaa is C or S
KAXXVPTELNAISMLYFDEYDKVVLKKYREMVVEGX

SEQ ID NO: 7132 - protein, 37 aa, Artificial Sequence
  Non-cyclic GFR-binding peptide
  MOD_RES (35), (37): Xaa is C or S
TQVQLSAISVLYLEIVRKKPIFLKNYQTLEDHLAXKX

SEQ ID NO: 7133 - protein, 36 aa, Artificial Sequence
  Non-cyclic GFR-binding peptide
  MOD_RES (5), (6): Xaa is C or S
VPKPXXAPTQLSAISVLYLDDSSNVILKNYQNMVVR

SEQ ID NO: 7134 - protein, 40 aa, Artificial Sequence
  Non-cyclic GFR-binding peptide
  MOD_RES (1), (2), (37), (39): Xaa is C or S
  MOD_RES (16), (17), (18), (19), (20): Xaa is A or G
  MOD_RES (21), (22), (23), (24): Xaa is A or G or is absent
XXVPTKLSAISVLYLXXXXXXXXXLKNYQEGMSVAEXGXR

SEQ ID NO: 7135 - protein, 37 aa, Artificial Sequence
  Non-cyclic GFR-binding peptide
  MOD_RES (1), (2), (34), (36): Xaa is C or S
XXVPTELSPISMLYKDENEKVVLKYHYDMVVEGXGXR

SEQ ID NO: 7136 - protein, 35 aa, Artificial Sequence
  Non-cyclic GFR-binding peptide
  MOD_RES (3), (4), (35): Xaa is C or S
SPXXVPQDLSPISILYKVGRTPKVLKYHYMVVKSX

SEQ ID NO: 7137 - protein, 35 aa, Artificial Sequence
  Non-cyclic GFR-binding peptide
  MOD_RES (4), (5): Xaa is C or S
AAPXXVPQALSAISILYLVGRKPKVLKNYQMIVRS

SEQ ID NO: 7138 - protein, 35 aa, Artificial Sequence
  Non-cyclic GFR-binding peptide
RPTQVQLNAISVLYFEIVRKKPIFLKKYRTLEDHL

SEQ ID NO: 7139 - protein, 38 aa, Artificial Sequence
  Non-cyclic GFR-binding peptide
  MOD_RES (4), (5): Xaa is C or S
  MOD_RES (19), (20), (21), (22), (23): Xaa is A or G
  MOD_RES (24), (25), (26), (27): Xaa is A or G or is absent
PKPXXAPTQLSPISVLYKXXXXXXXXXLKYHYNMVVRA

SEQ ID NO: 7140 - protein, 37 aa, Artificial Sequence
  Non-cyclic GFR-binding peptide
  MOD_RES (5), (6), (37): Xaa is C or S
SASPXXVPQDLNAISILYFVGRTPKVLKKYRMVVKSX

SEQ ID NO: 7141 - protein, 34 aa, Artificial Sequence
  Non-cyclic GFR-binding peptide
  MOD_RES (14), (15), (16), (17), (18): Xaa is A or G
  MOD_RES (19), (20), (21), (22): Xaa is A or G or is absent
TQVQLNAISVLYFXXXXXXXXXLKKYRTLEDHLA

SEQ ID NO: 7142 - protein, 39 aa, Artificial Sequence
  Non-cyclic GFR-binding peptide
  MOD_RES (2), (3), (36), (38): Xaa is C or S
AXXVPTKLSAISVLYLDDMGVPTLKNYQEGMSVAEXGXR

SEQ ID NO: 7143 - protein, 40 aa, Artificial Sequence
  Non-cyclic GFR-binding peptide
  MOD_RES (3), (4), (37), (39): Xaa is C or S
  MOD_RES (18), (19), (20), (21), (22): Xaa is A or G
  MOD_RES (23), (24), (25), (26): Xaa is A or G or is absent
SPXXVPQDLSATSILYYXXXXXXXXXLRKHRMVVKSXKXS

SEQ ID NO: 7144 - protein, 37 aa, Artificial Sequence
  Non-cyclic GFR-binding peptide
  MOD_RES (4), (5), (37): Xaa is C or S
PKAXXVPTELNAISMLYFDEYDKVVLKKYREMVVEGX

SEQ ID NO: 7145 - protein, 41 aa, Artificial Sequence
  Non-cyclic GFR-binding peptide
  MOD_RES (4), (5), (38), (40): Xaa is C or S
  MOD_RES (19), (20), (21), (22), (23): Xaa is A or G
  MOD_RES (24), (25), (26), (27): Xaa is A or G or is absent
ASPXXVSQDLSAISILYLXXXXXXXXXLKNYQMIVKSXKXS

SEQ ID NO: 7146 - protein, 37 aa, Artificial Sequence
  Non-cyclic GFR-binding peptide
  MOD_RES (1), (2), (36): Xaa is C or S
  MOD_RES (16), (17), (18), (19), (20): Xaa is A or G
  MOD_RES (21), (22), (23), (24): Xaa is A or G or is absent
XXAPTKLNAISVLYFXXXXXXXXXLKKYRNMVVKAXG

SEQ ID NO: 7147 - protein, 42 aa, Artificial Sequence
  Non-cyclic GFR-binding peptide
  MOD_RES (6), (7), (39), (41): Xaa is C or S
TVPKPXXAPTQLSPISVLYKDDSSNVILKYHYNMVVRAXGXH

SEQ ID NO: 7148 - protein, 38 aa, Artificial Sequence
  Non-cyclic GFR-binding peptide
  MOD_RES (4), (5), (37): Xaa is C or S
PKPXXAPTQLSPISVLYKDDSSNVILKYHYNMVVRAXG

SEQ ID NO: 7149 - protein, 39 aa, Artificial Sequence
  Non-cyclic GFR-binding peptide
  MOD_RES (5), (6), (38): Xaa is C or S
VPKPXXAPTQLSATSVLYYDDSSNVILRKHRNMVVRAXG

SEQ ID NO: 7150 - protein, 40 aa, Artificial Sequence
  Non-cyclic GFR-binding peptide
  MOD_RES (3), (4), (39): Xaa is C or S
  MOD_RES (18), (19), (20), (21), (22): Xaa is A or G
  MOD_RES (23), (24), (25), (26): Xaa is A or G or is absent
KAXXVPTKLNAISVLYFXXXXXXXXXLKKYREGMSVAEXG

SEQ ID NO: 7151 - protein, 38 aa, Artificial Sequence
  Non-cyclic GFR-binding peptide
  MOD_RES (4), (5), (36), (38): Xaa is C or S
ASPXXVPQDLSATSILYYVGRTPKVLRKHRMVVKSXKX

SEQ ID NO: 7152 - protein, 36 aa, Artificial Sequence
  Non-cyclic GFR-binding peptide
  MOD_RES (1), (2), (35): Xaa is C or S
  MOD_RES (16), (17), (18), (19), (20): Xaa is A or G
  MOD_RES (21), (22), (23), (24): Xaa is A or G or is absent
XXVPQALSATSILYYXXXXXXXXXLRKHRMIVRSXK

SEQ ID NO: 7153 - protein, 40 aa, Artificial Sequence
  Non-cyclic GFR-binding peptide
  MOD_RES (6), (7), (40): Xaa is C or S
  MOD_RES (21), (22), (23), (24), (25): Xaa is A or G
  MOD_RES (26), (27), (28), (29): Xaa is A or G or is absent
ASAAPXXVPQALSAISILYLXXXXXXXXXLKNYQMIVRSX

SEQ ID NO: 7154 - protein, 35 aa, Artificial Sequence
  Non-cyclic GFR-binding peptide
  MOD_RES (3), (4), (35): Xaa is C or S
SPXXVSQDLSATSILYYIGKTPKILRKHRMIVKSX

SEQ ID NO: 7155 - protein, 38 aa, Artificial Sequence
  Non-cyclic GFR-binding peptide
  MOD_RES (4), (5): Xaa is C or S
  MOD_RES (19), (20), (21), (22), (23): Xaa is A or G
  MOD_RES (24), (25), (26), (27): Xaa is A or G or is absent
PKAXXVPTELSPISMLYKXXXXXXXXXLKYHYDMVVEG

SEQ ID NO: 7156 - protein, 34 aa, Artificial Sequence
  Non-cyclic GFR-binding peptide
  MOD_RES (34), (34): Xaa is C or S
  MOD_RES (14), (15), (16), (17), (18): Xaa is A or G
  MOD_RES (19), (20), (21), (22): Xaa is A or G or is absent
APTKLSAISVLYLXXXXXXXXXLKNYQNMVVRSX

SEQ ID NO: 7157 - protein, 43 aa, Artificial Sequence
  Non-cyclic GFR-binding peptide
  MOD_RES (4), (41), (43): Xaa is C or S
  MOD_RES (20), (21), (22), (23), (24): Xaa is A or G
  MOD_RES (25), (26), (27), (28): Xaa is A or G or is absent
NVQXRPTQVQLSAISVLYLXXXXXXXXXLKNYQTLEDHLAXKX

SEQ ID NO: 7158 - protein, 37 aa, Artificial Sequence
  Non-cyclic GFR-binding peptide
  MOD_RES (1), (2), (34), (36): Xaa is C or S
XXAPTKLSAISVLYLDSSNNVILKNYQNMVVKAXGXH

SEQ ID NO: 7159 - protein, 40 aa, Artificial Sequence
  Non-cyclic GFR-binding peptide
  MOD_RES (6), (7), (40): Xaa is C or S
  MOD_RES (21), (22), (23), (24), (25): Xaa is A or G
  MOD_RES (26), (27), (28), (29): Xaa is A or G or is absent
ASASPXXVSQDLNAISILYFXXXXXXXXXLKKYRMIVKSX

SEQ ID NO: 7160 - protein, 35 aa, Artificial Sequence
  Non-cyclic GFR-binding peptide
  MOD_RES (1), (33), (35): Xaa is C or S
XAPTKLNAISVLYFDSSNNVILKKYRNMVVKAXGX

SEQ ID NO: 7161 - protein, 34 aa, Artificial Sequence
  Non-cyclic GFR-binding peptide
  MOD_RES (33), (33): Xaa is C or S
  MOD_RES (14), (15), (16), (17), (18): Xaa is A or G
  MOD_RES (19), (20), (21), (22): Xaa is A or G or is absent
VSQDLSPISILYKXXXXXXXXXLKYHYMIVKSXK

SEQ ID NO: 7162 - protein, 32 aa, Artificial Sequence
  Non-cyclic GFR-binding peptide
  MOD_RES (31), (31): Xaa is C or S
VPQALSPISILYKVGRKPKVLKYHYMIVRSXK

SEQ ID NO: 7163 - protein, 36 aa, Artificial Sequence
  Non-cyclic GFR-binding peptide
  MOD_RES (36), (36): Xaa is C or S
  MOD_RES (15), (16), (17), (18), (19): Xaa is A or G
  MOD_RES (20), (21), (22), (23): Xaa is A or G or is absent
PTQVQLSATSVLYYXXXXXXXXXLRKHRTLEDHLAX

SEQ ID NO: 7164 - protein, 36 aa, Artificial Sequence
  Non-cyclic GFR-binding peptide
  MOD_RES (5), (6): Xaa is C or S
VPKAXXAPTKLSAISVLYLDSSNNVILKNYQNMVVK

SEQ ID NO: 7165 - protein, 35 aa, Artificial Sequence
  Non-cyclic GFR-binding peptide
  MOD_RES (2), (3), (35): Xaa is C or S
PXXAPTKLSATSVLYYDDSSNVILRKHRNMVVRSX

SEQ ID NO: 7166 - protein, 39 aa, Artificial Sequence
  Non-cyclic GFR-binding peptide
  MOD_RES (4), (36), (38): Xaa is C or S
KPTXAPTKLSAISVLYLDDSSNVILKNYQNMVVRSXGXH

SEQ ID NO: 7167 - protein, 38 aa, Artificial Sequence
  Non-cyclic GFR-binding peptide
  MOD_RES (2), (3), (37): Xaa is C or S
  MOD_RES (17), (18), (19), (20), (21): Xaa is A or G
  MOD_RES (22), (23), (24), (25): Xaa is A or G or is absent
AXXAPTKLNAISVLYFXXXXXXXXXLKKYRNMVVKAXG

SEQ ID NO: 7168 - protein, 42 aa, Artificial Sequence
  Non-cyclic GFR-binding peptide
  MOD_RES (6), (7), (39), (41): Xaa is C or S
AVPKAXXAPTKLNAISVLYFDSSNNVILKKYRNMVVKAXGXH

SEQ ID NO: 7169 - protein, 40 aa, Artificial Sequence
  Non-cyclic GFR-binding peptide
  MOD_RES (6), (7), (39): Xaa is C or S
KIPKAXXVPTELSPISMLYKDENEKVVLKYHYDMVVEGXG

SEQ ID NO: 7170 - protein, 37 aa, Artificial Sequence
  Non-cyclic GFR-binding peptide
  MOD_RES (1), (2), (34), (36): Xaa is C or S
XXAPTKLSPISVLYKDDSSNVILKYHYNMVVRSXGXH

SEQ ID NO: 7171 - protein, 35 aa, Artificial Sequence
  Non-cyclic GFR-binding peptide
  MOD_RES (4), (5): Xaa is C or S
AAPXXVPQALSPISILYKVGRKPKVLKYHYMIVRS

SEQ ID NO: 7172 - protein, 40 aa, Artificial Sequence
  Non-cyclic GFR-binding peptide
  MOD_RES (5), (39): Xaa is C or S
  MOD_RES (19), (20), (21), (22), (23): Xaa is A or G
  MOD_RES (24), (25), (26), (27): Xaa is A or G or is absent
TKPTXAPTKLSPISVLYKXXXXXXXXXLKYHYNMVVRSXG

SEQ ID NO: 7173 - protein, 42 aa, Artificial Sequence
  Non-cyclic GFR-binding peptide
  MOD_RES (4), (41): Xaa is C or S
NVQXRPTQVQLNAISVLYFEIVRKKPIFLKKYRTLEDHLAXK

SEQ ID NO: 7174 - protein, 37 aa, Artificial Sequence
  Non-cyclic GFR-binding peptide
  MOD_RES (5), (6), (37): Xaa is C or S
SAAPXXVPQALSATSILYYVGRKPKVLRKHRMIVRSX

SEQ ID NO: 7175 - protein, 40 aa, Artificial Sequence
  Non-cyclic GFR-binding peptide
  MOD_RES (4), (4): Xaa is C or S
NVQXRPTQVQLSAISVLYLEIVRKKPIFLKNYQTLEDHLA

SEQ ID NO: 7176 - protein, 35 aa, Artificial Sequence
  Non-cyclic GFR-binding peptide
  MOD_RES (34), (34): Xaa is C or S
  MOD_RES (14), (15), (16), (17), (18): Xaa is A or G
  MOD_RES (19), (20), (21), (22): Xaa is A or G or is absent
APTQLSAISVLYLXXXXXXXXXLKNYQNMVVRAXG

SEQ ID NO: 7177 - protein, 34 aa, Artificial Sequence
  Non-cyclic GFR-binding peptide
  MOD_RES (1), (2): Xaa is C or S
XXVPTKLNAISVLYFDDMGVPTLKKYREGMSVAE

SEQ ID NO: 7178 - protein, 35 aa, Artificial Sequence
  Non-cyclic GFR-binding peptide
  MOD_RES (3), (4): Xaa is C or S
KAXXAPTKLNAISVLYFDSSNNVILKKYRNMVVKA

SEQ ID NO: 7179 - protein, 35 aa, Artificial Sequence
  Non-cyclic GFR-binding peptide
  MOD_RES (1), (35): Xaa is C or S
  MOD_RES (15), (16), (17), (18), (19): Xaa is A or G
  MOD_RES (20), (21), (22), (23): Xaa is A or G or is absent
XAPTKLSAISVLYLXXXXXXXXXLKNYQNMVVRSX

SEQ ID NO: 7180 - protein, 37 aa, Artificial Sequence
  Non-cyclic GFR-binding peptide
  MOD_RES (2), (3), (37): Xaa is C or S
  MOD_RES (17), (18), (19), (20), (21): Xaa is A or G
  MOD_RES (22), (23), (24), (25): Xaa is A or G or is absent
PXXAPTQLSATSVLYYXXXXXXXXXLRKHRNMVVRAX

SEQ ID NO: 7181 - protein, 38 aa, Artificial Sequence
  Non-cyclic GFR-binding peptide
  MOD_RES (2), (36), (38): Xaa is C or S
  MOD_RES (16), (17), (18), (19), (20): Xaa is A or G
  MOD_RES (21), (22), (23), (24): Xaa is A or G or is absent
TXAPTKLSAISVLYLXXXXXXXXXLKNYQNMVVRSXGX

SEQ ID NO: 7182 - protein, 43 aa, Artificial Sequence
  Non-cyclic GFR-binding peptide
  MOD_RES (5), (6), (40), (42): Xaa is C or S
  MOD_RES (20), (21), (22), (23), (24): Xaa is A or G
  MOD_RES (25), (26), (27), (28): Xaa is A or G or is absent
IPKAXXVPTELSPISMLYKXXXXXXXXXLKYHYEMVVEGXGXR

SEQ ID NO: 7183 - protein, 39 aa, Artificial Sequence
  Non-cyclic GFR-binding peptide
  MOD_RES (5), (6), (39): Xaa is C or S
  MOD_RES (20), (21), (22), (23), (24): Xaa is A or G
  MOD_RES (25), (26), (27), (28): Xaa is A or G or is absent
SAAPXXVPQALSPISILYKXXXXXXXXXLKYHYMIVRSX

SEQ ID NO: 7184 - protein, 38 aa, Artificial Sequence
  Non-cyclic GFR-binding peptide
  MOD_RES (3), (4), (35), (37): Xaa is C or S
APXXVPQALSAISILYLVGRKPKVLKNYQMIVRSXKXS

SEQ ID NO: 7185 - protein, 38 aa, Artificial Sequence
  Non-cyclic GFR-binding peptide
  MOD_RES (3), (4), (38): Xaa is C or S
  MOD_RES (18), (19), (20), (21), (22): Xaa is A or G
  MOD_RES (23), (24), (25), (26): Xaa is A or G or is absent
KPXXAPTKLSATSVLYYXXXXXXXXXLRKHRNMVVRSX

SEQ ID NO: 7186 - protein, 38 aa, Artificial Sequence
  Non-cyclic GFR-binding peptide
  MOD_RES (6), (7), (38): Xaa is C or S
ASASPXXVPQDLNAISILYFVGRTPKVLKKYRMVVKSX

SEQ ID NO: 7187 - protein, 39 aa, Artificial Sequence
  Non-cyclic GFR-binding peptide
  MOD_RES (37), (39): Xaa is C or S
  MOD_RES (16), (17), (18), (19), (20): Xaa is A or G
  MOD_RES (21), (22), (23), (24): Xaa is A or G or is absent
RPTQVQLSPISVLYKXXXXXXXXXLKYHYTLEDHLAXKX

SEQ ID NO: 7188 - protein, 34 aa, Artificial Sequence
  Non-cyclic GFR-binding peptide
  MOD_RES (2), (3): Xaa is C or S
AXXVPTELNAISMLYFDENEKVVLKKYRDMVVEG

SEQ ID NO: 7189 - protein, 42 aa, Artificial Sequence
  Non-cyclic GFR-binding peptide
  MOD_RES (4), (41): Xaa is C or S
  MOD_RES (20), (21), (22), (23), (24): Xaa is A or G
  MOD_RES (25), (26), (27), (28): Xaa is A or G or is absent
NVQXRPTQVQLNAISVLYFXXXXXXXXXLKKYRTLEDHLAXK

SEQ ID NO: 7190 - protein, 36 aa, Artificial Sequence
  Non-cyclic GFR-binding peptide
  MOD_RES (5), (6): Xaa is C or S
VPKAXXAPTKLSPISVLYKDSSNNVILKYHYNMVVK

SEQ ID NO: 7191 - protein, 40 aa, Artificial Sequence
  Non-cyclic GFR-binding peptide
  MOD_RES (6), (7): Xaa is C or S
  MOD_RES (21), (22), (23), (24), (25): Xaa is A or G
  MOD_RES (26), (27), (28), (29): Xaa is A or G or is absent
TVPKPXXAPTQLSATSVLYYXXXXXXXXXLRKHRNMVVRA

SEQ ID NO: 7192 - protein, 41 aa, Artificial Sequence
  Non-cyclic GFR-binding peptide
  MOD_RES (4), (5), (39), (41): Xaa is C or S
  MOD_RES (19), (20), (21), (22), (23): Xaa is A or G
  MOD_RES (24), (25), (26), (27): Xaa is A or G or is absent
PKAXXVPTELSPISMLYKXXXXXXXXXLKYHYEMVVEGXGX

SEQ ID NO: 7193 - protein, 37 aa, Artificial Sequence
  Non-cyclic GFR-binding peptide
  MOD_RES (3), (4), (36): Xaa is C or S
KAXXVPTELSPISMLYKDENEKVVLKYHYDMVVEGXG

SEQ ID NO: 7194 - protein, 42 aa, Artificial Sequence
  Non-cyclic GFR-binding peptide
  MOD_RES (6), (7), (40), (42): Xaa is C or S
  MOD_RES (21), (22), (23), (24), (25): Xaa is A or G
  MOD_RES (26), (27), (28), (29): Xaa is A or G or is absent
ASAAPXXVPQALSPISILYKXXXXXXXXXLKYHYMIVRSXKX

SEQ ID NO: 7195 - protein, 38 aa, Artificial Sequence
  Non-cyclic GFR-binding peptide
  MOD_RES (4), (36), (38): Xaa is C or S
KPTXAPTKLSATSVLYYDDSSNVILRKHRNMVVRSXGX

SEQ ID NO: 7196 - protein, 36 aa, Artificial Sequence
  Non-cyclic GFR-binding peptide
  MOD_RES (1), (2): Xaa is C or S
  MOD_RES (16), (17), (18), (19), (20): Xaa is A or G
  MOD_RES (21), (22), (23), (24): Xaa is A or G or is absent
XXVPTKLSAISVLYLXXXXXXXXXLKNYQEGMSVAE

SEQ ID NO: 7197 - protein, 35 aa, Artificial Sequence
  Non-cyclic GFR-binding peptide
  MOD_RES (2), (3), (35): Xaa is C or S
PXXAPTQLSPISVLYKDDSSNVILKYHYNMVVRAX

SEQ ID NO: 7198 - protein, 33 aa, Artificial Sequence
  Non-cyclic GFR-binding peptide
  MOD_RES (2), (3): Xaa is C or S
PXXAPTQLSATSVLYYDDSSNVILRKHRNMVVR

SEQ ID NO: 7199 - protein, 41 aa, Artificial Sequence
  Non-cyclic GFR-binding peptide
  MOD_RES (6), (7), (38), (40): Xaa is C or S
ASASPXXVPQDLNAISILYFVGRTPKVLKKYRMVVKSXKXS

SEQ ID NO: 7200 - protein, 32 aa, Artificial Sequence
  Non-cyclic GFR-binding peptide
  MOD_RES (14), (15), (16), (17), (18): Xaa is A or G
  MOD_RES (19), (20), (21), (22): Xaa is A or G or is absent
VPQDLNAISILYFXXXXXXXXXLKKYRMVVKS

SEQ ID NO: 7201 - protein, 38 aa, Artificial Sequence
  Non-cyclic GFR-binding peptide
  MOD_RES (5), (6): Xaa is C or S
VGKAXXVPTKLSATSVLYYDDMGVPTLRKHREGMSVAE

SEQ ID NO: 7202 - protein, 34 aa, Artificial Sequence
  Non-cyclic GFR-binding peptide
  MOD_RES (3), (4): Xaa is C or S
SPXXVPQDLSPISILYKVGRTPKVLKYHYMVVKS

SEQ ID NO: 7203 - protein, 37 aa, Artificial Sequence
  Non-cyclic GFR-binding peptide
  MOD_RES (1), (35), (37): Xaa is C or S
  MOD_RES (15), (16), (17), (18), (19): Xaa is A or G
  MOD_RES (20), (21), (22), (23): Xaa is A or G or is absent
XAPTKLNAISVLYFXXXXXXXXXLKKYRNMVVKAXGX

SEQ ID NO: 7204 - protein, 35 aa, Artificial Sequence
  Non-cyclic GFR-binding peptide
  MOD_RES (33), (35): Xaa is C or S
  MOD_RES (14), (15), (16), (17), (18): Xaa is A or G
  MOD_RES (19), (20), (21), (22): Xaa is A or G or is absent
VPQDLSATSILYYXXXXXXXXXLRKHRMVVKSXKX

SEQ ID NO: 7205 - protein, 38 aa, Artificial Sequence
  Non-cyclic GFR-binding peptide
  MOD_RES (2), (3), (37): Xaa is C or S
  MOD_RES (17), (18), (19), (20), (21): Xaa is A or G
  MOD_RES (22), (23), (24), (25): Xaa is A or G or is absent
AXXVPTELNAISMLYFXXXXXXXXXLKKYRDMVVEGXG

SEQ ID NO: 7206 - protein, 36 aa, Artificial Sequence
  Non-cyclic GFR-binding peptide
  MOD_RES (1), (2): Xaa is C or S
  MOD_RES (16), (17), (18), (19), (20): Xaa is A or G
  MOD_RES (21), (22), (23), (24): Xaa is A or G or is absent
XXVPTKLSATSVLYYXXXXXXXXXLRKHREGMSVAE

SEQ ID NO: 7207 - protein, 41 aa, Artificial Sequence
  Non-cyclic GFR-binding peptide
  MOD_RES (1), (38), (40): Xaa is C or S
XRPTQVQLSATSVLYYEIVRKKPIFLRKHRTLEDHLAXKXE

SEQ ID NO: 7208 - protein, 38 aa, Artificial Sequence
  Non-cyclic GFR-binding peptide
  MOD_RES (3), (4), (38): Xaa is C or S
  MOD_RES (18), (19), (20), (21), (22): Xaa is A or G
  MOD_RES (23), (24), (25), (26): Xaa is A or G or is absent
KAXXVPTELSATSMLYYXXXXXXXXXLRKHRDMVVEGX

SEQ ID NO: 7209 - protein, 33 aa, Artificial Sequence
  Non-cyclic GFR-binding peptide
  MOD_RES (1), (1): Xaa is C or S
  MOD_RES (15), (16), (17), (18), (19): Xaa is A or G
  MOD_RES (20), (21), (22), (23): Xaa is A or G or is absent
XVPQDLNAISILYFXXXXXXXXXLKKYRMVVKS

SEQ ID NO: 7210 - protein, 38 aa, Artificial Sequence
  Non-cyclic GFR-binding peptide
  MOD_RES (2), (3), (37): Xaa is C or S
  MOD_RES (17), (18), (19), (20), (21): Xaa is A or G
  MOD_RES (22), (23), (24), (25): Xaa is A or G or is absent
PXXAPTKLSATSVLYYXXXXXXXXXLRKHRNMVVRSXG

SEQ ID NO: 7211 - protein, 36 aa, Artificial Sequence
  Non-cyclic GFR-binding peptide
  MOD_RES (1), (2), (35): Xaa is C or S
  MOD_RES (16), (17), (18), (19), (20): Xaa is A or G
  MOD_RES (21), (22), (23), (24): Xaa is A or G or is absent
XXVPQDLSPISILYKXXXXXXXXXLKYHYMVVKSXK

SEQ ID NO: 7212 - protein, 35 aa, Artificial Sequence
  Non-cyclic GFR-binding peptide
  MOD_RES (34), (34): Xaa is C or S
  MOD_RES (14), (15), (16), (17), (18): Xaa is A or G
  MOD_RES (19), (20), (21), (22): Xaa is A or G or is absent
APTKLSAISVLYLXXXXXXXXXLKNYQNMVVKAXG

SEQ ID NO: 7213 - protein, 37 aa, Artificial Sequence
  Non-cyclic GFR-binding peptide
  MOD_RES (2), (3), (37): Xaa is C or S
  MOD_RES (17), (18), (19), (20), (21): Xaa is A or G
  MOD_RES (22), (23), (24), (25): Xaa is A or G or is absent
AXXVPTELNAISMLYFXXXXXXXXXLKKYREMVVEGX

SEQ ID NO: 7214 - protein, 38 aa, Artificial Sequence
  Non-cyclic GFR-binding peptide
  MOD_RES (6), (7), (38): Xaa is C or S
ASAAPXXVPQALSATSILYYVGRKPKVLRKHRMIVRSX

SEQ ID NO: 7215 - protein, 30 aa, Artificial Sequence
  Non-cyclic GFR-binding peptide
VSQDLSPISILYKIGKTPKILKYHYMIVKS

SEQ ID NO: 7216 - protein, 36 aa, Artificial Sequence
  Non-cyclic GFR-binding peptide
  MOD_RES (1), (1): Xaa is C or S
XRPTQVQLNAISVLYFEIVRKKPIFLKKYRTLEDHL

SEQ ID NO: 7217 - protein, 32 aa, Artificial Sequence
  Non-cyclic GFR-binding peptide
  MOD_RES (1), (32): Xaa is C or S
XVPQALNAISILYFVGRKPKVLKKYRMIVRSX

SEQ ID NO: 7218 - protein, 31 aa, Artificial Sequence
  Non-cyclic GFR-binding peptide
  MOD_RES (31), (31): Xaa is C or S
VPQALNAISILYFVGRKPKVLKKYRMIVRSX

SEQ ID NO: 7219 - protein, 41 aa, Artificial Sequence
  Non-cyclic GFR-binding peptide
  MOD_RES (4), (41): Xaa is C or S
  MOD_RES (20), (21), (22), (23), (24): Xaa is A or G
  MOD_RES (25), (26), (27), (28): Xaa is A or G or is absent
NVQXRPTQVQLNAISVLYFXXXXXXXXXLKKYRTLEDHLAX

SEQ ID NO: 7220 - protein, 37 aa, Artificial Sequence
  Non-cyclic GFR-binding peptide
  MOD_RES (1), (2), (36): Xaa is C or S
  MOD_RES (16), (17), (18), (19), (20): Xaa is A or G
  MOD_RES (21), (22), (23), (24): Xaa is A or G or is absent
XXVPTELNAISMLYFXXXXXXXXXLKKYRDMVVEGXG

SEQ ID NO: 7221 - protein, 36 aa, Artificial Sequence
  Non-cyclic GFR-binding peptide
  MOD_RES (1), (2), (33), (35): Xaa is C or S
XXVPQDLSPISILYKVGRTPKVLKYHYMVVKSXKXS

SEQ ID NO: 7222 - protein, 35 aa, Artificial Sequence
  Non-cyclic GFR-binding peptide
  MOD_RES (1), (32), (34): Xaa is C or S
XVSQDLSATSILYYIGKTPKILRKHRMIVKSXKXS

SEQ ID NO: 7223 - protein, 40 aa, Artificial Sequence
  Non-cyclic GFR-binding peptide
  MOD_RES (6), (7), (38), (40): Xaa is C or S
ASASPXXVPQDLNAISILYFVGRTPKVLKKYRMVVKSXKX

SEQ ID NO: 7224 - protein, 38 aa, Artificial Sequence
  Non-cyclic GFR-binding peptide
  MOD_RES (4), (5), (38): Xaa is C or S
  MOD_RES (19), (20), (21), (22), (23): Xaa is A or G
  MOD_RES (24), (25), (26), (27): Xaa is A or G or is absent
ASPXXVSQDLNAISILYFXXXXXXXXXLKKYRMIVKSX

SEQ ID NO: 7225 - protein, 37 aa, Artificial Sequence
  Non-cyclic GFR-binding peptide
  MOD_RES (2), (3), (34), (36): Xaa is C or S
PXXVPQALNAISILYFVGRKPKVLKKYRMIVRSXKXS

SEQ ID NO: 7226 - protein, 42 aa, Artificial Sequence
  Non-cyclic GFR-binding peptide
  MOD_RES (5), (42): Xaa is C or S
  MOD_RES (21), (22), (23), (24), (25): Xaa is A or G
  MOD_RES (26), (27), (28), (29): Xaa is A or G or is absent
RNVQXRPTQVQLNAISVLYFXXXXXXXXXLKKYRTLEDHLAX

SEQ ID NO: 7227 - protein, 35 aa, Artificial Sequence
  Non-cyclic GFR-binding peptide
  MOD_RES (1), (2), (33), (35): Xaa is C or S
XXVSQDLSPISILYKIGKTPKILKYHYMIVKSXKX

SEQ ID NO: 7228 - protein, 42 aa, Artificial Sequence
  Non-cyclic GFR-binding peptide
  MOD_RES (5), (6), (39), (41): Xaa is C or S
  MOD_RES (20), (21), (22), (23), (24): Xaa is A or G
  MOD_RES (25), (26), (27), (28): Xaa is A or G or is absent
SAAPXXVPQALNAISILYFXXXXXXXXXLKKYRMIVRSXKXS

SEQ ID NO: 7229 - protein, 36 aa, Artificial Sequence
  Non-cyclic GFR-binding peptide
  MOD_RES (1), (33), (35): Xaa is C or S
XVPTELSATSMLYYDENEKVVLRKHRDMVVEGXGXR

SEQ ID NO: 7230 - protein, 38 aa, Artificial Sequence
  Non-cyclic GFR-binding peptide
  MOD_RES (5), (6), (38): Xaa is C or S
VPKAXXAPTKLNAISVLYFDSSNNVILKKYRNMVVKAX

SEQ ID NO: 7231 - protein, 39 aa, Artificial Sequence
  Non-cyclic GFR-binding peptide
  MOD_RES (3), (37), (39): Xaa is C or S
  MOD_RES (17), (18), (19), (20), (21): Xaa is A or G
  MOD_RES (22), (23), (24), (25): Xaa is A or G or is absent
PTXAPTKLSATSVLYYXXXXXXXXXLRKHRNMVVRSXGX

SEQ ID NO: 7232 - protein, 43 aa, Artificial Sequence
  Non-cyclic GFR-binding peptide
  MOD_RES (7), (41), (43): Xaa is C or S
  MOD_RES (21), (22), (23), (24), (25): Xaa is A or G
  MOD_RES (26), (27), (28), (29): Xaa is A or G or is absent
HVTKPTXAPTKLSAISVLYLXXXXXXXXXLKNYQNMVVRSXGX

SEQ ID NO: 7233 - protein, 33 aa, Artificial Sequence
  Non-cyclic GFR-binding peptide
  MOD_RES (15), (16), (17), (18), (19): Xaa is A or G
  MOD_RES (20), (21), (22), (23): Xaa is A or G or is absent
PTQVQLNAISVLYFXXXXXXXXXLKKYRTLEDH

SEQ ID NO: 7234 - protein, 37 aa, Artificial Sequence
  Non-cyclic GFR-binding peptide
  MOD_RES (2), (3), (35), (37): Xaa is C or S
AXXVPTELSATSMLYYDENEKVVLRKHRDMVVEGXGX

SEQ ID NO: 7235 - protein, 37 aa, Artificial Sequence
  Non-cyclic GFR-binding peptide
  MOD_RES (36), (36): Xaa is C or S
  MOD_RES (15), (16), (17), (18), (19): Xaa is A or G
  MOD_RES (20), (21), (22), (23): Xaa is A or G or is absent
PTQVQLSATSVLYYXXXXXXXXXLRKHRTLEDHLAXK

SEQ ID NO: 7236 - protein, 36 aa, Artificial Sequence
  Non-cyclic GFR-binding peptide
  MOD_RES (1), (1): Xaa is C or S
  MOD_RES (17), (18), (19), (20), (21): Xaa is A or G
  MOD_RES (22), (23), (24), (25): Xaa is A or G or is absent
XRPTQVQLSATSVLYYXXXXXXXXXLRKHRTLEDHL

SEQ ID NO: 7237 - protein, 44 aa, Artificial Sequence
  Non-cyclic GFR-binding peptide
  MOD_RES (6), (7), (41), (43): Xaa is C or S
  MOD_RES (21), (22), (23), (24), (25): Xaa is A or G
  MOD_RES (26), (27), (28), (29): Xaa is A or G or is absent
TVPKPXXAPTQLSAISVLYLXXXXXXXXXLKNYQNMVVRAXGXH

SEQ ID NO: 7238 - protein, 41 aa, Artificial Sequence
  Non-cyclic GFR-binding peptide
  MOD_RES (3), (4), (39), (41): Xaa is C or S
  MOD_RES (18), (19), (20), (21), (22): Xaa is A or G
  MOD_RES (23), (24), (25), (26): Xaa is A or G or is absent
KAXXVPTKLSATSVLYYXXXXXXXXXLRKHREGMSVAEXGX

SEQ ID NO: 7239 - protein, 38 aa, Artificial Sequence
  Non-cyclic GFR-binding peptide
  MOD_RES (3), (4), (37): Xaa is C or S
KAXXVPTKLSATSVLYYDDMGVPTLRKHREGMSVAEXG

SEQ ID NO: 7240 - protein, 37 aa, Artificial Sequence
  Non-cyclic GFR-binding peptide
  MOD_RES (2), (3), (36): Xaa is C or S
  MOD_RES (17), (18), (19), (20), (21): Xaa is A or G
  MOD_RES (22), (23), (24), (25): Xaa is A or G or is absent
PXXVPQALSPISILYKXXXXXXXXXLKYHYMIVRSXK

SEQ ID NO: 7241 - protein, 39 aa, Artificial Sequence
  Non-cyclic GFR-binding peptide
  MOD_RES (3), (4), (38): Xaa is C or S
  MOD_RES (18), (19), (20), (21), (22): Xaa is A or G
  MOD_RES (23), (24), (25), (26): Xaa is A or G or is absent
KAXXVPTELSATSMLYYXXXXXXXXXLRKHRDMVVEGXG

SEQ ID NO: 7242 - protein, 31 aa, Artificial Sequence
  Non-cyclic GFR-binding peptide
  MOD_RES (1), (1): Xaa is C or S
XVSQDLSATSILYYIGKTPKILRKHRMIVKS

SEQ ID NO: 7243 - protein, 38 aa, Artificial Sequence
  Non-cyclic GFR-binding peptide
  MOD_RES (6), (38): Xaa is C or S
VTKPTXAPTKLSPISVLYKDDSSNVILKYHYNMVVRSX

SEQ ID NO: 7244 - protein, 35 aa, Artificial Sequence
  Non-cyclic GFR-binding peptide
  MOD_RES (1), (32), (34): Xaa is C or S
XVPQDLNAISILYFVGRTPKVLKKYRMVVKSXKXS

SEQ ID NO: 7245 - protein, 35 aa, Artificial Sequence
  Non-cyclic GFR-binding peptide
  MOD_RES (1), (33), (35): Xaa is C or S
XVPTELSPISMLYKDEYDKVVLKYHYEMVVEGXGX

SEQ ID NO: 7246 - protein, 35 aa, Artificial Sequence
  Non-cyclic GFR-binding peptide
  MOD_RES (1), (34): Xaa is C or S
XVPTKLSAISVLYLDDMGVPTLKNYQEGMSVAEXG

SEQ ID NO: 7247 - protein, 37 aa, Artificial Sequence
  Non-cyclic GFR-binding peptide
  MOD_RES (6), (7): Xaa is C or S
KIPKAXXVPTELSATSMLYYDENEKVVLRKHRDMVVE

SEQ ID NO: 7248 - protein, 41 aa, Artificial Sequence
  Non-cyclic GFR-binding peptide
  MOD_RES (4), (41): Xaa is C or S
NVQXRPTQVQLSPISVLYKEIVRKKPIFLKYHYTLEDHLAX

SEQ ID NO: 7249 - protein, 41 aa, Artificial Sequence
  Non-cyclic GFR-binding peptide
  MOD_RES (5), (6), (38), (40): Xaa is C or S
IPKAXXVPTELNAISMLYFDEYDKVVLKKYREMVVEGXGXR

SEQ ID NO: 7250 - protein, 39 aa, Artificial Sequence
  Non-cyclic GFR-binding peptide
  MOD_RES (5), (6): Xaa is C or S
  MOD_RES (20), (21), (22), (23), (24): Xaa is A or G
  MOD_RES (25), (26), (27), (28): Xaa is A or G or is absent
VPKPXXAPTKLSPISVLYKXXXXXXXXXLKYHYNMVVRS

SEQ ID NO: 7251 - protein, 37 aa, Artificial Sequence
  Non-cyclic GFR-binding peptide
  MOD_RES (2), (3), (34), (36): Xaa is C or S
PXXVPQDLSATSILYYVGRTPKVLRKHRMVVKSXKXS

SEQ ID NO: 7252 - protein, 44 aa, Artificial Sequence
  Non-cyclic GFR-binding peptide
  MOD_RES (4), (41), (43): Xaa is C or S
NVQXRPTQVQLSATSVLYYEIVRKKPIFLRKHRTLEDHLAXKXE

SEQ ID NO: 7253 - protein, 41 aa, Artificial Sequence
  Non-cyclic GFR-binding peptide
  MOD_RES (4), (41): Xaa is C or S
  MOD_RES (20), (21), (22), (23), (24): Xaa is A or G
  MOD_RES (25), (26), (27), (28): Xaa is A or G or is absent
NVQXRPTQVQLSPISVLYKXXXXXXXXXLKYHYTLEDHLAX

SEQ ID NO: 7254 - protein, 39 aa, Artificial Sequence
  Non-cyclic GFR-binding peptide
  MOD_RES (7), (7): Xaa is C or S
  MOD_RES (21), (22), (23), (24), (25): Xaa is A or G
  MOD_RES (26), (27), (28), (29): Xaa is A or G or is absent
HVTKPTXAPTKLSPISVLYKXXXXXXXXXLKYHYNMVVR

SEQ ID NO: 7255 - protein, 37 aa, Artificial Sequence
  Non-cyclic GFR-binding peptide
  MOD_RES (4), (4): Xaa is C or S
  MOD_RES (18), (19), (20), (21), (22): Xaa is A or G
  MOD_RES (23), (24), (25), (26): Xaa is A or G or is absent
KPTXAPTKLSAISVLYLXXXXXXXXXLKNYQNMVVRS

SEQ ID NO: 7256 - protein, 34 aa, Artificial Sequence
  Non-cyclic GFR-binding peptide
  MOD_RES (1), (32), (34): Xaa is C or S
XVSQDLSPISILYKIGKTPKILKYHYMIVKSXKX

SEQ ID NO: 7257 - protein, 36 aa, Artificial Sequence
  Non-cyclic GFR-binding peptide
  MOD_RES (3), (4), (35): Xaa is C or S
APXXVPQALSAISILYLVGRKPKVLKNYQMIVRSXK

SEQ ID NO: 7258 - protein, 36 aa, Artificial Sequence
  Non-cyclic GFR-binding peptide
  MOD_RES (1), (2), (35): Xaa is C or S
XXVPTKLSAISVLYLDDMGVPTLKNYQEGMSVAEXG

SEQ ID NO: 7259 - protein, 38 aa, Artificial Sequence
  Non-cyclic GFR-binding peptide
  MOD_RES (4), (4): Xaa is C or S
  MOD_RES (20), (21), (22), (23), (24): Xaa is A or G
  MOD_RES (25), (26), (27), (28): Xaa is A or G or is absent
NVQXRPTQVQLSPISVLYKXXXXXXXXXLKYHYTLEDH

SEQ ID NO: 7260 - protein, 39 aa, Artificial Sequence
  Non-cyclic GFR-binding peptide
  MOD_RES (5), (5): Xaa is C or S
  MOD_RES (21), (22), (23), (24), (25): Xaa is A or G
  MOD_RES (26), (27), (28), (29): Xaa is A or G or is absent
RNVQXRPTQVQLSPISVLYKXXXXXXXXXLKYHYTLEDH

SEQ ID NO: 7261 - protein, 35 aa, Artificial Sequence
  Non-cyclic GFR-binding peptide
PTQVQLNAISVLYFEIVRKKPIFLKKYRTLEDHLA

SEQ ID NO: 7262 - protein, 42 aa, Artificial Sequence
  Non-cyclic GFR-binding peptide
  MOD_RES (5), (42): Xaa is C or S
RNVQXRPTQVQLNAISVLYFEIVRKKPIFLKKYRTLEDHLAX

SEQ ID NO: 7263 - protein, 42 aa, Artificial Sequence
  Non-cyclic GFR-binding peptide
  MOD_RES (5), (6), (40), (42): Xaa is C or S
  MOD_RES (20), (21), (22), (23), (24): Xaa is A or G
  MOD_RES (25), (26), (27), (28): Xaa is A or G or is absent
VPKPXXAPTQLSAISVLYLXXXXXXXXXLKNYQNMVVRAXGX

SEQ ID NO: 7264 - protein, 34 aa, Artificial Sequence
  Non-cyclic GFR-binding peptide
  MOD_RES (2), (3), (34): Xaa is C or S
PXXVPQDLSAISILYLVGRTPKVLKNYQMVVKSX

SEQ ID NO: 7265 - protein, 40 aa, Artificial Sequence
  Non-cyclic GFR-binding peptide
  MOD_RES (5), (5): Xaa is C or S
  MOD_RES (21), (22), (23), (24), (25): Xaa is A or G
  MOD_RES (26), (27), (28), (29): Xaa is A or G or is absent
RNVQXRPTQVQLSATSVLYYXXXXXXXXXLRKHRTLEDHL

SEQ ID NO: 7266 - protein, 42 aa, Artificial Sequence
  Non-cyclic GFR-binding peptide
  MOD_RES (5), (6), (39), (41): Xaa is C or S
VGKAXXVPTKLNAISVLYFDDMGVPTLKKYREGMSVAEXGXR

SEQ ID NO: 7267 - protein, 39 aa, Artificial Sequence
  Non-cyclic GFR-binding peptide
  MOD_RES (3), (4), (38): Xaa is C or S
  MOD_RES (18), (19), (20), (21), (22): Xaa is A or G
  MOD_RES (23), (24), (25), (26): Xaa is A or G or is absent
KPXXAPTQLSAISVLYLXXXXXXXXXLKNYQNMVVRAXG

SEQ ID NO: 7268 - protein, 36 aa, Artificial Sequence
  Non-cyclic GFR-binding peptide
  MOD_RES (2), (36): Xaa is C or S
  MOD_RES (16), (17), (18), (19), (20): Xaa is A or G
  MOD_RES (21), (22), (23), (24): Xaa is A or G or is absent
TXAPTKLSPISVLYKXXXXXXXXXLKYHYNMVVRSX

SEQ ID NO: 7269 - protein, 34 aa, Artificial Sequence
  Non-cyclic GFR-binding peptide
  MOD_RES (34), (34): Xaa is C or S
  MOD_RES (14), (15), (16), (17), (18): Xaa is A or G
  MOD_RES (19), (20), (21), (22): Xaa is A or G or is absent
VPTELNAISMLYFXXXXXXXXXLKKYREMVVEGX

SEQ ID NO: 7270 - protein, 39 aa, Artificial Sequence
  Non-cyclic GFR-binding peptide
  MOD_RES (7), (39): Xaa is C or S
HVTKPTXAPTKLSAISVLYLDDSSNVILKNYQNMVVRSX

SEQ ID NO: 7271 - protein, 37 aa, Artificial Sequence
  Non-cyclic GFR-binding peptide
  MOD_RES (2), (34), (36): Xaa is C or S
TXAPTKLSATSVLYYDDSSNVILRKHRNMVVRSXGXH

SEQ ID NO: 7272 - protein, 40 aa, Artificial Sequence
  Non-cyclic GFR-binding peptide
  MOD_RES (7), (7): Xaa is C or S
  MOD_RES (21), (22), (23), (24), (25): Xaa is A or G
  MOD_RES (26), (27), (28), (29): Xaa is A or G or is absent
HVTKPTXAPTKLSAISVLYLXXXXXXXXXLKNYQNMVVRS

SEQ ID NO: 7273 - protein, 33 aa, Artificial Sequence
  Non-cyclic GFR-binding peptide
  MOD_RES (3), (3): Xaa is C or S
PTXAPTKLSPISVLYKDDSSNVILKYHYNMVVR

SEQ ID NO: 7274 - protein, 44 aa, Artificial Sequence
  Non-cyclic GFR-binding peptide
  MOD_RES (6), (7), (41), (43): Xaa is C or S
  MOD_RES (21), (22), (23), (24), (25): Xaa is A or G
  MOD_RES (26), (27), (28), (29): Xaa is A or G or is absent
YVPKPXXAPTKLSPISVLYKXXXXXXXXXLKYHYNMVVRSXGXH

SEQ ID NO: 7275 - protein, 39 aa, Artificial Sequence
  Non-cyclic GFR-binding peptide
  MOD_RES (6), (7), (38): Xaa is C or S
ASAAPXXVPQALSAISILYLVGRKPKVLKNYQMIVRSXK

SEQ ID NO: 7276 - protein, 35 aa, Artificial Sequence
  Non-cyclic GFR-binding peptide
  MOD_RES (1), (2), (33), (35): Xaa is C or S
XXVPQALSATSILYYVGRKPKVLRKHRMIVRSXKX

SEQ ID NO: 7277 - protein, 44 aa, Artificial Sequence
  Non-cyclic GFR-binding peptide
  MOD_RES (6), (7), (41), (43): Xaa is C or S
  MOD_RES (21), (22), (23), (24), (25): Xaa is A or G
  MOD_RES (26), (27), (28), (29): Xaa is A or G or is absent
YVPKPXXAPTKLSATSVLYYXXXXXXXXXLRKHRNMVVRSXGXH

SEQ ID NO: 7278 - protein, 37 aa, Artificial Sequence
  Non-cyclic GFR-binding peptide
  MOD_RES (1), (35), (37): Xaa is C or S
  MOD_RES (15), (16), (17), (18), (19): Xaa is A or G
  MOD_RES (20), (21), (22), (23): Xaa is A or G or is absent
XAPTQLSAISVLYLXXXXXXXXXLKNYQNMVVRAXGX

SEQ ID NO: 7279 - protein, 38 aa, Artificial Sequence
  Non-cyclic GFR-binding peptide
  MOD_RES (3), (3): Xaa is C or S
  MOD_RES (19), (20), (21), (22), (23): Xaa is A or G
  MOD_RES (24), (25), (26), (27): Xaa is A or G or is absent
VQXRPTQVQLNAISVLYFXXXXXXXXXLKKYRTLEDHL

SEQ ID NO: 7280 - protein, 43 aa, Artificial Sequence
  Non-cyclic GFR-binding peptide
  MOD_RES (6), (7), (41), (43): Xaa is C or S
  MOD_RES (21), (22), (23), (24), (25): Xaa is A or G
  MOD_RES (26), (27), (28), (29): Xaa is A or G or is absent
SIPKAXXVPTELSPISMLYKXXXXXXXXXLKYHYEMVVEGXGX

SEQ ID NO: 7281 - protein, 40 aa, Artificial Sequence
  Non-cyclic GFR-binding peptide
  MOD_RES (2), (39): Xaa is C or S
  MOD_RES (18), (19), (20), (21), (22): Xaa is A or G
  MOD_RES (23), (24), (25), (26): Xaa is A or G or is absent
QXRPTQVQLSPISVLYKXXXXXXXXXLKYHYTLEDHLAXK

SEQ ID NO: 7282 - protein, 40 aa, Artificial Sequence
  Non-cyclic GFR-binding peptide
  MOD_RES (5), (6), (39): Xaa is C or S
  MOD_RES (20), (21), (22), (23), (24): Xaa is A or G
  MOD_RES (25), (26), (27), (28): Xaa is A or G or is absent
SASPXXVPQDLSPISILYKXXXXXXXXXLKYHYMVVKSXK

SEQ ID NO: 7283 - protein, 40 aa, Artificial Sequence
  Non-cyclic GFR-binding peptide
  MOD_RES (4), (5), (37), (39): Xaa is C or S
PKAXXAPTKLSAISVLYLDSSNNVILKNYQNMVVKAXGXH

SEQ ID NO: 7284 - protein, 37 aa, Artificial Sequence
  Non-cyclic GFR-binding peptide
  MOD_RES (3), (4): Xaa is C or S
  MOD_RES (18), (19), (20), (21), (22): Xaa is A or G
  MOD_RES (23), (24), (25), (26): Xaa is A or G or is absent
KPXXAPTQLSPISVLYKXXXXXXXXXLKYHYNMVVRA

SEQ ID NO: 7285 - protein, 38 aa, Artificial Sequence
  Non-cyclic GFR-binding peptide
  MOD_RES (5), (6): Xaa is C or S
  MOD_RES (20), (21), (22), (23), (24): Xaa is A or G
  MOD_RES (25), (26), (27), (28): Xaa is A or G or is absent
IPKAXXVPTELNAISMLYFXXXXXXXXXLKKYREMVVE

SEQ ID NO: 7286 - protein, 33 aa, Artificial Sequence
  Non-cyclic GFR-binding peptide
  MOD_RES (1), (32): Xaa is C or S
XVPQDLNAISILYFVGRTPKVLKKYRMVVKSXK

SEQ ID NO: 7287 - protein, 39 aa, Artificial Sequence
  Non-cyclic GFR-binding peptide
  MOD_RES (1), (2), (36), (38): Xaa is C or S
  MOD_RES (16), (17), (18), (19), (20): Xaa is A or G
  MOD_RES (21), (22), (23), (24): Xaa is A or G or is absent
XXVPTELNAISMLYFXXXXXXXXXLKKYREMVVEGXGXR

SEQ ID NO: 7288 - protein, 33 aa, Artificial Sequence
  Non-cyclic GFR-binding peptide
  MOD_RES (1), (32): Xaa is C or S
XVSQDLNAISILYFIGKTPKILKKYRMIVKSXK

SEQ ID NO: 7289 - protein, 37 aa, Artificial Sequence
  Non-cyclic GFR-binding peptide
  MOD_RES (1), (2), (36): Xaa is C or S
  MOD_RES (16), (17), (18), (19), (20): Xaa is A or G
  MOD_RES (21), (22), (23), (24): Xaa is A or G or is absent
XXVPTELNAISMLYFXXXXXXXXXLKKYREMVVEGXG

SEQ ID NO: 7290 - protein, 36 aa, Artificial Sequence
  Non-cyclic GFR-binding peptide
  MOD_RES (3), (4), (35): Xaa is C or S
SPXXVPQDLSATSILYYVGRTPKVLRKHRMVVKSXK

SEQ ID NO: 7291 - protein, 40 aa, Artificial Sequence
  Non-cyclic GFR-binding peptide
  MOD_RES (7), (39): Xaa is C or S
HVTKPTXAPTKLSPISVLYKDDSSNVILKYHYNMVVRSXG

SEQ ID NO: 7292 - protein, 36 aa, Artificial Sequence
  Non-cyclic GFR-binding peptide
  MOD_RES (2), (3): Xaa is C or S
  MOD_RES (17), (18), (19), (20), (21): Xaa is A or G
  MOD_RES (22), (23), (24), (25): Xaa is A or G or is absent
AXXVPTELSPISMLYKXXXXXXXXXLKYHYDMVVEG

SEQ ID NO: 7293 - protein, 38 aa, Artificial Sequence
  Non-cyclic GFR-binding peptide
  MOD_RES (3), (4), (38): Xaa is C or S
  MOD_RES (18), (19), (20), (21), (22): Xaa is A or G
  MOD_RES (23), (24), (25), (26): Xaa is A or G or is absent
KPXXAPTKLSAISVLYLXXXXXXXXXLKNYQNMVVRSX

SEQ ID NO: 7294 - protein, 36 aa, Artificial Sequence
  Non-cyclic GFR-binding peptide
  MOD_RES (1), (2), (33), (35): Xaa is C or S
XXVPQDLSAISILYLVGRTPKVLKNYQMVVKSXKXS

SEQ ID NO: 7295 - protein, 40 aa, Artificial Sequence
  Non-cyclic GFR-binding peptide
  MOD_RES (4), (5), (37), (39): Xaa is C or S
PKAXXVPTELNAISMLYFDEYDKVVLKKYREMVVEGXGXR

SEQ ID NO: 7296 - protein, 40 aa, Artificial Sequence
  Non-cyclic GFR-binding peptide
  MOD_RES (5), (6), (39): Xaa is C or S
VGKAXXVPTKLSATSVLYYDDMGVPTLRKHREGMSVAEXG

SEQ ID NO: 7297 - protein, 32 aa, Artificial Sequence
  Non-cyclic GFR-binding peptide
  MOD_RES (1), (2): Xaa is C or S
XXVPTELNAISMLYFDEYDKVVLKKYREMVVE

SEQ ID NO: 7298 - protein, 36 aa, Artificial Sequence
  Non-cyclic GFR-binding peptide
  MOD_RES (2), (2): Xaa is C or S
  MOD_RES (18), (19), (20), (21), (22): Xaa is A or G
  MOD_RES (23), (24), (25), (26): Xaa is A or G or is absent
QXRPTQVQLNAISVLYFXXXXXXXXXLKKYRTLEDH

SEQ ID NO: 7299 - protein, 33 aa, Artificial Sequence
  Non-cyclic GFR-binding peptide
  MOD_RES (1), (1): Xaa is C or S
  MOD_RES (15), (16), (17), (18), (19): Xaa is A or G
  MOD_RES (20), (21), (22), (23): Xaa is A or G or is absent
XVSQDLSAISILYLXXXXXXXXXLKNYQMIVKS

SEQ ID NO: 7300 - protein, 41 aa, Artificial Sequence
  Non-cyclic GFR-binding peptide
  MOD_RES (6), (7), (41): Xaa is C or S
  MOD_RES (21), (22), (23), (24), (25): Xaa is A or G
  MOD_RES (26), (27), (28), (29): Xaa is A or G or is absent
TVPKPXXAPTQLSPISVLYKXXXXXXXXXLKYHYNMVVRAX

SEQ ID NO: 7301 - protein, 36 aa, Artificial Sequence
  Non-cyclic GFR-binding peptide
  MOD_RES (2), (3), (36): Xaa is C or S
AXXVPTKLSATSVLYYDDMGVPTLRKHREGMSVAEX

SEQ ID NO: 7302 - protein, 32 aa, Artificial Sequence
  Non-cyclic GFR-binding peptide
  MOD_RES (32), (32): Xaa is C or S
VPTELNAISMLYFDEYDKVVLKKYREMVVEGX

SEQ ID NO: 7303 - protein, 39 aa, Artificial Sequence
  Non-cyclic GFR-binding peptide
  MOD_RES (6), (7), (38): Xaa is C or S
ASASPXXVPQDLSATSILYYVGRTPKVLRKHRMVVKSXK

SEQ ID NO: 7304 - protein, 38 aa, Artificial Sequence
  Non-cyclic GFR-binding peptide
  MOD_RES (3), (4), (36), (38): Xaa is C or S
KAXXVPTELSPISMLYKDENEKVVLKYHYDMVVEGXGX

SEQ ID NO: 7305 - protein, 41 aa, Artificial Sequence
  Non-cyclic GFR-binding peptide
  MOD_RES (7), (41): Xaa is C or S
  MOD_RES (21), (22), (23), (24), (25): Xaa is A or G
  MOD_RES (26), (27), (28), (29): Xaa is A or G or is absent
HVTKPTXAPTKLSPISVLYKXXXXXXXXXLKYHYNMVVRSX

SEQ ID NO: 7306 - protein, 36 aa, Artificial Sequence
  Non-cyclic GFR-binding peptide
  MOD_RES (1), (2), (34), (36): Xaa is C or S
XXAPTKLSATSVLYYDDSSNVILRKHRNMVVRSXGX

SEQ ID NO: 7307 - protein, 36 aa, Artificial Sequence
  Non-cyclic GFR-binding peptide
  MOD_RES (1), (35): Xaa is C or S
  MOD_RES (15), (16), (17), (18), (19): Xaa is A or G
  MOD_RES (20), (21), (22), (23): Xaa is A or G or is absent
XAPTKLNAISVLYFXXXXXXXXXLKKYRNMVVKAXG

SEQ ID NO: 7308 - protein, 38 aa, Artificial Sequence
  Non-cyclic GFR-binding peptide
  MOD_RES (4), (38): Xaa is C or S
  MOD_RES (18), (19), (20), (21), (22): Xaa is A or G
  MOD_RES (23), (24), (25), (26): Xaa is A or G or is absent
KPTXAPTKLSPISVLYKXXXXXXXXXLKYHYNMVVRSX

SEQ ID NO: 7309 - protein, 38 aa, Artificial Sequence
  Non-cyclic GFR-binding peptide
  MOD_RES (5), (6): Xaa is C or S
  MOD_RES (20), (21), (22), (23), (24): Xaa is A or G
  MOD_RES (25), (26), (27), (28): Xaa is A or G or is absent
VPKPXXAPTKLSAISVLYLXXXXXXXXXLKNYQNMVVR

SEQ ID NO: 7310 - protein, 34 aa, Artificial Sequence
  Non-cyclic GFR-binding peptide
  MOD_RES (1), (33): Xaa is C or S
XAPTQLSATSVLYYDDSSNVILRKHRNMVVRAXG

SEQ ID NO: 7311 - protein, 38 aa, Artificial Sequence
  Non-cyclic GFR-binding peptide
  MOD_RES (4), (5), (37): Xaa is C or S
PKAXXAPTKLNAISVLYFDSSNNVILKKYRNMVVKAXG

SEQ ID NO: 7312 - protein, 37 aa, Artificial Sequence
  Non-cyclic GFR-binding peptide
  MOD_RES (6), (7): Xaa is C or S
AVPKAXXAPTKLSPISVLYKDSSNNVILKYHYNMVVK

SEQ ID NO: 7313 - protein, 33 aa, Artificial Sequence
  Non-cyclic GFR-binding peptide
  MOD_RES (2), (3): Xaa is C or S
PXXVPQALSPISILYKVGRKPKVLKYHYMIVRS

SEQ ID NO: 7314 - protein, 35 aa, Artificial Sequence
  Non-cyclic GFR-binding peptide
  MOD_RES (4), (5): Xaa is C or S
AAPXXVPQALSATSILYYVGRKPKVLRKHRMIVRS

SEQ ID NO: 7315 - protein, 38 aa, Artificial Sequence
  Non-cyclic GFR-binding peptide
  MOD_RES (2), (3), (36), (38): Xaa is C or S
  MOD_RES (17), (18), (19), (20), (21): Xaa is A or G
  MOD_RES (22), (23), (24), (25): Xaa is A or G or is absent
PXXVPQDLSPISILYKXXXXXXXXXLKYHYMVVKSXKX

SEQ ID NO: 7316 - protein, 37 aa, Artificial Sequence
  Non-cyclic GFR-binding peptide
  MOD_RES (2), (3), (34), (36): Xaa is C or S
PXXVSQDLSPISILYKIGKTPKILKYHYMIVKSXKXS

SEQ ID NO: 7317 - protein, 36 aa, Artificial Sequence
  Non-cyclic GFR-binding peptide
  MOD_RES (1), (35): Xaa is C or S
  MOD_RES (15), (16), (17), (18), (19): Xaa is A or G
  MOD_RES (20), (21), (22), (23): Xaa is A or G or is absent
XAPTKLSAISVLYLXXXXXXXXXLKNYQNMVVRSXG

SEQ ID NO: 7318 - protein, 35 aa, Artificial Sequence
  Non-cyclic GFR-binding peptide
  MOD_RES (16), (17), (18), (19), (20): Xaa is A or G
  MOD_RES (21), (22), (23), (24): Xaa is A or G or is absent
RPTQVQLSPISVLYKXXXXXXXXXLKYHYTLEDHL

SEQ ID NO: 7319 - protein, 39 aa, Artificial Sequence
  Non-cyclic GFR-binding peptide
  MOD_RES (2), (39): Xaa is C or S
  MOD_RES (18), (19), (20), (21), (22): Xaa is A or G
  MOD_RES (23), (24), (25), (26): Xaa is A or G or is absent
QXRPTQVQLSPISVLYKXXXXXXXXXLKYHYTLEDHLAX

SEQ ID NO: 7320 - protein, 33 aa, Artificial Sequence
  Non-cyclic GFR-binding peptide
  MOD_RES (33), (33): Xaa is C or S
  MOD_RES (14), (15), (16), (17), (18): Xaa is A or G
  MOD_RES (19), (20), (21), (22): Xaa is A or G or is absent
VPQDLNAISILYFXXXXXXXXXLKKYRMVVKSX

SEQ ID NO: 7321 - protein, 39 aa, Artificial Sequence
  Non-cyclic GFR-binding peptide
  MOD_RES (1), (38): Xaa is C or S
XRPTQVQLSATSVLYYEIVRKKPIFLRKHRTLEDHLAXK

SEQ ID NO: 7322 - protein, 34 aa, Artificial Sequence
  Non-cyclic GFR-binding peptide
  MOD_RES (1), (34): Xaa is C or S
  MOD_RES (15), (16), (17), (18), (19): Xaa is A or G
  MOD_RES (20), (21), (22), (23): Xaa is A or G or is absent
XVSQDLNAISILYFXXXXXXXXXLKKYRMIVKSX

SEQ ID NO: 7323 - protein, 36 aa, Artificial Sequence
  Non-cyclic GFR-binding peptide
  MOD_RES (4), (5): Xaa is C or S
PKAXXVPTELSPISMLYKDEYDKVVLKYHYEMVVEG

SEQ ID NO: 7324 - protein, 39 aa, Artificial Sequence
  Non-cyclic GFR-binding peptide
  MOD_RES (6), (7), (38): Xaa is C or S
ASASPXXVSQDLSATSILYYIGKTPKILRKHRMIVKSXK

SEQ ID NO: 7325 - protein, 37 aa, Artificial Sequence
  Non-cyclic GFR-binding peptide
  MOD_RES (1), (1): Xaa is C or S
XRPTQVQLSATSVLYYEIVRKKPIFLRKHRTLEDHLA

SEQ ID NO: 7326 - protein, 36 aa, Artificial Sequence
  Non-cyclic GFR-binding peptide
  MOD_RES (2), (3), (35): Xaa is C or S
AXXVPTELSPISMLYKDEYDKVVLKYHYEMVVEGXG

SEQ ID NO: 7327 - protein, 42 aa, Artificial Sequence
  Non-cyclic GFR-binding peptide
  MOD_RES (2), (39), (41): Xaa is C or S
  MOD_RES (18), (19), (20), (21), (22): Xaa is A or G
  MOD_RES (23), (24), (25), (26): Xaa is A or G or is absent
QXRPTQVQLNAISVLYFXXXXXXXXXLKKYRTLEDHLAXKXE

SEQ ID NO: 7328 - protein, 36 aa, Artificial Sequence
  Non-cyclic GFR-binding peptide
  MOD_RES (4), (5), (36): Xaa is C or S
ASPXXVSQDLSPISILYKIGKTPKILKYHYMIVKSX

SEQ ID NO: 7329 - protein, 37 aa, Artificial Sequence
  Non-cyclic GFR-binding peptide
  MOD_RES (1), (35), (37): Xaa is C or S
  MOD_RES (15), (16), (17), (18), (19): Xaa is A or G
  MOD_RES (20), (21), (22), (23): Xaa is A or G or is absent
XVPTELSATSMLYYXXXXXXXXXLRKHREMVVEGXGX

SEQ ID NO: 7330 - protein, 32 aa, Artificial Sequence
  Non-cyclic GFR-binding peptide
  MOD_RES (14), (15), (16), (17), (18): Xaa is A or G
  MOD_RES (19), (20), (21), (22): Xaa is A or G or is absent
VPQDLSAISILYLXXXXXXXXXLKNYQMVVKS

SEQ ID NO: 7331 - protein, 40 aa, Artificial Sequence
  Non-cyclic GFR-binding peptide
  MOD_RES (3), (4), (37), (39): Xaa is C or S
  MOD_RES (18), (19), (20), (21), (22): Xaa is A or G
  MOD_RES (23), (24), (25), (26): Xaa is A or G or is absent
SPXXVPQDLSPISILYKXXXXXXXXXLKYHYMVVKSXKXS

SEQ ID NO: 7332 - protein, 35 aa, Artificial Sequence
  Non-cyclic GFR-binding peptide
  MOD_RES (1), (1): Xaa is C or S
XRPTQVQLNAISVLYFEIVRKKPIFLKKYRTLEDH

SEQ ID NO: 7333 - protein, 39 aa, Artificial Sequence
  Non-cyclic GFR-binding peptide
  MOD_RES (2), (3), (37), (39): Xaa is C or S
  MOD_RES (17), (18), (19), (20), (21): Xaa is A or G
  MOD_RES (22), (23), (24), (25): Xaa is A or G or is absent
PXXAPTQLSAISVLYLXXXXXXXXXLKNYQNMVVRAXGX

SEQ ID NO: 7334 - protein, 34 aa, Artificial Sequence
  Non-cyclic GFR-binding peptide
  MOD_RES (2), (3), (34): Xaa is C or S
PXXVPQDLNAISILYFVGRTPKVLKKYRMVVKSX

SEQ ID NO: 7335 - protein, 38 aa, Artificial Sequence
  Non-cyclic GFR-binding peptide
  MOD_RES (2), (2): Xaa is C or S
QXRPTQVQLSAISVLYLEIVRKKPIFLKNYQTLEDHLA

SEQ ID NO: 7336 - protein, 37 aa, Artificial Sequence
  Non-cyclic GFR-binding peptide
  MOD_RES (1), (2), (34), (36): Xaa is C or S
XXAPTKLSPISVLYKDSSNNVILKYHYNMVVKAXGXH

SEQ ID NO: 7337 - protein, 33 aa, Artificial Sequence
  Non-cyclic GFR-binding peptide
  MOD_RES (33), (33): Xaa is C or S
VPTKLSAISVLYLDDMGVPTLKNYQEGMSVAEX

SEQ ID NO: 7338 - protein, 37 aa, Artificial Sequence
  Non-cyclic GFR-binding peptide
  MOD_RES (1), (2), (34), (36): Xaa is C or S
XXVPTELSATSMLYYDENEKVVLRKHRDMVVEGXGXR

SEQ ID NO: 7339 - protein, 37 aa, Artificial Sequence
  Non-cyclic GFR-binding peptide
  MOD_RES (34), (36): Xaa is C or S
  MOD_RES (14), (15), (16), (17), (18): Xaa is A or G
  MOD_RES (19), (20), (21), (22): Xaa is A or G or is absent
VPTELNAISMLYFXXXXXXXXXLKKYRDMVVEGXGXR

SEQ ID NO: 7340 - protein, 42 aa, Artificial Sequence
  Non-cyclic GFR-binding peptide
  MOD_RES (4), (5), (39), (41): Xaa is C or S
  MOD_RES (19), (20), (21), (22), (23): Xaa is A or G
  MOD_RES (24), (25), (26), (27): Xaa is A or G or is absent
PKAXXVPTELNAISMLYFXXXXXXXXXLKKYRDMVVEGXGXR

SEQ ID NO: 7341 - protein, 42 aa, Artificial Sequence
  Non-cyclic GFR-binding peptide
  MOD_RES (6), (7), (41): Xaa is C or S
  MOD_RES (21), (22), (23), (24), (25): Xaa is A or G
  MOD_RES (26), (27), (28), (29): Xaa is A or G or is absent
KIPKAXXVPTELNAISMLYFXXXXXXXXXLKKYRDMVVEGXG

SEQ ID NO: 7342 - protein, 35 aa, Artificial Sequence
  Non-cyclic GFR-binding peptide
  MOD_RES (4), (5): Xaa is C or S
ASPXXVPQDLSPISILYKVGRTPKVLKYHYMVVKS

SEQ ID NO: 7343 - protein, 32 aa, Artificial Sequence
  Non-cyclic GFR-binding peptide
  MOD_RES (1), (1): Xaa is C or S
XAPTQLSPISVLYKDDSSNVILKYHYNMVVRA

SEQ ID NO: 7344 - protein, 40 aa, Artificial Sequence
  Non-cyclic GFR-binding peptide
  MOD_RES (5), (6), (38), (40): Xaa is C or S
VPKPXXAPTKLSPISVLYKDDSSNVILKYHYNMVVRSXGX

SEQ ID NO: 7345 - protein, 38 aa, Artificial Sequence
  Non-cyclic GFR-binding peptide
  MOD_RES (2), (2): Xaa is C or S
QXRPTQVQLSATSVLYYEIVRKKPIFLRKHRTLEDHLA

SEQ ID NO: 7346 - protein, 36 aa, Artificial Sequence
  Non-cyclic GFR-binding peptide
  MOD_RES (16), (17), (18), (19), (20): Xaa is A or G
  MOD_RES (21), (22), (23), (24): Xaa is A or G or is absent
RPTQVQLSPISVLYKXXXXXXXXXLKYHYTLEDHLA

SEQ ID NO: 7347 - protein, 39 aa, Artificial Sequence
  Non-cyclic GFR-binding peptide
  MOD_RES (4), (5), (38): Xaa is C or S
GKAXXVPTKLSAISVLYLDDMGVPTLKNYQEGMSVAEXG

SEQ ID NO: 7348 - protein, 39 aa, Artificial Sequence
  Non-cyclic GFR-binding peptide
  MOD_RES (4), (38): Xaa is C or S
  MOD_RES (18), (19), (20), (21), (22): Xaa is A or G
  MOD_RES (23), (24), (25), (26): Xaa is A or G or is absent
KPTXAPTKLSAISVLYLXXXXXXXXXLKNYQNMVVRSXG

SEQ ID NO: 7349 - protein, 35 aa, Artificial Sequence
  Non-cyclic GFR-binding peptide
  MOD_RES (1), (1): Xaa is C or S
  MOD_RES (15), (16), (17), (18), (19): Xaa is A or G
  MOD_RES (20), (21), (22), (23): Xaa is A or G or is absent
XVPTKLNAISVLYFXXXXXXXXXLKKYREGMSVAE

SEQ ID NO: 7350 - protein, 36 aa, Artificial Sequence
  Non-cyclic GFR-binding peptide
  MOD_RES (3), (35): Xaa is C or S
PTXAPTKLSAISVLYLDDSSNVILKNYQNMVVRSXG

SEQ ID NO: 7351 - protein, 37 aa, Artificial Sequence
  Non-cyclic GFR-binding peptide
  MOD_RES (1), (1): Xaa is C or S
XRPTQVQLSAISVLYLEIVRKKPIFLKNYQTLEDHLA

SEQ ID NO: 7352 - protein, 39 aa, Artificial Sequence
  Non-cyclic GFR-binding peptide
  MOD_RES (6), (7), (39): Xaa is C or S
AVPKAXXAPTKLSAISVLYLDSSNNVILKNYQNMVVKAX

SEQ ID NO: 7353 - protein, 39 aa, Artificial Sequence
  Non-cyclic GFR-binding peptide
  MOD_RES (3), (4), (37), (39): Xaa is C or S
KAXXVPTKLSATSVLYYDDMGVPTLRKHREGMSVAEXGX

SEQ ID NO: 7354 - protein, 39 aa, Artificial Sequence
  Non-cyclic GFR-binding peptide
  MOD_RES (4), (5), (36), (38): Xaa is C or S
ASPXXVSQDLSATSILYYIGKTPKILRKHRMIVKSXKXS

SEQ ID NO: 7355 - protein, 35 aa, Artificial Sequence
  Non-cyclic GFR-binding peptide
  MOD_RES (33), (35): Xaa is C or S
  MOD_RES (14), (15), (16), (17), (18): Xaa is A or G
  MOD_RES (19), (20), (21), (22): Xaa is A or G or is absent
VPQDLSAISILYLXXXXXXXXXLKNYQMVVKSXKX

SEQ ID NO: 7356 - protein, 37 aa, Artificial Sequence
  Non-cyclic GFR-binding peptide
  MOD_RES (1), (35), (37): Xaa is C or S
  MOD_RES (15), (16), (17), (18), (19): Xaa is A or G
  MOD_RES (20), (21), (22), (23): Xaa is A or G or is absent
XVPTELSATSMLYYXXXXXXXXXLRKHRDMVVEGXGX

SEQ ID NO: 7357 - protein, 40 aa, Artificial Sequence
  Non-cyclic GFR-binding peptide
  MOD_RES (3), (4), (37), (39): Xaa is C or S
  MOD_RES (18), (19), (20), (21), (22): Xaa is A or G
  MOD_RES (23), (24), (25), (26): Xaa is A or G or is absent
SPXXVSQDLSATSILYYXXXXXXXXXLRKHRMIVKSXKXS

SEQ ID NO: 7358 - protein, 40 aa, Artificial Sequence
  Non-cyclic GFR-binding peptide
  MOD_RES (2), (3), (37), (39): Xaa is C or S
  MOD_RES (17), (18), (19), (20), (21): Xaa is A or G
  MOD_RES (22), (23), (24), (25): Xaa is A or G or is absent
AXXAPTKLSAISVLYLXXXXXXXXXLKNYQNMVVKAXGXH

SEQ ID NO: 7359 - protein, 36 aa, Artificial Sequence
  Non-cyclic GFR-binding peptide
  MOD_RES (33), (35): Xaa is C or S
  MOD_RES (14), (15), (16), (17), (18): Xaa is A or G
  MOD_RES (19), (20), (21), (22): Xaa is A or G or is absent
VPQALNAISILYFXXXXXXXXXLKKYRMIVRSXKXS

(The sequence listing continues in the following parts.)
